United States Patent Application Publication US 2016/0281171 A1 - sequence listing, part 5

SEQ ID NO: 95764 - DNA, 76 bp, Homo sapiens
ttggcctcttctgcaagaggaatctcttgaaaacaggggcacacagaaatttgatttgtggccaaattggatgaaa

SEQ ID NO: 95765 - DNA, 73 bp, Homo sapiens
ttgaaaacaggggcacacagaaatttgatttgtggccaaattggatgaaaaagatgaggctctaaggaaatgg

SEQ ID NO: 95766 - DNA, 75 bp, Homo sapiens
acacagaaatttgatttgtggccaaattggatgaaaaagatgaggctctaaggaaatggtggcatgaagaccctc

SEQ ID NO: 95767 - DNA, 73 bp, Homo sapiens
aatttgatttgtggccaaattggatgaaaaagatgaggctctaaggaaatggtggcatgaagaccctctccct

SEQ ID NO: 95768 - DNA, 70 bp, Homo sapiens
ctaaggaaatggtggcatgaagaccctctcccttctttgtagaattaagataactttgattttatagctt

SEQ ID NO: 95769 - DNA, 71 bp, Homo sapiens
gcatgaagaccctctcccttctttgtagaattaagataactttgattttatagcttttgagctaacgtaac

SEQ ID NO: 95770 - DNA, 67 bp, Homo sapiens
ccctctcccttctttgtagaattaagataactttgattttatagcttttgagctaacgtaacttttg

SEQ ID NO: 95771 - DNA, 67 bp, Homo sapiens
cccttctttgtagaattaagataactttgattttatagcttttgagctaacgtaacttttgtaaaga

SEQ ID NO: 95772 - DNA, 69 bp, Homo sapiens
ttaagataactttgattttatagcttttgagctaacgtaacttttgtaaagattaagctcatttagtgt

SEQ ID NO: 95773 - DNA, 67 bp, Homo sapiens
actttgattttatagcttttgagctaacgtaacttttgtaaagattaagctcatttagtgttgtttt

SEQ ID NO: 95774 - DNA, 65 bp, Homo sapiens
ttttatagcttttgagctaacgtaacttttgtaaagattaagctcatttagtgttgttttttttt

SEQ ID NO: 95775 - DNA, 67 bp, Homo sapiens
tttatttgtttgcttatttttaaattaactgttttgagctttgaatacttaaggctttagagggaga

SEQ ID NO: 95776 - DNA, 66 bp, Homo sapiens
tgcttatttttaaattaactgttttgagctttgaatacttaaggctttagagggagaacccaattt

SEQ ID NO: 95777 - DNA, 68 bp, Homo sapiens
taaattaactgttttgagctttgaatacttaaggctttagagggagaacccaattttcaattatgttg

SEQ ID NO: 95778 - DNA, 67 bp, Homo sapiens
aactgttttgagctttgaatacttaaggctttagagggagaacccaattttcaattatgttggcttt

SEQ ID NO: 95779 - DNA, 68 bp, Homo sapiens
gagctttgaatacttaaggctttagagggagaacccaattttcaattatgttggctttttataaagct

SEQ ID NO: 95780 - DNA, 69 bp, Homo sapiens
tacttaaggctttagagggagaacccaattttcaattatgttggctttttataaagcttgagttatgta

SEQ ID NO: 95781 - DNA, 68 bp, Homo sapiens
aggctttagagggagaacccaattttcaattatgttggctttttataaagcttgagttatgtaagatt

SEQ ID NO: 95782 - DNA, 68 bp, Homo sapiens
tttagagggagaacccaattttcaattatgttggctttttataaagcttgagttatgtaagatttaaa

SEQ ID NO: 95783 - DNA, 67 bp, Homo sapiens
agggagaacccaattttcaattatgttggctttttataaagcttgagttatgtaagatttaaataaa

SEQ ID NO: 95784 - DNA, 67 bp, Homo sapiens
acccaattttcaattatgttggctttttataaagcttgagttatgtaagatttaaataaaagtttgc

SEQ ID NO: 95785 - DNA, 71 bp, Homo sapiens
ttatgttggctttttataaagcttgagttatgtaagatttaaataaaagtttgctaccaagatgattgcct

SEQ ID NO: 95786 - DNA, 72 bp, Homo sapiens
ttggctttttataaagcttgagttatgtaagatttaaataaaagtttgctaccaagatgattgccttattga

SEQ ID NO: 95787 - DNA, 72 bp, Homo sapiens
tggctttttataaagcttgagttatgtaagatttaaataaaagtttgctaccaagatgattgccttattgaa

SEQ ID NO: 95788 - DNA, 73 bp, Homo sapiens
ataaagcttgagttatgtaagatttaaataaaagtttgctaccaagatgattgccttattgaataggtcacta

SEQ ID NO: 95789 - DNA, 75 bp, Homo sapiens
taaaagtttgctaccaagatgattgccttattgaataggtcactattaaattcctttaaatgttgatatctgcca

SEQ ID NO: 95790 - DNA, 75 bp, Homo sapiens
gatgattgccttattgaataggtcactattaaattcctttaaatgttgatatctgccatttgtggaaacaacgta

SEQ ID NO: 95791 - DNA, 70 bp, Homo sapiens
cctttaaatgttgatatctgccatttgtggaaacaacgtaaattctacttaagtgtaaacaaggcaagcc

SEQ ID NO: 95792 - DNA, 73 bp, Homo sapiens
aaatgttgatatctgccatttgtggaaacaacgtaaattctacttaagtgtaaacaaggcaagcctcagacca

SEQ ID NO: 95793 - DNA, 70 bp, Homo sapiens
ccatttgtggaaacaacgtaaattctacttaagtgtaaacaaggcaagcctcagaccagcaataaattac

SEQ ID NO: 95794 - DNA, 71 bp, Homo sapiens
tgtggaaacaacgtaaattctacttaagtgtaaacaaggcaagcctcagaccagcaataaattactcagtt

SEQ ID NO: 95795 - DNA, 71 bp, Homo sapiens
acgtaaattctacttaagtgtaaacaaggcaagcctcagaccagcaataaattactcagtttggataacat

SEQ ID NO: 95796 - DNA, 76 bp, Homo sapiens
taagtgtaaacaaggcaagcctcagaccagcaataaattactcagtttggataacattattttgtgcagttaatca

SEQ ID NO: 95797 - DNA, 75 bp, Homo sapiens
aacaaggcaagcctcagaccagcaataaattactcagtttggataacattattttgtgcagttaatcaaatttgc

SEQ ID NO: 95798 - DNA, 74 bp, Homo sapiens
aagcctcagaccagcaataaattactcagtttggataacattattttgtgcagttaatcaaatttgccaaagtc

SEQ ID NO: 95799 - DNA, 74 bp, Homo sapiens
ccagcaataaattactcagtttggataacattattttgtgcagttaatcaaatttgccaaagtctttatctgcc

SEQ ID NO: 95800 - DNA, 71 bp, Homo sapiens
ggataacattattttgtgcagttaatcaaatttgccaaagtctttatctgcccctttaacaagttgagtaa

SEQ ID NO: 95801 - DNA, 68 bp, Homo sapiens
ttgtgcagttaatcaaatttgccaaagtctttatctgcccctttaacaagttgagtaaaaataaaagg

SEQ ID NO: 95802 - DNA, 66 bp, Homo sapiens
cagttaatcaaatttgccaaagtctttatctgcccctttaacaagttgagtaaaaataaaaggtat

SEQ ID NO: 95803 - DNA, 66 bp, Homo sapiens
gccaaagtctttatctgcccctttaacaagttgagtaaaaataaaaggtattttttagtcaatgtg

SEQ ID NO: 95804 - DNA, 66 bp, Homo sapiens
ccctttaacaagttgagtaaaaataaaaggtattttttagtcaatgtgttccatgattttgcttaa

SEQ ID NO: 95805 - DNA, 67 bp, Homo sapiens
ataaaaggtattttttagtcaatgtgttccatgattttgcttaaattaatacttttaagtaatggaa

SEQ ID NO: 95806 - DNA, 66 bp, Homo sapiens
aggtattttttagtcaatgtgttccatgattttgcttaaattaatacttttaagtaatggaacttt

SEQ ID NO: 95807 - DNA, 69 bp, Homo sapiens
tagtcaatgtgttccatgattttgcttaaattaatacttttaagtaatggaacttttttcaaaggcaaa

SEQ ID NO: 95808 - DNA, 66 bp, Homo sapiens
tccatgattttgcttaaattaatacttttaagtaatggaacttttttcaaaggcaaatttaaacta

SEQ ID NO: 95809 - DNA, 64 bp, Homo sapiens
ttgcttaaattaatacttttaagtaatggaacttttttcaaaggcaaatttaaactatttaaga

SEQ ID NO: 95810 - DNA, 65 bp, Homo sapiens
tacttttaagtaatggaacttttttcaaaggcaaatttaaactatttaagaaatagctcctaata

SEQ ID NO: 95811 - DNA, 67 bp, Homo sapiens
taatggaacttttttcaaaggcaaatttaaactatttaagaaatagctcctaatacttgggatcttg

SEQ ID NO: 95812 - DNA, 69 bp, Homo sapiens
ttttcaaaggcaaatttaaactatttaagaaatagctcctaatacttgggatcttgtttagagaatcca

SEQ ID NO: 95813 - DNA, 70 bp, Homo sapiens
ggcaaatttaaactatttaagaaatagctcctaatacttgggatcttgtttagagaatccactttctgga

SEQ ID NO: 95814 - DNA, 73 bp, Homo sapiens
ctatttaagaaatagctcctaatacttgggatcttgtttagagaatccactttctggaagttctcagcataat

SEQ ID NO: 95815 - DNA, 74 bp, Homo sapiens
taagaaatagctcctaatacttgggatcttgtttagagaatccactttctggaagttctcagcataattagtgt

SEQ ID NO: 95816 - DNA, 75 bp, Homo sapiens
taatacttgggatcttgtttagagaatccactttctggaagttctcagcataattagtgttgagagtggttcagt

SEQ ID NO: 95817 - DNA, 75 bp, Homo sapiens
atcttgtttagagaatccactttctggaagttctcagcataattagtgttgagagtggttcagttgtctttaatg

SEQ ID NO: 95818 - DNA, 74 bp, Homo sapiens
gtttagagaatccactttctggaagttctcagcataattagtgttgagagtggttcagttgtctttaatgtttg

SEQ ID NO: 95819 - DNA, 76 bp, Homo sapiens
ttctcagcataattagtgttgagagtggttcagttgtctttaatgtttgtcatgtggaaatggaagtagcctcttt

SEQ ID NO: 95820 - DNA, 73 bp, Homo sapiens
gtgttgagagtggttcagttgtctttaatgtttgtcatgtggaaatggaagtagcctctttttgttctgaaat

SEQ ID NO: 95821 - DNA, 71 bp, Homo sapiens
ggttcagttgtctttaatgtttgtcatgtggaaatggaagtagcctctttttgttctgaaattgagtttat

SEQ ID NO: 95822 - DNA, 72 bp, Homo sapiens
gtctttaatgtttgtcatgtggaaatggaagtagcctctttttgttctgaaattgagtttattcaaagtgta

SEQ ID NO: 95823 - DNA, 76 bp, Homo sapiens
ttgtcatgtggaaatggaagtagcctctttttgttctgaaattgagtttattcaaagtgtaaaagcacatactgca

SEQ ID NO: 95824 - DNA, 74 bp, Homo sapiens
gaaatggaagtagcctctttttgttctgaaattgagtttattcaaagtgtaaaagcacatactgcattttctgc

SEQ ID NO: 95825 - DNA, 77 bp, Homo sapiens
gcctctttttgttctgaaattgagtttattcaaagtgtaaaagcacatactgcattttctgctgaaagatcattatg

SEQ ID NO: 95826 - DNA, 78 bp, Homo sapiens
tctgaaattgagtttattcaaagtgtaaaagcacatactgcattttctgctgaaagatcattatgtttaacaggcact

SEQ ID NO: 95827 - DNA, 78 bp, Homo sapiens
tactgcattttctgctgaaagatcattatgtttaacaggcacttaatctcagtaaagtcagttgccagttaagttcca

SEQ ID NO: 95828 - DNA, 75 bp, Homo sapiens
tgaaagatcattatgtttaacaggcacttaatctcagtaaagtcagttgccagttaagttccacccagtagtcag

SEQ ID NO: 95829 - DNA, 73 bp, Homo sapiens
atcattatgtttaacaggcacttaatctcagtaaagtcagttgccagttaagttccacccagtagtcagtccc

SEQ ID NO: 95830 - DNA, 71 bp, Homo sapiens
tttaacaggcacttaatctcagtaaagtcagttgccagttaagttccacccagtagtcagtcccctttgta

SEQ ID NO: 95831 - DNA, 70 bp, Homo sapiens
atctcagtaaagtcagttgccagttaagttccacccagtagtcagtcccctttgtagttagtgggattat

SEQ ID NO: 95832 - DNA, 70 bp, Homo sapiens
taaagtcagttgccagttaagttccacccagtagtcagtcccctttgtagttagtgggattatttgataa

SEQ ID NO: 95833 - DNA, 71 bp, Homo sapiens
cagttaagttccacccagtagtcagtcccctttgtagttagtgggattatttgataattggttagatcata

SEQ ID NO: 95834 - DNA, 71 bp, Homo sapiens
ttccacccagtagtcagtcccctttgtagttagtgggattatttgataattggttagatcatacttgtaaa

SEQ ID NO: 95835 - DNA, 70 bp, Homo sapiens
ccctttgtagttagtgggattatttgataattggttagatcatacttgtaaattttaatgctttgtgtaa

SEQ ID NO: 95836 - DNA, 71 bp, Homo sapiens
agttagtgggattatttgataattggttagatcatacttgtaaattttaatgctttgtgtaattggtttga

SEQ ID NO: 95837 - DNA, 67 bp, Homo sapiens
catacttgtaaattttaatgctttgtgtaattggtttgaaaaacagtgaaatgggtaaacgcaaaac

SEQ ID NO: 95838 - DNA, 65 bp, Homo sapiens
attttaatgctttgtgtaattggtttgaaaaacagtgaaatgggtaaacgcaaaacttttgtact

SEQ ID NO: 95839 - DNA, 66 bp, Homo sapiens
gtttgaaaaacagtgaaatgggtaaacgcaaaacttttgtactttattacgagtaaagtgtaatga

SEQ ID NO: 95840 - DNA, 68 bp, Homo sapiens
acagtgaaatgggtaaacgcaaaacttttgtactttattacgagtaaagtgtaatgagtactgtggaa

SEQ ID NO: 95841 - DNA, 66 bp, Homo sapiens
aaatgggtaaacgcaaaacttttgtactttattacgagtaaagtgtaatgagtactgtggaaacca

SEQ ID NO: 95842 - DNA, 70 bp, Homo sapiens
gtactttattacgagtaaagtgtaatgagtactgtggaaaccaaatttgaatactgcaaatttgtaggag

SEQ ID NO: 95843 - DNA, 72 bp, Homo sapiens
gagtaaagtgtaatgagtactgtggaaaccaaatttgaatactgcaaatttgtaggagttactaggttagca

SEQ ID NO: 95844 - DNA, 72 bp, Homo sapiens
gtgtaatgagtactgtggaaaccaaatttgaatactgcaaatttgtaggagttactaggttagcaattagtc

SEQ ID NO: 95845 - DNA, 74 bp, Homo sapiens
tgtggaaaccaaatttgaatactgcaaatttgtaggagttactaggttagcaattagtccatacatccataagc

SEQ ID NO: 95846 - DNA, 76 bp, Homo sapiens
aaatttgaatactgcaaatttgtaggagttactaggttagcaattagtccatacatccataagcctgatgagttga

SEQ ID NO: 95847 - DNA, 77 bp, Homo sapiens
aatactgcaaatttgtaggagttactaggttagcaattagtccatacatccataagcctgatgagttgaaattgcag

SEQ ID NO: 95848 - DNA, 76 bp, Homo sapiens
aaatttgtaggagttactaggttagcaattagtccatacatccataagcctgatgagttgaaattgcagtttgaga

SEQ ID NO: 95849 - DNA, 76 bp, Homo sapiens
agttactaggttagcaattagtccatacatccataagcctgatgagttgaaattgcagtttgagaagtgaattaac

SEQ ID NO: 95850 - DNA, 76 bp, Homo sapiens
atacatccataagcctgatgagttgaaattgcagtttgagaagtgaattaaccttacatccctttgttcagatacc

SEQ ID NO: 95851 - DNA, 74 bp, Homo sapiens
cataagcctgatgagttgaaattgcagtttgagaagtgaattaaccttacatccctttgttcagataccttaaa

SEQ ID NO: 95852 - DNA, 71 bp, Homo sapiens
gatgagttgaaattgcagtttgagaagtgaattaaccttacatccctttgttcagataccttaaaagttac

SEQ ID NO: 95853 - DNA, 67 bp, Homo sapiens
aaattgcagtttgagaagtgaattaaccttacatccctttgttcagataccttaaaagttactttat

SEQ ID NO: 95854 - DNA, 67 bp, Homo sapiens
ttgagaagtgaattaaccttacatccctttgttcagataccttaaaagttactttatttaaaagcat

SEQ ID NO: 95855 - DNA, 65 bp, Homo sapiens
accttacatccctttgttcagataccttaaaagttactttatttaaaagcatttattaatcttag

SEQ ID NO: 95856 - DNA, 69 bp, Homo sapiens
catccctttgttcagataccttaaaagttactttatttaaaagcatttattaatcttagtctgaaatca

SEQ ID NO: 95857 - DNA, 69 bp, Homo sapiens
gttcagataccttaaaagttactttatttaaaagcatttattaatcttagtctgaaatcaaaatataga

SEQ ID NO: 95858 - DNA, 70 bp, Homo sapiens
aagttactttatttaaaagcatttattaatcttagtctgaaatcaaaatatagattaattggctcagctt

SEQ ID NO: 95859 - DNA, 71 bp, Homo sapiens
atttaaaagcatttattaatcttagtctgaaatcaaaatatagattaattggctcagctttaatacctttc

SEQ ID NO: 95860 - DNA, 74 bp, Homo sapiens
tcttagtctgaaatcaaaatatagattaattggctcagctttaatacctttctaggaggtgtcacaatgtaggg

SEQ ID NO: 95861 - DNA, 71 bp, Homo sapiens
aatcaaaatatagattaattggctcagctttaatacctttctaggaggtgtcacaatgtagggtaccaagg

SEQ ID NO: 95862 - DNA, 70 bp, Homo sapiens
aaatatagattaattggctcagctttaatacctttctaggaggtgtcacaatgtagggtaccaagggttg

SEQ ID NO: 95863 - DNA, 72 bp, Homo sapiens
taattggctcagctttaatacctttctaggaggtgtcacaatgtagggtaccaagggttggattgtgatggg

SEQ ID NO: 95864 - DNA, 72 bp, Homo sapiens
tttaatacctttctaggaggtgtcacaatgtagggtaccaagggttggattgtgatggggcatggtcgtaca

SEQ ID NO: 95865 - DNA, 78 bp, Homo sapiens
tttctaggaggtgtcacaatgtagggtaccaagggttggattgtgatggggcatggtcgtacactgctcattgtgcca

SEQ ID NO: 95866 - DNA, 79 bp, Homo sapiens
aggtgtcacaatgtagggtaccaagggttggattgtgatggggcatggtcgtacactgctcattgtgccacaggtgtga

SEQ ID NO: 95867 - DNA, 81 bp, Homo sapiens
tagggtaccaagggttggattgtgatggggcatggtcgtacactgctcattgtgccacaggtgtgactggaaagcatgata

SEQ ID NO: 95868 - DNA, 80 bp, Homo sapiens
aagggttggattgtgatggggcatggtcgtacactgctcattgtgccacaggtgtgactggaaagcatgatattctaggg

SEQ ID NO: 95869 - DNA, 81 bp, Homo sapiens
attgtgatggggcatggtcgtacactgctcattgtgccacaggtgtgactggaaagcatgatattctagggttggtttgta

SEQ ID NO: 95870 - DNA, 79 bp, Homo sapiens
atggtcgtacactgctcattgtgccacaggtgtgactggaaagcatgatattctagggttggtttgtagattcaaataa

SEQ ID NO: 95871 - DNA, 80 bp, Homo sapiens
tacactgctcattgtgccacaggtgtgactggaaagcatgatattctagggttggtttgtagattcaaataatccagaaa

SEQ ID NO: 95872 - DNA, 75 bp, Homo sapiens
caggtgtgactggaaagcatgatattctagggttggtttgtagattcaaataatccagaaatatacctaataaga

SEQ ID NO: 95873 - DNA, 74 bp, Homo sapiens
gtttgtagattcaaataatccagaaatatacctaataagattgagtgaaaaatttgagtcaaatatctagggca

SEQ ID NO: 95874 - DNA, 77 bp, Homo sapiens
tcaaataatccagaaatatacctaataagattgagtgaaaaatttgagtcaaatatctagggcattcacagagtagc

SEQ ID NO: 95875 - DNA, 76 bp, Homo sapiens
aagattgagtgaaaaatttgagtcaaatatctagggcattcacagagtagctgtgagttcttggtaatgtgaaaaa

SEQ ID NO: 95876 - DNA, 73 bp, Homo sapiens
aatttgagtcaaatatctagggcattcacagagtagctgtgagttcttggtaatgtgaaaaaggccttgtttt

SEQ ID NO: 95877 - DNA, 74 bp, Homo sapiens
agtcaaatatctagggcattcacagagtagctgtgagttcttggtaatgtgaaaaaggccttgtttttcagaaa

SEQ ID NO: 95878 - DNA, 72 bp, Homo sapiens
tagggcattcacagagtagctgtgagttcttggtaatgtgaaaaaggccttgtttttcagaaattcctgggt

SEQ ID NO: 95879 - DNA, 69 bp, Homo sapiens
agagtagctgtgagttcttggtaatgtgaaaaaggccttgtttttcagaaattcctgggtttcctgtta

SEQ ID NO: 95880 - DNA, 67 bp, Homo sapiens
gctgtgagttcttggtaatgtgaaaaaggccttgtttttcagaaattcctgggtttcctgttaaaaa

SEQ ID NO: 95881 - DNA, 64 bp, Homo sapiens
cttggtaatgtgaaaaaggccttgtttttcagaaattcctgggtttcctgttaaaaaatcttaa

SEQ ID NO: 95882 - DNA, 62 bp, Homo sapiens
aaggccttgtttttcagaaattcctgggtttcctgttaaaaaatcttaaagcccaaccttag

SEQ ID NO: 95883 - DNA, 65 bp, Homo sapiens
ttttcagaaattcctgggtttcctgttaaaaaatcttaaagcccaaccttaggaatatagtgccc

SEQ ID NO: 95884 - DNA, 68 bp, Homo sapiens
aaaaatcttaaagcccaaccttaggaatatagtgccccaaaaggcggatgcttcttccattatcttat

SEQ ID NO: 95885 - DNA, 70 bp, Homo sapiens
ttaaagcccaaccttaggaatatagtgccccaaaaggcggatgcttcttccattatcttattttctttga

SEQ ID NO: 95886 - DNA, 71 bp, Homo sapiens
tatagtgccccaaaaggcggatgcttcttccattatcttattttctttgatactttatttaattagatgtt

SEQ ID NO: 95887 - DNA, 69 bp, Homo sapiens
atgcttcttccattatcttattttctttgatactttatttaattagatgtttataaagaaatgggttta

SEQ ID NO: 95888 - DNA, 68 bp, Homo sapiens
tcttattttctttgatactttatttaattagatgtttataaagaaatgggtttatttttccagcataa

SEQ ID NO: 95889 - DNA, 69 bp, Homo sapiens
tctttgatactttatttaattagatgtttataaagaaatgggtttatttttccagcataaacctcagaa

SEQ ID NO: 95890 - DNA, 67 bp, Homo sapiens
ttatttaattagatgtttataaagaaatgggtttatttttccagcataaacctcagaatttaaggaa

SEQ ID NO: 95891 - DNA, 69 bp, Homo sapiens
gatgtttataaagaaatgggtttatttttccagcataaacctcagaatttaaggaaagaaaatgatgtc

SEQ ID NO: 95892 - DNA, 69 bp, Homo sapiens
aagaaatgggtttatttttccagcataaacctcagaatttaaggaaagaaaatgatgtctgttgttata

SEQ ID NO: 95893 - DNA, 71 bp, Homo sapiens
tgggtttatttttccagcataaacctcagaatttaaggaaagaaaatgatgtctgttgttatagttcattg

SEQ ID NO: 95894 - DNA, 76 bp, Homo sapiens
ttccagcataaacctcagaatttaaggaaagaaaatgatgtctgttgttatagttcattgttttgcctactcagca

SEQ ID NO: 95895 - DNA, 76 bp, Homo sapiens
aacctcagaatttaaggaaagaaaatgatgtctgttgttatagttcattgttttgcctactcagcagaagtgatga

SEQ ID NO: 95896 - DNA, 74 bp, Homo sapiens
aaggaaagaaaatgatgtctgttgttatagttcattgttttgcctactcagcagaagtgatgactcttaaaaat

SEQ ID NO: 95897 - DNA, 76 bp, Homo sapiens
aaaatgatgtctgttgttatagttcattgttttgcctactcagcagaagtgatgactcttaaaaattggctttgac

SEQ ID NO: 95898 - DNA, 75 bp, Homo sapiens
tctgttgttatagttcattgttttgcctactcagcagaagtgatgactcttaaaaattggctttgaccaaagttc

SEQ ID NO: 95899 - DNA, 74 bp, Homo sapiens
tatagttcattgttttgcctactcagcagaagtgatgactcttaaaaattggctttgaccaaagttctcttgtt

SEQ ID NO: 95900 - DNA, 72 bp, Homo sapiens
ttttgcctactcagcagaagtgatgactcttaaaaattggctttgaccaaagttctcttgttttcagggaaa

SEQ ID NO: 95901 - DNA, 71 bp, Homo sapiens
cagcagaagtgatgactcttaaaaattggctttgaccaaagttctcttgttttcagggaaagaacataaaa

SEQ ID NO: 95902 - DNA, 68 bp, Homo sapiens
gtgatgactcttaaaaattggctttgaccaaagttctcttgttttcagggaaagaacataaaagcttt

SEQ ID NO: 95903 - DNA, 67 bp, Homo sapiens
aaattggctttgaccaaagttctcttgttttcagggaaagaacataaaagctttttgaactacagcc

SEQ ID NO: 95904 - DNA, 67 bp, Homo sapiens
tctcttgttttcagggaaagaacataaaagctttttgaactacagcctttttaaaagagggatggga

SEQ ID NO: 95905 - DNA, 68 bp, Homo sapiens
tcagggaaagaacataaaagctttttgaactacagcctttttaaaagagggatgggaggatattacag

SEQ ID NO: 95906 - DNA, 67 bp, Homo sapiens
agctttttgaactacagcctttttaaaagagggatgggaggatattacagtaagaaattaggctttc

SEQ ID NO: 95907 - DNA, 69 bp, Homo sapiens
ttaaaagagggatgggaggatattacagtaagaaattaggctttctaaaagtatgaaacatccttcaac

SEQ ID NO: 95908 - DNA, 72 bp, Homo sapiens
gatgggaggatattacagtaagaaattaggctttctaaaagtatgaaacatccttcaactgggctctcttgt

SEQ ID NO: 95909 - DNA, 71 bp, Homo sapiens
ggatattacagtaagaaattaggctttctaaaagtatgaaacatccttcaactgggctctcttgttaatag

SEQ ID NO: 95910 - DNA, 73 bp, Homo sapiens
agaaattaggctttctaaaagtatgaaacatccttcaactgggctctcttgttaataggacatcatatggtaa

SEQ ID NO: 95911 - DNA, 73 bp, Homo sapiens
ctttctaaaagtatgaaacatccttcaactgggctctcttgttaataggacatcatatggtaatagactggtt

SEQ ID NO: 95912 - DNA, 75 bp, Homo sapiens
aaagtatgaaacatccttcaactgggctctcttgttaataggacatcatatggtaatagactggtttgactatat

SEQ ID NO: 95913 - DNA, 77 bp, Homo sapiens
aaacatccttcaactgggctctcttgttaataggacatcatatggtaatagactggtttgactatattgttagctgc

SEQ ID NO: 95914 - DNA, 78 bp, Homo sapiens
aactgggctctcttgttaataggacatcatatggtaatagactggtttgactatattgttagctgccacagtaagcag

SEQ ID NO: 95915 - DNA, 80 bp, Homo sapiens
tgttaataggacatcatatggtaatagactggtttgactatattgttagctgccacagtaagcaggtcattgtataggta

SEQ ID NO: 95916 - DNA, 80 bp, Homo sapiens
taggacatcatatggtaatagactggtttgactatattgttagctgccacagtaagcaggtcattgtataggtaaatgcc

SEQ ID NO: 95917 - DNA, 78 bp, Homo sapiens
taatagactggtttgactatattgttagctgccacagtaagcaggtcattgtataggtaaatgcctgcacccataatt

SEQ ID NO: 95918 - DNA, 78 bp, Homo sapiens
actatattgttagctgccacagtaagcaggtcattgtataggtaaatgcctgcacccataattttctagtaatagcca

SEQ ID NO: 95919 - DNA, 76 bp, Homo sapiens
tgccacagtaagcaggtcattgtataggtaaatgcctgcacccataattttctagtaatagccacgaccaatttat

SEQ ID NO: 95920 - DNA, 73 bp, Homo sapiens
agtaagcaggtcattgtataggtaaatgcctgcacccataattttctagtaatagccacgaccaatttattaa

SEQ ID NO: 95921 - DNA, 74 bp, Homo sapiens
aatgcctgcacccataattttctagtaatagccacgaccaatttattaacagtcagggcctatccttgcctgta

SEQ ID NO: 95922 - DNA, 72 bp, Homo sapiens
acccataattttctagtaatagccacgaccaatttattaacagtcagggcctatccttgcctgtagttctca

SEQ ID NO: 95923 - DNA, 74 bp, Homo sapiens
attttctagtaatagccacgaccaatttattaacagtcagggcctatccttgcctgtagttctcagtcactgga

SEQ ID NO: 95924 - DNA, 77 bp, Homo sapiens
aatagccacgaccaatttattaacagtcagggcctatccttgcctgtagttctcagtcactggatgcacaaaatcac

SEQ ID NO: 95925 - DNA, 77 bp, Homo sapiens
accaatttattaacagtcagggcctatccttgcctgtagttctcagtcactggatgcacaaaatcactgtgtaacat

SEQ ID NO: 95926 - DNA, 82 bp, Homo sapiens
taacagtcagggcctatccttgcctgtagttctcagtcactggatgcacaaaatcactgtgtaacattggctcacttggtga

SEQ ID NO: 95927 - DNA, 84 bp, Homo sapiens
tatccttgcctgtagttctcagtcactggatgcacaaaatcactgtgtaacattggctcacttggtgagcatagggttgactga

SEQ ID NO: 95928 - DNA, 82 bp, Homo sapiens
tgtagttctcagtcactggatgcacaaaatcactgtgtaacattggctcacttggtgagcatagggttgactgataaaatgt

SEQ ID NO: 95929 - DNA, 81 bp, Homo sapiens
tctcagtcactggatgcacaaaatcactgtgtaacattggctcacttggtgagcatagggttgactgataaaatgtttaat

SEQ ID NO: 95930 - DNA, 78 bp, Homo sapiens
atgcacaaaatcactgtgtaacattggctcacttggtgagcatagggttgactgataaaatgtttaattcccttgcta

SEQ ID NO: 95931 - DNA, 76 bp, Homo sapiens
aaatcactgtgtaacattggctcacttggtgagcatagggttgactgataaaatgtttaattcccttgctagcttg

SEQ ID NO: 95932 - DNA, 78 bp, Homo sapiens
gtaacattggctcacttggtgagcatagggttgactgataaaatgtttaattcccttgctagcttgtgagaagaatga

SEQ ID NO: 95933 - DNA, 82 bp, Homo sapiens
ttggtgagcatagggttgactgataaaatgtttaattcccttgctagcttgtgagaagaatgagttgatgacatgctccata

SEQ ID NO: 95934 - DNA, 79 bp, Homo sapiens
atagggttgactgataaaatgtttaattcccttgctagcttgtgagaagaatgagttgatgacatgctccataccagtg

SEQ ID NO: 95935 - DNA, 82 bp, Homo sapiens
tgataaaatgtttaattcccttgctagcttgtgagaagaatgagttgatgacatgctccataccagtggctagatggagtat

SEQ ID NO: 95936 - DNA, 80 bp, Homo sapiens
aaatgtttaattcccttgctagcttgtgagaagaatgagttgatgacatgctccataccagtggctagatggagtattaa

SEQ ID NO: 95937 - DNA, 83 bp, Homo sapiens
ttcccttgctagcttgtgagaagaatgagttgatgacatgctccataccagtggctagatggagtattaaggtggagcagaaa

SEQ ID NO: 95938 - DNA, 82 bp, Homo sapiens
cttgtgagaagaatgagttgatgacatgctccataccagtggctagatggagtattaaggtggagcagaaaagaagtgagaa

SEQ ID NO: 95939 - DNA, 78 bp, Homo sapiens
atgacatgctccataccagtggctagatggagtattaaggtggagcagaaaagaagtgagaacatcttgattcccctt

SEQ ID NO: 95940 - DNA, 73 bp, Homo sapiens
tagatggagtattaaggtggagcagaaaagaagtgagaacatcttgattcccctttcttttacttgatggtgt

SEQ ID NO: 95941 - DNA, 74 bp, Homo sapiens
agcagaaaagaagtgagaacatcttgattcccctttcttttacttgatggtgtttatgaacatgccgtagtgcc

SEQ ID NO: 95942 - DNA, 72 bp, Homo sapiens
aaagaagtgagaacatcttgattcccctttcttttacttgatggtgtttatgaacatgccgtagtgccttta

SEQ ID NO: 95943 - DNA, 72 bp, Homo sapiens
agaacatcttgattcccctttcttttacttgatggtgtttatgaacatgccgtagtgcctttatggccagtt

SEQ ID NO: 95944 - DNA, 72 bp, Homo sapiens
ccctttcttttacttgatggtgtttatgaacatgccgtagtgcctttatggccagtttgagtcctgcctact

SEQ ID NO: 95945 - DNA, 73 bp, Homo sapiens
tgtttatgaacatgccgtagtgcctttatggccagtttgagtcctgcctactttgacttttacgttcccattc

SEQ ID NO: 95946 - DNA, 73 bp, Homo sapiens
atgaacatgccgtagtgcctttatggccagtttgagtcctgcctactttgacttttacgttcccattcctgtg

SEQ ID NO: 95947 - DNA, 70 bp, Homo sapiens
tagtgcctttatggccagtttgagtcctgcctactttgacttttacgttcccattcctgtgttaccacct

SEQ ID NO: 95948 - DNA, 69 bp, Homo sapiens
ttatggccagtttgagtcctgcctactttgacttttacgttcccattcctgtgttaccaccttcctccc

SEQ ID NO: 95949 - DNA, 69 bp, Homo sapiens
tttgagtcctgcctactttgacttttacgttcccattcctgtgttaccaccttcctcccgatttgttca

SEQ ID NO: 95950 - DNA, 66 bp, Homo sapiens
ctactttgacttttacgttcccattcctgtgttaccaccttcctcccgatttgttcacctattttg

SEQ ID NO: 95951 - DNA, 66 bp, Homo sapiens
acttttacgttcccattcctgtgttaccaccttcctcccgatttgttcacctattttgtgctttaa

SEQ ID NO: 95952 - DNA, 70 bp, Homo sapiens
tcccattcctgtgttaccaccttcctcccgatttgttcacctattttgtgctttaaatctcaataaaata

SEQ ID NO: 95953 - DNA, 69 bp, Homo sapiens
gtgttaccaccttcctcccgatttgttcacctattttgtgctttaaatctcaataaaatacttactgag

SEQ ID NO: 95954 - DNA, 71 bp, Homo sapiens
ttcacctattttgtgctttaaatctcaataaaatacttactgagggaaaggcttgttttgagtttattgca

SEQ ID NO: 95955 - DNA, 73 bp, Homo sapiens
ttgtgctttaaatctcaataaaatacttactgagggaaaggcttgttttgagtttattgcatatgcccactta

SEQ ID NO: 95956 - DNA, 69 bp, Homo sapiens
gggaccttatggggttgtatattttgttgaaatatttataacaactaagttacatggaaatattccatg

SEQ ID NO: 95957 - DNA, 68 bp, Homo sapiens
gggttgtatattttgttgaaatatttataacaactaagttacatggaaatattccatgggatttattt

SEQ ID NO: 95958 - DNA, 69 bp, Homo sapiens
tatttataacaactaagttacatggaaatattccatgggatttatttttaacaaacatttacataaaca

SEQ ID NO: 95959 - DNA, 69 bp, Homo sapiens
acaactaagttacatggaaatattccatgggatttatttttaacaaacatttacataaacaataaatga

SEQ ID NO: 95960 - DNA, 67 bp, Homo sapiens
gttacatggaaatattccatgggatttatttttaacaaacatttacataaacaataaatgaaaaaaa

SEQ ID NO: 95961 - DNA, 71 bp, Homo sapiens
caaacatttacataaacaataaatgaaaaaaaaacaggtttaaagtgagcagattcatatttacagtgtga

SEQ ID NO: 95962 - DNA, 69 bp, Homo sapiens
cataaacaataaatgaaaaaaaaacaggtttaaagtgagcagattcatatttacagtgtgatttttaag

SEQ ID NO: 95963 - DNA, 70 bp, Homo sapiens
aaatgaaaaaaaaacaggtttaaagtgagcagattcatatttacagtgtgatttttaaggactgtctata

SEQ ID NO: 95964 - DNA, 71 bp, Homo sapiens
aaaacaggtttaaagtgagcagattcatatttacagtgtgatttttaaggactgtctatatccaaatttta

SEQ ID NO: 95965 - DNA, 74 bp, Homo sapiens
taaagtgagcagattcatatttacagtgtgatttttaaggactgtctatatccaaattttattttcgtgaacgc

SEQ ID NO: 95966 - DNA, 74 bp, Homo sapiens
gcagattcatatttacagtgtgatttttaaggactgtctatatccaaattttattttcgtgaacgcttacattc

SEQ ID NO: 95967 - DNA, 72 bp, Homo sapiens
tttacagtgtgatttttaaggactgtctatatccaaattttattttcgtgaacgcttacattctaagagcag

SEQ ID NO: 95968 - DNA, 72 bp, Homo sapiens
gatttttaaggactgtctatatccaaattttattttcgtgaacgcttacattctaagagcagtacaattagc

SEQ ID NO: 95969 - DNA, 72 bp, Homo sapiens
aggactgtctatatccaaattttattttcgtgaacgcttacattctaagagcagtacaattagcctattacg

SEQ ID NO: 95970 - DNA, 70 bp, Homo sapiens
tccaaattttattttcgtgaacgcttacattctaagagcagtacaattagcctattacgtagggccctaa

SEQ ID NO: 95971 - DNA, 71 bp, Homo sapiens
tttattttcgtgaacgcttacattctaagagcagtacaattagcctattacgtagggccctaatcttgtta

SEQ ID NO: 95972 - DNA, 71 bp, Homo sapiens
aacgcttacattctaagagcagtacaattagcctattacgtagggccctaatcttgttagtatagtgttgt

SEQ ID NO: 95973 - DNA, 71 bp, Homo sapiens
ttctaagagcagtacaattagcctattacgtagggccctaatcttgttagtatagtgttgttgaaatactt

SEQ ID NO: 95974 - DNA, 70 bp, Homo sapiens
agtacaattagcctattacgtagggccctaatcttgttagtatagtgttgttgaaatactttcttcagct

SEQ ID NO: 95975 - DNA, 69 bp, Homo sapiens
cctattacgtagggccctaatcttgttagtatagtgttgttgaaatactttcttcagcttttgccttaa

SEQ ID NO: 95976 - DNA, 70 bp, Homo sapiens
tacgtagggccctaatcttgttagtatagtgttgttgaaatactttcttcagcttttgccttaacaaatc

SEQ ID NO: 95977 - DNA, 76 bp, Homo sapiens
tcttgttagtatagtgttgttgaaatactttcttcagcttttgccttaacaaatccaaagatggaagatgatgaca

SEQ ID NO: 95978 - DNA, 76 bp, Homo sapiens
agtatagtgttgttgaaatactttcttcagcttttgccttaacaaatccaaagatggaagatgatgacaatctgga

SEQ ID NO: 95979 - DNA, 76 bp, Homo sapiens
gttgttgaaatactttcttcagcttttgccttaacaaatccaaagatggaagatgatgacaatctggaatattcaa

SEQ ID NO: 95980 - DNA, 77 bp, Homo sapiens
ctttcttcagcttttgccttaacaaatccaaagatggaagatgatgacaatctggaatattcaacataacatgaaaa

SEQ ID NO: 95981 - DNA, 77 bp, Homo sapiens
gcttttgccttaacaaatccaaagatggaagatgatgacaatctggaatattcaacataacatgaaaaaattcattc

SEQ ID NO: 95982 - DNA, 80 bp, Homo sapiens
caaatccaaagatggaagatgatgacaatctggaatattcaacataacatgaaaaaattcattccacatatccaaatgag

SEQ ID NO: 95983 - DNA, 81 bp, Homo sapiens
gatggaagatgatgacaatctggaatattcaacataacatgaaaaaattcattccacatatccaaatgaggaagcctgaaa

SEQ ID NO: 95984 - DNA, 76 bp, Homo sapiens
aatctggaatattcaacataacatgaaaaaattcattccacatatccaaatgaggaagcctgaaaaagacaaagca

SEQ ID NO: 95985 - DNA, 77 bp, Homo sapiens
tcaacataacatgaaaaaattcattccacatatccaaatgaggaagcctgaaaaagacaaagcataaataatggcta

SEQ ID NO: 95986 - DNA, 73 bp, Homo sapiens
tactttagttattctcttttcactacagcaccaatgctaatactcaccttctaaaaagaccttcaggcttaca

SEQ ID NO: 95987 - DNA, 73 bp, Homo sapiens
attctcttttcactacagcaccaatgctaatactcaccttctaaaaagaccttcaggcttacactctcctcct

SEQ ID NO: 95988 - DNA, 73 bp, Homo sapiens
ttttcactacagcaccaatgctaatactcaccttctaaaaagaccttcaggcttacactctcctccttcattt

SEQ ID NO: 95989 - DNA, 73 bp, Homo sapiens
caatgctaatactcaccttctaaaaagaccttcaggcttacactctcctccttcatttttcactttcatgtaa

SEQ ID NO: 95990 - DNA, 73 bp, Homo sapiens
taatactcaccttctaaaaagaccttcaggcttacactctcctccttcatttttcactttcatgtaagtgcca

SEQ ID NO: 95991 - DNA, 77 bp, Homo sapiens
tctaaaaagaccttcaggcttacactctcctccttcatttttcactttcatgtaagtgccaaagagcatgcaatata

SEQ ID NO: 95992 - DNA, 80 bp, Homo sapiens
accttcaggcttacactctcctccttcatttttcactttcatgtaagtgccaaagagcatgcaatatactgttgcagcaa

SEQ ID NO: 95993 - DNA, 79 bp, Homo sapiens
tacactctcctccttcatttttcactttcatgtaagtgccaaagagcatgcaatatactgttgcagcaaccccaaagta

SEQ ID NO: 95994 - DNA, 80 bp, Homo sapiens
cttcatttttcactttcatgtaagtgccaaagagcatgcaatatactgttgcagcaaccccaaagtaatcgatctatgaa

SEQ ID NO: 95995 - DNA, 81 bp, Homo sapiens
ttttcactttcatgtaagtgccaaagagcatgcaatatactgttgcagcaaccccaaagtaatcgatctatgaagaagata

SEQ ID NO: 95996 - DNA, 83 bp, Homo sapiens
atgtaagtgccaaagagcatgcaatatactgttgcagcaaccccaaagtaatcgatctatgaagaagatagaggtatatatga

SEQ ID NO: 95997 - DNA, 80 bp, Homo sapiens
aaagagcatgcaatatactgttgcagcaaccccaaagtaatcgatctatgaagaagatagaggtatatatgacttaaata

SEQ ID NO: 95998 - DNA, 68 bp, Homo sapiens
ataagcgcaacacagaaaaatatttccaagtccctcactttagttttatacctggtagttccatggtt

SEQ ID NO: 95999 - DNA, 71 bp, Homo sapiens
aaaaatatttccaagtccctcactttagttttatacctggtagttccatggtttgttgctgagcatctcaa

SEQ ID NO: 96000 - DNA, 75 bp, Homo sapiens
tatttccaagtccctcactttagttttatacctggtagttccatggtttgttgctgagcatctcaacacactgaa

SEQ ID NO: 96001 - DNA, 76 bp, Homo sapiens
cactttagttttatacctggtagttccatggtttgttgctgagcatctcaacacactgaaaaccagatgtttcaca

SEQ ID NO: 96002 - DNA, 77 bp, Homo sapiens
tagttttatacctggtagttccatggtttgttgctgagcatctcaacacactgaaaaccagatgtttcacactttgc

SEQ ID NO: 96003 - DNA, 79 bp, Homo sapiens
tagttccatggtttgttgctgagcatctcaacacactgaaaaccagatgtttcacactttgctgtgaatatagttcctt

SEQ ID NO: 96004 - DNA, 77 bp, Homo sapiens
gtttgttgctgagcatctcaacacactgaaaaccagatgtttcacactttgctgtgaatatagttccttttggaaaa

SEQ ID NO: 96005 - DNA, 77 bp, Homo sapiens
tgagcatctcaacacactgaaaaccagatgtttcacactttgctgtgaatatagttccttttggaaaaagtttcata

SEQ ID NO: 96006 - DNA, 75 bp, Homo sapiens
tctcaacacactgaaaaccagatgtttcacactttgctgtgaatatagttccttttggaaaaagtttcatatcta

SEQ ID NO: 96007 - DNA, 73 bp, Homo sapiens
aaccagatgtttcacactttgctgtgaatatagttccttttggaaaaagtttcatatctatactctgacccag

SEQ ID NO: 96008 - DNA, 75 bp, Homo sapiens
atgtttcacactttgctgtgaatatagttccttttggaaaaagtttcatatctatactctgacccaggtcaatca

SEQ ID NO: 96009 - DNA, 75 bp, Homo sapiens
actttgctgtgaatatagttccttttggaaaaagtttcatatctatactctgacccaggtcaatcagtgccaagc

SEQ ID NO: 96010 - DNA, 75 bp, Homo sapiens
aatatagttccttttggaaaaagtttcatatctatactctgacccaggtcaatcagtgccaagccagcagataaa

SEQ ID NO: 96011 - DNA, 81 bp, Homo sapiens
tttggaaaaagtttcatatctatactctgacccaggtcaatcagtgccaagccagcagataaatcatcttcatcatcctgt

SEQ ID NO: 96012 - DNA, 84 bp, Homo sapiens
tttcatatctatactctgacccaggtcaatcagtgccaagccagcagataaatcatcttcatcatcctgttccaaaaatctata

SEQ ID NO: 96013 - DNA, 82 bp, Homo sapiens
atctatactctgacccaggtcaatcagtgccaagccagcagataaatcatcttcatcatcctgttccaaaaatctatattaa

SEQ ID NO: 96014 - DNA, 79 bp, Homo sapiens
ccaggtcaatcagtgccaagccagcagataaatcatcttcatcatcctgttccaaaaatctatattaaacacaaacaaa

SEQ ID NO: 96015 - DNA, 79 bp, Homo sapiens
aatcagtgccaagccagcagataaatcatcttcatcatcctgttccaaaaatctatattaaacacaaacaaagccaggc

SEQ ID NO: 96016 - DNA, 71 bp, Homo sapiens
tatggaaataggaagagaagaaccctgttaaaagcataacacttgcccgtttccaagtatgaaattgtctg

SEQ ID NO: 96017 - DNA, 69 bp, Homo sapiens
taggaagagaagaaccctgttaaaagcataacacttgcccgtttccaagtatgaaattgtctggtttaa

SEQ ID NO: 96018 - DNA, 70 bp, Homo sapiens
agaagaaccctgttaaaagcataacacttgcccgtttccaagtatgaaattgtctggtttaatgtctcca

SEQ ID NO: 96019 - DNA, 74 bp, Homo sapiens
gttaaaagcataacacttgcccgtttccaagtatgaaattgtctggtttaatgtctccatgaatgatttcacag

SEQ ID NO: 96020 - DNA, 80 bp, Homo sapiens
ataacacttgcccgtttccaagtatgaaattgtctggtttaatgtctccatgaatgatttcacagtcatgcacttgctca

SEQ ID NO: 96021 - DNA, 86 bp, Homo sapiens
ttccaagtatgaaattgtctggtttaatgtctccatgaatgatttcacagtcatgcacttgctcaatcatgtaaagcattctcata

SEQ ID NO: 96022 - DNA, 87 bp, Homo sapiens
tatgaaattgtctggtttaatgtctccatgaatgatttcacagtcatgcacttgctcaatcatgtaaagcattctcatagcaaaaga

SEQ ID NO: 96023 - DNA, 89 bp, Homo sapiens
tgtctggtttaatgtctccatgaatgatttcacagtcatgcacttgctcaatcatgtaaagcattctcatagcaaaagagatgacaaga

SEQ ID NO: 96024 - DNA, 89 bp, Homo sapiens
aatgtctccatgaatgatttcacagtcatgcacttgctcaatcatgtaaagcattctcatagcaaaagagatgacaagaccttgaggca

SEQ ID NO: 96025 - DNA, 85 bp, Homo sapiens
aatgatttcacagtcatgcacttgctcaatcatgtaaagcattctcatagcaaaagagatgacaagaccttgaggcatcactttt

SEQ ID NO: 96026 - DNA, 83 bp, Homo sapiens
tcatgcacttgctcaatcatgtaaagcattctcatagcaaaagagatgacaagaccttgaggcatcactttttcaggggtatt

SEQ ID NO: 96027 - DNA, 80 bp, Homo sapiens
tgctcaatcatgtaaagcattctcatagcaaaagagatgacaagaccttgaggcatcactttttcaggggtatttttata

SEQ ID NO: 96028 - DNA, 77 bp, Homo sapiens
atcatgtaaagcattctcatagcaaaagagatgacaagaccttgaggcatcactttttcaggggtatttttatagag

SEQ ID NO: 96029 - DNA, 75 bp, Homo sapiens
ttctcatagcaaaagagatgacaagaccttgaggcatcactttttcaggggtatttttatagaggttaatggcat

SEQ ID NO: 96030 - DNA, 72 bp, Homo sapiens
aaagagatgacaagaccttgaggcatcactttttcaggggtatttttatagaggttaatggcattctaggaa

SEQ ID NO: 96031 - DNA, 70 bp, Homo sapiens
aagaccttgaggcatcactttttcaggggtatttttatagaggttaatggcattctaggaacaatggaaa

SEQ ID NO: 96032 - DNA, 72 bp, Homo sapiens
ttgaggcatcactttttcaggggtatttttatagaggttaatggcattctaggaacaatggaaagtggaatc

SEQ ID NO: 96033 - DNA, 69 bp, Homo sapiens
ttttcaggggtatttttatagaggttaatggcattctaggaacaatggaaagtggaatcctgagttagt

SEQ ID NO: 96034 - DNA, 78 bp, Homo sapiens
aaatccattttaaattcatgtgctcatcataaaaatgaatacttactaataatgttccatagctgtagagctctccta

SEQ ID NO: 96035 - DNA, 82 bp, Homo sapiens
taaattcatgtgctcatcataaaaatgaatacttactaataatgttccatagctgtagagctctcctactaatacactgcca

SEQ ID NO: 96036 - DNA, 82 bp, Homo sapiens
tgctcatcataaaaatgaatacttactaataatgttccatagctgtagagctctcctactaatacactgccattctggaata

SEQ ID NO: 96037 - DNA, 76 bp, Homo sapiens
aaaaatgaatacttactaataatgttccatagctgtagagctctcctactaatacactgccattctggaataagtg

SEQ ID NO: 96038 - DNA, 78 bp, Homo sapiens
aatacttactaataatgttccatagctgtagagctctcctactaatacactgccattctggaataagtgggcagaata

SEQ ID NO: 96039 - DNA, 80 bp, Homo sapiens
taataatgttccatagctgtagagctctcctactaatacactgccattctggaataagtgggcagaatagaacttcataa

SEQ ID NO: 96040 - DNA, 84 bp, Homo sapiens
atagctgtagagctctcctactaatacactgccattctggaataagtgggcagaatagaacttcataaacatgtgctgcataga

SEQ ID NO: 96041 - DNA, 82 bp, Homo sapiens
agctctcctactaatacactgccattctggaataagtgggcagaatagaacttcataaacatgtgctgcatagatggcttta

SEQ ID NO: 96042 - DNA, 81 bp, Homo sapiens
tactaatacactgccattctggaataagtgggcagaatagaacttcataaacatgtgctgcatagatggctttagtctttc

SEQ ID NO: 96043 - DNA, 80 bp, Homo sapiens
cattctggaataagtgggcagaatagaacttcataaacatgtgctgcatagatggctttagtctttccatcaactgggtc

SEQ ID NO: 96044 - DNA, 79 bp, Homo sapiens
ataagtgggcagaatagaacttcataaacatgtgctgcatagatggctttagtctttccatcaactgggtcccaatgta

SEQ ID NO: 96045 - DNA, 78 bp, Homo sapiens
agaatagaacttcataaacatgtgctgcatagatggctttagtctttccatcaactgggtcccaatgtagaattccca

SEQ ID NO: 96046 - DNA, 75 bp, Homo sapiens
aacttcataaacatgtgctgcatagatggctttagtctttccatcaactgggtcccaatgtagaattcccagggg

SEQ ID NO: 96047 - DNA, 75 bp, Homo sapiens
atgtgctgcatagatggctttagtctttccatcaactgggtcccaatgtagaattcccaggggttggcaggcttt

SEQ ID NO: 96048 - DNA, 71 bp, Homo sapiens
atagatggctttagtctttccatcaactgggtcccaatgtagaattcccaggggttggcaggcttttggac

SEQ ID NO: 96049 - DNA, 72 bp, Homo sapiens
tttagtctttccatcaactgggtcccaatgtagaattcccaggggttggcaggcttttggacctgcaaatca

SEQ ID NO: 96050 - DNA, 72 bp, Homo sapiens
atcaactgggtcccaatgtagaattcccaggggttggcaggcttttggacctgcaaatcaggtatgtgaaat

SEQ ID NO: 96051 - DNA, 76 bp, Homo sapiens
tcccaatgtagaattcccaggggttggcaggcttttggacctgcaaatcaggtatgtgaaattcatatccaatctc

SEQ ID NO: 96052 - DNA, 69 bp, Homo sapiens
agttctaaaattcatttctatatcatacaaaagacaactcaggtcatttacctttaaaacaaatttctg

SEQ ID NO: 96053 - DNA, 70 bp, Homo sapiens
catttctatatcatacaaaagacaactcaggtcatttacctttaaaacaaatttctgtttatttttagca

SEQ ID NO: 96054 - DNA, 71 bp, Homo sapiens
tacaaaagacaactcaggtcatttacctttaaaacaaatttctgtttatttttagcatcattcagatctcc

SEQ ID NO: 96055 - DNA, 71 bp, Homo sapiens
caactcaggtcatttacctttaaaacaaatttctgtttatttttagcatcattcagatctccctgggtagc

SEQ ID NO: 96056 - DNA, 70 bp, Homo sapiens
catttacctttaaaacaaatttctgtttatttttagcatcattcagatctccctgggtagcttcgtacac

SEQ ID NO: 96057 - DNA, 71 bp, Homo sapiens
tttaaaacaaatttctgtttatttttagcatcattcagatctccctgggtagcttcgtacacctgggcaaa

SEQ ID NO: 96058 - DNA, 75 bp, Homo sapiens
tctgtttatttttagcatcattcagatctccctgggtagcttcgtacacctgggcaaaggctccttctccaagaa

SEQ ID NO: 96059 - DNA, 75 bp, Homo sapiens
ttatttttagcatcattcagatctccctgggtagcttcgtacacctgggcaaaggctccttctccaagaaggtga

SEQ ID NO: 96060 - DNA, 77 bp, Homo sapiens
atcattcagatctccctgggtagcttcgtacacctgggcaaaggctccttctccaagaaggtgatggacatagacca

SEQ ID NO: 96061 - DNA, 75 bp, Homo sapiens
atctccctgggtagcttcgtacacctgggcaaaggctccttctccaagaaggtgatggacatagaccagcttaga

SEQ ID NO: 96062 - DNA, 74 bp, Homo sapiens
ttcgtacacctgggcaaaggctccttctccaagaaggtgatggacatagaccagcttagaaccttagaagataa

SEQ ID NO: 96063 - DNA, 73 bp, Homo sapiens
tgggcaaaggctccttctccaagaaggtgatggacatagaccagcttagaaccttagaagataattgaaaatt

SEQ ID NO: 96064 - DNA, 71 bp, Homo sapiens
aaaggctccttctccaagaaggtgatggacatagaccagcttagaaccttagaagataattgaaaatttta

SEQ ID NO: 96065 - DNA, 71 bp, Homo sapiens
tcatagagaaacaagaatttaaagttatattatccaaataattcttacccaattgaaattcagtcttgggc

SEQ ID NO: 96066 - DNA, 72 bp, Homo sapiens
caagaatttaaagttatattatccaaataattcttacccaattgaaattcagtcttgggcttgatggctgga

SEQ ID NO: 96067 - DNA, 73 bp, Homo sapiens
agttatattatccaaataattcttacccaattgaaattcagtcttgggcttgatggctggaagtttacattgc

SEQ ID NO: 96068 - DNA, 74 bp, Homo sapiens
tatccaaataattcttacccaattgaaattcagtcttgggcttgatggctggaagtttacattgccattcaaaa

SEQ ID NO: 96069 - DNA, 72 bp, Homo sapiens
ataattcttacccaattgaaattcagtcttgggcttgatggctggaagtttacattgccattcaaaagtatt

SEQ ID NO: 96070 - DNA, 74 bp, Homo sapiens
aattgaaattcagtcttgggcttgatggctggaagtttacattgccattcaaaagtatttggataggaactcac

SEQ ID NO: 96071 - DNA, 74 bp, Homo sapiens
attcagtcttgggcttgatggctggaagtttacattgccattcaaaagtatttggataggaactcactggttta

SEQ ID NO: 96072 - DNA, 74 bp, Homo sapiens
ttgatggctggaagtttacattgccattcaaaagtatttggataggaactcactggtttagaaagcccagataa

SEQ ID NO: 96073 - DNA, 70 bp, Homo sapiens
tggaagtttacattgccattcaaaagtatttggataggaactcactggtttagaaagcccagataaaagt

SEQ ID NO: 96074 - DNA, 71 bp, Homo sapiens
attgccattcaaaagtatttggataggaactcactggtttagaaagcccagataaaagtttgaaaatcagc

SEQ ID NO: 96075 - DNA, 71 bp, Homo sapiens
aaagtatttggataggaactcactggtttagaaagcccagataaaagtttgaaaatcagcttatcatccca

SEQ ID NO: 96076 - DNA, 72 bp, Homo sapiens
tttggataggaactcactggtttagaaagcccagataaaagtttgaaaatcagcttatcatcccatgggttc

SEQ ID NO: 96077 - DNA, 72 bp, Homo sapiens
aactcactggtttagaaagcccagataaaagtttgaaaatcagcttatcatcccatgggttcccaacaatga

SEQ ID NO: 96078 - DNA, 71 bp, Homo sapiens
tttagaaagcccagataaaagtttgaaaatcagcttatcatcccatgggttcccaacaatgaagtcttaaa

SEQ ID NO: 96079 - DNA, 72 bp, Homo sapiens
ccagataaaagtttgaaaatcagcttatcatcccatgggttcccaacaatgaagtcttaaaggaatgagaaa

SEQ ID NO: 96080 - DNA, 69 bp, Homo sapiens
gtttgaaaatcagcttatcatcccatgggttcccaacaatgaagtcttaaaggaatgagaaaaaaaaaa

SEQ ID NO: 96081 - DNA, 80 bp, Homo sapiens
atgctcctgtcctgattcaagggcataacaaagagtgagtgttcgtacttggagcatcaacagtcccaagtgaactcatc

SEQ ID NO: 96082 - DNA, 82 bp, Homo sapiens
tgtcctgattcaagggcataacaaagagtgagtgttcgtacttggagcatcaacagtcccaagtgaactcatctgcatccat

SEQ ID NO: 96083 - DNA, 81 bp, Homo sapiens
aagggcataacaaagagtgagtgttcgtacttggagcatcaacagtcccaagtgaactcatctgcatccattctgcttgga

SEQ ID NO: 96084 - DNA, 83 bp, Homo sapiens
acaaagagtgagtgttcgtacttggagcatcaacagtcccaagtgaactcatctgcatccattctgcttggagcccagcaata

SEQ ID NO: 96085 - DNA, 86 bp, Homo sapiens
tgttcgtacttggagcatcaacagtcccaagtgaactcatctgcatccattctgcttggagcccagcaatagcatctggtggatct

SEQ ID NO: 96086 - DNA, 90 bp, Homo sapiens
cttggagcatcaacagtcccaagtgaactcatctgcatccattctgcttggagcccagcaatagcatctggtggatcttctgcaatggca

SEQ ID NO: 96087 - DNA, 88 bp, Homo sapiens
aacagtcccaagtgaactcatctgcatccattctgcttggagcccagcaatagcatctggtggatcttctgcaatggcagcgtcagtg

SEQ ID NO: 96088 - DNA, 93 bp, Homo sapiens
aagtgaactcatctgcatccattctgcttggagcccagcaatagcatctggtggatcttctgcaatggcagcgtcagtgtctgtgagtctgca

SEQ ID NO: 96089 - DNA, 92 bp, Homo sapiens
atctgcatccattctgcttggagcccagcaatagcatctggtggatcttctgcaatggcagcgtcagtgtctgtgagtctgcaagcctcaac

SEQ ID NO: 96090 - DNA, 88 bp, Homo sapiens
attctgcttggagcccagcaatagcatctggtggatcttctgcaatggcagcgtcagtgtctgtgagtctgcaagcctcaacgcccaa

SEQ ID NO: 96091 - DNA, 89 bp, Homo sapiens
agcccagcaatagcatctggtggatcttctgcaatggcagcgtcagtgtctgtgagtctgcaagcctcaacgcccaactctgcctcaca

SEQ ID NO: 96092 - DNA, 87 bp, Homo sapiens
tagcatctggtggatcttctgcaatggcagcgtcagtgtctgtgagtctgcaagcctcaacgcccaactctgcctcacaggtaagta

SEQ ID NO: 96093 - DNA, 81 bp, Homo sapiens
atcttctgcaatggcagcgtcagtgtctgtgagtctgcaagcctcaacgcccaactctgcctcacaggtaagtaccccacc

SEQ ID NO: 96094 - DNA, 82 bp, Homo sapiens
aatggcagcgtcagtgtctgtgagtctgcaagcctcaacgcccaactctgcctcacaggtaagtaccccacctgcagcaggc

SEQ ID NO: 96095 - DNA, 82 bp, Homo sapiens
agtgtctgtgagtctgcaagcctcaacgcccaactctgcctcacaggtaagtaccccacctgcagcaggctggctcagacga

SEQ ID NO: 96096 - DNA, 81 bp, Homo sapiens
tgtgagtctgcaagcctcaacgcccaactctgcctcacaggtaagtaccccacctgcagcaggctggctcagacgaagtaa

SEQ ID NO: 96097 - DNA, 79 bp, Homo sapiens
cctcaacgcccaactctgcctcacaggtaagtaccccacctgcagcaggctggctcagacgaagtaaggatgctgaata

SEQ ID NO: 96098 - DNA, 83 bp, Homo sapiens
caactctgcctcacaggtaagtaccccacctgcagcaggctggctcagacgaagtaaggatgctgaatacatgtgagacgaca

SEQ ID NO: 96099 - DNA, 81 bp, Homo sapiens
tcacaggtaagtaccccacctgcagcaggctggctcagacgaagtaaggatgctgaatacatgtgagacgacaaggcctgt

SEQ ID NO: 96100 - DNA, 79 bp, Homo sapiens
gtaagtaccccacctgcagcaggctggctcagacgaagtaaggatgctgaatacatgtgagacgacaaggcctgttttg

SEQ ID NO: 96101 - DNA, 81 bp, Homo sapiens
tgcagcaggctggctcagacgaagtaaggatgctgaatacatgtgagacgacaaggcctgttttgggcttttctcttgaat

SEQ ID NO: 96102 - DNA, 78 bp, Homo sapiens
tggctcagacgaagtaaggatgctgaatacatgtgagacgacaaggcctgttttgggcttttctcttgaattggactg

SEQ ID NO: 96103 - DNA, 75 bp, Homo sapiens
agacgaagtaaggatgctgaatacatgtgagacgacaaggcctgttttgggcttttctcttgaattggactggac

SEQ ID NO: 96104 - DNA, 76 bp, Homo sapiens
tgctgaatacatgtgagacgacaaggcctgttttgggcttttctcttgaattggactggacgtgtgaaaggaataa

SEQ ID NO: 96105 - DNA, 72 bp, Homo sapiens
aatacatgtgagacgacaaggcctgttttgggcttttctcttgaattggactggacgtgtgaaaggaataaa

SEQ ID NO: 96106 - DNA, 67 bp, Homo sapiens
acaaggcctgttttgggcttttctcttgaattggactggacgtgtgaaaggaataaagaaaccaaaa

SEQ ID NO: 96107 - DNA, 71 bp, Homo sapiens
aatgttagaatgaaaatgaagagaatggcagaaccaaataaaccctcacaatacctgaattttccatccct

SEQ ID NO: 96108 - DNA, 71 bp, Homo sapiens
aaaatgaagagaatggcagaaccaaataaaccctcacaatacctgaattttccatcccttgaaggcaccac

SEQ ID NO: 96109 - DNA, 71 bp, Homo sapiens
agaatggcagaaccaaataaaccctcacaatacctgaattttccatcccttgaaggcaccaccatgttttc

SEQ ID NO: 96110 - DNA, 70 bp, Homo sapiens
agaaccaaataaaccctcacaatacctgaattttccatcccttgaaggcaccaccatgttttcctcacaa

SEQ ID NO: 96111 - DNA, 71 bp, Homo sapiens
ataaaccctcacaatacctgaattttccatcccttgaaggcaccaccatgttttcctcacaagaatccaaa

SEQ ID NO: 96112 - DNA, 71 bp, Homo sapiens
aatacctgaattttccatcccttgaaggcaccaccatgttttcctcacaagaatccaaagtcgcctgggta

SEQ ID NO: 96113 - DNA, 70 bp, Homo sapiens
attttccatcccttgaaggcaccaccatgttttcctcacaagaatccaaagtcgcctgggtacactgttt

SEQ ID NO: 96114 - DNA, 73 bp, Homo sapiens
ttgaaggcaccaccatgttttcctcacaagaatccaaagtcgcctgggtacactgttttgctaccacattttc

SEQ ID NO: 96115 - DNA, 73 bp, Homo sapiens
ccatgttttcctcacaagaatccaaagtcgcctgggtacactgttttgctaccacattttctgaaagattcaa

SEQ ID NO: 96116 - DNA, 71 bp, Homo sapiens
ttttcctcacaagaatccaaagtcgcctgggtacactgttttgctaccacattttctgaaagattcaaaaa

SEQ ID NO: 96117 - DNA, 71 bp, Homo sapiens
aagaatccaaagtcgcctgggtacactgttttgctaccacattttctgaaagattcaaaaattagagacaa

SEQ ID NO: 96118 - DNA, 75 bp, Homo sapiens
aaagaatcaaagttggcagaagacagacactaaaacagtgtaacacacacctttatcttctaaaatgtgcactga

SEQ ID NO: 96119 - DNA, 76 bp, Homo sapiens
agttggcagaagacagacactaaaacagtgtaacacacacctttatcttctaaaatgtgcactgactccactggaa

SEQ ID NO: 96120 - DNA, 76 bp, Homo sapiens
acagacactaaaacagtgtaacacacacctttatcttctaaaatgtgcactgactccactggaagcttgtggaatg

SEQ ID NO: 96121 - DNA, 76 bp, Homo sapiens
taaaacagtgtaacacacacctttatcttctaaaatgtgcactgactccactggaagcttgtggaatggtgtagac

SEQ ID NO: 96122 - DNA, 79 bp, Homo sapiens
gtaacacacacctttatcttctaaaatgtgcactgactccactggaagcttgtggaatggtgtagacgcaagttgtgca

SEQ ID NO: 96123 - DNA, 83 bp, Homo sapiens
tttatcttctaaaatgtgcactgactccactggaagcttgtggaatggtgtagacgcaagttgtgcagcagatgtgaagtctc

SEQ ID NO: 96124 - DNA, 83 bp, Homo sapiens
taaaatgtgcactgactccactggaagcttgtggaatggtgtagacgcaagttgtgcagcagatgtgaagtctcctgggctct

SEQ ID NO: 96125 - DNA, 81 bp, Homo sapiens
actgactccactggaagcttgtggaatggtgtagacgcaagttgtgcagcagatgtgaagtctcctgggctcttaggactg

SEQ ID NO: 96126 - DNA, 78 bp, Homo sapiens
aagcttgtggaatggtgtagacgcaagttgtgcagcagatgtgaagtctcctgggctcttaggactgggtgccagggt

SEQ ID NO: 96127 - DNA, 78 bp, Homo sapiens
tgtggaatggtgtagacgcaagttgtgcagcagatgtgaagtctcctgggctcttaggactgggtgccagggttttgt

SEQ ID NO: 96128 - DNA, 80 bp, Homo sapiens
tgtagacgcaagttgtgcagcagatgtgaagtctcctgggctcttaggactgggtgccagggttttgttgcagcgaatac

SEQ ID NO: 96129 - DNA, 80 bp, Homo sapiens
tgtgcagcagatgtgaagtctcctgggctcttaggactgggtgccagggttttgttgcagcgaataccccatacagttga

SEQ ID NO: 96130 - DNA, 76 bp, Homo sapiens
atgtgaagtctcctgggctcttaggactgggtgccagggttttgttgcagcgaataccccatacagttgagtcatc

SEQ ID NO: 96131 - DNA, 74 bp, Homo sapiens
tctcctgggctcttaggactgggtgccagggttttgttgcagcgaataccccatacagttgagtcatccaaaaa

SEQ ID NO: 96132 - DNA, 77 bp, Homo sapiens
tcttaggactgggtgccagggttttgttgcagcgaataccccatacagttgagtcatccaaaaactcttcagcatga

SEQ ID NO: 96133 - DNA, 78 bp, Homo sapiens
tgccagggttttgttgcagcgaataccccatacagttgagtcatccaaaaactcttcagcatgaggcacttcctccta

SEQ ID NO: 96134 - DNA, 78 bp, Homo sapiens
ttttgttgcagcgaataccccatacagttgagtcatccaaaaactcttcagcatgaggcacttcctcctataacagaa

SEQ ID NO: 96135 - DNA, 77 bp, Homo sapiens
aataccccatacagttgagtcatccaaaaactcttcagcatgaggcacttcctcctataacagaagatgaaatgaaa

SEQ ID NO: 96136 - DNA, 76 bp, Homo sapiens
cccatacagttgagtcatccaaaaactcttcagcatgaggcacttcctcctataacagaagatgaaatgaaaaaaa

SEQ ID NO: 96137 - DNA, 66 bp, Homo sapiens
gtagaataaagcggatgggttgtaggacccatttcatagataaaacaggtttgtttacctttggtt

SEQ ID NO: 96138 - DNA, 66 bp, Homo sapiens
aagcggatgggttgtaggacccatttcatagataaaacaggtttgtttacctttggttttgaagga

SEQ ID NO: 96139 - DNA, 70 bp, Homo sapiens
gttgtaggacccatttcatagataaaacaggtttgtttacctttggttttgaaggaagtctgctgacaga

SEQ ID NO: 96140 - DNA, 70 bp, Homo sapiens
atttcatagataaaacaggtttgtttacctttggttttgaaggaagtctgctgacagagcgttctccaaa

SEQ ID NO: 96141 - DNA, 68 bp, Homo sapiens
ataaaacaggtttgtttacctttggttttgaaggaagtctgctgacagagcgttctccaaaggtcctg

SEQ ID NO: 96142 - DNA, 70 bp, Homo sapiens
tttacctttggttttgaaggaagtctgctgacagagcgttctccaaaggtcctggctcctgtgggtttat

SEQ ID NO: 96143 - DNA, 70 bp, Homo sapiens
ctttggttttgaaggaagtctgctgacagagcgttctccaaaggtcctggctcctgtgggtttattttta

SEQ ID NO: 96144 - DNA, 72 bp, Homo sapiens
aagtctgctgacagagcgttctccaaaggtcctggctcctgtgggtttatttttaggctgtggtaatctaag

SEQ ID NO: 96145 - DNA, 69 bp, Homo sapiens
acagagcgttctccaaaggtcctggctcctgtgggtttatttttaggctgtggtaatctaaggaaagat

SEQ ID NO: 96146 - DNA, 69 bp, Homo sapiens
ttctccaaaggtcctggctcctgtgggtttatttttaggctgtggtaatctaaggaaagatttgctaaa

SEQ ID NO: 96147 - DNA, 68 bp, Homo sapiens
aaggtcctggctcctgtgggtttatttttaggctgtggtaatctaaggaaagatttgctaaattataa

SEQ ID NO: 96148 - DNA, 67 bp, Homo sapiens
ctcctgtgggtttatttttaggctgtggtaatctaaggaaagatttgctaaattataaatagtaaaa

SEQ ID NO: 96149 - DNA, 68 bp, Homo sapiens
gtcccagagaaaactcggcagcatcccattaactagatggtatttttttacccataattttctttgtt

SEQ ID NO: 96150 - DNA, 71 bp, Homo sapiens
ctcggcagcatcccattaactagatggtatttttttacccataattttctttgtttccatcttcaaacaca

SEQ ID NO: 96151 - DNA, 70 bp, Homo sapiens
gcatcccattaactagatggtatttttttacccataattttctttgtttccatcttcaaacacatgaaaa

SEQ ID NO: 96152 - DNA, 72 bp, Homo sapiens
gatggtatttttttacccataattttctttgtttccatcttcaaacacatgaaaagcagatgacaaagaaga

SEQ ID NO: 96153 - DNA, 76 bp, Homo sapiens
ttttacccataattttctttgtttccatcttcaaacacatgaaaagcagatgacaaagaagagatgatcttattga

SEQ ID NO: 96154 - DNA, 76 bp, Homo sapiens
cccataattttctttgtttccatcttcaaacacatgaaaagcagatgacaaagaagagatgatcttattgactccc

SEQ ID NO: 96155 - DNA, 79 bp, Homo sapiens
tttgtttccatcttcaaacacatgaaaagcagatgacaaagaagagatgatcttattgactccccaagccccagatgac

SEQ ID NO: 96156 - DNA, 78 bp, Homo sapiens
ttcaaacacatgaaaagcagatgacaaagaagagatgatcttattgactccccaagccccagatgaccttacattttc

SEQ ID NO: 96157 - DNA, 80 bp, Homo sapiens
tgaaaagcagatgacaaagaagagatgatcttattgactccccaagccccagatgaccttacattttctgcaacagaata

SEQ ID NO: 96158 - DNA, 76 bp, Homo sapiens
agatgacaaagaagagatgatcttattgactccccaagccccagatgaccttacattttctgcaacagaataaaaa

SEQ ID NO: 96159 - DNA, 77 bp, Homo sapiens
gagatgatcttattgactccccaagccccagatgaccttacattttctgcaacagaataaaaaatagcatctaatta

SEQ ID NO: 96160 - DNA, 75 bp, Homo sapiens
tcttattgactccccaagccccagatgaccttacattttctgcaacagaataaaaaatagcatctaattattgta

SEQ ID NO: 96161 - DNA, 75 bp, Homo sapiens
gataaccacctataatgctatgcacttagtagcttttaaatagttattactttgaaactgggcttcaaatgcatc

SEQ ID NO: 96162 - DNA, 77 bp, Homo sapiens
atgctatgcacttagtagcttttaaatagttattactttgaaactgggcttcaaatgcatcttcattttgatctaga

SEQ ID NO: 96163 - DNA, 76 bp, Homo sapiens
gcacttagtagcttttaaatagttattactttgaaactgggcttcaaatgcatcttcattttgatctagagattgc

SEQ ID NO: 96164 - DNA, 78 bp, Homo sapiens
tttaaatagttattactttgaaactgggcttcaaatgcatcttcattttgatctagagattgccattcatctttgtca

SEQ ID NO: 96165 - DNA, 82 bp, Homo sapiens
ttattactttgaaactgggcttcaaatgcatcttcattttgatctagagattgccattcatctttgtcatcagaaatatcag

SEQ ID NO: 96166 - DNA, 83 bp, Homo sapiens
tttgaaactgggcttcaaatgcatcttcattttgatctagagattgccattcatctttgtcatcagaaatatcaggaagtgta

SEQ ID NO: 96167 - DNA, 85 bp, Homo sapiens
tcaaatgcatcttcattttgatctagagattgccattcatctttgtcatcagaaatatcaggaagtgtaggagcctgaaacatat

SEQ ID NO: 96168 - DNA, 86 bp, Homo sapiens
tcttcattttgatctagagattgccattcatctttgtcatcagaaatatcaggaagtgtaggagcctgaaacatattcatgatgaa

SEQ ID NO: 96169 - DNA, 82 bp, Homo sapiens
atctagagattgccattcatctttgtcatcagaaatatcaggaagtgtaggagcctgaaacatattcatgatgaaaccttaa

SEQ ID NO: 96170 - DNA, 80 bp, Homo sapiens
agattgccattcatctttgtcatcagaaatatcaggaagtgtaggagcctgaaacatattcatgatgaaaccttaaagaa

SEQ ID NO: 96171 - DNA, 77 bp, Homo sapiens
catctttgtcatcagaaatatcaggaagtgtaggagcctgaaacatattcatgatgaaaccttaaagaacaaaaaga

SEQ ID NO: 96172 - DNA, 75 bp, Homo sapiens
catcagaaatatcaggaagtgtaggagcctgaaacatattcatgatgaaaccttaaagaacaaaaagaataattg

SEQ ID NO: 96173 - DNA, 71 bp, Homo sapiens
caggaagtgtaggagcctgaaacatattcatgatgaaaccttaaagaacaaaaagaataattgtaaacagg

SEQ ID NO: 96174 - DNA, 76 bp, Homo sapiens
tttcattaacttgtcatcaggtgctacacactcagataaaatactttacctaatgcttcttttgtgtgcacggtgg

SEQ ID NO: 96175 - DNA, 80 bp, Homo sapiens
acttgtcatcaggtgctacacactcagataaaatactttacctaatgcttcttttgtgtgcacggtgggtgatggctgca

SEQ ID NO: 96176 - DNA, 77 bp, Homo sapiens
aggtgctacacactcagataaaatactttacctaatgcttcttttgtgtgcacggtgggtgatggctgcactttgga

SEQ ID NO: 96177 - DNA, 76 bp, Homo sapiens
agataaaatactttacctaatgcttcttttgtgtgcacggtgggtgatggctgcactttggatggcgttgcctgaa

SEQ ID NO: 96178 - DNA, 75 bp, Homo sapiens
aaatactttacctaatgcttcttttgtgtgcacggtgggtgatggctgcactttggatggcgttgcctgaaccat

SEQ ID NO: 96179 - DNA, 80 bp, Homo sapiens
taatgcttcttttgtgtgcacggtgggtgatggctgcactttggatggcgttgcctgaaccattcccagtgatgtgtttg

SEQ ID NO: 96180 - DNA, 79 bp, Homo sapiens
ttttgtgtgcacggtgggtgatggctgcactttggatggcgttgcctgaaccattcccagtgatgtgtttggagttgtg

SEQ ID NO: 96181 - DNA, 78 bp, Homo sapiens
tgggtgatggctgcactttggatggcgttgcctgaaccattcccagtgatgtgtttggagttgtgtgaaaagaacttg

SEQ ID NO: 96182 - DNA, 77 bp, Homo sapiens
ctgcactttggatggcgttgcctgaaccattcccagtgatgtgtttggagttgtgtgaaaagaacttgtgttggcaa

SEQ ID NO: 96183 - DNA, 75 bp, Homo sapiens
ttggatggcgttgcctgaaccattcccagtgatgtgtttggagttgtgtgaaaagaacttgtgttggcaacctta

SEQ ID NO: 96184 - DNA, 76 bp, Homo sapiens
ttgcctgaaccattcccagtgatgtgtttggagttgtgtgaaaagaacttgtgttggcaaccttatgtgtttcaca

SEQ ID NO: 96185 - DNA, 74 bp, Homo sapiens
ttcccagtgatgtgtttggagttgtgtgaaaagaacttgtgttggcaaccttatgtgtttcacaccctagcaaa

SEQ ID NO: 96186 - DNA, 73 bp, Homo sapiens
atgtgtttggagttgtgtgaaaagaacttgtgttggcaaccttatgtgtttcacaccctagcaaagaaatgga

SEQ ID NO: 96187 - DNA, 72 bp, Homo sapiens
agttgtgtgaaaagaacttgtgttggcaaccttatgtgtttcacaccctagcaaagaaatggagacaaaatg

SEQ ID NO: 96188 - DNA, 73 bp, Homo sapiens
aaagaacttgtgttggcaaccttatgtgtttcacaccctagcaaagaaatggagacaaaatgtggtatcagta

SEQ ID NO: 96189 - DNA, 75 bp, Homo sapiens
gccacaaaatacacctctgagtgatacagaggaatctggacagaaacacatttattataattaaacattaccttc

SEQ ID NO: 96190 - DNA, 78 bp, Homo sapiens
tacacctctgagtgatacagaggaatctggacagaaacacatttattataattaaacattaccttctttgatctctgc

SEQ ID NO: 96191 - DNA, 77 bp, Homo sapiens
agtgatacagaggaatctggacagaaacacatttattataattaaacattaccttctttgatctctgctccactctg

SEQ ID NO: 96192 - DNA, 77 bp, Homo sapiens
aatctggacagaaacacatttattataattaaacattaccttctttgatctctgctccactctgtggcttgaattca

SEQ ID NO: 96193 - DNA, 77 bp, Homo sapiens
gaaacacatttattataattaaacattaccttctttgatctctgctccactctgtggcttgaattcatgagtactct

SEQ ID NO: 96194 - DNA, 80 bp, Homo sapiens
ttattataattaaacattaccttctttgatctctgctccactctgtggcttgaattcatgagtactcttattcacacatc

SEQ ID NO: 96195 - DNA, 81 bp, Homo sapiens
attaaacattaccttctttgatctctgctccactctgtggcttgaattcatgagtactcttattcacacatctggaagaga

SEQ ID NO: 96196 - DNA, 81 bp, Homo sapiens
accttctttgatctctgctccactctgtggcttgaattcatgagtactcttattcacacatctggaagagaaaactcttga

SEQ ID NO: 96197 - DNA, 83 bp, Homo sapiens
tgctccactctgtggcttgaattcatgagtactcttattcacacatctggaagagaaaactcttgagacacactagagaataa

SEQ ID NO: 96198 - DNA, 79 bp, Homo sapiens
actctgtggcttgaattcatgagtactcttattcacacatctggaagagaaaactcttgagacacactagagaataaaa

SEQ ID NO: 96199 - DNA, 81 bp, Homo sapiens
ttgaattcatgagtactcttattcacacatctggaagagaaaactcttgagacacactagagaataaaatgcttgatctag

SEQ ID NO: 96200 - DNA, 79 bp, Homo sapiens
agtactcttattcacacatctggaagagaaaactcttgagacacactagagaataaaatgcttgatctaggctgggtgc

SEQ ID NO: 96201 - DNA, 74 bp, Homo sapiens
tagcatttaaaagtaatggttatcaagaaagaaaaaaatgacacacaagccatttatatcacactttaagtgca

SEQ ID NO: 96202 - DNA, 71 bp, Homo sapiens
aaagtaatggttatcaagaaagaaaaaaatgacacacaagccatttatatcacactttaagtgcacttggg

SEQ ID NO: 96203 - DNA, 75 bp, Homo sapiens
tatcaagaaagaaaaaaatgacacacaagccatttatatcacactttaagtgcacttggggtagtggatctaaca

SEQ ID NO: 96204 - DNA, 75 bp, Homo sapiens
aaaaatgacacacaagccatttatatcacactttaagtgcacttggggtagtggatctaacatgtctatttaaca

SEQ ID NO: 96205 - DNA, 76 bp, Homo sapiens
acacaagccatttatatcacactttaagtgcacttggggtagtggatctaacatgtctatttaacattgctggagt

SEQ ID NO: 96206 - DNA, 75 bp, Homo sapiens
ttatatcacactttaagtgcacttggggtagtggatctaacatgtctatttaacattgctggagttcccttaata

SEQ ID NO: 96207 - DNA, 71 bp, Homo sapiens
acactttaagtgcacttggggtagtggatctaacatgtctatttaacattgctggagttcccttaataaac

SEQ ID NO: 96208 - DNA, 68 bp, Homo sapiens
acttggggtagtggatctaacatgtctatttaacattgctggagttcccttaataaaccctgttaagg

SEQ ID NO: 96209 - DNA, 69 bp, Homo sapiens
gggtagtggatctaacatgtctatttaacattgctggagttcccttaataaaccctgttaaggtataaa

SEQ ID NO: 96210 - DNA, 71 bp, Homo sapiens
catgtctatttaacattgctggagttcccttaataaaccctgttaaggtataaagtaaaacatgcaaagca

SEQ ID NO: 96211 - DNA, 68 bp, Homo sapiens
ctatttaacattgctggagttcccttaataaaccctgttaaggtataaagtaaaacatgcaaagcatt

SEQ ID NO: 96212 - DNA, 66 bp, Homo sapiens
ttgctggagttcccttaataaaccctgttaaggtataaagtaaaacatgcaaagcatttttaattt

SEQ ID NO: 96213 - DNA, 64 bp, Homo sapiens
cccttaataaaccctgttaaggtataaagtaaaacatgcaaagcatttttaattttacaaatcc

SEQ ID NO: 96214 - DNA, 66 bp, Homo sapiens
cctgttaaggtataaagtaaaacatgcaaagcatttttaattttacaaatccctataaaaacgagc

SEQ ID NO: 96215 - DNA, 68 bp, Homo sapiens
taaagtaaaacatgcaaagcatttttaattttacaaatccctataaaaacgagctaaaagagagccaa

SEQ ID NO: 96216 - DNA, 67 bp, Homo sapiens
gcatttttaattttacaaatccctataaaaacgagctaaaagagagccaaaatgactggaggtaaaa

SEQ ID NO: 96217 - DNA, 66 bp, Homo sapiens
aattttacaaatccctataaaaacgagctaaaagagagccaaaatgactggaggtaaaaatgtaac

SEQ ID NO: 96218 - DNA, 69 bp, Homo sapiens
tccctataaaaacgagctaaaagagagccaaaatgactggaggtaaaaatgtaacttaaacgagtgata

SEQ ID NO: 96219 - DNA, 70 bp, Homo sapiens
aaacgagctaaaagagagccaaaatgactggaggtaaaaatgtaacttaaacgagtgatatgacattaac

SEQ ID NO: 96220 - DNA, 73 bp, Homo sapiens
gagagccaaaatgactggaggtaaaaatgtaacttaaacgagtgatatgacattaactataatttctgaaatc

SEQ ID NO: 96221 - DNA, 72 bp, Homo sapiens
caaaatgactggaggtaaaaatgtaacttaaacgagtgatatgacattaactataatttctgaaatctggaa

SEQ ID NO: 96222 - DNA, 69 bp, Homo sapiens
ggaggtaaaaatgtaacttaaacgagtgatatgacattaactataatttctgaaatctggaaaaatccc

SEQ ID NO: 96223 - DNA, 70 bp, Homo sapiens
atgtaacttaaacgagtgatatgacattaactataatttctgaaatctggaaaaatccctcaaaattggg

SEQ ID NO: 96224 - DNA, 69 bp, Homo sapiens
cgagtgatatgacattaactataatttctgaaatctggaaaaatccctcaaaattggggtaaaaacttc

SEQ ID NO: 96225 - DNA, 69 bp, Homo sapiens
gacattaactataatttctgaaatctggaaaaatccctcaaaattggggtaaaaacttccagtgcagag

SEQ ID NO: 96226 - DNA, 69 bp, Homo sapiens
atttctgaaatctggaaaaatccctcaaaattggggtaaaaacttccagtgcagaggtacattttgaga

SEQ ID NO: 96227 - DNA, 69 bp, Homo sapiens
aaatctggaaaaatccctcaaaattggggtaaaaacttccagtgcagaggtacattttgagagacagaa

SEQ ID NO: 96228 - DNA, 71 bp, Homo sapiens
aaaattggggtaaaaacttccagtgcagaggtacattttgagagacagaatcatgtgtattaatcccaaac

SEQ ID NO: 96229 - DNA, 78 bp, Homo sapiens
taaaaacttccagtgcagaggtacattttgagagacagaatcatgtgtattaatcccaaactgctctctatgggaaga

SEQ ID NO: 96230 - DNA, 81 bp, Homo sapiens
agtgcagaggtacattttgagagacagaatcatgtgtattaatcccaaactgctctctatgggaagacagaaggaatatga

SEQ ID NO: 96231 - DNA, 80 bp, Homo sapiens
acagaatcatgtgtattaatcccaaactgctctctatgggaagacagaaggaatatgagaacacatgtcaagtaattgtc

SEQ ID NO: 96232 - DNA, 81 bp, Homo sapiens
atcatgtgtattaatcccaaactgctctctatgggaagacagaaggaatatgagaacacatgtcaagtaattgtctagaca

SEQ ID NO: 96233 - DNA, 80 bp, Homo sapiens
tctctatgggaagacagaaggaatatgagaacacatgtcaagtaattgtctagacagttatgatccctgtaggtattcaa

SEQ ID NO: 96234 - DNA, 79 bp, Homo sapiens
aagacagaaggaatatgagaacacatgtcaagtaattgtctagacagttatgatccctgtaggtattcaatcaaagcca

SEQ ID NO: 96235 - DNA, 80 bp, Homo sapiens
aaggaatatgagaacacatgtcaagtaattgtctagacagttatgatccctgtaggtattcaatcaaagccagtgagcaa

SEQ ID NO: 96236 - DNA, 76 bp, Homo sapiens
aacacatgtcaagtaattgtctagacagttatgatccctgtaggtattcaatcaaagccagtgagcaaagggaatt

SEQ ID NO: 96237 - DNA, 74 bp, Homo sapiens
aagtaattgtctagacagttatgatccctgtaggtattcaatcaaagccagtgagcaaagggaattttagccta

SEQ ID NO: 96238 - DNA, 77 bp, Homo sapiens
tctagacagttatgatccctgtaggtattcaatcaaagccagtgagcaaagggaattttagcctaacagctgtatat

SEQ ID NO: 96239 - DNA, 76 bp, Homo sapiens
agttatgatccctgtaggtattcaatcaaagccagtgagcaaagggaattttagcctaacagctgtatattcttca

SEQ ID NO: 96240 - DNA, 76 bp, Homo sapiens
tgtaggtattcaatcaaagccagtgagcaaagggaattttagcctaacagctgtatattcttcagttacaaagtga

SEQ ID NO: 96241 - DNA, 75 bp, Homo sapiens
tgagcaaagggaattttagcctaacagctgtatattcttcagttacaaagtgactgttgactttcaggtactgaa

SEQ ID NO: 96242 - DNA, 71 bp, Homo sapiens
aaagggaattttagcctaacagctgtatattcttcagttacaaagtgactgttgactttcaggtactgaaa

SEQ ID NO: 96243 - DNA, 73 bp, Homo sapiens
gcctaacagctgtatattcttcagttacaaagtgactgttgactttcaggtactgaaaatttttaattcacga

SEQ ID NO: 96244 - DNA, 71 bp, Homo sapiens
agctgtatattcttcagttacaaagtgactgttgactttcaggtactgaaaatttttaattcacgaaagta

SEQ ID NO: 96245 - DNA, 68 bp, Homo sapiens
caaagtgactgttgactttcaggtactgaaaatttttaattcacgaaagtataaaataaatattctaa

SEQ ID NO: 96246 - DNA, 69 bp, Homo sapiens
ttgactttcaggtactgaaaatttttaattcacgaaagtataaaataaatattctaaaagaagcatgga

SEQ ID NO: 96247 - DNA, 69 bp, Homo sapiens
ttaattcacgaaagtataaaataaatattctaaaagaagcatggaataagtaagcctaaaggattggga

SEQ ID NO: 96248 - DNA, 71 bp, Homo sapiens
tcacgaaagtataaaataaatattctaaaagaagcatggaataagtaagcctaaaggattgggagcaatgt

SEQ ID NO: 96249 - DNA, 71 bp, Homo sapiens
ataaatattctaaaagaagcatggaataagtaagcctaaaggattgggagcaatgttttgccacttgcttt

SEQ ID NO: 96250 - DNA, 73 bp, Homo sapiens
tattctaaaagaagcatggaataagtaagcctaaaggattgggagcaatgttttgccacttgctttttcaaca

SEQ ID NO: 96251 - DNA, 72 bp, Homo sapiens
atggaataagtaagcctaaaggattgggagcaatgttttgccacttgctttttcaacaacatacctatctaa

SEQ ID NO: 96252 - DNA, 70 bp, Homo sapiens
ataagtaagcctaaaggattgggagcaatgttttgccacttgctttttcaacaacatacctatctaaaaa

SEQ ID NO: 96253 - DNA, 71 bp, Homo sapiens
ctaaaggattgggagcaatgttttgccacttgctttttcaacaacatacctatctaaaaataaaaggcaga

SEQ ID NO: 96254 - DNA, 74 bp, Homo sapiens
gggagcaatgttttgccacttgctttttcaacaacatacctatctaaaaataaaaggcagacatcattcatctt

SEQ ID NO: 96255 - DNA, 74 bp, Homo sapiens
gccacttgctttttcaacaacatacctatctaaaaataaaaggcagacatcattcatcttttacatactgttcc

SEQ ID NO: 96256 - DNA, 78 bp, Homo sapiens
tttcaacaacatacctatctaaaaataaaaggcagacatcattcatcttttacatactgttcctgataatgcaggtca

SEQ ID NO: 96257 - DNA, 78 bp, Homo sapiens
acatacctatctaaaaataaaaggcagacatcattcatcttttacatactgttcctgataatgcaggtcatgtaaaga

SEQ ID NO: 96258 - DNA, 76 bp, Homo sapiens
aaaaataaaaggcagacatcattcatcttttacatactgttcctgataatgcaggtcatgtaaagaaggtgacagg

SEQ ID NO: 96259 - DNA, 85 bp, Homo sapiens
atcattcatcttttacatactgttcctgataatgcaggtcatgtaaagaaggtgacaggtgccactcacatcactgtgatctcta

SEQ ID NO: 96260 - DNA, 82 bp, Homo sapiens
ttttacatactgttcctgataatgcaggtcatgtaaagaaggtgacaggtgccactcacatcactgtgatctctaggactac

SEQ ID NO: 96261 - DNA, 83 bp, Homo sapiens
ctgttcctgataatgcaggtcatgtaaagaaggtgacaggtgccactcacatcactgtgatctctaggactaccttcagctta

SEQ ID NO: 96262 - DNA, 82 bp, Homo sapiens
atgtaaagaaggtgacaggtgccactcacatcactgtgatctctaggactaccttcagcttacccagcatctttgctggcca

SEQ ID NO: 96263 - DNA, 83 bp, Homo sapiens
aaggtgacaggtgccactcacatcactgtgatctctaggactaccttcagcttacccagcatctttgctggccactgcaaaca

SEQ ID NO: 96264 - DNA, 79 bp, Homo sapiens
tctaggactaccttcagcttacccagcatctttgctggccactgcaaacatggagtctgttactgtctgggctttcaaa

SEQ ID NO: 96265 - DNA, 78 bp, Homo sapiens
taccttcagcttacccagcatctttgctggccactgcaaacatggagtctgttactgtctgggctttcaaaggaacag

SEQ ID NO: 96266 - DNA, 78 bp, Homo sapiens
cttacccagcatctttgctggccactgcaaacatggagtctgttactgtctgggctttcaaaggaacaggaggagcaa

SEQ ID NO: 96267 - DNA, 80 bp, Homo sapiens
atctttgctggccactgcaaacatggagtctgttactgtctgggctttcaaaggaacaggaggagcaatgctctggctgg

SEQ ID NO: 96268 - DNA, 79 bp, Homo sapiens
actgcaaacatggagtctgttactgtctgggctttcaaaggaacaggaggagcaatgctctggctggtggctggggaca

SEQ ID NO: 96269 - DNA, 79 bp, Homo sapiens
tgttactgtctgggctttcaaaggaacaggaggagcaatgctctggctggtggctggggacaccaaagctgcagaaata

SEQ ID NO: 96270 - DNA, 79 bp, Homo sapiens
tttcaaaggaacaggaggagcaatgctctggctggtggctggggacaccaaagctgcagaaatagcatttgccaaagga

SEQ ID NO: 96271 - DNA, 79 bp, Homo sapiens
aacaggaggagcaatgctctggctggtggctggggacaccaaagctgcagaaatagcatttgccaaaggaggaacaaca

SEQ ID NO: 96272 - DNA, 78 bp, Homo sapiens
aggagcaatgctctggctggtggctggggacaccaaagctgcagaaatagcatttgccaaaggaggaacaacaggagg

SEQ ID NO: 96273 - DNA, 78 bp, Homo sapiens
tctggctggtggctggggacaccaaagctgcagaaatagcatttgccaaaggaggaacaacaggaggtgcctctcttg

SEQ ID NO: 96274 - DNA, 73 bp, Homo sapiens
tggggacaccaaagctgcagaaatagcatttgccaaaggaggaacaacaggaggtgcctctcttgggttcttt

SEQ ID NO: 96275 - DNA, 73 bp, Homo sapiens
accaaagctgcagaaatagcatttgccaaaggaggaacaacaggaggtgcctctcttgggttcttttccatgt

SEQ ID NO: 96276 - DNA, 73 bp, Homo sapiens
agaaatagcatttgccaaaggaggaacaacaggaggtgcctctcttgggttcttttccatgttcactggtgtc

SEQ ID NO: 96277 - DNA, 75 bp, Homo sapiens
ttgccaaaggaggaacaacaggaggtgcctctcttgggttcttttccatgttcactggtgtctgctgataggtta

SEQ ID NO: 96278 - DNA, 75 bp, Homo sapiens
aggaacaacaggaggtgcctctcttgggttcttttccatgttcactggtgtctgctgataggttactggaagaca

SEQ ID NO: 96279 - DNA, 78 bp, Homo sapiens
aggtgcctctcttgggttcttttccatgttcactggtgtctgctgataggttactggaagacatggcgctctcagttc

SEQ ID NO: 96280 - DNA, 80 bp, Homo sapiens
tctcttgggttcttttccatgttcactggtgtctgctgataggttactggaagacatggcgctctcagttcctgctggga

SEQ ID NO: 96281 - DNA, 80 bp, Homo sapiens
ttcttttccatgttcactggtgtctgctgataggttactggaagacatggcgctctcagttcctgctgggagcctacact

SEQ ID NO: 96282 - DNA, 81 bp, Homo sapiens
atgttcactggtgtctgctgataggttactggaagacatggcgctctcagttcctgctgggagcctacacttggccccata

SEQ ID NO: 96283 - DNA, 81 bp, Homo sapiens
tctgctgataggttactggaagacatggcgctctcagttcctgctgggagcctacacttggccccatacgtgctggattaa

SEQ ID NO: 96284 - DNA, 76 bp, Homo sapiens
aagacatggcgctctcagttcctgctgggagcctacacttggccccatacgtgctggattaacctttcatattaaa

SEQ ID NO: 96285 - DNA, 73 bp, Homo sapiens
ctctcagttcctgctgggagcctacacttggccccatacgtgctggattaacctttcatattaaacaaacaaa

SEQ ID NO: 96286 - DNA, 82 bp, Homo sapiens
attcctgctgctgggcacaggatgtgtcatgaggagcacaacatacctcggacctttcctgggaagcgggcagatcctcatg

SEQ ID NO: 96287 - DNA, 81 bp, Homo sapiens
ctgggcacaggatgtgtcatgaggagcacaacatacctcggacctttcctgggaagcgggcagatcctcatgggatgtctc

SEQ ID NO: 96288 - DNA, 80 bp, Homo sapiens
acaggatgtgtcatgaggagcacaacatacctcggacctttcctgggaagcgggcagatcctcatgggatgtctccacca

SEQ ID NO: 96289 - DNA, 79 bp, Homo sapiens
tgaggagcacaacatacctcggacctttcctgggaagcgggcagatcctcatgggatgtctccaccacctgatgcaact

SEQ ID NO: 96290 - DNA, 77 bp, Homo sapiens
aacatacctcggacctttcctgggaagcgggcagatcctcatgggatgtctccaccacctgatgcaacttcttatga

SEQ ID NO: 96291 - DNA, 78 bp, Homo sapiens
gacctttcctgggaagcgggcagatcctcatgggatgtctccaccacctgatgcaacttcttatgaagttcatccatt

SEQ ID NO: 96292 - DNA, 79 bp, Homo sapiens
ttcctgggaagcgggcagatcctcatgggatgtctccaccacctgatgcaacttcttatgaagttcatccattttctgt

SEQ ID NO: 96293 - DNA, 79 bp, Homo sapiens
cagatcctcatgggatgtctccaccacctgatgcaacttcttatgaagttcatccattttctgttttaatagctgttct

SEQ ID NO: 96294 - DNA, 76 bp, Homo sapiens
atgggatgtctccaccacctgatgcaacttcttatgaagttcatccattttctgttttaatagctgttcttcaaaa

SEQ ID NO: 96295 - DNA, 77 bp, Homo sapiens
tctccaccacctgatgcaacttcttatgaagttcatccattttctgttttaatagctgttcttcaaaagcatttgct

SEQ ID NO: 96296 - DNA, 75 bp, Homo sapiens
cctgatgcaacttcttatgaagttcatccattttctgttttaatagctgttcttcaaaagcatttgcttctttcc

SEQ ID NO: 96297 - DNA, 72 bp, Homo sapiens
acttcttatgaagttcatccattttctgttttaatagctgttcttcaaaagcatttgcttctttccttttca

SEQ ID NO: 96298 - DNA, 75 bp, Homo sapiens
catccattttctgttttaatagctgttcttcaaaagcatttgcttctttccttttcatataatgtctgtcttcat

SEQ ID NO: 96299 - DNA, 73 bp, Homo sapiens
tttctgttttaatagctgttcttcaaaagcatttgcttctttccttttcatataatgtctgtcttcatttact

SEQ ID NO: 96300 - DNA, 75 bp, Homo sapiens
tagctgttcttcaaaagcatttgcttctttccttttcatataatgtctgtcttcatttactttaggaaagataga

SEQ ID NO: 96301 - DNA, 72 bp, Homo sapiens
cttcaaaagcatttgcttctttccttttcatataatgtctgtcttcatttactttaggaaagatagaaatgg

SEQ ID NO: 96302 - DNA, 76 bp, Homo sapiens
gcatttgcttctttccttttcatataatgtctgtcttcatttactttaggaaagatagaaatggtttgcatgcaaa

SEQ ID NO: 96303 - DNA, 75 bp, Homo sapiens
tttttatgtgacataagaataactaaaaatacaagattgcaagtaccccattgctcatgctttctccgttgattg

SEQ ID NO: 96304 - DNA, 76 bp, Homo sapiens
atgtgacataagaataactaaaaatacaagattgcaagtaccccattgctcatgctttctccgttgattgtatttc

SEQ ID NO: 96305 - DNA, 75 bp, Homo sapiens
aataactaaaaatacaagattgcaagtaccccattgctcatgctttctccgttgattgtatttctgggctctcaa

SEQ ID NO: 96306 - DNA, 76 bp, Homo sapiens
aaaatacaagattgcaagtaccccattgctcatgctttctccgttgattgtatttctgggctctcaattcttcaaa

SEQ ID NO: 96307 - DNA, 74 bp, Homo sapiens
aagtaccccattgctcatgctttctccgttgattgtatttctgggctctcaattcttcaaaggaaaattctgat

SEQ ID NO: 96308 - DNA, 76 bp, Homo sapiens
ttgctcatgctttctccgttgattgtatttctgggctctcaattcttcaaaggaaaattctgattccccacgaata

SEQ ID NO: 96309 - DNA, 72 bp, Homo sapiens
tttctccgttgattgtatttctgggctctcaattcttcaaaggaaaattctgattccccacgaataagcttc

SEQ ID NO: 96310 - DNA, 75 bp, Homo sapiens
ttgattgtatttctgggctctcaattcttcaaaggaaaattctgattccccacgaataagcttctccttgcaata

SEQ ID NO: 96311 - DNA, 74 bp, Homo sapiens
tttctgggctctcaattcttcaaaggaaaattctgattccccacgaataagcttctccttgcaatacataacaa

SEQ ID NO: 96312 - DNA, 75 bp, Homo sapiens
aattcttcaaaggaaaattctgattccccacgaataagcttctccttgcaatacataacaacctgctcaacatca

SEQ ID NO: 96313 - DNA, 73 bp, Homo sapiens
aaaggaaaattctgattccccacgaataagcttctccttgcaatacataacaacctgctcaacatcaactttg

SEQ ID NO: 96314 - DNA, 77 bp, Homo sapiens
aattctgattccccacgaataagcttctccttgcaatacataacaacctgctcaacatcaactttggatgccaaaga

SEQ ID NO: 96315 - DNA, 81 bp, Homo sapiens
acgaataagcttctccttgcaatacataacaacctgctcaacatcaactttggatgccaaagatgagtgcacagaatattc

SEQ ID NO: 96316 - DNA, 82 bp, Homo sapiens
ttctccttgcaatacataacaacctgctcaacatcaactttggatgccaaagatgagtgcacagaatattctgatttagaaa

SEQ ID NO: 96317 - DNA, 82 bp, Homo sapiens
aatacataacaacctgctcaacatcaactttggatgccaaagatgagtgcacagaatattctgatttagaaatcgtgatcac

SEQ ID NO: 96318 - DNA, 82 bp, Homo sapiens
taacaacctgctcaacatcaactttggatgccaaagatgagtgcacagaatattctgatttagaaatcgtgatcactcttcg

SEQ ID NO: 96319 - DNA, 79 bp, Homo sapiens
aacatcaactttggatgccaaagatgagtgcacagaatattctgatttagaaatcgtgatcactcttcgttccctacaa

SEQ ID NO: 96320 - DNA, 77 bp, Homo sapiens
actttggatgccaaagatgagtgcacagaatattctgatttagaaatcgtgatcactcttcgttccctacaatgggg

SEQ ID NO: 96321 - DNA, 75 bp, Homo sapiens
aaagatgagtgcacagaatattctgatttagaaatcgtgatcactcttcgttccctacaatgggggaaaatacat

SEQ ID NO: 96322 - DNA, 75 bp, Homo sapiens
tgcacagaatattctgatttagaaatcgtgatcactcttcgttccctacaatgggggaaaatacattatttacaa

SEQ ID NO: 96323 - DNA, 69 bp, Homo sapiens
atcactcttcgttccctacaatgggggaaaatacattatttacaacaatgtacctaagagcacttaaag

SEQ ID NO: 96324 - DNA, 67 bp, Homo sapiens
cgttccctacaatgggggaaaatacattatttacaacaatgtacctaagagcacttaaaggaaacta

SEQ ID NO: 96325 - DNA, 76 bp, Homo sapiens
cattatttacaacaatgtacctaagagcacttaaaggaaactaataatagattaatgcactgattatacttgcata

SEQ ID NO: 96326 - DNA, 76 bp, Homo sapiens
acaacaatgtacctaagagcacttaaaggaaactaataatagattaatgcactgattatacttgcatatttgactc

SEQ ID NO: 96327 - DNA, 77 bp, Homo sapiens
cctaagagcacttaaaggaaactaataatagattaatgcactgattatacttgcatatttgactctttatcacaagc

SEQ ID NO: 96328 - DNA, 81 bp, Homo sapiens
aaggaaactaataatagattaatgcactgattatacttgcatatttgactctttatcacaagctgaagatatcactccaga

SEQ ID NO: 96329 - DNA, 83 bp, Homo sapiens
aataatagattaatgcactgattatacttgcatatttgactctttatcacaagctgaagatatcactccagaaagctctgaac

SEQ ID NO: 96330 - DNA, 81 bp, Homo sapiens
taatgcactgattatacttgcatatttgactctttatcacaagctgaagatatcactccagaaagctctgaaccctaaaaa

SEQ ID NO: 96331 - DNA, 77 bp, Homo sapiens
attatacttgcatatttgactctttatcacaagctgaagatatcactccagaaagctctgaaccctaaaaaacagaa

SEQ ID NO: 96332 - DNA, 76 bp, Homo sapiens
cttgcatatttgactctttatcacaagctgaagatatcactccagaaagctctgaaccctaaaaaacagaaaacaa

SEQ ID NO: 96333 - DNA, 77 bp, Homo sapiens
tctttatcacaagctgaagatatcactccagaaagctctgaaccctaaaaaacagaaaacaaacatgagcattcact

SEQ ID NO: 96334 - DNA, 77 bp, Homo sapiens
aagctgaagatatcactccagaaagctctgaaccctaaaaaacagaaaacaaacatgagcattcacttatctgagaa

SEQ ID NO: 96335 - DNA, 75 bp, Homo sapiens
aagatatcactccagaaagctctgaaccctaaaaaacagaaaacaaacatgagcattcacttatctgagaagaaa

SEQ ID NO: 96336 - DNA, 72 bp, Homo sapiens
aaagctctgaaccctaaaaaacagaaaacaaacatgagcattcacttatctgagaagaaagcttcacccaaa

SEQ ID NO: 96337 - DNA, 77 bp, Homo sapiens
tcaataccattcccagtttccacacaagctacaaatgtcattattacctgattcttagaaatgcaggccatgttatt

SEQ ID NO: 96338 - DNA, 76 bp, Homo sapiens
attcccagtttccacacaagctacaaatgtcattattacctgattcttagaaatgcaggccatgttatttcctgga

SEQ ID NO: 96339 - DNA, 76 bp, Homo sapiens
tttccacacaagctacaaatgtcattattacctgattcttagaaatgcaggccatgttatttcctggatttgattt

SEQ ID NO: 96340 - DNA, 78 bp, Homo sapiens
agctacaaatgtcattattacctgattcttagaaatgcaggccatgttatttcctggatttgattttgatgttatcat

SEQ ID NO: 96341 - DNA, 77 bp, Homo sapiens
gtcattattacctgattcttagaaatgcaggccatgttatttcctggatttgattttgatgttatcatttgatttaa

SEQ ID NO: 96342 - DNA, 75 bp, Homo sapiens
cctgattcttagaaatgcaggccatgttatttcctggatttgattttgatgttatcatttgatttaaaacctgaa

SEQ ID NO: 96343 - DNA, 77 bp, Homo sapiens
atgcaggccatgttatttcctggatttgattttgatgttatcatttgatttaaaacctgaacattatgcagaggttc

SEQ ID NO: 96344 - DNA, 76 bp, Homo sapiens
gccatgttatttcctggatttgattttgatgttatcatttgatttaaaacctgaacattatgcagaggttctgagg

SEQ ID NO: 96345 - DNA, 78 bp, Homo sapiens
ttcctggatttgattttgatgttatcatttgatttaaaacctgaacattatgcagaggttctgaggttctagctatga

SEQ ID NO: 96346 - DNA, 76 bp, Homo sapiens
gattttgatgttatcatttgatttaaaacctgaacattatgcagaggttctgaggttctagctatgagggaaaaga

SEQ ID NO: 96347 - DNA, 74 bp, Homo sapiens
gttatcatttgatttaaaacctgaacattatgcagaggttctgaggttctagctatgagggaaaagaggataaa

SEQ ID NO: 96348 - DNA, 72 bp, Homo sapiens
taaaacctgaacattatgcagaggttctgaggttctagctatgagggaaaagaggataaaatacggagaaat

SEQ ID NO: 96349 - DNA, 69 bp, Homo sapiens
aaagaaaagaaaatactagtacaaatccaagactaaatggacaacaacaggcattttagaaagcctgat

SEQ ID NO: 96350 - DNA, 71 bp, Homo sapiens
aaatactagtacaaatccaagactaaatggacaacaacaggcattttagaaagcctgattttaccttgagc

SEQ ID NO: 96351 - DNA, 74 bp, Homo sapiens
tagtacaaatccaagactaaatggacaacaacaggcattttagaaagcctgattttaccttgagctggcaaatg

SEQ ID NO: 96352 - DNA, 73 bp, Homo sapiens
aagactaaatggacaacaacaggcattttagaaagcctgattttaccttgagctggcaaatgggtttcagtga

SEQ ID NO: 96353 - DNA, 74 bp, Homo sapiens
acaacaacaggcattttagaaagcctgattttaccttgagctggcaaatgggtttcagtgaggcgtgtctgaaa

SEQ ID NO: 96354 - DNA, 73 bp, Homo sapiens
gcattttagaaagcctgattttaccttgagctggcaaatgggtttcagtgaggcgtgtctgaaataacctaaa

SEQ ID NO: 96355 - DNA, 76 bp, Homo sapiens
ttagaaagcctgattttaccttgagctggcaaatgggtttcagtgaggcgtgtctgaaataacctaaatgacagca

SEQ ID NO: 96356 - DNA, 76 bp, Homo sapiens
attttaccttgagctggcaaatgggtttcagtgaggcgtgtctgaaataacctaaatgacagcagaaaaggcatca

SEQ ID NO: 96357 - DNA, 77 bp, Homo sapiens
ctggcaaatgggtttcagtgaggcgtgtctgaaataacctaaatgacagcagaaaaggcatcaatgtagattataaa

SEQ ID NO: 96358 - DNA, 74 bp, Homo sapiens
aaatgggtttcagtgaggcgtgtctgaaataacctaaatgacagcagaaaaggcatcaatgtagattataaact

SEQ ID NO: 96359 - DNA, 77 bp, Homo sapiens
aggcgtgtctgaaataacctaaatgacagcagaaaaggcatcaatgtagattataaacttacagtacatagctgtta

SEQ ID NO: 96360 - DNA, 78 bp, Homo sapiens
gtctgaaataacctaaatgacagcagaaaaggcatcaatgtagattataaacttacagtacatagctgttagagtgaa

SEQ ID NO: 96361 - DNA, 75 bp, Homo sapiens
attacttttcaaagtcagaatcatcacagagagtttgactttgtaactacctgtattgttgttgcaggaactctc

SEQ ID NO: 96362 - DNA, 76 bp, Homo sapiens
aaagtcagaatcatcacagagagtttgactttgtaactacctgtattgttgttgcaggaactctctgggttcagcc

SEQ ID NO: 96363 - DNA, 74 bp, Homo sapiens
atcacagagagtttgactttgtaactacctgtattgttgttgcaggaactctctgggttcagcctggttttgaa

SEQ ID NO: 96364 - DNA, 71 bp, Homo sapiens
agagtttgactttgtaactacctgtattgttgttgcaggaactctctgggttcagcctggttttgaattcc

SEQ ID NO: 96365 - DNA, 74 bp, Homo sapiens
tttgtaactacctgtattgttgttgcaggaactctctgggttcagcctggttttgaattcctctctgaaggaca

SEQ ID NO: 96366 - DNA, 84 bp, Homo sapiens
tgtattgttgttgcaggaactctctgggttcagcctggttttgaattcctctctgaaggacagcactggcatgctgcagctctc

SEQ ID NO: 96367 - DNA, 82 bp, Homo sapiens
ttgcaggaactctctgggttcagcctggttttgaattcctctctgaaggacagcactggcatgctgcagctctccttgggct

SEQ ID NO: 96368 - DNA, 83 bp, Homo sapiens
actctctgggttcagcctggttttgaattcctctctgaaggacagcactggcatgctgcagctctccttgggcttccagatgc

SEQ ID NO: 96369 - DNA, 81 bp, Homo sapiens
cctggttttgaattcctctctgaaggacagcactggcatgctgcagctctccttgggcttccagatgccccgcccaggcaa

SEQ ID NO: 96370 - DNA, 84 bp, Homo sapiens
ttttgaattcctctctgaaggacagcactggcatgctgcagctctccttgggcttccagatgccccgcccaggcaatgtacaga

SEQ ID NO: 96371 - DNA, 83 bp, Homo sapiens
tgaaggacagcactggcatgctgcagctctccttgggcttccagatgccccgcccaggcaatgtacagaggggatgacagggt

SEQ ID NO: 96372 - DNA, 82 bp, Homo sapiens
agcactggcatgctgcagctctccttgggcttccagatgccccgcccaggcaatgtacagaggggatgacagggttccaatc

SEQ ID NO: 96373 - DNA, 77 bp, Homo sapiens
ctgcagctctccttgggcttccagatgccccgcccaggcaatgtacagaggggatgacagggttccaatcccatggt

SEQ ID NO: 96374 - DNA, 76 bp, Homo sapiens
tccttgggcttccagatgccccgcccaggcaatgtacagaggggatgacagggttccaatcccatggttgtacaga

SEQ ID NO: 96375 - DNA, 75 bp, Homo sapiens
ttccagatgccccgcccaggcaatgtacagaggggatgacagggttccaatcccatggttgtacagaaactcaaa

SEQ ID NO: 96376 - DNA, 73 bp, Homo sapiens
ccgcccaggcaatgtacagaggggatgacagggttccaatcccatggttgtacagaaactcaaaaaattgatg

SEQ ID NO: 96377 - DNA, 73 bp, Homo sapiens
aatgtacagaggggatgacagggttccaatcccatggttgtacagaaactcaaaaaattgatggaggtcactg

SEQ ID NO: 96378 - DNA, 74 bp, Homo sapiens
gggatgacagggttccaatcccatggttgtacagaaactcaaaaaattgatggaggtcactgttgtactcagcc

SEQ ID NO: 96379 - DNA, 73 bp, Homo sapiens
ggttccaatcccatggttgtacagaaactcaaaaaattgatggaggtcactgttgtactcagcctacacgaac

SEQ ID NO: 96380 - DNA, 72 bp, Homo sapiens
ccatggttgtacagaaactcaaaaaattgatggaggtcactgttgtactcagcctacacgaacccaaaacaa

SEQ ID NO: 96381 - DNA, 70 bp, Homo sapiens
gttgtacagaaactcaaaaaattgatggaggtcactgttgtactcagcctacacgaacccaaaacaaaaa

SEQ ID NO: 96382 - DNA, 75 bp, Homo sapiens
gtacaacatgattatagatttgattatacatcttaagtatacttacaaattttaaacaataactgatgaatcttg

SEQ ID NO: 96383 - DNA, 74 bp, Homo sapiens
gattatagatttgattatacatcttaagtatacttacaaattttaaacaataactgatgaatcttgggtcattg

SEQ ID NO: 96384 - DNA, 73 bp, Homo sapiens
tgattatacatcttaagtatacttacaaattttaaacaataactgatgaatcttgggtcattgtggtatttct

SEQ ID NO: 96385 - DNA, 72 bp, Homo sapiens
catcttaagtatacttacaaattttaaacaataactgatgaatcttgggtcattgtggtatttcttcttatc

SEQ ID NO: 96386 - DNA, 69 bp, Homo sapiens
acttacaaattttaaacaataactgatgaatcttgggtcattgtggtatttcttcttatctaaaaattc

SEQ ID NO: 96387 - DNA, 71 bp, Homo sapiens
tttaaacaataactgatgaatcttgggtcattgtggtatttcttcttatctaaaaattccttcattaaatg

SEQ ID NO: 96388 - DNA, 72 bp, Homo sapiens
acaataactgatgaatcttgggtcattgtggtatttcttcttatctaaaaattccttcattaaatgttctag

SEQ ID NO: 96389 - DNA, 72 bp, Homo sapiens
tgaatcttgggtcattgtggtatttcttcttatctaaaaattccttcattaaatgttctagtaaagttatca

SEQ ID NO: 96390 - DNA, 70 bp, Homo sapiens
ggtcattgtggtatttcttcttatctaaaaattccttcattaaatgttctagtaaagttatcaagtattc

SEQ ID NO: 96391 - DNA, 70 bp, Homo sapiens
ttcttcttatctaaaaattccttcattaaatgttctagtaaagttatcaagtattctttattctcaggaa

SEQ ID NO: 96392 - DNA, 69 bp, Homo sapiens
atctaaaaattccttcattaaatgttctagtaaagttatcaagtattctttattctcaggaaaattctc

SEQ ID NO: 96393 - DNA, 70 bp, Homo sapiens
ccttcattaaatgttctagtaaagttatcaagtattctttattctcaggaaaattctcttctacccactg

SEQ ID NO: 96394 - DNA, 73 bp, Homo sapiens
aatgttctagtaaagttatcaagtattctttattctcaggaaaattctcttctacccactgtatgtatctaga

SEQ ID NO: 96395 - DNA, 72 bp, Homo sapiens
gtaaagttatcaagtattctttattctcaggaaaattctcttctacccactgtatgtatctagaaaaatatg

SEQ ID NO: 96396 - DNA, 73 bp, Homo sapiens
caagtattctttattctcaggaaaattctcttctacccactgtatgtatctagaaaaatatggataatgttaa

SEQ ID NO: 96397 - DNA, 72 bp, Homo sapiens
attctcaggaaaattctcttctacccactgtatgtatctagaaaaatatggataatgttaattttccatggg

SEQ ID NO: 96398 - DNA, 72 bp, Homo sapiens
cttctacccactgtatgtatctagaaaaatatggataatgttaattttccatggggcagtgtatagtttgtt

SEQ ID NO: 96399 - DNA, 71 bp, Homo sapiens
ctgtatgtatctagaaaaatatggataatgttaattttccatggggcagtgtatagtttgtttaagggaaa

SEQ ID NO: 96400 - DNA, 69 bp, Homo sapiens
gataatgttaattttccatggggcagtgtatagtttgtttaagggaaataaaataactaaatgctgacc

SEQ ID NO: 96401 - DNA, 69 bp, Homo sapiens
tttccatggggcagtgtatagtttgtttaagggaaataaaataactaaatgctgacctttcccattcac

SEQ ID NO: 96402 - DNA, 70 bp, Homo sapiens
gcagtgtatagtttgtttaagggaaataaaataactaaatgctgacctttcccattcaccaagagggtca

SEQ ID NO: 96403 - DNA, 69 bp, Homo sapiens
tatagtttgtttaagggaaataaaataactaaatgctgacctttcccattcaccaagagggtcattgcc

SEQ ID NO: 96404 - DNA, 70 bp, Homo sapiens
tttaagggaaataaaataactaaatgctgacctttcccattcaccaagagggtcattgcccttgtagctc

SEQ ID NO: 96405 - DNA, 77 bp, Homo sapiens
aaaataactaaatgctgacctttcccattcaccaagagggtcattgcccttgtagctctgcatgtgggcttcaagca

SEQ ID NO: 96406 - DNA, 81 bp, Homo sapiens
taaatgctgacctttcccattcaccaagagggtcattgcccttgtagctctgcatgtgggcttcaagcatcctagaagaga

SEQ ID NO: 96407 - DNA, 78 bp, Homo sapiens
ctttcccattcaccaagagggtcattgcccttgtagctctgcatgtgggcttcaagcatcctagaagagagaaaggta

SEQ ID NO: 96408 - DNA, 81 bp, Homo sapiens
aagagggtcattgcccttgtagctctgcatgtgggcttcaagcatcctagaagagagaaaggtatgcacatgggatattag

SEQ ID NO: 96409 - DNA, 80 bp, Homo sapiens
attgcccttgtagctctgcatgtgggcttcaagcatcctagaagagagaaaggtatgcacatgggatattagggataatt

SEQ ID NO: 96410 - DNA, 82 bp, Homo sapiens
tagctctgcatgtgggcttcaagcatcctagaagagagaaaggtatgcacatgggatattagggataatttctacaagcaaa

SEQ ID NO: 96411 - DNA, 66 bp, Homo sapiens
aggcgccccagccccctgggcttccccaccccaccagacggacacttactgaaggacattttccgg

SEQ ID NO: 96412 - DNA, 69 bp, Homo sapiens
ccctgggcttccccaccccaccagacggacacttactgaaggacattttccggggtgtccatggccaga

SEQ ID NO: 96413 - DNA, 71 bp, Homo sapiens
ttccccaccccaccagacggacacttactgaaggacattttccggggtgtccatggccagaggacgctggc

SEQ ID NO: 96414 - DNA, 73 bp, Homo sapiens
accagacggacacttactgaaggacattttccggggtgtccatggccagaggacgctggccggcagcggccaa

SEQ ID NO: 96415 - DNA, 72 bp, Homo sapiens
acacttactgaaggacattttccggggtgtccatggccagaggacgctggccggcagcggccaaacctgaac

SEQ ID NO: 96416 - DNA, 71 bp, Homo sapiens
aaggacattttccggggtgtccatggccagaggacgctggccggcagcggccaaacctgaaccgcaaacta

SEQ ID NO: 96417 - DNA, 72 bp, Homo sapiens
ttttccggggtgtccatggccagaggacgctggccggcagcggccaaacctgaaccgcaaactagaagccgc

SEQ ID NO: 96418 - DNA, 73 bp, Homo sapiens
atggccagaggacgctggccggcagcggccaaacctgaaccgcaaactagaagccgccgccgattcgaatacc

SEQ ID NO: 96419 - DNA, 71 bp, Homo sapiens
agaggacgctggccggcagcggccaaacctgaaccgcaaactagaagccgccgccgattcgaataccccgc

SEQ ID NO: 96420 - DNA, 72 bp, Homo sapiens
ccggcagcggccaaacctgaaccgcaaactagaagccgccgccgattcgaataccccgcgcagccgcagtcg

SEQ ID NO: 96421 - DNA, 71 bp, Homo sapiens
aaacctgaaccgcaaactagaagccgccgccgattcgaataccccgcgcagccgcagtcggctcgccgaac

SEQ ID NO: 96422 - DNA, 71 bp, Homo sapiens
aaccgcaaactagaagccgccgccgattcgaataccccgcgcagccgcagtcggctcgccgaacgtttcag

SEQ ID NO: 96423 - DNA, 73 bp, Homo sapiens
actagaagccgccgccgattcgaataccccgcgcagccgcagtcggctcgccgaacgtttcagggcgcctgcc

SEQ ID NO: 96424 - DNA, 75 bp, Homo sapiens
cgattcgaataccccgcgcagccgcagtcggctcgccgaacgtttcagggcgcctgcccattggtggcggcggca

SEQ ID NO: 96425 - DNA, 74 bp, Homo sapiens
cgaataccccgcgcagccgcagtcggctcgccgaacgtttcagggcgcctgcccattggtggcggcggcagaag

SEQ ID NO: 96426 - DNA, 73 bp, Homo sapiens
agggtcagtatggcactgattcactttacaaaaagatgcaaactgcgcaagtacaaaaacctctttgagtcct

SEQ ID NO: 96427 - DNA, 73 bp, Homo sapiens
agtatggcactgattcactttacaaaaagatgcaaactgcgcaagtacaaaaacctctttgagtcctttatta

SEQ ID NO: 96428 - DNA, 70 bp, Homo sapiens
attcactttacaaaaagatgcaaactgcgcaagtacaaaaacctctttgagtcctttattaacgtctgga

SEQ ID NO: 96429 - DNA, 73 bp, Homo sapiens
aaaagatgcaaactgcgcaagtacaaaaacctctttgagtcctttattaacgtctggagatgtgtggtacata

SEQ ID NO: 96430 - DNA, 71 bp, Homo sapiens
aaactgcgcaagtacaaaaacctctttgagtcctttattaacgtctggagatgtgtggtacatacaattaa

SEQ ID NO: 96431 - DNA, 73 bp, Homo sapiens
aagtacaaaaacctctttgagtcctttattaacgtctggagatgtgtggtacatacaattaacagcatcacac

SEQ ID NO: 96432 - DNA, 76 bp, Homo sapiens
aaacctctttgagtcctttattaacgtctggagatgtgtggtacatacaattaacagcatcacaccagctacagaa

SEQ ID NO: 96433 - DNA, 79 bp, Homo sapiens
tcctttattaacgtctggagatgtgtggtacatacaattaacagcatcacaccagctacagaagtacagataaccaaga

SEQ ID NO: 96434 - DNA, 79 bp, Homo sapiens
attaacgtctggagatgtgtggtacatacaattaacagcatcacaccagctacagaagtacagataaccaagaatgtac

SEQ ID NO: 96435 - DNA, 80 bp, Homo sapiens
agatgtgtggtacatacaattaacagcatcacaccagctacagaagtacagataaccaagaatgtacttcagaacaagga

SEQ ID NO: 96436 - DNA, 80 bp, Homo sapiens
atacaattaacagcatcacaccagctacagaagtacagataaccaagaatgtacttcagaacaaggatctgagagcaact

SEQ ID NO: 96437 - DNA, 80 bp, Homo sapiens
attaacagcatcacaccagctacagaagtacagataaccaagaatgtacttcagaacaaggatctgagagcaacttatgg

SEQ ID NO: 96438 - DNA, 79 bp, Homo sapiens
agaagtacagataaccaagaatgtacttcagaacaaggatctgagagcaacttatggtgttgcctgctctgaacctcca

SEQ ID NO: 96439 - DNA, 77 bp, Homo sapiens
agataaccaagaatgtacttcagaacaaggatctgagagcaacttatggtgttgcctgctctgaacctccacaaaaa

SEQ ID NO: 96440 - DNA, 77 bp, Homo sapiens
aatgtacttcagaacaaggatctgagagcaacttatggtgttgcctgctctgaacctccacaaaaacccagttctga

SEQ ID NO: 96441 - DNA, 78 bp, Homo sapiens
aacaaggatctgagagcaacttatggtgttgcctgctctgaacctccacaaaaacccagttctgacacacgcaagaca

SEQ ID NO: 96442 - DNA, 80 bp, Homo sapiens
tgagagcaacttatggtgttgcctgctctgaacctccacaaaaacccagttctgacacacgcaagacagacgatataaca

SEQ ID NO: 96443 - DNA, 75 bp, Homo sapiens
aacttatggtgttgcctgctctgaacctccacaaaaacccagttctgacacacgcaagacagacgatataacaat

SEQ ID NO: 96444 - DNA, 76 bp, Homo sapiens
ttgcctgctctgaacctccacaaaaacccagttctgacacacgcaagacagacgatataacaatttcacttgggaa

SEQ ID NO: 96445 - DNA, 70 bp, Homo sapiens
acctccacaaaaacccagttctgacacacgcaagacagacgatataacaatttcacttgggaatggtttt

SEQ ID NO: 96446 - DNA, 69 bp, Homo sapiens
acaaaaacccagttctgacacacgcaagacagacgatataacaatttcacttgggaatggtttttttta

SEQ ID NO: 96447 - DNA, 73 bp, Homo sapiens
ttttaaaaaatgacaagaactaatagttcaaaccctttagagtgtgagatgtggcagctcgcttggtgccgtg

SEQ ID NO: 96448 - DNA, 78 bp, Homo sapiens
atgacaagaactaatagttcaaaccctttagagtgtgagatgtggcagctcgcttggtgccgtggcactgctgtaaaa

SEQ ID NO: 96449 - DNA, 76 bp, Homo sapiens
aactaatagttcaaaccctttagagtgtgagatgtggcagctcgcttggtgccgtggcactgctgtaaaaggccaa

SEQ ID NO: 96450 - DNA, 78 bp, Homo sapiens
aaaccctttagagtgtgagatgtggcagctcgcttggtgccgtggcactgctgtaaaaggccaacatgggcatttgaa

SEQ ID NO: 96451 - DNA, 83 bp, Homo sapiens
tttagagtgtgagatgtggcagctcgcttggtgccgtggcactgctgtaaaaggccaacatgggcatttgaaggtcaggcaga

SEQ ID NO: 96452 - DNA, 79 bp, Homo sapiens
atgtggcagctcgcttggtgccgtggcactgctgtaaaaggccaacatgggcatttgaaggtcaggcagaagaaccgaa

SEQ ID NO: 96453 - DNA, 73 bp, Homo sapiens
ccgtggcactgctgtaaaaggccaacatgggcatttgaaggtcaggcagaagaaccgaatggggtgggtggaa

SEQ ID NO: 96454 - DNA, 70 bp, Homo sapiens
tgtaaaaggccaacatgggcatttgaaggtcaggcagaagaaccgaatggggtgggtggaagaggtttta

SEQ ID NO: 96455 - DNA, 68 bp, Homo sapiens
aaggccaacatgggcatttgaaggtcaggcagaagaaccgaatggggtgggtggaagaggttttattt

SEQ ID NO: 96456 - DNA, 70 bp, Homo sapiens
atttgaaggtcaggcagaagaaccgaatggggtgggtggaagaggttttattttcagtgtagagagataa

SEQ ID NO: 96457 - DNA, 71 bp, Homo sapiens
aaggtcaggcagaagaaccgaatggggtgggtggaagaggttttattttcagtgtagagagataacagatg

SEQ ID NO: 96458 - DNA, 71 bp, Homo sapiens
agaaccgaatggggtgggtggaagaggttttattttcagtgtagagagataacagatggtccgagtggata

SEQ ID NO: 96459 - DNA, 72 bp, Homo sapiens
gggtgggtggaagaggttttattttcagtgtagagagataacagatggtccgagtggatactttcagtccag

SEQ ID NO: 96460 - DNA, 74 bp, Homo sapiens
aagaggttttattttcagtgtagagagataacagatggtccgagtggatactttcagtccaggctcagtatggg

SEQ ID NO: 96461 - DNA, 79 bp, Homo sapiens
ttattttcagtgtagagagataacagatggtccgagtggatactttcagtccaggctcagtatggggcctgcaggaatc

SEQ ID NO: 96462 - DNA, 80 bp, Homo sapiens
tagagagataacagatggtccgagtggatactttcagtccaggctcagtatggggcctgcaggaatccactagataaata

SEQ ID NO: 96463 - DNA, 79 bp, Homo sapiens
taacagatggtccgagtggatactttcagtccaggctcagtatggggcctgcaggaatccactagataaatacagtcta

SEQ ID NO: 96464 - DNA, 75 bp, Homo sapiens
tttcagtccaggctcagtatggggcctgcaggaatccactagataaatacagtctataaaccggaaggctgaaaa

SEQ ID NO: 96465 - DNA, 75 bp, Homo sapiens
tccaggctcagtatggggcctgcaggaatccactagataaatacagtctataaaccggaaggctgaaaaacacca

SEQ ID NO: 96466 - DNA, 74 bp, Homo sapiens
agtatggggcctgcaggaatccactagataaatacagtctataaaccggaaggctgaaaaacaccagccagcca

SEQ ID NO: 96467 - DNA, 74 bp, Homo sapiens
aatacagtctataaaccggaaggctgaaaaacaccagccagccatccttgtcattgcttccaactggtggacac

SEQ ID NO: 96468 - DNA, 84 bp, Homo sapiens
ctgaaaaacaccagccagccatccttgtcattgcttccaactggtggacactgatgcatccggagtcacttatgacacagatca

SEQ ID NO: 96469 - DNA, 78 bp, Homo sapiens
attgcttccaactggtggacactgatgcatccggagtcacttatgacacagatcaggtttaacaggggtgcacccgaa

SEQ ID NO: 96470 - DNA, 77 bp, Homo sapiens
aactggtggacactgatgcatccggagtcacttatgacacagatcaggtttaacaggggtgcacccgaacgcaagaa

SEQ ID NO: 96471 - DNA, 80 bp, Homo sapiens
acactgatgcatccggagtcacttatgacacagatcaggtttaacaggggtgcacccgaacgcaagaaggcagctcacta

SEQ ID NO: 96472 - DNA, 77 bp, Homo sapiens
atccggagtcacttatgacacagatcaggtttaacaggggtgcacccgaacgcaagaaggcagctcactatgtccag

SEQ ID NO: 96473 - DNA, 80 bp, Homo sapiens
ttatgacacagatcaggtttaacaggggtgcacccgaacgcaagaaggcagctcactatgtccagtcagctctgatcctt

SEQ ID NO: 96474 - DNA, 78 bp, Homo sapiens
agatcaggtttaacaggggtgcacccgaacgcaagaaggcagctcactatgtccagtcagctctgatcctttcacgcc

SEQ ID NO: 96475 - DNA, 80 bp, Homo sapiens
ttaacaggggtgcacccgaacgcaagaaggcagctcactatgtccagtcagctctgatcctttcacgcccttggatgtca

SEQ ID NO: 96476 - DNA, 80 bp, Homo sapiens
ccgaacgcaagaaggcagctcactatgtccagtcagctctgatcctttcacgcccttggatgtcatgggttcctctgctt

SEQ ID NO: 96477 - DNA, 80 bp, Homo sapiens
aagaaggcagctcactatgtccagtcagctctgatcctttcacgcccttggatgtcatgggttcctctgctttcacacgg

SEQ ID NO: 96478 - DNA, 79 bp, Homo sapiens
tcactatgtccagtcagctctgatcctttcacgcccttggatgtcatgggttcctctgctttcacacgggaactaagga

SEQ ID NO: 96479 - DNA, 72 bp, Homo sapiens
tgatcctttcacgcccttggatgtcatgggttcctctgctttcacacgggaactaaggaacacttcctttat

SEQ ID NO: 96480 - DNA, 71 bp, Homo sapiens
tttcacgcccttggatgtcatgggttcctctgctttcacacgggaactaaggaacacttcctttatttcaa

SEQ ID NO: 96481 - DNA, 71 bp, Homo sapiens
ttggatgtcatgggttcctctgctttcacacgggaactaaggaacacttcctttatttcaatgttccactt

SEQ ID NO: 96482 - DNA, 67 bp, Homo sapiens
ggttcctctgctttcacacgggaactaaggaacacttcctttatttcaatgttccactttggaaaaa

SEQ ID NO: 96483 - DNA, 62 bp, Homo sapiens
cgggaactaaggaacacttcctttatttcaatgttccactttggaaaaaaccaaaaccctcc

SEQ ID NO: 96484 - DNA, 70 bp, Homo sapiens
ccccccacccccaccatcattcttcataaatttgcttccaatctcctgattgttctgggtctagactttt

SEQ ID NO: 96485 - DNA, 74 bp, Homo sapiens
ccaccatcattcttcataaatttgcttccaatctcctgattgttctgggtctagactttttcctttcgcttcaa

SEQ ID NO: 96486 - DNA, 72 bp, Homo sapiens
attcttcataaatttgcttccaatctcctgattgttctgggtctagactttttcctttcgcttcaatttgga

SEQ ID NO: 96487 - DNA, 70 bp, Homo sapiens
ataaatttgcttccaatctcctgattgttctgggtctagactttttcctttcgcttcaatttggacactt

SEQ ID NO: 96488 - DNA, 71 bp, Homo sapiens
ttccaatctcctgattgttctgggtctagactttttcctttcgcttcaatttggacacttttttgacagtc

SEQ ID NO: 96489 - DNA, 68 bp, Homo sapiens
tgttctgggtctagactttttcctttcgcttcaatttggacacttttttgacagtcccgttcttgtta

SEQ ID NO: 96490 - DNA, 69 bp, Homo sapiens
ctagactttttcctttcgcttcaatttggacacttttttgacagtcccgttcttgttaagcagcttcag

SEQ ID NO: 96491 - DNA, 72 bp, Homo sapiens
ttcaatttggacacttttttgacagtcccgttcttgttaagcagcttcaggacacggtctttatgatctaaa

SEQ ID NO: 96492 - DNA, 78 bp, Homo sapiens
ttcttgttaagcagcttcaggacacggtctttatgatctaaaaccttaagcatggagtctctggcttcactgatttga

SEQ ID NO: 96493 - DNA, 81 bp, Homo sapiens
taagcagcttcaggacacggtctttatgatctaaaaccttaagcatggagtctctggcttcactgatttgatccatcacaa

SEQ ID NO: 96494 - DNA, 77 bp, Homo sapiens
aggacacggtctttatgatctaaaaccttaagcatggagtctctggcttcactgatttgatccatcacaagtttaca

SEQ ID NO: 96495 - DNA, 80 bp, Homo sapiens
tttatgatctaaaaccttaagcatggagtctctggcttcactgatttgatccatcacaagtttacacctctgcatatttc

SEQ ID NO: 96496 - DNA, 85 bp, Homo sapiens
atggagtctctggcttcactgatttgatccatcacaagtttacacctctgcatatttccctgaaacagaagacattgcatcatca

SEQ ID NO: 96497 - DNA, 86 bp, Homo sapiens
tggcttcactgatttgatccatcacaagtttacacctctgcatatttccctgaaacagaagacattgcatcatcaatcagtgacca

SEQ ID NO: 96498 - DNA, 72 bp, Homo sapiens
aaagcaacttcataaagtagatgatcagaagggaaggggcgcactcaaacctgtatcagttcgtttattcgg

SEQ ID NO: 96499 - DNA, 77 bp, Homo sapiens
taaagtagatgatcagaagggaaggggcgcactcaaacctgtatcagttcgtttattcggtggagatcatcatctgt

SEQ ID NO: 96500 - DNA, 78 bp, Homo sapiens
atgatcagaagggaaggggcgcactcaaacctgtatcagttcgtttattcggtggagatcatcatctgttgctgcttt

SEQ ID NO: 96501 - DNA, 74 bp, Homo sapiens
agggaaggggcgcactcaaacctgtatcagttcgtttattcggtggagatcatcatctgttgctgcttttttct

SEQ ID NO: 96502 - DNA, 75 bp, Homo sapiens
tcaaacctgtatcagttcgtttattcggtggagatcatcatctgttgctgcttttttctttgggataatcccttc

SEQ ID NO: 96503 - DNA, 76 bp, Homo sapiens
tatcagttcgtttattcggtggagatcatcatctgttgctgcttttttctttgggataatcccttcctgcaggtta

SEQ ID NO: 96504 - DNA, 74 bp, Homo sapiens
ttcgtttattcggtggagatcatcatctgttgctgcttttttctttgggataatcccttcctgcaggttagtaa

SEQ ID NO: 96505 - DNA, 79 bp, Homo sapiens
gagatcatcatctgttgctgcttttttctttgggataatcccttcctgcaggttagtaagtctttcatagacatcatgt

SEQ ID NO: 96506 - DNA, 77 bp, Homo sapiens
atcatctgttgctgcttttttctttgggataatcccttcctgcaggttagtaagtctttcatagacatcatgttcta

SEQ ID NO: 96507 - DNA, 75 bp, Homo sapiens
cttttttctttgggataatcccttcctgcaggttagtaagtctttcatagacatcatgttctagattcgtctgca

SEQ ID NO: 96508 - DNA, 77 bp, Homo sapiens
tttgggataatcccttcctgcaggttagtaagtctttcatagacatcatgttctagattcgtctgcaacacacaaaa

SEQ ID NO: 96509 - DNA, 76 bp, Homo sapiens
taatcccttcctgcaggttagtaagtctttcatagacatcatgttctagattcgtctgcaacacacaaaagggagg

SEQ ID NO: 96510 - DNA, 76 bp, Homo sapiens
aggttagtaagtctttcatagacatcatgttctagattcgtctgcaacacacaaaagggagggtatcataagctcg

SEQ ID NO: 96511 - DNA, 81 bp, Homo sapiens
ttctcctctcttcagcatgatgaacaactgctagaactccacctaccagctgtagtaactgggcagcacagaggtggactt

SEQ ID NO: 96512 - DNA, 82 bp, Homo sapiens
ctctcttcagcatgatgaacaactgctagaactccacctaccagctgtagtaactgggcagcacagaggtggactttccagc

SEQ ID NO: 96513 - DNA, 80 bp, Homo sapiens
atgatgaacaactgctagaactccacctaccagctgtagtaactgggcagcacagaggtggactttccagccttgagcac

SEQ ID NO: 96514 - DNA, 79 bp, Homo sapiens
actgctagaactccacctaccagctgtagtaactgggcagcacagaggtggactttccagccttgagcacgacaggata

SEQ ID NO: 96515 - DNA, 77 bp, Homo sapiens
acctaccagctgtagtaactgggcagcacagaggtggactttccagccttgagcacgacaggatactcctttctgat

SEQ ID NO: 96516 - DNA, 78 bp, Homo sapiens
ctgtagtaactgggcagcacagaggtggactttccagccttgagcacgacaggatactcctttctgattagctatttc

SEQ ID NO: 96517 - DNA, 82 bp, Homo sapiens
taactgggcagcacagaggtggactttccagccttgagcacgacaggatactcctttctgattagctatttcctgcagcata

SEQ ID NO: 96518 - DNA, 79 bp, Homo sapiens
acagaggtggactttccagccttgagcacgacaggatactcctttctgattagctatttcctgcagcatagctttcttc

SEQ ID NO: 96519 - DNA, 79 bp, Homo sapiens
actttccagccttgagcacgacaggatactcctttctgattagctatttcctgcagcatagctttcttctcctctggaa

SEQ ID NO: 96520 - DNA, 78 bp, Homo sapiens
cttgagcacgacaggatactcctttctgattagctatttcctgcagcatagctttcttctcctctggaaccataaaaa

SEQ ID NO: 96521 - DNA, 74 bp, Homo sapiens
acaggatactcctttctgattagctatttcctgcagcatagctttcttctcctctggaaccataaaaaataaaa

SEQ ID NO: 96522 - DNA, 71 bp, Homo sapiens
tttacaccaatttcatgcattaatatcaagtgtttctggggaaactaacctttgacccggacgtcactgta

SEQ ID NO: 96523 - DNA, 71 bp, Homo sapiens
atttcatgcattaatatcaagtgtttctggggaaactaacctttgacccggacgtcactgtacctctgaaa

SEQ ID NO: 96524 - DNA, 68 bp, Homo sapiens
atatcaagtgtttctggggaaactaacctttgacccggacgtcactgtacctctgaaagtggtggtaa

SEQ ID NO: 96525 - DNA, 69 bp, Homo sapiens
tttctggggaaactaacctttgacccggacgtcactgtacctctgaaagtggtggtaagcagctttcca

SEQ ID NO: 96526 - DNA, 67 bp, Homo sapiens
aaactaacctttgacccggacgtcactgtacctctgaaagtggtggtaagcagctttccaggggttc

SEQ ID NO: 96527 - DNA, 71 bp, Homo sapiens
tttgacccggacgtcactgtacctctgaaagtggtggtaagcagctttccaggggttccgatagtgacgaa

SEQ ID NO: 96528 - DNA, 72 bp, Homo sapiens
acgtcactgtacctctgaaagtggtggtaagcagctttccaggggttccgatagtgacgaagcaaagtaatg

SEQ ID NO: 96529 - DNA, 71 bp, Homo sapiens
tctgaaagtggtggtaagcagctttccaggggttccgatagtgacgaagcaaagtaatggggggtcttgga

SEQ ID NO: 96530 - DNA, 70 bp, Homo sapiens
aagtggtggtaagcagctttccaggggttccgatagtgacgaagcaaagtaatggggggtcttggacgca

SEQ ID NO: 96531 - DNA, 73 bp, Homo sapiens
agctttccaggggttccgatagtgacgaagcaaagtaatggggggtcttggacgcactgggacatatctcaca

SEQ ID NO: 96532 - DNA, 74 bp, Homo sapiens
gggttccgatagtgacgaagcaaagtaatggggggtcttggacgcactgggacatatctcacaccttcctcatc

SEQ ID NO: 96533 - DNA, 75 bp, Homo sapiens
atagtgacgaagcaaagtaatggggggtcttggacgcactgggacatatctcacaccttcctcatctgttaaaga

SEQ ID NO: 96534 - DNA, 73 bp, Homo sapiens
aaagtaatggggggtcttggacgcactgggacatatctcacaccttcctcatctgttaaagagaagacattaa

SEQ ID NO: 96535 - DNA, 74 bp, Homo sapiens
ggggtcttggacgcactgggacatatctcacaccttcctcatctgttaaagagaagacattaaacaacttagta

SEQ ID NO: 96536 - DNA, 76 bp, Homo sapiens
actttattgggaagcatcataacacaagtcagcctgtgaccattaccaatatactccttgggaggagacttgcgct

SEQ ID NO: 96537 - DNA, 79 bp, Homo sapiens
attgggaagcatcataacacaagtcagcctgtgaccattaccaatatactccttgggaggagacttgcgcttctcagcc

SEQ ID NO: 96538 - DNA, 79 bp, Homo sapiens
atcataacacaagtcagcctgtgaccattaccaatatactccttgggaggagacttgcgcttctcagccttcaccagaa

SEQ ID NO: 96539 - DNA, 77 bp, Homo sapiens
aagtcagcctgtgaccattaccaatatactccttgggaggagacttgcgcttctcagccttcaccagaagactcttg

SEQ ID NO: 96540 - DNA, 76 bp, Homo sapiens
accattaccaatatactccttgggaggagacttgcgcttctcagccttcaccagaagactcttggcagtggacttc

SEQ ID NO: 96541 - DNA, 82 bp, Homo sapiens
aatatactccttgggaggagacttgcgcttctcagccttcaccagaagactcttggcagtggacttctcatcatcagtgctg

SEQ ID NO: 96542 - DNA, 85 bp, Homo sapiens
ttgggaggagacttgcgcttctcagccttcaccagaagactcttggcagtggacttctcatcatcagtgctgtttgtctccatca

SEQ ID NO: 96543 - DNA, 86 bp, Homo sapiens
ttgcgcttctcagccttcaccagaagactcttggcagtggacttctcatcatcagtgctgtttgtctccatcatgtcaccttcttc

SEQ ID NO: 96544 - DNA, 86 bp, Homo sapiens
agccttcaccagaagactcttggcagtggacttctcatcatcagtgctgtttgtctccatcatgtcaccttcttctgttgagatca

SEQ ID NO: 96545 - DNA, 88 bp, Homo sapiens
agaagactcttggcagtggacttctcatcatcagtgctgtttgtctccatcatgtcaccttcttctgttgagatcacatgctgttgct

SEQ ID NO: 96546 - DNA, 88 bp, Homo sapiens
actcttggcagtggacttctcatcatcagtgctgtttgtctccatcatgtcaccttcttctgttgagatcacatgctgttgctttcga

SEQ ID NO: 96547 - DNA, 84 bp, Homo sapiens
cttctcatcatcagtgctgtttgtctccatcatgtcaccttcttctgttgagatcacatgctgttgctttcgaggctttttcct

SEQ ID NO: 96548 - DNA, 82 bp, Homo sapiens
atcatcagtgctgtttgtctccatcatgtcaccttcttctgttgagatcacatgctgttgctttcgaggctttttccttggg

SEQ ID NO: 96549 - DNA, 80 bp, Homo sapiens
tgtttgtctccatcatgtcaccttcttctgttgagatcacatgctgttgctttcgaggctttttccttggggaggcacca

SEQ ID NO: 96550 - DNA, 77 bp, Homo sapiens
atcatgtcaccttcttctgttgagatcacatgctgttgctttcgaggctttttccttggggaggcaccaggtggtag

SEQ ID NO: 96551 - DNA, 76 bp, Homo sapiens
ttcttctgttgagatcacatgctgttgctttcgaggctttttccttggggaggcaccaggtggtaggtcacttgta

SEQ ID NO: 96552 - DNA, 76 bp, Homo sapiens
agatcacatgctgttgctttcgaggctttttccttggggaggcaccaggtggtaggtcacttgtaggcatggacaa

SEQ ID NO: 96553 - DNA, 71 bp, Homo sapiens
ctgttgctttcgaggctttttccttggggaggcaccaggtggtaggtcacttgtaggcatggacaagttgt

SEQ ID NO: 96554 - DNA, 71 bp, Homo sapiens
ctttcgaggctttttccttggggaggcaccaggtggtaggtcacttgtaggcatggacaagttgtttgcca

SEQ ID NO: 96555 - DNA, 76 bp, Homo sapiens
tttttccttggggaggcaccaggtggtaggtcacttgtaggcatggacaagttgtttgccagcaatgcaagagatg

SEQ ID NO: 96556 - DNA, 80 bp, Homo sapiens
aggcaccaggtggtaggtcacttgtaggcatggacaagttgtttgccagcaatgcaagagatggagacacagtgttggta

SEQ ID NO: 96557 - DNA, 80 bp, Homo sapiens
aggtggtaggtcacttgtaggcatggacaagttgtttgccagcaatgcaagagatggagacacagtgttggtagccagtg

SEQ ID NO: 96558 - DNA, 84 bp, Homo sapiens
cttgtaggcatggacaagttgtttgccagcaatgcaagagatggagacacagtgttggtagccagtggaggaactgctgtcata

SEQ ID NO: 96559 - DNA, 81 bp, Homo sapiens
atggacaagttgtttgccagcaatgcaagagatggagacacagtgttggtagccagtggaggaactgctgtcataggaaaa

SEQ ID NO: 96560 - DNA, 84 bp, Homo sapiens
ttgtttgccagcaatgcaagagatggagacacagtgttggtagccagtggaggaactgctgtcataggaaaaggagcacacata

SEQ ID NO: 96561 - DNA, 82 bp, Homo sapiens
aatgcaagagatggagacacagtgttggtagccagtggaggaactgctgtcataggaaaaggagcacacatatctgtaagaa

SEQ ID NO: 96562 - DNA, 77 bp, Homo sapiens
gggaagaggcaattgccaatggagagtattctatggacggacttaccagaaactggcctcatgatatccattggttc

SEQ ID NO: 96563 - DNA, 76 bp, Homo sapiens
aattgccaatggagagtattctatggacggacttaccagaaactggcctcatgatatccattggttctacttcttc

SEQ ID NO: 96564 - DNA, 75 bp, Homo sapiens
aatggagagtattctatggacggacttaccagaaactggcctcatgatatccattggttctacttcttctttcac

SEQ ID NO: 96565 - DNA, 73 bp, Homo sapiens
tattctatggacggacttaccagaaactggcctcatgatatccattggttctacttcttctttcactttaatt

SEQ ID NO: 96566 - DNA, 71 bp, Homo sapiens
acttaccagaaactggcctcatgatatccattggttctacttcttctttcactttaatttcaggaacggga

SEQ ID NO: 96567 - DNA, 70 bp, Homo sapiens
aaactggcctcatgatatccattggttctacttcttctttcactttaatttcaggaacgggagggcccaa

SEQ ID NO: 96568 - DNA, 69 bp, Homo sapiens
atgatatccattggttctacttcttctttcactttaatttcaggaacgggagggcccaagacggaggaa

SEQ ID NO: 96569 - DNA, 67 bp, Homo sapiens
atccattggttctacttcttctttcactttaatttcaggaacgggagggcccaagacggaggaaaga

SEQ ID NO: 96570 - DNA, 69 bp, Homo sapiens
tctacttcttctttcactttaatttcaggaacgggagggcccaagacggaggaaagactgccacccaca

SEQ ID NO: 96571 - DNA, 71 bp, Homo sapiens
tttcactttaatttcaggaacgggagggcccaagacggaggaaagactgccacccacagtgactgatggag

SEQ ID NO: 96572 - DNA, 76 bp, Homo sapiens
aatttcaggaacgggagggcccaagacggaggaaagactgccacccacagtgactgatggaggtggtgcagctgca

SEQ ID NO: 96573 - DNA, 78 bp, Homo sapiens
acgggagggcccaagacggaggaaagactgccacccacagtgactgatggaggtggtgcagctgcaatggtggtgatg

SEQ ID NO: 96574 - DNA, 80 bp, Homo sapiens
aagacggaggaaagactgccacccacagtgactgatggaggtggtgcagctgcaatggtggtgatgggtggagtgatggg

SEQ ID NO: 96575 - DNA, 81 bp, Homo sapiens
aaagactgccacccacagtgactgatggaggtggtgcagctgcaatggtggtgatgggtggagtgatggggaccgctccag

SEQ ID NO: 96576 - DNA, 81 bp, Homo sapiens
ccacagtgactgatggaggtggtgcagctgcaatggtggtgatgggtggagtgatggggaccgctccaggaatggttgaaa

SEQ ID NO: 96577 - DNA, 79 bp, Homo sapiens
actgatggaggtggtgcagctgcaatggtggtgatgggtggagtgatggggaccgctccaggaatggttgaaagggcaa

SEQ ID NO: 96578 - DNA, 79 bp, Homo sapiens
gtgcagctgcaatggtggtgatgggtggagtgatggggaccgctccaggaatggttgaaagggcaacggctggttgtga

SEQ ID NO: 96579 - DNA, 72 bp, Homo sapiens
aatggtggtgatgggtggagtgatggggaccgctccaggaatggttgaaagggcaacggctggttgtgacgg

SEQ ID NO: 96580 - DNA, 71 bp, Homo sapiens
atgggtggagtgatggggaccgctccaggaatggttgaaagggcaacggctggttgtgacgggggactggc

SEQ ID NO: 96581 - DNA, 76 bp, Homo sapiens
agtgatggggaccgctccaggaatggttgaaagggcaacggctggttgtgacgggggactggctgctgcaatcata

SEQ ID NO: 96582 - DNA, 75 bp, Homo sapiens
accgctccaggaatggttgaaagggcaacggctggttgtgacgggggactggctgctgcaatcatagttggaatg

SEQ ID NO: 96583 - DNA, 74 bp, Homo sapiens
aggaatggttgaaagggcaacggctggttgtgacgggggactggctgctgcaatcatagttggaatggtcggtg

SEQ ID NO: 96584 - DNA, 74 bp, Homo sapiens
aaagggcaacggctggttgtgacgggggactggctgctgcaatcatagttggaatggtcggtgggggctgctgg

SEQ ID NO: 96585 - DNA, 76 bp, Homo sapiens
acggctggttgtgacgggggactggctgctgcaatcatagttggaatggtcggtgggggctgctgggcagttggag

SEQ ID NO: 96586 - DNA, 76 bp, Homo sapiens
cgggggactggctgctgcaatcatagttggaatggtcggtgggggctgctgggcagttggagggacggcaatggta

SEQ ID NO: 96587 - DNA, 79 bp, Homo sapiens
ctgctgcaatcatagttggaatggtcggtgggggctgctgggcagttggagggacggcaatggtaggctgatcattatt

SEQ ID NO: 96588 - DNA, 76 bp, Homo sapiens
aatcatagttggaatggtcggtgggggctgctgggcagttggagggacggcaatggtaggctgatcattattttga

SEQ ID NO: 96589 - DNA, 77 bp, Homo sapiens
ttggaatggtcggtgggggctgctgggcagttggagggacggcaatggtaggctgatcattattttgattggataca

SEQ ID NO: 96590 - DNA, 79 bp, Homo sapiens
ggcagttggagggacggcaatggtaggctgatcattattttgattggatacagtctccatggacacagtgaccggagtg

SEQ ID NO: 96591 - DNA, 80 bp, Homo sapiens
agggacggcaatggtaggctgatcattattttgattggatacagtctccatggacacagtgaccggagtggccatagaca

SEQ ID NO: 96592 - DNA, 78 bp, Homo sapiens
atcattattttgattggatacagtctccatggacacagtgaccggagtggccatagacacgtggatttcagacttggg

SEQ ID NO: 96593 - DNA, 76 bp, Homo sapiens
atacagtctccatggacacagtgaccggagtggccatagacacgtggatttcagacttgggtttggcactaaaaca

SEQ ID NO: 96594 - DNA, 73 bp, Homo sapiens
atggacacagtgaccggagtggccatagacacgtggatttcagacttgggtttggcactaaaacacaaaagaa

SEQ ID NO: 96595 - DNA, 72 bp, Homo sapiens
accggagtggccatagacacgtggatttcagacttgggtttggcactaaaacacaaaagaaaagcacatgta

SEQ ID NO: 96596 - DNA, 75 bp, Homo sapiens
acgatgtgtgggtaaaagcaagagtgcgaagaacacttaggtgctcaccctgcaggcctaggtgacccagacgta

SEQ ID NO: 96597 - DNA, 77 bp, Homo sapiens
taaaagcaagagtgcgaagaacacttaggtgctcaccctgcaggcctaggtgacccagacgtactccgcatagagct

SEQ ID NO: 96598 - DNA, 76 bp, Homo sapiens
aagagtgcgaagaacacttaggtgctcaccctgcaggcctaggtgacccagacgtactccgcatagagctttccac

SEQ ID NO: 96599 - DNA, 76 bp, Homo sapiens
agaacacttaggtgctcaccctgcaggcctaggtgacccagacgtactccgcatagagctttccactcgaggacta

SEQ ID NO: 96600 - DNA, 80 bp, Homo sapiens
taggtgctcaccctgcaggcctaggtgacccagacgtactccgcatagagctttccactcgaggactagcaacatcagga

SEQ ID NO: 96601 - DNA, 79 bp, Homo sapiens
ccctgcaggcctaggtgacccagacgtactccgcatagagctttccactcgaggactagcaacatcaggaggctgagga

SEQ ID NO: 96602 - DNA, 73 bp, Homo sapiens
caggaggctgaggaggaatgagggttttccgaactgccattctgaaagagacaagagacaaacccggagaaca

SEQ ID NO: 96603 - DNA, 76 bp, Homo sapiens
ttatatccagaaccagaggtgtcattcggcactaccaggtctactcacccatctgtggcaggtttcttccggagta

SEQ ID NO: 96604 - DNA, 76 bp, Homo sapiens
agaaccagaggtgtcattcggcactaccaggtctactcacccatctgtggcaggtttcttccggagtatgcttggc

SEQ ID NO: 96605 - DNA, 78 bp, Homo sapiens
ggtgtcattcggcactaccaggtctactcacccatctgtggcaggtttcttccggagtatgcttggccgtggcgatga

SEQ ID NO: 96606 - DNA, 75 bp, Homo sapiens
actaccaggtctactcacccatctgtggcaggtttcttccggagtatgcttggccgtggcgatgagccctgggcg

SEQ ID NO: 96607 - DNA, 77 bp, Homo sapiens
tactcacccatctgtggcaggtttcttccggagtatgcttggccgtggcgatgagccctgggcgggagcgttggtgc

SEQ ID NO: 96608 - DNA, 78 bp, Homo sapiens
atctgtggcaggtttcttccggagtatgcttggccgtggcgatgagccctgggcgggagcgttggtgctagcactctg

SEQ ID NO: 96609 - DNA, 76 bp, Homo sapiens
aggtttcttccggagtatgcttggccgtggcgatgagccctgggcgggagcgttggtgctagcactctggctgtgg

SEQ ID NO: 96610 - DNA, 79 bp, Homo sapiens
agtatgcttggccgtggcgatgagccctgggcgggagcgttggtgctagcactctggctgtgggtctgcaccacggttg

SEQ ID NO: 96611 - DNA, 81 bp, Homo sapiens
ttggccgtggcgatgagccctgggcgggagcgttggtgctagcactctggctgtgggtctgcaccacggttgttgctgctg

SEQ ID NO: 96612 - DNA, 84 bp, Homo sapiens
atgagccctgggcgggagcgttggtgctagcactctggctgtgggtctgcaccacggttgttgctgctggagcagcactgaatg

SEQ ID NO: 96613 - DNA, 85 bp, Homo sapiens
ggcgggagcgttggtgctagcactctggctgtgggtctgcaccacggttgttgctgctggagcagcactgaatggattgctaata

SEQ ID NO: 96614 - DNA, 83 bp, Homo sapiens
agcgttggtgctagcactctggctgtgggtctgcaccacggttgttgctgctggagcagcactgaatggattgctaatagggt

SEQ ID NO: 96615 - DNA, 82 bp, Homo sapiens
actctggctgtgggtctgcaccacggttgttgctgctggagcagcactgaatggattgctaatagggttggccacaattgtg

SEQ ID NO: 96616 - DNA, 83 bp, Homo sapiens
ctgtgggtctgcaccacggttgttgctgctggagcagcactgaatggattgctaatagggttggccacaattgtggctccatc

SEQ ID NO: 96617 - DNA, 82 bp, Homo sapiens
accacggttgttgctgctggagcagcactgaatggattgctaatagggttggccacaattgtggctccatctgccaacacca

SEQ ID NO: 96618 - DNA, 86 bp, Homo sapiens
ttgttgctgctggagcagcactgaatggattgctaatagggttggccacaattgtggctccatctgccaacaccactgctacagga

SEQ ID NO: 96619 - DNA, 84 bp, Homo sapiens
agcagcactgaatggattgctaatagggttggccacaattgtggctccatctgccaacaccactgctacaggagagaggcaaca

SEQ ID NO: 96620 - DNA, 79 bp, Homo sapiens
aatggattgctaatagggttggccacaattgtggctccatctgccaacaccactgctacaggagagaggcaacaggaaa

SEQ ID NO: 96621 - DNA, 79 bp, Homo sapiens
taatagggttggccacaattgtggctccatctgccaacaccactgctacaggagagaggcaacaggaaagaacattgaa

SEQ ID NO: 96622 - DNA, 72 bp, Homo sapiens
ttttctccaaaccaccttctatgcaaaaatttaaaattacctgaagtctttccttcaggctgaggctgctga

SEQ ID NO: 96623 - DNA, 72 bp, Homo sapiens
aaccaccttctatgcaaaaatttaaaattacctgaagtctttccttcaggctgaggctgctgagtacccata

SEQ ID NO: 96624 - DNA, 73 bp, Homo sapiens
aaaaatttaaaattacctgaagtctttccttcaggctgaggctgctgagtacccataggtgcaggctgaagcc

SEQ ID NO: 96625 - DNA, 77 bp, Homo sapiens
aaattacctgaagtctttccttcaggctgaggctgctgagtacccataggtgcaggctgaagcccttgtgtgttgat

SEQ ID NO: 96626 - DNA, 79 bp, Homo sapiens
aagtctttccttcaggctgaggctgctgagtacccataggtgcaggctgaagcccttgtgtgttgattggggttgctga

SEQ ID NO: 96627 - DNA, 81 bp, Homo sapiens
ttccttcaggctgaggctgctgagtacccataggtgcaggctgaagcccttgtgtgttgattggggttgctgagtgaattc

SEQ ID NO: 96628 - DNA, 80 bp, Homo sapiens
aggctgctgagtacccataggtgcaggctgaagcccttgtgtgttgattggggttgctgagtgaattccctgtgtgccaa

SEQ ID NO: 96629 - DNA, 79 bp, Homo sapiens
agtacccataggtgcaggctgaagcccttgtgtgttgattggggttgctgagtgaattccctgtgtgccaagtggtgca

SEQ ID NO: 96630 - DNA, 81 bp, Homo sapiens
taggtgcaggctgaagcccttgtgtgttgattggggttgctgagtgaattccctgtgtgccaagtggtgcaggctgtatcc

SEQ ID NO: 96631 - DNA, 76 bp, Homo sapiens
aagcccttgtgtgttgattggggttgctgagtgaattccctgtgtgccaagtggtgcaggctgtatccctggggtc

SEQ ID NO: 96632 - DNA, 77 bp, Homo sapiens
tgtgtgttgattggggttgctgagtgaattccctgtgtgccaagtggtgcaggctgtatccctggggtcccaatggg

SEQ ID NO: 96633 - DNA, 76 bp, Homo sapiens
gttgctgagtgaattccctgtgtgccaagtggtgcaggctgtatccctggggtcccaatgggggccggctggatac

SEQ ID NO: 96634 - DNA, 75 bp, Homo sapiens
tgagtgaattccctgtgtgccaagtggtgcaggctgtatccctggggtcccaatgggggccggctggataccctg

SEQ ID NO: 96635 - DNA, 74 bp, Homo sapiens
tgtgtgccaagtggtgcaggctgtatccctggggtcccaatgggggccggctggataccctgggtactgatggg

SEQ ID NO: 96636 - DNA, 73 bp, Homo sapiens
aagtggtgcaggctgtatccctggggtcccaatgggggccggctggataccctgggtactgatgggtgctggc

SEQ ID NO: 96637 - DNA, 73 bp, Homo sapiens
tgtatccctggggtcccaatgggggccggctggataccctgggtactgatgggtgctggctggatcccttgaa

SEQ ID NO: 96638 - DNA, 78 bp, Homo sapiens
ggtcccaatgggggccggctggataccctgggtactgatgggtgctggctggatcccttgaatatgtcgagcatgcga

SEQ ID NO: 96639 - DNA, 85 bp, Homo sapiens
ggggccggctggataccctgggtactgatgggtgctggctggatcccttgaatatgtcgagcatgcgatgcatccactgtcatca

SEQ ID NO: 96640 - DNA, 87 bp, Homo sapiens
ctggataccctgggtactgatgggtgctggctggatcccttgaatatgtcgagcatgcgatgcatccactgtcatcaactgcatggg

SEQ ID NO: 96641 - DNA, 86 bp, Homo sapiens
tgggtactgatgggtgctggctggatcccttgaatatgtcgagcatgcgatgcatccactgtcatcaactgcatggggtttaggtg

SEQ ID NO: 96642 - DNA, 84 bp, Homo sapiens
atgggtgctggctggatcccttgaatatgtcgagcatgcgatgcatccactgtcatcaactgcatggggtttaggtggacggta

SEQ ID NO: 96643 - DNA, 82 bp, Homo sapiens
tggatcccttgaatatgtcgagcatgcgatgcatccactgtcatcaactgcatggggtttaggtggacggtagacgctaccc

SEQ ID NO: 96644 - DNA, 83 bp, Homo sapiens
agcatgcgatgcatccactgtcatcaactgcatggggtttaggtggacggtagacgctaccccaacaccagtctgagctgtga

SEQ ID NO: 96645 - DNA, 82 bp, Homo sapiens
atgcatccactgtcatcaactgcatggggtttaggtggacggtagacgctaccccaacaccagtctgagctgtgatggcaga

SEQ ID NO: 96646 - DNA, 77 bp, Homo sapiens
actgtcatcaactgcatggggtttaggtggacggtagacgctaccccaacaccagtctgagctgtgatggcagagtt

SEQ ID NO: 96647 - DNA, 77 bp, Homo sapiens
actgcatggggtttaggtggacggtagacgctaccccaacaccagtctgagctgtgatggcagagtttggagcctga

SEQ ID NO: 96648 - DNA, 77 bp, Homo sapiens
tttaggtggacggtagacgctaccccaacaccagtctgagctgtgatggcagagtttggagcctgagctgaaactaa

SEQ ID NO: 96649 - DNA, 77 bp, Homo sapiens
agtctgagctgtgatggcagagtttggagcctgagctgaaactaaaaatgatgcgaaaggtaactataagaaggtta

SEQ ID NO: 96650 - DNA, 75 bp, Homo sapiens
tgttggcaaaagttaaactgtgaaaagtcatctaaaaagcagggctcatacctggatactgtcggatagtggaca

SEQ ID NO: 96651 - DNA, 75 bp, Homo sapiens
taaactgtgaaaagtcatctaaaaagcagggctcatacctggatactgtcggatagtggacacggaactggtgat

SEQ ID NO: 96652 - DNA, 74 bp, Homo sapiens
aaagtcatctaaaaagcagggctcatacctggatactgtcggatagtggacacggaactggtgattggggtgta

SEQ ID NO: 96653 - DNA, 75 bp, Homo sapiens
taaaaagcagggctcatacctggatactgtcggatagtggacacggaactggtgattggggtgtaggtatgtgcc

SEQ ID NO: 96654 - DNA, 78 bp, Homo sapiens
ctcatacctggatactgtcggatagtggacacggaactggtgattggggtgtaggtatgtgccgccagtgggtatgca

SEQ ID NO: 96655 - DNA, 76 bp, Homo sapiens
cctggatactgtcggatagtggacacggaactggtgattggggtgtaggtatgtgccgccagtgggtatgcagaag

SEQ ID NO: 96656 - DNA, 71 bp, Homo sapiens
atagtggacacggaactggtgattggggtgtaggtatgtgccgccagtgggtatgcagaaggggggtaagt

SEQ ID NO: 96657 - DNA, 70 bp, Homo sapiens
acggaactggtgattggggtgtaggtatgtgccgccagtgggtatgcagaaggggggtaagttggcaaaa

SEQ ID NO: 96658 - DNA, 71 bp, Homo sapiens
gtgattggggtgtaggtatgtgccgccagtgggtatgcagaaggggggtaagttggcaaaaaatattggaa

SEQ ID NO: 96659 - DNA, 70 bp, Homo sapiens
taggtatgtgccgccagtgggtatgcagaaggggggtaagttggcaaaaaatattggaactgaacgggaa

SEQ ID NO: 96660 - DNA, 70 bp, Homo sapiens
atgtgccgccagtgggtatgcagaaggggggtaagttggcaaaaaatattggaactgaacgggaacagac

SEQ ID NO: 96661 - DNA, 70 bp, Homo sapiens
gtatgcagaaggggggtaagttggcaaaaaatattggaactgaacgggaacagacggtctagagacagaa

SEQ ID NO: 96662 - DNA, 69 bp, Homo sapiens
aaggggggtaagttggcaaaaaatattggaactgaacgggaacagacggtctagagacagaacagatga

SEQ ID NO: 96663 - DNA, 73 bp, Homo sapiens
taagttggcaaaaaatattggaactgaacgggaacagacggtctagagacagaacagatgatagcaaacaaaa

SEQ ID NO: 96664 - DNA, 77 bp, Homo sapiens
agaacgattaatgacacagtgaggcagaataactgacacacagcctcctacctgttgtcacttcgggtttccatggc

SEQ ID NO: 96665 - DNA, 77 bp, Homo sapiens
acagtgaggcagaataactgacacacagcctcctacctgttgtcacttcgggtttccatggccacaggattgggaga

SEQ ID NO: 96666 - DNA, 74 bp, Homo sapiens
agaataactgacacacagcctcctacctgttgtcacttcgggtttccatggccacaggattgggagaggcccga

SEQ ID NO: 96667 - DNA, 74 bp, Homo sapiens
aactgacacacagcctcctacctgttgtcacttcgggtttccatggccacaggattgggagaggcccgatgtcc

SEQ ID NO: 96668 - DNA, 74 bp, Homo sapiens
ctcctacctgttgtcacttcgggtttccatggccacaggattgggagaggcccgatgtccggagatgggaatca

SEQ ID NO: 96669 - DNA, 75 bp, Homo sapiens
ctgttgtcacttcgggtttccatggccacaggattgggagaggcccgatgtccggagatgggaatcaggctactc

SEQ ID NO: 96670 - DNA, 75 bp, Homo sapiens
ggtttccatggccacaggattgggagaggcccgatgtccggagatgggaatcaggctactcctctcggcagggta

SEQ ID NO: 96671 - DNA, 78 bp, Homo sapiens
gccacaggattgggagaggcccgatgtccggagatgggaatcaggctactcctctcggcagggtagtctggctggatc

SEQ ID NO: 96672 - DNA, 76 bp, Homo sapiens
attgggagaggcccgatgtccggagatgggaatcaggctactcctctcggcagggtagtctggctggatccgagga

SEQ ID NO: 96673 - DNA, 79 bp, Homo sapiens
ccgatgtccggagatgggaatcaggctactcctctcggcagggtagtctggctggatccgaggagaagtgtgcgtgatc

SEQ ID NO: 96674 - DNA, 80 bp, Homo sapiens
gtccggagatgggaatcaggctactcctctcggcagggtagtctggctggatccgaggagaagtgtgcgtgatctgctgg

SEQ ID NO: 96675 - DNA, 79 bp, Homo sapiens
aatcaggctactcctctcggcagggtagtctggctggatccgaggagaagtgtgcgtgatctgctggggcaccaccttg

SEQ ID NO: 96676 - DNA, 81 bp, Homo sapiens
tactcctctcggcagggtagtctggctggatccgaggagaagtgtgcgtgatctgctggggcaccaccttggctgcaaaca

SEQ ID NO: 96677 - DNA, 79 bp, Homo sapiens
agggtagtctggctggatccgaggagaagtgtgcgtgatctgctggggcaccaccttggctgcaaacagtaaatgccaa

SEQ ID NO: 96678 - DNA, 82 bp, Homo sapiens
tggctggatccgaggagaagtgtgcgtgatctgctggggcaccaccttggctgcaaacagtaaatgccaattccatgaccat

SEQ ID NO: 96679 - DNA, 76 bp, Homo sapiens
ggttacagcactcctggtaagcttctgtccgaaggcagcaggccacttaccgactgggatgtttgaggtggtcaca

SEQ ID NO: 96680 - DNA, 78 bp, Homo sapiens
actcctggtaagcttctgtccgaaggcagcaggccacttaccgactgggatgtttgaggtggtcacagcagtagcatg

SEQ ID NO: 96681 - DNA, 78 bp, Homo sapiens
agcttctgtccgaaggcagcaggccacttaccgactgggatgtttgaggtggtcacagcagtagcatgggaggaatgg

SEQ ID NO: 96682 - DNA, 78 bp, Homo sapiens
aggcagcaggccacttaccgactgggatgtttgaggtggtcacagcagtagcatgggaggaatgggagggtactgtca

SEQ ID NO: 96683 - DNA, 75 bp, Homo sapiens
acttaccgactgggatgtttgaggtggtcacagcagtagcatgggaggaatgggagggtactgtcatggtaacaa

SEQ ID NO: 96684 - DNA, 76 bp, Homo sapiens
actgggatgtttgaggtggtcacagcagtagcatgggaggaatgggagggtactgtcatggtaacaatggtacttg

SEQ ID NO: 96685 - DNA, 77 bp, Homo sapiens
tgtttgaggtggtcacagcagtagcatgggaggaatgggagggtactgtcatggtaacaatggtacttgtgggagct

SEQ ID NO: 96686 - DNA, 80 bp, Homo sapiens
acagcagtagcatgggaggaatgggagggtactgtcatggtaacaatggtacttgtgggagcttgcgtgtgtgacacaga

SEQ ID NO: 96687 - DNA, 77 bp, Homo sapiens
atgggaggaatgggagggtactgtcatggtaacaatggtacttgtgggagcttgcgtgtgtgacacagatcctgaaa

SEQ ID NO: 96688 - DNA, 76 bp, Homo sapiens
aggaatgggagggtactgtcatggtaacaatggtacttgtgggagcttgcgtgtgtgacacagatcctgaaatagg

SEQ ID NO: 96689 - DNA, 74 bp, Homo sapiens
gggtactgtcatggtaacaatggtacttgtgggagcttgcgtgtgtgacacagatcctgaaataggggaaaaaa

SEQ ID NO: 96690 - DNA, 72 bp, Homo sapiens
atggtaacaatggtacttgtgggagcttgcgtgtgtgacacagatcctgaaataggggaaaaaaggaaattc

SEQ ID NO: 96691 - DNA, 72 bp, Homo sapiens
atcactcttgcctcctttttccccagtagaaggaagaggagggtcgtggacttaccagctgtggtcgctgaa

SEQ ID NO: 96692 - DNA, 70 bp, Homo sapiens
ctttttccccagtagaaggaagaggagggtcgtggacttaccagctgtggtcgctgaaggaatggtgttg

SEQ ID NO: 96693 - DNA, 72 bp, Homo sapiens
agtagaaggaagaggagggtcgtggacttaccagctgtggtcgctgaaggaatggtgttggttgccaaaata

SEQ ID NO: 96694 - DNA, 73 bp, Homo sapiens
aagaggagggtcgtggacttaccagctgtggtcgctgaaggaatggtgttggttgccaaaataggtgctactg

SEQ ID NO: 96695 - DNA, 77 bp, Homo sapiens
agggtcgtggacttaccagctgtggtcgctgaaggaatggtgttggttgccaaaataggtgctactgtggctgcagc

SEQ ID NO: 96696 - DNA, 81 bp, Homo sapiens
ttaccagctgtggtcgctgaaggaatggtgttggttgccaaaataggtgctactgtggctgcagccactggcgtgccagta

SEQ ID NO: 96697 - DNA, 80 bp, Homo sapiens
tcgctgaaggaatggtgttggttgccaaaataggtgctactgtggctgcagccactggcgtgccagtactgaagattgtt

SEQ ID NO: 96698 - DNA, 77 bp, Homo sapiens
aaggaatggtgttggttgccaaaataggtgctactgtggctgcagccactggcgtgccagtactgaagattgttttc

SEQ ID NO: 96699 - DNA, 79 bp, Homo sapiens
tgttggttgccaaaataggtgctactgtggctgcagccactggcgtgccagtactgaagattgttttctgtgagggaaa

SEQ ID NO: 96700 - DNA, 76 bp, Homo sapiens
aaaataggtgctactgtggctgcagccactggcgtgccagtactgaagattgttttctgtgagggaaaccccacaa

SEQ ID NO: 96701 - DNA, 78 bp, Homo sapiens
tgtggctgcagccactggcgtgccagtactgaagattgttttctgtgagggaaaccccacaacacagttataagaaca

SEQ ID NO: 96702 - DNA, 74 bp, Homo sapiens
agccactggcgtgccagtactgaagattgttttctgtgagggaaaccccacaacacagttataagaacattatc

SEQ ID NO: 96703 - DNA, 68 bp, Homo sapiens
tttggttttacccaacaaagtacacaggtggttctccacttttggttttacctgagccattgtatgaa

SEQ ID NO: 96704 - DNA, 72 bp, Homo sapiens
aacaaagtacacaggtggttctccacttttggttttacctgagccattgtatgaagctgctgttttggcgtc

SEQ ID NO: 96705 - DNA, 75 bp, Homo sapiens
tacacaggtggttctccacttttggttttacctgagccattgtatgaagctgctgttttggcgtccctaatgcag

SEQ ID NO: 96706 - DNA, 76 bp, Homo sapiens
ttctccacttttggttttacctgagccattgtatgaagctgctgttttggcgtccctaatgcagggtgagatggta

SEQ ID NO: 96707 - DNA, 77 bp, Homo sapiens
tttggttttacctgagccattgtatgaagctgctgttttggcgtccctaatgcagggtgagatggtagtgtgattct

SEQ ID NO: 96708 - DNA, 82 bp, Homo sapiens
agccattgtatgaagctgctgttttggcgtccctaatgcagggtgagatggtagtgtgattcttgttgtgacatctcgtgac

SEQ ID NO: 96709 - DNA, 83 bp, Homo sapiens
tatgaagctgctgttttggcgtccctaatgcagggtgagatggtagtgtgattcttgttgtgacatctcgtgactgggcagga

SEQ ID NO: 96710 - DNA, 81 bp, Homo sapiens
tgttttggcgtccctaatgcagggtgagatggtagtgtgattcttgttgtgacatctcgtgactgggcaggacgctgaata

SEQ ID NO: 96711 - DNA, 87 bp, Homo sapiens
tccctaatgcagggtgagatggtagtgtgattcttgttgtgacatctcgtgactgggcaggacgctgaatactgattgctgcagatg

SEQ ID NO: 96712 - DNA, 89 bp, Homo sapiens
ggtgagatggtagtgtgattcttgttgtgacatctcgtgactgggcaggacgctgaatactgattgctgcagatggaggatgctggata

SEQ ID NO: 96713 - DNA, 88 bp, Homo sapiens
atggtagtgtgattcttgttgtgacatctcgtgactgggcaggacgctgaatactgattgctgcagatggaggatgctggatagacaa

SEQ ID NO: 96714 - DNA, 86 bp, Homo sapiens
ttcttgttgtgacatctcgtgactgggcaggacgctgaatactgattgctgcagatggaggatgctggatagacaaggttggccta

SEQ ID NO: 96715 - DNA, 85 bp, Homo sapiens
catctcgtgactgggcaggacgctgaatactgattgctgcagatggaggatgctggatagacaaggttggcctactgaaaagata

SEQ ID NO: 96716 - DNA, 81 bp, Homo sapiens
actgggcaggacgctgaatactgattgctgcagatggaggatgctggatagacaaggttggcctactgaaaagataacaaa

SEQ ID NO: 96717 - DNA, 81 bp, Homo sapiens
aggacgctgaatactgattgctgcagatggaggatgctggatagacaaggttggcctactgaaaagataacaaagacacaa

SEQ ID NO: 96718 - DNA, 84 bp, Homo sapiens
aatactgattgctgcagatggaggatgctggatagacaaggttggcctactgaaaagataacaaagacacaatgcagatgggca

SEQ ID NO: 96719 - DNA, 80 bp, Homo sapiens
gaggaggatggcaggaaggttcaaacttcatactccccatgtatacctaagtgctgaatcagtagcatgcgccgctgtcg

SEQ ID NO: 96720 - DNA, 82 bp, Homo sapiens
atggcaggaaggttcaaacttcatactccccatgtatacctaagtgctgaatcagtagcatgcgccgctgtcgtagtgatga

SEQ ID NO: 96721 - DNA, 81 bp, Homo sapiens
aaggttcaaacttcatactccccatgtatacctaagtgctgaatcagtagcatgcgccgctgtcgtagtgatgactggaga

SEQ ID NO: 96722 - DNA, 88 bp, Homo sapiens
ttcatactccccatgtatacctaagtgctgaatcagtagcatgcgccgctgtcgtagtgatgactggagactgagctctggtggctga

SEQ ID NO: 96723 - DNA, 88 bp, Homo sapiens
atgtatacctaagtgctgaatcagtagcatgcgccgctgtcgtagtgatgactggagactgagctctggtggctgagacagttgctac

SEQ ID NO: 96724 - DNA, 90 bp, Homo sapiens
ctaagtgctgaatcagtagcatgcgccgctgtcgtagtgatgactggagactgagctctggtggctgagacagttgctaccacagcagga

SEQ ID NO: 96725 - DNA, 89 bp, Homo sapiens
aatcagtagcatgcgccgctgtcgtagtgatgactggagactgagctctggtggctgagacagttgctaccacagcaggagggatggca

SEQ ID NO: 96726 - DNA, 86 bp, Homo sapiens
atgcgccgctgtcgtagtgatgactggagactgagctctggtggctgagacagttgctaccacagcaggagggatggcattggagg

SEQ ID NO: 96727 - DNA, 86 bp, Homo sapiens
tgtcgtagtgatgactggagactgagctctggtggctgagacagttgctaccacagcaggagggatggcattggaggtggtcacag

SEQ ID NO: 96728 - DNA, 84 bp, Homo sapiens
tggagactgagctctggtggctgagacagttgctaccacagcaggagggatggcattggaggtggtcacaggtggccgagacta

SEQ ID NO: 96729 - DNA, 80 bp, Homo sapiens
gctctggtggctgagacagttgctaccacagcaggagggatggcattggaggtggtcacaggtggccgagactaccaaaa

SEQ ID NO: 96730 - DNA, 77 bp, Homo sapiens
ctgagacagttgctaccacagcaggagggatggcattggaggtggtcacaggtggccgagactaccaaaagagaaaa

SEQ ID NO: 96731 - DNA, 74 bp, Homo sapiens
acagttgctaccacagcaggagggatggcattggaggtggtcacaggtggccgagactaccaaaagagaaaaaa

SEQ ID NO: 96732 - DNA, 72 bp, Homo sapiens
agcaggagggatggcattggaggtggtcacaggtggccgagactaccaaaagagaaaaaacagttcatttaa

SEQ ID NO: 96733 - DNA, 78 bp, Homo sapiens
aatgaataactccaatgaggcccttaatgcaccccaggctccgacgtgcctggattggttggtgaatgatgtgctgta

SEQ ID NO: 96734 - DNA, 81 bp, Homo sapiens
actccaatgaggcccttaatgcaccccaggctccgacgtgcctggattggttggtgaatgatgtgctgtactgctggctga

SEQ ID NO: 96735 - DNA, 84 bp, Homo sapiens
ccttaatgcaccccaggctccgacgtgcctggattggttggtgaatgatgtgctgtactgctggctgagcagtagcagcatttg

SEQ ID NO: 96736 - DNA, 87 bp, Homo sapiens
cccaggctccgacgtgcctggattggttggtgaatgatgtgctgtactgctggctgagcagtagcagcatttggcagctgtgaggtc

SEQ ID NO: 96737 - DNA, 87 bp, Homo sapiens
acgtgcctggattggttggtgaatgatgtgctgtactgctggctgagcagtagcagcatttggcagctgtgaggtcggcctcaggac

SEQ ID NO: 96738 - DNA, 86 bp, Homo sapiens
attggttggtgaatgatgtgctgtactgctggctgagcagtagcagcatttggcagctgtgaggtcggcctcaggactgtggttac

SEQ ID NO: 96739 - DNA, 87 bp, Homo sapiens
tgaatgatgtgctgtactgctggctgagcagtagcagcatttggcagctgtgaggtcggcctcaggactgtggttactttagaactg

SEQ ID NO: 96740 - DNA, 85 bp, Homo sapiens
ctgtactgctggctgagcagtagcagcatttggcagctgtgaggtcggcctcaggactgtggttactttagaactggacatcaca

SEQ ID NO: 96741 - DNA, 89 bp, Homo sapiens
ctgctggctgagcagtagcagcatttggcagctgtgaggtcggcctcaggactgtggttactttagaactggacatcacagcagcagca

SEQ ID NO: 96742 - DNA, 87 bp, Homo sapiens
tagcagcatttggcagctgtgaggtcggcctcaggactgtggttactttagaactggacatcacagcagcagcagctgcacctgaaa

SEQ ID NO: 96743 - DNA, 82 bp, Homo sapiens
atttggcagctgtgaggtcggcctcaggactgtggttactttagaactggacatcacagcagcagcagctgcacctgaaaaa

SEQ ID NO: 96744 - DNA, 78 bp, Homo sapiens
ctgtgaggtcggcctcaggactgtggttactttagaactggacatcacagcagcagcagctgcacctgaaaaaaaaaa

SEQ ID NO: 96745 - DNA, 74 bp, Homo sapiens
tatatctactactacattttgagagtttgaacaaaacttgcaagtcgttacctcgaggtaaatgagaagctcca

SEQ ID NO: 96746 - DNA, 73 bp, Homo sapiens
actacattttgagagtttgaacaaaacttgcaagtcgttacctcgaggtaaatgagaagctccaatgtgaaga

SEQ ID NO: 96747 - DNA, 71 bp, Homo sapiens
agagtttgaacaaaacttgcaagtcgttacctcgaggtaaatgagaagctccaatgtgaagagggggccca

SEQ ID NO: 96748 - DNA, 75 bp, Homo sapiens
acaaaacttgcaagtcgttacctcgaggtaaatgagaagctccaatgtgaagagggggcccaggagcattgctgc

SEQ ID NO: 96749 - DNA, 77 bp, Homo sapiens
aagtcgttacctcgaggtaaatgagaagctccaatgtgaagagggggcccaggagcattgctgcggatgatagacat

SEQ ID NO: 96750 - DNA, 83 bp, Homo sapiens
aggtaaatgagaagctccaatgtgaagagggggcccaggagcattgctgcggatgatagacatttgcacatttgtagtcatga

SEQ ID NO: 96751 - DNA, 88 bp, Homo sapiens
aatgagaagctccaatgtgaagagggggcccaggagcattgctgcggatgatagacatttgcacatttgtagtcatgatgtgatgcag

SEQ ID NO: 96752 - DNA, 85 bp, Homo sapiens
aatgtgaagagggggcccaggagcattgctgcggatgatagacatttgcacatttgtagtcatgatgtgatgcaggttactggga

SEQ ID NO: 96753 - DNA, 86 bp, Homo sapiens
gggcccaggagcattgctgcggatgatagacatttgcacatttgtagtcatgatgtgatgcaggttactgggatggccctgaaaga

SEQ ID NO: 96754 - DNA, 86 bp, Homo sapiens
agcattgctgcggatgatagacatttgcacatttgtagtcatgatgtgatgcaggttactgggatggccctgaaagaaagaggata

SEQ ID NO: 96755 - DNA, 81 bp, Homo sapiens
ggatgatagacatttgcacatttgtagtcatgatgtgatgcaggttactgggatggccctgaaagaaagaggatagaacgt

SEQ ID NO: 96756 - DNA, 77 bp, Homo sapiens
catttgcacatttgtagtcatgatgtgatgcaggttactgggatggccctgaaagaaagaggatagaacgttatttt

SEQ ID NO: 96757 - DNA, 75 bp, Homo sapiens
atttgtagtcatgatgtgatgcaggttactgggatggccctgaaagaaagaggatagaacgttatttttacatgt

SEQ ID NO: 96758 - DNA, 71 bp, Homo sapiens
agtttggcatttcagtttgaaaatcagcaaattaaaaggaagaaaaacctgttgtccactgattgttgcca

SEQ ID NO: 96759 - DNA, 71 bp, Homo sapiens
atttcagtttgaaaatcagcaaattaaaaggaagaaaaacctgttgtccactgattgttgccacaggaatg

SEQ ID NO: 96760 - DNA, 73 bp, Homo sapiens
aaaatcagcaaattaaaaggaagaaaaacctgttgtccactgattgttgccacaggaatggctgaagcttgag

SEQ ID NO: 96761 - DNA, 73 bp, Homo sapiens
aaattaaaaggaagaaaaacctgttgtccactgattgttgccacaggaatggctgaagcttgagggatgctac

SEQ ID NO: 96762 - DNA, 76 bp, Homo sapiens
aaaaacctgttgtccactgattgttgccacaggaatggctgaagcttgagggatgctactctccatggtaacggta

SEQ ID NO: 96763 - DNA, 79 bp, Homo sapiens
tgttgtccactgattgttgccacaggaatggctgaagcttgagggatgctactctccatggtaacggtaacctgccctg

SEQ ID NO: 96764 - DNA, 75 bp, Homo sapiens
attgttgccacaggaatggctgaagcttgagggatgctactctccatggtaacggtaacctgccctggaaccttg

SEQ ID NO: 96765 - DNA, 72 bp, Homo sapiens
ccacaggaatggctgaagcttgagggatgctactctccatggtaacggtaacctgccctggaaccttggggg

SEQ ID NO: 96766 - DNA, 71 bp, Homo sapiens
ctgaagcttgagggatgctactctccatggtaacggtaacctgccctggaaccttggggggaagtgacagg

SEQ ID NO: 96767 - DNA, 70 bp, Homo sapiens
ttgagggatgctactctccatggtaacggtaacctgccctggaaccttggggggaagtgacagggtagaa

SEQ ID NO: 96768 - DNA, 69 bp, Homo sapiens
ctactctccatggtaacggtaacctgccctggaaccttggggggaagtgacagggtagaaggtggagca

SEQ ID NO: 96769 - DNA, 69 bp, Homo sapiens
tggtaacggtaacctgccctggaaccttggggggaagtgacagggtagaaggtggagcaggagcaatgg

SEQ ID NO: 96770 - DNA, 71 bp, Homo sapiens
aacctgccctggaaccttggggggaagtgacagggtagaaggtggagcaggagcaatgggacggctaggca

SEQ ID NO: 96771 - DNA, 71 bp, Homo sapiens
aaccttggggggaagtgacagggtagaaggtggagcaggagcaatgggacggctaggcatggtgggcttcg

SEQ ID NO: 96772 - DNA, 75 bp, Homo sapiens
aagtgacagggtagaaggtggagcaggagcaatgggacggctaggcatggtgggcttcgggggcggctgcaaaca

SEQ ID NO: 96773 - DNA, 73 bp, Homo sapiens
agggtagaaggtggagcaggagcaatgggacggctaggcatggtgggcttcgggggcggctgcaaacagaaaa

SEQ ID NO: 96774 - DNA, 76 bp, Homo sapiens
agcaggagcaatgggacggctaggcatggtgggcttcgggggcggctgcaaacagaaaaccacacaaaacatatca

SEQ ID NO: 96775 - DNA, 71 bp, Homo sapiens
agtctcgagctctggttcagtgtgaagttttaaccctctccattaccttcataagtccctccgaaaatgaa

SEQ ID NO: 96776 - DNA, 70 bp, Homo sapiens
cgagctctggttcagtgtgaagttttaaccctctccattaccttcataagtccctccgaaaatgaaagtg

SEQ ID NO: 96777 - DNA, 72 bp, Homo sapiens
agtgtgaagttttaaccctctccattaccttcataagtccctccgaaaatgaaagtggcactgctggcgtca

SEQ ID NO: 96778 - DNA, 72 bp, Homo sapiens
agttttaaccctctccattaccttcataagtccctccgaaaatgaaagtggcactgctggcgtcaggtgtgc

SEQ ID NO: 96779 - DNA, 79 bp, Homo sapiens
cattaccttcataagtccctccgaaaatgaaagtggcactgctggcgtcaggtgtgctggcggggctgtcactgcaaca

SEQ ID NO: 96780 - DNA, 79 bp, Homo sapiens
cttcataagtccctccgaaaatgaaagtggcactgctggcgtcaggtgtgctggcggggctgtcactgcaacaggtgtg

SEQ ID NO: 96781 - DNA, 86 bp, Homo sapiens
tccgaaaatgaaagtggcactgctggcgtcaggtgtgctggcggggctgtcactgcaacaggtgtggctgatgcgacagcatggtg

SEQ ID NO: 96782 - DNA, 88 bp, Homo sapiens
atgaaagtggcactgctggcgtcaggtgtgctggcggggctgtcactgcaacaggtgtggctgatgcgacagcatggtgtgtcgacaa

SEQ ID NO: 96783 - DNA, 89 bp, Homo sapiens
actgctggcgtcaggtgtgctggcggggctgtcactgcaacaggtgtggctgatgcgacagcatggtgtgtcgacaacatctgcacctg

SEQ ID NO: 96784 - DNA, 87 bp, Homo sapiens
aggtgtgctggcggggctgtcactgcaacaggtgtggctgatgcgacagcatggtgtgtcgacaacatctgcacctgtggatagggc

SEQ ID NO: 96785 - DNA, 85 bp, Homo sapiens
cggggctgtcactgcaacaggtgtggctgatgcgacagcatggtgtgtcgacaacatctgcacctgtggatagggccttaccaca

SEQ ID NO: 96786 - DNA, 84 bp, Homo sapiens
actgcaacaggtgtggctgatgcgacagcatggtgtgtcgacaacatctgcacctgtggatagggccttaccacaacaggctct

SEQ ID NO: 96787 - DNA, 83 bp, Homo sapiens
aacaggtgtggctgatgcgacagcatggtgtgtcgacaacatctgcacctgtggatagggccttaccacaacaggctcttgct

SEQ ID NO: 96788 - DNA, 82 bp, Homo sapiens
ctgatgcgacagcatggtgtgtcgacaacatctgcacctgtggatagggccttaccacaacaggctcttgcttctcctcccg

SEQ ID NO: 96789 - DNA, 77 bp, Homo sapiens
atggtgtgtcgacaacatctgcacctgtggatagggccttaccacaacaggctcttgcttctcctcccgggactgga

SEQ ID NO: 96790 - DNA, 77 bp, Homo sapiens
tgtcgacaacatctgcacctgtggatagggccttaccacaacaggctcttgcttctcctcccgggactggagggagc

SEQ ID NO: 96791 - DNA, 76 bp, Homo sapiens
cacctgtggatagggccttaccacaacaggctcttgcttctcctcccgggactggagggagctgctggaactcatg

SEQ ID NO: 96792 - DNA, 76 bp, Homo sapiens
atagggccttaccacaacaggctcttgcttctcctcccgggactggagggagctgctggaactcatgtgctccctg

SEQ ID NO: 96793 - DNA, 80 bp, Homo sapiens
ttaccacaacaggctcttgcttctcctcccgggactggagggagctgctggaactcatgtgctccctggcactgacttca

SEQ ID NO: 96794 - DNA, 81 bp, Homo sapiens
ctcttgcttctcctcccgggactggagggagctgctggaactcatgtgctccctggcactgacttcagaatctcgaccaga

SEQ ID NO: 96795 - DNA, 82 bp, Homo sapiens
ttctcctcccgggactggagggagctgctggaactcatgtgctccctggcactgacttcagaatctcgaccagattcatcat

SEQ ID NO: 96796 - DNA, 84 bp, Homo sapiens
actggagggagctgctggaactcatgtgctccctggcactgacttcagaatctcgaccagattcatcattgactagtaaagaca

SEQ ID NO: 96797 - DNA, 85 bp, Homo sapiens
agctgctggaactcatgtgctccctggcactgacttcagaatctcgaccagattcatcattgactagtaaagacattaagagtga

SEQ ID NO: 96798 - DNA, 83 bp, Homo sapiens
aactcatgtgctccctggcactgacttcagaatctcgaccagattcatcattgactagtaaagacattaagagtgagacagta

SEQ ID NO: 96799 - DNA, 84 bp, Homo sapiens
tccctggcactgacttcagaatctcgaccagattcatcattgactagtaaagacattaagagtgagacagtatgtcacagtctc

SEQ ID NO: 96800 - DNA, 77 bp, Homo sapiens
tattcttaaagtaggaaaaaatatattagaatattacatatctcacctgtagcagctgggtttatcaatccagcaga

SEQ ID NO: 96801 - DNA, 76 bp, Homo sapiens
taaagtaggaaaaaatatattagaatattacatatctcacctgtagcagctgggtttatcaatccagcagaaccac

SEQ ID NO: 96802 - DNA, 81 bp, Homo sapiens
aaatatattagaatattacatatctcacctgtagcagctgggtttatcaatccagcagaaccactgtttgcaatctgagaa

SEQ ID NO: 96803 - DNA, 80 bp, Homo sapiens
agaatattacatatctcacctgtagcagctgggtttatcaatccagcagaaccactgtttgcaatctgagaaggggcctg

SEQ ID NO: 96804 - DNA, 81 bp, Homo sapiens
acatatctcacctgtagcagctgggtttatcaatccagcagaaccactgtttgcaatctgagaaggggcctggctcagccc

SEQ ID NO: 96805 - DNA, 78 bp, Homo sapiens
tgtagcagctgggtttatcaatccagcagaaccactgtttgcaatctgagaaggggcctggctcagcccggtagaagg

SEQ ID NO: 96806 - DNA, 75 bp, Homo sapiens
gtttatcaatccagcagaaccactgtttgcaatctgagaaggggcctggctcagcccggtagaaggggctcctaa

SEQ ID NO: 96807 - DNA, 73 bp, Homo sapiens
cagcagaaccactgtttgcaatctgagaaggggcctggctcagcccggtagaaggggctcctaaccgaggaaa

SEQ ID NO: 96808 - DNA, 72 bp, Homo sapiens
actgtttgcaatctgagaaggggcctggctcagcccggtagaaggggctcctaaccgaggaaactgttgaga

SEQ ID NO: 96809 - DNA, 70 bp, Homo sapiens
aatctgagaaggggcctggctcagcccggtagaaggggctcctaaccgaggaaactgttgagaactcatt

SEQ ID NO: 96810 - DNA, 70 bp, Homo sapiens
gggcctggctcagcccggtagaaggggctcctaaccgaggaaactgttgagaactcatttccacctgtag

SEQ ID NO: 96811 - DNA, 71 bp, Homo sapiens
tcagcccggtagaaggggctcctaaccgaggaaactgttgagaactcatttccacctgtagtacatacagt

SEQ ID NO: 96812 - DNA, 72 bp, Homo sapiens
tagaaggggctcctaaccgaggaaactgttgagaactcatttccacctgtagtacatacagttatatggtta

SEQ ID NO: 96813 - DNA, 72 bp, Homo sapiens
ggacgggcgatctggggacccgaccacaagacgagcactgtgcctctttacctgtagccgccgcccgccgcc

SEQ ID NO: 96814 - DNA, 72 bp, Homo sapiens
ggacccgaccacaagacgagcactgtgcctctttacctgtagccgccgcccgccgcccgcaccgcccgcttc

SEQ ID NO: 96815 - DNA, 74 bp, Homo sapiens
accacaagacgagcactgtgcctctttacctgtagccgccgcccgccgcccgcaccgcccgcttctatctcgcc

SEQ ID NO: 96816 - DNA, 73 bp, Homo sapiens
acgagcactgtgcctctttacctgtagccgccgcccgccgcccgcaccgcccgcttctatctcgccggcctgg

SEQ ID NO: 96817 - DNA, 71 bp, Homo sapiens
tctttacctgtagccgccgcccgccgcccgcaccgcccgcttctatctcgccggcctgggggtgccgcgga

SEQ ID NO: 96818 - DNA, 72 bp, Homo sapiens
tagccgccgcccgccgcccgcaccgcccgcttctatctcgccggcctgggggtgccgcggagggcccatctc

SEQ ID NO: 96819 - DNA, 72 bp, Homo sapiens
cgccgcccgcaccgcccgcttctatctcgccggcctgggggtgccgcggagggcccatctcggcggcggcga

SEQ ID NO: 96820 - DNA, 73 bp, Homo sapiens
accgcccgcttctatctcgccggcctgggggtgccgcggagggcccatctcggcggcggcgatgtgctcggcg

SEQ ID NO: 96821 - DNA, 74 bp, Homo sapiens
ccgcttctatctcgccggcctgggggtgccgcggagggcccatctcggcggcggcgatgtgctcggcgggcgcg

SEQ ID NO: 96822 - DNA, 73 bp, Homo sapiens
tcgccggcctgggggtgccgcggagggcccatctcggcggcggcgatgtgctcggcgggcgcggggagggatc

SEQ ID NO: 96823 - DNA, 74 bp, Homo sapiens
gggtgccgcggagggcccatctcggcggcggcgatgtgctcggcgggcgcggggagggatcgcggcggcggcgc

SEQ ID NO: 96824 - DNA, 71 bp, Homo sapiens
cggagggcccatctcggcggcggcgatgtgctcggcgggcgcggggagggatcgcggcggcggcgcccggg

SEQ ID NO: 96825 - DNA, 74 bp, Homo sapiens
atctcggcggcggcgatgtgctcggcgggcgcggggagggatcgcggcggcggcgcccggggcccgctgctgtc

SEQ ID NO: 96826 - DNA, 74 bp, Homo sapiens
ggcgatgtgctcggcgggcgcggggagggatcgcggcggcggcgcccggggcccgctgctgtccagccccgctg

SEQ ID NO: 96827 - DNA, 72 bp, Homo sapiens
gcgggcgcggggagggatcgcggcggcggcgcccggggcccgctgctgtccagccccgctggccccactcac

SEQ ID NO: 96828 - DNA, 71 bp, Homo sapiens
gggagggatcgcggcggcggcgcccggggcccgctgctgtccagccccgctggccccactcacccccgcca

SEQ ID NO: 96829 - DNA, 70 bp, Homo sapiens
atcgcggcggcggcgcccggggcccgctgctgtccagccccgctggccccactcacccccgccacccggc

SEQ ID NO: 96830 - DNA, 73 bp, Homo sapiens
gcccggggcccgctgctgtccagccccgctggccccactcacccccgccacccggccgccgctgtgctcgcag

SEQ ID NO: 96831 - DNA, 74 bp, Homo sapiens
ccgctgctgtccagccccgctggccccactcacccccgccacccggccgccgctgtgctcgcagtcctcttccc

SEQ ID NO: 96832 - DNA, 72 bp, Homo sapiens
tgtccagccccgctggccccactcacccccgccacccggccgccgctgtgctcgcagtcctcttcccccgaa

SEQ ID NO: 96833 - DNA, 70 bp, Homo sapiens
ccgctggccccactcacccccgccacccggccgccgctgtgctcgcagtcctcttcccccgaacctgccc

SEQ ID NO: 96834 - DNA, 69 bp, Homo sapiens
actcacccccgccacccggccgccgctgtgctcgcagtcctcttcccccgaacctgcccctgcctcccc

SEQ ID NO: 96835 - DNA, 68 bp, Homo sapiens
ccctcgtctcctccccttccctcccgggcgcccgtcccgccattacctgggtgctgcgcccagtggcc

SEQ ID NO: 96836 - DNA, 69 bp, Homo sapiens
ctccccttccctcccgggcgcccgtcccgccattacctgggtgctgcgcccagtggccgccgcgccgcc

SEQ ID NO: 96837 - DNA, 72 bp, Homo sapiens
cttccctcccgggcgcccgtcccgccattacctgggtgctgcgcccagtggccgccgcgccgccttgagctc

SEQ ID NO: 96838 - DNA, 75 bp, Homo sapiens
cccgtcccgccattacctgggtgctgcgcccagtggccgccgcgccgccttgagctcgctcccgcgcgctctccg

SEQ ID NO: 96839 - DNA, 77 bp, Homo sapiens
cccgccattacctgggtgctgcgcccagtggccgccgcgccgccttgagctcgctcccgcgcgctctccgtctgtgg

SEQ ID NO: 96840 - DNA, 77 bp, Homo sapiens
tgggtgctgcgcccagtggccgccgcgccgccttgagctcgctcccgcgcgctctccgtctgtggggccgacgtccc

SEQ ID NO: 96841 - DNA, 75 bp, Homo sapiens
cagtggccgccgcgccgccttgagctcgctcccgcgcgctctccgtctgtggggccgacgtccccaggctccgga

SEQ ID NO: 96842 - DNA, 75 bp, Homo sapiens
cgcgccgccttgagctcgctcccgcgcgctctccgtctgtggggccgacgtccccaggctccggacccgcagcca

SEQ ID NO: 96843 - DNA, 73 bp, Homo sapiens
ccttgagctcgctcccgcgcgctctccgtctgtggggccgacgtccccaggctccggacccgcagccaccgcc

SEQ ID NO: 96844 - DNA, 73 bp, Homo sapiens
tcccgcgcgctctccgtctgtggggccgacgtccccaggctccggacccgcagccaccgccggggagctagca

SEQ ID NO: 96845 - DNA, 72 bp, Homo sapiens
ctctccgtctgtggggccgacgtccccaggctccggacccgcagccaccgccggggagctagcactctgccc

SEQ ID NO: 96846 - DNA, 71 bp, Homo sapiens
tctgtggggccgacgtccccaggctccggacccgcagccaccgccggggagctagcactctgccccccacc

SEQ ID NO: 96847 - DNA, 71 bp, Homo sapiens
cgacgtccccaggctccggacccgcagccaccgccggggagctagcactctgccccccacccctcactcca

SEQ ID NO: 96848 - DNA, 74 bp, Homo sapiens
aggctccggacccgcagccaccgccggggagctagcactctgccccccacccctcactccagcgccgctgcttc

SEQ ID NO: 96849 - DNA, 73 bp, Homo sapiens
tcagtttcccaaccctccatctcagagaaagacaaaaccaattggatatggtgtatgtacttgtcaaactgtt

SEQ ID NO: 96850 - DNA, 73 bp, Homo sapiens
aaccctccatctcagagaaagacaaaaccaattggatatggtgtatgtacttgtcaaactgtttatttgccat

SEQ ID NO: 96851 - DNA, 77 bp, Homo sapiens
tcagagaaagacaaaaccaattggatatggtgtatgtacttgtcaaactgtttatttgccattcacactgattgtaa

SEQ ID NO: 96852 - DNA, 75 bp, Homo sapiens
acaaaaccaattggatatggtgtatgtacttgtcaaactgtttatttgccattcacactgattgtaacactggat

SEQ ID NO: 96853 - DNA, 77 bp, Homo sapiens
aattggatatggtgtatgtacttgtcaaactgtttatttgccattcacactgattgtaacactggatttacagaaga

SEQ ID NO: 96854 - DNA, 77 bp, Homo sapiens
tatggtgtatgtacttgtcaaactgtttatttgccattcacactgattgtaacactggatttacagaagaaactgtg

SEQ ID NO: 96855 - DNA, 75 bp, Homo sapiens
tacttgtcaaactgtttatttgccattcacactgattgtaacactggatttacagaagaaactgtggtacaaaga

SEQ ID NO: 96856 - DNA, 73 bp, Homo sapiens
aactgtttatttgccattcacactgattgtaacactggatttacagaagaaactgtggtacaaagagaggaag

SEQ ID NO: 96857 - DNA, 76 bp, Homo sapiens
attcacactgattgtaacactggatttacagaagaaactgtggtacaaagagaggaaggctctggtggctcctgaa

SEQ ID NO: 96858 - DNA, 78 bp, Homo sapiens
actgattgtaacactggatttacagaagaaactgtggtacaaagagaggaaggctctggtggctcctgaacagcagca

SEQ ID NO: 96859 - DNA, 79 bp, Homo sapiens
aacactggatttacagaagaaactgtggtacaaagagaggaaggctctggtggctcctgaacagcagcagtccagctgc

SEQ ID NO: 96860 - DNA, 82 bp, Homo sapiens
ttacagaagaaactgtggtacaaagagaggaaggctctggtggctcctgaacagcagcagtccagctgccctgctcaggctg

SEQ ID NO: 96861 - DNA, 82 bp, Homo sapiens
actgtggtacaaagagaggaaggctctggtggctcctgaacagcagcagtccagctgccctgctcaggctgggcacgacgaa

SEQ ID NO: 96862 - DNA, 83 bp, Homo sapiens
aaagagaggaaggctctggtggctcctgaacagcagcagtccagctgccctgctcaggctgggcacgacgaatgctcccagga

SEQ ID NO: 96863 - DNA, 82 bp, Homo sapiens
aaggctctggtggctcctgaacagcagcagtccagctgccctgctcaggctgggcacgacgaatgctcccaggagaggggag

SEQ ID NO: 96864 - DNA, 81 bp, Homo sapiens
tcctgaacagcagcagtccagctgccctgctcaggctgggcacgacgaatgctcccaggagaggggaggcggcccacccga

SEQ ID NO: 96865 - DNA, 78 bp, Homo sapiens
agcagtccagctgccctgctcaggctgggcacgacgaatgctcccaggagaggggaggcggcccacccgactgtgtac

SEQ ID NO: 96866 - DNA, 76 bp, Homo sapiens
agctgccctgctcaggctgggcacgacgaatgctcccaggagaggggaggcggcccacccgactgtgtaccgtgga

SEQ ID NO: 96867 - DNA, 75 bp, Homo sapiens
tcaggctgggcacgacgaatgctcccaggagaggggaggcggcccacccgactgtgtaccgtggactgtggacag

SEQ ID NO: 96868 - DNA, 77 bp, Homo sapiens
tgggcacgacgaatgctcccaggagaggggaggcggcccacccgactgtgtaccgtggactgtggacagtgcagtgc

SEQ ID NO: 96869 - DNA, 77 bp, Homo sapiens
aatgctcccaggagaggggaggcggcccacccgactgtgtaccgtggactgtggacagtgcagtgcctgctctcctg

SEQ ID NO: 96870 - DNA, 78 bp, Homo sapiens
aggggaggcggcccacccgactgtgtaccgtggactgtggacagtgcagtgcctgctctcctgtgctatctagaaaca

SEQ ID NO: 96871 - DNA, 80 bp, Homo sapiens
ggcccacccgactgtgtaccgtggactgtggacagtgcagtgcctgctctcctgtgctatctagaaacaccttggagaga

SEQ ID NO: 96872 - DNA, 79 bp, Homo sapiens
actgtgtaccgtggactgtggacagtgcagtgcctgctctcctgtgctatctagaaacaccttggagagagggttctgg

SEQ ID NO: 96873 - DNA, 85 bp, Homo sapiens
tggactgtggacagtgcagtgcctgctctcctgtgctatctagaaacaccttggagagagggttctgggatattctctcatgtca

SEQ ID NO: 96874 - DNA, 85 bp, Homo sapiens
acagtgcagtgcctgctctcctgtgctatctagaaacaccttggagagagggttctgggatattctctcatgtcatctggctgaa

SEQ ID NO: 96875 - DNA, 83 bp, Homo sapiens
agtgcctgctctcctgtgctatctagaaacaccttggagagagggttctgggatattctctcatgtcatctggctgaagacac

SEQ ID NO: 96876 - DNA, 82 bp, Homo sapiens
ctgtgctatctagaaacaccttggagagagggttctgggatattctctcatgtcatctggctgaagacaccagcttgacagt

SEQ ID NO: 96877 - DNA, 79 bp, Homo sapiens
ttggagagagggttctgggatattctctcatgtcatctggctgaagacaccagcttgacagttcccctttaagaagcat

SEQ ID NO: 96878 - DNA, 78 bp, Homo sapiens
atattctctcatgtcatctggctgaagacaccagcttgacagttcccctttaagaagcattccatacgtttgtaccag

SEQ ID NO: 96879 - DNA, 74 bp, Homo sapiens
tctggctgaagacaccagcttgacagttcccctttaagaagcattccatacgtttgtaccagggagaaagaagc

SEQ ID NO: 96880 - DNA, 69 bp, Homo sapiens
attccatacgtttgtaccagggagaaagaagcccacgcacgaattttcaggatgttttgtgaccaaacc

SEQ ID NO: 96881 - DNA, 68 bp, Homo sapiens
cgtttgtaccagggagaaagaagcccacgcacgaattttcaggatgttttgtgaccaaacccaataac

SEQ ID NO: 96882 - DNA, 71 bp, Homo sapiens
agaaagaagcccacgcacgaattttcaggatgttttgtgaccaaacccaataactgccacacaaatagacc

SEQ ID NO: 96883 - DNA, 70 bp, Homo sapiens
aagcccacgcacgaattttcaggatgttttgtgaccaaacccaataactgccacacaaatagaccctagg

SEQ ID NO: 96884 - DNA, 70 bp, Homo sapiens
ttttcaggatgttttgtgaccaaacccaataactgccacacaaatagaccctaggtgggggctggcttaa

SEQ ID NO: 96885 - DNA, 69 bp, Homo sapiens
atgttttgtgaccaaacccaataactgccacacaaatagaccctaggtgggggctggcttaaataggac

SEQ ID NO: 96886 - DNA, 68 bp, Homo sapiens
accaaacccaataactgccacacaaatagaccctaggtgggggctggcttaaataggaccacatttcc

SEQ ID NO: 96887 - DNA, 68 bp, Homo sapiens
ataactgccacacaaatagaccctaggtgggggctggcttaaataggaccacatttcccgttgctttt

SEQ ID NO: 96888 - DNA, 70 bp, Homo sapiens
ctaggtgggggctggcttaaataggaccacatttcccgttgctttttcagtagatgtgttataccgtcat

SEQ ID NO: 96889 - DNA, 72 bp, Homo sapiens
gctggcttaaataggaccacatttcccgttgctttttcagtagatgtgttataccgtcatttcaatttgaaa

SEQ ID NO: 96890 - DNA, 69 bp, Homo sapiens
cttaaataggaccacatttcccgttgctttttcagtagatgtgttataccgtcatttcaatttgaaagt

SEQ ID NO: 96891 - DNA, 67 bp, Homo sapiens
accacatttcccgttgctttttcagtagatgtgttataccgtcatttcaatttgaaagtttattttt

SEQ ID NO: 96892 - DNA, 70 bp, Homo sapiens
tcatttcaatttgaaagtttatttttttccattgatttttatacatccagaataacacaaataaccaaca

SEQ ID NO: 96893 - DNA, 66 bp, Homo sapiens
aagtttatttttttccattgatttttatacatccagaataacacaaataaccaacagttctttttc

SEQ ID NO: 96894 - DNA, 65 bp, Homo sapiens
atttttttccattgatttttatacatccagaataacacaaataaccaacagttctttttcttttt

SEQ ID NO: 96895 - DNA, 63 bp, Homo sapiens
tttttctttttttgcacattcatttcccctagaacaaaaaaagtgaacttaaaaaaaattgga

SEQ ID NO: 96896 - DNA, 69 bp, Homo sapiens
tttgcacattcatttcccctagaacaaaaaaagtgaacttaaaaaaaattggaaccatgctattagctg

SEQ ID NO: 96897 - DNA, 67 bp, Homo sapiens
tcatttcccctagaacaaaaaaagtgaacttaaaaaaaattggaaccatgctattagctgtttacaa

SEQ ID NO: 96898 - DNA, 66 bp, Homo sapiens
ccctagaacaaaaaaagtgaacttaaaaaaaattggaaccatgctattagctgtttacaaaagtga

SEQ ID NO: 96899 - DNA, 69 bp, Homo sapiens
aagtgaacttaaaaaaaattggaaccatgctattagctgtttacaaaagtgaataagaagtagctcatt

SEQ ID NO: 96900 - DNA, 69 bp, Homo sapiens
aaaaaaaattggaaccatgctattagctgtttacaaaagtgaataagaagtagctcattttaaagtcta

SEQ ID NO: 96901 - DNA, 71 bp, Homo sapiens
catgctattagctgtttacaaaagtgaataagaagtagctcattttaaagtctaaaataaacaaagtagaa

SEQ ID NO: 96902 - DNA, 69 bp, Homo sapiens
gctgtttacaaaagtgaataagaagtagctcattttaaagtctaaaataaacaaagtagaaagaagcat

SEQ ID NO: 96903 - DNA, 68 bp, Homo sapiens
gtagctcattttaaagtctaaaataaacaaagtagaaagaagcatttttttccctacagtatttagca

SEQ ID NO: 96904 - DNA, 64 bp, Homo sapiens
aataaacaaagtagaaagaagcatttttttccctacagtatttagcaaacctaagaaaaagtcc

SEQ ID NO: 96905 - DNA, 67 bp, Homo sapiens
gtagaaagaagcatttttttccctacagtatttagcaaacctaagaaaaagtccttagaaacacaca

SEQ ID NO: 96906 - DNA, 66 bp, Homo sapiens
aagaagcatttttttccctacagtatttagcaaacctaagaaaaagtccttagaaacacacacaaa

SEQ ID NO: 96907 - DNA, 68 bp, Homo sapiens
aaaaattgaaaaaaagttataggcattaacaatattttataatgaagcttaaaatctatttacataca

SEQ ID NO: 96908 - DNA, 70 bp, Homo sapiens
aaaaagttataggcattaacaatattttataatgaagcttaaaatctatttacatacataaatacaatta

SEQ ID NO: 96909 - DNA, 74 bp, Homo sapiens
aggcattaacaatattttataatgaagcttaaaatctatttacatacataaatacaattaactttgttgatgca

SEQ ID NO: 96910 - DNA, 74 bp, Homo sapiens
caatattttataatgaagcttaaaatctatttacatacataaatacaattaactttgttgatgcaactcttctg

SEQ ID NO: 96911 - DNA, 74 bp, Homo sapiens
ttataatgaagcttaaaatctatttacatacataaatacaattaactttgttgatgcaactcttctggaaggaa

SEQ ID NO: 96912 - DNA, 78 bp, Homo sapiens
tacatacataaatacaattaactttgttgatgcaactcttctggaaggaaaaaaagagccaaatgatcagcctcatca

SEQ ID NO: 96913 - DNA, 76 bp, Homo sapiens
aaatacaattaactttgttgatgcaactcttctggaaggaaaaaaagagccaaatgatcagcctcatcaatactga

SEQ ID NO: 96914 - DNA, 77 bp, Homo sapiens
taactttgttgatgcaactcttctggaaggaaaaaaagagccaaatgatcagcctcatcaatactgacctggctaaa

SEQ ID NO: 96915 - DNA, 73 bp, Homo sapiens
tctggaaggaaaaaaagagccaaatgatcagcctcatcaatactgacctggctaaaaacaaaattcccaacaa

SEQ ID NO: 96916 - DNA, 72 bp, Homo sapiens
aaaaagagccaaatgatcagcctcatcaatactgacctggctaaaaacaaaattcccaacaaacacacaaaa

SEQ ID NO: 96917 - DNA, 71 bp, Homo sapiens
aaatgatcagcctcatcaatactgacctggctaaaaacaaaattcccaacaaacacacaaaaatcccaaaa

SEQ ID NO: 96918 - DNA, 70 bp, Homo sapiens
atcagcctcatcaatactgacctggctaaaaacaaaattcccaacaaacacacaaaaatcccaaaacaaa

SEQ ID NO: 96919 - DNA, 69 bp, Homo sapiens
tcaatactgacctggctaaaaacaaaattcccaacaaacacacaaaaatcccaaaacaaatgtatacgc

SEQ ID NO: 96920 - DNA, 66 bp, Homo sapiens
cctggctaaaaacaaaattcccaacaaacacacaaaaatcccaaaacaaatgtatacgctacggta

SEQ ID NO: 96921 - DNA, 66 bp, Homo sapiens
caaaattcccaacaaacacacaaaaatcccaaaacaaatgtatacgctacggtaaacaaaaaggca

SEQ ID NO: 96922 - DNA, 69 bp, Homo sapiens
caaacacacaaaaatcccaaaacaaatgtatacgctacggtaaacaaaaaggcattttgttcagatgta

SEQ ID NO: 96923 - DNA, 68 bp, Homo sapiens
caaaaatcccaaaacaaatgtatacgctacggtaaacaaaaaggcattttgttcagatgtaaaatatg

SEQ ID NO: 96924 - DNA, 70 bp, Homo sapiens
ccaaaacaaatgtatacgctacggtaaacaaaaaggcattttgttcagatgtaaaatatgttttgtgaga

SEQ ID NO: 96925 - DNA, 72 bp, Homo sapiens
gtatacgctacggtaaacaaaaaggcattttgttcagatgtaaaatatgttttgtgagattattgtcaaaca

SEQ ID NO: 96926 - DNA, 70 bp, Homo sapiens
cggtaaacaaaaaggcattttgttcagatgtaaaatatgttttgtgagattattgtcaaacaaattttca

SEQ ID NO: 96927 - DNA, 73 bp, Homo sapiens
ggcattttgttcagatgtaaaatatgttttgtgagattattgtcaaacaaattttcatgtataaaagacccaa

SEQ ID NO: 96928 - DNA, 74 bp, Homo sapiens
cagatgtaaaatatgttttgtgagattattgtcaaacaaattttcatgtataaaagacccaaacatgtcattcc

SEQ ID NO: 96929 - DNA, 71 bp, Homo sapiens
gtaaaatatgttttgtgagattattgtcaaacaaattttcatgtataaaagacccaaacatgtcattcccc

SEQ ID NO: 96930 - DNA, 64 bp, Homo sapiens
acaaattttcatgtataaaagacccaaacatgtcattccccccaaaaataaaaaccaacaaaaa

SEQ ID NO: 96931 - DNA, 67 bp, Homo sapiens
aaaaccaacaaaaataaaaatcatcaggacggaatgtcccaaagaaacaggtatttcaaggcagaaa

SEQ ID NO: 96932 - DNA, 71 bp, Homo sapiens
aaaataaaaatcatcaggacggaatgtcccaaagaaacaggtatttcaaggcagaaatctgcaatcctaaa

SEQ ID NO: 96933 - DNA, 74 bp, Homo sapiens
aaaaatcatcaggacggaatgtcccaaagaaacaggtatttcaaggcagaaatctgcaatcctaaattgcagga

SEQ ID NO: 96934 - DNA, 74 bp, Homo sapiens
acggaatgtcccaaagaaacaggtatttcaaggcagaaatctgcaatcctaaattgcaggacatttgagtggaa

SEQ ID NO: 96935 - DNA, 75 bp, Homo sapiens
aacaggtatttcaaggcagaaatctgcaatcctaaattgcaggacatttgagtggaaccattcatttcctttcta

SEQ ID NO: 96936 - DNA, 79 bp, Homo sapiens
gcagaaatctgcaatcctaaattgcaggacatttgagtggaaccattcatttcctttctaatcagagcatttctgttta

SEQ ID NO: 96937 - DNA, 80 bp, Homo sapiens
aatctgcaatcctaaattgcaggacatttgagtggaaccattcatttcctttctaatcagagcatttctgtttatctgca

SEQ ID NO: 96938 - DNA, 77 bp, Homo sapiens
attgcaggacatttgagtggaaccattcatttcctttctaatcagagcatttctgtttatctgcacagaaacccaag

SEQ ID NO: 96939 - DNA, 77 bp, Homo sapiens
atttgagtggaaccattcatttcctttctaatcagagcatttctgtttatctgcacagaaacccaaggcagcagaaa

SEQ ID NO: 96940 - DNA, 77 bp, Homo sapiens
atttcctttctaatcagagcatttctgtttatctgcacagaaacccaaggcagcagaaaggctgtctatttactcac

SEQ ID NO: 96941 - DNA, 81 bp, Homo sapiens
ttctaatcagagcatttctgtttatctgcacagaaacccaaggcagcagaaaggctgtctatttactcactgattgtgatt

SEQ ID NO: 96942 - DNA, 82 bp, Homo sapiens
atcagagcatttctgtttatctgcacagaaacccaaggcagcagaaaggctgtctatttactcactgattgtgatttgccca

SEQ ID NO: 96943 - DNA, 78 bp, Homo sapiens
tttctgtttatctgcacagaaacccaaggcagcagaaaggctgtctatttactcactgattgtgatttgcccaggaaa

SEQ ID NO: 96944 - DNA, 77 bp, Homo sapiens
tgtttatctgcacagaaacccaaggcagcagaaaggctgtctatttactcactgattgtgatttgcccaggaaagtt

SEQ ID NO: 96945 - DNA, 74 bp, Homo sapiens
acagaaacccaaggcagcagaaaggctgtctatttactcactgattgtgatttgcccaggaaagtttgctggtt

SEQ ID NO: 96946 - DNA, 78 bp, Homo sapiens
aaaggctgtctatttactcactgattgtgatttgcccaggaaagtttgctggtttggacagcaagcagatccaatatg

SEQ ID NO: 96947 - DNA, 79 bp, Homo sapiens
atttactcactgattgtgatttgcccaggaaagtttgctggtttggacagcaagcagatccaatatggttggcaatgtc

SEQ ID NO: 96948 - DNA, 79 bp, Homo sapiens
atttgcccaggaaagtttgctggtttggacagcaagcagatccaatatggttggcaatgtctctgttctgctggaagaa

SEQ ID NO: 96949 - DNA, 77 bp, Homo sapiens
aaagtttgctggtttggacagcaagcagatccaatatggttggcaatgtctctgttctgctggaagaaacccataaa

SEQ ID NO: 96950 - DNA, 78 bp, Homo sapiens
ctggtttggacagcaagcagatccaatatggttggcaatgtctctgttctgctggaagaaacccataaacaggagaaa

SEQ ID NO: 96951 - DNA, 76 bp, Homo sapiens
ttggcaatgtctctgttctgctggaagaaacccataaacaggagaaaggctgacaaaccatgttcctttatgtgaa

SEQ ID NO: 96952 - DNA, 73 bp, Homo sapiens
tgtctctgttctgctggaagaaacccataaacaggagaaaggctgacaaaccatgttcctttatgtgaagggg

SEQ ID NO: 96953 - DNA, 70 bp, Homo sapiens
tggaagaaacccataaacaggagaaaggctgacaaaccatgttcctttatgtgaagggggaagaactgga

SEQ ID NO: 96954 - DNA, 70 bp, Homo sapiens
cataaacaggagaaaggctgacaaaccatgttcctttatgtgaagggggaagaactggaccttcttgtgt

SEQ ID NO: 96955 - DNA, 69 bp, Homo sapiens
agaaaggctgacaaaccatgttcctttatgtgaagggggaagaactggaccttcttgtgttctgaaatt

SEQ ID NO: 96956 - DNA, 68 bp, Homo sapiens
acaaaccatgttcctttatgtgaagggggaagaactggaccttcttgtgttctgaaatttggtactgg

SEQ ID NO: 96957 - DNA, 68 bp, Homo sapiens
ccatgttcctttatgtgaagggggaagaactggaccttcttgtgttctgaaatttggtactgggtggg

SEQ ID NO: 96958 - DNA, 72 bp, Homo sapiens
tgaagggggaagaactggaccttcttgtgttctgaaatttggtactgggtgggggtatgtgctatctgctta

SEQ ID NO: 96959 - DNA, 73 bp, Homo sapiens
aagaactggaccttcttgtgttctgaaatttggtactgggtgggggtatgtgctatctgcttaagagaacaca

SEQ ID NO: 96960 - DNA, 73 bp, Homo sapiens
tgtgttctgaaatttggtactgggtgggggtatgtgctatctgcttaagagaacacaggaaaaggaggaggga

SEQ ID NO: 96961 - DNA, 70 bp, Homo sapiens
aatttggtactgggtgggggtatgtgctatctgcttaagagaacacaggaaaaggaggagggagaaagtg

SEQ ID NO: 96962 - DNA, 72 bp, Homo sapiens
tgggggtatgtgctatctgcttaagagaacacaggaaaaggaggagggagaaagtggggtttggaagataga

SEQ ID NO: 96963 - DNA, 74 bp, Homo sapiens
tatgtgctatctgcttaagagaacacaggaaaaggaggagggagaaagtggggtttggaagatagaggaagaga

SEQ ID NO: 96964 - DNA, 65 bp, Homo sapiens
aacacaggaaaaggaggagggagaaagtggggtttggaagatagaggaagagagaaaaaaaggga

SEQ ID NO: 96965 - DNA, 65 bp, Homo sapiens
aaaggaggagggagaaagtggggtttggaagatagaggaagagagaaaaaaagggagatattggg

SEQ ID NO: 96966 - DNA, 66 bp, Homo sapiens
agaaagtggggtttggaagatagaggaagagagaaaaaaagggagatattggggggaagagaggga

SEQ ID NO: 96967 - DNA, 67 bp, Homo sapiens
aaaaagggagatattggggggaagagagggagggaaatgtattttcagatagtgagaaaaagaaaga

SEQ ID NO: 96968 - DNA, 75 bp, Homo sapiens
gagagggagggaaatgtattttcagatagtgagaaaaagaaagaactgaaatatgtatccatgttgaaatcataa

SEQ ID NO: 96969 - DNA, 74 bp, Homo sapiens
gggaaatgtattttcagatagtgagaaaaagaaagaactgaaatatgtatccatgttgaaatcataaataggga

SEQ ID NO: 96970 - DNA, 76 bp, Homo sapiens
gtattttcagatagtgagaaaaagaaagaactgaaatatgtatccatgttgaaatcataaatagggacatgagtaa

SEQ ID NO: 96971 - DNA, 79 bp, Homo sapiens
ttcagatagtgagaaaaagaaagaactgaaatatgtatccatgttgaaatcataaatagggacatgagtaagcagtaga

SEQ ID NO: 96972 - DNA, 79 bp, Homo sapiens
tcagatagtgagaaaaagaaagaactgaaatatgtatccatgttgaaatcataaatagggacatgagtaagcagtagaa

SEQ ID NO: 96973 - DNA, 77 bp, Homo sapiens
gtgagaaaaagaaagaactgaaatatgtatccatgttgaaatcataaatagggacatgagtaagcagtagaaatggc

SEQ ID NO: 96974 - DNA, 77 bp, Homo sapiens
aaagaaagaactgaaatatgtatccatgttgaaatcataaatagggacatgagtaagcagtagaaatggcttattca

SEQ ID NO: 96975 - DNA, 78 bp, Homo sapiens
gaaagaactgaaatatgtatccatgttgaaatcataaatagggacatgagtaagcagtagaaatggcttattcaatac

SEQ ID NO: 96976 - DNA, 78 bp, Homo sapiens
actgaaatatgtatccatgttgaaatcataaatagggacatgagtaagcagtagaaatggcttattcaatacttctcc

SEQ ID NO: 96977 - DNA, 78 bp, Homo sapiens
aaatatgtatccatgttgaaatcataaatagggacatgagtaagcagtagaaatggcttattcaatacttctcctgga

SEQ ID NO: 96978 - DNA, 80 bp, Homo sapiens
tatccatgttgaaatcataaatagggacatgagtaagcagtagaaatggcttattcaatacttctcctggaccagacaca

SEQ ID NO: 96979 - DNA, 80 bp, Homo sapiens
tgaaatcataaatagggacatgagtaagcagtagaaatggcttattcaatacttctcctggaccagacacatgcagttat

SEQ ID NO: 96980 - DNA, 80 bp, Homo sapiens
taaatagggacatgagtaagcagtagaaatggcttattcaatacttctcctggaccagacacatgcagttattacatgat

SEQ ID NO: 96981 - DNA, 80 bp, Homo sapiens
tagaaatggcttattcaatacttctcctggaccagacacatgcagttattacatgattggcttaagggtctcattgatac

SEQ ID NO: 96982 - DNA, 75 bp, Homo sapiens
aatacttctcctggaccagacacatgcagttattacatgattggcttaagggtctcattgataccttaactttcc

SEQ ID NO: 96983 - DNA, 77 bp, Homo sapiens
accagacacatgcagttattacatgattggcttaagggtctcattgataccttaactttcctgagggcaatgaataa

SEQ ID NO: 96984 - DNA, 75 bp, Homo sapiens
acacatgcagttattacatgattggcttaagggtctcattgataccttaactttcctgagggcaatgaataaaaa

SEQ ID NO: 96985 - DNA, 72 bp, Homo sapiens
ttattacatgattggcttaagggtctcattgataccttaactttcctgagggcaatgaataaaaagatacct

SEQ ID NO: 96986 - DNA, 70 bp, Homo sapiens
attggcttaagggtctcattgataccttaactttcctgagggcaatgaataaaaagataccttaatctac

SEQ ID NO: 96987 - DNA, 76 bp, Homo sapiens
tctcattgataccttaactttcctgagggcaatgaataaaaagataccttaatctacctgaagtcaatgaatgcaa

SEQ ID NO: 96988 - DNA, 72 bp, Homo sapiens
gataccttaactttcctgagggcaatgaataaaaagataccttaatctacctgaagtcaatgaatgcaattt

SEQ ID NO: 96989 - DNA, 76 bp, Homo sapiens
ctttcctgagggcaatgaataaaaagataccttaatctacctgaagtcaatgaatgcaatttttcacacacacaca

SEQ ID NO: 96990 - DNA, 72 bp, Homo sapiens
cacacacatacaaaaatgtgttgcgtgagacctatcgccaaaacaactacagtttgattttttttgaaacaa

SEQ ID NO: 96991 - DNA, 72 bp, Homo sapiens
gtgttgcgtgagacctatcgccaaaacaactacagtttgattttttttgaaacaattaaatactatatatgc

SEQ ID NO: 96992 - DNA, 71 bp, Homo sapiens
gagacctatcgccaaaacaactacagtttgattttttttgaaacaattaaatactatatatgctggtaaga

SEQ ID NO: 96993 - DNA, 71 bp, Homo sapiens
cgccaaaacaactacagtttgattttttttgaaacaattaaatactatatatgctggtaagagtctgtgaa

SEQ ID NO: 96994 - DNA, 72 bp, Homo sapiens
cagtttgattttttttgaaacaattaaatactatatatgctggtaagagtctgtgaaactctaaatgaccaa

SEQ ID NO: 96995 - DNA, 76 bp, Homo sapiens
tttttgaaacaattaaatactatatatgctggtaagagtctgtgaaactctaaatgaccaatccagtgagcctaca

SEQ ID NO: 96996 - DNA, 77 bp, Homo sapiens
aaacaattaaatactatatatgctggtaagagtctgtgaaactctaaatgaccaatccagtgagcctacaatagtga

SEQ ID NO: 96997 - DNA, 77 bp, Homo sapiens
aatactatatatgctggtaagagtctgtgaaactctaaatgaccaatccagtgagcctacaatagtgacaagccccc

SEQ ID NO: 96998 - DNA, 77 bp, Homo sapiens
tggtaagagtctgtgaaactctaaatgaccaatccagtgagcctacaatagtgacaagccccctccacacatggctt

SEQ ID NO: 96999 - DNA, 77 bp, Homo sapiens
taaatgaccaatccagtgagcctacaatagtgacaagccccctccacacatggctttgagagtaaaggttcaatgta

SEQ ID NO: 97000 - DNA, 74 bp, Homo sapiens
aatccagtgagcctacaatagtgacaagccccctccacacatggctttgagagtaaaggttcaatgtaaaagat

SEQ ID NO: 97001 - DNA, 75 bp, Homo sapiens
agcctacaatagtgacaagccccctccacacatggctttgagagtaaaggttcaatgtaaaagattatctaatca

SEQ ID NO: 97002 - DNA, 77 bp, Homo sapiens
aatagtgacaagccccctccacacatggctttgagagtaaaggttcaatgtaaaagattatctaatcagagcatgag

SEQ ID NO: 97003 - DNA, 75 bp, Homo sapiens
aagccccctccacacatggctttgagagtaaaggttcaatgtaaaagattatctaatcagagcatgaggctggtt

SEQ ID NO: 97004 - DNA, 77 bp, Homo sapiens
cctccacacatggctttgagagtaaaggttcaatgtaaaagattatctaatcagagcatgaggctggttttgagttg

SEQ ID NO: 97005 - DNA, 76 bp, Homo sapiens
atggctttgagagtaaaggttcaatgtaaaagattatctaatcagagcatgaggctggttttgagttggaatatct

SEQ ID NO: 97006 - DNA, 76 bp, Homo sapiens
tttgagagtaaaggttcaatgtaaaagattatctaatcagagcatgaggctggttttgagttggaatatcttcagt

SEQ ID NO: 97007 - DNA, 77 bp, Homo sapiens
ttgagagtaaaggttcaatgtaaaagattatctaatcagagcatgaggctggttttgagttggaatatcttcagtta

SEQ ID NO: 97008 - DNA, 76 bp, Homo sapiens
gtaaaggttcaatgtaaaagattatctaatcagagcatgaggctggttttgagttggaatatcttcagttaacaga

SEQ ID NO: 97009 - DNA, 76 bp, Homo sapiens
aggttcaatgtaaaagattatctaatcagagcatgaggctggttttgagttggaatatcttcagttaacagaatta

SEQ ID NO: 97010 - DNA, 77 bp, Homo sapiens
caatgtaaaagattatctaatcagagcatgaggctggttttgagttggaatatcttcagttaacagaattaaactga

SEQ ID NO: 97011 - DNA, 74 bp, Homo sapiens
aaaagattatctaatcagagcatgaggctggttttgagttggaatatcttcagttaacagaattaaactgaaaa

SEQ ID NO: 97012 - DNA, 76 bp, Homo sapiens
gattatctaatcagagcatgaggctggttttgagttggaatatcttcagttaacagaattaaactgaaaaacataa

SEQ ID NO: 97013 - DNA, 72 bp, Homo sapiens
cagagcatgaggctggttttgagttggaatatcttcagttaacagaattaaactgaaaaacataattttttc

SEQ ID NO: 97014 - DNA, 68 bp, Homo sapiens
aggctggttttgagttggaatatcttcagttaacagaattaaactgaaaaacataattttttccttca

SEQ ID NO: 97015 - DNA, 73 bp, Homo sapiens
ttccttcatttttctccagcatttttgcaggtcagacatggtaacatgtgctgaaaaaaaacatttacgttta

SEQ ID NO: 97016 - DNA, 71 bp, Homo sapiens
ttttctccagcatttttgcaggtcagacatggtaacatgtgctgaaaaaaaacatttacgtttaatttggg

SEQ ID NO: 97017 - DNA, 70 bp, Homo sapiens
agcatttttgcaggtcagacatggtaacatgtgctgaaaaaaaacatttacgtttaatttgggggaaatg

SEQ ID NO: 97018 - DNA, 68 bp, Homo sapiens
aggtcagacatggtaacatgtgctgaaaaaaaacatttacgtttaatttgggggaaatgggctaatgg

SEQ ID NO: 97019 - DNA, 69 bp, Homo sapiens
tggtaacatgtgctgaaaaaaaacatttacgtttaatttgggggaaatgggctaatggtgcttttcaga

SEQ ID NO: 97020 - DNA, 66 bp, Homo sapiens
gtgctgaaaaaaaacatttacgtttaatttgggggaaatgggctaatggtgcttttcagaaattaa

SEQ ID NO: 97021 - DNA, 62 bp, Homo sapiens
aaaaacatttacgtttaatttgggggaaatgggctaatggtgcttttcagaaattaaatttt

SEQ ID NO: 97022 - DNA, 75 bp, Homo sapiens
acatttgctgacattttatggtaatttagctgcaaaaatgtaatacggaataatatatgaaactgagttgtggag

SEQ ID NO: 97023 - DNA, 75 bp, Homo sapiens
catttgctgacattttatggtaatttagctgcaaaaatgtaatacggaataatatatgaaactgagttgtggagg

SEQ ID NO: 97024 - DNA, 75 bp, Homo sapiens
gctgacattttatggtaatttagctgcaaaaatgtaatacggaataatatatgaaactgagttgtggagggaatc

SEQ ID NO: 97025 - DNA, 73 bp, Homo sapiens
atggtaatttagctgcaaaaatgtaatacggaataatatatgaaactgagttgtggagggaatcctgtcaaaa

SEQ ID NO: 97026 - DNA, 74 bp, Homo sapiens
gtaatacggaataatatatgaaactgagttgtggagggaatcctgtcaaaaatgaaagtgaatatattctgagt

SEQ ID NO: 97027 - DNA, 76 bp, Homo sapiens
ataatatatgaaactgagttgtggagggaatcctgtcaaaaatgaaagtgaatatattctgagtttgtccgagatc

SEQ ID NO: 97028 - DNA, 78 bp, Homo sapiens
atgaaactgagttgtggagggaatcctgtcaaaaatgaaagtgaatatattctgagtttgtccgagatctgctatagc

SEQ ID NO: 97029 - DNA, 78 bp, Homo sapiens
aatcctgtcaaaaatgaaagtgaatatattctgagtttgtccgagatctgctatagctcttctctagataagaacgac

SEQ ID NO: 97030 - DNA, 79 bp, Homo sapiens
aaatgaaagtgaatatattctgagtttgtccgagatctgctatagctcttctctagataagaacgacctgacaacataa

SEQ ID NO: 97031 - DNA, 80 bp, Homo sapiens
tatattctgagtttgtccgagatctgctatagctcttctctagataagaacgacctgacaacataagctgctttactctt

SEQ ID NO: 97032 - DNA, 79 bp, Homo sapiens
tctgagtttgtccgagatctgctatagctcttctctagataagaacgacctgacaacataagctgctttactctttaac

SEQ ID NO: 97033 - DNA, 76 bp, Homo sapiens
agatctgctatagctcttctctagataagaacgacctgacaacataagctgctttactctttaactcttaccaaag

SEQ ID NO: 97034 - DNA, 75 bp, Homo sapiens
ctatagctcttctctagataagaacgacctgacaacataagctgctttactctttaactcttaccaaagtgctac

SEQ ID NO: 97035 - DNA, 76 bp, Homo sapiens
tagataagaacgacctgacaacataagctgctttactctttaactcttaccaaagtgctactgcatgtgtgtaaaa

SEQ ID NO: 97036 - DNA, 74 bp, Homo sapiens
aagaacgacctgacaacataagctgctttactctttaactcttaccaaagtgctactgcatgtgtgtaaaacaa

SEQ ID NO: 97037 - DNA, 75 bp, Homo sapiens
acctgacaacataagctgctttactctttaactcttaccaaagtgctactgcatgtgtgtaaaacaaataatcaa

SEQ ID NO: 97038 - DNA, 77 bp, Homo sapiens
gacaacataagctgctttactctttaactcttaccaaagtgctactgcatgtgtgtaaaacaaataatcaatatata

SEQ ID NO: 97039 - DNA, 77 bp, Homo sapiens
acataagctgctttactctttaactcttaccaaagtgctactgcatgtgtgtaaaacaaataatcaatatatatata

SEQ ID NO: 97040 - DNA, 74 bp, Homo sapiens
actctttaactcttaccaaagtgctactgcatgtgtgtaaaacaaataatcaatatatatataagaaaactcaa

SEQ ID NO: 97041 - DNA, 73 bp, Homo sapiens
cttaccaaagtgctactgcatgtgtgtaaaacaaataatcaatatatatataagaaaactcaaaaacaagttg

SEQ ID NO: 97042 - DNA, 73 bp, Homo sapiens
tgctactgcatgtgtgtaaaacaaataatcaatatatatataagaaaactcaaaaacaagttgttttaaataa

SEQ ID NO: 97043 - DNA, 70 bp, Homo sapiens
tgtgtgtaaaacaaataatcaatatatatataagaaaactcaaaaacaagttgttttaaataagtccagc

SEQ ID NO: 97044 - DNA, 69 bp, Homo sapiens
acaaataatcaatatatatataagaaaactcaaaaacaagttgttttaaataagtccagctgtttttgc

SEQ ID NO: 97045 - DNA, 70 bp, Homo sapiens
aactcaaaaacaagttgttttaaataagtccagctgtttttgctgcctgcagccaaagatttgcctaatt

SEQ ID NO: 97046 - DNA, 73 bp, Homo sapiens
gttgttttaaataagtccagctgtttttgctgcctgcagccaaagatttgcctaatttgaatgcttaaattta

SEQ ID NO: 97047 - DNA, 74 bp, Homo sapiens
ttaaataagtccagctgtttttgctgcctgcagccaaagatttgcctaatttgaatgcttaaatttataaaata

SEQ ID NO: 97048 - DNA, 73 bp, Homo sapiens
ccagctgtttttgctgcctgcagccaaagatttgcctaatttgaatgcttaaatttataaaataaaaatcaaa

SEQ ID NO: 97049 - DNA, 75 bp, Homo sapiens
tgctgcctgcagccaaagatttgcctaatttgaatgcttaaatttataaaataaaaatcaaacactgttctgaag

SEQ ID NO: 97050 - DNA, 71 bp, Homo sapiens
aaatttataaaataaaaatcaaacactgttctgaagtcctgctttcaaatactcttcagagttgacctgaa

SEQ ID NO: 97051 - DNA, 71 bp, Homo sapiens
tctgaagtcctgctttcaaatactcttcagagttgacctgaaatcgtttcaacgaattttaagaggtacgt

SEQ ID NO: 97052 - DNA, 69 bp, Homo sapiens
gtcctgctttcaaatactcttcagagttgacctgaaatcgtttcaacgaattttaagaggtacgttaaa

SEQ ID NO: 97053 - DNA, 70 bp, Homo sapiens
tactcttcagagttgacctgaaatcgtttcaacgaattttaagaggtacgttaaataaccaccagatcat

SEQ ID NO: 97054 - DNA, 70 bp, Homo sapiens
tcttcagagttgacctgaaatcgtttcaacgaattttaagaggtacgttaaataaccaccagatcatttg

SEQ ID NO: 97055 - DNA, 70 bp, Homo sapiens
agttgacctgaaatcgtttcaacgaattttaagaggtacgttaaataaccaccagatcatttggagcaca

SEQ ID NO: 97056 - DNA, 71 bp, Homo sapiens
gttgacctgaaatcgtttcaacgaattttaagaggtacgttaaataaccaccagatcatttggagcacaca

SEQ ID NO: 97057 - DNA, 71 bp, Homo sapiens
aatcgtttcaacgaattttaagaggtacgttaaataaccaccagatcatttggagcacacatgtgtcaaaa

SEQ ID NO: 97058 - DNA, 74 bp, Homo sapiens
tttcaacgaattttaagaggtacgttaaataaccaccagatcatttggagcacacatgtgtcaaaatcagcagt

SEQ ID NO: 97059 - DNA, 81 bp, Homo sapiens
taaataaccaccagatcatttggagcacacatgtgtcaaaatcagcagttagtatttatgagttgtacaacaactgcattc

SEQ ID NO: 97060 - DNA, 78 bp, Homo sapiens
cacacatgtgtcaaaatcagcagttagtatttatgagttgtacaacaactgcattctgaccaaatcctccaataaaaa

SEQ ID NO: 97061 - DNA, 76 bp, Homo sapiens
atgtgtcaaaatcagcagttagtatttatgagttgtacaacaactgcattctgaccaaatcctccaataaaaatag

SEQ ID NO: 97062 - DNA, 76 bp, Homo sapiens
atcagcagttagtatttatgagttgtacaacaactgcattctgaccaaatcctccaataaaaatagtgccataaaa

SEQ ID NO: 97063 - DNA, 76 bp, Homo sapiens
ttatgagttgtacaacaactgcattctgaccaaatcctccaataaaaatagtgccataaaatttacagcgacattg

SEQ ID NO: 97064 - DNA, 75 bp, Homo sapiens
agttgtacaacaactgcattctgaccaaatcctccaataaaaatagtgccataaaatttacagcgacattggata

SEQ ID NO: 97065 - DNA, 75 bp, Homo sapiens
ctgcattctgaccaaatcctccaataaaaatagtgccataaaatttacagcgacattggatacctttgaattgta

SEQ ID NO: 97066 - DNA, 71 bp, Homo sapiens
accaaatcctccaataaaaatagtgccataaaatttacagcgacattggatacctttgaattgtagccacg

SEQ ID NO: 97067 - DNA, 75 bp, Homo sapiens
aaatagtgccataaaatttacagcgacattggatacctttgaattgtagccacggacagtagtgacatgaatctt

SEQ ID NO: 97068 - DNA, 76 bp, Homo sapiens
ataaaatttacagcgacattggatacctttgaattgtagccacggacagtagtgacatgaatctttcctgtcacac

SEQ ID NO: 97069 - DNA, 77 bp, Homo sapiens
acattggatacctttgaattgtagccacggacagtagtgacatgaatctttcctgtcacactggtgcacaggtaaaa

SEQ ID NO: 97070 - DNA, 78 bp, Homo sapiens
tacctttgaattgtagccacggacagtagtgacatgaatctttcctgtcacactggtgcacaggtaaaagcccatata

SEQ ID NO: 97071 - DNA, 77 bp, Homo sapiens
aattgtagccacggacagtagtgacatgaatctttcctgtcacactggtgcacaggtaaaagcccatataccccata

SEQ ID NO: 97072 - DNA, 76 bp, Homo sapiens
acagtagtgacatgaatctttcctgtcacactggtgcacaggtaaaagcccatataccccatagggtagggtctca

SEQ ID NO: 97073 - DNA, 76 bp, Homo sapiens
agtgacatgaatctttcctgtcacactggtgcacaggtaaaagcccatataccccatagggtagggtctcagcctg

SEQ ID NO: 97074 - DNA, 75 bp, Homo sapiens
tttcctgtcacactggtgcacaggtaaaagcccatataccccatagggtagggtctcagcctggtgaaagcaaca

SEQ ID NO: 97075 - DNA, 73 bp, Homo sapiens
actggtgcacaggtaaaagcccatataccccatagggtagggtctcagcctggtgaaagcaacacaaagatgt

SEQ ID NO: 97076 - DNA, 78 bp, Homo sapiens
aagcccatataccccatagggtagggtctcagcctggtgaaagcaacacaaagatgttgttgagtgagcagcacagga

SEQ ID NO: 97077 - DNA, 79 bp, Homo sapiens
atagggtagggtctcagcctggtgaaagcaacacaaagatgttgttgagtgagcagcacaggacagggggtctcgcaca

SEQ ID NO: 97078 - DNA, 80 bp, Homo sapiens
tagggtctcagcctggtgaaagcaacacaaagatgttgttgagtgagcagcacaggacagggggtctcgcacaggtggga

SEQ ID NO: 97079 - DNA, 78 bp, Homo sapiens
tggtgaaagcaacacaaagatgttgttgagtgagcagcacaggacagggggtctcgcacaggtgggaccatgttttcc

SEQ ID NO: 97080 - DNA, 76 bp, Homo sapiens
aagcaacacaaagatgttgttgagtgagcagcacaggacagggggtctcgcacaggtgggaccatgttttcccact

SEQ ID NO: 97081 - DNA, 78 bp, Homo sapiens
aagatgttgttgagtgagcagcacaggacagggggtctcgcacaggtgggaccatgttttcccacttgtctccactga

SEQ ID NO: 97082 - DNA, 80 bp, Homo sapiens
tgagcagcacaggacagggggtctcgcacaggtgggaccatgttttcccacttgtctccactgaggcacacagaggcaaa

SEQ ID NO: 97083 - DNA, 79 bp, Homo sapiens
tctcgcacaggtgggaccatgttttcccacttgtctccactgaggcacacagaggcaaattgactcctcgaggcctgct

SEQ ID NO: 97084 - DNA, 77 bp, Homo sapiens
acaggtgggaccatgttttcccacttgtctccactgaggcacacagaggcaaattgactcctcgaggcctgcttctg

SEQ ID NO: 97085 - DNA, 76 bp, Homo sapiens
tgttttcccacttgtctccactgaggcacacagaggcaaattgactcctcgaggcctgcttctggtgggcccttaa

SEQ ID NO: 97086 - DNA, 75 bp, Homo sapiens
ctgaggcacacagaggcaaattgactcctcgaggcctgcttctggtgggcccttaaattgctataatcgtaaccc

SEQ ID NO: 97087 - DNA, 70 bp, Homo sapiens
agaggcaaattgactcctcgaggcctgcttctggtgggcccttaaattgctataatcgtaacccctaaat

SEQ ID NO: 97088 - DNA, 71 bp, Homo sapiens
aaattgactcctcgaggcctgcttctggtgggcccttaaattgctataatcgtaacccctaaattcattga

SEQ ID NO: 97089 - DNA, 70 bp, Homo sapiens
aggcctgcttctggtgggcccttaaattgctataatcgtaacccctaaattcattgatttggttcctatg

SEQ ID NO: 97090 - DNA, 70 bp, Homo sapiens
ttctggtgggcccttaaattgctataatcgtaacccctaaattcattgatttggttcctatgtaaatgtg

SEQ ID NO: 97091 - DNA, 69 bp, Homo sapiens
gggcccttaaattgctataatcgtaacccctaaattcattgatttggttcctatgtaaatgtggctccc

SEQ ID NO: 97092 - DNA, 73 bp, Homo sapiens
aaattcattgatttggttcctatgtaaatgtggctcccctacacagtttactttggctgtgttctgttacaca

SEQ ID NO: 97093 - DNA, 75 bp, Homo sapiens
atttggttcctatgtaaatgtggctcccctacacagtttactttggctgtgttctgttacacagcatctgtgaaa

SEQ ID NO: 97094 - DNA, 79 bp, Homo sapiens
tatgtaaatgtggctcccctacacagtttactttggctgtgttctgttacacagcatctgtgaaattatcagatgacct

SEQ ID NO: 97095 - DNA, 78 bp, Homo sapiens
tcccctacacagtttactttggctgtgttctgttacacagcatctgtgaaattatcagatgaccttggggtgagcaaa

SEQ ID NO: 97096 - DNA, 79 bp, Homo sapiens
tacacagtttactttggctgtgttctgttacacagcatctgtgaaattatcagatgaccttggggtgagcaaatccctg

SEQ ID NO: 97097 - DNA, 80 bp, Homo sapiens
tttggctgtgttctgttacacagcatctgtgaaattatcagatgaccttggggtgagcaaatccctgggcagaaatcaaa

SEQ ID NO: 97098 - DNA, 80 bp, Homo sapiens
ttctgttacacagcatctgtgaaattatcagatgaccttggggtgagcaaatccctgggcagaaatcaaatcctctccaa

SEQ ID NO: 97099 - DNA, 76 bp, Homo sapiens
aaattatcagatgaccttggggtgagcaaatccctgggcagaaatcaaatcctctccaaagatgtaattattggca

SEQ ID NO: 97100 - DNA, 77 bp, Homo sapiens
tgagcaaatccctgggcagaaatcaaatcctctccaaagatgtaattattggcacctgcctcaaccctctggaacta

SEQ ID NO: 97101 - DNA, 74 bp, Homo sapiens
aatcaaatcctctccaaagatgtaattattggcacctgcctcaaccctctggaactagattgaccttctctgtt

SEQ ID NO: 97102 - DNA, 73 bp, Homo sapiens
aatcctctccaaagatgtaattattggcacctgcctcaaccctctggaactagattgaccttctctgttttaa

SEQ ID NO: 97103 - DNA, 73 bp, Homo sapiens
tgtaattattggcacctgcctcaaccctctggaactagattgaccttctctgttttaaggaggaagttagata

SEQ ID NO: 97104 - DNA, 74 bp, Homo sapiens
ttattggcacctgcctcaaccctctggaactagattgaccttctctgttttaaggaggaagttagatatgagac

SEQ ID NO: 97105 - DNA, 73 bp, Homo sapiens
tcaaccctctggaactagattgaccttctctgttttaaggaggaagttagatatgagacccttgttgagcctg

SEQ ID NO: 97106 - DNA, 73 bp, Homo sapiens
tggaactagattgaccttctctgttttaaggaggaagttagatatgagacccttgttgagcctggcagaaaat

SEQ ID NO: 97107 - DNA, 74 bp, Homo sapiens
ttctctgttttaaggaggaagttagatatgagacccttgttgagcctggcagaaaattccatacttctgatcct

SEQ ID NO: 97108 - DNA, 75 bp, Homo sapiens
taaggaggaagttagatatgagacccttgttgagcctggcagaaaattccatacttctgatccttggagtgaccc

SEQ ID NO: 97109 - DNA, 77 bp, Homo sapiens
ttagatatgagacccttgttgagcctggcagaaaattccatacttctgatccttggagtgaccctcagtgtctaaaa

SEQ ID NO: 97110 - DNA, 74 bp, Homo sapiens
cttgttgagcctggcagaaaattccatacttctgatccttggagtgaccctcagtgtctaaaaatcctattaaa

SEQ ID NO: 97111 - DNA, 70 bp, Homo sapiens
cctggcagaaaattccatacttctgatccttggagtgaccctcagtgtctaaaaatcctattaaaaacgt

SEQ ID NO: 97112 - DNA, 72 bp, Homo sapiens
aaaattccatacttctgatccttggagtgaccctcagtgtctaaaaatcctattaaaaacgttgctgcgtga

SEQ ID NO: 97113 - DNA, 74 bp, Homo sapiens
ttctgatccttggagtgaccctcagtgtctaaaaatcctattaaaaacgttgctgcgtgagctactcacttgtt

SEQ ID NO: 97114 - DNA, 74 bp, Homo sapiens
ttggagtgaccctcagtgtctaaaaatcctattaaaaacgttgctgcgtgagctactcacttgtttgattaaca

SEQ ID NO: 97115 - DNA, 73 bp, Homo sapiens
tcagtgtctaaaaatcctattaaaaacgttgctgcgtgagctactcacttgtttgattaacatgaaagggagt

SEQ ID NO: 97116 - DNA, 71 bp, Homo sapiens
gtctaaaaatcctattaaaaacgttgctgcgtgagctactcacttgtttgattaacatgaaagggagttta

SEQ ID NO: 97117 - DNA, 71 bp, Homo sapiens
cctattaaaaacgttgctgcgtgagctactcacttgtttgattaacatgaaagggagtttaatgtaaacaa

SEQ ID NO: 97118 - DNA, 75 bp, Homo sapiens
ttgctgcgtgagctactcacttgtttgattaacatgaaagggagtttaatgtaaacaatacttctggataaccaa

SEQ ID NO: 97119 - DNA, 74 bp, Homo sapiens
gctactcacttgtttgattaacatgaaagggagtttaatgtaaacaatacttctggataaccaagcgatcacat

SEQ ID NO: 97120 - DNA, 71 bp, Homo sapiens
attaacatgaaagggagtttaatgtaaacaatacttctggataaccaagcgatcacattactcattctttt

SEQ ID NO: 97121 - DNA, 71 bp, Homo sapiens
gggagtttaatgtaaacaatacttctggataaccaagcgatcacattactcattctttttttctagccttc

SEQ ID NO: 97122 - DNA, 75 bp, Homo sapiens
gtaaacaatacttctggataaccaagcgatcacattactcattctttttttctagccttcttcaatgtgatacat

SEQ ID NO: 97123 - DNA, 76 bp, Homo sapiens
tctggataaccaagcgatcacattactcattctttttttctagccttcttcaatgtgatacatttaactttggcta

SEQ ID NO: 97124 - DNA, 76 bp, Homo sapiens
ccaagcgatcacattactcattctttttttctagccttcttcaatgtgatacatttaactttggctactatcaaga

SEQ ID NO: 97125 - DNA, 75 bp, Homo sapiens
gatcacattactcattctttttttctagccttcttcaatgtgatacatttaactttggctactatcaagaacaaa

SEQ ID NO: 97126 - DNA, 71 bp, Homo sapiens
cattctttttttctagccttcttcaatgtgatacatttaactttggctactatcaagaacaaaagaaaatg

SEQ ID NO: 97127 - DNA, 74 bp, Homo sapiens
tctagccttcttcaatgtgatacatttaactttggctactatcaagaacaaaagaaaatgtagtacttgatatt

SEQ ID NO: 97128 - DNA, 72 bp, Homo sapiens
ttcttcaatgtgatacatttaactttggctactatcaagaacaaaagaaaatgtagtacttgatatttttct

SEQ ID NO: 97129 - DNA, 71 bp, Homo sapiens
tgatacatttaactttggctactatcaagaacaaaagaaaatgtagtacttgatatttttcttaatataag

SEQ ID NO: 97130 - DNA, 69 bp, Homo sapiens
aactttggctactatcaagaacaaaagaaaatgtagtacttgatatttttcttaatataagtacattta

SEQ ID NO: 97131 - DNA, 74 bp, Homo sapiens
tataagtacatttaaataattaaaaaattatcaacacataaatgtctgaacatcaagatacataaatatctggg

SEQ ID NO: 97132 - DNA, 73 bp, Homo sapiens
tttaaataattaaaaaattatcaacacataaatgtctgaacatcaagatacataaatatctggggattccttg

SEQ ID NO: 97133 - DNA, 76 bp, Homo sapiens
taaaaaattatcaacacataaatgtctgaacatcaagatacataaatatctggggattccttgtgggaatacagta

SEQ ID NO: 97134 - DNA, 77 bp, Homo sapiens
tcaacacataaatgtctgaacatcaagatacataaatatctggggattccttgtgggaatacagtagttaaaaatga

SEQ ID NO: 97135 - DNA, 75 bp, Homo sapiens
cataaatgtctgaacatcaagatacataaatatctggggattccttgtgggaatacagtagttaaaaatgaccca

SEQ ID NO: 97136 - DNA, 74 bp, Homo sapiens
ctgaacatcaagatacataaatatctggggattccttgtgggaatacagtagttaaaaatgacccaaagctgta

SEQ ID NO: 97137 - DNA, 73 bp, Homo sapiens
tacataaatatctggggattccttgtgggaatacagtagttaaaaatgacccaaagctgtagctgtttctcaa

SEQ ID NO: 97138 - DNA, 70 bp, Homo sapiens
atatctggggattccttgtgggaatacagtagttaaaaatgacccaaagctgtagctgtttctcaaaaaa

SEQ ID NO: 97139 - DNA, 58 bp, Homo sapiens
aaaaaacaactacccaaaagtccaaaagaaaagttaaataaaacttaaagaaaaggga

SEQ ID NO: 97140 - DNA, 62 bp, Homo sapiens
caactacccaaaagtccaaaagaaaagttaaataaaacttaaagaaaagggaatcatatttc

SEQ ID NO: 97141 - DNA, 66 bp, Homo sapiens
gtccaaaagaaaagttaaataaaacttaaagaaaagggaatcatatttctttccatggtcaaagca

SEQ ID NO: 97142 - DNA, 67 bp, Homo sapiens
aagttaaataaaacttaaagaaaagggaatcatatttctttccatggtcaaagcaagaaagaagcaa

SEQ ID NO: 97143 - DNA, 71 bp, Homo sapiens
aaacttaaagaaaagggaatcatatttctttccatggtcaaagcaagaaagaagcaagctcaatttatata

SEQ ID NO: 97144 - DNA, 69 bp, Homo sapiens
atatttatataaacgtatataaaaataaaaaccacccaaatgcaaatacgcattttgcaattgataagg

SEQ ID NO: 97145 - DNA, 69 bp, Homo sapiens
taaacgtatataaaaataaaaaccacccaaatgcaaatacgcattttgcaattgataaggtgcggaaaa

SEQ ID NO: 97146 - DNA, 66 bp, Homo sapiens
aaaaataaaaaccacccaaatgcaaatacgcattttgcaattgataaggtgcggaaaaattaaaaa

SEQ ID NO: 97147 - DNA, 67 bp, Homo sapiens
aaaattaaaaataagaattagatgccaaacagggcgagttgcatccctcctctccccccaccccaac

SEQ ID NO: 97148 - DNA, 67 bp, Homo sapiens
aaaaataagaattagatgccaaacagggcgagttgcatccctcctctccccccaccccaaccaaaat

SEQ ID NO: 97149 - DNA, 69 bp, Homo sapiens
aattagatgccaaacagggcgagttgcatccctcctctccccccaccccaaccaaaattccacactctt

SEQ ID NO: 97150 - DNA, 67 bp, Homo sapiens
aaacagggcgagttgcatccctcctctccccccaccccaaccaaaattccacactctttggaataaa

SEQ ID NO: 97151 - DNA, 67 bp, Homo sapiens
ttgcatccctcctctccccccaccccaaccaaaattccacactctttggaataaacaacttggttaa

SEQ ID NO: 97152 - DNA, 63 bp, Homo sapiens
tctccccccaccccaaccaaaattccacactctttggaataaacaacttggttaaaaagttaa

SEQ ID NO: 97153 - DNA, 63 bp, Homo sapiens
caccccaaccaaaattccacactctttggaataaacaacttggttaaaaagttaagtcaaggg

SEQ ID NO: 97154 - DNA, 64 bp, Homo sapiens
ccaaaattccacactctttggaataaacaacttggttaaaaagttaagtcaagggtataaaatc

SEQ ID NO: 97155 - DNA, 63 bp, Homo sapiens
cacactctttggaataaacaacttggttaaaaagttaagtcaagggtataaaatctttctttt

SEQ ID NO: 97156 - DNA, 67 bp, Homo sapiens
gaataaacaacttggttaaaaagttaagtcaagggtataaaatctttctttttattcacagcattgc

SEQ ID NO: 97157 - DNA, 70 bp, Homo sapiens
cttggttaaaaagttaagtcaagggtataaaatctttctttttattcacagcattgctaaatcagaagca

SEQ ID NO: 97158 - DNA, 73 bp, Homo sapiens
gttaagtcaagggtataaaatctttctttttattcacagcattgctaaatcagaagcattcacagtttccctc

SEQ ID NO: 97159 - DNA, 73 bp, Homo sapiens
taagtcaagggtataaaatctttctttttattcacagcattgctaaatcagaagcattcacagtttccctccg

SEQ ID NO: 97160 - DNA, 71 bp, Homo sapiens
aagggtataaaatctttctttttattcacagcattgctaaatcagaagcattcacagtttccctccgggaa

SEQ ID NO: 97161 - DNA, 72 bp, Homo sapiens
aaatctttctttttattcacagcattgctaaatcagaagcattcacagtttccctccgggaatcttcctgtt

SEQ ID NO: 97162 - DNA, 74 bp, Homo sapiens
tttctttttattcacagcattgctaaatcagaagcattcacagtttccctccgggaatcttcctgtttgctttc

SEQ ID NO: 97163 - DNA, 76 bp, Homo sapiens
ttttattcacagcattgctaaatcagaagcattcacagtttccctccgggaatcttcctgtttgctttccagcgcg

SEQ ID NO: 97164 - DNA, 76 bp, Homo sapiens
ttcacagcattgctaaatcagaagcattcacagtttccctccgggaatcttcctgtttgctttccagcgcgtcccc

SEQ ID NO: 97165 - DNA, 72 bp, Homo sapiens
attgctaaatcagaagcattcacagtttccctccgggaatcttcctgtttgctttccagcgcgtcccctggg

SEQ ID NO: 97166 - DNA, 73 bp, Homo sapiens
ctaaatcagaagcattcacagtttccctccgggaatcttcctgtttgctttccagcgcgtcccctgggtgctg

SEQ ID NO: 97167 - DNA, 70 bp, Homo sapiens
aagcattcacagtttccctccgggaatcttcctgtttgctttccagcgcgtcccctgggtgctggggccg

SEQ ID NO: 97168 - DNA, 72 bp, Homo sapiens
tttgctttccagcgcgtcccctgggtgctggggccggcggacaccctcgaggtgcgtcgcctcggacacctc

SEQ ID NO: 97169 - DNA, 72 bp, Homo sapiens
tttccagcgcgtcccctgggtgctggggccggcggacaccctcgaggtgcgtcgcctcggacacctccgcga

SEQ ID NO: 97170 - DNA, 71 bp, Homo sapiens
ctgggtgctggggccggcggacaccctcgaggtgcgtcgcctcggacacctccgcgagggccggggcgcca

SEQ ID NO: 97171 - DNA, 71 bp, Homo sapiens
gggccggcggacaccctcgaggtgcgtcgcctcggacacctccgcgagggccggggcgccagcagacggcg

SEQ ID NO: 97172 - DNA, 73 bp, Homo sapiens
ctcgaggtgcgtcgcctcggacacctccgcgagggccggggcgccagcagacggcggcggcgtgggcttctgg

SEQ ID NO: 97173 - DNA, 74 bp, Homo sapiens
gtcgcctcggacacctccgcgagggccggggcgccagcagacggcggcggcgtgggcttctgggcgcaggaggc

SEQ ID NO: 97174 - DNA, 76 bp, Homo sapiens
tccgcgagggccggggcgccagcagacggcggcggcgtgggcttctgggcgcaggaggctgcgcgggcctgaccta

SEQ ID NO: 97175 - DNA, 76 bp, Homo sapiens
cggcggcgtgggcttctgggcgcaggaggctgcgcgggcctgacctacagcgagatcctggccgtcgggcgccctc

SEQ ID NO: 97176 - DNA, 75 bp, Homo sapiens
cgtgggcttctgggcgcaggaggctgcgcgggcctgacctacagcgagatcctggccgtcgggcgccctcggccc

SEQ ID NO: 97177 - DNA, 75 bp, Homo sapiens
tgggcgcaggaggctgcgcgggcctgacctacagcgagatcctggccgtcgggcgccctcggccccaggacggtg

SEQ ID NO: 97178 - DNA, 72 bp, Homo sapiens
ctgcgcgggcctgacctacagcgagatcctggccgtcgggcgccctcggccccaggacggtggccgggccca

SEQ ID NO: 97179 - DNA, 70 bp, Homo sapiens
ggcctgacctacagcgagatcctggccgtcgggcgccctcggccccaggacggtggccgggcccagggcc

SEQ ID NO: 97180 - DNA, 68 bp, Homo sapiens
acagcgagatcctggccgtcgggcgccctcggccccaggacggtggccgggcccagggcccgggatcc

SEQ ID NO: 97181 - DNA, 64 bp, Homo sapiens
ccgtcgggcgccctcggccccaggacggtggccgggcccagggcccgggatcccggcgggcttg

SEQ ID NO: 97182 - DNA, 67 bp, Homo sapiens
cccaggacggtggccgggcccagggcccgggatcccggcgggcttgtcgcgaacaggaggcccgcgc

SEQ ID NO: 97183 - DNA, 68 bp, Homo sapiens
gccgggcccagggcccgggatcccggcgggcttgtcgcgaacaggaggcccgcgcgcccggaggcgaa

SEQ ID NO: 97184 - DNA, 68 bp, Homo sapiens
ccagggcccgggatcccggcgggcttgtcgcgaacaggaggcccgcgcgcccggaggcgaaggcggcg

SEQ ID NO: 97185 - DNA, 68 bp, Homo sapiens
cgggcttgtcgcgaacaggaggcccgcgcgcccggaggcgaaggcggcggcccgcggggcccagccgg

SEQ ID NO: 97186 - DNA, 69 bp, Homo sapiens
cgcgaacaggaggcccgcgcgcccggaggcgaaggcggcggcccgcggggcccagccgggccaggcctg

SEQ ID NO: 97187 - DNA, 70 bp, Homo sapiens
aggcccgcgcgcccggaggcgaaggcggcggcccgcggggcccagccgggccaggcctggcgcctcagta

SEQ ID NO: 97188 - DNA, 70 bp, Homo sapiens
ccggaggcgaaggcggcggcccgcggggcccagccgggccaggcctggcgcctcagtagggcctccacac

SEQ ID NO: 97189 - DNA, 70 bp, Homo sapiens
aaggcggcggcccgcggggcccagccgggccaggcctggcgcctcagtagggcctccacacggcctcctc

SEQ ID NO: 97190 - DNA, 74 bp, Homo sapiens
ccgggccaggcctggcgcctcagtagggcctccacacggcctcctccaggcgcgcggagggcgccatgttggtg

SEQ ID NO: 97191 - DNA, 73 bp, Homo sapiens
aggcctggcgcctcagtagggcctccacacggcctcctccaggcgcgcggagggcgccatgttggtgggggag

SEQ ID NO: 97192 - DNA, 76 bp, Homo sapiens
cctcagtagggcctccacacggcctcctccaggcgcgcggagggcgccatgttggtgggggagttgctgtggctgc

SEQ ID NO: 97193 - DNA, 75 bp, Homo sapiens
cctccacacggcctcctccaggcgcgcggagggcgccatgttggtgggggagttgctgtggctgccctcggcctc

SEQ ID NO: 97194 - DNA, 76 bp, Homo sapiens
ctcctccaggcgcgcggagggcgccatgttggtgggggagttgctgtggctgccctcggcctccaccacgtcgctc

SEQ ID NO: 97195 - DNA, 75 bp, Homo sapiens
aggcgcgcggagggcgccatgttggtgggggagttgctgtggctgccctcggcctccaccacgtcgctctggttc

SEQ ID NO: 97196 - DNA, 74 bp, Homo sapiens
agggcgccatgttggtgggggagttgctgtggctgccctcggcctccaccacgtcgctctggttcgggaggctg

SEQ ID NO: 97197 - DNA, 73 bp, Homo sapiens
atgttggtgggggagttgctgtggctgccctcggcctccaccacgtcgctctggttcgggaggctggggttga

SEQ ID NO: 97198 - DNA, 77 bp, Homo sapiens
ttgctgtggctgccctcggcctccaccacgtcgctctggttcgggaggctggggttgagcagcgcggagccggtgga

SEQ ID NO: 97199 - DNA, 74 bp, Homo sapiens
tgccctcggcctccaccacgtcgctctggttcgggaggctggggttgagcagcgcggagccggtggaggcgttg

SEQ ID NO: 97200 - DNA, 75 bp, Homo sapiens
tcggcctccaccacgtcgctctggttcgggaggctggggttgagcagcgcggagccggtggaggcgttggtgcag

SEQ ID NO: 97201 - DNA, 79 bp, Homo sapiens
tggggttgagcagcgcggagccggtggaggcgttggtgcagggcggcaggatgcgcggcggcgagcgctcgccgcccac

SEQ ID NO: 97202 - DNA, 82 bp, Homo sapiens
tgagcagcgcggagccggtggaggcgttggtgcagggcggcaggatgcgcggcggcgagcgctcgccgcccaccatggagaa

SEQ ID NO: 97203 - DNA, 77 bp, Homo sapiens
agccggtggaggcgttggtgcagggcggcaggatgcgcggcggcgagcgctcgccgcccaccatggagaactggtag

SEQ ID NO: 97204 - DNA, 73 bp, Homo sapiens
cggcgagcgctcgccgcccaccatggagaactggtaggagccggccgaggcgccgtagtacaggtggtaggag

SEQ ID NO: 97205 - DNA, 72 bp, Homo sapiens
ccgcccaccatggagaactggtaggagccggccgaggcgccgtagtacaggtggtaggagggcgagctggct

SEQ ID NO: 97206 - DNA, 72 bp, Homo sapiens
accatggagaactggtaggagccggccgaggcgccgtagtacaggtggtaggagggcgagctggcttggaac

SEQ ID NO: 97207 - DNA, 70 bp, Homo sapiens
aactggtaggagccggccgaggcgccgtagtacaggtggtaggagggcgagctggcttggaacgggcctc

SEQ ID NO: 97208 - DNA, 73 bp, Homo sapiens
cggccgaggcgccgtagtacaggtggtaggagggcgagctggcttggaacgggcctccctgcgcttgcgacga

SEQ ID NO: 97209 - DNA, 72 bp, Homo sapiens
ggcgccgtagtacaggtggtaggagggcgagctggcttggaacgggcctccctgcgcttgcgacgagccggg

SEQ ID NO: 97210 - DNA, 70 bp, Homo sapiens
aggtggtaggagggcgagctggcttggaacgggcctccctgcgcttgcgacgagccggggtagggcggcg

SEQ ID NO: 97211 - DNA, 71 bp, Homo sapiens
agggcgagctggcttggaacgggcctccctgcgcttgcgacgagccggggtagggcggcggcaggtaggtg

SEQ ID NO: 97212 - DNA, 72 bp, Homo sapiens
ctggcttggaacgggcctccctgcgcttgcgacgagccggggtagggcggcggcaggtaggtgtggtagcgc

SEQ ID NO: 97213 - DNA, 71 bp, Homo sapiens
aacgggcctccctgcgcttgcgacgagccggggtagggcggcggcaggtaggtgtggtagcgcgtggccga

SEQ ID NO: 97214 - DNA, 76 bp, Homo sapiens
gcttgcgacgagccggggtagggcggcggcaggtaggtgtggtagcgcgtggccgagcccatggccgacatgccga

SEQ ID NO: 97215 - DNA, 75 bp, Homo sapiens
acgagccggggtagggcggcggcaggtaggtgtggtagcgcgtggccgagcccatggccgacatgccgatgccga

SEQ ID NO: 97216 - DNA, 78 bp, Homo sapiens
gtagggcggcggcaggtaggtgtggtagcgcgtggccgagcccatggccgacatgccgatgccgatgcccgaggtgac

SEQ ID NO: 97217 - DNA, 77 bp, Homo sapiens
tggtagcgcgtggccgagcccatggccgacatgccgatgccgatgcccgaggtgaccggcgtcggggagtaggtgaa

SEQ ID NO: 97218 - DNA, 77 bp, Homo sapiens
tggccgagcccatggccgacatgccgatgccgatgcccgaggtgaccggcgtcggggagtaggtgaaggcgcctgga

SEQ ID NO: 97219 - DNA, 78 bp, Homo sapiens
agcccatggccgacatgccgatgccgatgcccgaggtgaccggcgtcggggagtaggtgaaggcgcctggatagtgca

SEQ ID NO: 97220 - DNA, 76 bp, Homo sapiens
acatgccgatgccgatgcccgaggtgaccggcgtcggggagtaggtgaaggcgcctggatagtgcatgcgggggtc

SEQ ID NO: 97221 - DNA, 74 bp, Homo sapiens
ccgaggtgaccggcgtcggggagtaggtgaaggcgcctggatagtgcatgcgggggtcggagatggagggcagc

SEQ ID NO: 97222 - DNA, 77 bp, Homo sapiens
cctggatagtgcatgcgggggtcggagatggagggcagcgcggggaactggcgcgggtcgctgaacgctgtcaggtc

SEQ ID NO: 97223 - DNA, 75 bp, Homo sapiens
atagtgcatgcgggggtcggagatggagggcagcgcggggaactggcgcgggtcgctgaacgctgtcaggtcggg

SEQ ID NO: 97224 - DNA, 76 bp, Homo sapiens
ggtcggagatggagggcagcgcggggaactggcgcgggtcgctgaacgctgtcaggtcgggtgccgctgcagggcg

SEQ ID NO: 97225 - DNA, 77 bp, Homo sapiens
atggagggcagcgcggggaactggcgcgggtcgctgaacgctgtcaggtcgggtgccgctgcagggcgggcaagaga

SEQ ID NO: 97226 - DNA, 74 bp, Homo sapiens
cggggaactggcgcgggtcgctgaacgctgtcaggtcgggtgccgctgcagggcgggcaagagaacggagcgga

SEQ ID NO: 97227 - DNA, 76 bp, Homo sapiens
actggcgcgggtcgctgaacgctgtcaggtcgggtgccgctgcagggcgggcaagagaacggagcggaagtgagta

SEQ ID NO: 97228 - DNA, 77 bp, Homo sapiens
tcgctgaacgctgtcaggtcgggtgccgctgcagggcgggcaagagaacggagcggaagtgagtaggaggttgcgga

SEQ ID NO: 97229 - DNA, 77 bp, Homo sapiens
tgtcaggtcgggtgccgctgcagggcgggcaagagaacggagcggaagtgagtaggaggttgcggaggccacagctc

SEQ ID NO: 97230 - DNA, 75 bp, Homo sapiens
tcgggtgccgctgcagggcgggcaagagaacggagcggaagtgagtaggaggttgcggaggccacagctcttccc

SEQ ID NO: 97231 - DNA, 72 bp, Homo sapiens
agggcgggcaagagaacggagcggaagtgagtaggaggttgcggaggccacagctcttccctctgccccagg

SEQ ID NO: 97232 - DNA, 71 bp, Homo sapiens
aagagaacggagcggaagtgagtaggaggttgcggaggccacagctcttccctctgccccagggggctacc

SEQ ID NO: 97233 - DNA, 73 bp, Homo sapiens
agcggaagtgagtaggaggttgcggaggccacagctcttccctctgccccagggggctacccaggatgatacc

SEQ ID NO: 97234 - DNA, 74 bp, Homo sapiens
taggaggttgcggaggccacagctcttccctctgccccagggggctacccaggatgataccgcctaggaggatg

SEQ ID NO: 97235 - DNA, 73 bp, Homo sapiens
ggttgcggaggccacagctcttccctctgccccagggggctacccaggatgataccgcctaggaggatgggaa

SEQ ID NO: 97236 - DNA, 74 bp, Homo sapiens
cctctgccccagggggctacccaggatgataccgcctaggaggatgggaagccacccaggatgctactgctggg

SEQ ID NO: 97237 - DNA, 72 bp, Homo sapiens
agggggctacccaggatgataccgcctaggaggatgggaagccacccaggatgctactgctggggaggacgg

SEQ ID NO: 97238 - DNA, 73 bp, Homo sapiens
tacccaggatgataccgcctaggaggatgggaagccacccaggatgctactgctggggaggacggggaccacc

SEQ ID NO: 97239 - DNA, 72 bp, Homo sapiens
ataccgcctaggaggatgggaagccacccaggatgctactgctggggaggacggggaccacccgggatgcta

SEQ ID NO: 97240 - DNA, 72 bp, Homo sapiens
agccacccaggatgctactgctggggaggacggggaccacccgggatgctactcccaagaggacgaggatta

SEQ ID NO: 97241 - DNA, 74 bp, Homo sapiens
tgctactgctggggaggacggggaccacccgggatgctactcccaagaggacgaggattacccaggatgctata

SEQ ID NO: 97242 - DNA, 69 bp, Homo sapiens
gggaggacggggaccacccgggatgctactcccaagaggacgaggattacccaggatgctatacccagg

SEQ ID NO: 97243 - DNA, 70 bp, Homo sapiens
gggaccacccgggatgctactcccaagaggacgaggattacccaggatgctatacccagggggacaggga

SEQ ID NO: 97244 - DNA, 69 bp, Homo sapiens
acccgggatgctactcccaagaggacgaggattacccaggatgctatacccagggggacagggaccacc

SEQ ID NO: 97245 - DNA, 72 bp, Homo sapiens
tactcccaagaggacgaggattacccaggatgctatacccagggggacagggaccacccaggatgccacctc

SEQ ID NO: 97246 - DNA, 74 bp, Homo sapiens
aggacgaggattacccaggatgctatacccagggggacagggaccacccaggatgccacctcctgagatgacga

SEQ ID NO: 97247 - DNA, 75 bp, Homo sapiens
attacccaggatgctatacccagggggacagggaccacccaggatgccacctcctgagatgacgaggatcaccca

SEQ ID NO: 97248 - DNA, 77 bp, Homo sapiens
tatacccagggggacagggaccacccaggatgccacctcctgagatgacgaggatcacccagcatgtcacctcccaa

SEQ ID NO: 97249 - DNA, 82 bp, Homo sapiens
cacccaggatgccacctcctgagatgacgaggatcacccagcatgtcacctcccaagaggatggggactacccatgatgcta

SEQ ID NO: 97250 - DNA, 83 bp, Homo sapiens
atgccacctcctgagatgacgaggatcacccagcatgtcacctcccaagaggatggggactacccatgatgctatgcccagga

SEQ ID NO: 97251 - DNA, 81 bp, Homo sapiens
ctcctgagatgacgaggatcacccagcatgtcacctcccaagaggatggggactacccatgatgctatgcccaggaggtcg

SEQ ID NO: 97252 - DNA, 78 bp, Homo sapiens
aggatcacccagcatgtcacctcccaagaggatggggactacccatgatgctatgcccaggaggtcggggaccactca

SEQ ID NO: 97253 - DNA, 78 bp, Homo sapiens
agcatgtcacctcccaagaggatggggactacccatgatgctatgcccaggaggtcggggaccactcaggatgccacc

SEQ ID NO: 97254 - DNA, 76 bp, Homo sapiens
acctcccaagaggatggggactacccatgatgctatgcccaggaggtcggggaccactcaggatgccacctcctga

SEQ ID NO: 97255 - DNA, 79 bp, Homo sapiens
tacccatgatgctatgcccaggaggtcggggaccactcaggatgccacctcctgagaggacggagaccacccaggatga

SEQ ID NO: 97256 - DNA, 77 bp, Homo sapiens
atgctatgcccaggaggtcggggaccactcaggatgccacctcctgagaggacggagaccacccaggatgacaccac

SEQ ID NO: 97257 - DNA, 73 bp, Homo sapiens
aggaggtcggggaccactcaggatgccacctcctgagaggacggagaccacccaggatgacaccacctgggag

SEQ ID NO: 97258 - DNA, 77 bp, Homo sapiens
aggatgccacctcctgagaggacggagaccacccaggatgacaccacctgggaggatggagaccacccaggatgcta

SEQ ID NO: 97259 - DNA, 72 bp, Homo sapiens
acggagaccacccaggatgacaccacctgggaggatggagaccacccaggatgctaccgcctaggaggacgg

SEQ ID NO: 97260 - DNA, 72 bp, Homo sapiens
aggatgacaccacctgggaggatggagaccacccaggatgctaccgcctaggaggacgggggacacccagga

SEQ ID NO: 97261 - DNA, 74 bp, Homo sapiens
cacctgggaggatggagaccacccaggatgctaccgcctaggaggacgggggacacccaggatgctactgtcca

SEQ ID NO: 97262 - DNA, 74 bp, Homo sapiens
aggatggagaccacccaggatgctaccgcctaggaggacgggggacacccaggatgctactgtccagggagatg

SEQ ID NO: 97263 - DNA, 73 bp, Homo sapiens
acccaggatgctaccgcctaggaggacgggggacacccaggatgctactgtccagggagatgggtttctatca

SEQ ID NO: 97264 - DNA, 73 bp, Homo sapiens
atgctaccgcctaggaggacgggggacacccaggatgctactgtccagggagatgggtttctatcagaattta

SEQ ID NO: 97265 - DNA, 72 bp, Homo sapiens
taggaggacgggggacacccaggatgctactgtccagggagatgggtttctatcagaatttaccgcccagga

SEQ ID NO: 97266 - DNA, 74 bp, Homo sapiens
ggacacccaggatgctactgtccagggagatgggtttctatcagaatttaccgcccaggaagattggaaccaca

SEQ ID NO: 97267 - DNA, 74 bp, Homo sapiens
tactgtccagggagatgggtttctatcagaatttaccgcccaggaagattggaaccacacaggattgctaccac

SEQ ID NO: 97268 - DNA, 73 bp, Homo sapiens
ttctatcagaatttaccgcccaggaagattggaaccacacaggattgctaccacctgggaggatgggggctac

SEQ ID NO: 97269 - DNA, 75 bp, Homo sapiens
atttaccgcccaggaagattggaaccacacaggattgctaccacctgggaggatgggggctactgaggatgctgc

SEQ ID NO: 97270 - DNA, 75 bp, Homo sapiens
aggattgctaccacctgggaggatgggggctactgaggatgctgctgcctagggagagggtttctacccagaatc

SEQ ID NO: 97271 - DNA, 75 bp, Homo sapiens
tgggaggatgggggctactgaggatgctgctgcctagggagagggtttctacccagaatctgccacccaaaaaga

SEQ ID NO: 97272 - DNA, 78 bp, Homo sapiens
aggatgctgctgcctagggagagggtttctacccagaatctgccacccaaaaagatgaggtcacccaggatgctatgc

SEQ ID NO: 97273 - DNA, 75 bp, Homo sapiens
tgcctagggagagggtttctacccagaatctgccacccaaaaagatgaggtcacccaggatgctatgcccaggag

SEQ ID NO: 97274 - DNA, 73 bp, Homo sapiens
agggagagggtttctacccagaatctgccacccaaaaagatgaggtcacccaggatgctatgcccaggaggac

SEQ ID NO: 97275 - DNA, 75 bp, Homo sapiens
tttctacccagaatctgccacccaaaaagatgaggtcacccaggatgctatgcccaggaggacggggatcaggag

SEQ ID NO: 97276 - DNA, 78 bp, Homo sapiens
aatctgccacccaaaaagatgaggtcacccaggatgctatgcccaggaggacggggatcaggaggctgctactgccca

SEQ ID NO: 97277 - DNA, 78 bp, Homo sapiens
aaaagatgaggtcacccaggatgctatgcccaggaggacggggatcaggaggctgctactgcccaggaggatggtata

SEQ ID NO: 97278 - DNA, 80 bp, Homo sapiens
tcacccaggatgctatgcccaggaggacggggatcaggaggctgctactgcccaggaggatggtataatatacagtaata

SEQ ID NO: 97279 - DNA, 79 bp, Homo sapiens
aggatgctatgcccaggaggacggggatcaggaggctgctactgcccaggaggatggtataatatacagtaatataata

SEQ ID NO: 97280 - DNA, 80 bp, Homo sapiens
ggatcaggaggctgctactgcccaggaggatggtataatatacagtaatataatacggtaatatagaatatcatgtaatg

SEQ ID NO: 97281 - DNA, 83 bp, Homo sapiens
gctgctactgcccaggaggatggtataatatacagtaatataatacggtaatatagaatatcatgtaatgtaatatgacatga

SEQ ID NO: 97282 - DNA, 83 bp, Homo sapiens
ctgcccaggaggatggtataatatacagtaatataatacggtaatatagaatatcatgtaatgtaatatgacatgatatatga

SEQ ID NO: 97283 - DNA, 86 bp, Homo sapiens
tacagtaatataatacggtaatatagaatatcatgtaatgtaatatgacatgatatatgaaatgatgtagtatagcataatatgta

SEQ ID NO: 97284 - DNA, 87 bp, Homo sapiens
tataatacggtaatatagaatatcatgtaatgtaatatgacatgatatatgaaatgatgtagtatagcataatatgtatagtataga

SEQ ID NO: 97285 - DNA, 91 bp, Homo sapiens
tatcatgtaatgtaatatgacatgatatatgaaatgatgtagtatagcataatatgtatagtatagatataatgtgcaatagtatatacta

SEQ ID NO: 97286 - DNA, 89 bp, Homo sapiens
atgtaatatgacatgatatatgaaatgatgtagtatagcataatatgtatagtatagatataatgtgcaatagtatatactataatatg

SEQ ID NO: 97287 - DNA, 88 bp, Homo sapiens
tgacatgatatatgaaatgatgtagtatagcataatatgtatagtatagatataatgtgcaatagtatatactataatatgtataacg

SEQ ID NO: 97288 - DNA, 84 bp, Homo sapiens
tgaaatgatgtagtatagcataatatgtatagtatagatataatgtgcaatagtatatactataatatgtataacgtatataaa

SEQ ID NO: 97289 - DNA, 83 bp, Homo sapiens
tgtagtatagcataatatgtatagtatagatataatgtgcaatagtatatactataatatgtataacgtatataaaatgttga

SEQ ID NO: 97290 - DNA, 80 bp, Homo sapiens
tatgtatagtatagatataatgtgcaatagtatatactataatatgtataacgtatataaaatgttgatataatcctagg

SEQ ID NO: 97291 - DNA, 79 bp, Homo sapiens
gtatagatataatgtgcaatagtatatactataatatgtataacgtatataaaatgttgatataatcctagggttggca

SEQ ID NO: 97292 - DNA, 80 bp, Homo sapiens
tgtgcaatagtatatactataatatgtataacgtatataaaatgttgatataatcctagggttggcaaactgcagcctgc

SEQ ID NO: 97293 - DNA, 78 bp, Homo sapiens
tatatactataatatgtataacgtatataaaatgttgatataatcctagggttggcaaactgcagcctgccagccaaa

SEQ ID NO: 97294 - DNA, 77 bp, Homo sapiens
actataatatgtataacgtatataaaatgttgatataatcctagggttggcaaactgcagcctgccagccaaatctg

SEQ ID NO: 97295 - DNA, 79 bp, Homo sapiens
tataacgtatataaaatgttgatataatcctagggttggcaaactgcagcctgccagccaaatctggcatttttgcatg

SEQ ID NO: 97296 - DNA, 79 bp, Homo sapiens
atataatcctagggttggcaaactgcagcctgccagccaaatctggcatttttgcatgtcccaggaggtaagaatgcat

SEQ ID NO: 97297 - DNA, 77 bp, Homo sapiens
gttggcaaactgcagcctgccagccaaatctggcatttttgcatgtcccaggaggtaagaatgcattttacattttt

SEQ ID NO: 97298 - DNA, 75 bp, Homo sapiens
aaactgcagcctgccagccaaatctggcatttttgcatgtcccaggaggtaagaatgcattttacattttttaaa

SEQ ID NO: 97299 - DNA, 72 bp, Homo sapiens
cagccaaatctggcatttttgcatgtcccaggaggtaagaatgcattttacattttttaaatggttgaaaaa

SEQ ID NO: 97300 - DNA, 69 bp, Homo sapiens
aaatctggcatttttgcatgtcccaggaggtaagaatgcattttacattttttaaatggttgaaaaaaa

SEQ ID NO: 97301 - DNA, 68 bp, Homo sapiens
aaaaaatccaaaaaagaatacttcctgacctgttaaaatgacaggaaattcaaacttcagtgtccatc

SEQ ID NO: 97302 - DNA, 70 bp, Homo sapiens
aaaaagaatacttcctgacctgttaaaatgacaggaaattcaaacttcagtgtccatccatacttcggaa

SEQ ID NO: 97303 - DNA, 74 bp, Homo sapiens
aatacttcctgacctgttaaaatgacaggaaattcaaacttcagtgtccatccatacttcggaacacatcctca

SEQ ID NO: 97304 - DNA, 75 bp, Homo sapiens
acctgttaaaatgacaggaaattcaaacttcagtgtccatccatacttcggaacacatcctcactcattctttca

SEQ ID NO: 97305 - DNA, 78 bp, Homo sapiens
aaatgacaggaaattcaaacttcagtgtccatccatacttcggaacacatcctcactcattctttcatgtactgcctg

SEQ ID NO: 97306 - DNA, 78 bp, Homo sapiens
aattcaaacttcagtgtccatccatacttcggaacacatcctcactcattctttcatgtactgcctgtggttgcttta

SEQ ID NO: 97307 - DNA, 80 bp, Homo sapiens
tgtccatccatacttcggaacacatcctcactcattctttcatgtactgcctgtggttgctttagagccactactgtaaa

SEQ ID NO: 97308 - DNA, 79 bp, Homo sapiens
atccatacttcggaacacatcctcactcattctttcatgtactgcctgtggttgctttagagccactactgtaaagtca

SEQ ID NO: 97309 - DNA, 79 bp, Homo sapiens
aacacatcctcactcattctttcatgtactgcctgtggttgctttagagccactactgtaaagtcaggtggtcagtata

SEQ ID NO: 97310 - DNA, 78 bp, Homo sapiens
actcattctttcatgtactgcctgtggttgctttagagccactactgtaaagtcaggtggtcagtatagggactgcag

SEQ ID NO: 97311 - DNA, 80 bp, Homo sapiens
tctttcatgtactgcctgtggttgctttagagccactactgtaaagtcaggtggtcagtatagggactgcaggagccaca

SEQ ID NO: 97312 - DNA, 78 bp, Homo sapiens
ctgtggttgctttagagccactactgtaaagtcaggtggtcagtatagggactgcaggagccacagagcaaatattta

SEQ ID NO: 97313 - DNA, 77 bp, Homo sapiens
ttgctttagagccactactgtaaagtcaggtggtcagtatagggactgcaggagccacagagcaaatatttattctt

SEQ ID NO: 97314 - DNA, 73 bp, Homo sapiens
agccactactgtaaagtcaggtggtcagtatagggactgcaggagccacagagcaaatatttattcttttttt

SEQ ID NO: 97315 - DNA, 67 bp, Homo sapiens
accgtgcccagccctaaaatatttattctctggccccttacagaaaaaagtttgctgaccctctatt

SEQ ID NO: 97316 - DNA, 71 bp, Homo sapiens
cagccctaaaatatttattctctggccccttacagaaaaaagtttgctgaccctctatttgatcaatatat

SEQ ID NO: 97317 - DNA, 72 bp, Homo sapiens
atttattctctggccccttacagaaaaaagtttgctgaccctctatttgatcaatatattaatataccaata

SEQ ID NO: 97318 - DNA, 73 bp, Homo sapiens
ttctctggccccttacagaaaaaagtttgctgaccctctatttgatcaatatattaatataccaataatataa

SEQ ID NO: 97319 - DNA, 74 bp, Homo sapiens
cttacagaaaaaagtttgctgaccctctatttgatcaatatattaatataccaataatataaattaatctgtga

SEQ ID NO: 97320 - DNA, 81 bp, Homo sapiens
tgaccctctatttgatcaatatattaatataccaataatataaattaatctgtgatattaatatagcagatgataatttga

SEQ ID NO: 97321 - DNA, 79 bp, Homo sapiens
tcaatatattaatataccaataatataaattaatctgtgatattaatatagcagatgataatttgacactaatgtaaag

SEQ ID NO: 97322 - DNA, 80 bp, Homo sapiens
taatataccaataatataaattaatctgtgatattaatatagcagatgataatttgacactaatgtaaaggatgcacaaa

SEQ ID NO: 97323 - DNA, 80 bp, Homo sapiens
taatataaattaatctgtgatattaatatagcagatgataatttgacactaatgtaaaggatgcacaaatatgttactac

SEQ ID NO: 97324 - DNA, 82 bp, Homo sapiens
taatctgtgatattaatatagcagatgataatttgacactaatgtaaaggatgcacaaatatgttactactaacacaatatg

SEQ ID NO: 97325 - DNA, 81 bp, Homo sapiens
gatattaatatagcagatgataatttgacactaatgtaaaggatgcacaaatatgttactactaacacaatatgttataca

SEQ ID NO: 97326 - DNA, 81 bp, Homo sapiens
atatagcagatgataatttgacactaatgtaaaggatgcacaaatatgttactactaacacaatatgttatacataatata

SEQ ID NO: 97327 - DNA, 79 bp, Homo sapiens
tgataatttgacactaatgtaaaggatgcacaaatatgttactactaacacaatatgttatacataatatatatcctaa

SEQ ID NO: 97328 - DNA, 77 bp, Homo sapiens
acactaatgtaaaggatgcacaaatatgttactactaacacaatatgttatacataatatatatcctaacaatatta

SEQ ID NO: 97329 - DNA, 77 bp, Homo sapiens
aaaggatgcacaaatatgttactactaacacaatatgttatacataatatatatcctaacaatattaatatataata

SEQ ID NO: 97330 - DNA, 76 bp, Homo sapiens
tacataatatatatcctaacaatattaatatataataatacattacacatagtatttaggttgaatgatagaaaat

SEQ ID NO: 97331 - DNA, 76 bp, Homo sapiens
aatatatatcctaacaatattaatatataataatacattacacatagtatttaggttgaatgatagaaaattgcca

SEQ ID NO: 97332 - DNA, 74 bp, Homo sapiens
caatattaatatataataatacattacacatagtatttaggttgaatgatagaaaattgccatttttataggcc

SEQ ID NO: 97333 - DNA, 73 bp, Homo sapiens
cattacacatagtatttaggttgaatgatagaaaattgccatttttataggccttcgacagttgaaaaattga

SEQ ID NO: 97334 - DNA, 72 bp, Homo sapiens
cacatagtatttaggttgaatgatagaaaattgccatttttataggccttcgacagttgaaaaattgataat

SEQ ID NO: 97335 - DNA, 71 bp, Homo sapiens
taggttgaatgatagaaaattgccatttttataggccttcgacagttgaaaaattgataatttcctagtat

SEQ ID NO: 97336 - DNA, 72 bp, Homo sapiens
gaaaattgccatttttataggccttcgacagttgaaaaattgataatttcctagtatttaagcgaatgcatg

SEQ ID NO: 97337 - DNA, 75 bp, Homo sapiens
catttttataggccttcgacagttgaaaaattgataatttcctagtatttaagcgaatgcatggctcagtagcaa

SEQ ID NO: 97338 - DNA, 80 bp, Homo sapiens
tataggccttcgacagttgaaaaattgataatttcctagtatttaagcgaatgcatggctcagtagcaactgctgagcga

SEQ ID NO: 97339 - DNA, 79 bp, Homo sapiens
agttgaaaaattgataatttcctagtatttaagcgaatgcatggctcagtagcaactgctgagcgaatgtcagggaata

SEQ ID NO: 97340 - DNA, 79 bp, Homo sapiens
aaaattgataatttcctagtatttaagcgaatgcatggctcagtagcaactgctgagcgaatgtcagggaataccatta

SEQ ID NO: 97341 - DNA, 79 bp, Homo sapiens
atttcctagtatttaagcgaatgcatggctcagtagcaactgctgagcgaatgtcagggaataccattaccactcctcc

SEQ ID NO: 97342 - DNA, 82 bp, Homo sapiens
atttaagcgaatgcatggctcagtagcaactgctgagcgaatgtcagggaataccattaccactcctcctctccatatctac

SEQ ID NO: 97343 - DNA, 80 bp, Homo sapiens
atggctcagtagcaactgctgagcgaatgtcagggaataccattaccactcctcctctccatatctactttcatactagt

SEQ ID NO: 97344 - DNA, 74 bp, Homo sapiens
agcgaatgtcagggaataccattaccactcctcctctccatatctactttcatactagttccacaattttagaa

SEQ ID NO: 97345 - DNA, 73 bp, Homo sapiens
atgtcagggaataccattaccactcctcctctccatatctactttcatactagttccacaattttagaaacag

SEQ ID NO: 97346 - DNA, 74 bp, Homo sapiens
ataccattaccactcctcctctccatatctactttcatactagttccacaattttagaaacagtactgccttga

SEQ ID NO: 97347 - DNA, 74 bp, Homo sapiens
ctcctctccatatctactttcatactagttccacaattttagaaacagtactgccttgagttcacctggtattc

SEQ ID NO: 97348 - DNA, 76 bp, Homo sapiens
atatctactttcatactagttccacaattttagaaacagtactgccttgagttcacctggtattctctattatgca

SEQ ID NO: 97349 - DNA, 76 bp, Homo sapiens
tttcatactagttccacaattttagaaacagtactgccttgagttcacctggtattctctattatgcacttcacta

SEQ ID NO: 97350 - DNA, 74 bp, Homo sapiens
ttccacaattttagaaacagtactgccttgagttcacctggtattctctattatgcacttcactagtttgttaa

SEQ ID NO: 97351 - DNA, 74 bp, Homo sapiens
ttttagaaacagtactgccttgagttcacctggtattctctattatgcacttcactagtttgttaacacaagta

SEQ ID NO: 97352 - DNA, 75 bp, Homo sapiens
agttcacctggtattctctattatgcacttcactagtttgttaacacaagtagatgtaggaccttgatttatcta

SEQ ID NO: 97353 - DNA, 75 bp, Homo sapiens
ctggtattctctattatgcacttcactagtttgttaacacaagtagatgtaggaccttgatttatctactctgtt

SEQ ID NO: 97354 - DNA, 76 bp, Homo sapiens
ctattatgcacttcactagtttgttaacacaagtagatgtaggaccttgatttatctactctgttttttgcacatg

SEQ ID NO: 97355 - DNA, 73 bp, Homo sapiens
ttgttaacacaagtagatgtaggaccttgatttatctactctgttttttgcacatgtggaaattttaccagaa

SEQ ID NO: 97356 - DNA, 71 bp, Homo sapiens
aggaccttgatttatctactctgttttttgcacatgtggaaattttaccagaaattgtaaagctttgtctc

SEQ ID NO: 97357 - DNA, 70 bp, Homo sapiens
ctactctgttttttgcacatgtggaaattttaccagaaattgtaaagctttgtctctaaaactcactttg

SEQ ID NO: 97358 - DNA, 71 bp, Homo sapiens
ttttgcacatgtggaaattttaccagaaattgtaaagctttgtctctaaaactcactttgttacgactgta

SEQ ID NO: 97359 - DNA, 71 bp, Homo sapiens
cacatgtggaaattttaccagaaattgtaaagctttgtctctaaaactcactttgttacgactgtacatta

SEQ ID NO: 97360 - DNA, 69 bp, Homo sapiens
tttaccagaaattgtaaagctttgtctctaaaactcactttgttacgactgtacattattttgttagga

SEQ ID NO: 97361 - DNA, 71 bp, Homo sapiens
gctttgtctctaaaactcactttgttacgactgtacattattttgttaggattatggatttacagtttcac

SEQ ID NO: 97362 - DNA, 70 bp, Homo sapiens
actcactttgttacgactgtacattattttgttaggattatggatttacagtttcaccaactggctttag

SEQ ID NO: 97363 - DNA, 71 bp, Homo sapiens
tttgttacgactgtacattattttgttaggattatggatttacagtttcaccaactggctttagggctgtc

SEQ ID NO: 97364 - DNA, 72 bp, Homo sapiens
actgtacattattttgttaggattatggatttacagtttcaccaactggctttagggctgtcctgtggttca

SEQ ID NO: 97365 - DNA, 75 bp, Homo sapiens
attatggatttacagtttcaccaactggctttagggctgtcctgtggttcactggctctctctgcatttttctta

SEQ ID NO: 97366 - DNA, 75 bp, Homo sapiens
ttacagtttcaccaactggctttagggctgtcctgtggttcactggctctctctgcatttttcttacctacaggc

SEQ ID NO: 97367 - DNA, 73 bp, Homo sapiens
tggttcactggctctctctgcatttttcttacctacaggccgcccttgggaactacggaggatttgtgtatta

SEQ ID NO: 97368 - DNA, 72 bp, Homo sapiens
actggctctctctgcatttttcttacctacaggccgcccttgggaactacggaggatttgtgtattaggcag

SEQ ID NO: 97369 - DNA, 67 bp, Homo sapiens
catttttcttacctacaggccgcccttgggaactacggaggatttgtgtattaggcagggttcccta

SEQ ID NO: 97370 - DNA, 70 bp, Homo sapiens
ttcttacctacaggccgcccttgggaactacggaggatttgtgtattaggcagggttccctatatctgta

SEQ ID NO: 97371 - DNA, 71 bp, Homo sapiens
aggccgcccttgggaactacggaggatttgtgtattaggcagggttccctatatctgtagatcagagtttc

SEQ ID NO: 97372 - DNA, 74 bp, Homo sapiens
aactacggaggatttgtgtattaggcagggttccctatatctgtagatcagagtttctcaactgttgacactgt

SEQ ID NO: 97373 - DNA, 76 bp, Homo sapiens
ggaggatttgtgtattaggcagggttccctatatctgtagatcagagtttctcaactgttgacactgttgacattt

SEQ ID NO: 97374 - DNA, 80 bp, Homo sapiens
tattaggcagggttccctatatctgtagatcagagtttctcaactgttgacactgttgacattttgggccagatcatgat

SEQ ID NO: 97375 - DNA, 80 bp, Homo sapiens
tatatctgtagatcagagtttctcaactgttgacactgttgacattttgggccagatcatgatttgctggggtggagggg

SEQ ID NO: 97376 - DNA, 76 bp, Homo sapiens
agagtttctcaactgttgacactgttgacattttgggccagatcatgatttgctggggtggagggggctgtctcgt

SEQ ID NO: 97377 - DNA, 77 bp, Homo sapiens
aactgttgacactgttgacattttgggccagatcatgatttgctggggtggagggggctgtctcgttcatcgtagga

SEQ ID NO: 97378 - DNA, 82 bp, Homo sapiens
ctgttgacattttgggccagatcatgatttgctggggtggagggggctgtctcgttcatcgtaggatgtgtggcagcatctc

SEQ ID NO: 97379 - DNA, 81 bp, Homo sapiens
attttgggccagatcatgatttgctggggtggagggggctgtctcgttcatcgtaggatgtgtggcagcatctctgcttta

SEQ ID NO: 97380 - DNA, 80 bp, Homo sapiens
agatcatgatttgctggggtggagggggctgtctcgttcatcgtaggatgtgtggcagcatctctgctttacccattagg

SEQ ID NO: 97381 - DNA, 77 bp, Homo sapiens
atttgctggggtggagggggctgtctcgttcatcgtaggatgtgtggcagcatctctgctttacccattaggtgtta

SEQ ID NO: 97382 - DNA, 78 bp, Homo sapiens
agggggctgtctcgttcatcgtaggatgtgtggcagcatctctgctttacccattaggtgttagtagcatcgcccgcc

SEQ ID NO: 97383 - DNA, 81 bp, Homo sapiens
tgtctcgttcatcgtaggatgtgtggcagcatctctgctttacccattaggtgttagtagcatcgcccgcccctcttgtga

SEQ ID NO: 97384 - DNA, 80 bp, Homo sapiens
atcgtaggatgtgtggcagcatctctgctttacccattaggtgttagtagcatcgcccgcccctcttgtgacaactcaga

SEQ ID NO: 97385 - DNA, 81 bp, Homo sapiens
atgtgtggcagcatctctgctttacccattaggtgttagtagcatcgcccgcccctcttgtgacaactcagaatgtctcca

SEQ ID NO: 97386 - DNA, 79 bp, Homo sapiens
atctctgctttacccattaggtgttagtagcatcgcccgcccctcttgtgacaactcagaatgtctccagacattgcca

SEQ ID NO: 97387 - DNA, 81 bp, Homo sapiens
tctccagacattgccagatatcctgcgggtggggtgacggaagcaaagtcaccccagctgagaaccaccactgcagatgta

SEQ ID NO: 97388 - DNA, 78 bp, Homo sapiens
acattgccagatatcctgcgggtggggtgacggaagcaaagtcaccccagctgagaaccaccactgcagatgtagaag

SEQ ID NO: 97389 - DNA, 75 bp, Homo sapiens
aagcaaagtcaccccagctgagaaccaccactgcagatgtagaagggcaccctggagaagttcaggttccttaga

SEQ ID NO: 97390 - DNA, 74 bp, Homo sapiens
accccagctgagaaccaccactgcagatgtagaagggcaccctggagaagttcaggttccttagaattattcat

SEQ ID NO: 97391 - DNA, 74 bp, Homo sapiens
agaaccaccactgcagatgtagaagggcaccctggagaagttcaggttccttagaattattcattaaatgacca

SEQ ID NO: 97392 - DNA, 74 bp, Homo sapiens
actgcagatgtagaagggcaccctggagaagttcaggttccttagaattattcattaaatgaccaggctaggac

SEQ ID NO: 97393 - DNA, 72 bp, Homo sapiens
atgtagaagggcaccctggagaagttcaggttccttagaattattcattaaatgaccaggctaggactctcc

SEQ ID NO: 97394 - DNA, 74 bp, Homo sapiens
cctggagaagttcaggttccttagaattattcattaaatgaccaggctaggactctcctctttatatcagcaaa

SEQ ID NO: 97395 - DNA, 75 bp, Homo sapiens
agaagttcaggttccttagaattattcattaaatgaccaggctaggactctcctctttatatcagcaaatccaca

SEQ ID NO: 97396 - DNA, 79 bp, Homo sapiens
ttagaattattcattaaatgaccaggctaggactctcctctttatatcagcaaatccacagacagcaacaaacagtaga

SEQ ID NO: 97397 - DNA, 79 bp, Homo sapiens
aaatgaccaggctaggactctcctctttatatcagcaaatccacagacagcaacaaacagtagaaacatgaattcattg

SEQ ID NO: 97398 - DNA, 76 bp, Homo sapiens
ctaggactctcctctttatatcagcaaatccacagacagcaacaaacagtagaaacatgaattcattgttttaaaa

SEQ ID NO: 97399 - DNA, 76 bp, Homo sapiens
cctctttatatcagcaaatccacagacagcaacaaacagtagaaacatgaattcattgttttaaaatgtgaagttc

SEQ ID NO: 97400 - DNA, 78 bp, Homo sapiens
caaatccacagacagcaacaaacagtagaaacatgaattcattgttttaaaatgtgaagttctcagatcaacacacaa

SEQ ID NO: 97401 - DNA, 75 bp, Homo sapiens
aacagtagaaacatgaattcattgttttaaaatgtgaagttctcagatcaacacacaaaataactcttaagctca

SEQ ID NO: 97402 - DNA, 79 bp, Homo sapiens
gaaacatgaattcattgttttaaaatgtgaagttctcagatcaacacacaaaataactcttaagctcagatggcatgtg

SEQ ID NO: 97403 - DNA, 77 bp, Homo sapiens
attgttttaaaatgtgaagttctcagatcaacacacaaaataactcttaagctcagatggcatgtggcctgtgtcct

SEQ ID NO: 97404 - DNA, 78 bp, Homo sapiens
ttaaaatgtgaagttctcagatcaacacacaaaataactcttaagctcagatggcatgtggcctgtgtccttttgagt

SEQ ID NO: 97405 - DNA, 82 bp, Homo sapiens
ttctcagatcaacacacaaaataactcttaagctcagatggcatgtggcctgtgtccttttgagttcaggctgatagagaaa

SEQ ID NO: 97406 - DNA, 79 bp, Homo sapiens
aataactcttaagctcagatggcatgtggcctgtgtccttttgagttcaggctgatagagaaagtcgacagagccaaaa

SEQ ID NO: 97407 - DNA, 83 bp, Homo sapiens
ttaagctcagatggcatgtggcctgtgtccttttgagttcaggctgatagagaaagtcgacagagccaaaagcttgctctgaa

SEQ ID NO: 97408 - DNA, 79 bp, Homo sapiens
atggcatgtggcctgtgtccttttgagttcaggctgatagagaaagtcgacagagccaaaagcttgctctgaaaggaaa

SEQ ID NO: 97409 - DNA, 76 bp, Homo sapiens
tgtgtccttttgagttcaggctgatagagaaagtcgacagagccaaaagcttgctctgaaaggaaagctaccaagg

SEQ ID NO: 97410 - DNA, 76 bp, Homo sapiens
tttgagttcaggctgatagagaaagtcgacagagccaaaagcttgctctgaaaggaaagctaccaaggtggattaa

SEQ ID NO: 97411 - DNA, 75 bp, Homo sapiens
tgatagagaaagtcgacagagccaaaagcttgctctgaaaggaaagctaccaaggtggattaatctgtttttgga

SEQ ID NO: 97412 - DNA, 71 bp, Homo sapiens
agaaagtcgacagagccaaaagcttgctctgaaaggaaagctaccaaggtggattaatctgtttttggaag

SEQ ID NO: 97413 - DNA, 75 bp, Homo sapiens
gccaaaagcttgctctgaaaggaaagctaccaaggtggattaatctgtttttggaaggcagcggcagttgatcaa

SEQ ID NO: 97414 - DNA, 76 bp, Homo sapiens
tgctctgaaaggaaagctaccaaggtggattaatctgtttttggaaggcagcggcagttgatcaacttcctcatat

SEQ ID NO: 97415 - DNA, 73 bp, Homo sapiens
aaaggaaagctaccaaggtggattaatctgtttttggaaggcagcggcagttgatcaacttcctcatatttca

SEQ ID NO: 97416 - DNA, 75 bp, Homo sapiens
taccaaggtggattaatctgtttttggaaggcagcggcagttgatcaacttcctcatatttcaagcctattattc

SEQ ID NO: 97417 - DNA, 78 bp, Homo sapiens
tggattaatctgtttttggaaggcagcggcagttgatcaacttcctcatatttcaagcctattattccagcagggaga

SEQ ID NO: 97418 - DNA, 80 bp, Homo sapiens
aggcagcggcagttgatcaacttcctcatatttcaagcctattattccagcagggagagctagtgtgttttctctctctc

SEQ ID NO: 97419 - DNA, 77 bp, Homo sapiens
ttctctctctctcgctcgctctctcgtctcttccacaccccatcctccctccctctaatggccttttattgctctaa

SEQ ID NO: 97420 - DNA, 74 bp, Homo sapiens
tcgctcgctctctcgtctcttccacaccccatcctccctccctctaatggccttttattgctctaacacatttt

SEQ ID NO: 97421 - DNA, 71 bp, Homo sapiens
ctctctcgtctcttccacaccccatcctccctccctctaatggccttttattgctctaacacatttttaaa

SEQ ID NO: 97422 - DNA, 70 bp, Homo sapiens
tctcgtctcttccacaccccatcctccctccctctaatggccttttattgctctaacacatttttaaaaa

SEQ ID NO: 97423 - DNA, 68 bp, Homo sapiens
atcctccctccctctaatggccttttattgctctaacacatttttaaaaatgaactcctctgtacctt

SEQ ID NO: 97424 - DNA, 67 bp, Homo sapiens
ccctccctctaatggccttttattgctctaacacatttttaaaaatgaactcctctgtacctttggg

SEQ ID NO: 97425 - DNA, 71 bp, Homo sapiens
aatggccttttattgctctaacacatttttaaaaatgaactcctctgtacctttggggtgaatgtgatgag

SEQ ID NO: 97426 - DNA, 73 bp, Homo sapiens
tattgctctaacacatttttaaaaatgaactcctctgtacctttggggtgaatgtgatgaggggatacactcc

SEQ ID NO: 97427 - DNA, 72 bp, Homo sapiens
tttttaaaaatgaactcctctgtacctttggggtgaatgtgatgaggggatacactcctcatcagaggtaat

SEQ ID NO: 97428 - DNA, 74 bp, Homo sapiens
tcctctgtacctttggggtgaatgtgatgaggggatacactcctcatcagaggtaattaaagtttatagaaaca

SEQ ID NO: 97429 - DNA, 77 bp, Homo sapiens
gggtgaatgtgatgaggggatacactcctcatcagaggtaattaaagtttatagaaacagcccaagtctgtagcaga

SEQ ID NO: 97430 - DNA, 76 bp, Homo sapiens
atgtgatgaggggatacactcctcatcagaggtaattaaagtttatagaaacagcccaagtctgtagcagatccct

SEQ ID NO: 97431 - DNA, 76 bp, Homo sapiens
atacactcctcatcagaggtaattaaagtttatagaaacagcccaagtctgtagcagatcccttcactaatgagga

SEQ ID NO: 97432 - DNA, 74 bp, Homo sapiens
tttatagaaacagcccaagtctgtagcagatcccttcactaatgaggaaaccaggagtctgactttcaaacaaa

SEQ ID NO: 97433 - DNA, 73 bp, Homo sapiens
cccaagtctgtagcagatcccttcactaatgaggaaaccaggagtctgactttcaaacaaacactcctgttaa

SEQ ID NO: 97434 - DNA, 73 bp, Homo sapiens
gtctgtagcagatcccttcactaatgaggaaaccaggagtctgactttcaaacaaacactcctgttaatcttt

SEQ ID NO: 97435 - DNA, 71 bp, Homo sapiens
atcccttcactaatgaggaaaccaggagtctgactttcaaacaaacactcctgttaatcttttcaaagcca

SEQ ID NO: 97436 - DNA, 74 bp, Homo sapiens
taatgaggaaaccaggagtctgactttcaaacaaacactcctgttaatcttttcaaagccaggcagacatgtgg

SEQ ID NO: 97437 - DNA, 72 bp, Homo sapiens
aggagtctgactttcaaacaaacactcctgttaatcttttcaaagccaggcagacatgtgggcagggaaaac

SEQ ID NO: 97438 - DNA, 70 bp, Homo sapiens
tttcaaacaaacactcctgttaatcttttcaaagccaggcagacatgtgggcagggaaaacgttgtaaac

SEQ ID NO: 97439 - DNA, 70 bp, Homo sapiens
aacaaacactcctgttaatcttttcaaagccaggcagacatgtgggcagggaaaacgttgtaaacggaca

SEQ ID NO: 97440 - DNA, 70 bp, Homo sapiens
actcctgttaatcttttcaaagccaggcagacatgtgggcagggaaaacgttgtaaacggacagtggttc

SEQ ID NO: 97441 - DNA, 73 bp, Homo sapiens
taatcttttcaaagccaggcagacatgtgggcagggaaaacgttgtaaacggacagtggttctgaggctgccc

SEQ ID NO: 97442 - DNA, 72 bp, Homo sapiens
aatcttttcaaagccaggcagacatgtgggcagggaaaacgttgtaaacggacagtggttctgaggctgccc

SEQ ID NO: 97443 - DNA, 72 bp, Homo sapiens
ttttcaaagccaggcagacatgtgggcagggaaaacgttgtaaacggacagtggttctgaggctgcccttcc

SEQ ID NO: 97444 - DNA, 72 bp, Homo sapiens
aaagccaggcagacatgtgggcagggaaaacgttgtaaacggacagtggttctgaggctgcccttccttggc

SEQ ID NO: 97445 - DNA, 72 bp, Homo sapiens
agacatgtgggcagggaaaacgttgtaaacggacagtggttctgaggctgcccttccttggccacactctag

SEQ ID NO: 97446 - DNA, 72 bp, Homo sapiens
atgtgggcagggaaaacgttgtaaacggacagtggttctgaggctgcccttccttggccacactctagtcat

SEQ ID NO: 97447 - DNA, 73 bp, Homo sapiens
ggcagggaaaacgttgtaaacggacagtggttctgaggctgcccttccttggccacactctagtcattctcga

SEQ ID NO: 97448 - DNA, 72 bp, Homo sapiens
agggaaaacgttgtaaacggacagtggttctgaggctgcccttccttggccacactctagtcattctcgagc

SEQ ID NO: 97449 - DNA, 77 bp, Homo sapiens
aggctgcccttccttggccacactctagtcattctcgagccaggccacacctcattccacagggttcatccctgccc

SEQ ID NO: 97450 - DNA, 77 bp, Homo sapiens
ttccttggccacactctagtcattctcgagccaggccacacctcattccacagggttcatccctgcccgctctttgg

SEQ ID NO: 97451 - DNA, 79 bp, Homo sapiens
acactctagtcattctcgagccaggccacacctcattccacagggttcatccctgcccgctctttggggccatctgtga

SEQ ID NO: 97452 - DNA, 79 bp, Homo sapiens
agtcattctcgagccaggccacacctcattccacagggttcatccctgcccgctctttggggccatctgtgagcaagcc

SEQ ID NO: 97453 - DNA, 75 bp, Homo sapiens
acacctcattccacagggttcatccctgcccgctctttggggccatctgtgagcaagccctgtgtcacttgtttt

SEQ ID NO: 97454 - DNA, 81 bp, Homo sapiens
atccctgcccgctctttggggccatctgtgagcaagccctgtgtcacttgtttttgctgacatggagagctgtgacatgtt

SEQ ID NO: 97455 - DNA, 81 bp, Homo sapiens
atctgtgagcaagccctgtgtcacttgtttttgctgacatggagagctgtgacatgtttgagagttaacaggaagctttac

SEQ ID NO: 97456 - DNA, 77 bp, Homo sapiens
aagccctgtgtcacttgtttttgctgacatggagagctgtgacatgtttgagagttaacaggaagctttactccatt

SEQ ID NO: 97457 - DNA, 77 bp, Homo sapiens
tcacttgtttttgctgacatggagagctgtgacatgtttgagagttaacaggaagctttactccatttttccattta

SEQ ID NO: 97458 - DNA, 77 bp, Homo sapiens
ttttgctgacatggagagctgtgacatgtttgagagttaacaggaagctttactccatttttccatttagatttata

SEQ ID NO: 97459 - DNA, 76 bp, Homo sapiens
acatggagagctgtgacatgtttgagagttaacaggaagctttactccatttttccatttagatttatagagtcta

SEQ ID NO: 97460 - DNA, 72 bp, Homo sapiens
acatgtttgagagttaacaggaagctttactccatttttccatttagatttatagagtctacggagaagctg

SEQ ID NO: 97461 - DNA, 72 bp, Homo sapiens
tttgagagttaacaggaagctttactccatttttccatttagatttatagagtctacggagaagctgggaca

SEQ ID NO: 97462 - DNA, 70 bp, Homo sapiens
aacaggaagctttactccatttttccatttagatttatagagtctacggagaagctgggacaggaggaaa

SEQ ID NO: 97463 - DNA, 73 bp, Homo sapiens
tactccatttttccatttagatttatagagtctacggagaagctgggacaggaggaaaagcattaggcaaata

SEQ ID NO: 97464 - DNA, 77 bp, Homo sapiens
agatttatagagtctacggagaagctgggacaggaggaaaagcattaggcaaatacagtcagtttgttgtcatctga

SEQ ID NO: 97465 - DNA, 79 bp, Homo sapiens
agtctacggagaagctgggacaggaggaaaagcattaggcaaatacagtcagtttgttgtcatctgatgcaatactctg

SEQ ID NO: 97466 - DNA, 79 bp, Homo sapiens
agctgggacaggaggaaaagcattaggcaaatacagtcagtttgttgtcatctgatgcaatactctggacacaaataaa

SEQ ID NO: 97467 - DNA, 81 bp, Homo sapiens
ggaaaagcattaggcaaatacagtcagtttgttgtcatctgatgcaatactctggacacaaataaatgactctgcccatta

SEQ ID NO: 97468 - DNA, 80 bp, Homo sapiens
attaggcaaatacagtcagtttgttgtcatctgatgcaatactctggacacaaataaatgactctgcccattattcctct

SEQ ID NO: 97469 - DNA, 81 bp, Homo sapiens
aaatacagtcagtttgttgtcatctgatgcaatactctggacacaaataaatgactctgcccattattcctcttgcttcat

SEQ ID NO: 97470 - DNA, 83 bp, Homo sapiens
ttgttgtcatctgatgcaatactctggacacaaataaatgactctgcccattattcctcttgcttcatttgccctgagacaaa

SEQ ID NO: 97471 - DNA, 79 bp, Homo sapiens
atctgatgcaatactctggacacaaataaatgactctgcccattattcctcttgcttcatttgccctgagacaaaaagg

SEQ ID NO: 97472 - DNA, 75 bp, Homo sapiens
aataaatgactctgcccattattcctcttgcttcatttgccctgagacaaaaaggtgaatccactggaaaatgaa

SEQ ID NO: 97473 - DNA, 75 bp, Homo sapiens
atgactctgcccattattcctcttgcttcatttgccctgagacaaaaaggtgaatccactggaaaatgaacgaaa

SEQ ID NO: 97474 - DNA, 72 bp, Homo sapiens
tttgccctgagacaaaaaggtgaatccactggaaaatgaacgaaaggtcaccctgttttacagcaatgtctg

SEQ ID NO: 97475 - DNA, 75 bp, Homo sapiens
aaaaggtgaatccactggaaaatgaacgaaaggtcaccctgttttacagcaatgtctggacatgctctgccagta

SEQ ID NO: 97476 - DNA, 75 bp, Homo sapiens
aatccactggaaaatgaacgaaaggtcaccctgttttacagcaatgtctggacatgctctgccagtaggttccaa

SEQ ID NO: 97477 - DNA, 75 bp, Homo sapiens
aaaatgaacgaaaggtcaccctgttttacagcaatgtctggacatgctctgccagtaggttccaactactacatg

SEQ ID NO: 97478 - DNA, 79 bp, Homo sapiens
tgttttacagcaatgtctggacatgctctgccagtaggttccaactactacatggtaatgtggtgatggtaccaagtta

SEQ ID NO: 97479 - DNA, 78 bp, Homo sapiens
aatgtctggacatgctctgccagtaggttccaactactacatggtaatgtggtgatggtaccaagttactggaatcca

SEQ ID NO: 97480 - DNA, 73 bp, Homo sapiens
agtaggttccaactactacatggtaatgtggtgatggtaccaagttactggaatccagagtgagtccgtgatt

SEQ ID NO: 97481 - DNA, 77 bp, Homo sapiens
aactactacatggtaatgtggtgatggtaccaagttactggaatccagagtgagtccgtgatttgtcatggacataa

SEQ ID NO: 97482 - DNA, 77 bp, Homo sapiens
atggtaatgtggtgatggtaccaagttactggaatccagagtgagtccgtgatttgtcatggacataagtactggaa

SEQ ID NO: 97483 - DNA, 79 bp, Homo sapiens
atgtggtgatggtaccaagttactggaatccagagtgagtccgtgatttgtcatggacataagtactggaatgatgtta

SEQ ID NO: 97484 - DNA, 79 bp, Homo sapiens
gaatccagagtgagtccgtgatttgtcatggacataagtactggaatgatgttatggtctcagctgttgggggaaaata

SEQ ID NO: 97485 - DNA, 76 bp, Homo sapiens
agtgagtccgtgatttgtcatggacataagtactggaatgatgttatggtctcagctgttgggggaaaatagttct

SEQ ID NO: 97486 - DNA, 76 bp, Homo sapiens
atttgtcatggacataagtactggaatgatgttatggtctcagctgttgggggaaaatagttctttcacttgtgag

SEQ ID NO: 97487 - DNA, 76 bp, Homo sapiens
atggacataagtactggaatgatgttatggtctcagctgttgggggaaaatagttctttcacttgtgaggagaaca

SEQ ID NO: 97488 - DNA, 75 bp, Homo sapiens
atgttatggtctcagctgttgggggaaaatagttctttcacttgtgaggagaacatccaaaagaaagagctgcaa

SEQ ID NO: 97489 - DNA, 80 bp, Homo sapiens
tctcagctgttgggggaaaatagttctttcacttgtgaggagaacatccaaaagaaagagctgcaatgctgcctgtgatc

SEQ ID NO: 97490 - DNA, 78 bp, Homo sapiens
gggaaaatagttctttcacttgtgaggagaacatccaaaagaaagagctgcaatgctgcctgtgatccttcttctatg

SEQ ID NO: 97491 - DNA, 82 bp, Homo sapiens
aatagttctttcacttgtgaggagaacatccaaaagaaagagctgcaatgctgcctgtgatccttcttctatgtacacatga

SEQ ID NO: 97492 - DNA, 85 bp, Homo sapiens
tgtgaggagaacatccaaaagaaagagctgcaatgctgcctgtgatccttcttctatgtacacatgagcaacgtcatactacaaa

SEQ ID NO: 97493 - DNA, 82 bp, Homo sapiens
aacatccaaaagaaagagctgcaatgctgcctgtgatccttcttctatgtacacatgagcaacgtcatactacaaaagacca

SEQ ID NO: 97494 - DNA, 81 bp, Homo sapiens
aaaagaaagagctgcaatgctgcctgtgatccttcttctatgtacacatgagcaacgtcatactacaaaagaccatccatt

SEQ ID NO: 97495 - DNA, 76 bp, Homo sapiens
ttcttctatgtacacatgagcaacgtcatactacaaaagaccatccatttggtcaaactatcttttttacacacat

SEQ ID NO: 97496 - DNA, 76 bp, Homo sapiens
atgtacacatgagcaacgtcatactacaaaagaccatccatttggtcaaactatcttttttacacacattttgata

SEQ ID NO: 97497 - DNA, 74 bp, Homo sapiens
gagcaacgtcatactacaaaagaccatccatttggtcaaactatcttttttacacacattttgataatacaata

SEQ ID NO: 97498 - DNA, 71 bp, Homo sapiens
ctacaaaagaccatccatttggtcaaactatcttttttacacacattttgataatacaatatcttaggcct

SEQ ID NO: 97499 - DNA, 78 bp, Homo sapiens
ttggtcaaactatcttttttacacacattttgataatacaatatcttaggccttctagatatgctcagattcaaatgc

SEQ ID NO: 97500 - DNA, 78 bp, Homo sapiens
cttttttacacacattttgataatacaatatcttaggccttctagatatgctcagattcaaatgctatattcaaatgt

SEQ ID NO: 97501 - DNA, 81 bp, Homo sapiens
cacacattttgataatacaatatcttaggccttctagatatgctcagattcaaatgctatattcaaatgttggttttcatc

SEQ ID NO: 97502 - DNA, 81 bp, Homo sapiens
ttgataatacaatatcttaggccttctagatatgctcagattcaaatgctatattcaaatgttggttttcatctttgtgtc

SEQ ID NO: 97503 - DNA, 81 bp, Homo sapiens
aatatcttaggccttctagatatgctcagattcaaatgctatattcaaatgttggttttcatctttgtgtcttgtctcaga

SEQ ID NO: 97504 - DNA, 81 bp, Homo sapiens
tctagatatgctcagattcaaatgctatattcaaatgttggttttcatctttgtgtcttgtctcagatcccttattcaaac

SEQ ID NO: 97505 - DNA, 81 bp, Homo sapiens
tatgctcagattcaaatgctatattcaaatgttggttttcatctttgtgtcttgtctcagatcccttattcaaacccatca

SEQ ID NO: 97506 - DNA, 80 bp, Homo sapiens
ttcaaatgctatattcaaatgttggttttcatctttgtgtcttgtctcagatcccttattcaaacccatcagtctgcgca

SEQ ID NO: 97507 - DNA, 77 bp, Homo sapiens
atattcaaatgttggttttcatctttgtgtcttgtctcagatcccttattcaaacccatcagtctgcgcagttcacc

SEQ ID NO: 97508 - DNA, 81 bp, Homo sapiens
ttttcatctttgtgtcttgtctcagatcccttattcaaacccatcagtctgcgcagttcacccatccagctgtagctcttc

SEQ ID NO: 97509 - DNA, 80 bp, Homo sapiens
tttgtgtcttgtctcagatcccttattcaaacccatcagtctgcgcagttcacccatccagctgtagctcttctgtcctt

SEQ ID NO: 97510 - DNA, 80 bp, Homo sapiens
cttgtctcagatcccttattcaaacccatcagtctgcgcagttcacccatccagctgtagctcttctgtccttttggctg

SEQ ID NO: 97511 - DNA, 78 bp, Homo sapiens
atcccttattcaaacccatcagtctgcgcagttcacccatccagctgtagctcttctgtccttttggctggcctggtg

SEQ ID NO: 97512 - DNA, 79 bp, Homo sapiens
aaacccatcagtctgcgcagttcacccatccagctgtagctcttctgtccttttggctggcctggtgtcccctgattca

SEQ ID NO: 97513 - DNA, 81 bp, Homo sapiens
agtctgcgcagttcacccatccagctgtagctcttctgtccttttggctggcctggtgtcccctgattcagcagaagtgtg

SEQ ID NO: 97514 - DNA, 75 bp, Homo sapiens
acccatccagctgtagctcttctgtccttttggctggcctggtgtcccctgattcagcagaagtgtggggggagt

SEQ ID NO: 97515 - DNA, 75 bp, Homo sapiens
ttctgtccttttggctggcctggtgtcccctgattcagcagaagtgtggggggagttgggatcccctgatattca

SEQ ID NO: 97516 - DNA, 72 bp, Homo sapiens
attcagcagaagtgtggggggagttgggatcccctgatattcacagagagtttttaagagtaggaaatctgg

SEQ ID NO: 97517 - DNA, 69 bp, Homo sapiens
atcccctgatattcacagagagtttttaagagtaggaaatctggggcttaggaggtccaggtattttgg

SEQ ID NO: 97518 - DNA, 68 bp, Homo sapiens
atattcacagagagtttttaagagtaggaaatctggggcttaggaggtccaggtattttggttggaag

SEQ ID NO: 97519 - DNA, 65 bp, Homo sapiens
agagtttttaagagtaggaaatctggggcttaggaggtccaggtattttggttggaagtgttttc

SEQ ID NO: 97520 - DNA, 67 bp, Homo sapiens
aagagtaggaaatctggggcttaggaggtccaggtattttggttggaagtgttttcccattgatggg

SEQ ID NO: 97521 - DNA, 67 bp, Homo sapiens
aatctggggcttaggaggtccaggtattttggttggaagtgttttcccattgatggggctaaatatt

SEQ ID NO: 97522 - DNA, 73 bp, Homo sapiens
ttaggaggtccaggtattttggttggaagtgttttcccattgatggggctaaatatttgccatgacagctcaa

SEQ ID NO: 97523 - DNA, 74 bp, Homo sapiens
aggtattttggttggaagtgttttcccattgatggggctaaatatttgccatgacagctcaagtcttcgctctc

SEQ ID NO: 97524 - DNA, 80 bp, Homo sapiens
ggaagtgttttcccattgatggggctaaatatttgccatgacagctcaagtcttcgctctccagcttgacatggatgaaa

SEQ ID NO: 97525 - DNA, 84 bp, Homo sapiens
tttcccattgatggggctaaatatttgccatgacagctcaagtcttcgctctccagcttgacatggatgaaagcagcctcgcta

SEQ ID NO: 97526 - DNA, 82 bp, Homo sapiens
atggggctaaatatttgccatgacagctcaagtcttcgctctccagcttgacatggatgaaagcagcctcgctacagggccc

SEQ ID NO: 97527 - DNA, 81 bp, Homo sapiens
aaatatttgccatgacagctcaagtcttcgctctccagcttgacatggatgaaagcagcctcgctacagggcccctcctac

SEQ ID NO: 97528 - DNA, 81 bp, Homo sapiens
atgacagctcaagtcttcgctctccagcttgacatggatgaaagcagcctcgctacagggcccctcctactgcccccagag

SEQ ID NO: 97529 - DNA, 78 bp, Homo sapiens
tcttcgctctccagcttgacatggatgaaagcagcctcgctacagggcccctcctactgcccccagaggattaaacaa

SEQ ID NO: 97530 - DNA, 77 bp, Homo sapiens
ctctccagcttgacatggatgaaagcagcctcgctacagggcccctcctactgcccccagaggattaaacaacctga

SEQ ID NO: 97531 - DNA, 75 bp, Homo sapiens
acatggatgaaagcagcctcgctacagggcccctcctactgcccccagaggattaaacaacctgagcaggtaatg

SEQ ID NO: 97532 - DNA, 71 bp, Homo sapiens
tacagggcccctcctactgcccccagaggattaaacaacctgagcaggtaatggctgccttaaaaggagct

SEQ ID NO: 97533 - DNA, 76 bp, Homo sapiens
tcctactgcccccagaggattaaacaacctgagcaggtaatggctgccttaaaaggagcttttgcatgactcagat

SEQ ID NO: 97534 - DNA, 80 bp, Homo sapiens
cccagaggattaaacaacctgagcaggtaatggctgccttaaaaggagcttttgcatgactcagattaatgcatgctgtc

SEQ ID NO: 97535 - DNA, 81 bp, Homo sapiens
attaaacaacctgagcaggtaatggctgccttaaaaggagcttttgcatgactcagattaatgcatgctgtctgtcgccca

SEQ ID NO: 97536 - DNA, 72 bp, Homo sapiens
aaaaaaaaagtaaacctctagatgacaactcttttcagacaaggtgtggagtctgtctgcaaaggatagaga

SEQ ID NO: 97537 - DNA, 73 bp, Homo sapiens
agagacagacagagtccaagtccccagcgcagaaggaagcccaggtggggctggggccgggaagaggggcaga

SEQ ID NO: 97538 - DNA, 72 bp, Homo sapiens
acagagtccaagtccccagcgcagaaggaagcccaggtggggctggggccgggaagaggggcagagcacaaa

SEQ ID NO: 97539 - DNA, 71 bp, Homo sapiens
aagtccccagcgcagaaggaagcccaggtggggctggggccgggaagaggggcagagcacaaagctgtcgg

SEQ ID NO: 97540 - DNA, 70 bp, Homo sapiens
agaaggaagcccaggtggggctggggccgggaagaggggcagagcacaaagctgtcgggctggattaaaa

SEQ ID NO: 97541 - DNA, 70 bp, Homo sapiens
aagcccaggtggggctggggccgggaagaggggcagagcacaaagctgtcgggctggattaaaaggcaaa

SEQ ID NO: 97542 - DNA, 77 bp, Homo sapiens
ctggggccgggaagaggggcagagcacaaagctgtcgggctggattaaaaggcaaagcagccacagagcagtgtcag

SEQ ID NO: 97543 - DNA, 80 bp, Homo sapiens
gaagaggggcagagcacaaagctgtcgggctggattaaaaggcaaagcagccacagagcagtgtcaggttctcaaagctg

SEQ ID NO: 97544 - DNA, 81 bp, Homo sapiens
agagcacaaagctgtcgggctggattaaaaggcaaagcagccacagagcagtgtcaggttctcaaagctgtcggccaggca

SEQ ID NO: 97545 - DNA, 80 bp, Homo sapiens
acaaagctgtcgggctggattaaaaggcaaagcagccacagagcagtgtcaggttctcaaagctgtcggccaggcagcca

SEQ ID NO: 97546 - DNA, 78 bp, Homo sapiens
tggattaaaaggcaaagcagccacagagcagtgtcaggttctcaaagctgtcggccaggcagccactttccttttatg

SEQ ID NO: 97547 - DNA, 78 bp, Homo sapiens
taaaaggcaaagcagccacagagcagtgtcaggttctcaaagctgtcggccaggcagccactttccttttatgtattc

SEQ ID NO: 97548 - DNA, 75 bp, Homo sapiens
agccacagagcagtgtcaggttctcaaagctgtcggccaggcagccactttccttttatgtattccacccccctc

SEQ ID NO: 97549 - DNA, 74 bp, Homo sapiens
agcagtgtcaggttctcaaagctgtcggccaggcagccactttccttttatgtattccacccccctcctgcctc

SEQ ID NO: 97550 - DNA, 73 bp, Homo sapiens
ttctcaaagctgtcggccaggcagccactttccttttatgtattccacccccctcctgcctccaggtttatga

SEQ ID NO: 97551 - DNA, 70 bp, Homo sapiens
tcggccaggcagccactttccttttatgtattccacccccctcctgcctccaggtttatgacaacacttt

SEQ ID NO: 97552 - DNA, 69 bp, Homo sapiens
agccactttccttttatgtattccacccccctcctgcctccaggtttatgacaacacttttcaggcctg

SEQ ID NO: 97553 - DNA, 71 bp, Homo sapiens
tttccttttatgtattccacccccctcctgcctccaggtttatgacaacacttttcaggcctgtgctccag

SEQ ID NO: 97554 - DNA, 75 bp, Homo sapiens
atgtattccacccccctcctgcctccaggtttatgacaacacttttcaggcctgtgctccaggcttgatttctca

SEQ ID NO: 97555 - DNA, 77 bp, Homo sapiens
ctcctgcctccaggtttatgacaacacttttcaggcctgtgctccaggcttgatttctcagagggagttctgccaaa

SEQ ID NO: 97556 - DNA, 82 bp, Homo sapiens
ctgtgctccaggcttgatttctcagagggagttctgccaaattgaagagcagtctcccatactgttctatgccactgtgaaa

SEQ ID NO: 97557 - DNA, 82 bp, Homo sapiens
ttgatttctcagagggagttctgccaaattgaagagcagtctcccatactgttctatgccactgtgaaagctcatctggaat

SEQ ID NO: 97558 - DNA, 81 bp, Homo sapiens
agagggagttctgccaaattgaagagcagtctcccatactgttctatgccactgtgaaagctcatctggaattctgtcctc

SEQ ID NO: 97559 - DNA, 80 bp, Homo sapiens
tgccaaattgaagagcagtctcccatactgttctatgccactgtgaaagctcatctggaattctgtcctccctccaaaaa

SEQ ID NO: 97560 - DNA, 78 bp, Homo sapiens
aattgaagagcagtctcccatactgttctatgccactgtgaaagctcatctggaattctgtcctccctccaaaaagaa

SEQ ID NO: 97561 - DNA, 77 bp, Homo sapiens
tcccatactgttctatgccactgtgaaagctcatctggaattctgtcctccctccaaaaagaaaagaatcattcttg

SEQ ID NO: 97562 - DNA, 76 bp, Homo sapiens
ttctatgccactgtgaaagctcatctggaattctgtcctccctccaaaaagaaaagaatcattcttgggttctgaa

SEQ ID NO: 97563 - DNA, 75 bp, Homo sapiens
actgtgaaagctcatctggaattctgtcctccctccaaaaagaaaagaatcattcttgggttctgaaatgaggca

SEQ ID NO: 97564 - DNA, 73 bp, Homo sapiens
tcatctggaattctgtcctccctccaaaaagaaaagaatcattcttgggttctgaaatgaggcatggttttta

SEQ ID NO: 97565 - DNA, 72 bp, Homo sapiens
tccctccaaaaagaaaagaatcattcttgggttctgaaatgaggcatggtttttatctacttcacactccca

SEQ ID NO: 97566 - DNA, 76 bp, Homo sapiens
aatcattcttgggttctgaaatgaggcatggtttttatctacttcacactcccatgccataaaatgttctctctta

SEQ ID NO: 97567 - DNA, 76 bp, Homo sapiens
ttctgaaatgaggcatggtttttatctacttcacactcccatgccataaaatgttctctcttactccttgggtgat

SEQ ID NO: 97568 - DNA, 75 bp, Homo sapiens
aatgaggcatggtttttatctacttcacactcccatgccataaaatgttctctcttactccttgggtgattgaag

SEQ ID NO: 97569 - DNA, 77 bp, Homo sapiens
tgccataaaatgttctctcttactccttgggtgattgaagtccaggatattcacaaatgtaactgtgatatgggact

SEQ ID NO: 97570 - DNA, 74 bp, Homo sapiens
aaaatgttctctcttactccttgggtgattgaagtccaggatattcacaaatgtaactgtgatatgggactttg

SEQ ID NO: 97571 - DNA, 78 bp, Homo sapiens
gtgattgaagtccaggatattcacaaatgtaactgtgatatgggactttggagtgcacatgttactcattccttttat

SEQ ID NO: 97572 - DNA, 75 bp, Homo sapiens
aagtccaggatattcacaaatgtaactgtgatatgggactttggagtgcacatgttactcattccttttatttaa

SEQ ID NO: 97573 - DNA, 74 bp, Homo sapiens
tcacaaatgtaactgtgatatgggactttggagtgcacatgttactcattccttttatttaaaaagtcacccta

SEQ ID NO: 97574 - DNA, 72 bp, Homo sapiens
aatgtaactgtgatatgggactttggagtgcacatgttactcattccttttatttaaaaagtcaccctacca

SEQ ID NO: 97575 - DNA, 72 bp, Homo sapiens
atatgggactttggagtgcacatgttactcattccttttatttaaaaagtcaccctaccatctgaacaccag

SEQ ID NO: 97576 - DNA, 75 bp, Homo sapiens
tttggagtgcacatgttactcattccttttatttaaaaagtcaccctaccatctgaacaccagtcagctggagga

SEQ ID NO: 97577 - DNA, 72 bp, Homo sapiens
acatgttactcattccttttatttaaaaagtcaccctaccatctgaacaccagtcagctggaggagttggcc

SEQ ID NO: 97578 - DNA, 68 bp, Homo sapiens
ccttttatttaaaaagtcaccctaccatctgaacaccagtcagctggaggagttggcccctagggttc

SEQ ID NO: 97579 - DNA, 71 bp, Homo sapiens
ttaaaaagtcaccctaccatctgaacaccagtcagctggaggagttggcccctagggttcttggactataa

SEQ ID NO: 97580 - DNA, 74 bp, Homo sapiens
accctaccatctgaacaccagtcagctggaggagttggcccctagggttcttggactataaggtgctgatcttg

SEQ ID NO: 97581 - DNA, 75 bp, Homo sapiens
ataaggtgctgatcttgggtgatgaccaagtcaaaagacttatgtaataaattccaaaggatagacccatagcag

SEQ ID NO: 97582 - DNA, 72 bp, Homo sapiens
caaaagacttatgtaataaattccaaaggatagacccatagcaggaacatttgaaggagaacaggcattatt

SEQ ID NO: 97583 - DNA, 75 bp, Homo sapiens
tatgtaataaattccaaaggatagacccatagcaggaacatttgaaggagaacaggcattatttcaggtgaagac

SEQ ID NO: 97584 - DNA, 73 bp, Homo sapiens
attccaaaggatagacccatagcaggaacatttgaaggagaacaggcattatttcaggtgaagaccgtagccg

SEQ ID NO: 97585 - DNA, 75 bp, Homo sapiens
gaacatttgaaggagaacaggcattatttcaggtgaagaccgtagccggtgtgcagaggggtgccctgagaacaa

SEQ ID NO: 97586 - DNA, 74 bp, Homo sapiens
aaggagaacaggcattatttcaggtgaagaccgtagccggtgtgcagaggggtgccctgagaacaatcagtaaa

SEQ ID NO: 97587 - DNA, 75 bp, Homo sapiens
aggcattatttcaggtgaagaccgtagccggtgtgcagaggggtgccctgagaacaatcagtaaaagctgacaag

SEQ ID NO: 97588 - DNA, 74 bp, Homo sapiens
atttcaggtgaagaccgtagccggtgtgcagaggggtgccctgagaacaatcagtaaaagctgacaagtgcctt

SEQ ID NO: 97589 - DNA, 74 bp, Homo sapiens
aagaccgtagccggtgtgcagaggggtgccctgagaacaatcagtaaaagctgacaagtgcctttgttcttgag

SEQ ID NO: 97590 - DNA, 76 bp, Homo sapiens
gtgccctgagaacaatcagtaaaagctgacaagtgcctttgttcttgagggataagcttctagaaaccacaagcta

SEQ ID NO: 97591 - DNA, 73 bp, Homo sapiens
aacaatcagtaaaagctgacaagtgcctttgttcttgagggataagcttctagaaaccacaagctaaacaaga

SEQ ID NO: 97592 - DNA, 75 bp, Homo sapiens
gtaaaagctgacaagtgcctttgttcttgagggataagcttctagaaaccacaagctaaacaagatgccaagata

SEQ ID NO: 97593 - DNA, 77 bp, Homo sapiens
tttgttcttgagggataagcttctagaaaccacaagctaaacaagatgccaagatacctgtgctactctcaatgcct

SEQ ID NO: 97594 - DNA, 81 bp, Homo sapiens
gataagcttctagaaaccacaagctaaacaagatgccaagatacctgtgctactctcaatgccttggagcagaatgtacca

SEQ ID NO: 97595 - DNA, 80 bp, Homo sapiens
tagaaaccacaagctaaacaagatgccaagatacctgtgctactctcaatgccttggagcagaatgtaccatgaaaatat

SEQ ID NO: 97596 - DNA, 81 bp, Homo sapiens
acaagctaaacaagatgccaagatacctgtgctactctcaatgccttggagcagaatgtaccatgaaaatattggcattaa

SEQ ID NO: 97597 - DNA, 79 bp, Homo sapiens
atacctgtgctactctcaatgccttggagcagaatgtaccatgaaaatattggcattaatggccaaaagtaatgtgaaa

SEQ ID NO: 97598 - DNA, 75 bp, Homo sapiens
aatgccttggagcagaatgtaccatgaaaatattggcattaatggccaaaagtaatgtgaaaaccaagcacttaa

SEQ ID NO: 97599 - DNA, 72 bp, Homo sapiens
agcagaatgtaccatgaaaatattggcattaatggccaaaagtaatgtgaaaaccaagcacttaagttggtt

SEQ ID NO: 97600 - DNA, 69 bp, Homo sapiens
tggcattaatggccaaaagtaatgtgaaaaccaagcacttaagttggttttcctattttactgtaccac

SEQ ID NO: 97601 - DNA, 67 bp, Homo sapiens
tggccaaaagtaatgtgaaaaccaagcacttaagttggttttcctattttactgtaccacccaagaa

SEQ ID NO: 97602 - DNA, 67 bp, Homo sapiens
aagtaatgtgaaaaccaagcacttaagttggttttcctattttactgtaccacccaagaacactgga

SEQ ID NO: 97603 - DNA, 66 bp, Homo sapiens
aaaaccaagcacttaagttggttttcctattttactgtaccacccaagaacactggaaggcagtgg

SEQ ID NO: 97604 - DNA, 67 bp, Homo sapiens
acttaagttggttttcctattttactgtaccacccaagaacactggaaggcagtggttctcacctgg

SEQ ID NO: 97605 - DNA, 67 bp, Homo sapiens
ggttttcctattttactgtaccacccaagaacactggaaggcagtggttctcacctggggacagttt

SEQ ID NO: 97606 - DNA, 69 bp, Homo sapiens
ttttactgtaccacccaagaacactggaaggcagtggttctcacctggggacagttttgccccttggga

SEQ ID NO: 97607 - DNA, 70 bp, Homo sapiens
tggaaggcagtggttctcacctggggacagttttgccccttgggaaatttggcaatgtctggaaacattt

SEQ ID NO: 97608 - DNA, 67 bp, Homo sapiens
agtggttctcacctggggacagttttgccccttgggaaatttggcaatgtctggaaacattttttat

SEQ ID NO: 97609 - DNA, 74 bp, Homo sapiens
atttggcaatgtctggaaacattttttattgtcctaactggggtgagggggatgctattggcatctagaggcca

SEQ ID NO: 97610 - DNA, 74 bp, Homo sapiens
aatgtctggaaacattttttattgtcctaactggggtgagggggatgctattggcatctagaggccaaggatgc

SEQ ID NO: 97611 - DNA, 74 bp, Homo sapiens
aaacattttttattgtcctaactggggtgagggggatgctattggcatctagaggccaaggatgctgctaaata

SEQ ID NO: 97612 - DNA, 80 bp, Homo sapiens
ttattgtcctaactggggtgagggggatgctattggcatctagaggccaaggatgctgctaaatattctccgatgctcag

SEQ ID NO: 97613 - DNA, 79 bp, Homo sapiens
aactggggtgagggggatgctattggcatctagaggccaaggatgctgctaaatattctccgatgctcaggacagaccc

SEQ ID NO: 97614 - DNA, 79 bp, Homo sapiens
gatgctattggcatctagaggccaaggatgctgctaaatattctccgatgctcaggacagaccccccccaacaaagaat

SEQ ID NO: 97615 - DNA, 77 bp, Homo sapiens
tattggcatctagaggccaaggatgctgctaaatattctccgatgctcaggacagaccccccccaacaaagaattat

SEQ ID NO: 97616 - DNA, 74 bp, Homo sapiens
tagaggccaaggatgctgctaaatattctccgatgctcaggacagaccccccccaacaaagaattatttggccc

SEQ ID NO: 97617 - DNA, 74 bp, Homo sapiens
atgctgctaaatattctccgatgctcaggacagaccccccccaacaaagaattatttggccccaaatgtcaata

SEQ ID NO: 97618 - DNA, 71 bp, Homo sapiens
gacagaccccccccaacaaagaattatttggccccaaatgtcaatagtactgccgttgtgaagctcttaga

SEQ ID NO: 97619 - DNA, 69 bp, Homo sapiens
agaccccccccaacaaagaattatttggccccaaatgtcaatagtactgccgttgtgaagctcttagaa

SEQ ID NO: 97620 - DNA, 75 bp, Homo sapiens
aacaaagaattatttggccccaaatgtcaatagtactgccgttgtgaagctcttagaaggcattctgtgaagctc

SEQ ID NO: 97621 - DNA, 80 bp, Homo sapiens
ttatttggccccaaatgtcaatagtactgccgttgtgaagctcttagaaggcattctgtgaagctctgaacagcagctaa

SEQ ID NO: 97622 - DNA, 79 bp, Homo sapiens
atttggccccaaatgtcaatagtactgccgttgtgaagctcttagaaggcattctgtgaagctctgaacagcagctaag

SEQ ID NO: 97623 - DNA, 82 bp, Homo sapiens
aaatgtcaatagtactgccgttgtgaagctcttagaaggcattctgtgaagctctgaacagcagctaaggcatctggtgaaa

SEQ ID NO: 97624 - DNA, 81 bp, Homo sapiens
aatagtactgccgttgtgaagctcttagaaggcattctgtgaagctctgaacagcagctaaggcatctggtgaaacctgaa

SEQ ID NO: 97625 - DNA, 83 bp, Homo sapiens
tactgccgttgtgaagctcttagaaggcattctgtgaagctctgaacagcagctaaggcatctggtgaaacctgaagtaatca

SEQ ID NO: 97626 - DNA, 81 bp, Homo sapiens
ttagaaggcattctgtgaagctctgaacagcagctaaggcatctggtgaaacctgaagtaatcacaactgtctggaaaaca

SEQ ID NO: 97627 - DNA, 80 bp, Homo sapiens
attctgtgaagctctgaacagcagctaaggcatctggtgaaacctgaagtaatcacaactgtctggaaaacacaacatta

SEQ ID NO: 97628 - DNA, 78 bp, Homo sapiens
tgaacagcagctaaggcatctggtgaaacctgaagtaatcacaactgtctggaaaacacaacattacacaacatttaa

SEQ ID NO: 97629 - DNA, 74 bp, Homo sapiens
agctaaggcatctggtgaaacctgaagtaatcacaactgtctggaaaacacaacattacacaacatttaaaatg

SEQ ID NO: 97630 - DNA, 76 bp, Homo sapiens
atctggtgaaacctgaagtaatcacaactgtctggaaaacacaacattacacaacatttaaaatggcagacatgac

SEQ ID NO: 97631 - DNA, 78 bp, Homo sapiens
acaacattacacaacatttaaaatggcagacatgactccactgcccctgtgcctgccccctaatctgctataatttga

SEQ ID NO: 97632 - DNA, 79 bp, Homo sapiens
catttaaaatggcagacatgactccactgcccctgtgcctgccccctaatctgctataatttgatcccaagagctgaaa

SEQ ID NO: 97633 - DNA, 79 bp, Homo sapiens
aaaatggcagacatgactccactgcccctgtgcctgccccctaatctgctataatttgatcccaagagctgaaaagcaa

SEQ ID NO: 97634 - DNA, 77 bp, Homo sapiens
acatgactccactgcccctgtgcctgccccctaatctgctataatttgatcccaagagctgaaaagcaagacccgcc

SEQ ID NO: 97635 - DNA, 71 bp, Homo sapiens
ccctgtgcctgccccctaatctgctataatttgatcccaagagctgaaaagcaagacccgccccgttcccc

SEQ ID NO: 97636 - DNA, 71 bp, Homo sapiens
cctgccccctaatctgctataatttgatcccaagagctgaaaagcaagacccgccccgttcccccaacaca

SEQ ID NO: 97637 - DNA, 75 bp, Homo sapiens
taatctgctataatttgatcccaagagctgaaaagcaagacccgccccgttcccccaacacacatgcgagtgtgt

SEQ ID NO: 97638 - DNA, 75 bp, Homo sapiens
ataatttgatcccaagagctgaaaagcaagacccgccccgttcccccaacacacatgcgagtgtgtttgcaggca

SEQ ID NO: 97639 - DNA, 76 bp, Homo sapiens
agagctgaaaagcaagacccgccccgttcccccaacacacatgcgagtgtgtttgcaggcatcataacactgaagt

SEQ ID NO: 97640 - DNA, 76 bp, Homo sapiens
aaaagcaagacccgccccgttcccccaacacacatgcgagtgtgtttgcaggcatcataacactgaagttctctga

SEQ ID NO: 97641 - DNA, 76 bp, Homo sapiens
ccccgttcccccaacacacatgcgagtgtgtttgcaggcatcataacactgaagttctctgaagtattttcacagt

SEQ ID NO: 97642 - DNA, 82 bp, Homo sapiens
ccaacacacatgcgagtgtgtttgcaggcatcataacactgaagttctctgaagtattttcacagtttggtgcagctccaat

SEQ ID NO: 97643 - DNA, 81 bp, Homo sapiens
acatgcgagtgtgtttgcaggcatcataacactgaagttctctgaagtattttcacagtttggtgcagctccaatttcaaa

SEQ ID NO: 97644 - DNA, 72 bp, Homo sapiens
tgaagttctctgaagtattttcacagtttggtgcagctccaatttcaaagccccaaacactaagtttcttct

SEQ ID NO: 97645 - DNA, 71 bp, Homo sapiens
tctgaagtattttcacagtttggtgcagctccaatttcaaagccccaaacactaagtttcttcttttgcct

SEQ ID NO: 97646 - DNA, 70 bp, Homo sapiens
ttttcacagtttggtgcagctccaatttcaaagccccaaacactaagtttcttcttttgccttcaacaaa

SEQ ID NO: 97647 - DNA, 68 bp, Homo sapiens
tttggtgcagctccaatttcaaagccccaaacactaagtttcttcttttgccttcaacaaaggaattt

SEQ ID NO: 97648 - DNA, 68 bp, Homo sapiens
cccaaacactaagtttcttcttttgccttcaacaaaggaatttttctctgtaactctgatttccctgc

SEQ ID NO: 97649 - DNA, 69 bp, Homo sapiens
aagtttcttcttttgccttcaacaaaggaatttttctctgtaactctgatttccctgcccacgagcaaa

SEQ ID NO: 97650 - DNA, 70 bp, Homo sapiens
aacaaaggaatttttctctgtaactctgatttccctgcccacgagcaaaggtgagtgccaagcccaaagg

SEQ ID NO: 97651 - DNA, 73 bp, Homo sapiens
tttttctctgtaactctgatttccctgcccacgagcaaaggtgagtgccaagcccaaagggctcataggttaa

SEQ ID NO: 97652 - DNA, 75 bp, Homo sapiens
tgtaactctgatttccctgcccacgagcaaaggtgagtgccaagcccaaagggctcataggttaaatgactaata

SEQ ID NO: 97653 - DNA, 73 bp, Homo sapiens
atttccctgcccacgagcaaaggtgagtgccaagcccaaagggctcataggttaaatgactaatacttaatga

SEQ ID NO: 97654 - DNA, 75 bp, Homo sapiens
acgagcaaaggtgagtgccaagcccaaagggctcataggttaaatgactaatacttaatgagctcatattaacaa

SEQ ID NO: 97655 - DNA, 73 bp, Homo sapiens
aaaggtgagtgccaagcccaaagggctcataggttaaatgactaatacttaatgagctcatattaacaacaat

SEQ ID NO: 97656 - DNA, 76 bp, Homo sapiens
aagcccaaagggctcataggttaaatgactaatacttaatgagctcatattaacaacaattatgctaaccatgaca

SEQ ID NO: 97657 - DNA, 77 bp, Homo sapiens
taaatgactaatacttaatgagctcatattaacaacaattatgctaaccatgacacctgagtttttcacgctgttcc

SEQ ID NO: 97658 - DNA, 77 bp, Homo sapiens
actaatacttaatgagctcatattaacaacaattatgctaaccatgacacctgagtttttcacgctgttcctctggc

SEQ ID NO: 97659 - DNA, 81 bp, Homo sapiens
taatgagctcatattaacaacaattatgctaaccatgacacctgagtttttcacgctgttcctctggcctctgtatgaaca

SEQ ID NO: 97660 - DNA, 78 bp, Homo sapiens
atattaacaacaattatgctaaccatgacacctgagtttttcacgctgttcctctggcctctgtatgaacagcgctta

SEQ ID NO: 97661 - DNA, 79 bp, Homo sapiens
attatgctaaccatgacacctgagtttttcacgctgttcctctggcctctgtatgaacagcgcttagttggaatgtcta

SEQ ID NO: 97662 - DNA, 74 bp, Homo sapiens
agtttttcacgctgttcctctggcctctgtatgaacagcgcttagttggaatgtctaatttggggtatacagtc

SEQ ID NO: 97663 - DNA, 76 bp, Homo sapiens
ctgttcctctggcctctgtatgaacagcgcttagttggaatgtctaatttggggtatacagtcggttctctatatc

SEQ ID NO: 97664 - DNA, 74 bp, Homo sapiens
tggcctctgtatgaacagcgcttagttggaatgtctaatttggggtatacagtcggttctctatatccgtgggt

SEQ ID NO: 97665 - DNA, 75 bp, Homo sapiens
ctgtatgaacagcgcttagttggaatgtctaatttggggtatacagtcggttctctatatccgtgggttctgcac

SEQ ID NO: 97666 - DNA, 71 bp, Homo sapiens
ttagttggaatgtctaatttggggtatacagtcggttctctatatccgtgggttctgcacctgtttaacca

SEQ ID NO: 97667 - DNA, 71 bp, Homo sapiens
aatgtctaatttggggtatacagtcggttctctatatccgtgggttctgcacctgtttaaccaactgtaga

SEQ ID NO: 97668 - DNA, 70 bp, Homo sapiens
aatttggggtatacagtcggttctctatatccgtgggttctgcacctgtttaaccaactgtagatcaaaa

SEQ ID NO: 97669 - DNA, 71 bp, Homo sapiens
atacagtcggttctctatatccgtgggttctgcacctgtttaaccaactgtagatcaaaaatattattaaa

SEQ ID NO: 97670 - DNA, 69 bp, Homo sapiens
ttctctatatccgtgggttctgcacctgtttaaccaactgtagatcaaaaatattattaaaaaaaagga

SEQ ID NO: 97671 - DNA, 67 bp, Homo sapiens
ccgtgggttctgcacctgtttaaccaactgtagatcaaaaatattattaaaaaaaaggatggttgtg

SEQ ID NO: 97672 - DNA, 71 bp, Homo sapiens
gcacctgtttaaccaactgtagatcaaaaatattattaaaaaaaaggatggttgtgtctgtattagacata

SEQ ID NO: 97673 - DNA, 71 bp, Homo sapiens
ccaactgtagatcaaaaatattattaaaaaaaaggatggttgtgtctgtattagacatatacagacttttc

SEQ ID NO: 97674 - DNA, 71 bp, Homo sapiens
caaaaatattattaaaaaaaaggatggttgtgtctgtattagacatatacagacttttcttcttgtcattc

SEQ ID NO: 97675 - DNA, 76 bp, Homo sapiens
aggatggttgtgtctgtattagacatatacagacttttcttcttgtcattccctaaacaatgcagtataacaagta

SEQ ID NO: 97676 - DNA, 75 bp, Homo sapiens
ggttgtgtctgtattagacatatacagacttttcttcttgtcattccctaaacaatgcagtataacaagtattta

SEQ ID NO: 97677 - DNA, 75 bp, Homo sapiens
catagcatttacattttattaggtattacgagtaatctagggatgatttaaatacatgggaggatatatatgtta

SEQ ID NO: 97678 - DNA, 74 bp, Homo sapiens
catttacattttattaggtattacgagtaatctagggatgatttaaatacatgggaggatatatatgttatata

SEQ ID NO: 97679 - DNA, 71 bp, Homo sapiens
gtatccatggggggtcctggaaccagtcctccatggataccaaggggcggctgtatttatttcccattcca

SEQ ID NO: 97680 - DNA, 71 bp, Homo sapiens
ggggtcctggaaccagtcctccatggataccaaggggcggctgtatttatttcccattccacatgtactcc

SEQ ID NO: 97681 - DNA, 74 bp, Homo sapiens
aaccagtcctccatggataccaaggggcggctgtatttatttcccattccacatgtactcccgtgtgctgtcca

SEQ ID NO: 97682 - DNA, 79 bp, Homo sapiens
tccatggataccaaggggcggctgtatttatttcccattccacatgtactcccgtgtgctgtccatgtgatctgtgaaa

SEQ ID NO: 97683 - DNA, 76 bp, Homo sapiens
taccaaggggcggctgtatttatttcccattccacatgtactcccgtgtgctgtccatgtgatctgtgaaaattta

SEQ ID NO: 97684 - DNA, 78 bp, Homo sapiens
ctgtatttatttcccattccacatgtactcccgtgtgctgtccatgtgatctgtgaaaatttaccaccaccgcatgga

SEQ ID NO: 97685 - DNA, 77 bp, Homo sapiens
tttatttcccattccacatgtactcccgtgtgctgtccatgtgatctgtgaaaatttaccaccaccgcatggaccag

SEQ ID NO: 97686 - DNA, 78 bp, Homo sapiens
acatgtactcccgtgtgctgtccatgtgatctgtgaaaatttaccaccaccgcatggaccagtcccattagtccagaa

SEQ ID NO: 97687 - DNA, 78 bp, Homo sapiens
tactcccgtgtgctgtccatgtgatctgtgaaaatttaccaccaccgcatggaccagtcccattagtccagaattcat

SEQ ID NO: 97688 - DNA, 78 bp, Homo sapiens
tgtccatgtgatctgtgaaaatttaccaccaccgcatggaccagtcccattagtccagaattcatttggaataatgag

SEQ ID NO: 97689 - DNA, 70 bp, Homo sapiens
aaatttaccaccaccgcatggaccagtcccattagtccagaattcatttggaataatgagtcctaaaagt

SEQ ID NO: 97690 - DNA, 70 bp, Homo sapiens
accaccgcatggaccagtcccattagtccagaattcatttggaataatgagtcctaaaagttgaaaactt

SEQ ID NO: 97691 - DNA, 68 bp, Homo sapiens
ggaccagtcccattagtccagaattcatttggaataatgagtcctaaaagttgaaaactttggctttt

SEQ ID NO: 97692 - DNA, 69 bp, Homo sapiens
gtcccattagtccagaattcatttggaataatgagtcctaaaagttgaaaactttggctttttatattg

SEQ ID NO: 97693 - DNA, 69 bp, Homo sapiens
cattagtccagaattcatttggaataatgagtcctaaaagttgaaaactttggctttttatattgttct

SEQ ID NO: 97694 - DNA, 67 bp, Homo sapiens
cagaattcatttggaataatgagtcctaaaagttgaaaactttggctttttatattgttcttaaccc

SEQ ID NO: 97695 - DNA, 69 bp, Homo sapiens
tcatttggaataatgagtcctaaaagttgaaaactttggctttttatattgttcttaacccttcagtca

SEQ ID NO: 97696 - DNA, 69 bp, Homo sapiens
tggaataatgagtcctaaaagttgaaaactttggctttttatattgttcttaacccttcagtcaccatc

SEQ ID NO: 97697 - DNA, 68 bp, Homo sapiens
ggaataatgagtcctaaaagttgaaaactttggctttttatattgttcttaacccttcagtcaccatc

SEQ ID NO: 97698 - DNA, 67 bp, Homo sapiens
gtcctaaaagttgaaaactttggctttttatattgttcttaacccttcagtcaccatcctttcttgc

SEQ ID NO: 97699 - DNA, 72 bp, Homo sapiens
ttatattgttcttaacccttcagtcaccatcctttcttgccaaatgtgaacaactttagatgtctaaggaac

SEQ ID NO: 97700 - DNA, 71 bp, Homo sapiens
ttcttaacccttcagtcaccatcctttcttgccaaatgtgaacaactttagatgtctaaggaacctacttc

SEQ ID NO: 97701 - DNA, 74 bp, Homo sapiens
ttcagtcaccatcctttcttgccaaatgtgaacaactttagatgtctaaggaacctacttctccaagccacttc

SEQ ID NO: 97702 - DNA, 74 bp, Homo sapiens
atcctttcttgccaaatgtgaacaactttagatgtctaaggaacctacttctccaagccacttctgccttcaca

SEQ ID NO: 97703 - DNA, 76 bp, Homo sapiens
aaatgtgaacaactttagatgtctaaggaacctacttctccaagccacttctgccttcacatccacaatctctgcc

SEQ ID NO: 97704 - DNA, 77 bp, Homo sapiens
aactttagatgtctaaggaacctacttctccaagccacttctgccttcacatccacaatctctgcctcttatgtatc

SEQ ID NO: 97705 - DNA, 77 bp, Homo sapiens
atgtctaaggaacctacttctccaagccacttctgccttcacatccacaatctctgcctcttatgtatccaagaaaa

SEQ ID NO: 97706 - DNA, 81 bp, Homo sapiens
aacctacttctccaagccacttctgccttcacatccacaatctctgcctcttatgtatccaagaaaatcagtgcatgggca

SEQ ID NO: 97707 - DNA, 84 bp, Homo sapiens
aagccacttctgccttcacatccacaatctctgcctcttatgtatccaagaaaatcagtgcatgggcatgggactcagagtaga

SEQ ID NO: 97708 - DNA, 86 bp, Homo sapiens
ttctgccttcacatccacaatctctgcctcttatgtatccaagaaaatcagtgcatgggcatgggactcagagtagagataggtca

SEQ ID NO: 97709 - DNA, 78 bp, Homo sapiens
tgcctcttatgtatccaagaaaatcagtgcatgggcatgggactcagagtagagataggtcacctttaaaccatgttt

SEQ ID NO: 97710 - DNA, 78 bp, Homo sapiens
tgtatccaagaaaatcagtgcatgggcatgggactcagagtagagataggtcacctttaaaccatgttttactcaata

SEQ ID NO: 97711 - DNA, 74 bp, Homo sapiens
atgggcatgggactcagagtagagataggtcacctttaaaccatgttttactcaataatgttctgccaactcct

SEQ ID NO: 97712 - DNA, 77 bp, Homo sapiens
gactcagagtagagataggtcacctttaaaccatgttttactcaataatgttctgccaactccttcatgcacctcta

SEQ ID NO: 97713 - DNA, 75 bp, Homo sapiens
agagtagagataggtcacctttaaaccatgttttactcaataatgttctgccaactccttcatgcacctctagtc

SEQ ID NO: 97714 - DNA, 75 bp, Homo sapiens
tcacctttaaaccatgttttactcaataatgttctgccaactccttcatgcacctctagtctcctggaccttcca

SEQ ID NO: 97715 - DNA, 74 bp, Homo sapiens
ttaaaccatgttttactcaataatgttctgccaactccttcatgcacctctagtctcctggaccttccacccca

SEQ ID NO: 97716 - DNA, 77 bp, Homo sapiens
aactccttcatgcacctctagtctcctggaccttccaccccagctcagctgcaaagaatgtgttttcaagtggctta

SEQ ID NO: 97717 - DNA, 76 bp, Homo sapiens
acctctagtctcctggaccttccaccccagctcagctgcaaagaatgtgttttcaagtggcttacttgagagtcga

SEQ ID NO: 97718 - DNA, 75 bp, Homo sapiens
tcctggaccttccaccccagctcagctgcaaagaatgtgttttcaagtggcttacttgagagtcgactggaaagt

SEQ ID NO: 97719 - DNA, 77 bp, Homo sapiens
aaagaatgtgttttcaagtggcttacttgagagtcgactggaaagttctgcagagagggttgtcatgccgctggcac

SEQ ID NO: 97720 - DNA, 78 bp, Homo sapiens
tttcaagtggcttacttgagagtcgactggaaagttctgcagagagggttgtcatgccgctggcacgtccaggtgaaa

SEQ ID NO: 97721 - DNA, 78 bp, Homo sapiens
cttacttgagagtcgactggaaagttctgcagagagggttgtcatgccgctggcacgtccaggtgaaatgggcgttgc

SEQ ID NO: 97722 - DNA, 79 bp, Homo sapiens
actggaaagttctgcagagagggttgtcatgccgctggcacgtccaggtgaaatgggcgttgctgggtgcacagaagga

SEQ ID NO: 97723 - DNA, 81 bp, Homo sapiens
tgtcatgccgctggcacgtccaggtgaaatgggcgttgctgggtgcacagaaggagaggcaatggatcccaggtattggta

SEQ ID NO: 97724 - DNA, 79 bp, Homo sapiens
tggcacgtccaggtgaaatgggcgttgctgggtgcacagaaggagaggcaatggatcccaggtattggtaggactgatc

SEQ ID NO: 97725 - DNA, 76 bp, Homo sapiens
aggtgaaatgggcgttgctgggtgcacagaaggagaggcaatggatcccaggtattggtaggactgatcgtaggac

SEQ ID NO: 97726 - DNA, 75 bp, Homo sapiens
aaatgggcgttgctgggtgcacagaaggagaggcaatggatcccaggtattggtaggactgatcgtaggaccacg

SEQ ID NO: 97727 - DNA, 75 bp, Homo sapiens
ggtgcacagaaggagaggcaatggatcccaggtattggtaggactgatcgtaggaccacggtggggatggttgga

SEQ ID NO: 97728 - DNA, 73 bp, Homo sapiens
aaggagaggcaatggatcccaggtattggtaggactgatcgtaggaccacggtggggatggttggatctgcct

SEQ ID NO: 97729 - DNA, 75 bp, Homo sapiens
aatggatcccaggtattggtaggactgatcgtaggaccacggtggggatggttggatctgccttgtatctgaaga

SEQ ID NO: 97730 - DNA, 77 bp, Homo sapiens
taggactgatcgtaggaccacggtggggatggttggatctgccttgtatctgaagagaatcagaaaggtcaattata

SEQ ID NO: 97731 - DNA, 75 bp, Homo sapiens
atcgtaggaccacggtggggatggttggatctgccttgtatctgaagagaatcagaaaggtcaattatatgtaaa

SEQ ID NO: 97732 - DNA, 74 bp, Homo sapiens
gtggggatggttggatctgccttgtatctgaagagaatcagaaaggtcaattatatgtaaagtggggtgggatt

SEQ ID NO: 97733 - DNA, 71 bp, Homo sapiens
ctgccttgtatctgaagagaatcagaaaggtcaattatatgtaaagtggggtgggatttaaaaaatgtctt

SEQ ID NO: 97734 - DNA, 69 bp, Homo sapiens
ctgaagagaatcagaaaggtcaattatatgtaaagtggggtgggatttaaaaaatgtcttttaataaga

SEQ ID NO: 97735 - DNA, 69 bp, Homo sapiens
tcagaaaggtcaattatatgtaaagtggggtgggatttaaaaaatgtcttttaataagaaatgagtggc

SEQ ID NO: 97736 - DNA, 69 bp, Homo sapiens
tcaattatatgtaaagtggggtgggatttaaaaaatgtcttttaataagaaatgagtggcccttgttca

SEQ ID NO: 97737 - DNA, 70 bp, Homo sapiens
agtggggtgggatttaaaaaatgtcttttaataagaaatgagtggcccttgttcaaatatgtcacataca

SEQ ID NO: 97738 - DNA, 75 bp, Homo sapiens
aaaaatgtcttttaataagaaatgagtggcccttgttcaaatatgtcacatacatgtatgtggcctatgtaccag

SEQ ID NO: 97739 - DNA, 75 bp, Homo sapiens
tttaataagaaatgagtggcccttgttcaaatatgtcacatacatgtatgtggcctatgtaccagggtttaataa

SEQ ID NO: 97740 - DNA, 76 bp, Homo sapiens
aaatgagtggcccttgttcaaatatgtcacatacatgtatgtggcctatgtaccagggtttaataagcctactcaa

SEQ ID NO: 97741 - DNA, 76 bp, Homo sapiens
ccttgttcaaatatgtcacatacatgtatgtggcctatgtaccagggtttaataagcctactcaagtccaagtatc

SEQ ID NO: 97742 - DNA, 78 bp, Homo sapiens
aatatgtcacatacatgtatgtggcctatgtaccagggtttaataagcctactcaagtccaagtatctgcctctgttg

SEQ ID NO: 97743 - DNA, 75 bp, Homo sapiens
atacatgtatgtggcctatgtaccagggtttaataagcctactcaagtccaagtatctgcctctgttggattatt

SEQ ID NO: 97744 - DNA, 71 bp, Homo sapiens
gtggcctatgtaccagggtttaataagcctactcaagtccaagtatctgcctctgttggattattttcccc

SEQ ID NO: 97745 - DNA, 70 bp, Homo sapiens
taccagggtttaataagcctactcaagtccaagtatctgcctctgttggattattttcccccaaaagaga

SEQ ID NO: 97746 - DNA, 74 bp, Homo sapiens
taataagcctactcaagtccaagtatctgcctctgttggattattttcccccaaaagagactgattcttggaga

SEQ ID NO: 97747 - DNA, 73 bp, Homo sapiens
aagtccaagtatctgcctctgttggattattttcccccaaaagagactgattcttggagattttcacctgata

SEQ ID NO: 97748 - DNA, 72 bp, Homo sapiens
aagtatctgcctctgttggattattttcccccaaaagagactgattcttggagattttcacctgataactat

SEQ ID NO: 97749 - DNA, 74 bp, Homo sapiens
agagactgattcttggagattttcacctgataactattccttccaaaggttttatttaatcatgctaacaatga

SEQ ID NO: 97750 - DNA, 74 bp, Homo sapiens
tttcacctgataactattccttccaaaggttttatttaatcatgctaacaatgatgagaggaatggattacact

SEQ ID NO: 97751 - DNA, 73 bp, Homo sapiens
gataactattccttccaaaggttttatttaatcatgctaacaatgatgagaggaatggattacactttcaagg

SEQ ID NO: 97752 - DNA, 82 bp, Homo sapiens
ttaatcatgctaacaatgatgagaggaatggattacactttcaaggtagaagtattaatgtccagactgttgaactgcagca

SEQ ID NO: 97753 - DNA, 79 bp, Homo sapiens
gaatggattacactttcaaggtagaagtattaatgtccagactgttgaactgcagcacttgagaacttcaagtatcata

SEQ ID NO: 97754 - DNA, 80 bp, Homo sapiens
attacactttcaaggtagaagtattaatgtccagactgttgaactgcagcacttgagaacttcaagtatcatatgactgc

SEQ ID NO: 97755 - DNA, 84 bp, Homo sapiens
aaggtagaagtattaatgtccagactgttgaactgcagcacttgagaacttcaagtatcatatgactgctgacatgatttcagc

SEQ ID NO: 97756 - DNA, 86 bp, Homo sapiens
tattaatgtccagactgttgaactgcagcacttgagaacttcaagtatcatatgactgctgacatgatttcagctttgccaataat

SEQ ID NO: 97757 - DNA, 86 bp, Homo sapiens
agactgttgaactgcagcacttgagaacttcaagtatcatatgactgctgacatgatttcagctttgccaataattacaattatca

SEQ ID NO: 97758 - DNA, 87 bp, Homo sapiens
aactgcagcacttgagaacttcaagtatcatatgactgctgacatgatttcagctttgccaataattacaattatcatcatcagaaa

SEQ ID NO: 97759 - DNA, 84 bp, Homo sapiens
cacttgagaacttcaagtatcatatgactgctgacatgatttcagctttgccaataattacaattatcatcatcagaaacattt

SEQ ID NO: 97760 - DNA, 82 bp, Homo sapiens
agtatcatatgactgctgacatgatttcagctttgccaataattacaattatcatcatcagaaacattttataaactcaggg

SEQ ID NO: 97761 - DNA, 82 bp, Homo sapiens
atatgactgctgacatgatttcagctttgccaataattacaattatcatcatcagaaacattttataaactcaggggatcac

SEQ ID NO: 97762 - DNA, 78 bp, Homo sapiens
atgatttcagctttgccaataattacaattatcatcatcagaaacattttataaactcaggggatcacctgtctgtgt

SEQ ID NO: 97763 - DNA, 75 bp, Homo sapiens
taattacaattatcatcatcagaaacattttataaactcaggggatcacctgtctgtgttcggtaagaacgtaga

SEQ ID NO: 97764 - DNA, 72 bp, Homo sapiens
aattatcatcatcagaaacattttataaactcaggggatcacctgtctgtgttcggtaagaacgtagagttt

SEQ ID NO: 97765 - DNA, 65 bp, Homo sapiens
attttataaactcaggggatcacctgtctgtgttcggtaagaacgtagagttttgggcttttttt

SEQ ID NO: 97766 - DNA, 64 bp, Homo sapiens
gggatcacctgtctgtgttcggtaagaacgtagagttttgggctttttttttatacctttacct

SEQ ID NO: 97767 - DNA, 64 bp, Homo sapiens
ctgtctgtgttcggtaagaacgtagagttttgggctttttttttatacctttacctttggcaaa

SEQ ID NO: 97768 - DNA, 61 bp, Homo sapiens
gttcggtaagaacgtagagttttgggctttttttttatacctttacctttggcaaaaagta

SEQ ID NO: 97769 - DNA, 63 bp, Homo sapiens
acgtagagttttgggctttttttttatacctttacctttggcaaaaagtattccatgggctgg

SEQ ID NO: 97770 - DNA, 64 bp, Homo sapiens
ggctttttttttatacctttacctttggcaaaaagtattccatgggctggtaaatgttttatag

SEQ ID NO: 97771 - DNA, 68 bp, Homo sapiens
ttatacctttacctttggcaaaaagtattccatgggctggtaaatgttttatagtaaggcgaattctc

SEQ ID NO: 97772 - DNA, 70 bp, Homo sapiens
aaaagtattccatgggctggtaaatgttttatagtaaggcgaattctctcccaaggatgacaggaaagaa

SEQ ID NO: 97773 - DNA, 73 bp, Homo sapiens
tattccatgggctggtaaatgttttatagtaaggcgaattctctcccaaggatgacaggaaagaaggtctggc

SEQ ID NO: 97774 - DNA, 69 bp, Homo sapiens
gtaaatgttttatagtaaggcgaattctctcccaaggatgacaggaaagaaggtctggctgggaaaccg

SEQ ID NO: 97775 - DNA, 71 bp, Homo sapiens
ttttatagtaaggcgaattctctcccaaggatgacaggaaagaaggtctggctgggaaaccggcaatgagg

SEQ ID NO: 97776 - DNA, 73 bp, Homo sapiens
tcccaaggatgacaggaaagaaggtctggctgggaaaccggcaatgaggtctaatgactagttcacaaaccca

SEQ ID NO: 97777 - DNA, 72 bp, Homo sapiens
acaggaaagaaggtctggctgggaaaccggcaatgaggtctaatgactagttcacaaacccagcagtagaac

SEQ ID NO: 97778 - DNA, 74 bp, Homo sapiens
aggtctggctgggaaaccggcaatgaggtctaatgactagttcacaaacccagcagtagaactggccctatcaa

SEQ ID NO: 97779 - DNA, 72 bp, Homo sapiens
ggaaaccggcaatgaggtctaatgactagttcacaaacccagcagtagaactggccctatcaacccaagcct

SEQ ID NO: 97780 - DNA, 72 bp, Homo sapiens
aatgaggtctaatgactagttcacaaacccagcagtagaactggccctatcaacccaagccttctgttcctt

SEQ ID NO: 97781 - DNA, 72 bp, Homo sapiens
taatgactagttcacaaacccagcagtagaactggccctatcaacccaagccttctgttccttttcaggact

SEQ ID NO: 97782 - DNA, 73 bp, Homo sapiens
tcacaaacccagcagtagaactggccctatcaacccaagccttctgttccttttcaggacttcgagtttgcaa

SEQ ID NO: 97783 - DNA, 70 bp, Homo sapiens
agcagtagaactggccctatcaacccaagccttctgttccttttcaggacttcgagtttgcaacttttaa

SEQ ID NO: 97784 - DNA, 67 bp, Homo sapiens
gccttctgttccttttcaggacttcgagtttgcaacttttaaaagtcagagtttttagcaggtattt

SEQ ID NO: 97785 - DNA, 69 bp, Homo sapiens
ccttttcaggacttcgagtttgcaacttttaaaagtcagagtttttagcaggtattttatagattgcca

SEQ ID NO: 97786 - DNA, 70 bp, Homo sapiens
cttcgagtttgcaacttttaaaagtcagagtttttagcaggtattttatagattgccattataagaggcc

SEQ ID NO: 97787 - DNA, 72 bp, Homo sapiens
gcaacttttaaaagtcagagtttttagcaggtattttatagattgccattataagaggcctgggatagagaa

SEQ ID NO: 97788 - DNA, 73 bp, Homo sapiens
tttaaaagtcagagtttttagcaggtattttatagattgccattataagaggcctgggatagagaagagacaa

SEQ ID NO: 97789 - DNA, 75 bp, Homo sapiens
gtattttatagattgccattataagaggcctgggatagagaagagacaaaagtctgacttcaaaagatttagaca

SEQ ID NO: 97790 - DNA, 73 bp, Homo sapiens
attgccattataagaggcctgggatagagaagagacaaaagtctgacttcaaaagatttagacaaagtggatt

SEQ ID NO: 97791 - DNA, 73 bp, Homo sapiens
attataagaggcctgggatagagaagagacaaaagtctgacttcaaaagatttagacaaagtggattttgtca

SEQ ID NO: 97792 - DNA, 73 bp, Homo sapiens
cctgggatagagaagagacaaaagtctgacttcaaaagatttagacaaagtggattttgtcaatttgactcca

SEQ ID NO: 97793 - DNA, 71 bp, Homo sapiens
aagagacaaaagtctgacttcaaaagatttagacaaagtggattttgtcaatttgactccagcgttcaaag

SEQ ID NO: 97794 - DNA, 72 bp, Homo sapiens
agacaaagtggattttgtcaatttgactccagcgttcaaaggagtcttaattttcaaaagcatcatactgtt

SEQ ID NO: 97795 - DNA, 76 bp, Homo sapiens
tggattttgtcaatttgactccagcgttcaaaggagtcttaattttcaaaagcatcatactgtttgcagatgaaaa

SEQ ID NO: 97796 - DNA, 73 bp, Homo sapiens
aatttgactccagcgttcaaaggagtcttaattttcaaaagcatcatactgtttgcagatgaaaaggggagga

SEQ ID NO: 97797 - DNA, 70 bp, Homo sapiens
agcgttcaaaggagtcttaattttcaaaagcatcatactgtttgcagatgaaaaggggaggaaaaccaac

SEQ ID NO: 97798 - DNA, 73 bp, Homo sapiens
ttttcaaaagcatcatactgtttgcagatgaaaaggggaggaaaaccaacgctattcttaggcaaatgtgtaa

SEQ ID NO: 97799 - DNA, 71 bp, Homo sapiens
atcatactgtttgcagatgaaaaggggaggaaaaccaacgctattcttaggcaaatgtgtaaggaaactta

SEQ ID NO: 97800 - DNA, 69 bp, Homo sapiens
tttgcagatgaaaaggggaggaaaaccaacgctattcttaggcaaatgtgtaaggaaacttaaattgga

SEQ ID NO: 97801 - DNA, 66 bp, Homo sapiens
aaaaggggaggaaaaccaacgctattcttaggcaaatgtgtaaggaaacttaaattggacactgtc

SEQ ID NO: 97802 - DNA, 69 bp, Homo sapiens
aggaaaaccaacgctattcttaggcaaatgtgtaaggaaacttaaattggacactgtcccactagaaga

SEQ ID NO: 97803 - DNA, 70 bp, Homo sapiens
aacgctattcttaggcaaatgtgtaaggaaacttaaattggacactgtcccactagaagacagttttaca

SEQ ID NO: 97804 - DNA, 69 bp, Homo sapiens
tgtgtaaggaaacttaaattggacactgtcccactagaagacagttttacatttctttggagttaaaca

SEQ ID NO: 97805 - DNA, 68 bp, Homo sapiens
cttaaattggacactgtcccactagaagacagttttacatttctttggagttaaacattaattttctc

SEQ ID NO: 97806 - DNA, 69 bp, Homo sapiens
ggacactgtcccactagaagacagttttacatttctttggagttaaacattaattttctctttatgtcc

SEQ ID NO: 97807 - DNA, 69 bp, Homo sapiens
tagaagacagttttacatttctttggagttaaacattaattttctctttatgtcccaactttgtggaca

SEQ ID NO: 97808 - DNA, 68 bp, Homo sapiens
tttacatttctttggagttaaacattaattttctctttatgtcccaactttgtggacaaagataacag

SEQ ID NO: 97809 - DNA, 68 bp, Homo sapiens
tttggagttaaacattaattttctctttatgtcccaactttgtggacaaagataacagtgaactaccg

SEQ ID NO: 97810 - DNA, 68 bp, Homo sapiens
aacattaattttctctttatgtcccaactttgtggacaaagataacagtgaactaccgtaactcccaa

SEQ ID NO: 97811 - DNA, 70 bp, Homo sapiens
tttctctttatgtcccaactttgtggacaaagataacagtgaactaccgtaactcccaagggtcttcata

SEQ ID NO: 97812 - DNA, 72 bp, Homo sapiens
ttatgtcccaactttgtggacaaagataacagtgaactaccgtaactcccaagggtcttcatagccagagct

SEQ ID NO: 97813 - DNA, 76 bp, Homo sapiens
aactttgtggacaaagataacagtgaactaccgtaactcccaagggtcttcatagccagagcttcatgatcctgca

SEQ ID NO: 97814 - DNA, 78 bp, Homo sapiens
agataacagtgaactaccgtaactcccaagggtcttcatagccagagcttcatgatcctgcaggtagcagtgtaggaa

SEQ ID NO: 97815 - DNA, 78 bp, Homo sapiens
aactaccgtaactcccaagggtcttcatagccagagcttcatgatcctgcaggtagcagtgtaggaagagcagacttc

SEQ ID NO: 97816 - DNA, 79 bp, Homo sapiens
taactcccaagggtcttcatagccagagcttcatgatcctgcaggtagcagtgtaggaagagcagacttctttaggaaa

SEQ ID NO: 97817 - DNA, 80 bp, Homo sapiens
gtcttcatagccagagcttcatgatcctgcaggtagcagtgtaggaagagcagacttctttaggaaaatactgggtataa

SEQ ID NO: 97818 - DNA, 77 bp, Homo sapiens
tagccagagcttcatgatcctgcaggtagcagtgtaggaagagcagacttctttaggaaaatactgggtataagttt

SEQ ID NO: 97819 - DNA, 75 bp, Homo sapiens
atgatcctgcaggtagcagtgtaggaagagcagacttctttaggaaaatactgggtataagttttgtataggtca

SEQ ID NO: 97820 - DNA, 72 bp, Homo sapiens
aggtagcagtgtaggaagagcagacttctttaggaaaatactgggtataagttttgtataggtcaggacata

SEQ ID NO: 97821 - DNA, 70 bp, Homo sapiens
agtgtaggaagagcagacttctttaggaaaatactgggtataagttttgtataggtcaggacataaagaa

SEQ ID NO: 97822 - DNA, 73 bp, Homo sapiens
ctttaggaaaatactgggtataagttttgtataggtcaggacataaagaaatgagctatttctgctcattata

SEQ ID NO: 97823 - DNA, 77 bp, Homo sapiens
actgggtataagttttgtataggtcaggacataaagaaatgagctatttctgctcattataaaatattcagatctgc

SEQ ID NO: 97824 - DNA, 78 bp, Homo sapiens
taagttttgtataggtcaggacataaagaaatgagctatttctgctcattataaaatattcagatctgcttcctccag

SEQ ID NO: 97825 - DNA, 79 bp, Homo sapiens
tataggtcaggacataaagaaatgagctatttctgctcattataaaatattcagatctgcttcctccaggggcttttca

SEQ ID NO: 97826 - DNA, 77 bp, Homo sapiens
ataaagaaatgagctatttctgctcattataaaatattcagatctgcttcctccaggggcttttcatttccagcagt

SEQ ID NO: 97827 - DNA, 77 bp, Homo sapiens
aatgagctatttctgctcattataaaatattcagatctgcttcctccaggggcttttcatttccagcagttcaagtt

SEQ ID NO: 97828 - DNA, 76 bp, Homo sapiens
tgctcattataaaatattcagatctgcttcctccaggggcttttcatttccagcagttcaagtttgcctttctgtt

SEQ ID NO: 97829 - DNA, 74 bp, Homo sapiens
ttataaaatattcagatctgcttcctccaggggcttttcatttccagcagttcaagtttgcctttctgtttatc

SEQ ID NO: 97830 - DNA, 77 bp, Homo sapiens
ttcagatctgcttcctccaggggcttttcatttccagcagttcaagtttgcctttctgtttatctctttgaagctgc

SEQ ID NO: 97831 - DNA, 78 bp, Homo sapiens
tttcatttccagcagttcaagtttgcctttctgtttatctctttgaagctgccacagtggataacagaatcagacatt

SEQ ID NO: 97832 - DNA, 79 bp, Homo sapiens
tttccagcagttcaagtttgcctttctgtttatctctttgaagctgccacagtggataacagaatcagacatttggaga

SEQ ID NO: 97833 - DNA, 75 bp, Homo sapiens
aagtttgcctttctgtttatctctttgaagctgccacagtggataacagaatcagacatttggagacccaagtct

SEQ ID NO: 97834 - DNA, 75 bp, Homo sapiens
cctttctgtttatctctttgaagctgccacagtggataacagaatcagacatttggagacccaagtcttcctccc

SEQ ID NO: 97835 - DNA, 79 bp, Homo sapiens
tatctctttgaagctgccacagtggataacagaatcagacatttggagacccaagtcttcctccccagtattctcctga

SEQ ID NO: 97836 - DNA, 77 bp, Homo sapiens
aagctgccacagtggataacagaatcagacatttggagacccaagtcttcctccccagtattctcctgacagcctcc

SEQ ID NO: 97837 - DNA, 66 bp, Homo sapiens
tcttttttgtgtgtgagtgaaaataactgattttttaagtttaaaaaacctggtagttcccaggca

SEQ ID NO: 97838 - DNA, 66 bp, Homo sapiens
tgtgtgtgagtgaaaataactgattttttaagtttaaaaaacctggtagttcccaggcaaatagtt

SEQ ID NO: 97839 - DNA, 62 bp, Homo sapiens
aaataactgattttttaagtttaaaaaacctggtagttcccaggcaaatagtttaacttgga

SEQ ID NO: 97840 - DNA, 64 bp, Homo sapiens
ctgattttttaagtttaaaaaacctggtagttcccaggcaaatagtttaacttggaatctttga

SEQ ID NO: 97841 - DNA, 64 bp, Homo sapiens
aagtttaaaaaacctggtagttcccaggcaaatagtttaacttggaatctttgaaatctaatat

SEQ ID NO: 97842 - DNA, 68 bp, Homo sapiens
cctggtagttcccaggcaaatagtttaacttggaatctttgaaatctaatattaaagaaaggtcttca

SEQ ID NO: 97843 - DNA, 69 bp, Homo sapiens
tcccaggcaaatagtttaacttggaatctttgaaatctaatattaaagaaaggtcttcattttattcca

SEQ ID NO: 97844 - DNA, 66 bp, Homo sapiens
gtttaacttggaatctttgaaatctaatattaaagaaaggtcttcattttattccaaattttagag

SEQ ID NO: 97845 - DNA, 68 bp, Homo sapiens
gaatctttgaaatctaatattaaagaaaggtcttcattttattccaaattttagaggatttaaagagc

SEQ ID NO: 97846 - DNA, 69 bp, Homo sapiens
gaaatctaatattaaagaaaggtcttcattttattccaaattttagaggatttaaagagctggcaagga

SEQ ID NO: 97847 - DNA, 68 bp, Homo sapiens
taaagaaaggtcttcattttattccaaattttagaggatttaaagagctggcaaggaacaaaaggagc

SEQ ID NO: 97848 - DNA, 69 bp, Homo sapiens
gtcttcattttattccaaattttagaggatttaaagagctggcaaggaacaaaaggagctggtccattt

SEQ ID NO: 97849 - DNA, 71 bp, Homo sapiens
ttattccaaattttagaggatttaaagagctggcaaggaacaaaaggagctggtccattttaaactcagca

SEQ ID NO: 97850 - DNA, 70 bp, Homo sapiens
attttagaggatttaaagagctggcaaggaacaaaaggagctggtccattttaaactcagcagaaaataa

SEQ ID NO: 97851 - DNA, 70 bp, Homo sapiens
atttaaagagctggcaaggaacaaaaggagctggtccattttaaactcagcagaaaataaatgttcaacc

SEQ ID NO: 97852 - DNA, 73 bp, Homo sapiens
gcaaggaacaaaaggagctggtccattttaaactcagcagaaaataaatgttcaaccttggctgaagctcctg

SEQ ID NO: 97853 - DNA, 73 bp, Homo sapiens
aaaggagctggtccattttaaactcagcagaaaataaatgttcaaccttggctgaagctcctgtgtaatctta

SEQ ID NO: 97854 - DNA, 75 bp, Homo sapiens
agctggtccattttaaactcagcagaaaataaatgttcaaccttggctgaagctcctgtgtaatcttacagctaa

SEQ ID NO: 97855 - DNA, 74 bp, Homo sapiens
ttttaaactcagcagaaaataaatgttcaaccttggctgaagctcctgtgtaatcttacagctaacagtgtttc

SEQ ID NO: 97856 - DNA, 74 bp, Homo sapiens
aaaataaatgttcaaccttggctgaagctcctgtgtaatcttacagctaacagtgtttccaatgactaaaggca

SEQ ID NO: 97857 - DNA, 75 bp, Homo sapiens
aaatgttcaaccttggctgaagctcctgtgtaatcttacagctaacagtgtttccaatgactaaaggcaaacaga

SEQ ID NO: 97858 - DNA, 77 bp, Homo sapiens
gctgaagctcctgtgtaatcttacagctaacagtgtttccaatgactaaaggcaaacagaaatagcagacggttcaa

SEQ ID NO: 97859 - DNA, 76 bp, Homo sapiens
taatcttacagctaacagtgtttccaatgactaaaggcaaacagaaatagcagacggttcaatatccccatgctac

SEQ ID NO: 97860 - DNA, 74 bp, Homo sapiens
aacagtgtttccaatgactaaaggcaaacagaaatagcagacggttcaatatccccatgctactgcaagtattt

SEQ ID NO: 97861 - DNA, 76 bp, Homo sapiens
aatgactaaaggcaaacagaaatagcagacggttcaatatccccatgctactgcaagtattttgctccaagtgaaa

SEQ ID NO: 97862 - DNA, 74 bp, Homo sapiens
ctaaaggcaaacagaaatagcagacggttcaatatccccatgctactgcaagtattttgctccaagtgaaaaaa

SEQ ID NO: 97863 - DNA, 75 bp, Homo sapiens
gaaatagcagacggttcaatatccccatgctactgcaagtattttgctccaagtgaaaaaaaaatcatatactta

SEQ ID NO: 97864 - DNA, 74 bp, Homo sapiens
cagacggttcaatatccccatgctactgcaagtattttgctccaagtgaaaaaaaaatcatatacttagatatt

SEQ ID NO: 97865 - DNA, 75 bp, Homo sapiens
ccccatgctactgcaagtattttgctccaagtgaaaaaaaaatcatatacttagatattttgtataagacatgcg

SEQ ID NO: 97866 - DNA, 76 bp, Homo sapiens
gctactgcaagtattttgctccaagtgaaaaaaaaatcatatacttagatattttgtataagacatgcgtatatac

SEQ ID NO: 97867 - DNA, 79 bp, Homo sapiens
aatcatatacttagatattttgtataagacatgcgtatatactagatacacacatttactaagtgaatatatagtactc

SEQ ID NO: 97868 - DNA, 77 bp, Homo sapiens
tttgtataagacatgcgtatatactagatacacacatttactaagtgaatatatagtactccaatactttaatcatt

SEQ ID NO: 97869 - DNA, 77 bp, Homo sapiens
gacatgcgtatatactagatacacacatttactaagtgaatatatagtactccaatactttaatcattttaaaagca

SEQ ID NO: 97870 - DNA, 74 bp, Homo sapiens
tatatactagatacacacatttactaagtgaatatatagtactccaatactttaatcattttaaaagcaaacaa

SEQ ID NO: 97871 - DNA, 70 bp, Homo sapiens
tacacacatttactaagtgaatatatagtactccaatactttaatcattttaaaagcaaacaaaagaggt

SEQ ID NO: 97872 - DNA, 71 bp, Homo sapiens
ctaagtgaatatatagtactccaatactttaatcattttaaaagcaaacaaaagaggtttcagaactgtca

SEQ ID NO: 97873 - DNA, 69 bp, Homo sapiens
atatagtactccaatactttaatcattttaaaagcaaacaaaagaggtttcagaactgtcataaagccc

SEQ ID NO: 97874 - DNA, 66 bp, Homo sapiens
tccaatactttaatcattttaaaagcaaacaaaagaggtttcagaactgtcataaagccccccggg

SEQ ID NO: 97875 - DNA, 70 bp, Homo sapiens
aaagcaaacaaaagaggtttcagaactgtcataaagccccccggggtgtgaactgcagtacagtaattca

SEQ ID NO: 97876 - DNA, 73 bp, Homo sapiens
ataaagccccccggggtgtgaactgcagtacagtaattcacgccttgttgtgtagacagcctcacacctctaa

SEQ ID NO: 97877 - DNA, 75 bp, Homo sapiens
cggggtgtgaactgcagtacagtaattcacgccttgttgtgtagacagcctcacacctctaaccccatgtctaaa

SEQ ID NO: 97878 - DNA, 79 bp, Homo sapiens
ccttgttgtgtagacagcctcacacctctaaccccatgtctaaagccacactaagcataaagtactatgccatgattca

SEQ ID NO: 97879 - DNA, 82 bp, Homo sapiens
tagacagcctcacacctctaaccccatgtctaaagccacactaagcataaagtactatgccatgattcatgctccgtcatgt

SEQ ID NO: 97880 - DNA, 79 bp, Homo sapiens
taaccccatgtctaaagccacactaagcataaagtactatgccatgattcatgctccgtcatgttttactgtagtgaaa

SEQ ID NO: 97881 - DNA, 78 bp, Homo sapiens
atgtctaaagccacactaagcataaagtactatgccatgattcatgctccgtcatgttttactgtagtgaaaaagtcg

SEQ ID NO: 97882 - DNA, 78 bp, Homo sapiens
ctaagcataaagtactatgccatgattcatgctccgtcatgttttactgtagtgaaaaagtcgtgctaggcttttcta

SEQ ID NO: 97883 - DNA, 75 bp, Homo sapiens
ataaagtactatgccatgattcatgctccgtcatgttttactgtagtgaaaaagtcgtgctaggcttttctaaac

SEQ ID NO: 97884 - DNA, 77 bp, Homo sapiens
tatgccatgattcatgctccgtcatgttttactgtagtgaaaaagtcgtgctaggcttttctaaactcataattaaa

SEQ ID NO: 97885 - DNA, 73 bp, Homo sapiens
atgctccgtcatgttttactgtagtgaaaaagtcgtgctaggcttttctaaactcataattaaaccatgcaaa

SEQ ID NO: 97886 - DNA, 73 bp, Homo sapiens
catgttttactgtagtgaaaaagtcgtgctaggcttttctaaactcataattaaaccatgcaaacgttgcata

SEQ ID NO: 97887 - DNA, 75 bp, Homo sapiens
tgtagtgaaaaagtcgtgctaggcttttctaaactcataattaaaccatgcaaacgttgcataatatttcacagc

SEQ ID NO: 97888 - DNA, 72 bp, Homo sapiens
aaaagtcgtgctaggcttttctaaactcataattaaaccatgcaaacgttgcataatatttcacagccttta

SEQ ID NO: 97889 - DNA, 72 bp, Homo sapiens
ctaggcttttctaaactcataattaaaccatgcaaacgttgcataatatttcacagcctttaaaaaatatgc

SEQ ID NO: 97890 - DNA, 73 bp, Homo sapiens
actcataattaaaccatgcaaacgttgcataatatttcacagcctttaaaaaatatgctttggtaaaatgatc

SEQ ID NO: 97891 - DNA, 73 bp, Homo sapiens
gcaaacgttgcataatatttcacagcctttaaaaaatatgctttggtaaaatgatctttatgattaaagtcca

SEQ ID NO: 97892 - DNA, 74 bp, Homo sapiens
gcataatatttcacagcctttaaaaaatatgctttggtaaaatgatctttatgattaaagtccaagttctatga

SEQ ID NO: 97893 - DNA, 70 bp, Homo sapiens
tcacagcctttaaaaaatatgctttggtaaaatgatctttatgattaaagtccaagttctatgagttttt

SEQ ID NO: 97894 - DNA, 66 bp, Homo sapiens
aaaaatatgctttggtaaaatgatctttatgattaaagtccaagttctatgagtttttttgttttt

SEQ ID NO: 97895 - DNA, 75 bp, Homo sapiens
ttgttttttaaagacaggcttgcagattccacattttctgacttcacaccataacttagcttttcaggtgctgga

SEQ ID NO: 97896 - DNA, 78 bp, Homo sapiens
ttgcagattccacattttctgacttcacaccataacttagcttttcaggtgctggaggggaagatggcagtcaacacc

SEQ ID NO: 97897 - DNA, 76 bp, Homo sapiens
ttccacattttctgacttcacaccataacttagcttttcaggtgctggaggggaagatggcagtcaacaccctgaa

SEQ ID NO: 97898 - DNA, 75 bp, Homo sapiens
attttctgacttcacaccataacttagcttttcaggtgctggaggggaagatggcagtcaacaccctgaagccca

SEQ ID NO: 97899 - DNA, 76 bp, Homo sapiens
ttctgacttcacaccataacttagcttttcaggtgctggaggggaagatggcagtcaacaccctgaagcccaccca

SEQ ID NO: 97900 - DNA, 73 bp, Homo sapiens
acttcacaccataacttagcttttcaggtgctggaggggaagatggcagtcaacaccctgaagcccacccaac

SEQ ID NO: 97901 - DNA, 73 bp, Homo sapiens
ataacttagcttttcaggtgctggaggggaagatggcagtcaacaccctgaagcccacccaacccccacatca

SEQ ID NO: 97902 - DNA, 71 bp, Homo sapiens
ttttcaggtgctggaggggaagatggcagtcaacaccctgaagcccacccaacccccacatcagttttctt

SEQ ID NO: 97903 - DNA, 74 bp, Homo sapiens
aggggaagatggcagtcaacaccctgaagcccacccaacccccacatcagttttctttcatgagaccacagtga

SEQ ID NO: 97904 - DNA, 76 bp, Homo sapiens
aagatggcagtcaacaccctgaagcccacccaacccccacatcagttttctttcatgagaccacagtgacctgtgc

SEQ ID NO: 97905 - DNA, 73 bp, Homo sapiens
aacaccctgaagcccacccaacccccacatcagttttctttcatgagaccacagtgacctgtgcttgggttca

SEQ ID NO: 97906 - DNA, 74 bp, Homo sapiens
aagcccacccaacccccacatcagttttctttcatgagaccacagtgacctgtgcttgggttcattgccagtgg

SEQ ID NO: 97907 - DNA, 76 bp, Homo sapiens
cccacatcagttttctttcatgagaccacagtgacctgtgcttgggttcattgccagtggtgggccagaaggtggg

SEQ ID NO: 97908 - DNA, 79 bp, Homo sapiens
ttcatgagaccacagtgacctgtgcttgggttcattgccagtggtgggccagaaggtggggatggtgagcctctaatgt

SEQ ID NO: 97909 - DNA, 74 bp, Homo sapiens
tgacctgtgcttgggttcattgccagtggtgggccagaaggtggggatggtgagcctctaatgttggggtttta

SEQ ID NO: 97910 - DNA, 72 bp, Homo sapiens
caaaaacaaaaaaggcctgataatatggtgcattctgggtttaatattcattactgtctttggtctgacagg

SEQ ID NO: 97911 - DNA, 75 bp, Homo sapiens
aaaaaggcctgataatatggtgcattctgggtttaatattcattactgtctttggtctgacagggccaacatgaa

SEQ ID NO: 97912 - DNA, 77 bp, Homo sapiens
ataatatggtgcattctgggtttaatattcattactgtctttggtctgacagggccaacatgaactcatgggccacc

SEQ ID NO: 97913 - DNA, 77 bp, Homo sapiens
cattctgggtttaatattcattactgtctttggtctgacagggccaacatgaactcatgggccacccgagcactgga

SEQ ID NO: 97914 - DNA, 78 bp, Homo sapiens
tttaatattcattactgtctttggtctgacagggccaacatgaactcatgggccacccgagcactggactaataggca

SEQ ID NO: 97915 - DNA, 78 bp, Homo sapiens
attcattactgtctttggtctgacagggccaacatgaactcatgggccacccgagcactggactaataggcaggagag

SEQ ID NO: 97916 - DNA, 78 bp, Homo sapiens
tctttggtctgacagggccaacatgaactcatgggccacccgagcactggactaataggcaggagaggtgaactcttg

SEQ ID NO: 97917 - DNA, 79 bp, Homo sapiens
acatgaactcatgggccacccgagcactggactaataggcaggagaggtgaactcttggtctttctgtctggtgagcaa

SEQ ID NO: 97918 - DNA, 78 bp, Homo sapiens
gccacccgagcactggactaataggcaggagaggtgaactcttggtctttctgtctggtgagcaactgggtgacattg

SEQ ID NO: 97919 - DNA, 79 bp, Homo sapiens
agcactggactaataggcaggagaggtgaactcttggtctttctgtctggtgagcaactgggtgacattggattactca

SEQ ID NO: 97920 - DNA, 78 bp, Homo sapiens
taataggcaggagaggtgaactcttggtctttctgtctggtgagcaactgggtgacattggattactcactgacactt

SEQ ID NO: 97921 - DNA, 76 bp, Homo sapiens
aactcttggtctttctgtctggtgagcaactgggtgacattggattactcactgacactttcttattctcacctcc

SEQ ID NO: 97922 - DNA, 78 bp, Homo sapiens
tttctgtctggtgagcaactgggtgacattggattactcactgacactttcttattctcacctccgaaggaggtgatc

SEQ ID NO: 97923 - DNA, 74 bp, Homo sapiens
agcaactgggtgacattggattactcactgacactttcttattctcacctccgaaggaggtgatccctaaatcc

SEQ ID NO: 97924 - DNA, 74 bp, Homo sapiens
gtgacattggattactcactgacactttcttattctcacctccgaaggaggtgatccctaaatcctttccaatg

SEQ ID NO: 97925 - DNA, 73 bp, Homo sapiens
acactttcttattctcacctccgaaggaggtgatccctaaatcctttccaatggtgacagagcaggattctaa

SEQ ID NO: 97926 - DNA, 75 bp, Homo sapiens
tcttattctcacctccgaaggaggtgatccctaaatcctttccaatggtgacagagcaggattctaattccaata

SEQ ID NO: 97927 - DNA, 72 bp, Homo sapiens
acctccgaaggaggtgatccctaaatcctttccaatggtgacagagcaggattctaattccaataggtccta

SEQ ID NO: 97928 - DNA, 73 bp, Homo sapiens
taaatcctttccaatggtgacagagcaggattctaattccaataggtcctacacagtatttctttgctttact

SEQ ID NO: 97929 - DNA, 74 bp, Homo sapiens
agcaggattctaattccaataggtcctacacagtatttctttgctttacttgtacattaagcagagtcagggaa

SEQ ID NO: 97930 - DNA, 75 bp, Homo sapiens
aataggtcctacacagtatttctttgctttacttgtacattaagcagagtcagggaagaatcagatgtggggtga

SEQ ID NO: 97931 - DNA, 77 bp, Homo sapiens
cagtatttctttgctttacttgtacattaagcagagtcagggaagaatcagatgtggggtgaagagtggtgcctgta

SEQ ID NO: 97932 - DNA, 76 bp, Homo sapiens
ttacttgtacattaagcagagtcagggaagaatcagatgtggggtgaagagtggtgcctgtaataataaatttgtg

SEQ ID NO: 97933 - DNA, 73 bp, Homo sapiens
agggaagaatcagatgtggggtgaagagtggtgcctgtaataataaatttgtgtattctaggaagaggaagta

SEQ ID NO: 97934 - DNA, 75 bp, Homo sapiens
atcagatgtggggtgaagagtggtgcctgtaataataaatttgtgtattctaggaagaggaagtagaggagagta

SEQ ID NO: 97935 - DNA, 73 bp, Homo sapiens
tgcctgtaataataaatttgtgtattctaggaagaggaagtagaggagagtacgatgggagttatccagaaaa

SEQ ID NO: 97936 - DNA, 71 bp, Homo sapiens
taataataaatttgtgtattctaggaagaggaagtagaggagagtacgatgggagttatccagaaaaggcc

SEQ ID NO: 97937 - DNA, 73 bp, Homo sapiens
ttgtgtattctaggaagaggaagtagaggagagtacgatgggagttatccagaaaaggccccaggctgaggaa

SEQ ID NO: 97938 - DNA, 72 bp, Homo sapiens
aagaggaagtagaggagagtacgatgggagttatccagaaaaggccccaggctgaggaagagaaccactgta

SEQ ID NO: 97939 - DNA, 72 bp, Homo sapiens
aagtagaggagagtacgatgggagttatccagaaaaggccccaggctgaggaagagaaccactgtaaatcat

SEQ ID NO: 97940 - DNA, 76 bp, Homo sapiens
agagtacgatgggagttatccagaaaaggccccaggctgaggaagagaaccactgtaaatcattctccagagcaca

SEQ ID NO: 97941 - DNA, 75 bp, Homo sapiens
ttatccagaaaaggccccaggctgaggaagagaaccactgtaaatcattctccagagcacagggctacttgttct

SEQ ID NO: 97942 - DNA, 74 bp, Homo sapiens
agaaaaggccccaggctgaggaagagaaccactgtaaatcattctccagagcacagggctacttgttcttgaaa

SEQ ID NO: 97943 - DNA, 80 bp, Homo sapiens
gctgaggaagagaaccactgtaaatcattctccagagcacagggctacttgttcttgaaagagttgcctctgataagtca

SEQ ID NO: 97944 - DNA, 79 bp, Homo sapiens
agaaccactgtaaatcattctccagagcacagggctacttgttcttgaaagagttgcctctgataagtcaatccatcta

SEQ ID NO: 97945 - DNA, 76 bp, Homo sapiens
tccagagcacagggctacttgttcttgaaagagttgcctctgataagtcaatccatctaaaagaacaaaagcttat

SEQ ID NO: 97946 - DNA, 75 bp, Homo sapiens
aaagagttgcctctgataagtcaatccatctaaaagaacaaaagcttattgaacatttacagtgtgccaggaatg

SEQ ID NO: 97947 - DNA, 76 bp, Homo sapiens
aaagaacaaaagcttattgaacatttacagtgtgccaggaatgtgctaatttacctggcaggagagtgatgaataa

SEQ ID NO: 97948 - DNA, 77 bp, Homo sapiens
aaaagcttattgaacatttacagtgtgccaggaatgtgctaatttacctggcaggagagtgatgaataagaccaaca

SEQ ID NO: 97949 - DNA, 80 bp, Homo sapiens
tgtgccaggaatgtgctaatttacctggcaggagagtgatgaataagaccaacatggtccctgccccacaggcacttaca

SEQ ID NO: 97950 - DNA, 79 bp, Homo sapiens
atgtgctaatttacctggcaggagagtgatgaataagaccaacatggtccctgccccacaggcacttacagtcagtgaa

SEQ ID NO: 97951 - DNA, 78 bp, Homo sapiens
taatttacctggcaggagagtgatgaataagaccaacatggtccctgccccacaggcacttacagtcagtgaagatcc

SEQ ID NO: 97952 - DNA, 82 bp, Homo sapiens
gagagtgatgaataagaccaacatggtccctgccccacaggcacttacagtcagtgaagatcccaggatcttgtgatgcttg

SEQ ID NO: 97953 - DNA, 79 bp, Homo sapiens
atgaataagaccaacatggtccctgccccacaggcacttacagtcagtgaagatcccaggatcttgtgatgcttggaaa

SEQ ID NO: 97954 - DNA, 85 bp, Homo sapiens
tgccccacaggcacttacagtcagtgaagatcccaggatcttgtgatgcttggaaaggcatcttcctgtggcattaatcatcata

SEQ ID NO: 97955 - DNA, 83 bp, Homo sapiens
gcacttacagtcagtgaagatcccaggatcttgtgatgcttggaaaggcatcttcctgtggcattaatcatcatactgggtgt

SEQ ID NO: 97956 - DNA, 85 bp, Homo sapiens
tcagtgaagatcccaggatcttgtgatgcttggaaaggcatcttcctgtggcattaatcatcatactgggtgttgcttcattcat

SEQ ID NO: 97957 - DNA, 82 bp, Homo sapiens
aagatcccaggatcttgtgatgcttggaaaggcatcttcctgtggcattaatcatcatactgggtgttgcttcattcattta

SEQ ID NO: 97958 - DNA, 76 bp, Homo sapiens
ttattcattcatgtgttcatgaaattactttttcattcactcatatttccaacaaacatttttgcttcacttgggc

SEQ ID NO: 97959 - DNA, 76 bp, Homo sapiens
cattcatgtgttcatgaaattactttttcattcactcatatttccaacaaacatttttgcttcacttgggccactg

SEQ ID NO: 97960 - DNA, 71 bp, Homo sapiens
catgaaattactttttcattcactcatatttccaacaaacatttttgcttcacttgggccactgttttggg

SEQ ID NO: 97961 - DNA, 72 bp, Homo sapiens
tactttttcattcactcatatttccaacaaacatttttgcttcacttgggccactgttttggggactcacta

SEQ ID NO: 97962 - DNA, 72 bp, Homo sapiens
tcatatttccaacaaacatttttgcttcacttgggccactgttttggggactcactagtgaatggaaggttc

SEQ ID NO: 97963 - DNA, 70 bp, Homo sapiens
aacaaacatttttgcttcacttgggccactgttttggggactcactagtgaatggaaggttcctgccttc

SEQ ID NO: 97964 - DNA, 71 bp, Homo sapiens
tttttgcttcacttgggccactgttttggggactcactagtgaatggaaggttcctgccttctggaagtta

SEQ ID NO: 97965 - DNA, 73 bp, Homo sapiens
ttcacttgggccactgttttggggactcactagtgaatggaaggttcctgccttctggaagttacagctacta

SEQ ID NO: 97966 - DNA, 71 bp, Homo sapiens
actgttttggggactcactagtgaatggaaggttcctgccttctggaagttacagctactagggtgcccaa

SEQ ID NO: 97967 - DNA, 75 bp, Homo sapiens
ctcactagtgaatggaaggttcctgccttctggaagttacagctactagggtgcccaagggctgtatctgggcta

SEQ ID NO: 97968 - DNA, 73 bp, Homo sapiens
actagtgaatggaaggttcctgccttctggaagttacagctactagggtgcccaagggctgtatctgggctaa

SEQ ID NO: 97969 - DNA, 74 bp, Homo sapiens
aatggaaggttcctgccttctggaagttacagctactagggtgcccaagggctgtatctgggctaactgctaga

SEQ ID NO: 97970 - DNA, 74 bp, Homo sapiens
aaggttcctgccttctggaagttacagctactagggtgcccaagggctgtatctgggctaactgctagattagc

SEQ ID NO: 97971 - DNA, 77 bp, Homo sapiens
tcctgccttctggaagttacagctactagggtgcccaagggctgtatctgggctaactgctagattagctgcctaat

SEQ ID NO: 97972 - DNA, 75 bp, Homo sapiens
ccttctggaagttacagctactagggtgcccaagggctgtatctgggctaactgctagattagctgcctaatttg

SEQ ID NO: 97973 - DNA, 76 bp, Homo sapiens
tctggaagttacagctactagggtgcccaagggctgtatctgggctaactgctagattagctgcctaatttggact

SEQ ID NO: 97974 - DNA, 76 bp, Homo sapiens
aagttacagctactagggtgcccaagggctgtatctgggctaactgctagattagctgcctaatttggacttgcaa

SEQ ID NO: 97975 - DNA, 77 bp, Homo sapiens
agctactagggtgcccaagggctgtatctgggctaactgctagattagctgcctaatttggacttgcaaacagctgt

SEQ ID NO: 97976 - DNA, 76 bp, Homo sapiens
caagggctgtatctgggctaactgctagattagctgcctaatttggacttgcaaacagctgttcccaaggtagaaa

SEQ ID NO: 97977 - DNA, 76 bp, Homo sapiens
ctgtatctgggctaactgctagattagctgcctaatttggacttgcaaacagctgttcccaaggtagaaacaagaa

SEQ ID NO: 97978 - DNA, 72 bp, Homo sapiens
attagctgcctaatttggacttgcaaacagctgttcccaaggtagaaacaagaaccctagtggtatctatta

SEQ ID NO: 97979 - DNA, 73 bp, Homo sapiens
taatttggacttgcaaacagctgttcccaaggtagaaacaagaaccctagtggtatctattacatgcttatgt

SEQ ID NO: 97980 - DNA, 76 bp, Homo sapiens
acttgcaaacagctgttcccaaggtagaaacaagaaccctagtggtatctattacatgcttatgttctgcctctga

SEQ ID NO: 97981 - DNA, 76 bp, Homo sapiens
tgttcccaaggtagaaacaagaaccctagtggtatctattacatgcttatgttctgcctctgagaggaggagacta

SEQ ID NO: 97982 - DNA, 78 bp, Homo sapiens
gtatctattacatgcttatgttctgcctctgagaggaggagactagggaaagcaccgaactcaaatcacagacaaatt

SEQ ID NO: 97983 - DNA, 78 bp, Homo sapiens
tattacatgcttatgttctgcctctgagaggaggagactagggaaagcaccgaactcaaatcacagacaaatttcagt

SEQ ID NO: 97984 - DNA, 79 bp, Homo sapiens
ttatgttctgcctctgagaggaggagactagggaaagcaccgaactcaaatcacagacaaatttcagtttgcatcctgc

SEQ ID NO: 97985 - DNA, 77 bp, Homo sapiens
tgagaggaggagactagggaaagcaccgaactcaaatcacagacaaatttcagtttgcatcctgccttcaccataaa

SEQ ID NO: 97986 - DNA, 74 bp, Homo sapiens
aggagactagggaaagcaccgaactcaaatcacagacaaatttcagtttgcatcctgccttcaccataaaccaa

SEQ ID NO: 97987 - DNA, 75 bp, Homo sapiens
aaagcaccgaactcaaatcacagacaaatttcagtttgcatcctgccttcaccataaaccaactggatgacctta

SEQ ID NO: 97988 - DNA, 77 bp, Homo sapiens
tcaaatcacagacaaatttcagtttgcatcctgccttcaccataaaccaactggatgaccttaggcaggtcacttat

SEQ ID NO: 97989 - DNA, 74 bp, Homo sapiens
acagacaaatttcagtttgcatcctgccttcaccataaaccaactggatgaccttaggcaggtcacttattttc

SEQ ID NO: 97990 - DNA, 77 bp, Homo sapiens
atttcagtttgcatcctgccttcaccataaaccaactggatgaccttaggcaggtcacttattttctctgattcata

SEQ ID NO: 97991 - DNA, 74 bp, Homo sapiens
accataaaccaactggatgaccttaggcaggtcacttattttctctgattcatagttagaattctgacttcaaa

SEQ ID NO: 97992 - DNA, 73 bp, Homo sapiens
aactggatgaccttaggcaggtcacttattttctctgattcatagttagaattctgacttcaaagggtaatag

SEQ ID NO: 97993 - DNA, 75 bp, Homo sapiens
ttaggcaggtcacttattttctctgattcatagttagaattctgacttcaaagggtaataggagtaagtgagata

SEQ ID NO: 97994 - DNA, 73 bp, Homo sapiens
caggtcacttattttctctgattcatagttagaattctgacttcaaagggtaataggagtaagtgagataaac

SEQ ID NO: 97995 - DNA, 75 bp, Homo sapiens
ttctctgattcatagttagaattctgacttcaaagggtaataggagtaagtgagataaactatatggaaagcaag

SEQ ID NO: 97996 - DNA, 75 bp, Homo sapiens
attctgacttcaaagggtaataggagtaagtgagataaactatatggaaagcaagtatcacaatttctggccata

SEQ ID NO: 97997 - DNA, 75 bp, Homo sapiens
ttcaaagggtaataggagtaagtgagataaactatatggaaagcaagtatcacaatttctggccatagtaaatgc

SEQ ID NO: 97998 - DNA, 76 bp, Homo sapiens
agtgagataaactatatggaaagcaagtatcacaatttctggccatagtaaatgctcaataagtctgaataacctt

SEQ ID NO: 97999 - DNA, 77 bp, Homo sapiens
actatatggaaagcaagtatcacaatttctggccatagtaaatgctcaataagtctgaataacctttatgattgtat

SEQ ID NO: 98000 - DNA, 75 bp, Homo sapiens
gcaagtatcacaatttctggccatagtaaatgctcaataagtctgaataacctttatgattgtattactaaaaag

SEQ ID NO: 98001 - DNA, 73 bp, Homo sapiens
tcacaatttctggccatagtaaatgctcaataagtctgaataacctttatgattgtattactaaaaaggaaaa

SEQ ID NO: 98002 - DNA, 76 bp, Homo sapiens
ctaaaaaggaaaagaaatccatgccaagggacttatctgatgttcattggtgagaccacacacatttgctccagga

SEQ ID NO: 98003 - DNA, 78 bp, Homo sapiens
aaaagaaatccatgccaagggacttatctgatgttcattggtgagaccacacacatttgctccaggataaggctcaag

SEQ ID NO: 98004 - DNA, 79 bp, Homo sapiens
aaagaaatccatgccaagggacttatctgatgttcattggtgagaccacacacatttgctccaggataaggctcaagta

SEQ ID NO: 98005 - DNA, 78 bp, Homo sapiens
atgccaagggacttatctgatgttcattggtgagaccacacacatttgctccaggataaggctcaagtaatagtgttt

SEQ ID NO: 98006 - DNA, 76 bp, Homo sapiens
aagggacttatctgatgttcattggtgagaccacacacatttgctccaggataaggctcaagtaatagtgttttgt

SEQ ID NO: 98007 - DNA, 80 bp, Homo sapiens
atgttcattggtgagaccacacacatttgctccaggataaggctcaagtaatagtgttttgttcacagctacagtcttga

SEQ ID NO: 98008 - DNA, 80 bp, Homo sapiens
attggtgagaccacacacatttgctccaggataaggctcaagtaatagtgttttgttcacagctacagtcttgacagaca

SEQ ID NO: 98009 - DNA, 81 bp, Homo sapiens
ttgctccaggataaggctcaagtaatagtgttttgttcacagctacagtcttgacagacacactcttcaggctggagagga

SEQ ID NO: 98010 - DNA, 81 bp, Homo sapiens
ataaggctcaagtaatagtgttttgttcacagctacagtcttgacagacacactcttcaggctggagaggagctgggctca

SEQ ID NO: 98011 - DNA, 81 bp, Homo sapiens
taatagtgttttgttcacagctacagtcttgacagacacactcttcaggctggagaggagctgggctcaggagattaaatg

SEQ ID NO: 98012 - DNA, 79 bp, Homo sapiens
ttttgttcacagctacagtcttgacagacacactcttcaggctggagaggagctgggctcaggagattaaatggtaaag

SEQ ID NO: 98013 - DNA, 77 bp, Homo sapiens
tacagtcttgacagacacactcttcaggctggagaggagctgggctcaggagattaaatggtaaaggggcaaatttc

SEQ ID NO: 98014 - DNA, 72 bp, Homo sapiens
tcttcaggctggagaggagctgggctcaggagattaaatggtaaaggggcaaatttccaaagattggaaatt

SEQ ID NO: 98015 - DNA, 69 bp, Homo sapiens
agaggagctgggctcaggagattaaatggtaaaggggcaaatttccaaagattggaaatttgggattag

SEQ ID NO: 98016 - DNA, 69 bp, Homo sapiens
gggctcaggagattaaatggtaaaggggcaaatttccaaagattggaaatttgggattaggatggagaa

SEQ ID NO: 98017 - DNA, 68 bp, Homo sapiens
agattaaatggtaaaggggcaaatttccaaagattggaaatttgggattaggatggagaaggcaggaa

SEQ ID NO: 98018 - DNA, 67 bp, Homo sapiens
attaaatggtaaaggggcaaatttccaaagattggaaatttgggattaggatggagaaggcaggaac

SEQ ID NO: 98019 - DNA, 71 bp, Homo sapiens
gtaaaggggcaaatttccaaagattggaaatttgggattaggatggagaaggcaggaactcagtatctcaa

SEQ ID NO: 98020 - DNA, 74 bp, Homo sapiens
ggcaaatttccaaagattggaaatttgggattaggatggagaaggcaggaactcagtatctcaaccaactcatg

SEQ ID NO: 98021 - DNA, 72 bp, Homo sapiens
aatttccaaagattggaaatttgggattaggatggagaaggcaggaactcagtatctcaaccaactcatgtt

SEQ ID NO: 98022 - DNA, 74 bp, Homo sapiens
caaagattggaaatttgggattaggatggagaaggcaggaactcagtatctcaaccaactcatgtttctattaa

SEQ ID NO: 98023 - DNA, 73 bp, Homo sapiens
aaagattggaaatttgggattaggatggagaaggcaggaactcagtatctcaaccaactcatgtttctattaa

SEQ ID NO: 98024 - DNA, 72 bp, Homo sapiens
attggaaatttgggattaggatggagaaggcaggaactcagtatctcaaccaactcatgtttctattaaaaa

SEQ ID NO: 98025 - DNA, 71 bp, Homo sapiens
aaatttgggattaggatggagaaggcaggaactcagtatctcaaccaactcatgtttctattaaaaaatac

SEQ ID NO: 98026 - DNA, 75 bp, Homo sapiens
tgggattaggatggagaaggcaggaactcagtatctcaaccaactcatgtttctattaaaaaatactggattcag

SEQ ID NO: 98027 - DNA, 74 bp, Homo sapiens
ttaggatggagaaggcaggaactcagtatctcaaccaactcatgtttctattaaaaaatactggattcagggcc

SEQ ID NO: 98028 - DNA, 73 bp, Homo sapiens
atggagaaggcaggaactcagtatctcaaccaactcatgtttctattaaaaaatactggattcagggccgggc

SEQ ID NO: 98029 - DNA, 67 bp, Homo sapiens
aataataaataaaaaacactggattcaaaaatttaaatttgagcctttatgcatactggttttccag

SEQ ID NO: 98030 - DNA, 71 bp, Homo sapiens
taaaaaacactggattcaaaaatttaaatttgagcctttatgcatactggttttccaggctaaatgatgtc

SEQ ID NO: 98031 - DNA, 77 bp, Homo sapiens
tggattcaaaaatttaaatttgagcctttatgcatactggttttccaggctaaatgatgtctgatgcagccacttta

SEQ ID NO: 98032 - DNA, 77 bp, Homo sapiens
atttaaatttgagcctttatgcatactggttttccaggctaaatgatgtctgatgcagccactttactgaggccatt

SEQ ID NO: 98033 - DNA, 80 bp, Homo sapiens
aatttgagcctttatgcatactggttttccaggctaaatgatgtctgatgcagccactttactgaggccattttgtgatg

SEQ ID NO: 98034 - DNA, 78 bp, Homo sapiens
tttatgcatactggttttccaggctaaatgatgtctgatgcagccactttactgaggccattttgtgatgggttattt

SEQ ID NO: 98035 - DNA, 76 bp, Homo sapiens
ttttccaggctaaatgatgtctgatgcagccactttactgaggccattttgtgatgggttattttcagctttttaa

SEQ ID NO: 98036 - DNA, 79 bp, Homo sapiens
taaatgatgtctgatgcagccactttactgaggccattttgtgatgggttattttcagctttttaatcatcaataatgg

SEQ ID NO: 98037 - DNA, 76 bp, Homo sapiens
tctgatgcagccactttactgaggccattttgtgatgggttattttcagctttttaatcatcaataatgggtaaaa

SEQ ID NO: 98038 - DNA, 70 bp, Homo sapiens
actttactgaggccattttgtgatgggttattttcagctttttaatcatcaataatgggtaaaacaggcc

SEQ ID NO: 98039 - DNA, 71 bp, Homo sapiens
actgaggccattttgtgatgggttattttcagctttttaatcatcaataatgggtaaaacaggccttctac

SEQ ID NO: 98040 - DNA, 71 bp, Homo sapiens
ttttgtgatgggttattttcagctttttaatcatcaataatgggtaaaacaggccttctactccttgatcc

SEQ ID NO: 98041 - DNA, 70 bp, Homo sapiens
ttttcagctttttaatcatcaataatgggtaaaacaggccttctactccttgatccccattcccttccat

SEQ ID NO: 98042 - DNA, 70 bp, Homo sapiens
tttttaatcatcaataatgggtaaaacaggccttctactccttgatccccattcccttccatttgaaatg

SEQ ID NO: 98043 - DNA, 69 bp, Homo sapiens
atcaataatgggtaaaacaggccttctactccttgatccccattcccttccatttgaaatgggaagtta

SEQ ID NO: 98044 - DNA, 68 bp, Homo sapiens
taaaacaggccttctactccttgatccccattcccttccatttgaaatgggaagttagggataaggta

SEQ ID NO: 98045 - DNA, 69 bp, Homo sapiens
ttctactccttgatccccattcccttccatttgaaatgggaagttagggataaggtagagttgaggtta

SEQ ID NO: 98046 - DNA, 70 bp, Homo sapiens
tccttgatccccattcccttccatttgaaatgggaagttagggataaggtagagttgaggttagtggtga

SEQ ID NO: 98047 - DNA, 71 bp, Homo sapiens
attcccttccatttgaaatgggaagttagggataaggtagagttgaggttagtggtgagctcagaggtgta

SEQ ID NO: 98048 - DNA, 75 bp, Homo sapiens
aaatgggaagttagggataaggtagagttgaggttagtggtgagctcagaggtgtacacggcatatatcacacaa

SEQ ID NO: 98049 - DNA, 76 bp, Homo sapiens
atgggaagttagggataaggtagagttgaggttagtggtgagctcagaggtgtacacggcatatatcacacaagaa

SEQ ID NO: 98050 - DNA, 75 bp, Homo sapiens
aagttagggataaggtagagttgaggttagtggtgagctcagaggtgtacacggcatatatcacacaagaagaaa

SEQ ID NO: 98051 - DNA, 76 bp, Homo sapiens
agggataaggtagagttgaggttagtggtgagctcagaggtgtacacggcatatatcacacaagaagaaaggagaa

SEQ ID NO: 98052 - DNA, 76 bp, Homo sapiens
agttgaggttagtggtgagctcagaggtgtacacggcatatatcacacaagaagaaaggagaatgcttttatcttt

SEQ ID NO: 98053 - DNA, 80 bp, Homo sapiens
agctcagaggtgtacacggcatatatcacacaagaagaaaggagaatgcttttatcttttgatgcagcaatattaaaatg

SEQ ID NO: 98054 - DNA, 79 bp, Homo sapiens
aggtgtacacggcatatatcacacaagaagaaaggagaatgcttttatcttttgatgcagcaatattaaaatgtctcta

SEQ ID NO: 98055 - DNA, 82 bp, Homo sapiens
gcatatatcacacaagaagaaaggagaatgcttttatcttttgatgcagcaatattaaaatgtctctagagtcaacaatgac

SEQ ID NO: 98056 - DNA, 75 bp, Homo sapiens
gaaaggagaatgcttttatcttttgatgcagcaatattaaaatgtctctagagtcaacaatgacccttttaaata

SEQ ID NO: 98057 - DNA, 78 bp, Homo sapiens
tttatcttttgatgcagcaatattaaaatgtctctagagtcaacaatgacccttttaaataattcatgtcagaatgtc

SEQ ID NO: 98058 - DNA, 81 bp, Homo sapiens
tgatgcagcaatattaaaatgtctctagagtcaacaatgacccttttaaataattcatgtcagaatgtcctgttgcttcta

SEQ ID NO: 98059 - DNA, 76 bp, Homo sapiens
gcaatattaaaatgtctctagagtcaacaatgacccttttaaataattcatgtcagaatgtcctgttgcttctagt

SEQ ID NO: 98060 - DNA, 75 bp, Homo sapiens
aaatgtctctagagtcaacaatgacccttttaaataattcatgtcagaatgtcctgttgcttctagtttcagttc

SEQ ID NO: 98061 - DNA, 72 bp, Homo sapiens
agagtcaacaatgacccttttaaataattcatgtcagaatgtcctgttgcttctagtttcagttccaaaatt

SEQ ID NO: 98062 - DNA, 72 bp, Homo sapiens
ccttttaaataattcatgtcagaatgtcctgttgcttctagtttcagttccaaaatttaaagagcttgagag

SEQ ID NO: 98063 - DNA, 76 bp, Homo sapiens
aaataattcatgtcagaatgtcctgttgcttctagtttcagttccaaaatttaaagagcttgagagtcatcactct

SEQ ID NO: 98064 - DNA, 76 bp, Homo sapiens
tgtcagaatgtcctgttgcttctagtttcagttccaaaatttaaagagcttgagagtcatcactcttgtttttata

SEQ ID NO: 98065 - DNA, 72 bp, Homo sapiens
gtcctgttgcttctagtttcagttccaaaatttaaagagcttgagagtcatcactcttgtttttataagaaa

SEQ ID NO: 98066 - DNA, 72 bp, Homo sapiens
ctagtttcagttccaaaatttaaagagcttgagagtcatcactcttgtttttataagaaaaaatgctgaaca

SEQ ID NO: 98067 - DNA, 71 bp, Homo sapiens
agttccaaaatttaaagagcttgagagtcatcactcttgtttttataagaaaaaatgctgaacaaactgaa

SEQ ID NO: 98068 - DNA, 73 bp, Homo sapiens
aaagagcttgagagtcatcactcttgtttttataagaaaaaatgctgaacaaactgaaaatccatgacttttc

SEQ ID NO: 98069 - DNA, 73 bp, Homo sapiens
gagagtcatcactcttgtttttataagaaaaaatgctgaacaaactgaaaatccatgacttttcttaagtcca

SEQ ID NO: 98070 - DNA, 69 bp, Homo sapiens
cttgtttttataagaaaaaatgctgaacaaactgaaaatccatgacttttcttaagtccaatggaaagc

SEQ ID NO: 98071 - DNA, 72 bp, Homo sapiens
ataagaaaaaatgctgaacaaactgaaaatccatgacttttcttaagtccaatggaaagctgaagttgcagg

SEQ ID NO: 98072 - DNA, 75 bp, Homo sapiens
aaatgctgaacaaactgaaaatccatgacttttcttaagtccaatggaaagctgaagttgcagggcaaactgcaa

SEQ ID NO: 98073 - DNA, 71 bp, Homo sapiens
actgaaaatccatgacttttcttaagtccaatggaaagctgaagttgcagggcaaactgcaaccccaaatt

SEQ ID NO: 98074 - DNA, 72 bp, Homo sapiens
aatccatgacttttcttaagtccaatggaaagctgaagttgcagggcaaactgcaaccccaaattttgagaa

SEQ ID NO: 98075 - DNA, 77 bp, Homo sapiens
aatggaaagctgaagttgcagggcaaactgcaaccccaaattttgagaagcaggcaaatatagagaatcatagtgag

SEQ ID NO: 98076 - DNA, 78 bp, Homo sapiens
aagctgaagttgcagggcaaactgcaaccccaaattttgagaagcaggcaaatatagagaatcatagtgaggtctgct

SEQ ID NO: 98077 - DNA, 79 bp, Homo sapiens
ggcaaactgcaaccccaaattttgagaagcaggcaaatatagagaatcatagtgaggtctgcttgctgggagcagaatt

SEQ ID NO: 98078 - DNA, 79 bp, Homo sapiens
aaccccaaattttgagaagcaggcaaatatagagaatcatagtgaggtctgcttgctgggagcagaatttctgaattca

SEQ ID NO: 98079 - DNA, 83 bp, Homo sapiens
aagcaggcaaatatagagaatcatagtgaggtctgcttgctgggagcagaatttctgaattcataaactgatgagaacactta

SEQ ID NO: 98080 - DNA, 82 bp, Homo sapiens
atatagagaatcatagtgaggtctgcttgctgggagcagaatttctgaattcataaactgatgagaacacttaatggtgatt

SEQ ID NO: 98081 - DNA, 84 bp, Homo sapiens
tgcttgctgggagcagaatttctgaattcataaactgatgagaacacttaatggtgattttgacagattgctagaggctcagta

SEQ ID NO: 98082 - DNA, 81 bp, Homo sapiens
agcagaatttctgaattcataaactgatgagaacacttaatggtgattttgacagattgctagaggctcagtacagactag

SEQ ID NO: 98083 - DNA, 83 bp, Homo sapiens
tctgaattcataaactgatgagaacacttaatggtgattttgacagattgctagaggctcagtacagactagtgtgcgaataa

SEQ ID NO: 98084 - DNA, 82 bp, Homo sapiens
ttcataaactgatgagaacacttaatggtgattttgacagattgctagaggctcagtacagactagtgtgcgaataagacac

SEQ ID NO: 98085 - DNA, 79 bp, Homo sapiens
atgagaacacttaatggtgattttgacagattgctagaggctcagtacagactagtgtgcgaataagacactcctaggg

SEQ ID NO: 98086 - DNA, 78 bp, Homo sapiens
ttaatggtgattttgacagattgctagaggctcagtacagactagtgtgcgaataagacactcctaggggctacagtt

SEQ ID NO: 98087 - DNA, 78 bp, Homo sapiens
attttgacagattgctagaggctcagtacagactagtgtgcgaataagacactcctaggggctacagtttcaggagga

SEQ ID NO: 98088 - DNA, 78 bp, Homo sapiens
attgctagaggctcagtacagactagtgtgcgaataagacactcctaggggctacagtttcaggaggaagtgcactgt

SEQ ID NO: 98089 - DNA, 73 bp, Homo sapiens
agtacagactagtgtgcgaataagacactcctaggggctacagtttcaggaggaagtgcactgttgtgggttt

SEQ ID NO: 98090 - DNA, 72 bp, Homo sapiens
aataagacactcctaggggctacagtttcaggaggaagtgcactgttgtgggtttttcattcaggaactcca

SEQ ID NO: 98091 - DNA, 76 bp, Homo sapiens
aggaggaagtgcactgttgtgggtttttcattcaggaactccaccagattctcacaggatccaatatattattata

SEQ ID NO: 98092 - DNA, 75 bp, Homo sapiens
tgttgtgggtttttcattcaggaactccaccagattctcacaggatccaatatattattataacagtgggttatg

SEQ ID NO: 98093 - DNA, 79 bp, Homo sapiens
ttcaggaactccaccagattctcacaggatccaatatattattataacagtgggttatggctgaaagagcttcaacata

SEQ ID NO: 98094 - DNA, 78 bp, Homo sapiens
accagattctcacaggatccaatatattattataacagtgggttatggctgaaagagcttcaacatactgactaagga

SEQ ID NO: 98095 - DNA, 77 bp, Homo sapiens
acaggatccaatatattattataacagtgggttatggctgaaagagcttcaacatactgactaaggaggagttcata

SEQ ID NO: 98096 - DNA, 79 bp, Homo sapiens
atatattattataacagtgggttatggctgaaagagcttcaacatactgactaaggaggagttcatagagaagctcaca

SEQ ID NO: 98097 - DNA, 82 bp, Homo sapiens
tattataacagtgggttatggctgaaagagcttcaacatactgactaaggaggagttcatagagaagctcacagatgacatg

SEQ ID NO: 98098 - DNA, 81 bp, Homo sapiens
ttatggctgaaagagcttcaacatactgactaaggaggagttcatagagaagctcacagatgacatgggagacaaaaacaa

SEQ ID NO: 98099 - DNA, 79 bp, Homo sapiens
aagagcttcaacatactgactaaggaggagttcatagagaagctcacagatgacatgggagacaaaaacaaggacgcta

SEQ ID NO: 98100 - DNA, 76 bp, Homo sapiens
actaaggaggagttcatagagaagctcacagatgacatgggagacaaaaacaaggacgctagaggaatttgaagtc

SEQ ID NO: 98101 - DNA, 76 bp, Homo sapiens
agttcatagagaagctcacagatgacatgggagacaaaaacaaggacgctagaggaatttgaagtctctggtacct

SEQ ID NO: 98102 - DNA, 75 bp, Homo sapiens
aagctcacagatgacatgggagacaaaaacaaggacgctagaggaatttgaagtctctggtaccttctgaaaaca

SEQ ID NO: 98103 - DNA, 72 bp, Homo sapiens
atgacatgggagacaaaaacaaggacgctagaggaatttgaagtctctggtaccttctgaaaacattaaata

SEQ ID NO: 98104 - DNA, 70 bp, Homo sapiens
agacaaaaacaaggacgctagaggaatttgaagtctctggtaccttctgaaaacattaaatacagcccaa

SEQ ID NO: 98105 - DNA, 70 bp, Homo sapiens
aaacaaggacgctagaggaatttgaagtctctggtaccttctgaaaacattaaatacagcccaactcttg

SEQ ID NO: 98106 - DNA, 72 bp, Homo sapiens
aggaatttgaagtctctggtaccttctgaaaacattaaatacagcccaactcttgggtacatgagaataata

SEQ ID NO: 98107 - DNA, 73 bp, Homo sapiens
tttgaagtctctggtaccttctgaaaacattaaatacagcccaactcttgggtacatgagaataataactcac

SEQ ID NO: 98108 - DNA, 72 bp, Homo sapiens
taccttctgaaaacattaaatacagcccaactcttgggtacatgagaataataactcacgctaaaggcctac

SEQ ID NO: 98109 - DNA, 74 bp, Homo sapiens
tacagcccaactcttgggtacatgagaataataactcacgctaaaggcctactaagttcctattgcctgataaa

SEQ ID NO: 98110 - DNA, 74 bp, Homo sapiens
aactcttgggtacatgagaataataactcacgctaaaggcctactaagttcctattgcctgataaatcatgtta

SEQ ID NO: 98111 - DNA, 74 bp, Homo sapiens
ggtacatgagaataataactcacgctaaaggcctactaagttcctattgcctgataaatcatgttaaactttca

SEQ ID NO: 98112 - DNA, 70 bp, Homo sapiens
aataataactcacgctaaaggcctactaagttcctattgcctgataaatcatgttaaactttcaataaaa

SEQ ID NO: 98113 - DNA, 70 bp, Homo sapiens
cacgctaaaggcctactaagttcctattgcctgataaatcatgttaaactttcaataaaaaattacaaga

SEQ ID NO: 98114 - DNA, 70 bp, Homo sapiens
gcctactaagttcctattgcctgataaatcatgttaaactttcaataaaaaattacaagaaaggcaagaa

SEQ ID NO: 98115 - DNA, 70 bp, Homo sapiens
ctgataaatcatgttaaactttcaataaaaaattacaagaaaggcaagaaaaaaacacagtctgaagaga

SEQ ID NO: 98116 - DNA, 68 bp, Homo sapiens
atgttaaactttcaataaaaaattacaagaaaggcaagaaaaaaacacagtctgaagagataaagcaa

SEQ ID NO: 98117 - DNA, 77 bp, Homo sapiens
aagaaaaaaacacagtctgaagagataaagcaagcatcagaaccagacccagatgtgacacagattttggaattaca

SEQ ID NO: 98118 - DNA, 79 bp, Homo sapiens
cacagtctgaagagataaagcaagcatcagaaccagacccagatgtgacacagattttggaattacaagacagggaatt

SEQ ID NO: 98119 - DNA, 76 bp, Homo sapiens
aagagataaagcaagcatcagaaccagacccagatgtgacacagattttggaattacaagacagggaatttaacaa

SEQ ID NO: 98120 - DNA, 77 bp, Homo sapiens
caagcatcagaaccagacccagatgtgacacagattttggaattacaagacagggaatttaacaatgattaacatgt

SEQ ID NO: 98121 - DNA, 75 bp, Homo sapiens
atcagaaccagacccagatgtgacacagattttggaattacaagacagggaatttaacaatgattaacatgttaa

SEQ ID NO: 98122 - DNA, 76 bp, Homo sapiens
cagatgtgacacagattttggaattacaagacagggaatttaacaatgattaacatgttaatggctctagtggaaa

SEQ ID NO: 98123 - DNA, 73 bp, Homo sapiens
gacacagattttggaattacaagacagggaatttaacaatgattaacatgttaatggctctagtggaaaaaga

SEQ ID NO: 98124 - DNA, 74 bp, Homo sapiens
tggaattacaagacagggaatttaacaatgattaacatgttaatggctctagtggaaaaagaagacaaggtgca

SEQ ID NO: 98125 - DNA, 73 bp, Homo sapiens
aagacagggaatttaacaatgattaacatgttaatggctctagtggaaaaagaagacaaggtgcaagaagaga

SEQ ID NO: 98126 - DNA, 76 bp, Homo sapiens
aatttaacaatgattaacatgttaatggctctagtggaaaaagaagacaaggtgcaagaagagatggatgatgtag

SEQ ID NO: 98127 - DNA, 78 bp, Homo sapiens
attaacatgttaatggctctagtggaaaaagaagacaaggtgcaagaagagatggatgatgtaggcagggagatggaa

SEQ ID NO: 98128 - DNA, 75 bp, Homo sapiens
ttaatggctctagtggaaaaagaagacaaggtgcaagaagagatggatgatgtaggcagggagatggaaactttt

SEQ ID NO: 98129 - DNA, 71 bp, Homo sapiens
ctagtggaaaaagaagacaaggtgcaagaagagatggatgatgtaggcagggagatggaaacttttttttt

SEQ ID NO: 98130 - DNA, 68 bp, Homo sapiens
ccgtgcccagcctgaaactcttaacactcaaaagcaaattctaaaaaccaaaagcaccctaacagaaa

SEQ ID NO: 98131 - DNA, 69 bp, Homo sapiens
agcctgaaactcttaacactcaaaagcaaattctaaaaaccaaaagcaccctaacagaaatgaggaatg

SEQ ID NO: 98132 - DNA, 69 bp, Homo sapiens
tcttaacactcaaaagcaaattctaaaaaccaaaagcaccctaacagaaatgaggaatggcttacttag

SEQ ID NO: 98133 - DNA, 71 bp, Homo sapiens
aaagcaaattctaaaaaccaaaagcaccctaacagaaatgaggaatggcttacttagtagacagaacatga

SEQ ID NO: 98134 - DNA, 72 bp, Homo sapiens
ttctaaaaaccaaaagcaccctaacagaaatgaggaatggcttacttagtagacagaacatgacaaagcaaa

SEQ ID NO: 98135 - DNA, 73 bp, Homo sapiens
aaaagcaccctaacagaaatgaggaatggcttacttagtagacagaacatgacaaagcaaagaaccaatgaac

SEQ ID NO: 98136 - DNA, 77 bp, Homo sapiens
taacagaaatgaggaatggcttacttagtagacagaacatgacaaagcaaagaaccaatgaacttgaagatacagaa

SEQ ID NO: 98137 - DNA, 75 bp, Homo sapiens
aatgaggaatggcttacttagtagacagaacatgacaaagcaaagaaccaatgaacttgaagatacagaaactta

SEQ ID NO: 98138 - DNA, 74 bp, Homo sapiens
tggcttacttagtagacagaacatgacaaagcaaagaaccaatgaacttgaagatacagaaacttaccaaacaa

SEQ ID NO: 98139 - DNA, 72 bp, Homo sapiens
agtagacagaacatgacaaagcaaagaaccaatgaacttgaagatacagaaacttaccaaacaaaaagataa

SEQ ID NO: 98140 - DNA, 70 bp, Homo sapiens
acatgacaaagcaaagaaccaatgaacttgaagatacagaaacttaccaaacaaaaagataaagaggaaa

SEQ ID NO: 98141 - DNA, 68 bp, Homo sapiens
gcaaagaaccaatgaacttgaagatacagaaacttaccaaacaaaaagataaagaggaaaaagaaaga

SEQ ID NO: 98142 - DNA, 69 bp, Homo sapiens
caatgaacttgaagatacagaaacttaccaaacaaaaagataaagaggaaaaagaaagaacatccaaga

SEQ ID NO: 98143 - DNA, 67 bp, Homo sapiens
acttgaagatacagaaacttaccaaacaaaaagataaagaggaaaaagaaagaacatccaagaactg

SEQ ID NO: 98144 - DNA, 69 bp, Homo sapiens
cttgaagatacagaaacttaccaaacaaaaagataaagaggaaaaagaaagaacatccaagaactgtga

SEQ ID NO: 98145 - DNA, 68 bp, Homo sapiens
aagatacagaaacttaccaaacaaaaagataaagaggaaaaagaaagaacatccaagaactgtgagaa

SEQ ID NO: 98146 - DNA, 69 bp, Homo sapiens
acaaaaagataaagaggaaaaagaaagaacatccaagaactgtgagaaagtttcaaaagatgtaatgtg

SEQ ID NO: 98147 - DNA, 71 bp, Homo sapiens
gataaagaggaaaaagaaagaacatccaagaactgtgagaaagtttcaaaagatgtaatgtgtaattggaa

SEQ ID NO: 98148 - DNA, 74 bp, Homo sapiens
aagaaagaacatccaagaactgtgagaaagtttcaaaagatgtaatgtgtaattggaataccagatggagaaga

SEQ ID NO: 98149 - DNA, 74 bp, Homo sapiens
gaacatccaagaactgtgagaaagtttcaaaagatgtaatgtgtaattggaataccagatggagaagaaaaaga

SEQ ID NO: 98150 - DNA, 69 bp, Homo sapiens
aagaaaaagaaaacagtggaagaaatacttgaagtattaatggctatgaattttccaaaattaatgaca

SEQ ID NO: 98151 - DNA, 77 bp, Homo sapiens
aaaccacagatccagaaagctcagagaacaccaagcataataaataccaaatctacacccaggcatatcatatttaa

SEQ ID NO: 98152 - DNA, 79 bp, Homo sapiens
acagatccagaaagctcagagaacaccaagcataataaataccaaatctacacccaggcatatcatatttaaactgcaa

SEQ ID NO: 98153 - DNA, 77 bp, Homo sapiens
tccagaaagctcagagaacaccaagcataataaataccaaatctacacccaggcatatcatatttaaactgcaaaaa

SEQ ID NO: 98154 - DNA, 75 bp, Homo sapiens
tcagagaacaccaagcataataaataccaaatctacacccaggcatatcatatttaaactgcaaaaaaccaaaga

SEQ ID NO: 98155 - DNA, 74 bp, Homo sapiens
caccaagcataataaataccaaatctacacccaggcatatcatatttaaactgcaaaaaaccaaagagaagaga

SEQ ID NO: 98156 - DNA, 73 bp, Homo sapiens
ccaagcataataaataccaaatctacacccaggcatatcatatttaaactgcaaaaaaccaaagagaagagaa

SEQ ID NO: 98157 - DNA, 72 bp, Homo sapiens
cataataaataccaaatctacacccaggcatatcatatttaaactgcaaaaaaccaaagagaagagaaaatc

SEQ ID NO: 98158 - DNA, 71 bp, Homo sapiens
aaataccaaatctacacccaggcatatcatatttaaactgcaaaaaaccaaagagaagagaaaatcttgaa

SEQ ID NO: 98159 - DNA, 74 bp, Homo sapiens
tctacacccaggcatatcatatttaaactgcaaaaaaccaaagagaagagaaaatcttgaaagaagctagagag

SEQ ID NO: 98160 - DNA, 71 bp, Homo sapiens
ggcatatcatatttaaactgcaaaaaaccaaagagaagagaaaatcttgaaagaagctagagagggggaaa

SEQ ID NO: 98161 - DNA, 68 bp, Homo sapiens
tttaaactgcaaaaaaccaaagagaagagaaaatcttgaaagaagctagagagggggaaaagccaaca

SEQ ID NO: 98162 - DNA, 68 bp, Homo sapiens
aaaaaccaaagagaagagaaaatcttgaaagaagctagagagggggaaaagccaacaccttatccata

SEQ ID NO: 98163 - DNA, 69 bp, Homo sapiens
aatcttgaaagaagctagagagggggaaaagccaacaccttatccatagaggaaaaaggataagaatta

SEQ ID NO: 98164 - DNA, 69 bp, Homo sapiens
agaagctagagagggggaaaagccaacaccttatccatagaggaaaaaggataagaattacattatctt

SEQ ID NO: 98165 - DNA, 73 bp, Homo sapiens
aagccaacaccttatccatagaggaaaaaggataagaattacattatctttctcttcagaaaccatgcaaaca

SEQ ID NO: 98166 - DNA, 72 bp, Homo sapiens
ccttatccatagaggaaaaaggataagaattacattatctttctcttcagaaaccatgcaaacacaaagaaa

SEQ ID NO: 98167 - DNA, 74 bp, Homo sapiens
gaggaaaaaggataagaattacattatctttctcttcagaaaccatgcaaacacaaagaaaggagaatacatga

SEQ ID NO: 98168 - DNA, 77 bp, Homo sapiens
ggataagaattacattatctttctcttcagaaaccatgcaaacacaaagaaaggagaatacatgaagtgttgcaaca

SEQ ID NO: 98169 - DNA, 75 bp, Homo sapiens
tatctttctcttcagaaaccatgcaaacacaaagaaaggagaatacatgaagtgttgcaacaaaaaagctaccaa

SEQ ID NO: 98170 - DNA, 73 bp, Homo sapiens
cttcagaaaccatgcaaacacaaagaaaggagaatacatgaagtgttgcaacaaaaaagctaccaaactatta

SEQ ID NO: 98171 - DNA, 76 bp, Homo sapiens
accatgcaaacacaaagaaaggagaatacatgaagtgttgcaacaaaaaagctaccaaactattattctgcattca

SEQ ID NO: 98172 - DNA, 75 bp, Homo sapiens
caaagaaaggagaatacatgaagtgttgcaacaaaaaagctaccaaactattattctgcattcagcaaaattatc

SEQ ID NO: 98173 - DNA, 75 bp, Homo sapiens
aaggagaatacatgaagtgttgcaacaaaaaagctaccaaactattattctgcattcagcaaaattatccttcaa

SEQ ID NO: 98174 - DNA, 75 bp, Homo sapiens
catgaagtgttgcaacaaaaaagctaccaaactattattctgcattcagcaaaattatccttcaaattcaaagaa

SEQ ID NO: 98175 - DNA, 73 bp, Homo sapiens
gcaacaaaaaagctaccaaactattattctgcattcagcaaaattatccttcaaattcaaagaaataaggata

SEQ ID NO: 98176 - DNA, 74 bp, Homo sapiens
aagctaccaaactattattctgcattcagcaaaattatccttcaaattcaaagaaataaggatattttctgaca

SEQ ID NO: 98177 - DNA, 74 bp, Homo sapiens
tattattctgcattcagcaaaattatccttcaaattcaaagaaataaggatattttctgacaaacaaaactgga

SEQ ID NO: 98178 - DNA, 75 bp, Homo sapiens
tatccttcaaattcaaagaaataaggatattttctgacaaacaaaactggaataattcattgccagctgacctgc

SEQ ID NO: 98179 - DNA, 75 bp, Homo sapiens
attcaaagaaataaggatattttctgacaaacaaaactggaataattcattgccagctgacctgccctatgagaa

SEQ ID NO: 98180 - DNA, 73 bp, Homo sapiens
aaacaaaactggaataattcattgccagctgacctgccctatgagaaatgtcaaaaagaactgcataaaaaag

SEQ ID NO: 98181 - DNA, 76 bp, Homo sapiens
aataattcattgccagctgacctgccctatgagaaatgtcaaaaagaactgcataaaaaaggaagagcattagaaa

SEQ ID NO: 98182 - DNA, 74 bp, Homo sapiens
gctgacctgccctatgagaaatgtcaaaaagaactgcataaaaaaggaagagcattagaaaagtactatattaa

SEQ ID NO: 98183 - DNA, 70 bp, Homo sapiens
cctatgagaaatgtcaaaaagaactgcataaaaaaggaagagcattagaaaagtactatattaaggtaaa

SEQ ID NO: 98184 - DNA, 65 bp, Homo sapiens
gaactgcataaaaaaggaagagcattagaaaagtactatattaaggtaaaattaagttttatttt

SEQ ID NO: 98185 - DNA, 67 bp, Homo sapiens
ggaagagcattagaaaagtactatattaaggtaaaattaagttttatttttcttaactgatctgaaa

SEQ ID NO: 98186 - DNA, 67 bp, Homo sapiens
gcattagaaaagtactatattaaggtaaaattaagttttatttttcttaactgatctgaaagataac

SEQ ID NO: 98187 - DNA, 67 bp, Homo sapiens
gtactatattaaggtaaaattaagttttatttttcttaactgatctgaaagataactgtttacaata

SEQ ID NO: 98188 - DNA, 67 bp, Homo sapiens
taaggtaaaattaagttttatttttcttaactgatctgaaagataactgtttacaataatagtaaca

SEQ ID NO: 98189 - DNA, 71 bp, Homo sapiens
gttttatttttcttaactgatctgaaagataactgtttacaataatagtaacaaagtattgagtgattata

SEQ ID NO: 98190 - DNA, 78 bp, Homo sapiens
ttcttaactgatctgaaagataactgtttacaataatagtaacaaagtattgagtgattatagcatgtggataaatga

SEQ ID NO: 98191 - DNA, 77 bp, Homo sapiens
actgatctgaaagataactgtttacaataatagtaacaaagtattgagtgattatagcatgtggataaatgaaataa

SEQ ID NO: 98192 - DNA, 77 bp, Homo sapiens
caataatagtaacaaagtattgagtgattatagcatgtggataaatgaaataaaaggcagtaatgatataaacagga

SEQ ID NO: 98193 - DNA, 76 bp, Homo sapiens
gtaacaaagtattgagtgattatagcatgtggataaatgaaataaaaggcagtaatgatataaacaggaaggaaga

SEQ ID NO: 98194 - DNA, 76 bp, Homo sapiens
gtattgagtgattatagcatgtggataaatgaaataaaaggcagtaatgatataaacaggaaggaagaagtggtag

SEQ ID NO: 98195 - DNA, 75 bp, Homo sapiens
aaaaggcagtaatgatataaacaggaaggaagaagtggtagttatttgatgctagatgtagattagttatacatg

SEQ ID NO: 98196 - DNA, 72 bp, Homo sapiens
acaggaaggaagaagtggtagttatttgatgctagatgtagattagttatacatgtacttttcaaactttag

SEQ ID NO: 98197 - DNA, 73 bp, Homo sapiens
gaagaagtggtagttatttgatgctagatgtagattagttatacatgtacttttcaaactttagggcagtaac

SEQ ID NO: 98198 - DNA, 71 bp, Homo sapiens
ggtagttatttgatgctagatgtagattagttatacatgtacttttcaaactttagggcagtaactaaaaa

SEQ ID NO: 98199 - DNA, 71 bp, Homo sapiens
ttgatgctagatgtagattagttatacatgtacttttcaaactttagggcagtaactaaaaacatttttaa

SEQ ID NO: 98200 - DNA, 72 bp, Homo sapiens
ttttaaaaagaatgattaatatgctaacagaggagataaaatggaatcatataaaatgttcagttaaaccta

SEQ ID NO: 98201 - DNA, 74 bp, Homo sapiens
gaatgattaatatgctaacagaggagataaaatggaatcatataaaatgttcagttaaacctataaaaggtaga

SEQ ID NO: 98202 - DNA, 70 bp, Homo sapiens
atgctaacagaggagataaaatggaatcatataaaatgttcagttaaacctataaaaggtagaaaaagag

SEQ ID NO: 98203 - DNA, 68 bp, Homo sapiens
gaggagataaaatggaatcatataaaatgttcagttaaacctataaaaggtagaaaaagaggtgtggg

SEQ ID NO: 98204 - DNA, 68 bp, Homo sapiens
atggaatcatataaaatgttcagttaaacctataaaaggtagaaaaagaggtgtggggggaagaatca

SEQ ID NO: 98205 - DNA, 68 bp, Homo sapiens
tataaaatgttcagttaaacctataaaaggtagaaaaagaggtgtggggggaagaatcaggtgcaaca

SEQ ID NO: 98206 - DNA, 65 bp, Homo sapiens
aaacctataaaaggtagaaaaagaggtgtggggggaagaatcaggtgcaacaaatataaaagtta

SEQ ID NO: 98207 - DNA, 73 bp, Homo sapiens
agaaaaagaggtgtggggggaagaatcaggtgcaacaaatataaaagttataaatatgattgatactactgca

SEQ ID NO: 98208 - DNA, 75 bp, Homo sapiens
gaggtgtggggggaagaatcaggtgcaacaaatataaaagttataaatatgattgatactactgcagttatatta

SEQ ID NO: 98209 - DNA, 74 bp, Homo sapiens
gggaagaatcaggtgcaacaaatataaaagttataaatatgattgatactactgcagttatattaatacttagg

SEQ ID NO: 98210 - DNA, 76 bp, Homo sapiens
tcaggtgcaacaaatataaaagttataaatatgattgatactactgcagttatattaatacttaggttaaatatga

SEQ ID NO: 98211 - DNA, 75 bp, Homo sapiens
agttataaatatgattgatactactgcagttatattaatacttaggttaaatatgaatactctaaatgcaccaat

SEQ ID NO: 98212 - DNA, 77 bp, Homo sapiens
tgattgatactactgcagttatattaatacttaggttaaatatgaatactctaaatgcaccaatttaaagacagaga

SEQ ID NO: 98213 - DNA, 76 bp, Homo sapiens
gcagttatattaatacttaggttaaatatgaatactctaaatgcaccaatttaaagacagagattggcagtgtgga

SEQ ID NO: 98214 - DNA, 75 bp, Homo sapiens
taatacttaggttaaatatgaatactctaaatgcaccaatttaaagacagagattggcagtgtggattaaagaca

SEQ ID NO: 98215 - DNA, 75 bp, Homo sapiens
taggttaaatatgaatactctaaatgcaccaatttaaagacagagattggcagtgtggattaaagacaagaccca

SEQ ID NO: 98216 - DNA, 76 bp, Homo sapiens
atatgaatactctaaatgcaccaatttaaagacagagattggcagtgtggattaaagacaagacccaactacatat

SEQ ID NO: 98217 - DNA, 75 bp, Homo sapiens
taaatgcaccaatttaaagacagagattggcagtgtggattaaagacaagacccaactacatattgtctacaagg

SEQ ID NO: 98218 - DNA, 73 bp, Homo sapiens
ttaaagacagagattggcagtgtggattaaagacaagacccaactacatattgtctacaagggacctatttta

SEQ ID NO: 98219 - DNA, 71 bp, Homo sapiens
agagattggcagtgtggattaaagacaagacccaactacatattgtctacaagggacctattttaaataaa

SEQ ID NO: 98220 - DNA, 69 bp, Homo sapiens
ggcagtgtggattaaagacaagacccaactacatattgtctacaagggacctattttaaataaaaatat

SEQ ID NO: 98221 - DNA, 71 bp, Homo sapiens
taaaaatatttatacagattacaagtaaagggatggaaaaaggtacaccatgctaacactgattgaaagaa

SEQ ID NO: 98222 - DNA, 73 bp, Homo sapiens
atatttatacagattacaagtaaagggatggaaaaaggtacaccatgctaacactgattgaaagaaagccaga

SEQ ID NO: 98223 - DNA, 74 bp, Homo sapiens
tacaagtaaagggatggaaaaaggtacaccatgctaacactgattgaaagaaagccagagcagcgatgttaatt

SEQ ID NO: 98224 - DNA, 74 bp, Homo sapiens
agggatggaaaaaggtacaccatgctaacactgattgaaagaaagccagagcagcgatgttaattttatacaaa

SEQ ID NO: 98225 - DNA, 77 bp, Homo sapiens
atgctaacactgattgaaagaaagccagagcagcgatgttaattttatacaaagctgacttcagaggaaggacaatt

SEQ ID NO: 98226 - DNA, 77 bp, Homo sapiens
tgattgaaagaaagccagagcagcgatgttaattttatacaaagctgacttcagaggaaggacaattttcagggata

SEQ ID NO: 98227 - DNA, 72 bp, Homo sapiens
agcagcgatgttaattttatacaaagctgacttcagaggaaggacaattttcagggataaagaagggaatta

SEQ ID NO: 98228 - DNA, 74 bp, Homo sapiens
attttatacaaagctgacttcagaggaaggacaattttcagggataaagaagggaattacatgatgataatgtg

SEQ ID NO: 98229 - DNA, 75 bp, Homo sapiens
tacaaagctgacttcagaggaaggacaattttcagggataaagaagggaattacatgatgataatgtgggtgaat

SEQ ID NO: 98230 - DNA, 76 bp, Homo sapiens
tgacttcagaggaaggacaattttcagggataaagaagggaattacatgatgataatgtgggtgaattctctaaga

SEQ ID NO: 98231 - DNA, 74 bp, Homo sapiens
cttcagaggaaggacaattttcagggataaagaagggaattacatgatgataatgtgggtgaattctctaagaa

SEQ ID NO: 98232 - DNA, 74 bp, Homo sapiens
agaggaaggacaattttcagggataaagaagggaattacatgatgataatgtgggtgaattctctaagaagaca

SEQ ID NO: 98233 - DNA, 78 bp, Homo sapiens
gataaagaagggaattacatgatgataatgtgggtgaattctctaagaagacagcatctttaatatatgtccacctaa

SEQ ID NO: 98234 - DNA, 77 bp, Homo sapiens
agggaattacatgatgataatgtgggtgaattctctaagaagacagcatctttaatatatgtccacctaaaaactga

SEQ ID NO: 98235 - DNA, 75 bp, Homo sapiens
ggtgaattctctaagaagacagcatctttaatatatgtccacctaaaaactgagtgtcaaaaaacatgaggcaaa

SEQ ID NO: 98236 - DNA, 75 bp, Homo sapiens
ttctctaagaagacagcatctttaatatatgtccacctaaaaactgagtgtcaaaaaacatgaggcaaaaactga

SEQ ID NO: 98237 - DNA, 75 bp, Homo sapiens
gacagcatctttaatatatgtccacctaaaaactgagtgtcaaaaaacatgaggcaaaaactgatagaactacac

SEQ ID NO: 98238 - DNA, 72 bp, Homo sapiens
atatatgtccacctaaaaactgagtgtcaaaaaacatgaggcaaaaactgatagaactacacggagaaatag

SEQ ID NO: 98239 - DNA, 70 bp, Homo sapiens
tccacctaaaaactgagtgtcaaaaaacatgaggcaaaaactgatagaactacacggagaaataggtaaa

SEQ ID NO: 98240 - DNA, 72 bp, Homo sapiens
aaaacatgaggcaaaaactgatagaactacacggagaaataggtaaatacgctattacaattggagacttca

SEQ ID NO: 98241 - DNA, 70 bp, Homo sapiens
caaaaactgatagaactacacggagaaataggtaaatacgctattacaattggagacttcaacaaccctc

SEQ ID NO: 98242 - DNA, 70 bp, Homo sapiens
atagaactacacggagaaataggtaaatacgctattacaattggagacttcaacaaccctctttcagtaa

SEQ ID NO: 98243 - DNA, 74 bp, Homo sapiens
tacacggagaaataggtaaatacgctattacaattggagacttcaacaaccctctttcagtaattgatacatca

SEQ ID NO: 98244 - DNA, 75 bp, Homo sapiens
aaataggtaaatacgctattacaattggagacttcaacaaccctctttcagtaattgatacatcaagcaggcaga

SEQ ID NO: 98245 - DNA, 76 bp, Homo sapiens
atacgctattacaattggagacttcaacaaccctctttcagtaattgatacatcaagcaggcagaaaattaagaca

SEQ ID NO: 98246 - DNA, 75 bp, Homo sapiens
ttggagacttcaacaaccctctttcagtaattgatacatcaagcaggcagaaaattaagacacagttgacctaaa

SEQ ID NO: 98247 - DNA, 75 bp, Homo sapiens
ttcaacaaccctctttcagtaattgatacatcaagcaggcagaaaattaagacacagttgacctaaacggcacta

SEQ ID NO: 98248 - DNA, 77 bp, Homo sapiens
tttcagtaattgatacatcaagcaggcagaaaattaagacacagttgacctaaacggcactaccagtcaacttgatc

SEQ ID NO: 98249 - DNA, 77 bp, Homo sapiens
taattgatacatcaagcaggcagaaaattaagacacagttgacctaaacggcactaccagtcaacttgatctaatta

SEQ ID NO: 98250 - DNA, 72 bp, Homo sapiens
gaaaattaagacacagttgacctaaacggcactaccagtcaacttgatctaattaacatttatggaatactc

SEQ ID NO: 98251 - DNA, 73 bp, Homo sapiens
aagacacagttgacctaaacggcactaccagtcaacttgatctaattaacatttatggaatactctaacaaca

SEQ ID NO: 98252 - DNA, 74 bp, Homo sapiens
acctaaacggcactaccagtcaacttgatctaattaacatttatggaatactctaacaacagcagaatacacat

SEQ ID NO: 98253 - DNA, 78 bp, Homo sapiens
acacattcttcagctcacatggaagattcaccaagataagccatattctgggccacaaaacacactttaagatcctta

SEQ ID NO: 98254 - DNA, 77 bp, Homo sapiens
tcagctcacatggaagattcaccaagataagccatattctgggccacaaaacacactttaagatccttaaaagtata

SEQ ID NO: 98255 - DNA, 73 bp, Homo sapiens
acatggaagattcaccaagataagccatattctgggccacaaaacacactttaagatccttaaaagtatagaa

SEQ ID NO: 98256 - DNA, 73 bp, Homo sapiens
gccatattctgggccacaaaacacactttaagatccttaaaagtatagaaagcatacaaagtattttctcaga

SEQ ID NO: 98257 - DNA, 72 bp, Homo sapiens
ggccacaaaacacactttaagatccttaaaagtatagaaagcatacaaagtattttctcagaccacatggat

SEQ ID NO: 98258 - DNA, 71 bp, Homo sapiens
caaaacacactttaagatccttaaaagtatagaaagcatacaaagtattttctcagaccacatggatttaa

SEQ ID NO: 98259 - DNA, 71 bp, Homo sapiens
taagatccttaaaagtatagaaagcatacaaagtattttctcagaccacatggatttaaattaaaaagcca

SEQ ID NO: 98260 - DNA, 72 bp, Homo sapiens
agtatagaaagcatacaaagtattttctcagaccacatggatttaaattaaaaagccaataatagataactg

SEQ ID NO: 98261 - DNA, 73 bp, Homo sapiens
gtatagaaagcatacaaagtattttctcagaccacatggatttaaattaaaaagccaataatagataactgga

SEQ ID NO: 98262 - DNA, 73 bp, Homo sapiens
gcatacaaagtattttctcagaccacatggatttaaattaaaaagccaataatagataactggaaaatctcca

SEQ ID NO: 98263 - DNA, 70 bp, Homo sapiens
caaagtattttctcagaccacatggatttaaattaaaaagccaataatagataactggaaaatctccaaa

SEQ ID NO: 98264 - DNA, 72 bp, Homo sapiens
tttctcagaccacatggatttaaattaaaaagccaataatagataactggaaaatctccaaatatttggaga

SEQ ID NO: 98265 - DNA, 73 bp, Homo sapiens
tctcagaccacatggatttaaattaaaaagccaataatagataactggaaaatctccaaatatttggagatta

SEQ ID NO: 98266 - DNA, 70 bp, Homo sapiens
gaccacatggatttaaattaaaaagccaataatagataactggaaaatctccaaatatttggagattaaa

SEQ ID NO: 98267 - DNA, 70 bp, Homo sapiens
catggatttaaattaaaaagccaataatagataactggaaaatctccaaatatttggagattaaacaaca

SEQ ID NO: 98268 - DNA, 70 bp, Homo sapiens
aattaaaaagccaataatagataactggaaaatctccaaatatttggagattaaacaacatacttctaca

SEQ ID NO: 98269 - DNA, 72 bp, Homo sapiens
taaaaagccaataatagataactggaaaatctccaaatatttggagattaaacaacatacttctacattaga

SEQ ID NO: 98270 - DNA, 76 bp, Homo sapiens
gccaataatagataactggaaaatctccaaatatttggagattaaacaacatacttctacattagacatgagtcaa

SEQ ID NO: 98271 - DNA, 74 bp, Homo sapiens
aatctccaaatatttggagattaaacaacatacttctacattagacatgagtcaaataaaaagtctcaagagaa

SEQ ID NO: 98272 - DNA, 73 bp, Homo sapiens
ccaaatatttggagattaaacaacatacttctacattagacatgagtcaaataaaaagtctcaagagaaatta

SEQ ID NO: 98273 - DNA, 71 bp, Homo sapiens
ggagattaaacaacatacttctacattagacatgagtcaaataaaaagtctcaagagaaattaaaaaatgt

SEQ ID NO: 98274 - DNA, 71 bp, Homo sapiens
caacatacttctacattagacatgagtcaaataaaaagtctcaagagaaattaaaaaatgttttgaactaa

SEQ ID NO: 98275 - DNA, 70 bp, Homo sapiens
aaatgttttgaactaaatgaaaatacaacttattacaatttttggatgcagatagaacagtacttagagg

SEQ ID NO: 98276 - DNA, 79 bp, Homo sapiens
gaaatttatagcattgaatacatatattagaaaagaaagatccagaatcagtcactgaagcttccacctcaggagactg

SEQ ID NO: 98277 - DNA, 80 bp, Homo sapiens
tatagcattgaatacatatattagaaaagaaagatccagaatcagtcactgaagcttccacctcaggagactggagaaaa

SEQ ID NO: 98278 - DNA, 78 bp, Homo sapiens
aatacatatattagaaaagaaagatccagaatcagtcactgaagcttccacctcaggagactggagaaaatagcaata

SEQ ID NO: 98279 - DNA, 78 bp, Homo sapiens
ttagaaaagaaagatccagaatcagtcactgaagcttccacctcaggagactggagaaaatagcaatacagacctcaa

SEQ ID NO: 98280 - DNA, 81 bp, Homo sapiens
aaagatccagaatcagtcactgaagcttccacctcaggagactggagaaaatagcaatacagacctcaagcaagcagaaga

SEQ ID NO: 98281 - DNA, 80 bp, Homo sapiens
aatcagtcactgaagcttccacctcaggagactggagaaaatagcaatacagacctcaagcaagcagaagagaagaaata

SEQ ID NO: 98282 - DNA, 75 bp, Homo sapiens
aagcttccacctcaggagactggagaaaatagcaatacagacctcaagcaagcagaagagaagaaataataaaaa

SEQ ID NO: 98283 - DNA, 69 bp, Homo sapiens
gagaagaaataataaaaattagactaggaaccagtgaaattaagtacaggaaaataatagacaaaatca

SEQ ID NO: 98284 - DNA, 68 bp, Homo sapiens
ataaaaattagactaggaaccagtgaaattaagtacaggaaaataatagacaaaatcaatagaacaaa

SEQ ID NO: 98285 - DNA, 71 bp, Homo sapiens
tagactaggaaccagtgaaattaagtacaggaaaataatagacaaaatcaatagaacaaaatatcttgttc

SEQ ID NO: 98286 - DNA, 70 bp, Homo sapiens
ggaaccagtgaaattaagtacaggaaaataatagacaaaatcaatagaacaaaatatcttgttctttgaa

SEQ ID NO: 98287 - DNA, 70 bp, Homo sapiens
taagtacaggaaaataatagacaaaatcaatagaacaaaatatcttgttctttgaaaagttcaaaacatc

SEQ ID NO: 98288 - DNA, 69 bp, Homo sapiens
caggaaaataatagacaaaatcaatagaacaaaatatcttgttctttgaaaagttcaaaacatccctct

SEQ ID NO: 98289 - DNA, 70 bp, Homo sapiens
caaaatcaatagaacaaaatatcttgttctttgaaaagttcaaaacatccctctttgtcctcgtgctccc

SEQ ID NO: 98290 - DNA, 70 bp, Homo sapiens
aatagaacaaaatatcttgttctttgaaaagttcaaaacatccctctttgtcctcgtgctccccacaggc

SEQ ID NO: 98291 - DNA, 71 bp, Homo sapiens
agaacaaaatatcttgttctttgaaaagttcaaaacatccctctttgtcctcgtgctccccacaggcgctg

SEQ ID NO: 98292 - DNA, 71 bp, Homo sapiens
aaatatcttgttctttgaaaagttcaaaacatccctctttgtcctcgtgctccccacaggcgctgggagaa

SEQ ID NO: 98293 - DNA, 74 bp, Homo sapiens
gttctttgaaaagttcaaaacatccctctttgtcctcgtgctccccacaggcgctgggagaagatggatagaga

SEQ ID NO: 98294 - DNA, 72 bp, Homo sapiens
aagttcaaaacatccctctttgtcctcgtgctccccacaggcgctgggagaagatggatagagacccctccc

SEQ ID NO: 98295 - DNA, 71 bp, Homo sapiens
aaaacatccctctttgtcctcgtgctccccacaggcgctgggagaagatggatagagacccctcccggccc

SEQ ID NO: 98296 - DNA, 74 bp, Homo sapiens
atccctctttgtcctcgtgctccccacaggcgctgggagaagatggatagagacccctcccggccctcctctga

SEQ ID NO: 98297 - DNA, 76 bp, Homo sapiens
tctttgtcctcgtgctccccacaggcgctgggagaagatggatagagacccctcccggccctcctctgactgtcca

SEQ ID NO: 98298 - DNA, 73 bp, Homo sapiens
ctccccacaggcgctgggagaagatggatagagacccctcccggccctcctctgactgtccactctagggtct

SEQ ID NO: 98299 - DNA, 69 bp, Homo sapiens
tcccggccctcctctgactgtccactctagggtcttttaaacacccaccctcagaagctgggtttccaa

SEQ ID NO: 98300 - DNA, 70 bp, Homo sapiens
cctcctctgactgtccactctagggtcttttaaacacccaccctcagaagctgggtttccaacagcaccc

SEQ ID NO: 98301 - DNA, 71 bp, Homo sapiens
tcttttaaacacccaccctcagaagctgggtttccaacagcaccccttgagcggtggcacccttcatcctg

SEQ ID NO: 98302 - DNA, 72 bp, Homo sapiens
taaacacccaccctcagaagctgggtttccaacagcaccccttgagcggtggcacccttcatcctgggcttg

SEQ ID NO: 98303 - DNA, 71 bp, Homo sapiens
agaagctgggtttccaacagcaccccttgagcggtggcacccttcatcctgggcttggagaaggttatagt

SEQ ID NO: 98304 - DNA, 71 bp, Homo sapiens
tgggtttccaacagcaccccttgagcggtggcacccttcatcctgggcttggagaaggttatagttagaaa

SEQ ID NO: 98305 - DNA, 70 bp, Homo sapiens
aacagcaccccttgagcggtggcacccttcatcctgggcttggagaaggttatagttagaaagccccttc

SEQ ID NO: 98306 - DNA, 72 bp, Homo sapiens
cttgagcggtggcacccttcatcctgggcttggagaaggttatagttagaaagccccttccttgattgtgtg

SEQ ID NO: 98307 - DNA, 72 bp, Homo sapiens
ccttcatcctgggcttggagaaggttatagttagaaagccccttccttgattgtgtggctgacatctttaaa

SEQ ID NO: 98308 - DNA, 71 bp, Homo sapiens
tgggcttggagaaggttatagttagaaagccccttccttgattgtgtggctgacatctttaaaacgccagg

SEQ ID NO: 98309 - DNA, 71 bp, Homo sapiens
aaggttatagttagaaagccccttccttgattgtgtggctgacatctttaaaacgccaggtctttcagtca

SEQ ID NO: 98310 - DNA, 76 bp, Homo sapiens
ttagaaagccccttccttgattgtgtggctgacatctttaaaacgccaggtctttcagtcatctctcagagctatt

SEQ ID NO: 98311 - DNA, 75 bp, Homo sapiens
ccttccttgattgtgtggctgacatctttaaaacgccaggtctttcagtcatctctcagagctatttaaaaataa

SEQ ID NO: 98312 - DNA, 76 bp, Homo sapiens
attgtgtggctgacatctttaaaacgccaggtctttcagtcatctctcagagctatttaaaaataaaagtcacata

SEQ ID NO: 98313 - DNA, 75 bp, Homo sapiens
tgacatctttaaaacgccaggtctttcagtcatctctcagagctatttaaaaataaaagtcacatagaccacagg

SEQ ID NO: 98314 - DNA, 73 bp, Homo sapiens
ttaaaacgccaggtctttcagtcatctctcagagctatttaaaaataaaagtcacatagaccacagggttcta

SEQ ID NO: 98315 - DNA, 75 bp, Homo sapiens
gtctttcagtcatctctcagagctatttaaaaataaaagtcacatagaccacagggttctaccatctatttttga

SEQ ID NO: 98316 - DNA, 73 bp, Homo sapiens
catctctcagagctatttaaaaataaaagtcacatagaccacagggttctaccatctatttttgaaaaaggca

SEQ ID NO: 98317 - DNA, 71 bp, Homo sapiens
gagctatttaaaaataaaagtcacatagaccacagggttctaccatctatttttgaaaaaggcaaatcagc

SEQ ID NO: 98318 - DNA, 70 bp, Homo sapiens
accacagggttctaccatctatttttgaaaaaggcaaatcagcttggtgaacatataaaccctaggggca

SEQ ID NO: 98319 - DNA, 70 bp, Homo sapiens
taccatctatttttgaaaaaggcaaatcagcttggtgaacatataaaccctaggggcagccctggttatt

SEQ ID NO: 98320 - DNA, 69 bp, Homo sapiens
tatttttgaaaaaggcaaatcagcttggtgaacatataaaccctaggggcagccctggttatttccctg

SEQ ID NO: 98321 - DNA, 66 bp, Homo sapiens
aacatataaaccctaggggcagccctggttatttccctggaggaattttttccctccttcatcctg

SEQ ID NO: 98322 - DNA, 66 bp, Homo sapiens
ccctaggggcagccctggttatttccctggaggaattttttccctccttcatcctggaggaaggta

SEQ ID NO: 98323 - DNA, 65 bp, Homo sapiens
tggttatttccctggaggaattttttccctccttcatcctggaggaaggtagggacgttcccagg

SEQ ID NO: 98324 - DNA, 66 bp, Homo sapiens
aggaattttttccctccttcatcctggaggaaggtagggacgttcccagggttccctccagattca

SEQ ID NO: 98325 - DNA, 72 bp, Homo sapiens
tccttcatcctggaggaaggtagggacgttcccagggttccctccagattcacctcagtcatggggagctgg

SEQ ID NO: 98326 - DNA, 71 bp, Homo sapiens
atcctggaggaaggtagggacgttcccagggttccctccagattcacctcagtcatggggagctggtgtaa

SEQ ID NO: 98327 - DNA, 71 bp, Homo sapiens
aaggtagggacgttcccagggttccctccagattcacctcagtcatggggagctggtgtaatgccctcttg

SEQ ID NO: 98328 - DNA, 82 bp, Homo sapiens
attcacctcagtcatggggagctggtgtaatgccctcttggagacctcagaacacacaacaggatgtgactcaggactcaga

SEQ ID NO: 98329 - DNA, 82 bp, Homo sapiens
tggggagctggtgtaatgccctcttggagacctcagaacacacaacaggatgtgactcaggactcagagatgtgagtcagtt

SEQ ID NO: 98330 - DNA, 82 bp, Homo sapiens
agctggtgtaatgccctcttggagacctcagaacacacaacaggatgtgactcaggactcagagatgtgagtcagtttccag

SEQ ID NO: 98331 - DNA, 81 bp, Homo sapiens
ccctcttggagacctcagaacacacaacaggatgtgactcaggactcagagatgtgagtcagtttccagggtgatgtgtta

SEQ ID NO: 98332 - DNA, 79 bp, Homo sapiens
aacacacaacaggatgtgactcaggactcagagatgtgagtcagtttccagggtgatgtgttagggcgagccccagtgg

SEQ ID NO: 98333 - DNA, 81 bp, Homo sapiens
atgtgactcaggactcagagatgtgagtcagtttccagggtgatgtgttagggcgagccccagtggtggtttgcatctcac

SEQ ID NO: 98334 - DNA, 77 bp, Homo sapiens
agagatgtgagtcagtttccagggtgatgtgttagggcgagccccagtggtggtttgcatctcactgtctgggaccc

SEQ ID NO: 98335 - DNA, 73 bp, Homo sapiens
tttccagggtgatgtgttagggcgagccccagtggtggtttgcatctcactgtctgggacccctgggaagaaa

SEQ ID NO: 98336 - DNA, 73 bp, Homo sapiens
gggtgatgtgttagggcgagccccagtggtggtttgcatctcactgtctgggacccctgggaagaaaggccta

SEQ ID NO: 98337 - DNA, 71 bp, Homo sapiens
gttagggcgagccccagtggtggtttgcatctcactgtctgggacccctgggaagaaaggcctaggctccc

SEQ ID NO: 98338 - DNA, 71 bp, Homo sapiens
agtggtggtttgcatctcactgtctgggacccctgggaagaaaggcctaggctccccttgcagacaaaggg

SEQ ID NO: 98339 - DNA, 72 bp, Homo sapiens
tggtttgcatctcactgtctgggacccctgggaagaaaggcctaggctccccttgcagacaaagggggtgac

SEQ ID NO: 98340 - DNA, 69 bp, Homo sapiens
actgtctgggacccctgggaagaaaggcctaggctccccttgcagacaaagggggtgaccccagatgct

SEQ ID NO: 98341 - DNA, 76 bp, Homo sapiens
aagaaaggcctaggctccccttgcagacaaagggggtgaccccagatgcttcccagcatcacatctgtcagaggtg

SEQ ID NO: 98342 - DNA, 80 bp, Homo sapiens
cctaggctccccttgcagacaaagggggtgaccccagatgcttcccagcatcacatctgtcagaggtgtgtgatgtcagg

SEQ ID NO: 98343 - DNA, 78 bp, Homo sapiens
aaagggggtgaccccagatgcttcccagcatcacatctgtcagaggtgtgtgatgtcaggggcctttcagagtccctg

SEQ ID NO: 98344 - DNA, 82 bp, Homo sapiens
agatgcttcccagcatcacatctgtcagaggtgtgtgatgtcaggggcctttcagagtccctgggggtgggtgactctgctc

SEQ ID NO: 98345 - DNA, 81 bp, Homo sapiens
ttcccagcatcacatctgtcagaggtgtgtgatgtcaggggcctttcagagtccctgggggtgggtgactctgctctgaaa

SEQ ID NO: 98346 - DNA, 74 bp, Homo sapiens
gtgtgtgatgtcaggggcctttcagagtccctgggggtgggtgactctgctctgaaagggacatttccctgaaa

SEQ ID NO: 98347 - DNA, 73 bp, Homo sapiens
tttcagagtccctgggggtgggtgactctgctctgaaagggacatttccctgaaagttccactgtctttgaga

SEQ ID NO: 98348 - DNA, 73 bp, Homo sapiens
ctgggggtgggtgactctgctctgaaagggacatttccctgaaagttccactgtctttgagaagcagtgtttc

SEQ ID NO: 98349 - DNA, 76 bp, Homo sapiens
tgggtgactctgctctgaaagggacatttccctgaaagttccactgtctttgagaagcagtgtttcctctggcctc

SEQ ID NO: 98350 - DNA, 78 bp, Homo sapiens
tctgaaagggacatttccctgaaagttccactgtctttgagaagcagtgtttcctctggcctctgcagcagggagcaa

SEQ ID NO: 98351 - DNA, 76 bp, Homo sapiens
aagggacatttccctgaaagttccactgtctttgagaagcagtgtttcctctggcctctgcagcagggagcaaagc

SEQ ID NO: 98352 - DNA, 81 bp, Homo sapiens
tgaaagttccactgtctttgagaagcagtgtttcctctggcctctgcagcagggagcaaagctccggcacagcacaagtaa

SEQ ID NO: 98353 - DNA, 82 bp, Homo sapiens
tttgagaagcagtgtttcctctggcctctgcagcagggagcaaagctccggcacagcacaagtaagaagagcagtcacctat

SEQ ID NO: 98354 - DNA, 80 bp, Homo sapiens
agtgtttcctctggcctctgcagcagggagcaaagctccggcacagcacaagtaagaagagcagtcacctattcctacta

SEQ ID NO: 98355 - DNA, 79 bp, Homo sapiens
ctggcctctgcagcagggagcaaagctccggcacagcacaagtaagaagagcagtcacctattcctactacaggtaccc

SEQ ID NO: 98356 - DNA, 75 bp, Homo sapiens
agggagcaaagctccggcacagcacaagtaagaagagcagtcacctattcctactacaggtacccccaggtagca

SEQ ID NO: 98357 - DNA, 74 bp, Homo sapiens
aaagctccggcacagcacaagtaagaagagcagtcacctattcctactacaggtacccccaggtagcagacacc

SEQ ID NO: 98358 - DNA, 76 bp, Homo sapiens
agcacaagtaagaagagcagtcacctattcctactacaggtacccccaggtagcagacaccggctcagcacactgt

SEQ ID NO: 98359 - DNA, 79 bp, Homo sapiens
taagaagagcagtcacctattcctactacaggtacccccaggtagcagacaccggctcagcacactgttgctatatcat

SEQ ID NO: 98360 - DNA, 77 bp, Homo sapiens
agtcacctattcctactacaggtacccccaggtagcagacaccggctcagcacactgttgctatatcattgaaatcc

SEQ ID NO: 98361 - DNA, 83 bp, Homo sapiens
aggtacccccaggtagcagacaccggctcagcacactgttgctatatcattgaaatcccatgataacatgagtcagtcagcac

SEQ ID NO: 98362 - DNA, 89 bp, Homo sapiens
tagcagacaccggctcagcacactgttgctatatcattgaaatcccatgataacatgagtcagtcagcaccagctctggatcctggaaa

SEQ ID NO: 98363 - DNA, 85 bp, Homo sapiens
acaccggctcagcacactgttgctatatcattgaaatcccatgataacatgagtcagtcagcaccagctctggatcctggaaaaa

SEQ ID NO: 98364 - DNA, 80 bp, Homo sapiens
acactgttgctatatcattgaaatcccatgataacatgagtcagtcagcaccagctctggatcctggaaaaaagggaggt

SEQ ID NO: 98365 - DNA, 79 bp, Homo sapiens
ttgaaatcccatgataacatgagtcagtcagcaccagctctggatcctggaaaaaagggaggttgtgaaacagctccag

SEQ ID NO: 98366 - DNA, 79 bp, Homo sapiens
atgataacatgagtcagtcagcaccagctctggatcctggaaaaaagggaggttgtgaaacagctccaggatttgccaa

SEQ ID NO: 98367 - DNA, 72 bp, Homo sapiens
accagctctggatcctggaaaaaagggaggttgtgaaacagctccaggatttgccaaccgttcgtctctggc

SEQ ID NO: 98368 - DNA, 73 bp, Homo sapiens
atcctggaaaaaagggaggttgtgaaacagctccaggatttgccaaccgttcgtctctggccggctgcagaca

SEQ ID NO: 98369 - DNA, 73 bp, Homo sapiens
aaaagggaggttgtgaaacagctccaggatttgccaaccgttcgtctctggccggctgcagacatcttggtta

SEQ ID NO: 98370 - DNA, 84 bp, Homo sapiens
tgaaacagctccaggatttgccaaccgttcgtctctggccggctgcagacatcttggttagtcatgtgtagctcagatgcattc

SEQ ID NO: 98371 - DNA, 82 bp, Homo sapiens
tccaggatttgccaaccgttcgtctctggccggctgcagacatcttggttagtcatgtgtagctcagatgcattcgttgttc

SEQ ID NO: 98372 - DNA, 82 bp, Homo sapiens
atttgccaaccgttcgtctctggccggctgcagacatcttggttagtcatgtgtagctcagatgcattcgttgttccagcaa

SEQ ID NO: 98373 - DNA, 85 bp, Homo sapiens
ggctgcagacatcttggttagtcatgtgtagctcagatgcattcgttgttccagcaattactttgaagagaagcagacagaccaa

SEQ ID NO: 98374 - DNA, 82 bp, Homo sapiens
agacatcttggttagtcatgtgtagctcagatgcattcgttgttccagcaattactttgaagagaagcagacagaccaagcc

SEQ ID NO: 98375 - DNA, 80 bp, Homo sapiens
tgtagctcagatgcattcgttgttccagcaattactttgaagagaagcagacagaccaagccggggcagaaccctgcctg

SEQ ID NO: 98376 - DNA, 74 bp, Homo sapiens
ttccagcaattactttgaagagaagcagacagaccaagccggggcagaaccctgcctgggtatgctgttttaaa

SEQ ID NO: 98377 - DNA, 71 bp, Homo sapiens
aagcagacagaccaagccggggcagaaccctgcctgggtatgctgttttaaaggcctcaggttttgaggga

SEQ ID NO: 98378 - DNA, 70 bp, Homo sapiens
acagaccaagccggggcagaaccctgcctgggtatgctgttttaaaggcctcaggttttgagggatccca

SEQ ID NO: 98379 - DNA, 72 bp, Homo sapiens
gggcagaaccctgcctgggtatgctgttttaaaggcctcaggttttgagggatcccatcctcactgccgacc

SEQ ID NO: 98380 - DNA, 73 bp, Homo sapiens
aaccctgcctgggtatgctgttttaaaggcctcaggttttgagggatcccatcctcactgccgacctgccagc

SEQ ID NO: 98381 - DNA, 73 bp, Homo sapiens
gggtatgctgttttaaaggcctcaggttttgagggatcccatcctcactgccgacctgccagcctgggaggtg

SEQ ID NO: 98382 - DNA, 75 bp, Homo sapiens
aggttttgagggatcccatcctcactgccgacctgccagcctgggaggtggcaggctgcctgcgggaaggaagaa

SEQ ID NO: 98383 - DNA, 77 bp, Homo sapiens
atcccatcctcactgccgacctgccagcctgggaggtggcaggctgcctgcgggaaggaagaagggagccctgtgtc

SEQ ID NO: 98384 - DNA, 78 bp, Homo sapiens
tcactgccgacctgccagcctgggaggtggcaggctgcctgcgggaaggaagaagggagccctgtgtccgcctctcca

SEQ ID NO: 98385 - DNA, 75 bp, Homo sapiens
acctgccagcctgggaggtggcaggctgcctgcgggaaggaagaagggagccctgtgtccgcctctccaccactc

SEQ ID NO: 98386 - DNA, 74 bp, Homo sapiens
tgggaggtggcaggctgcctgcgggaaggaagaagggagccctgtgtccgcctctccaccactccctgcttccg

SEQ ID NO: 98387 - DNA, 70 bp, Homo sapiens
aggctgcctgcgggaaggaagaagggagccctgtgtccgcctctccaccactccctgcttccgggacccg

SEQ ID NO: 98388 - DNA, 72 bp, Homo sapiens
tgcgggaaggaagaagggagccctgtgtccgcctctccaccactccctgcttccgggacccgtattcatcac

SEQ ID NO: 98389 - DNA, 71 bp, Homo sapiens
aggaagaagggagccctgtgtccgcctctccaccactccctgcttccgggacccgtattcatcacctcgcc

SEQ ID NO: 98390 - DNA, 72 bp, Homo sapiens
ctctccaccactccctgcttccgggacccgtattcatcacctcgccggggaagctttgtggctttgtggtca

SEQ ID NO: 98391 - DNA, 69 bp, Homo sapiens
actccctgcttccgggacccgtattcatcacctcgccggggaagctttgtggctttgtggtcagggccc

SEQ ID NO: 98392 - DNA, 72 bp, Homo sapiens
ttccgggacccgtattcatcacctcgccggggaagctttgtggctttgtggtcagggccctgtgaatcaaga

SEQ ID NO: 98393 - DNA, 79 bp, Homo sapiens
tattcatcacctcgccggggaagctttgtggctttgtggtcagggccctgtgaatcaagaatgctggttcctcacatca

SEQ ID NO: 98394 - DNA, 74 bp, Homo sapiens
aagctttgtggctttgtggtcagggccctgtgaatcaagaatgctggttcctcacatcaggccgcccccaaccc

SEQ ID NO: 98395 - DNA, 76 bp, Homo sapiens
ttgtggctttgtggtcagggccctgtgaatcaagaatgctggttcctcacatcaggccgcccccaaccctgctggt

SEQ ID NO: 98396 - DNA, 76 bp, Homo sapiens
gtcagggccctgtgaatcaagaatgctggttcctcacatcaggccgcccccaaccctgctggttcaccctggagtc

SEQ ID NO: 98397 - DNA, 73 bp, Homo sapiens
tgaatcaagaatgctggttcctcacatcaggccgcccccaaccctgctggttcaccctggagtccttttcttt

SEQ ID NO: 98398 - DNA, 66 bp, Homo sapiens
aaccctgctggttcaccctggagtccttttcttttcaaacctctgtttcctcacctctaaaaatgg

SEQ ID NO: 98399 - DNA, 65 bp, Homo sapiens
ttcaccctggagtccttttcttttcaaacctctgtttcctcacctctaaaaatgggggtaaccag

SEQ ID NO: 98400 - DNA, 66 bp, Homo sapiens
agtccttttcttttcaaacctctgtttcctcacctctaaaaatgggggtaaccaggctcacttgcc

SEQ ID NO: 98401 - DNA, 68 bp, Homo sapiens
ttttcttttcaaacctctgtttcctcacctctaaaaatgggggtaaccaggctcacttgcctcacagg

SEQ ID NO: 98402 - DNA, 72 bp, Homo sapiens
tctgtttcctcacctctaaaaatgggggtaaccaggctcacttgcctcacaggtgtgagagttaattaatgt

SEQ ID NO: 98403 - DNA, 71 bp, Homo sapiens
ctcacctctaaaaatgggggtaaccaggctcacttgcctcacaggtgtgagagttaattaatgtttgtggg

SEQ ID NO: 98404 - DNA, 73 bp, Homo sapiens
taaaaatgggggtaaccaggctcacttgcctcacaggtgtgagagttaattaatgtttgtggggcagctttga

SEQ ID NO: 98405 - DNA, 78 bp, Homo sapiens
ggtaaccaggctcacttgcctcacaggtgtgagagttaattaatgtttgtggggcagctttgagatccacagatgaaa

SEQ ID NO: 98406 - DNA, 78 bp, Homo sapiens
acttgcctcacaggtgtgagagttaattaatgtttgtggggcagctttgagatccacagatgaaaggtgctctataaa

SEQ ID NO: 98407 - DNA, 76 bp, Homo sapiens
acaggtgtgagagttaattaatgtttgtggggcagctttgagatccacagatgaaaggtgctctataaacgcaaaa

SEQ ID NO: 98408 - DNA, 80 bp, Homo sapiens
ttaatgtttgtggggcagctttgagatccacagatgaaaggtgctctataaacgcaaaatgcaattcctcattagcactg

SEQ ID NO: 98409 - DNA, 80 bp, Homo sapiens
cagctttgagatccacagatgaaaggtgctctataaacgcaaaatgcaattcctcattagcactgtcagacggttcccag

SEQ ID NO: 98410 - DNA, 76 bp, Homo sapiens
atccacagatgaaaggtgctctataaacgcaaaatgcaattcctcattagcactgtcagacggttcccaggggaaa

SEQ ID NO: 98411 - DNA, 75 bp, Homo sapiens
atgaaaggtgctctataaacgcaaaatgcaattcctcattagcactgtcagacggttcccaggggaaacagttca

SEQ ID NO: 98412 - DNA, 75 bp, Homo sapiens
ctctataaacgcaaaatgcaattcctcattagcactgtcagacggttcccaggggaaacagttcaccctgcacca

SEQ ID NO: 98413 - DNA, 75 bp, Homo sapiens
aaaatgcaattcctcattagcactgtcagacggttcccaggggaaacagttcaccctgcaccacgaggctgctac

SEQ ID NO: 98414 - DNA, 75 bp, Homo sapiens
aattcctcattagcactgtcagacggttcccaggggaaacagttcaccctgcaccacgaggctgctaccctcagc

SEQ ID NO: 98415 - DNA, 76 bp, Homo sapiens
agacggttcccaggggaaacagttcaccctgcaccacgaggctgctaccctcagccagatgagtctgagacacgtc

SEQ ID NO: 98416 - DNA, 77 bp, Homo sapiens
gggaaacagttcaccctgcaccacgaggctgctaccctcagccagatgagtctgagacacgtctgggaaagggctac

SEQ ID NO: 98417 - DNA, 77 bp, Homo sapiens
agttcaccctgcaccacgaggctgctaccctcagccagatgagtctgagacacgtctgggaaagggctacgtattta

SEQ ID NO: 98418 - DNA, 77 bp, Homo sapiens
accacgaggctgctaccctcagccagatgagtctgagacacgtctgggaaagggctacgtatttaggcagagtgctt

SEQ ID NO: 98419 - DNA, 77 bp, Homo sapiens
aggctgctaccctcagccagatgagtctgagacacgtctgggaaagggctacgtatttaggcagagtgcttttggag

SEQ ID NO: 98420 - DNA, 74 bp, Homo sapiens
agccagatgagtctgagacacgtctgggaaagggctacgtatttaggcagagtgcttttggagggagggttcaa

SEQ ID NO: 98421 - DNA, 73 bp, Homo sapiens
atgagtctgagacacgtctgggaaagggctacgtatttaggcagagtgcttttggagggagggttcaaggata

SEQ ID NO: 98422 - DNA, 70 bp, Homo sapiens
acacgtctgggaaagggctacgtatttaggcagagtgcttttggagggagggttcaaggataggtcacta

SEQ ID NO: 98423 - DNA, 70 bp, Homo sapiens
aaagggctacgtatttaggcagagtgcttttggagggagggttcaaggataggtcactagcttccagaaa

SEQ ID NO: 98424 - DNA, 71 bp, Homo sapiens
tatttaggcagagtgcttttggagggagggttcaaggataggtcactagcttccagaaaagatgggtgttt

SEQ ID NO: 98425 - DNA, 70 bp, Homo sapiens
agagtgcttttggagggagggttcaaggataggtcactagcttccagaaaagatgggtgtttttagaaca

SEQ ID NO: 98426 - DNA, 77 bp, Homo sapiens
agcttccagaaaagatgggtgtttttagaacatgtctcattctcagttggcatcgtgtccctgaggcagagggagag

SEQ ID NO: 98427 - DNA, 77 bp, Homo sapiens
aaagatgggtgtttttagaacatgtctcattctcagttggcatcgtgtccctgaggcagagggagagtggccttcag

SEQ ID NO: 98428 - DNA, 82 bp, Homo sapiens
gtttttagaacatgtctcattctcagttggcatcgtgtccctgaggcagagggagagtggccttcagtgcacacagctggag

SEQ ID NO: 98429 - DNA, 84 bp, Homo sapiens
atgtctcattctcagttggcatcgtgtccctgaggcagagggagagtggccttcagtgcacacagctggagggaccatagttca

SEQ ID NO: 98430 - DNA, 82 bp, Homo sapiens
tctcagttggcatcgtgtccctgaggcagagggagagtggccttcagtgcacacagctggagggaccatagttcagagggaa

SEQ ID NO: 98431 - DNA, 80 bp, Homo sapiens
atcgtgtccctgaggcagagggagagtggccttcagtgcacacagctggagggaccatagttcagagggaacagaaggca

SEQ ID NO: 98432 - DNA, 78 bp, Homo sapiens
gcagagggagagtggccttcagtgcacacagctggagggaccatagttcagagggaacagaaggcaccttctggtttc

SEQ ID NO: 98433 - DNA, 79 bp, Homo sapiens
agagtggccttcagtgcacacagctggagggaccatagttcagagggaacagaaggcaccttctggtttctgctgcctc

SEQ ID NO: 98434 - DNA, 77 bp, Homo sapiens
cttcagtgcacacagctggagggaccatagttcagagggaacagaaggcaccttctggtttctgctgcctcctccct

SEQ ID NO: 98435 - DNA, 77 bp, Homo sapiens
agctggagggaccatagttcagagggaacagaaggcaccttctggtttctgctgcctcctcccttgcagacagattc

SEQ ID NO: 98436 - DNA, 77 bp, Homo sapiens
accatagttcagagggaacagaaggcaccttctggtttctgctgcctcctcccttgcagacagattctttctctgta

SEQ ID NO: 98437 - DNA, 75 bp, Homo sapiens
gagggaacagaaggcaccttctggtttctgctgcctcctcccttgcagacagattctttctctgtactttgttaa

SEQ ID NO: 98438 - DNA, 74 bp, Homo sapiens
aacagaaggcaccttctggtttctgctgcctcctcccttgcagacagattctttctctgtactttgttaaataa

SEQ ID NO: 98439 - DNA, 72 bp, Homo sapiens
accttctggtttctgctgcctcctcccttgcagacagattctttctctgtactttgttaaataaacatttgt

SEQ ID NO: 98440 - DNA, 76 bp, Homo sapiens
ctgcctcctcccttgcagacagattctttctctgtactttgttaaataaacatttgttgcagacatcttttccata

SEQ ID NO: 98441 - DNA, 76 bp, Homo sapiens
agacagattctttctctgtactttgttaaataaacatttgttgcagacatcttttccataaggatcttctgcactg

SEQ ID NO: 98442 - DNA, 79 bp, Homo sapiens
tttctctgtactttgttaaataaacatttgttgcagacatcttttccataaggatcttctgcactgtgcactttctgca

SEQ ID NO: 98443 - DNA, 78 bp, Homo sapiens
actttgttaaataaacatttgttgcagacatcttttccataaggatcttctgcactgtgcactttctgcacctctgcc

SEQ ID NO: 98444 - DNA, 78 bp, Homo sapiens
aaacatttgttgcagacatcttttccataaggatcttctgcactgtgcactttctgcacctctgccccccgtatacaa

SEQ ID NO: 98445 - DNA, 78 bp, Homo sapiens
gttgcagacatcttttccataaggatcttctgcactgtgcactttctgcacctctgccccccgtatacaactttccag

SEQ ID NO: 98446 - DNA, 76 bp, Homo sapiens
tcttttccataaggatcttctgcactgtgcactttctgcacctctgccccccgtatacaactttccaggcctgaag

SEQ ID NO: 98447 - DNA, 78 bp, Homo sapiens
aaggatcttctgcactgtgcactttctgcacctctgccccccgtatacaactttccaggcctgaaggagctctacaga

SEQ ID NO: 98448 - DNA, 76 bp, Homo sapiens
tgtgcactttctgcacctctgccccccgtatacaactttccaggcctgaaggagctctacagacaggttgggtaca

SEQ ID NO: 98449 - DNA, 72 bp, Homo sapiens
actttctgcacctctgccccccgtatacaactttccaggcctgaaggagctctacagacaggttgggtacat

SEQ ID NO: 98450 - DNA, 74 bp, Homo sapiens
ctctgccccccgtatacaactttccaggcctgaaggagctctacagacaggttgggtacattcctgcaacacca

SEQ ID NO: 98451 - DNA, 80 bp, Homo sapiens
tttccaggcctgaaggagctctacagacaggttgggtacattcctgcaacaccagcacatcatggatgtttagattcttc

SEQ ID NO: 98452 - DNA, 78 bp, Homo sapiens
tacagacaggttgggtacattcctgcaacaccagcacatcatggatgtttagattcttctatggccaccctatttatt

SEQ ID NO: 98453 - DNA, 76 bp, Homo sapiens
ggttgggtacattcctgcaacaccagcacatcatggatgtttagattcttctatggccaccctatttatttccttc

SEQ ID NO: 98454 - DNA, 78 bp, Homo sapiens
attcctgcaacaccagcacatcatggatgtttagattcttctatggccaccctatttatttccttccactcctccatg

SEQ ID NO: 98455 - DNA, 76 bp, Homo sapiens
accagcacatcatggatgtttagattcttctatggccaccctatttatttccttccactcctccatgtccttcttc

SEQ ID NO: 98456 - DNA, 73 bp, Homo sapiens
atggatgtttagattcttctatggccaccctatttatttccttccactcctccatgtccttcttctccaggag

SEQ ID NO: 98457 - DNA, 71 bp, Homo sapiens
ttagattcttctatggccaccctatttatttccttccactcctccatgtccttcttctccaggagggtaaa

SEQ ID NO: 98458 - DNA, 70 bp, Homo sapiens
tatggccaccctatttatttccttccactcctccatgtccttcttctccaggagggtaaagacaactttc

SEQ ID NO: 98459 - DNA, 70 bp, Homo sapiens
atttatttccttccactcctccatgtccttcttctccaggagggtaaagacaactttctgctcccttcta

SEQ ID NO: 98460 - DNA, 70 bp, Homo sapiens
ttcttctccaggagggtaaagacaactttctgctcccttctactcctctggcacctttgccccgcttagt

SEQ ID NO: 98461 - DNA, 68 bp, Homo sapiens
agggtaaagacaactttctgctcccttctactcctctggcacctttgccccgcttagttccttgaaaa

SEQ ID NO: 98462 - DNA, 72 bp, Homo sapiens
actttctgctcccttctactcctctggcacctttgccccgcttagttccttgaaaaacatgagccagaaata

SEQ ID NO: 98463 - DNA, 73 bp, Homo sapiens
tcccttctactcctctggcacctttgccccgcttagttccttgaaaaacatgagccagaaatattgtgttgag

SEQ ID NO: 98464 - DNA, 75 bp, Homo sapiens
acctttgccccgcttagttccttgaaaaacatgagccagaaatattgtgttgagggctgggatatctcaagcagc

SEQ ID NO: 98465 - DNA, 79 bp, Homo sapiens
ttgaaaaacatgagccagaaatattgtgttgagggctgggatatctcaagcagcctccatcctgagactggacccttgg

SEQ ID NO: 98466 - DNA, 80 bp, Homo sapiens
aacatgagccagaaatattgtgttgagggctgggatatctcaagcagcctccatcctgagactggacccttggtggagaa

SEQ ID NO: 98467 - DNA, 80 bp, Homo sapiens
aaatattgtgttgagggctgggatatctcaagcagcctccatcctgagactggacccttggtggagaatgaggatactca

SEQ ID NO: 98468 - DNA, 78 bp, Homo sapiens
agggctgggatatctcaagcagcctccatcctgagactggacccttggtggagaatgaggatactcactccagtaaaa

SEQ ID NO: 98469 - DNA, 80 bp, Homo sapiens
atatctcaagcagcctccatcctgagactggacccttggtggagaatgaggatactcactccagtaaaacaaatcactga

SEQ ID NO: 98470 - DNA, 77 bp, Homo sapiens
agcctccatcctgagactggacccttggtggagaatgaggatactcactccagtaaaacaaatcactgacacctcaa

SEQ ID NO: 98471 - DNA, 76 bp, Homo sapiens
atcctgagactggacccttggtggagaatgaggatactcactccagtaaaacaaatcactgacacctcaagtggga

SEQ ID NO: 98472 - DNA, 74 bp, Homo sapiens
acccttggtggagaatgaggatactcactccagtaaaacaaatcactgacacctcaagtgggagctgggaagct

SEQ ID NO: 98473 - DNA, 79 bp, Homo sapiens
tggagaatgaggatactcactccagtaaaacaaatcactgacacctcaagtgggagctgggaagcttcaagcagaagag

SEQ ID NO: 98474 - DNA, 80 bp, Homo sapiens
aggatactcactccagtaaaacaaatcactgacacctcaagtgggagctgggaagcttcaagcagaagaggcacagcatc

SEQ ID NO: 98475 - DNA, 79 bp, Homo sapiens
actccagtaaaacaaatcactgacacctcaagtgggagctgggaagcttcaagcagaagaggcacagcatctcccagga

SEQ ID NO: 98476 - DNA, 83 bp, Homo sapiens
aaatcactgacacctcaagtgggagctgggaagcttcaagcagaagaggcacagcatctcccaggactgcacacagctaaaga

SEQ ID NO: 98477 - DNA, 80 bp, Homo sapiens
acctcaagtgggagctgggaagcttcaagcagaagaggcacagcatctcccaggactgcacacagctaaagaaacagaat

SEQ ID NO: 98478 - DNA, 80 bp, Homo sapiens
aagcttcaagcagaagaggcacagcatctcccaggactgcacacagctaaagaaacagaattttctgaagaacactccat

SEQ ID NO: 98479 - DNA, 82 bp, Homo sapiens
caggactgcacacagctaaagaaacagaattttctgaagaacactccattgaggtggcacctgatatcaagaggattgtgca

SEQ ID NO: 98480 - DNA, 81 bp, Homo sapiens
cacagctaaagaaacagaattttctgaagaacactccattgaggtggcacctgatatcaagaggattgtgcacgcttgata

SEQ ID NO: 98481 - DNA, 81 bp, Homo sapiens
agaaacagaattttctgaagaacactccattgaggtggcacctgatatcaagaggattgtgcacgcttgatagtctatgct

SEQ ID NO: 98482 - DNA, 81 bp, Homo sapiens
aattttctgaagaacactccattgaggtggcacctgatatcaagaggattgtgcacgcttgatagtctatgcttggaaggc

SEQ ID NO: 98483 - DNA, 80 bp, Homo sapiens
aagaacactccattgaggtggcacctgatatcaagaggattgtgcacgcttgatagtctatgcttggaaggcctgggttg

SEQ ID NO: 98484 - DNA, 82 bp, Homo sapiens
attgaggtggcacctgatatcaagaggattgtgcacgcttgatagtctatgcttggaaggcctgggttgggagactgtcatc

SEQ ID NO: 98485 - DNA, 82 bp, Homo sapiens
acctgatatcaagaggattgtgcacgcttgatagtctatgcttggaaggcctgggttgggagactgtcatctccaacctgca

SEQ ID NO: 98486 - DNA, 81 bp, Homo sapiens
atcaagaggattgtgcacgcttgatagtctatgcttggaaggcctgggttgggagactgtcatctccaacctgcagtccag

SEQ ID NO: 98487 - DNA, 83 bp, Homo sapiens
ttgtgcacgcttgatagtctatgcttggaaggcctgggttgggagactgtcatctccaacctgcagtccaggctgggcatgga

SEQ ID NO: 98488 - DNA, 79 bp, Homo sapiens
ttgatagtctatgcttggaaggcctgggttgggagactgtcatctccaacctgcagtccaggctgggcatggaaggccg

SEQ ID NO: 98489 - DNA, 78 bp, Homo sapiens
atgcttggaaggcctgggttgggagactgtcatctccaacctgcagtccaggctgggcatggaaggccgtgctttaca

SEQ ID NO: 98490 - DNA, 79 bp, Homo sapiens
ctgggttgggagactgtcatctccaacctgcagtccaggctgggcatggaaggccgtgctttacagccaatctccactg

SEQ ID NO: 98491 - DNA, 80 bp, Homo sapiens
atctccaacctgcagtccaggctgggcatggaaggccgtgctttacagccaatctccactgtgctgatgaggggccggtg

SEQ ID NO: 98492 - DNA, 78 bp, Homo sapiens
gtccaggctgggcatggaaggccgtgctttacagccaatctccactgtgctgatgaggggccggtgggatttcctaga

SEQ ID NO: 98493 - DNA, 78 bp, Homo sapiens
tgggcatggaaggccgtgctttacagccaatctccactgtgctgatgaggggccggtgggatttcctagagaggcacc

SEQ ID NO: 98494 - DNA, 80 bp, Homo sapiens
tttacagccaatctccactgtgctgatgaggggccggtgggatttcctagagaggcacctgtgatatctctggctaaaca

SEQ ID NO: 98495 - DNA, 80 bp, Homo sapiens
tctccactgtgctgatgaggggccggtgggatttcctagagaggcacctgtgatatctctggctaaacagatacagttaa

SEQ ID NO: 98496 - DNA, 80 bp, Homo sapiens
ccggtgggatttcctagagaggcacctgtgatatctctggctaaacagatacagttaagagctgtcgctggggcagatca

SEQ ID NO: 98497 - DNA, 81 bp, Homo sapiens
tttcctagagaggcacctgtgatatctctggctaaacagatacagttaagagctgtcgctggggcagatcatgttaagtaa

SEQ ID NO: 98498 - DNA, 83 bp, Homo sapiens
aggcacctgtgatatctctggctaaacagatacagttaagagctgtcgctggggcagatcatgttaagtaacatggctgagat

SEQ ID NO: 98499 - DNA, 81 bp, Homo sapiens
atatctctggctaaacagatacagttaagagctgtcgctggggcagatcatgttaagtaacatggctgagatttgccaggg

SEQ ID NO: 98500 - DNA, 80 bp, Homo sapiens
ctaaacagatacagttaagagctgtcgctggggcagatcatgttaagtaacatggctgagatttgccagggtccatgtaa

SEQ ID NO: 98501 - DNA, 81 bp, Homo sapiens
agatacagttaagagctgtcgctggggcagatcatgttaagtaacatggctgagatttgccagggtccatgtaatgcctta

SEQ ID NO: 98502 - DNA, 83 bp, Homo sapiens
taagagctgtcgctggggcagatcatgttaagtaacatggctgagatttgccagggtccatgtaatgccttagggtgtcagca

SEQ ID NO: 98503 - DNA, 79 bp, Homo sapiens
gggcagatcatgttaagtaacatggctgagatttgccagggtccatgtaatgccttagggtgtcagcacgcaagaaaaa

SEQ ID NO: 98504 - DNA, 76 bp, Homo sapiens
atcatgttaagtaacatggctgagatttgccagggtccatgtaatgccttagggtgtcagcacgcaagaaaaaaaa

SEQ ID NO: 98505 - DNA, 69 bp, Homo sapiens
aaaaaaaagaagtgactttacgtctgggactgcagaggctacaaaatgatgaaccccctaacctatgag

SEQ ID NO: 98506 - DNA, 73 bp, Homo sapiens
aagaagtgactttacgtctgggactgcagaggctacaaaatgatgaaccccctaacctatgagttgtcgatat

SEQ ID NO: 98507 - DNA, 75 bp, Homo sapiens
tttacgtctgggactgcagaggctacaaaatgatgaaccccctaacctatgagttgtcgatattggagaatacga

SEQ ID NO: 98508 - DNA, 77 bp, Homo sapiens
actgcagaggctacaaaatgatgaaccccctaacctatgagttgtcgatattggagaatacgatgcttttgagccca

SEQ ID NO: 98509 - DNA, 77 bp, Homo sapiens
aggctacaaaatgatgaaccccctaacctatgagttgtcgatattggagaatacgatgcttttgagcccagctcaga

SEQ ID NO: 98510 - DNA, 80 bp, Homo sapiens
atgatgaaccccctaacctatgagttgtcgatattggagaatacgatgcttttgagcccagctcagatggagatctgttc

SEQ ID NO: 98511 - DNA, 81 bp, Homo sapiens
cctaacctatgagttgtcgatattggagaatacgatgcttttgagcccagctcagatggagatctgttccacacaggtgtg

SEQ ID NO: 98512 - DNA, 85 bp, Homo sapiens
atattggagaatacgatgcttttgagcccagctcagatggagatctgttccacacaggtgtgtgtcatgccagtttgcagcctgg

SEQ ID NO: 98513 - DNA, 85 bp, Homo sapiens
atacgatgcttttgagcccagctcagatggagatctgttccacacaggtgtgtgtcatgccagtttgcagcctgggcttcctctg

SEQ ID NO: 98514 - DNA, 84 bp, Homo sapiens
tttgagcccagctcagatggagatctgttccacacaggtgtgtgtcatgccagtttgcagcctgggcttcctctggtgactacc

SEQ ID NO: 98515 - DNA, 84 bp, Homo sapiens
ctcagatggagatctgttccacacaggtgtgtgtcatgccagtttgcagcctgggcttcctctggtgactaccccatccatctc

SEQ ID NO: 98516 - DNA, 84 bp, Homo sapiens
agatctgttccacacaggtgtgtgtcatgccagtttgcagcctgggcttcctctggtgactaccccatccatctctgccactgc

SEQ ID NO: 98517 - DNA, 83 bp, Homo sapiens
tgttccacacaggtgtgtgtcatgccagtttgcagcctgggcttcctctggtgactaccccatccatctctgccactgcccca

SEQ ID NO: 98518 - DNA, 83 bp, Homo sapiens
acaggtgtgtgtcatgccagtttgcagcctgggcttcctctggtgactaccccatccatctctgccactgccccagctctctg

SEQ ID NO: 98519 - DNA, 85 bp, Homo sapiens
tgtgtgtcatgccagtttgcagcctgggcttcctctggtgactaccccatccatctctgccactgccccagctctctgtgcccaa

SEQ ID NO: 98520 - DNA, 84 bp, Homo sapiens
tgtgtcatgccagtttgcagcctgggcttcctctggtgactaccccatccatctctgccactgccccagctctctgtgcccaag

SEQ ID NO: 98521 - DNA, 82 bp, Homo sapiens
cctgggcttcctctggtgactaccccatccatctctgccactgccccagctctctgtgcccaagtgctgtccctgagccaga

SEQ ID NO: 98522 - DNA, 83 bp, Homo sapiens
gcttcctctggtgactaccccatccatctctgccactgccccagctctctgtgcccaagtgctgtccctgagccagacctctg

SEQ ID NO: 98523 - DNA, 82 bp, Homo sapiens
ttcctctggtgactaccccatccatctctgccactgccccagctctctgtgcccaagtgctgtccctgagccagacctctgg

SEQ ID NO: 98524 - DNA, 83 bp, Homo sapiens
tggtgactaccccatccatctctgccactgccccagctctctgtgcccaagtgctgtccctgagccagacctctggtgggaga

SEQ ID NO: 98525 - DNA, 82 bp, Homo sapiens
gtgactaccccatccatctctgccactgccccagctctctgtgcccaagtgctgtccctgagccagacctctggtgggagag

SEQ ID NO: 98526 - DNA, 80 bp, Homo sapiens
atccatctctgccactgccccagctctctgtgcccaagtgctgtccctgagccagacctctggtgggagaggccgagggg

SEQ ID NO: 98527 - DNA, 81 bp, Homo sapiens
agctctctgtgcccaagtgctgtccctgagccagacctctggtgggagaggccgagggggcatggagcagtgatctcaaaa

SEQ ID NO: 98528 - DNA, 79 bp, Homo sapiens
caagtgctgtccctgagccagacctctggtgggagaggccgagggggcatggagcagtgatctcaaaagccttcctctc

SEQ ID NO: 98529 - DNA, 78 bp, Homo sapiens
tccctgagccagacctctggtgggagaggccgagggggcatggagcagtgatctcaaaagccttcctctctacacaaa

SEQ ID NO: 98530 - DNA, 72 bp, Homo sapiens
tgggagaggccgagggggcatggagcagtgatctcaaaagccttcctctctacacaaacccaaccacgggtt

SEQ ID NO: 98531 - DNA, 75 bp, Homo sapiens
atggagcagtgatctcaaaagccttcctctctacacaaacccaaccacgggtttctcagtgggcattctcctagc

SEQ ID NO: 98532 - DNA, 74 bp, Homo sapiens
atctcaaaagccttcctctctacacaaacccaaccacgggtttctcagtgggcattctcctagctgcagcctta

SEQ ID NO: 98533 - DNA, 71 bp, Homo sapiens
cttcctctctacacaaacccaaccacgggtttctcagtgggcattctcctagctgcagccttagtttttac

SEQ ID NO: 98534 - DNA, 73 bp, Homo sapiens
tctctacacaaacccaaccacgggtttctcagtgggcattctcctagctgcagccttagtttttactttggca

SEQ ID NO: 98535 - DNA, 73 bp, Homo sapiens
tttctcagtgggcattctcctagctgcagccttagtttttactttggcacttttttgatgttgtaaaatgtta

SEQ ID NO: 98536 - DNA, 73 bp, Homo sapiens
gcattctcctagctgcagccttagtttttactttggcacttttttgatgttgtaaaatgttagaactgtttga

SEQ ID NO: 98537 - DNA, 70 bp, Homo sapiens
ctcctagctgcagccttagtttttactttggcacttttttgatgttgtaaaatgttagaactgtttgaaa

SEQ ID NO: 98538 - DNA, 67 bp, Homo sapiens
cagccttagtttttactttggcacttttttgatgttgtaaaatgttagaactgtttgaaaaattcta

SEQ ID NO: 98539 - DNA, 72 bp, Homo sapiens
ctttggcacttttttgatgttgtaaaatgttagaactgtttgaaaaattctagagtggcttgaagcccagca

SEQ ID NO: 98540 - DNA, 74 bp, Homo sapiens
tttttgatgttgtaaaatgttagaactgtttgaaaaattctagagtggcttgaagcccagcaagcagtctctgt

SEQ ID NO: 98541 - DNA, 79 bp, Homo sapiens
aatgttagaactgtttgaaaaattctagagtggcttgaagcccagcaagcagtctctgttgtcttctgcttccatatga

SEQ ID NO: 98542 - DNA, 80 bp, Homo sapiens
tgtttgaaaaattctagagtggcttgaagcccagcaagcagtctctgttgtcttctgcttccatatgacatgggccctaa

SEQ ID NO: 98543 - DNA, 82 bp, Homo sapiens
ttgaagcccagcaagcagtctctgttgtcttctgcttccatatgacatgggccctaaggcaggcttattggattttatgcca

SEQ ID NO: 98544 - DNA, 80 bp, Homo sapiens
agcaagcagtctctgttgtcttctgcttccatatgacatgggccctaaggcaggcttattggattttatgccagggattc

SEQ ID NO: 98545 - DNA, 77 bp, Homo sapiens
ttctgcttccatatgacatgggccctaaggcaggcttattggattttatgccagggattctggttttaagcagcaaa

SEQ ID NO: 98546 - DNA, 77 bp, Homo sapiens
tccatatgacatgggccctaaggcaggcttattggattttatgccagggattctggttttaagcagcaaactctgag

SEQ ID NO: 98547 - DNA, 76 bp, Homo sapiens
ccctaaggcaggcttattggattttatgccagggattctggttttaagcagcaaactctgaggcatggcattctaa

SEQ ID NO: 98548 - DNA, 77 bp, Homo sapiens
aggcttattggattttatgccagggattctggttttaagcagcaaactctgaggcatggcattctaataaaatcaga

SEQ ID NO: 98549 - DNA, 76 bp, Homo sapiens
agggattctggttttaagcagcaaactctgaggcatggcattctaataaaatcagaagaaaaactcatatgaatgg

SEQ ID NO: 98550 - DNA, 75 bp, Homo sapiens
tggttttaagcagcaaactctgaggcatggcattctaataaaatcagaagaaaaactcatatgaatgggggaaaa

SEQ ID NO: 98551 - DNA, 75 bp, Homo sapiens
agcaaactctgaggcatggcattctaataaaatcagaagaaaaactcatatgaatgggggaaaaggagaattcaa

SEQ ID NO: 98552 - DNA, 74 bp, Homo sapiens
ctctgaggcatggcattctaataaaatcagaagaaaaactcatatgaatgggggaaaaggagaattcaaaacaa

SEQ ID NO: 98553 - DNA, 72 bp, Homo sapiens
ggcattctaataaaatcagaagaaaaactcatatgaatgggggaaaaggagaattcaaaacaataaacatga

SEQ ID NO: 98554 - DNA, 72 bp, Homo sapiens
atcagaagaaaaactcatatgaatgggggaaaaggagaattcaaaacaataaacatgaaatatggcttaaca

SEQ ID NO: 98555 - DNA, 72 bp, Homo sapiens
aaactcatatgaatgggggaaaaggagaattcaaaacaataaacatgaaatatggcttaacataaagatgct

SEQ ID NO: 98556 - DNA, 70 bp, Homo sapiens
gaatgggggaaaaggagaattcaaaacaataaacatgaaatatggcttaacataaagatgcttttgtttg

SEQ ID NO: 98557 - DNA, 71 bp, Homo sapiens
gaaaaggagaattcaaaacaataaacatgaaatatggcttaacataaagatgcttttgtttgttctggccc

SEQ ID NO: 98558 - DNA, 72 bp, Homo sapiens
tcaaaacaataaacatgaaatatggcttaacataaagatgcttttgtttgttctggccccaaacattttcag

SEQ ID NO: 98559 - DNA, 71 bp, Homo sapiens
aaacatgaaatatggcttaacataaagatgcttttgtttgttctggccccaaacattttcaggatttggga

SEQ ID NO: 98560 - DNA, 70 bp, Homo sapiens
aaatatggcttaacataaagatgcttttgtttgttctggccccaaacattttcaggatttgggaacctca

SEQ ID NO: 98561 - DNA, 71 bp, Homo sapiens
aaacattttcaggatttgggaacctcatcccagagctgtctctctaaaagccaaaagggcttcagtaagga

SEQ ID NO: 98562 - DNA, 73 bp, Homo sapiens
tttcaggatttgggaacctcatcccagagctgtctctctaaaagccaaaagggcttcagtaaggatacaataa

SEQ ID NO: 98563 - DNA, 77 bp, Homo sapiens
cagagctgtctctctaaaagccaaaagggcttcagtaaggatacaataagggcatagttctgcagtctgagaggtaa

SEQ ID NO: 98564 - DNA, 73 bp, Homo sapiens
aaaagccaaaagggcttcagtaaggatacaataagggcatagttctgcagtctgagaggtaaggacagagacc

SEQ ID NO: 98565 - DNA, 75 bp, Homo sapiens
agggcttcagtaaggatacaataagggcatagttctgcagtctgagaggtaaggacagagaccctagcttggccc

SEQ ID NO: 98566 - DNA, 81 bp, Homo sapiens
taagggcatagttctgcagtctgagaggtaaggacagagaccctagcttggcccctcactcacagtgtgctgaagcaagta

SEQ ID NO: 98567 - DNA, 78 bp, Homo sapiens
agttctgcagtctgagaggtaaggacagagaccctagcttggcccctcactcacagtgtgctgaagcaagtaacttaa

SEQ ID NO: 98568 - DNA, 76 bp, Homo sapiens
agaggtaaggacagagaccctagcttggcccctcactcacagtgtgctgaagcaagtaacttaatgccttggagac

SEQ ID NO: 98569 - DNA, 76 bp, Homo sapiens
aaggacagagaccctagcttggcccctcactcacagtgtgctgaagcaagtaacttaatgccttggagactcagtt

SEQ ID NO: 98570 - DNA, 76 bp, Homo sapiens
tagcttggcccctcactcacagtgtgctgaagcaagtaacttaatgccttggagactcagtttccccccataagga

SEQ ID NO: 98571 - DNA, 79 bp, Homo sapiens
ctcactcacagtgtgctgaagcaagtaacttaatgccttggagactcagtttccccccataaggagatgttattgcatc

SEQ ID NO: 98572 - DNA, 73 bp, Homo sapiens
aagcaagtaacttaatgccttggagactcagtttccccccataaggagatgttattgcatctgtcccttagat

SEQ ID NO: 98573 - DNA, 74 bp, Homo sapiens
taacttaatgccttggagactcagtttccccccataaggagatgttattgcatctgtcccttagattcctggga

SEQ ID NO: 98574 - DNA, 73 bp, Homo sapiens
cttggagactcagtttccccccataaggagatgttattgcatctgtcccttagattcctgggagggtgaaatg

SEQ ID NO: 98575 - DNA, 79 bp, Homo sapiens
ataaggagatgttattgcatctgtcccttagattcctgggagggtgaaatgtgcccctctgcccgatattgtcaatgca

SEQ ID NO: 98576 - DNA, 81 bp, Homo sapiens
atgttattgcatctgtcccttagattcctgggagggtgaaatgtgcccctctgcccgatattgtcaatgcagtagctggca

SEQ ID NO: 98577 - DNA, 78 bp, Homo sapiens
atctgtcccttagattcctgggagggtgaaatgtgcccctctgcccgatattgtcaatgcagtagctggcaccttgaa

SEQ ID NO: 98578 - DNA, 78 bp, Homo sapiens
ttagattcctgggagggtgaaatgtgcccctctgcccgatattgtcaatgcagtagctggcaccttgaaggcaggaaa

SEQ ID NO: 98579 - DNA, 78 bp, Homo sapiens
tctgcccgatattgtcaatgcagtagctggcaccttgaaggcaggaaacagtcttctctcccctgcccttccaggaaa

SEQ ID NO: 98580 - DNA, 74 bp, Homo sapiens
agtagctggcaccttgaaggcaggaaacagtcttctctcccctgcccttccaggaaaggataacagtgtctgga

SEQ ID NO: 98581 - DNA, 73 bp, Homo sapiens
cttgaaggcaggaaacagtcttctctcccctgcccttccaggaaaggataacagtgtctggagagtactgttg

SEQ ID NO: 98582 - DNA, 72 bp, Homo sapiens
aaacagtcttctctcccctgcccttccaggaaaggataacagtgtctggagagtactgttggcttagctggt

SEQ ID NO: 98583 - DNA, 75 bp, Homo sapiens
ttctctcccctgcccttccaggaaaggataacagtgtctggagagtactgttggcttagctggttgttgctccag

SEQ ID NO: 98584 - DNA, 74 bp, Homo sapiens
cccttccaggaaaggataacagtgtctggagagtactgttggcttagctggttgttgctccaggtaacagaaga

SEQ ID NO: 98585 - DNA, 76 bp, Homo sapiens
agtgtctggagagtactgttggcttagctggttgttgctccaggtaacagaagagggagaggcttggtctcacaaa

SEQ ID NO: 98586 - DNA, 76 bp, Homo sapiens
agagtactgttggcttagctggttgttgctccaggtaacagaagagggagaggcttggtctcacaaagccaccaga

SEQ ID NO: 98587 - DNA, 77 bp, Homo sapiens
ctgttggcttagctggttgttgctccaggtaacagaagagggagaggcttggtctcacaaagccaccagaaatgaga

SEQ ID NO: 98588 - DNA, 75 bp, Homo sapiens
caggtaacagaagagggagaggcttggtctcacaaagccaccagaaatgagaccttccttaggcagccagagttc

SEQ ID NO: 98589 - DNA, 74 bp, Homo sapiens
aacagaagagggagaggcttggtctcacaaagccaccagaaatgagaccttccttaggcagccagagttccaag

SEQ ID NO: 98590 - DNA, 77 bp, Homo sapiens
agaggcttggtctcacaaagccaccagaaatgagaccttccttaggcagccagagttccaaggtgcactattccagc

SEQ ID NO: 98591 - DNA, 80 bp, Homo sapiens
tctcacaaagccaccagaaatgagaccttccttaggcagccagagttccaaggtgcactattccagcggggtagcatgca

SEQ ID NO: 98592 - DNA, 79 bp, Homo sapiens
ttaggcagccagagttccaaggtgcactattccagcggggtagcatgcaccgctaggatgcaacataagcccttcctcc

SEQ ID NO: 98593 - DNA, 83 bp, Homo sapiens
ccagagttccaaggtgcactattccagcggggtagcatgcaccgctaggatgcaacataagcccttcctcctgcagagcagca

SEQ ID NO: 98594 - DNA, 82 bp, Homo sapiens
aaggtgcactattccagcggggtagcatgcaccgctaggatgcaacataagcccttcctcctgcagagcagcagcctcctcc

SEQ ID NO: 98595 - DNA, 83 bp, Homo sapiens
tattccagcggggtagcatgcaccgctaggatgcaacataagcccttcctcctgcagagcagcagcctcctccttcacaagga

SEQ ID NO: 98596 - DNA, 85 bp, Homo sapiens
gggtagcatgcaccgctaggatgcaacataagcccttcctcctgcagagcagcagcctcctccttcacaaggagcaccatagcca

SEQ ID NO: 98597 - DNA, 84 bp, Homo sapiens
ctaggatgcaacataagcccttcctcctgcagagcagcagcctcctccttcacaaggagcaccatagccaccctgcagaacaca

SEQ ID NO: 98598 - DNA, 84 bp, Homo sapiens
aacataagcccttcctcctgcagagcagcagcctcctccttcacaaggagcaccatagccaccctgcagaacacagctgcgtca

SEQ ID NO: 98599 - DNA, 87 bp, Homo sapiens
ttcctcctgcagagcagcagcctcctccttcacaaggagcaccatagccaccctgcagaacacagctgcgtcagggcctcacagcag

SEQ ID NO: 98600 - DNA, 86 bp, Homo sapiens
agagcagcagcctcctccttcacaaggagcaccatagccaccctgcagaacacagctgcgtcagggcctcacagcagtgttgcacc

SEQ ID NO: 98601 - DNA, 84 bp, Homo sapiens
agcctcctccttcacaaggagcaccatagccaccctgcagaacacagctgcgtcagggcctcacagcagtgttgcaccgtgcca

SEQ ID NO: 98602 - DNA, 87 bp, Homo sapiens
ttcacaaggagcaccatagccaccctgcagaacacagctgcgtcagggcctcacagcagtgttgcaccgtgccagccacaacacaga

SEQ ID NO: 98603 - DNA, 86 bp, Homo sapiens
agcaccatagccaccctgcagaacacagctgcgtcagggcctcacagcagtgttgcaccgtgccagccacaacacagattctgaaa

SEQ ID NO: 98604 - DNA, 85 bp, Homo sapiens
accctgcagaacacagctgcgtcagggcctcacagcagtgttgcaccgtgccagccacaacacagattctgaaagctgcatttta

SEQ ID NO: 98605 - DNA, 82 bp, Homo sapiens
acagcagtgttgcaccgtgccagccacaacacagattctgaaagctgcattttacaaatcgaggattcactgctctttgtct

SEQ ID NO: 98606 - DNA, 82 bp, Homo sapiens
agtgttgcaccgtgccagccacaacacagattctgaaagctgcattttacaaatcgaggattcactgctctttgtcttgtga

SEQ ID NO: 98607 - DNA, 77 bp, Homo sapiens
aaagctgcattttacaaatcgaggattcactgctctttgtcttgtgaagtgtgacccacaatgaatggcaaccgttc

SEQ ID NO: 98608 - DNA, 75 bp, Homo sapiens
tttacaaatcgaggattcactgctctttgtcttgtgaagtgtgacccacaatgaatggcaaccgttctttcttta

SEQ ID NO: 98609 - DNA, 78 bp, Homo sapiens
ttcactgctctttgtcttgtgaagtgtgacccacaatgaatggcaaccgttctttctttaagagcttccattccatgc

SEQ ID NO: 98610 - DNA, 76 bp, Homo sapiens
tcttgtgaagtgtgacccacaatgaatggcaaccgttctttctttaagagcttccattccatgctcccaatttgaa

SEQ ID NO: 98611 - DNA, 74 bp, Homo sapiens
aagtgtgacccacaatgaatggcaaccgttctttctttaagagcttccattccatgctcccaatttgaaggata

SEQ ID NO: 98612 - DNA, 74 bp, Homo sapiens
acaatgaatggcaaccgttctttctttaagagcttccattccatgctcccaatttgaaggatatcctgacaaag

SEQ ID NO: 98613 - DNA, 71 bp, Homo sapiens
aaccgttctttctttaagagcttccattccatgctcccaatttgaaggatatcctgacaaagggaagtaga

SEQ ID NO: 98614 - DNA, 72 bp, Homo sapiens
tttctttaagagcttccattccatgctcccaatttgaaggatatcctgacaaagggaagtagaattccccaa

SEQ ID NO: 98615 - DNA, 73 bp, Homo sapiens
ttccattccatgctcccaatttgaaggatatcctgacaaagggaagtagaattccccaagtggaagtgcctcg

SEQ ID NO: 98616 - DNA, 72 bp, Homo sapiens
ttccatgctcccaatttgaaggatatcctgacaaagggaagtagaattccccaagtggaagtgcctcgtccc

SEQ ID NO: 98617 - DNA, 69 bp, Homo sapiens
aatttgaaggatatcctgacaaagggaagtagaattccccaagtggaagtgcctcgtccccttcaataa

SEQ ID NO: 98618 - DNA, 70 bp, Homo sapiens
tatcctgacaaagggaagtagaattccccaagtggaagtgcctcgtccccttcaataaacgcgagtgaaa

SEQ ID NO: 98619 - DNA, 74 bp, Homo sapiens
aagtggaagtgcctcgtccccttcaataaacgcgagtgaaatcaaagggctgcttctgtgctctcttcctctgt

SEQ ID NO: 98620 - DNA, 77 bp, Homo sapiens
ctcgtccccttcaataaacgcgagtgaaatcaaagggctgcttctgtgctctcttcctctgtttttctcatgcagtc

SEQ ID NO: 98621 - DNA, 78 bp, Homo sapiens
ccttcaataaacgcgagtgaaatcaaagggctgcttctgtgctctcttcctctgtttttctcatgcagtcctcccatc

SEQ ID NO: 98622 - DNA, 81 bp, Homo sapiens
cgagtgaaatcaaagggctgcttctgtgctctcttcctctgtttttctcatgcagtcctcccatctgactaccttgtcaca

SEQ ID NO: 98623 - DNA, 80 bp, Homo sapiens
aaatcaaagggctgcttctgtgctctcttcctctgtttttctcatgcagtcctcccatctgactaccttgtcacagctct

SEQ ID NO: 98624 - DNA, 80 bp, Homo sapiens
tcttcctctgtttttctcatgcagtcctcccatctgactaccttgtcacagctcttcttttcctacctgcatcctcttca

SEQ ID NO: 98625 - DNA, 77 bp, Homo sapiens
tttttctcatgcagtcctcccatctgactaccttgtcacagctcttcttttcctacctgcatcctcttcaccttgtt

SEQ ID NO: 98626 - DNA, 75 bp, Homo sapiens
atgcagtcctcccatctgactaccttgtcacagctcttcttttcctacctgcatcctcttcaccttgttttcctt

SEQ ID NO: 98627 - DNA, 76 bp, Homo sapiens
ccatctgactaccttgtcacagctcttcttttcctacctgcatcctcttcaccttgttttcctttcccacacatca

SEQ ID NO: 98628 - DNA, 74 bp, Homo sapiens
actaccttgtcacagctcttcttttcctacctgcatcctcttcaccttgttttcctttcccacacatcaggcca

SEQ ID NO: 98629 - DNA, 73 bp, Homo sapiens
gctcttcttttcctacctgcatcctcttcaccttgttttcctttcccacacatcaggccaaggcttctagaat

SEQ ID NO: 98630 - DNA, 72 bp, Homo sapiens
tcttttcctacctgcatcctcttcaccttgttttcctttcccacacatcaggccaaggcttctagaattcct

SEQ ID NO: 98631 - DNA, 76 bp, Homo sapiens
atcctcttcaccttgttttcctttcccacacatcaggccaaggcttctagaattccttgcagcaagagctggagga

SEQ ID NO: 98632 - DNA, 76 bp, Homo sapiens
ttcaccttgttttcctttcccacacatcaggccaaggcttctagaattccttgcagcaagagctggaggacagaac

SEQ ID NO: 98633 - DNA, 76 bp, Homo sapiens
ttttcctttcccacacatcaggccaaggcttctagaattccttgcagcaagagctggaggacagaacctcagggaa

SEQ ID NO: 98634 - DNA, 78 bp, Homo sapiens
acacatcaggccaaggcttctagaattccttgcagcaagagctggaggacagaacctcagggaactgccctgtgggaa

SEQ ID NO: 98635 - DNA, 81 bp, Homo sapiens
tctagaattccttgcagcaagagctggaggacagaacctcagggaactgccctgtgggaatgcttcatgtcgtcttctaca

SEQ ID NO: 98636 - DNA, 78 bp, Homo sapiens
agcaagagctggaggacagaacctcagggaactgccctgtgggaatgcttcatgtcgtcttctacacgccctctgacc

SEQ ID NO: 98637 - DNA, 78 bp, Homo sapiens
acctcagggaactgccctgtgggaatgcttcatgtcgtcttctacacgccctctgacctggccgctgcacacaggtct

SEQ ID NO: 98638 - DNA, 80 bp, Homo sapiens
ttcatgtcgtcttctacacgccctctgacctggccgctgcacacaggtctttcactctatgtgattccctggctgcccct

SEQ ID NO: 98639 - DNA, 79 bp, Homo sapiens
ttctacacgccctctgacctggccgctgcacacaggtctttcactctatgtgattccctggctgccccttcacctccaa

SEQ ID NO: 98640 - DNA, 80 bp, Homo sapiens
ctctgacctggccgctgcacacaggtctttcactctatgtgattccctggctgccccttcacctccaagagctctgaacg

SEQ ID NO: 98641 - DNA, 79 bp, Homo sapiens
gccgctgcacacaggtctttcactctatgtgattccctggctgccccttcacctccaagagctctgaacggctttacaa

SEQ ID NO: 98642 - DNA, 77 bp, Homo sapiens
ttcactctatgtgattccctggctgccccttcacctccaagagctctgaacggctttacaactaggaagtctctgaa

SEQ ID NO: 98643 - DNA, 77 bp, Homo sapiens
ctgccccttcacctccaagagctctgaacggctttacaactaggaagtctctgaatgtgcagaacaatgagtttctc

SEQ ID NO: 98644 - DNA, 77 bp, Homo sapiens
ccttcacctccaagagctctgaacggctttacaactaggaagtctctgaatgtgcagaacaatgagtttctctttca

SEQ ID NO: 98645 - DNA, 78 bp, Homo sapiens
aagagctctgaacggctttacaactaggaagtctctgaatgtgcagaacaatgagtttctctttcagcagggccttgc

SEQ ID NO: 98646 - DNA, 76 bp, Homo sapiens
gctttacaactaggaagtctctgaatgtgcagaacaatgagtttctctttcagcagggccttgccaccccagttgt

SEQ ID NO: 98647 - DNA, 74 bp, Homo sapiens
aactaggaagtctctgaatgtgcagaacaatgagtttctctttcagcagggccttgccaccccagttgttttta

SEQ ID NO: 98648 - DNA, 73 bp, Homo sapiens
agtctctgaatgtgcagaacaatgagtttctctttcagcagggccttgccaccccagttgtttttattccccc

SEQ ID NO: 98649 - DNA, 73 bp, Homo sapiens
agaacaatgagtttctctttcagcagggccttgccaccccagttgtttttattcccccctctgatatgctaga

SEQ ID NO: 98650 - DNA, 76 bp, Homo sapiens
tttcagcagggccttgccaccccagttgtttttattcccccctctgatatgctagagataatgatagatccaggaa

SEQ ID NO: 98651 - DNA, 75 bp, Homo sapiens
agttgtttttattcccccctctgatatgctagagataatgatagatccaggaagtatattttcttcacactagga

SEQ ID NO: 98652 - DNA, 80 bp, Homo sapiens
tctgatatgctagagataatgatagatccaggaagtatattttcttcacactaggaggggccttgccccacaactggaga

SEQ ID NO: 98653 - DNA, 78 bp, Homo sapiens
tagagataatgatagatccaggaagtatattttcttcacactaggaggggccttgccccacaactggagacatgccat

SEQ ID NO: 98654 - DNA, 77 bp, Homo sapiens
taatgatagatccaggaagtatattttcttcacactaggaggggccttgccccacaactggagacatgccattcctg

SEQ ID NO: 98655 - DNA, 73 bp, Homo sapiens
aggaagtatattttcttcacactaggaggggccttgccccacaactggagacatgccattcctgtctttactg

SEQ ID NO: 98656 - DNA, 76 bp, Homo sapiens
atattttcttcacactaggaggggccttgccccacaactggagacatgccattcctgtctttactgtctgttctga

SEQ ID NO: 98657 - DNA, 78 bp, Homo sapiens
acactaggaggggccttgccccacaactggagacatgccattcctgtctttactgtctgttctgatgggagctcctga

SEQ ID NO: 98658 - DNA, 82 bp, Homo sapiens
gggccttgccccacaactggagacatgccattcctgtctttactgtctgttctgatgggagctcctgagagatggcaggaca

SEQ ID NO: 98659 - DNA, 83 bp, Homo sapiens
agacatgccattcctgtctttactgtctgttctgatgggagctcctgagagatggcaggacaggcagccttcattcctaaaca

SEQ ID NO: 98660 - DNA, 81 bp, Homo sapiens
attcctgtctttactgtctgttctgatgggagctcctgagagatggcaggacaggcagccttcattcctaaacacagtgtc

SEQ ID NO: 98661 - DNA, 83 bp, Homo sapiens
ttactgtctgttctgatgggagctcctgagagatggcaggacaggcagccttcattcctaaacacagtgtcctgcagacccac

SEQ ID NO: 98662 - DNA, 81 bp, Homo sapiens
atgggagctcctgagagatggcaggacaggcagccttcattcctaaacacagtgtcctgcagacccacccgctccagctta

SEQ ID NO: 98663 - DNA, 77 bp, Homo sapiens
acaggcagccttcattcctaaacacagtgtcctgcagacccacccgctccagcttatttttcacagacatatttctg

SEQ ID NO: 98664 - DNA, 75 bp, Homo sapiens
tcctaaacacagtgtcctgcagacccacccgctccagcttatttttcacagacatatttctggaggagtagtgtt

SEQ ID NO: 98665 - DNA, 72 bp, Homo sapiens
agacccacccgctccagcttatttttcacagacatatttctggaggagtagtgtttattatacctctgaaac

SEQ ID NO: 98666 - DNA, 76 bp, Homo sapiens
gctccagcttatttttcacagacatatttctggaggagtagtgtttattatacctctgaaactcaaggcttctcca

SEQ ID NO: 98667 - DNA, 76 bp, Homo sapiens
atttttcacagacatatttctggaggagtagtgtttattatacctctgaaactcaaggcttctccatgcacagaaa

SEQ ID NO: 98668 - DNA, 77 bp, Homo sapiens
agacatatttctggaggagtagtgtttattatacctctgaaactcaaggcttctccatgcacagaaatagcctccaa

SEQ ID NO: 98669 - DNA, 75 bp, Homo sapiens
atttctggaggagtagtgtttattatacctctgaaactcaaggcttctccatgcacagaaatagcctccaagaaa

SEQ ID NO: 98670 - DNA, 74 bp, Homo sapiens
ctgaaactcaaggcttctccatgcacagaaatagcctccaagaaacagccctctatacccccgagaaatgcccc

SEQ ID NO: 98671 - DNA, 73 bp, Homo sapiens
ttctccatgcacagaaatagcctccaagaaacagccctctatacccccgagaaatgcccccaagaaacctcca

SEQ ID NO: 98672 - DNA, 72 bp, Homo sapiens
atgcacagaaatagcctccaagaaacagccctctatacccccgagaaatgcccccaagaaacctccatgccc

SEQ ID NO: 98673 - DNA, 71 bp, Homo sapiens
ctccaagaaacagccctctatacccccgagaaatgcccccaagaaacctccatgcccctgagaaatagctc

SEQ ID NO: 98674 - DNA, 73 bp, Homo sapiens
agaaacagccctctatacccccgagaaatgcccccaagaaacctccatgcccctgagaaatagctctcttgca

SEQ ID NO: 98675 - DNA, 72 bp, Homo sapiens
tatacccccgagaaatgcccccaagaaacctccatgcccctgagaaatagctctcttgcacctctctatttt

SEQ ID NO: 98676 - DNA, 72 bp, Homo sapiens
cgagaaatgcccccaagaaacctccatgcccctgagaaatagctctcttgcacctctctattttttgaaatt

SEQ ID NO: 98677 - DNA, 71 bp, Homo sapiens
ccaagaaacctccatgcccctgagaaatagctctcttgcacctctctattttttgaaatttcttaaatatt

SEQ ID NO: 98678 - DNA, 73 bp, Homo sapiens
acctccatgcccctgagaaatagctctcttgcacctctctattttttgaaatttcttaaatatttgccaccaa

SEQ ID NO: 98679 - DNA, 76 bp, Homo sapiens
ctgagaaatagctctcttgcacctctctattttttgaaatttcttaaatatttgccaccaagcaacagagtgaata

SEQ ID NO: 98680 - DNA, 74 bp, Homo sapiens
ttgaaatttcttaaatatttgccaccaagcaacagagtgaataagaggctaaaatgttccctcatttggtgaca

SEQ ID NO: 98681 - DNA, 74 bp, Homo sapiens
tcttaaatatttgccaccaagcaacagagtgaataagaggctaaaatgttccctcatttggtgacaagttccta

SEQ ID NO: 98682 - DNA, 73 bp, Homo sapiens
aagcaacagagtgaataagaggctaaaatgttccctcatttggtgacaagttcctatgcaagttttgaattat

SEQ ID NO: 98683 - DNA, 71 bp, Homo sapiens
gttccctcatttggtgacaagttcctatgcaagttttgaattatttggaataattggatttctttggcttg

SEQ ID NO: 98684 - DNA, 72 bp, Homo sapiens
ttggtgacaagttcctatgcaagttttgaattatttggaataattggatttctttggcttgtgagccaaggg

SEQ ID NO: 98685 - DNA, 74 bp, Homo sapiens
tatgcaagttttgaattatttggaataattggatttctttggcttgtgagccaaggggaatcactatcactttc

SEQ ID NO: 98686 - DNA, 74 bp, Homo sapiens
ttgaattatttggaataattggatttctttggcttgtgagccaaggggaatcactatcactttcttctatggta

SEQ ID NO: 98687 - DNA, 73 bp, Homo sapiens
ttggatttctttggcttgtgagccaaggggaatcactatcactttcttctatggtatcagaaaactccctctt

SEQ ID NO: 98688 - DNA, 74 bp, Homo sapiens
tctttggcttgtgagccaaggggaatcactatcactttcttctatggtatcagaaaactccctctttcttctaa

SEQ ID NO: 98689 - DNA, 71 bp, Homo sapiens
agccaaggggaatcactatcactttcttctatggtatcagaaaactccctctttcttctaagttcccctgc

SEQ ID NO: 98690 - DNA, 74 bp, Homo sapiens
aatcactatcactttcttctatggtatcagaaaactccctctttcttctaagttcccctgctgcagtcttctcc

SEQ ID NO: 98691 - DNA, 72 bp, Homo sapiens
atcactttcttctatggtatcagaaaactccctctttcttctaagttcccctgctgcagtcttctcccccac

SEQ ID NO: 98692 - DNA, 76 bp, Homo sapiens
tatggtatcagaaaactccctctttcttctaagttcccctgctgcagtcttctcccccaccttcatgtgagagcta

SEQ ID NO: 98693 - DNA, 74 bp, Homo sapiens
ttcttctaagttcccctgctgcagtcttctcccccaccttcatgtgagagctacacaaggggaatttgttcact

SEQ ID NO: 98694 - DNA, 73 bp, Homo sapiens
taagttcccctgctgcagtcttctcccccaccttcatgtgagagctacacaaggggaatttgttcacttaagt

SEQ ID NO: 98695 - DNA, 78 bp, Homo sapiens
tgcagtcttctcccccaccttcatgtgagagctacacaaggggaatttgttcacttaagtttgcagccattttgcaca

SEQ ID NO: 98696 - DNA, 73 bp, Homo sapiens
accttcatgtgagagctacacaaggggaatttgttcacttaagtttgcagccattttgcacaccccaaagagt

SEQ ID NO: 98697 - DNA, 73 bp, Homo sapiens
ctacacaaggggaatttgttcacttaagtttgcagccattttgcacaccccaaagagttgaccttgatgtgaa

SEQ ID NO: 98698 - DNA, 73 bp, Homo sapiens
ggaatttgttcacttaagtttgcagccattttgcacaccccaaagagttgaccttgatgtgaactaattggga

SEQ ID NO: 98699 - DNA, 74 bp, Homo sapiens
agtttgcagccattttgcacaccccaaagagttgaccttgatgtgaactaattgggattgcagtgggttaataa

SEQ ID NO: 98700 - DNA, 72 bp, Homo sapiens
caaagagttgaccttgatgtgaactaattgggattgcagtgggttaataacacaggttggtgaggtggaatt

SEQ ID NO: 98701 - DNA, 76 bp, Homo sapiens
ttgaccttgatgtgaactaattgggattgcagtgggttaataacacaggttggtgaggtggaatttgcagcataaa

SEQ ID NO: 98702 - DNA, 74 bp, Homo sapiens
atgtgaactaattgggattgcagtgggttaataacacaggttggtgaggtggaatttgcagcataaaggaaaca

SEQ ID NO: 98703 - DNA, 72 bp, Homo sapiens
agtgggttaataacacaggttggtgaggtggaatttgcagcataaaggaaacacttgaagataagagccatt

SEQ ID NO: 98704 - DNA, 76 bp, Homo sapiens
aataacacaggttggtgaggtggaatttgcagcataaaggaaacacttgaagataagagccatttgtgctttcata

SEQ ID NO: 98705 - DNA, 78 bp, Homo sapiens
ttggtgaggtggaatttgcagcataaaggaaacacttgaagataagagccatttgtgctttcataagctcatccctgg

SEQ ID NO: 98706 - DNA, 79 bp, Homo sapiens
aatttgcagcataaaggaaacacttgaagataagagccatttgtgctttcataagctcatccctggtgctctgaacaaa

SEQ ID NO: 98707 - DNA, 77 bp, Homo sapiens
ataaaggaaacacttgaagataagagccatttgtgctttcataagctcatccctggtgctctgaacaaaggacacaa

SEQ ID NO: 98708 - DNA, 77 bp, Homo sapiens
aacacttgaagataagagccatttgtgctttcataagctcatccctggtgctctgaacaaaggacacaaactaataa

SEQ ID NO: 98709 - DNA, 80 bp, Homo sapiens
taagagccatttgtgctttcataagctcatccctggtgctctgaacaaaggacacaaactaataaagtcagattcatcta

SEQ ID NO: 98710 - DNA, 78 bp, Homo sapiens
tttgtgctttcataagctcatccctggtgctctgaacaaaggacacaaactaataaagtcagattcatctaggggcaa

SEQ ID NO: 98711 - DNA, 79 bp, Homo sapiens
ttcataagctcatccctggtgctctgaacaaaggacacaaactaataaagtcagattcatctaggggcaatctacactc

SEQ ID NO: 98712 - DNA, 76 bp, Homo sapiens
atccctggtgctctgaacaaaggacacaaactaataaagtcagattcatctaggggcaatctacactcgctcaccc

SEQ ID NO: 98713 - DNA, 77 bp, Homo sapiens
tgaacaaaggacacaaactaataaagtcagattcatctaggggcaatctacactcgctcaccccaaactctgattca

SEQ ID NO: 98714 - DNA, 76 bp, Homo sapiens
actaataaagtcagattcatctaggggcaatctacactcgctcaccccaaactctgattcagaaaggcaaatggaa

SEQ ID NO: 98715 - DNA, 74 bp, Homo sapiens
cccaaactctgattcagaaaggcaaatggaaatctgccagaattcttttaaactccaacacagatctcgattta

SEQ ID NO: 98716 - DNA, 73 bp, Homo sapiens
actctgattcagaaaggcaaatggaaatctgccagaattcttttaaactccaacacagatctcgatttaaaaa

SEQ ID NO: 98717 - DNA, 73 bp, Homo sapiens
aaggcaaatggaaatctgccagaattcttttaaactccaacacagatctcgatttaaaaaatgacacacacaa

SEQ ID NO: 98718 - DNA, 71 bp, Homo sapiens
aaatctgccagaattcttttaaactccaacacagatctcgatttaaaaaatgacacacacaaaaccgcttg

SEQ ID NO: 98719 - DNA, 71 bp, Homo sapiens
gccagaattcttttaaactccaacacagatctcgatttaaaaaatgacacacacaaaaccgcttggtaata

SEQ ID NO: 98720 - DNA, 71 bp, Homo sapiens
ttttaaactccaacacagatctcgatttaaaaaatgacacacacaaaaccgcttggtaataagcagacctc

SEQ ID NO: 98721 - DNA, 78 bp, Homo sapiens
aacacagatctcgatttaaaaaatgacacacacaaaaccgcttggtaataagcagacctctgatgatctacagatcca

SEQ ID NO: 98722 - DNA, 76 bp, Homo sapiens
tttaaaaaatgacacacacaaaaccgcttggtaataagcagacctctgatgatctacagatccacagcttcgttta

SEQ ID NO: 98723 - DNA, 79 bp, Homo sapiens
gacacacacaaaaccgcttggtaataagcagacctctgatgatctacagatccacagcttcgtttattgacttagagaa

SEQ ID NO: 98724 - DNA, 75 bp, Homo sapiens
aaaaccgcttggtaataagcagacctctgatgatctacagatccacagcttcgtttattgacttagagaaagtaa

SEQ ID NO: 98725 - DNA, 79 bp, Homo sapiens
gtaataagcagacctctgatgatctacagatccacagcttcgtttattgacttagagaaagtaaatggcatttcaaata

SEQ ID NO: 98726 - DNA, 76 bp, Homo sapiens
agacctctgatgatctacagatccacagcttcgtttattgacttagagaaagtaaatggcatttcaaatacaacct

SEQ ID NO: 98727 - DNA, 76 bp, Homo sapiens
gatctacagatccacagcttcgtttattgacttagagaaagtaaatggcatttcaaatacaaccttcatacttcaa

SEQ ID NO: 98728 - DNA, 76 bp, Homo sapiens
gatccacagcttcgtttattgacttagagaaagtaaatggcatttcaaatacaaccttcatacttcaatagatgag

SEQ ID NO: 98729 - DNA, 74 bp, Homo sapiens
gcttcgtttattgacttagagaaagtaaatggcatttcaaatacaaccttcatacttcaatagatgaggtcacc

SEQ ID NO: 98730 - DNA, 76 bp, Homo sapiens
acttagagaaagtaaatggcatttcaaatacaaccttcatacttcaatagatgaggtcaccctgagaaagatgata

SEQ ID NO: 98731 - DNA, 77 bp, Homo sapiens
aaagtaaatggcatttcaaatacaaccttcatacttcaatagatgaggtcaccctgagaaagatgatactcagccca

SEQ ID NO: 98732 - DNA, 77 bp, Homo sapiens
atttcaaatacaaccttcatacttcaatagatgaggtcaccctgagaaagatgatactcagcccagcagtgggaaac

SEQ ID NO: 98733 - DNA, 78 bp, Homo sapiens
atacttcaatagatgaggtcaccctgagaaagatgatactcagcccagcagtgggaaacctccctccagagaactgct

SEQ ID NO: 98734 - DNA, 76 bp, Homo sapiens
ctgagaaagatgatactcagcccagcagtgggaaacctccctccagagaactgctttgatttacaaggccaaggaa

SEQ ID NO: 98735 - DNA, 74 bp, Homo sapiens
aaagatgatactcagcccagcagtgggaaacctccctccagagaactgctttgatttacaaggccaaggaaggc

SEQ ID NO: 98736 - DNA, 73 bp, Homo sapiens
agcccagcagtgggaaacctccctccagagaactgctttgatttacaaggccaaggaaggctttctcatagaa

SEQ ID NO: 98737 - DNA, 73 bp, Homo sapiens
ggaaacctccctccagagaactgctttgatttacaaggccaaggaaggctttctcatagaagccatatacttg

SEQ ID NO: 98738 - DNA, 75 bp, Homo sapiens
ctccagagaactgctttgatttacaaggccaaggaaggctttctcatagaagccatatacttgggctaaaatgga

SEQ ID NO: 98739 - DNA, 72 bp, Homo sapiens
aactgctttgatttacaaggccaaggaaggctttctcatagaagccatatacttgggctaaaatggagtaat

SEQ ID NO: 98740 - DNA, 70 bp, Homo sapiens
ttgatttacaaggccaaggaaggctttctcatagaagccatatacttgggctaaaatggagtaatttttt

SEQ ID NO: 98741 - DNA, 77 bp, Homo sapiens
aaaattaaatgtagaggttgagatagcagacaactatgaaactcttgctcaacaagagggatgacctatggaagaca

SEQ ID NO: 98742 - DNA, 79 bp, Homo sapiens
aggttgagatagcagacaactatgaaactcttgctcaacaagagggatgacctatggaagacaggaatgctaggaccta

SEQ ID NO: 98743 - DNA, 80 bp, Homo sapiens
atagcagacaactatgaaactcttgctcaacaagagggatgacctatggaagacaggaatgctaggacctacagaactga

SEQ ID NO: 98744 - DNA, 77 bp, Homo sapiens
tatgaaactcttgctcaacaagagggatgacctatggaagacaggaatgctaggacctacagaactgaagggtcaaa

SEQ ID NO: 98745 - DNA, 76 bp, Homo sapiens
ttgctcaacaagagggatgacctatggaagacaggaatgctaggacctacagaactgaagggtcaaaattgactta

SEQ ID NO: 98746 - DNA, 72 bp, Homo sapiens
cctatggaagacaggaatgctaggacctacagaactgaagggtcaaaattgacttactaccaagtttagata

SEQ ID NO: 98747 - DNA, 71 bp, Homo sapiens
acaggaatgctaggacctacagaactgaagggtcaaaattgacttactaccaagtttagatagctaagtaa

SEQ ID NO: 98748 - DNA, 70 bp, Homo sapiens
taggacctacagaactgaagggtcaaaattgacttactaccaagtttagatagctaagtaactcacattt

SEQ ID NO: 98749 - DNA, 71 bp, Homo sapiens
cagaactgaagggtcaaaattgacttactaccaagtttagatagctaagtaactcacatttttttcaggca

SEQ ID NO: 98750 - DNA, 72 bp, Homo sapiens
ctgaagggtcaaaattgacttactaccaagtttagatagctaagtaactcacatttttttcaggcattgaga

SEQ ID NO: 98751 - DNA, 71 bp, Homo sapiens
agggtcaaaattgacttactaccaagtttagatagctaagtaactcacatttttttcaggcattgagatcc

SEQ ID NO: 98752 - DNA, 74 bp, Homo sapiens
gtcaaaattgacttactaccaagtttagatagctaagtaactcacatttttttcaggcattgagatcctgtgta

SEQ ID NO: 98753 - DNA, 76 bp, Homo sapiens
actaccaagtttagatagctaagtaactcacatttttttcaggcattgagatcctgtgtatattgactagaagatc

SEQ ID NO: 98754 - DNA, 76 bp, Homo sapiens
taccaagtttagatagctaagtaactcacatttttttcaggcattgagatcctgtgtatattgactagaagatcct

SEQ ID NO: 98755 - DNA, 77 bp, Homo sapiens
aagtttagatagctaagtaactcacatttttttcaggcattgagatcctgtgtatattgactagaagatccttgtga

SEQ ID NO: 98756 - DNA, 78 bp, Homo sapiens
tagatagctaagtaactcacatttttttcaggcattgagatcctgtgtatattgactagaagatccttgtgaatttcc

SEQ ID NO: 98757 - DNA, 75 bp, Homo sapiens
agtaactcacatttttttcaggcattgagatcctgtgtatattgactagaagatccttgtgaatttcccaattac

SEQ ID NO: 98758 - DNA, 76 bp, Homo sapiens
actcacatttttttcaggcattgagatcctgtgtatattgactagaagatccttgtgaatttcccaattactctta

SEQ ID NO: 98759 - DNA, 76 bp, Homo sapiens
ctcacatttttttcaggcattgagatcctgtgtatattgactagaagatccttgtgaatttcccaattactcttaa

SEQ ID NO: 98760 - DNA, 80 bp, Homo sapiens
ttcaggcattgagatcctgtgtatattgactagaagatccttgtgaatttcccaattactcttaaatagcgatcatcaaa

SEQ ID NO: 98761 - DNA, 75 bp, Homo sapiens
tcctgtgtatattgactagaagatccttgtgaatttcccaattactcttaaatagcgatcatcaaacgggtgatt

SEQ ID NO: 98762 - DNA, 75 bp, Homo sapiens
tatattgactagaagatccttgtgaatttcccaattactcttaaatagcgatcatcaaacgggtgatttctcctc

SEQ ID NO: 98763 - DNA, 72 bp, Homo sapiens
ctagaagatccttgtgaatttcccaattactcttaaatagcgatcatcaaacgggtgatttctcctccaggg

SEQ ID NO: 98764 - DNA, 74 bp, Homo sapiens
tgaatttcccaattactcttaaatagcgatcatcaaacgggtgatttctcctccaggggatttctggcaatgtc

SEQ ID NO: 98765 - DNA, 76 bp, Homo sapiens
tcccaattactcttaaatagcgatcatcaaacgggtgatttctcctccaggggatttctggcaatgtctggagaca

SEQ ID NO: 98766 - DNA, 77 bp, Homo sapiens
atttttggttgccacaactgaggaagggggagtgctactgtcatctagtacgtggaggccaggaatgctgctcaaca

SEQ ID NO: 98767 - DNA, 81 bp, Homo sapiens
ccacaactgaggaagggggagtgctactgtcatctagtacgtggaggccaggaatgctgctcaacatcctacaatgcacag

SEQ ID NO: 98768 - DNA, 81 bp, Homo sapiens
aactgaggaagggggagtgctactgtcatctagtacgtggaggccaggaatgctgctcaacatcctacaatgcacaggatg

SEQ ID NO: 98769 - DNA, 80 bp, Homo sapiens
aggaagggggagtgctactgtcatctagtacgtggaggccaggaatgctgctcaacatcctacaatgcacaggatggccc

SEQ ID NO: 98770 - DNA, 83 bp, Homo sapiens
agtgctactgtcatctagtacgtggaggccaggaatgctgctcaacatcctacaatgcacaggatggcccctacaacagagaa

SEQ ID NO: 98771 - DNA, 84 bp, Homo sapiens
tactgtcatctagtacgtggaggccaggaatgctgctcaacatcctacaatgcacaggatggcccctacaacagagaatgatcc

SEQ ID NO: 98772 - DNA, 83 bp, Homo sapiens
atctagtacgtggaggccaggaatgctgctcaacatcctacaatgcacaggatggcccctacaacagagaatgatcctgccca

SEQ ID NO: 98773 - DNA, 83 bp, Homo sapiens
tagtacgtggaggccaggaatgctgctcaacatcctacaatgcacaggatggcccctacaacagagaatgatcctgcccacaa

SEQ ID NO: 98774 - DNA, 85 bp, Homo sapiens
aggccaggaatgctgctcaacatcctacaatgcacaggatggcccctacaacagagaatgatcctgcccacaagatcaagcgtgc

SEQ ID NO: 98775 - DNA, 84 bp, Homo sapiens
aggaatgctgctcaacatcctacaatgcacaggatggcccctacaacagagaatgatcctgcccacaagatcaagcgtgcccta

SEQ ID NO: 98776 - DNA, 82 bp, Homo sapiens
ctcaacatcctacaatgcacaggatggcccctacaacagagaatgatcctgcccacaagatcaagcgtgccctaaagtgtca

SEQ ID NO: 98777 - DNA, 74 bp, Homo sapiens
acaggatggcccctacaacagagaatgatcctgcccacaagatcaagcgtgccctaaagtgtcaaagaaaacct

SEQ ID NO: 98778 - DNA, 77 bp, Homo sapiens
acagagaatgatcctgcccacaagatcaagcgtgccctaaagtgtcaaagaaaaccttgctcagggaaagcacacac

SEQ ID NO: 98779 - DNA, 77 bp, Homo sapiens
ccctaaagtgtcaaagaaaaccttgctcagggaaagcacacactgccacaatggtttcagctaccatgatgacaaga

SEQ ID NO: 98780 - DNA, 81 bp, Homo sapiens
tgtcaaagaaaaccttgctcagggaaagcacacactgccacaatggtttcagctaccatgatgacaagacggaagatgtga

SEQ ID NO: 98781 - DNA, 79 bp, Homo sapiens
actgccacaatggtttcagctaccatgatgacaagacggaagatgtgacttctagaggtgctcttcaggatcggggaaa

SEQ ID NO: 98782 - DNA, 78 bp, Homo sapiens
aatggtttcagctaccatgatgacaagacggaagatgtgacttctagaggtgctcttcaggatcggggaaagctaaca

SEQ ID NO: 98783 - DNA, 80 bp, Homo sapiens
agctaccatgatgacaagacggaagatgtgacttctagaggtgctcttcaggatcggggaaagctaacacagcattgtcc

SEQ ID NO: 98784 - DNA, 78 bp, Homo sapiens
atgacaagacggaagatgtgacttctagaggtgctcttcaggatcggggaaagctaacacagcattgtcccctgggca

SEQ ID NO: 98785 - DNA, 78 bp, Homo sapiens
aagatgtgacttctagaggtgctcttcaggatcggggaaagctaacacagcattgtcccctgggcacagtacaaatga

SEQ ID NO: 98786 - DNA, 76 bp, Homo sapiens
acttctagaggtgctcttcaggatcggggaaagctaacacagcattgtcccctgggcacagtacaaatgaactgag

SEQ ID NO: 98787 - DNA, 76 bp, Homo sapiens
aggtgctcttcaggatcggggaaagctaacacagcattgtcccctgggcacagtacaaatgaactgaggggtatga

SEQ ID NO: 98788 - DNA, 75 bp, Homo sapiens
aggatcggggaaagctaacacagcattgtcccctgggcacagtacaaatgaactgaggggtatgaggagatgagg

SEQ ID NO: 98789 - DNA, 80 bp, Homo sapiens
acagcattgtcccctgggcacagtacaaatgaactgaggggtatgaggagatgaggtgtgtggtgagcactttctggagc

SEQ ID NO: 98790 - DNA, 80 bp, Homo sapiens
tgggcacagtacaaatgaactgaggggtatgaggagatgaggtgtgtggtgagcactttctggagcccttgtgagaatcc

SEQ ID NO: 98791 - DNA, 77 bp, Homo sapiens
agtacaaatgaactgaggggtatgaggagatgaggtgtgtggtgagcactttctggagcccttgtgagaatcctggg

SEQ ID NO: 98792 - DNA, 84 bp, Homo sapiens
gtatgaggagatgaggtgtgtggtgagcactttctggagcccttgtgagaatcctgggtggctgcagtcatgatgcacccaggg

SEQ ID NO: 98793 - DNA, 80 bp, Homo sapiens
atgaggtgtgtggtgagcactttctggagcccttgtgagaatcctgggtggctgcagtcatgatgcacccagggggaaac

SEQ ID NO: 98794 - DNA, 79 bp, Homo sapiens
agcactttctggagcccttgtgagaatcctgggtggctgcagtcatgatgcacccagggggaaactccatccccatgta

SEQ ID NO: 98795 - DNA, 77 bp, Homo sapiens
tggagcccttgtgagaatcctgggtggctgcagtcatgatgcacccagggggaaactccatccccatgtaaggttta

SEQ ID NO: 98796 - DNA, 76 bp, Homo sapiens
ttgtgagaatcctgggtggctgcagtcatgatgcacccagggggaaactccatccccatgtaaggtttaaggcgac

SEQ ID NO: 98797 - DNA, 80 bp, Homo sapiens
tgggtggctgcagtcatgatgcacccagggggaaactccatccccatgtaaggtttaaggcgactgctctctcagtctca

SEQ ID NO: 98798 - DNA, 79 bp, Homo sapiens
agtcatgatgcacccagggggaaactccatccccatgtaaggtttaaggcgactgctctctcagtctcatggcctggca

SEQ ID NO: 98799 - DNA, 80 bp, Homo sapiens
gaaactccatccccatgtaaggtttaaggcgactgctctctcagtctcatggcctggcacccagacttagagctggcatg

SEQ ID NO: 98800 - DNA, 82 bp, Homo sapiens
tgtaaggtttaaggcgactgctctctcagtctcatggcctggcacccagacttagagctggcatgttgagccctgggtgagc

SEQ ID NO: 98801 - DNA, 86 bp, Homo sapiens
aggcgactgctctctcagtctcatggcctggcacccagacttagagctggcatgttgagccctgggtgagctgcaggtgtgaacta

SEQ ID NO: 98802 - DNA, 85 bp, Homo sapiens
tctctcagtctcatggcctggcacccagacttagagctggcatgttgagccctgggtgagctgcaggtgtgaactaccaacaaga

SEQ ID NO: 98803 - DNA, 83 bp, Homo sapiens
atggcctggcacccagacttagagctggcatgttgagccctgggtgagctgcaggtgtgaactaccaacaagactgctcctga

SEQ ID NO: 98804 - DNA, 81 bp, Homo sapiens
acccagacttagagctggcatgttgagccctgggtgagctgcaggtgtgaactaccaacaagactgctcctgagctgaccg

SEQ ID NO: 98805 - DNA, 83 bp, Homo sapiens
ttagagctggcatgttgagccctgggtgagctgcaggtgtgaactaccaacaagactgctcctgagctgaccgtcggctttgc

SEQ ID NO: 98806 - DNA, 81 bp, Homo sapiens
atgttgagccctgggtgagctgcaggtgtgaactaccaacaagactgctcctgagctgaccgtcggctttgccatctggga

SEQ ID NO: 98807 - DNA, 80 bp, Homo sapiens
ggtgagctgcaggtgtgaactaccaacaagactgctcctgagctgaccgtcggctttgccatctgggagggtacaggcta

SEQ ID NO: 98808 - DNA, 78 bp, Homo sapiens
aggtgtgaactaccaacaagactgctcctgagctgaccgtcggctttgccatctgggagggtacaggctagcacttgc

SEQ ID NO: 98809 - DNA, 77 bp, Homo sapiens
aactaccaacaagactgctcctgagctgaccgtcggctttgccatctgggagggtacaggctagcacttgcctctcc

SEQ ID NO: 98810 - DNA, 78 bp, Homo sapiens
acaagactgctcctgagctgaccgtcggctttgccatctgggagggtacaggctagcacttgcctctcctgggcttcc

SEQ ID NO: 98811 - DNA, 80 bp, Homo sapiens
agctgaccgtcggctttgccatctgggagggtacaggctagcacttgcctctcctgggcttcctgggcatgagtcacatg

SEQ ID NO: 98812 - DNA, 81 bp, Homo sapiens
tcggctttgccatctgggagggtacaggctagcacttgcctctcctgggcttcctgggcatgagtcacatgtaactagata

SEQ ID NO: 98813 - DNA, 77 bp, Homo sapiens
ctcctgggcttcctgggcatgagtcacatgtaactagataatgacgcaaatcaccgtcaacattacttaaggtttca

SEQ ID NO: 98814 - DNA, 78 bp, Homo sapiens
ttcctgggcatgagtcacatgtaactagataatgacgcaaatcaccgtcaacattacttaaggtttcattctaatgtc

SEQ ID NO: 98815 - DNA, 77 bp, Homo sapiens
atgagtcacatgtaactagataatgacgcaaatcaccgtcaacattacttaaggtttcattctaatgtcttatggaa

SEQ ID NO: 98816 - DNA, 78 bp, Homo sapiens
atgtaactagataatgacgcaaatcaccgtcaacattacttaaggtttcattctaatgtcttatggaatgatagagca

SEQ ID NO: 98817 - DNA, 78 bp, Homo sapiens
agataatgacgcaaatcaccgtcaacattacttaaggtttcattctaatgtcttatggaatgatagagcagaaagcaa

SEQ ID NO: 98818 - DNA, 75 bp, Homo sapiens
aaatcaccgtcaacattacttaaggtttcattctaatgtcttatggaatgatagagcagaaagcaacctccgaga

SEQ ID NO: 98819 - DNA, 77 bp, Homo sapiens
aacattacttaaggtttcattctaatgtcttatggaatgatagagcagaaagcaacctccgagacagcagagacaac

SEQ ID NO: 98820 - DNA, 80 bp, Homo sapiens
cttaaggtttcattctaatgtcttatggaatgatagagcagaaagcaacctccgagacagcagagacaaccatgccagcc

SEQ ID NO: 98821 - DNA, 83 bp, Homo sapiens
attctaatgtcttatggaatgatagagcagaaagcaacctccgagacagcagagacaaccatgccagccccatctcagagaaa

SEQ ID NO: 98822 - DNA, 86 bp, Homo sapiens
ttatggaatgatagagcagaaagcaacctccgagacagcagagacaaccatgccagccccatctcagagaaagctgcagtgcggaa

SEQ ID NO: 98823 - DNA, 84 bp, Homo sapiens
atagagcagaaagcaacctccgagacagcagagacaaccatgccagccccatctcagagaaagctgcagtgcggaatggtgaag

SEQ ID NO: 98824 - DNA, 81 bp, Homo sapiens
aaagcaacctccgagacagcagagacaaccatgccagccccatctcagagaaagctgcagtgcggaatggtgaagggactc

SEQ ID NO: 98825 - DNA, 81 bp, Homo sapiens
agacagcagagacaaccatgccagccccatctcagagaaagctgcagtgcggaatggtgaagggactccccctattctcca

SEQ ID NO: 98826 - DNA, 81 bp, Homo sapiens
agacaaccatgccagccccatctcagagaaagctgcagtgcggaatggtgaagggactccccctattctccacagcagata

SEQ ID NO: 98827 - DNA, 82 bp, Homo sapiens
cagccccatctcagagaaagctgcagtgcggaatggtgaagggactccccctattctccacagcagatagcaacagagcagg

SEQ ID NO: 98828 - DNA, 78 bp, Homo sapiens
gaatggtgaagggactccccctattctccacagcagatagcaacagagcagggacagaccttctggctctttgtagac

SEQ ID NO: 98829 - DNA, 81 bp, Homo sapiens
ctattctccacagcagatagcaacagagcagggacagaccttctggctctttgtagactactgctttaactacatgatagt

SEQ ID NO: 98830 - DNA, 80 bp, Homo sapiens
cagcagatagcaacagagcagggacagaccttctggctctttgtagactactgctttaactacatgatagttagaaacta

SEQ ID NO: 98831 - DNA, 77 bp, Homo sapiens
atagcaacagagcagggacagaccttctggctctttgtagactactgctttaactacatgatagttagaaactataa

SEQ ID NO: 98832 - DNA, 72 bp, Homo sapiens
agggacagaccttctggctctttgtagactactgctttaactacatgatagttagaaactataaccctccca

SEQ ID NO: 98833 - DNA, 74 bp, Homo sapiens
ttctggctctttgtagactactgctttaactacatgatagttagaaactataaccctcccatcaatctagttac

SEQ ID NO: 98834 - DNA, 75 bp, Homo sapiens
tttgtagactactgctttaactacatgatagttagaaactataaccctcccatcaatctagttaccatgtactga

SEQ ID NO: 98835 - DNA, 75 bp, Homo sapiens
tactgctttaactacatgatagttagaaactataaccctcccatcaatctagttaccatgtactgacagaacaaa

SEQ ID NO: 98836 - DNA, 73 bp, Homo sapiens
ttaactacatgatagttagaaactataaccctcccatcaatctagttaccatgtactgacagaacaaaaagac

SEQ ID NO: 98837 - DNA, 71 bp, Homo sapiens
atagttagaaactataaccctcccatcaatctagttaccatgtactgacagaacaaaaagacctagctaaa

SEQ ID NO: 98838 - DNA, 70 bp, Homo sapiens
aactataaccctcccatcaatctagttaccatgtactgacagaacaaaaagacctagctaaacctcaaaa

SEQ ID NO: 98839 - DNA, 72 bp, Homo sapiens
caaaaaaaaagaagtcactggaaagcacattgtccagatggttctggtggggaacacctttgcctgcttata

SEQ ID NO: 98840 - DNA, 76 bp, Homo sapiens
aaaaagaagtcactggaaagcacattgtccagatggttctggtggggaacacctttgcctgcttatagctctgtga

SEQ ID NO: 98841 - DNA, 82 bp, Homo sapiens
tggaaagcacattgtccagatggttctggtggggaacacctttgcctgcttatagctctgtgagatcctgagcttggtgaga

SEQ ID NO: 98842 - DNA, 81 bp, Homo sapiens
acattgtccagatggttctggtggggaacacctttgcctgcttatagctctgtgagatcctgagcttggtgagatggactg

SEQ ID NO: 98843 - DNA, 78 bp, Homo sapiens
gttctggtggggaacacctttgcctgcttatagctctgtgagatcctgagcttggtgagatggactgggaagtcctaa

SEQ ID NO: 98844 - DNA, 79 bp, Homo sapiens
ggaacacctttgcctgcttatagctctgtgagatcctgagcttggtgagatggactgggaagtcctaacttcatttatg

SEQ ID NO: 98845 - DNA, 79 bp, Homo sapiens
acctttgcctgcttatagctctgtgagatcctgagcttggtgagatggactgggaagtcctaacttcatttatgtcttc

SEQ ID NO: 98846 - DNA, 80 bp, Homo sapiens
ttatagctctgtgagatcctgagcttggtgagatggactgggaagtcctaacttcatttatgtcttctctccaccctgaa

SEQ ID NO: 98847 - DNA, 75 bp, Homo sapiens
agcttggtgagatggactgggaagtcctaacttcatttatgtcttctctccaccctgaaacgatgccaaaatgac

SEQ ID NO: 98848 - DNA, 72 bp, Homo sapiens
agatggactgggaagtcctaacttcatttatgtcttctctccaccctgaaacgatgccaaaatgaccccaaa

SEQ ID NO: 98849 - DNA, 71 bp, Homo sapiens
aagtcctaacttcatttatgtcttctctccaccctgaaacgatgccaaaatgaccccaaatctcaaataaa

SEQ ID NO: 98850 - DNA, 71 bp, Homo sapiens
taacttcatttatgtcttctctccaccctgaaacgatgccaaaatgaccccaaatctcaaataaaagttgg

SEQ ID NO: 98851 - DNA, 72 bp, Homo sapiens
cttctctccaccctgaaacgatgccaaaatgaccccaaatctcaaataaaagttggtgtctgttgctgtaaa

SEQ ID NO: 98852 - DNA, 71 bp, Homo sapiens
accctgaaacgatgccaaaatgaccccaaatctcaaataaaagttggtgtctgttgctgtaaatgtacaaa

SEQ ID NO: 98853 - DNA, 70 bp, Homo sapiens
aaacgatgccaaaatgaccccaaatctcaaataaaagttggtgtctgttgctgtaaatgtacaaataacc

SEQ ID NO: 98854 - DNA, 69 bp, Homo sapiens
aaatgaccccaaatctcaaataaaagttggtgtctgttgctgtaaatgtacaaataacccaaagtcaaa

SEQ ID NO: 98855 - DNA, 69 bp, Homo sapiens
ctcaaataaaagttggtgtctgttgctgtaaatgtacaaataacccaaagtcaaaattagggatggaag

SEQ ID NO: 98856 - DNA, 69 bp, Homo sapiens
tctgttgctgtaaatgtacaaataacccaaagtcaaaattagggatggaagttaccattccttttgcct

SEQ ID NO: 98857 - DNA, 68 bp, Homo sapiens
ctgtaaatgtacaaataacccaaagtcaaaattagggatggaagttaccattccttttgccttctgtg

SEQ ID NO: 98858 - DNA, 66 bp, Homo sapiens
acaaataacccaaagtcaaaattagggatggaagttaccattccttttgccttctgtgttttgagg

SEQ ID NO: 98859 - DNA, 67 bp, Homo sapiens
aaagtcaaaattagggatggaagttaccattccttttgccttctgtgttttgaggtggtcgtgggga

SEQ ID NO: 98860 - DNA, 68 bp, Homo sapiens
agttaccattccttttgccttctgtgttttgaggtggtcgtggggaggaggaaggctttcagggacaa

SEQ ID NO: 98861 - DNA, 71 bp, Homo sapiens
ttttgccttctgtgttttgaggtggtcgtggggaggaggaaggctttcagggacaagcagacggcgacagg

SEQ ID NO: 98862 - DNA, 77 bp, Homo sapiens
ttgaggtggtcgtggggaggaggaaggctttcagggacaagcagacggcgacagggatcacactgtcacctgtgtgc

SEQ ID NO: 98863 - DNA, 76 bp, Homo sapiens
ggaggaggaaggctttcagggacaagcagacggcgacagggatcacactgtcacctgtgtgcgccttttcttctaa

SEQ ID NO: 98864 - DNA, 76 bp, Homo sapiens
aaggctttcagggacaagcagacggcgacagggatcacactgtcacctgtgtgcgccttttcttctaatggcctta

SEQ ID NO: 98865 - DNA, 76 bp, Homo sapiens
agggacaagcagacggcgacagggatcacactgtcacctgtgtgcgccttttcttctaatggccttaaactgccaa

SEQ ID NO: 98866 - DNA, 77 bp, Homo sapiens
agacggcgacagggatcacactgtcacctgtgtgcgccttttcttctaatggccttaaactgccaagtggctgcaac

SEQ ID NO: 98867 - DNA, 82 bp, Homo sapiens
gatcacactgtcacctgtgtgcgccttttcttctaatggccttaaactgccaagtggctgcaactgcagcgtgctgatttta

SEQ ID NO: 98868 - DNA, 78 bp, Homo sapiens
actgtcacctgtgtgcgccttttcttctaatggccttaaactgccaagtggctgcaactgcagcgtgctgattttaaa

SEQ ID NO: 98869 - DNA, 78 bp, Homo sapiens
tgcgccttttcttctaatggccttaaactgccaagtggctgcaactgcagcgtgctgattttaaatgcttttatggaa

SEQ ID NO: 98870 - DNA, 77 bp, Homo sapiens
ttttcttctaatggccttaaactgccaagtggctgcaactgcagcgtgctgattttaaatgcttttatggaaagcac

SEQ ID NO: 98871 - DNA, 75 bp, Homo sapiens
caactgcagcgtgctgattttaaatgcttttatggaaagcaccatccccttttcgactagcatcacttaaaataa

SEQ ID NO: 98872 - DNA, 75 bp, Homo sapiens
taaatgcttttatggaaagcaccatccccttttcgactagcatcacttaaaataatgagttagatgcacttgtat

SEQ ID NO: 98873 - DNA, 75 bp, Homo sapiens
ttttatggaaagcaccatccccttttcgactagcatcacttaaaataatgagttagatgcacttgtattattctg

SEQ ID NO: 98874 - DNA, 75 bp, Homo sapiens
aaagcaccatccccttttcgactagcatcacttaaaataatgagttagatgcacttgtattattctgtctttcaa

SEQ ID NO: 98875 - DNA, 78 bp, Homo sapiens
actagcatcacttaaaataatgagttagatgcacttgtattattctgtctttcaagtggattaaattcacaggctcgc

SEQ ID NO: 98876 - DNA, 77 bp, Homo sapiens
aaaataatgagttagatgcacttgtattattctgtctttcaagtggattaaattcacaggctcgctctcctccagtc

SEQ ID NO: 98877 - DNA, 77 bp, Homo sapiens
acttgtattattctgtctttcaagtggattaaattcacaggctcgctctcctccagtctcgcaagctttggcctggc

SEQ ID NO: 98878 - DNA, 80 bp, Homo sapiens
ttcaagtggattaaattcacaggctcgctctcctccagtctcgcaagctttggcctggctgtctgaacctccagattaga

SEQ ID NO: 98879 - DNA, 85 bp, Homo sapiens
ttaaattcacaggctcgctctcctccagtctcgcaagctttggcctggctgtctgaacctccagattagactgatgagcacatgc

SEQ ID NO: 98880 - DNA, 87 bp, Homo sapiens
ctcgctctcctccagtctcgcaagctttggcctggctgtctgaacctccagattagactgatgagcacatgccagacagcaatgaaa

SEQ ID NO: 98881 - DNA, 88 bp, Homo sapiens
tcctccagtctcgcaagctttggcctggctgtctgaacctccagattagactgatgagcacatgccagacagcaatgaaatgcaatta

SEQ ID NO: 98882 - DNA, 84 bp, Homo sapiens
aagctttggcctggctgtctgaacctccagattagactgatgagcacatgccagacagcaatgaaatgcaattacccaggcaaa

SEQ ID NO: 98883 - DNA, 84 bp, Homo sapiens
tggctgtctgaacctccagattagactgatgagcacatgccagacagcaatgaaatgcaattacccaggcaaacttttgaagga

SEQ ID NO: 98884 - DNA, 81 bp, Homo sapiens
gtctgaacctccagattagactgatgagcacatgccagacagcaatgaaatgcaattacccaggcaaacttttgaaggatt

SEQ ID NO: 98885 - DNA, 80 bp, Homo sapiens
agattagactgatgagcacatgccagacagcaatgaaatgcaattacccaggcaaacttttgaaggatttgagccctggg

SEQ ID NO: 98886 - DNA, 80 bp, Homo sapiens
atgagcacatgccagacagcaatgaaatgcaattacccaggcaaacttttgaaggatttgagccctggggcacaggctgt

SEQ ID NO: 98887 - DNA, 75 bp, Homo sapiens
cagacagcaatgaaatgcaattacccaggcaaacttttgaaggatttgagccctggggcacaggctgtttacgaa

SEQ ID NO: 98888 - DNA, 72 bp, Homo sapiens
tgaaatgcaattacccaggcaaacttttgaaggatttgagccctggggcacaggctgtttacgaaagactaa

SEQ ID NO: 98889 - DNA, 70 bp, Homo sapiens
aaacttttgaaggatttgagccctggggcacaggctgtttacgaaagactaaaagcaccgtttgtgctga

SEQ ID NO: 98890 - DNA, 74 bp, Homo sapiens
tttgaaggatttgagccctggggcacaggctgtttacgaaagactaaaagcaccgtttgtgctgagcaggacca

SEQ ID NO: 98891 - DNA, 72 bp, Homo sapiens
ccctggggcacaggctgtttacgaaagactaaaagcaccgtttgtgctgagcaggaccagttgcctccgtct

SEQ ID NO: 98892 - DNA, 73 bp, Homo sapiens
tgtttacgaaagactaaaagcaccgtttgtgctgagcaggaccagttgcctccgtcttttccagttctggatc

SEQ ID NO: 98893 - DNA, 76 bp, Homo sapiens
agactaaaagcaccgtttgtgctgagcaggaccagttgcctccgtcttttccagttctggatcctgcctgccactg

SEQ ID NO: 98894 - DNA, 78 bp, Homo sapiens
ctgagcaggaccagttgcctccgtcttttccagttctggatcctgcctgccactggactgcaggcaggatttctgggg

SEQ ID NO: 98895 - DNA, 77 bp, Homo sapiens
agttgcctccgtcttttccagttctggatcctgcctgccactggactgcaggcaggatttctgggggcctgataaca

SEQ ID NO: 98896 - DNA, 81 bp, Homo sapiens
tcttttccagttctggatcctgcctgccactggactgcaggcaggatttctgggggcctgataacatcaggcttctgtcca

SEQ ID NO: 98897 - DNA, 83 bp, Homo sapiens
agttctggatcctgcctgccactggactgcaggcaggatttctgggggcctgataacatcaggcttctgtccacacctcagca

SEQ ID NO: 98898 - DNA, 81 bp, Homo sapiens
atcctgcctgccactggactgcaggcaggatttctgggggcctgataacatcaggcttctgtccacacctcagcacctcgg

SEQ ID NO: 98899 - DNA, 75 bp, Homo sapiens
aggcaggatttctgggggcctgataacatcaggcttctgtccacacctcagcacctcggggtctttgctctgttt

SEQ ID NO: 98900 - DNA, 75 bp, Homo sapiens
tttctgggggcctgataacatcaggcttctgtccacacctcagcacctcggggtctttgctctgtttttcaacaa

SEQ ID NO: 98901 - DNA, 75 bp, Homo sapiens
ataacatcaggcttctgtccacacctcagcacctcggggtctttgctctgtttttcaacaagaaaatgcaagtac

SEQ ID NO: 98902 - DNA, 72 bp, Homo sapiens
cacctcagcacctcggggtctttgctctgtttttcaacaagaaaatgcaagtaccaacaaaagcctattata

SEQ ID NO: 98903 - DNA, 70 bp, Homo sapiens
acctcggggtctttgctctgtttttcaacaagaaaatgcaagtaccaacaaaagcctattataacatctc

SEQ ID NO: 98904 - DNA, 72 bp, Homo sapiens
tttgctctgtttttcaacaagaaaatgcaagtaccaacaaaagcctattataacatctccctttgtgttcac

SEQ ID NO: 98905 - DNA, 73 bp, Homo sapiens
tttttcaacaagaaaatgcaagtaccaacaaaagcctattataacatctccctttgtgttcactgactgactc

SEQ ID NO: 98906 - DNA, 75 bp, Homo sapiens
aacaagaaaatgcaagtaccaacaaaagcctattataacatctccctttgtgttcactgactgactctctctctc

SEQ ID NO: 98907 - DNA, 75 bp, Homo sapiens
aagtaccaacaaaagcctattataacatctccctttgtgttcactgactgactctctctctctcattgacttatt

SEQ ID NO: 98908 - DNA, 75 bp, Homo sapiens
acaaaagcctattataacatctccctttgtgttcactgactgactctctctctctcattgacttatttttttgta

SEQ ID NO: 98909 - DNA, 76 bp, Homo sapiens
tctctctctctcattgacttatttttttgtattgtgtactaccccgaaaaaatgcagccaggaatcatcctatagc

SEQ ID NO: 98910 - DNA, 76 bp, Homo sapiens
tctctcattgacttatttttttgtattgtgtactaccccgaaaaaatgcagccaggaatcatcctatagctgactg

SEQ ID NO: 98911 - DNA, 73 bp, Homo sapiens
atttttttgtattgtgtactaccccgaaaaaatgcagccaggaatcatcctatagctgactggctgtgtaact

SEQ ID NO: 98912 - DNA, 76 bp, Homo sapiens
tttgtattgtgtactaccccgaaaaaatgcagccaggaatcatcctatagctgactggctgtgtaacttctttgga

SEQ ID NO: 98913 - DNA, 75 bp, Homo sapiens
gtactaccccgaaaaaatgcagccaggaatcatcctatagctgactggctgtgtaacttctttggaaatgaacaa

SEQ ID NO: 98914 - DNA, 74 bp, Homo sapiens
aaaatgcagccaggaatcatcctatagctgactggctgtgtaacttctttggaaatgaacaacctttccaaaaa

SEQ ID NO: 98915 - DNA, 69 bp, Homo sapiens
tatagctgactggctgtgtaacttctttggaaatgaacaacctttccaaaaaacaggaacttcccgtct

SEQ ID NO: 98916 - DNA, 67 bp, Homo sapiens
tggctgtgtaacttctttggaaatgaacaacctttccaaaaaacaggaacttcccgtcttctttgaa

SEQ ID NO: 98917 - DNA, 64 bp, Homo sapiens
gtgtaacttctttggaaatgaacaacctttccaaaaaacaggaacttcccgtcttctttgaaaa

SEQ ID NO: 98918 - DNA, 61 bp, Homo sapiens
tttggaaatgaacaacctttccaaaaaacaggaacttcccgtcttctttgaaaaaaaaaat

SEQ ID NO: 98919 - DNA, 68 bp, Homo sapiens
aaaaattaaaaagcaaaccagtctcaacagcacctctgaattaccttccccttgatttgaacaaaaga

SEQ ID NO: 98920 - DNA, 71 bp, Homo sapiens
aaccagtctcaacagcacctctgaattaccttccccttgatttgaacaaaagaggtttcagaggaacagag

SEQ ID NO: 98921 - DNA, 69 bp, Homo sapiens
ccttgatttgaacaaaagaggtttcagaggaacagaggtggagggaagagaaaacaaagaatgggcaaa

SEQ ID NO: 98922 - DNA, 68 bp, Homo sapiens
tttgaacaaaagaggtttcagaggaacagaggtggagggaagagaaaacaaagaatgggcaaagggaa

SEQ ID NO: 98923 - DNA, 71 bp, Homo sapiens
tttcagaggaacagaggtggagggaagagaaaacaaagaatgggcaaagggaaggttgacaaggagagtga

SEQ ID NO: 98924 - DNA, 70 bp, Homo sapiens
aacagaggtggagggaagagaaaacaaagaatgggcaaagggaaggttgacaaggagagtgaccatggtc

SEQ ID NO: 98925 - DNA, 72 bp, Homo sapiens
agggaagagaaaacaaagaatgggcaaagggaaggttgacaaggagagtgaccatggtctcccctctgctga

SEQ ID NO: 98926 - DNA, 71 bp, Homo sapiens
aaacaaagaatgggcaaagggaaggttgacaaggagagtgaccatggtctcccctctgctgacccagactt

SEQ ID NO: 98927 - DNA, 70 bp, Homo sapiens
aagaatgggcaaagggaaggttgacaaggagagtgaccatggtctcccctctgctgacccagactttttt

SEQ ID NO: 98928 - DNA, 69 bp, Homo sapiens
aaagggaaggttgacaaggagagtgaccatggtctcccctctgctgacccagacttttttttgtttgtg

SEQ ID NO: 98929 - DNA, 75 bp, Homo sapiens
tttgtgtgttttagacaactgtgggtgacacagaggtgttggaatggttcttcatccattcagctgaaaattaaa

SEQ ID NO: 98930 - DNA, 74 bp, Homo sapiens
ttttagacaactgtgggtgacacagaggtgttggaatggttcttcatccattcagctgaaaattaaaatgtaat

SEQ ID NO: 98931 - DNA, 77 bp, Homo sapiens
ctgtgggtgacacagaggtgttggaatggttcttcatccattcagctgaaaattaaaatgtaattctgctaggagaa

SEQ ID NO: 98932 - DNA, 77 bp, Homo sapiens
acacagaggtgttggaatggttcttcatccattcagctgaaaattaaaatgtaattctgctaggagaatgctgggga

SEQ ID NO: 98933 - DNA, 74 bp, Homo sapiens
gttggaatggttcttcatccattcagctgaaaattaaaatgtaattctgctaggagaatgctggggaggggagg

SEQ ID NO: 98934 - DNA, 70 bp, Homo sapiens
ttcagctgaaaattaaaatgtaattctgctaggagaatgctggggaggggagggactggggaaggttcct

SEQ ID NO: 98935 - DNA, 69 bp, Homo sapiens
ttaaaatgtaattctgctaggagaatgctggggaggggagggactggggaaggttccttggcttttgta

SEQ ID NO: 98936 - DNA, 72 bp, Homo sapiens
taattctgctaggagaatgctggggaggggagggactggggaaggttccttggcttttgtagttgctgtgga

SEQ ID NO: 98937 - DNA, 70 bp, Homo sapiens
agaatgctggggaggggagggactggggaaggttccttggcttttgtagttgctgtggaggaagcaccaa

SEQ ID NO: 98938 - DNA, 72 bp, Homo sapiens
gaggggagggactggggaaggttccttggcttttgtagttgctgtggaggaagcaccaagtgaagccagcag

SEQ ID NO: 98939 - DNA, 77 bp, Homo sapiens
actggggaaggttccttggcttttgtagttgctgtggaggaagcaccaagtgaagccagcaggatggcagcactgaa

SEQ ID NO: 98940 - DNA, 78 bp, Homo sapiens
aaggttccttggcttttgtagttgctgtggaggaagcaccaagtgaagccagcaggatggcagcactgaaacgctcca

SEQ ID NO: 98941 - DNA, 78 bp, Homo sapiens
cttttgtagttgctgtggaggaagcaccaagtgaagccagcaggatggcagcactgaaacgctccagggctggggttg

SEQ ID NO: 98942 - DNA, 78 bp, Homo sapiens
tagttgctgtggaggaagcaccaagtgaagccagcaggatggcagcactgaaacgctccagggctggggttgggggtc

SEQ ID NO: 98943 - DNA, 75 bp, Homo sapiens
aggaagcaccaagtgaagccagcaggatggcagcactgaaacgctccagggctggggttgggggtcctgaagccc

SEQ ID NO: 98944 - DNA, 74 bp, Homo sapiens
aagtgaagccagcaggatggcagcactgaaacgctccagggctggggttgggggtcctgaagcccccgccatag

SEQ ID NO: 98945 - DNA, 70 bp, Homo sapiens
agcactgaaacgctccagggctggggttgggggtcctgaagcccccgccatagggcacagggtgggtgtg

SEQ ID NO: 98946 - DNA, 67 bp, Homo sapiens
aaacgctccagggctggggttgggggtcctgaagcccccgccatagggcacagggtgggtgtgggaa

SEQ ID NO: 98947 - DNA, 70 bp, Homo sapiens
tggggttgggggtcctgaagcccccgccatagggcacagggtgggtgtgggaaagaagcttccatgagga

SEQ ID NO: 98948 - DNA, 71 bp, Homo sapiens
ggtcctgaagcccccgccatagggcacagggtgggtgtgggaaagaagcttccatgaggagtgggaaaata

SEQ ID NO: 98949 - DNA, 71 bp, Homo sapiens
atagggcacagggtgggtgtgggaaagaagcttccatgaggagtgggaaaatacgagggatagcaagaaaa

SEQ ID NO: 98950 - DNA, 69 bp, Homo sapiens
aaagaagcttccatgaggagtgggaaaatacgagggatagcaagaaaaagagtaaacttggaaggatgg

SEQ ID NO: 98951 - DNA, 70 bp, Homo sapiens
ttccatgaggagtgggaaaatacgagggatagcaagaaaaagagtaaacttggaaggatgggtttcagaa

SEQ ID NO: 98952 - DNA, 69 bp, Homo sapiens
aaatacgagggatagcaagaaaaagagtaaacttggaaggatgggtttcagaagtgctggaaccaagaa

SEQ ID NO: 98953 - DNA, 70 bp, Homo sapiens
caagaaaaagagtaaacttggaaggatgggtttcagaagtgctggaaccaagaacaatctagaatgcttt

SEQ ID NO: 98954 - DNA, 71 bp, Homo sapiens
aaaagagtaaacttggaaggatgggtttcagaagtgctggaaccaagaacaatctagaatgcttttagaga

SEQ ID NO: 98955 - DNA, 74 bp, Homo sapiens
acttggaaggatgggtttcagaagtgctggaaccaagaacaatctagaatgcttttagagaaggaggccacaca

SEQ ID NO: 98956 - DNA, 79 bp, Homo sapiens
tttcagaagtgctggaaccaagaacaatctagaatgcttttagagaaggaggccacacaggggcacatctgcacaccaa

SEQ ID NO: 98957 - DNA, 77 bp, Homo sapiens
aagtgctggaaccaagaacaatctagaatgcttttagagaaggaggccacacaggggcacatctgcacaccaaggaa

SEQ ID NO: 98958 - DNA, 75 bp, Homo sapiens
aaccaagaacaatctagaatgcttttagagaaggaggccacacaggggcacatctgcacaccaaggaaggaggaa

SEQ ID NO: 98959 - DNA, 77 bp, Homo sapiens
aatctagaatgcttttagagaaggaggccacacaggggcacatctgcacaccaaggaaggaggaagaacgccactgc

SEQ ID NO: 98960 - DNA, 78 bp, Homo sapiens
ttttagagaaggaggccacacaggggcacatctgcacaccaaggaaggaggaagaacgccactgccaggagctagcag

SEQ ID NO: 98961 - DNA, 78 bp, Homo sapiens
aaggaggccacacaggggcacatctgcacaccaaggaaggaggaagaacgccactgccaggagctagcagtgagtagg

SEQ ID NO: 98962 - DNA, 77 bp, Homo sapiens
gggcacatctgcacaccaaggaaggaggaagaacgccactgccaggagctagcagtgagtaggggttgggatccaag

SEQ ID NO: 98963 - DNA, 75 bp, Homo sapiens
atctgcacaccaaggaaggaggaagaacgccactgccaggagctagcagtgagtaggggttgggatccaaggaag

SEQ ID NO: 98964 - DNA, 72 bp, Homo sapiens
gaaggaggaagaacgccactgccaggagctagcagtgagtaggggttgggatccaaggaagtggtaggtaaa

SEQ ID NO: 98965 - DNA, 76 bp, Homo sapiens
agaacgccactgccaggagctagcagtgagtaggggttgggatccaaggaagtggtaggtaaatcatgcactctta

SEQ ID NO: 98966 - DNA, 75 bp, Homo sapiens
actgccaggagctagcagtgagtaggggttgggatccaaggaagtggtaggtaaatcatgcactcttactctggg

SEQ ID NO: 98967 - DNA, 75 bp, Homo sapiens
tagcagtgagtaggggttgggatccaaggaagtggtaggtaaatcatgcactcttactctggggccgagatgtct

SEQ ID NO: 98968 - DNA, 72 bp, Homo sapiens
taggggttgggatccaaggaagtggtaggtaaatcatgcactcttactctggggccgagatgtcttacaaaa

SEQ ID NO: 98969 - DNA, 74 bp, Homo sapiens
ttgggatccaaggaagtggtaggtaaatcatgcactcttactctggggccgagatgtcttacaaaatgtggaaa

SEQ ID NO: 98970 - DNA, 77 bp, Homo sapiens
aggtaaatcatgcactcttactctggggccgagatgtcttacaaaatgtggaaagcagggtcaggattcagaaggca

SEQ ID NO: 98971 - DNA, 76 bp, Homo sapiens
actcttactctggggccgagatgtcttacaaaatgtggaaagcagggtcaggattcagaaggcagcctccgatgag

SEQ ID NO: 98972 - DNA, 79 bp, Homo sapiens
gggccgagatgtcttacaaaatgtggaaagcagggtcaggattcagaaggcagcctccgatgaggctgagcagtcttta

SEQ ID NO: 98973 - DNA, 79 bp, Homo sapiens
agatgtcttacaaaatgtggaaagcagggtcaggattcagaaggcagcctccgatgaggctgagcagtctttagaggaa

SEQ ID NO: 98974 - DNA, 78 bp, Homo sapiens
aaaatgtggaaagcagggtcaggattcagaaggcagcctccgatgaggctgagcagtctttagaggaaggaagatgaa

SEQ ID NO: 98975 - DNA, 77 bp, Homo sapiens
aaagcagggtcaggattcagaaggcagcctccgatgaggctgagcagtctttagaggaaggaagatgaaaagaaaga

SEQ ID NO: 98976 - DNA, 79 bp, Homo sapiens
aggattcagaaggcagcctccgatgaggctgagcagtctttagaggaaggaagatgaaaagaaagaagctgggatgaga

SEQ ID NO: 98977 - DNA, 77 bp, Homo sapiens
aaggcagcctccgatgaggctgagcagtctttagaggaaggaagatgaaaagaaagaagctgggatgagagagtttg

SEQ ID NO: 98978 - DNA, 74 bp, Homo sapiens
cagtctttagaggaaggaagatgaaaagaaagaagctgggatgagagagtttggcctcagagagggaatgggaa

SEQ ID NO: 98979 - DNA, 72 bp, Homo sapiens
tttagaggaaggaagatgaaaagaaagaagctgggatgagagagtttggcctcagagagggaatgggaaagg

SEQ ID NO: 98980 - DNA, 73 bp, Homo sapiens
atgaaaagaaagaagctgggatgagagagtttggcctcagagagggaatgggaaagggcaggggggctcacta

SEQ ID NO: 98981 - DNA, 73 bp, Homo sapiens
aagaagctgggatgagagagtttggcctcagagagggaatgggaaagggcaggggggctcactagcttagtta

SEQ ID NO: 98982 - DNA, 76 bp, Homo sapiens
atgagagagtttggcctcagagagggaatgggaaagggcaggggggctcactagcttagttagcagaaggctgtga

SEQ ID NO: 98983 - DNA, 74 bp, Homo sapiens
agagggaatgggaaagggcaggggggctcactagcttagttagcagaaggctgtgaaagtgatgagggccagaa

SEQ ID NO: 98984 - DNA, 74 bp, Homo sapiens
aatgggaaagggcaggggggctcactagcttagttagcagaaggctgtgaaagtgatgagggccagaaagccaa

SEQ ID NO: 98985 - DNA, 81 bp, Homo sapiens
ttagttagcagaaggctgtgaaagtgatgagggccagaaagccaagaagcatggagacttcctaggctcctcctcatcaca

SEQ ID NO: 98986 - DNA, 78 bp, Homo sapiens
aaggctgtgaaagtgatgagggccagaaagccaagaagcatggagacttcctaggctcctcctcatcacaaacaagaa

SEQ ID NO: 98987 - DNA, 75 bp, Homo sapiens
aaagtgatgagggccagaaagccaagaagcatggagacttcctaggctcctcctcatcacaaacaagaagggaaa

SEQ ID NO: 98988 - DNA, 73 bp, Homo sapiens
agaaagccaagaagcatggagacttcctaggctcctcctcatcacaaacaagaagggaaatggcccaagaaag

SEQ ID NO: 98989 - DNA, 73 bp, Homo sapiens
aagaagcatggagacttcctaggctcctcctcatcacaaacaagaagggaaatggcccaagaaagggcaggtg

SEQ ID NO: 98990 - DNA, 74 bp, Homo sapiens
atggagacttcctaggctcctcctcatcacaaacaagaagggaaatggcccaagaaagggcaggtggtgccagc

SEQ ID NO: 98991 - DNA, 74 bp, Homo sapiens
cctaggctcctcctcatcacaaacaagaagggaaatggcccaagaaagggcaggtggtgccagccaggctctcc

SEQ ID NO: 98992 - DNA, 70 bp, Homo sapiens
atcacaaacaagaagggaaatggcccaagaaagggcaggtggtgccagccaggctctccccccaggttcc

SEQ ID NO: 98993 - DNA, 69 bp, Homo sapiens
aaacaagaagggaaatggcccaagaaagggcaggtggtgccagccaggctctccccccaggttcccagc

SEQ ID NO: 98994 - DNA, 71 bp, Homo sapiens
aagaaagggcaggtggtgccagccaggctctccccccaggttcccagctgggatctgggaaaggagaagga

SEQ ID NO: 98995 - DNA, 72 bp, Homo sapiens
gtggtgccagccaggctctccccccaggttcccagctgggatctgggaaaggagaaggaaagaatggagaaa

SEQ ID NO: 98996 - DNA, 68 bp, Homo sapiens
cccaggttcccagctgggatctgggaaaggagaaggaaagaatggagaaaggaaacagccaaagggcc

SEQ ID NO: 98997 - DNA, 72 bp, Homo sapiens
cagctgggatctgggaaaggagaaggaaagaatggagaaaggaaacagccaaagggccccagcagagagttg

SEQ ID NO: 98998 - DNA, 73 bp, Homo sapiens
tctgggaaaggagaaggaaagaatggagaaaggaaacagccaaagggccccagcagagagttggtgctatgta

SEQ ID NO: 98999 - DNA, 71 bp, Homo sapiens
agaaggaaagaatggagaaaggaaacagccaaagggccccagcagagagttggtgctatgtaaggaaagaa

SEQ ID NO: 99000 - DNA, 71 bp, Homo sapiens
aaagggccccagcagagagttggtgctatgtaaggaaagaaattgtttagggcaggatattctgaaattaa

SEQ ID NO: 99001 - DNA, 70 bp, Homo sapiens
agcagagagttggtgctatgtaaggaaagaaattgtttagggcaggatattctgaaattaacttaaaacc

SEQ ID NO: 99002 - DNA, 68 bp, Homo sapiens
agagttggtgctatgtaaggaaagaaattgtttagggcaggatattctgaaattaacttaaaacctaa

SEQ ID NO: 99003 - DNA, 67 bp, Homo sapiens
gaaattgtttagggcaggatattctgaaattaacttaaaacctaaaacaaacagttttgacttgctg

SEQ ID NO: 99004 - DNA, 68 bp, Homo sapiens
tttagggcaggatattctgaaattaacttaaaacctaaaacaaacagttttgacttgctgtcccagga

SEQ ID NO: 99005 - DNA, 67 bp, Homo sapiens
tctgaaattaacttaaaacctaaaacaaacagttttgacttgctgtcccaggagcaaggaaaaatcc

SEQ ID NO: 99006 - DNA, 65 bp, Homo sapiens
attaacttaaaacctaaaacaaacagttttgacttgctgtcccaggagcaaggaaaaatccttcc

SEQ ID NO: 99007 - DNA, 71 bp, Homo sapiens
aaacctaaaacaaacagttttgacttgctgtcccaggagcaaggaaaaatccttcctcaacgactcatgca

SEQ ID NO: 99008 - DNA, 74 bp, Homo sapiens
aaacagttttgacttgctgtcccaggagcaaggaaaaatccttcctcaacgactcatgcacccctttctctgca

SEQ ID NO: 99009 - DNA, 75 bp, Homo sapiens
tcccaggagcaaggaaaaatccttcctcaacgactcatgcacccctttctctgcagctctgggctaggttcgtgg

SEQ ID NO: 99010 - DNA, 72 bp, Homo sapiens
aaaatccttcctcaacgactcatgcacccctttctctgcagctctgggctaggttcgtgggggtcctgggaa

SEQ ID NO: 99011 - DNA, 74 bp, Homo sapiens
ccttcctcaacgactcatgcacccctttctctgcagctctgggctaggttcgtgggggtcctgggaaggagaga

SEQ ID NO: 99012 - DNA, 75 bp, Homo sapiens
actcatgcacccctttctctgcagctctgggctaggttcgtgggggtcctgggaaggagagagcgttcctgccca

SEQ ID NO: 99013 - DNA, 74 bp, Homo sapiens
tttctctgcagctctgggctaggttcgtgggggtcctgggaaggagagagcgttcctgcccacctggaagtctc

SEQ ID NO: 99014 - DNA, 71 bp, Homo sapiens
agctctgggctaggttcgtgggggtcctgggaaggagagagcgttcctgcccacctggaagtctccttcca

SEQ ID NO: 99015 - DNA, 73 bp, Homo sapiens
gggtcctgggaaggagagagcgttcctgcccacctggaagtctccttccaacttgttgatctcagaaccctga

SEQ ID NO: 99016 - DNA, 77 bp, Homo sapiens
tgggaaggagagagcgttcctgcccacctggaagtctccttccaacttgttgatctcagaaccctgatgtgctctgg

SEQ ID NO: 99017 - DNA, 76 bp, Homo sapiens
agagcgttcctgcccacctggaagtctccttccaacttgttgatctcagaaccctgatgtgctctggggagaagag

SEQ ID NO: 99018 - DNA, 76 bp, Homo sapiens
cacctggaagtctccttccaacttgttgatctcagaaccctgatgtgctctggggagaagagtgtgtagcgggtgg

SEQ ID NO: 99019 - DNA, 75 bp, Homo sapiens
aagtctccttccaacttgttgatctcagaaccctgatgtgctctggggagaagagtgtgtagcgggtgggggcac

SEQ ID NO: 99020 - DNA, 76 bp, Homo sapiens
ttccaacttgttgatctcagaaccctgatgtgctctggggagaagagtgtgtagcgggtgggggcacgctcagggt

SEQ ID NO: 99021 - DNA, 80 bp, Homo sapiens
ttgatctcagaaccctgatgtgctctggggagaagagtgtgtagcgggtgggggcacgctcagggttgcctgcctggatg

SEQ ID NO: 99022 - DNA, 78 bp, Homo sapiens
aaccctgatgtgctctggggagaagagtgtgtagcgggtgggggcacgctcagggttgcctgcctggatggcatctcg

SEQ ID NO: 99023 - DNA, 74 bp, Homo sapiens
agtgtgtagcgggtgggggcacgctcagggttgcctgcctggatggcatctcggtggtggtggttgagttttta

SEQ ID NO: 99024 - DNA, 74 bp, Homo sapiens
gggtgggggcacgctcagggttgcctgcctggatggcatctcggtggtggtggttgagtttttactgtcttaca

SEQ ID NO: 99025 - DNA, 78 bp, Homo sapiens
acgctcagggttgcctgcctggatggcatctcggtggtggtggttgagtttttactgtcttacagcacagatggtgga

SEQ ID NO: 99026 - DNA, 79 bp, Homo sapiens
gtggttgagtttttactgtcttacagcacagatggtggaaaatcatagccatgacagttggtgaagcgtcactcaaaca

SEQ ID NO: 99027 - DNA, 82 bp, Homo sapiens
aaatcatagccatgacagttggtgaagcgtcactcaaacatgcagcctatctggtaacagcagaaggcaatgtgtggggaaa

SEQ ID NO: 99028 - DNA, 82 bp, Homo sapiens
atgacagttggtgaagcgtcactcaaacatgcagcctatctggtaacagcagaaggcaatgtgtggggaaatgccaaagtga

SEQ ID NO: 99029 - DNA, 82 bp, Homo sapiens
gttggtgaagcgtcactcaaacatgcagcctatctggtaacagcagaaggcaatgtgtggggaaatgccaaagtgacagaga

SEQ ID NO: 99030 - DNA, 83 bp, Homo sapiens
actcaaacatgcagcctatctggtaacagcagaaggcaatgtgtggggaaatgccaaagtgacagagaccaacagatcagtca

SEQ ID NO: 99031 - DNA, 83 bp, Homo sapiens
acatgcagcctatctggtaacagcagaaggcaatgtgtggggaaatgccaaagtgacagagaccaacagatcagtcaggagtc

SEQ ID NO: 99032 - DNA, 79 bp, Homo sapiens
tatctggtaacagcagaaggcaatgtgtggggaaatgccaaagtgacagagaccaacagatcagtcaggagtcgggaag

SEQ ID NO: 99033 - DNA, 77 bp, Homo sapiens
agaaggcaatgtgtggggaaatgccaaagtgacagagaccaacagatcagtcaggagtcgggaagggagtcagtctg

SEQ ID NO: 99034 - DNA, 77 bp, Homo sapiens
aatgtgtggggaaatgccaaagtgacagagaccaacagatcagtcaggagtcgggaagggagtcagtctgggcctca

SEQ ID NO: 99035 - DNA, 77 bp, Homo sapiens
aaatgccaaagtgacagagaccaacagatcagtcaggagtcgggaagggagtcagtctgggcctcagtgaggacaaa

SEQ ID NO: 99036 - DNA, 78 bp, Homo sapiens
aagtgacagagaccaacagatcagtcaggagtcgggaagggagtcagtctgggcctcagtgaggacaaagatgttctg

SEQ ID NO: 99037 - DNA, 77 bp, Homo sapiens
accaacagatcagtcaggagtcgggaagggagtcagtctgggcctcagtgaggacaaagatgttctggaggagatgg

SEQ ID NO: 99038 - DNA, 76 bp, Homo sapiens
agtcaggagtcgggaagggagtcagtctgggcctcagtgaggacaaagatgttctggaggagatggggcaggtgag

SEQ ID NO: 99039 - DNA, 79 bp, Homo sapiens
agtcagtctgggcctcagtgaggacaaagatgttctggaggagatggggcaggtgaggtgccctgaagaatggcaggat

SEQ ID NO: 99040 - DNA, 79 bp, Homo sapiens
tcagtgaggacaaagatgttctggaggagatggggcaggtgaggtgccctgaagaatggcaggattcggggatgtggtg

SEQ ID NO: 99041 - DNA, 76 bp, Homo sapiens
atgttctggaggagatggggcaggtgaggtgccctgaagaatggcaggattcggggatgtggtggggaggagagga

SEQ ID NO: 99042 - DNA, 72 bp, Homo sapiens
atggggcaggtgaggtgccctgaagaatggcaggattcggggatgtggtggggaggagaggaaggaactttc

SEQ ID NO: 99043 - DNA, 71 bp, Homo sapiens
aggtgaggtgccctgaagaatggcaggattcggggatgtggtggggaggagaggaaggaactttctgggta

SEQ ID NO: 99044 - DNA, 75 bp, Homo sapiens
gatgtggtggggaggagaggaaggaactttctgggtaggcatccagcatggaccaaagcttgtgggcaggactgg

SEQ ID NO: 99045 - DNA, 75 bp, Homo sapiens
ggaggagaggaaggaactttctgggtaggcatccagcatggaccaaagcttgtgggcaggactggtcatgggtgt

SEQ ID NO: 99046 - DNA, 84 bp, Homo sapiens
atccagcatggaccaaagcttgtgggcaggactggtcatgggtgttcagagatcaagcaggaagatctgcagcattcacccacc

SEQ ID NO: 99047 - DNA, 83 bp, Homo sapiens
atggaccaaagcttgtgggcaggactggtcatgggtgttcagagatcaagcaggaagatctgcagcattcacccacctcagtg

SEQ ID NO: 99048 - DNA, 84 bp, Homo sapiens
aagcttgtgggcaggactggtcatgggtgttcagagatcaagcaggaagatctgcagcattcacccacctcagtgtccagcctc

SEQ ID NO: 99049 - DNA, 81 bp, Homo sapiens
actggtcatgggtgttcagagatcaagcaggaagatctgcagcattcacccacctcagtgtccagcctccctcctgttcgt

SEQ ID NO: 99050 - DNA, 82 bp, Homo sapiens
atgggtgttcagagatcaagcaggaagatctgcagcattcacccacctcagtgtccagcctccctcctgttcgttggcttga

SEQ ID NO: 99051 - DNA, 79 bp, Homo sapiens
agagatcaagcaggaagatctgcagcattcacccacctcagtgtccagcctccctcctgttcgttggcttgactttttg

SEQ ID NO: 99052 - DNA, 77 bp, Homo sapiens
aggaagatctgcagcattcacccacctcagtgtccagcctccctcctgttcgttggcttgactttttggtcatttca

SEQ ID NO: 99053 - DNA, 77 bp, Homo sapiens
agcattcacccacctcagtgtccagcctccctcctgttcgttggcttgactttttggtcatttcagagcaagaatga

SEQ ID NO: 99054 - DNA, 76 bp, Homo sapiens
cacctcagtgtccagcctccctcctgttcgttggcttgactttttggtcatttcagagcaagaatgagcttcggaa

SEQ ID NO: 99055 - DNA, 75 bp, Homo sapiens
agtgtccagcctccctcctgttcgttggcttgactttttggtcatttcagagcaagaatgagcttcggaagaatg

SEQ ID NO: 99056 - DNA, 76 bp, Homo sapiens
tccctcctgttcgttggcttgactttttggtcatttcagagcaagaatgagcttcggaagaatggagcaccttgtg

SEQ ID NO: 99057 - DNA, 77 bp, Homo sapiens
ttcgttggcttgactttttggtcatttcagagcaagaatgagcttcggaagaatggagcaccttgtggcccagaaca

SEQ ID NO: 99058 - DNA, 77 bp, Homo sapiens
ttgactttttggtcatttcagagcaagaatgagcttcggaagaatggagcaccttgtggcccagaacaaggcaggga

SEQ ID NO: 99059 - DNA, 79 bp, Homo sapiens
atttcagagcaagaatgagcttcggaagaatggagcaccttgtggcccagaacaaggcagggaggcatggctagagaag

SEQ ID NO: 99060 - DNA, 79 bp, Homo sapiens
agcaagaatgagcttcggaagaatggagcaccttgtggcccagaacaaggcagggaggcatggctagagaaggagacag

SEQ ID NO: 99061 - DNA, 76 bp, Homo sapiens
agcttcggaagaatggagcaccttgtggcccagaacaaggcagggaggcatggctagagaaggagacaggaaactg

SEQ ID NO: 99062 - DNA, 76 bp, Homo sapiens
agaatggagcaccttgtggcccagaacaaggcagggaggcatggctagagaaggagacaggaaactggtggttcca

SEQ ID NO: 99063 - DNA, 76 bp, Homo sapiens
aacaaggcagggaggcatggctagagaaggagacaggaaactggtggttccatggtctccataggtatcaggcctc

SEQ ID NO: 99064 - DNA, 78 bp, Homo sapiens
agggaggcatggctagagaaggagacaggaaactggtggttccatggtctccataggtatcaggcctccctggcatca

SEQ ID NO: 99065 - DNA, 79 bp, Homo sapiens
tagagaaggagacaggaaactggtggttccatggtctccataggtatcaggcctccctggcatcagctgacctgaaata

SEQ ID NO: 99066 - DNA, 78 bp, Homo sapiens
aaggagacaggaaactggtggttccatggtctccataggtatcaggcctccctggcatcagctgacctgaaatagcaa

SEQ ID NO: 99067 - DNA, 78 bp, Homo sapiens
aaactggtggttccatggtctccataggtatcaggcctccctggcatcagctgacctgaaatagcaacacctgcttct

SEQ ID NO: 99068 - DNA, 80 bp, Homo sapiens
ttccatggtctccataggtatcaggcctccctggcatcagctgacctgaaatagcaacacctgcttcttcggccactttc

SEQ ID NO: 99069 - DNA, 78 bp, Homo sapiens
ctccataggtatcaggcctccctggcatcagctgacctgaaatagcaacacctgcttcttcggccactttcctccaaa

SEQ ID NO: 99070 - DNA, 78 bp, Homo sapiens
atcaggcctccctggcatcagctgacctgaaatagcaacacctgcttcttcggccactttcctccaaaggtgacatat

SEQ ID NO: 99071 - DNA, 78 bp, Homo sapiens
catcagctgacctgaaatagcaacacctgcttcttcggccactttcctccaaaggtgacatattcagacaggttctac

SEQ ID NO: 99072 - DNA, 74 bp, Homo sapiens
acctgaaatagcaacacctgcttcttcggccactttcctccaaaggtgacatattcagacaggttctaccagga

SEQ ID NO: 99073 - DNA, 72 bp, Homo sapiens
cttcttcggccactttcctccaaaggtgacatattcagacaggttctaccaggagtgcagggctaagggaac

SEQ ID NO: 99074 - DNA, 76 bp, Homo sapiens
actttcctccaaaggtgacatattcagacaggttctaccaggagtgcagggctaagggaacctatgcagtgcagtc

SEQ ID NO: 99075 - DNA, 77 bp, Homo sapiens
aaaggtgacatattcagacaggttctaccaggagtgcagggctaagggaacctatgcagtgcagtccctggactctc

SEQ ID NO: 99076 - DNA, 78 bp, Homo sapiens
atattcagacaggttctaccaggagtgcagggctaagggaacctatgcagtgcagtccctggactctctgaaggccaa

SEQ ID NO: 99077 - DNA, 76 bp, Homo sapiens
aggttctaccaggagtgcagggctaagggaacctatgcagtgcagtccctggactctctgaaggccaaagtatcaa

SEQ ID NO: 99078 - DNA, 80 bp, Homo sapiens
aggagtgcagggctaagggaacctatgcagtgcagtccctggactctctgaaggccaaagtatcaacagtgagcacattg

SEQ ID NO: 99079 - DNA, 80 bp, Homo sapiens
ggctaagggaacctatgcagtgcagtccctggactctctgaaggccaaagtatcaacagtgagcacattgggtcttcaca

SEQ ID NO: 99080 - DNA, 81 bp, Homo sapiens
aacctatgcagtgcagtccctggactctctgaaggccaaagtatcaacagtgagcacattgggtcttcacacgtcactcaa

SEQ ID NO: 99081 - DNA, 81 bp, Homo sapiens
agtgcagtccctggactctctgaaggccaaagtatcaacagtgagcacattgggtcttcacacgtcactcaaggtcacata

SEQ ID NO: 99082 - DNA, 78 bp, Homo sapiens
ccctggactctctgaaggccaaagtatcaacagtgagcacattgggtcttcacacgtcactcaaggtcacatagaggg

SEQ ID NO: 99083 - DNA, 80 bp, Homo sapiens
tctgaaggccaaagtatcaacagtgagcacattgggtcttcacacgtcactcaaggtcacatagaggggattcaaactca

SEQ ID NO: 99084 - DNA, 78 bp, Homo sapiens
aaagtatcaacagtgagcacattgggtcttcacacgtcactcaaggtcacatagaggggattcaaactcaggctggag

SEQ ID NO: 99085 - DNA, 83 bp, Homo sapiens
ggctggagtgtagccagaagtccaggttgcctatgctcattgctattcaccgtctgtcactctgctgcctctgaaaagttgtc

SEQ ID NO: 99086 - DNA, 81 bp, Homo sapiens
tgtagccagaagtccaggttgcctatgctcattgctattcaccgtctgtcactctgctgcctctgaaaagttgtccttttg

SEQ ID NO: 99087 - DNA, 80 bp, Homo sapiens
tagccagaagtccaggttgcctatgctcattgctattcaccgtctgtcactctgctgcctctgaaaagttgtccttttgt

SEQ ID NO: 99088 - DNA, 81 bp, Homo sapiens
ttgcctatgctcattgctattcaccgtctgtcactctgctgcctctgaaaagttgtccttttgtttctctgggattgtcaa

SEQ ID NO: 99089 - DNA, 80 bp, Homo sapiens
ttgctattcaccgtctgtcactctgctgcctctgaaaagttgtccttttgtttctctgggattgtcaactgatgtacata

SEQ ID NO: 99090 - DNA, 80 bp, Homo sapiens
cgtctgtcactctgctgcctctgaaaagttgtccttttgtttctctgggattgtcaactgatgtacatacagagatacaa

SEQ ID NO: 99091 - DNA, 77 bp, Homo sapiens
actctgctgcctctgaaaagttgtccttttgtttctctgggattgtcaactgatgtacatacagagatacaagggtg

SEQ ID NO: 99092 - DNA, 78 bp, Homo sapiens
tctgaaaagttgtccttttgtttctctgggattgtcaactgatgtacatacagagatacaagggtggctgagctacaa

SEQ ID NO: 99093 - DNA, 79 bp, Homo sapiens
ttgtccttttgtttctctgggattgtcaactgatgtacatacagagatacaagggtggctgagctacaaatgatttata

SEQ ID NO: 99094 - DNA, 80 bp, Homo sapiens
tttctctgggattgtcaactgatgtacatacagagatacaagggtggctgagctacaaatgatttatactacaagaaaca

SEQ ID NO: 99095 - DNA, 81 bp, Homo sapiens
attgtcaactgatgtacatacagagatacaagggtggctgagctacaaatgatttatactacaagaaacagactggcgcaa

SEQ ID NO: 99096 - DNA, 80 bp, Homo sapiens
aactgatgtacatacagagatacaagggtggctgagctacaaatgatttatactacaagaaacagactggcgcaacctca

SEQ ID NO: 99097 - DNA, 79 bp, Homo sapiens
atacagagatacaagggtggctgagctacaaatgatttatactacaagaaacagactggcgcaacctcatctctggtaa

SEQ ID NO: 99098 - DNA, 78 bp, Homo sapiens
tacaagggtggctgagctacaaatgatttatactacaagaaacagactggcgcaacctcatctctggtaagtcctcag

SEQ ID NO: 99099 - DNA, 76 bp, Homo sapiens
aaatgatttatactacaagaaacagactggcgcaacctcatctctggtaagtcctcagtctcaaatgaaataaaca

SEQ ID NO: 99100 - DNA, 78 bp, Homo sapiens
tactacaagaaacagactggcgcaacctcatctctggtaagtcctcagtctcaaatgaaataaacagcatatggattt

SEQ ID NO: 99101 - DNA, 76 bp, Homo sapiens
aaacagactggcgcaacctcatctctggtaagtcctcagtctcaaatgaaataaacagcatatggattttccctgt

SEQ ID NO: 99102 - DNA, 77 bp, Homo sapiens
aacagactggcgcaacctcatctctggtaagtcctcagtctcaaatgaaataaacagcatatggattttccctgttg

SEQ ID NO: 99103 - DNA, 78 bp, Homo sapiens
actggcgcaacctcatctctggtaagtcctcagtctcaaatgaaataaacagcatatggattttccctgttgtgtcgc

SEQ ID NO: 99104 - DNA, 78 bp, Homo sapiens
cctcatctctggtaagtcctcagtctcaaatgaaataaacagcatatggattttccctgttgtgtcgctgaggccaaa

SEQ ID NO: 99105 - DNA, 77 bp, Homo sapiens
atctctggtaagtcctcagtctcaaatgaaataaacagcatatggattttccctgttgtgtcgctgaggccaaatta

SEQ ID NO: 99106 - DNA, 77 bp, Homo sapiens
tctctggtaagtcctcagtctcaaatgaaataaacagcatatggattttccctgttgtgtcgctgaggccaaattag

SEQ ID NO: 99107 - DNA, 77 bp, Homo sapiens
gtaagtcctcagtctcaaatgaaataaacagcatatggattttccctgttgtgtcgctgaggccaaattaggagtca

SEQ ID NO: 99108 - DNA, 75 bp, Homo sapiens
aaatgaaataaacagcatatggattttccctgttgtgtcgctgaggccaaattaggagtcagcaatggggcttag

SEQ ID NO: 99109 - DNA, 77 bp, Homo sapiens
taaacagcatatggattttccctgttgtgtcgctgaggccaaattaggagtcagcaatggggcttagtgcttaaata

SEQ ID NO: 99110 - DNA, 74 bp, Homo sapiens
atatggattttccctgttgtgtcgctgaggccaaattaggagtcagcaatggggcttagtgcttaaataagttg

SEQ ID NO: 99111 - DNA, 78 bp, Homo sapiens
tgtgtcgctgaggccaaattaggagtcagcaatggggcttagtgcttaaataagttgtgtatggatgagaaggatagg

SEQ ID NO: 99112 - DNA, 78 bp, Homo sapiens
gggcttagtgcttaaataagttgtgtatggatgagaaggatagggctgcccattccttgtttgagtgactgctggcac

SEQ ID NO: 99113 - DNA, 77 bp, Homo sapiens
agtgcttaaataagttgtgtatggatgagaaggatagggctgcccattccttgtttgagtgactgctggcacctaaa

SEQ ID NO: 99114 - DNA, 78 bp, Homo sapiens
taagttgtgtatggatgagaaggatagggctgcccattccttgtttgagtgactgctggcacctaaatgcctcccggc

SEQ ID NO: 99115 - DNA, 78 bp, Homo sapiens
atggatgagaaggatagggctgcccattccttgtttgagtgactgctggcacctaaatgcctcccggctcaggtaaga

SEQ ID NO: 99116 - DNA, 76 bp, Homo sapiens
ctggcacctaaatgcctcccggctcaggtaagagcctacctgatcacaaacagagctgggagatttgtcgagttac

SEQ ID NO: 99117 - DNA, 75 bp, Homo sapiens
acctaaatgcctcccggctcaggtaagagcctacctgatcacaaacagagctgggagatttgtcgagttactcaa

SEQ ID NO: 99118 - DNA, 76 bp, Homo sapiens
tcccggctcaggtaagagcctacctgatcacaaacagagctgggagatttgtcgagttactcaagcccccaagaca

SEQ ID NO: 99119 - DNA, 79 bp, Homo sapiens
taagagcctacctgatcacaaacagagctgggagatttgtcgagttactcaagcccccaagacatggccactacatgtg

SEQ ID NO: 99120 - DNA, 80 bp, Homo sapiens
tgatcacaaacagagctgggagatttgtcgagttactcaagcccccaagacatggccactacatgtgtgagattttctta

SEQ ID NO: 99121 - DNA, 76 bp, Homo sapiens
agttactcaagcccccaagacatggccactacatgtgtgagattttcttagctcttctacacaggctccttactgt

SEQ ID NO: 99122 - DNA, 79 bp, Homo sapiens
aagcccccaagacatggccactacatgtgtgagattttcttagctcttctacacaggctccttactgttggctctcgca

SEQ ID NO: 99123 - DNA, 79 bp, Homo sapiens
aagacatggccactacatgtgtgagattttcttagctcttctacacaggctccttactgttggctctcgcagtaaagag

SEQ ID NO: 99124 - DNA, 78 bp, Homo sapiens
tacatgtgtgagattttcttagctcttctacacaggctccttactgttggctctcgcagtaaagagtggtttttgata

SEQ ID NO: 99125 - DNA, 74 bp, Homo sapiens
agattttcttagctcttctacacaggctccttactgttggctctcgcagtaaagagtggtttttgataactctg

SEQ ID NO: 99126 - DNA, 75 bp, Homo sapiens
ttagctcttctacacaggctccttactgttggctctcgcagtaaagagtggtttttgataactctgggaagctct

SEQ ID NO: 99127 - DNA, 75 bp, Homo sapiens
tctacacaggctccttactgttggctctcgcagtaaagagtggtttttgataactctgggaagctcttttcctga

SEQ ID NO: 99128 - DNA, 74 bp, Homo sapiens
ttactgttggctctcgcagtaaagagtggtttttgataactctgggaagctcttttcctgactcctacactatg

SEQ ID NO: 99129 - DNA, 74 bp, Homo sapiens
ttggctctcgcagtaaagagtggtttttgataactctgggaagctcttttcctgactcctacactatgggcctc

SEQ ID NO: 99130 - DNA, 75 bp, Homo sapiens
tttgataactctgggaagctcttttcctgactcctacactatgggcctccacgtcgtgtggtcctgcaatagaaa

SEQ ID NO: 99131 - DNA, 75 bp, Homo sapiens
taactctgggaagctcttttcctgactcctacactatgggcctccacgtcgtgtggtcctgcaatagaaagtcat

SEQ ID NO: 99132 - DNA, 74 bp, Homo sapiens
tcttttcctgactcctacactatgggcctccacgtcgtgtggtcctgcaatagaaagtcatttcagggtggctt

SEQ ID NO: 99133 - DNA, 74 bp, Homo sapiens
actcctacactatgggcctccacgtcgtgtggtcctgcaatagaaagtcatttcagggtggctttgactaagta

SEQ ID NO: 99134 - DNA, 74 bp, Homo sapiens
actatgggcctccacgtcgtgtggtcctgcaatagaaagtcatttcagggtggctttgactaagtaatgatcct

SEQ ID NO: 99135 - DNA, 78 bp, Homo sapiens
acgtcgtgtggtcctgcaatagaaagtcatttcagggtggctttgactaagtaatgatccttcagagcgatcatcacc

SEQ ID NO: 99136 - DNA, 79 bp, Homo sapiens
tgtggtcctgcaatagaaagtcatttcagggtggctttgactaagtaatgatccttcagagcgatcatcacccttgagg

SEQ ID NO: 99137 - DNA, 77 bp, Homo sapiens
aatagaaagtcatttcagggtggctttgactaagtaatgatccttcagagcgatcatcacccttgaggggtgccagc

SEQ ID NO: 99138 - DNA, 77 bp, Homo sapiens
atttcagggtggctttgactaagtaatgatccttcagagcgatcatcacccttgaggggtgccagcctgtacccaga

SEQ ID NO: 99139 - DNA, 77 bp, Homo sapiens
ggtggctttgactaagtaatgatccttcagagcgatcatcacccttgaggggtgccagcctgtacccagaaggactc

SEQ ID NO: 99140 - DNA, 75 bp, Homo sapiens
actaagtaatgatccttcagagcgatcatcacccttgaggggtgccagcctgtacccagaaggactcctgcccgg

SEQ ID NO: 99141 - DNA, 76 bp, Homo sapiens
atccttcagagcgatcatcacccttgaggggtgccagcctgtacccagaaggactcctgcccggggccgcctcatg

SEQ ID NO: 99142 - DNA, 76 bp, Homo sapiens
tcatcacccttgaggggtgccagcctgtacccagaaggactcctgcccggggccgcctcatgtcagggcctcttga

SEQ ID NO: 99143 - DNA, 75 bp, Homo sapiens
cagcctgtacccagaaggactcctgcccggggccgcctcatgtcagggcctcttgagaactggatttgcaaagtg

SEQ ID NO: 99144 - DNA, 76 bp, Homo sapiens
actcctgcccggggccgcctcatgtcagggcctcttgagaactggatttgcaaagtgtctgcagacgtaagtcctg

SEQ ID NO: 99145 - DNA, 80 bp, Homo sapiens
gggccgcctcatgtcagggcctcttgagaactggatttgcaaagtgtctgcagacgtaagtcctggtggcctgctctgtc

SEQ ID NO: 99146 - DNA, 83 bp, Homo sapiens
tcttgagaactggatttgcaaagtgtctgcagacgtaagtcctggtggcctgctctgtctgctctgatcacaggggacaggaa

SEQ ID NO: 99147 - DNA, 81 bp, Homo sapiens
aagtgtctgcagacgtaagtcctggtggcctgctctgtctgctctgatcacaggggacaggaaggctgaaccaggacagaa

SEQ ID NO: 99148 - DNA, 79 bp, Homo sapiens
agacgtaagtcctggtggcctgctctgtctgctctgatcacaggggacaggaaggctgaaccaggacagaacagtttgc

SEQ ID NO: 99149 - DNA, 81 bp, Homo sapiens
tcctggtggcctgctctgtctgctctgatcacaggggacaggaaggctgaaccaggacagaacagtttgcggtttcatcaa

SEQ ID NO: 99150 - DNA, 83 bp, Homo sapiens
tgctctgtctgctctgatcacaggggacaggaaggctgaaccaggacagaacagtttgcggtttcatcaatgaataatatgga

SEQ ID NO: 99151 - DNA, 82 bp, Homo sapiens
tgtctgctctgatcacaggggacaggaaggctgaaccaggacagaacagtttgcggtttcatcaatgaataatatggagctg

SEQ ID NO: 99152 - DNA, 75 bp, Homo sapiens
acaggggacaggaaggctgaaccaggacagaacagtttgcggtttcatcaatgaataatatggagctggggacaa

SEQ ID NO: 99153 - DNA, 74 bp, Homo sapiens
acaggaaggctgaaccaggacagaacagtttgcggtttcatcaatgaataatatggagctggggacaaagtccc

SEQ ID NO: 99154 - DNA, 76 bp, Homo sapiens
acagaacagtttgcggtttcatcaatgaataatatggagctggggacaaagtcccctctactttctgcggctgtca

SEQ ID NO: 99155 - DNA, 80 bp, Homo sapiens
ttgcggtttcatcaatgaataatatggagctggggacaaagtcccctctactttctgcggctgtcactgaaatgtcagca

SEQ ID NO: 99156 - DNA, 77 bp, Homo sapiens
aatgaataatatggagctggggacaaagtcccctctactttctgcggctgtcactgaaatgtcagcagtggagggaa

SEQ ID NO: 99157 - DNA, 75 bp, Homo sapiens
aatatggagctggggacaaagtcccctctactttctgcggctgtcactgaaatgtcagcagtggagggaaaacca

SEQ ID NO: 99158 - DNA, 78 bp, Homo sapiens
ctttctgcggctgtcactgaaatgtcagcagtggagggaaaaccagaagagaaaacctctcactgacaggcgccctca

SEQ ID NO: 99159 - DNA, 77 bp, Homo sapiens
atgtcagcagtggagggaaaaccagaagagaaaacctctcactgacaggcgccctcagtgtgcaaagagctcaagtt

SEQ ID NO: 99160 - DNA, 75 bp, Homo sapiens
agggaaaaccagaagagaaaacctctcactgacaggcgccctcagtgtgcaaagagctcaagtttcagtgctggg

SEQ ID NO: 99161 - DNA, 78 bp, Homo sapiens
ctgacaggcgccctcagtgtgcaaagagctcaagtttcagtgctggggtggggtgggggctgcgcccctgcctattca

SEQ ID NO: 99162 - DNA, 76 bp, Homo sapiens
tcagtgtgcaaagagctcaagtttcagtgctggggtggggtgggggctgcgcccctgcctattcaccccactcctc

SEQ ID NO: 99163 - DNA, 73 bp, Homo sapiens
tcaagtttcagtgctggggtggggtgggggctgcgcccctgcctattcaccccactcctcccctgggctgctc

SEQ ID NO: 99164 - DNA, 74 bp, Homo sapiens
tggggtggggtgggggctgcgcccctgcctattcaccccactcctcccctgggctgctccactcccatgatgac

SEQ ID NO: 99165 - DNA, 76 bp, Homo sapiens
tgggggctgcgcccctgcctattcaccccactcctcccctgggctgctccactcccatgatgactgggaatttatc

SEQ ID NO: 99166 - DNA, 77 bp, Homo sapiens
tgcgcccctgcctattcaccccactcctcccctgggctgctccactcccatgatgactgggaatttatcctacaaca

SEQ ID NO: 99167 - DNA, 77 bp, Homo sapiens
tattcaccccactcctcccctgggctgctccactcccatgatgactgggaatttatcctacaacaggccacgagctc

SEQ ID NO: 99168 - DNA, 78 bp, Homo sapiens
actcctcccctgggctgctccactcccatgatgactgggaatttatcctacaacaggccacgagctccttgttctgca

SEQ ID NO: 99169 - DNA, 79 bp, Homo sapiens
tgggctgctccactcccatgatgactgggaatttatcctacaacaggccacgagctccttgttctgcagtaggaaatta

SEQ ID NO: 99170 - DNA, 77 bp, Homo sapiens
actcccatgatgactgggaatttatcctacaacaggccacgagctccttgttctgcagtaggaaattatccttcata

SEQ ID NO: 99171 - DNA, 74 bp, Homo sapiens
aatttatcctacaacaggccacgagctccttgttctgcagtaggaaattatccttcataagagggcaactgtta

SEQ ID NO: 99172 - DNA, 73 bp, Homo sapiens
aacaggccacgagctccttgttctgcagtaggaaattatccttcataagagggcaactgttagtattgtttgt

SEQ ID NO: 99173 - DNA, 72 bp, Homo sapiens
ccacgagctccttgttctgcagtaggaaattatccttcataagagggcaactgttagtattgtttgtttgtt

SEQ ID NO: 99174 - DNA, 62 bp, Homo sapiens
tgtttgttttttaatttccaaaagtaaggagaagtttattaaataagagcgggggaagggag

SEQ ID NO: 99175 - DNA, 64 bp, Homo sapiens
caaaagtaaggagaagtttattaaataagagcgggggaagggaggagggagaaggagagggaaa

SEQ ID NO: 99176 - DNA, 68 bp, Homo sapiens
ttattaaataagagcgggggaagggaggagggagaaggagagggaaagggcccgagaggcagctgacc

SEQ ID NO: 99177 - DNA, 69 bp, Homo sapiens
agagcgggggaagggaggagggagaaggagagggaaagggcccgagaggcagctgaccccagcatttcc

SEQ ID NO: 99178 - DNA, 69 bp, Homo sapiens
aggagggagaaggagagggaaagggcccgagaggcagctgaccccagcatttcccgtctccccttggct

SEQ ID NO: 99179 - DNA, 70 bp, Homo sapiens
aaggagagggaaagggcccgagaggcagctgaccccagcatttcccgtctccccttggcttctcccatcc

SEQ ID NO: 99180 - DNA, 68 bp, Homo sapiens
agggaaagggcccgagaggcagctgaccccagcatttcccgtctccccttggcttctcccatccccct

SEQ ID NO: 99181 - DNA, 70 bp, Homo sapiens
cccgagaggcagctgaccccagcatttcccgtctccccttggcttctcccatcccccttgtcccagaccc

SEQ ID NO: 99182 - DNA, 66 bp, Homo sapiens
accccagcatttcccgtctccccttggcttctcccatcccccttgtcccagacccccctccttctg

SEQ ID NO: 99183 - DNA, 66 bp, Homo sapiens
atttcccgtctccccttggcttctcccatcccccttgtcccagacccccctccttctggttctgaa

SEQ ID NO: 99184 - DNA, 69 bp, Homo sapiens
cccttggcttctcccatcccccttgtcccagacccccctccttctggttctgaatgtgaaaaataagca

SEQ ID NO: 99185 - DNA, 72 bp, Homo sapiens
ttctcccatcccccttgtcccagacccccctccttctggttctgaatgtgaaaaataagcagcctgcacctc

SEQ ID NO: 99186 - DNA, 74 bp, Homo sapiens
ccttgtcccagacccccctccttctggttctgaatgtgaaaaataagcagcctgcacctcctcgactggagatg

SEQ ID NO: 99187 - DNA, 80 bp, Homo sapiens
cttctggttctgaatgtgaaaaataagcagcctgcacctcctcgactggagatgtgtctaacaaggccctcattgtctca

SEQ ID NO: 99188 - DNA, 83 bp, Homo sapiens
tgaatgtgaaaaataagcagcctgcacctcctcgactggagatgtgtctaacaaggccctcattgtctcagacaggtgtgaga

SEQ ID NO: 99189 - DNA, 80 bp, Homo sapiens
aaaaataagcagcctgcacctcctcgactggagatgtgtctaacaaggccctcattgtctcagacaggtgtgagattgga

SEQ ID NO: 99190 - DNA, 79 bp, Homo sapiens
tcctcgactggagatgtgtctaacaaggccctcattgtctcagacaggtgtgagattggacttgattcggggccaacac

SEQ ID NO: 99191 - DNA, 77 bp, Homo sapiens
agatgtgtctaacaaggccctcattgtctcagacaggtgtgagattggacttgattcggggccaacacctccagtac

SEQ ID NO: 99192 - DNA, 75 bp, Homo sapiens
gtctaacaaggccctcattgtctcagacaggtgtgagattggacttgattcggggccaacacctccagtaccgga

SEQ ID NO: 99193 - DNA, 80 bp, Homo sapiens
tcattgtctcagacaggtgtgagattggacttgattcggggccaacacctccagtaccggagccagctctgtgagccgaa

SEQ ID NO: 99194 - DNA, 78 bp, Homo sapiens
agacaggtgtgagattggacttgattcggggccaacacctccagtaccggagccagctctgtgagccgaaaacatgca

SEQ ID NO: 99195 - DNA, 76 bp, Homo sapiens
agattggacttgattcggggccaacacctccagtaccggagccagctctgtgagccgaaaacatgcaccagccctc

SEQ ID NO: 99196 - DNA, 79 bp, Homo sapiens
gggccaacacctccagtaccggagccagctctgtgagccgaaaacatgcaccagccctccagtaataccactgcagcca

SEQ ID NO: 99197 - DNA, 82 bp, Homo sapiens
cagtaccggagccagctctgtgagccgaaaacatgcaccagccctccagtaataccactgcagccagccagagactcaacaa

SEQ ID NO: 99198 - DNA, 81 bp, Homo sapiens
gccagctctgtgagccgaaaacatgcaccagccctccagtaataccactgcagccagccagagactcaacaatttaaggct

SEQ ID NO: 99199 - DNA, 80 bp, Homo sapiens
tctgtgagccgaaaacatgcaccagccctccagtaataccactgcagccagccagagactcaacaatttaaggcttaaca

SEQ ID NO: 99200 - DNA, 78 bp, Homo sapiens
aaaacatgcaccagccctccagtaataccactgcagccagccagagactcaacaatttaaggcttaacacacacaaca

SEQ ID NO: 99201 - DNA, 78 bp, Homo sapiens
accagccctccagtaataccactgcagccagccagagactcaacaatttaaggcttaacacacacaacataaatcaga

SEQ ID NO: 99202 - DNA, 78 bp, Homo sapiens
agtaataccactgcagccagccagagactcaacaatttaaggcttaacacacacaacataaatcagaggaggatggac

SEQ ID NO: 99203 - DNA, 78 bp, Homo sapiens
cagccagccagagactcaacaatttaaggcttaacacacacaacataaatcagaggaggatggaccagccgaccggca

SEQ ID NO: 99204 - DNA, 75 bp, Homo sapiens
agagactcaacaatttaaggcttaacacacacaacataaatcagaggaggatggaccagccgaccggcagcttct

SEQ ID NO: 99205 - DNA, 75 bp, Homo sapiens
aacaatttaaggcttaacacacacaacataaatcagaggaggatggaccagccgaccggcagcttcttgggcaga

SEQ ID NO: 99206 - DNA, 86 bp, Homo sapiens
ttaacacacacaacataaatcagaggaggatggaccagccgaccggcagcttcttgggcagatgcctgcagactgtctgcagatca

SEQ ID NO: 99207 - DNA, 84 bp, Homo sapiens
acacaacataaatcagaggaggatggaccagccgaccggcagcttcttgggcagatgcctgcagactgtctgcagatcataccc

SEQ ID NO: 99208 - DNA, 84 bp, Homo sapiens
taaatcagaggaggatggaccagccgaccggcagcttcttgggcagatgcctgcagactgtctgcagatcataccctgcctgtt

SEQ ID NO: 99209 - DNA, 82 bp, Homo sapiens
atggaccagccgaccggcagcttcttgggcagatgcctgcagactgtctgcagatcataccctgcctgtttgggttatttga

SEQ ID NO: 99210 - DNA, 80 bp, Homo sapiens
gaccggcagcttcttgggcagatgcctgcagactgtctgcagatcataccctgcctgtttgggttatttgagactctttt

SEQ ID NO: 99211 - DNA, 81 bp, Homo sapiens
ttcttgggcagatgcctgcagactgtctgcagatcataccctgcctgtttgggttatttgagactctttttctgtaatata

SEQ ID NO: 99212 - DNA, 76 bp, Homo sapiens
agactgtctgcagatcataccctgcctgtttgggttatttgagactctttttctgtaatataaagatgagaaactg

SEQ ID NO: 99213 - DNA, 74 bp, Homo sapiens
agatcataccctgcctgtttgggttatttgagactctttttctgtaatataaagatgagaaactgggtggagca

SEQ ID NO: 99214 - DNA, 72 bp, Homo sapiens
ataccctgcctgtttgggttatttgagactctttttctgtaatataaagatgagaaactgggtggagcagcg

SEQ ID NO: 99215 - DNA, 76 bp, Homo sapiens
tgtttgggttatttgagactctttttctgtaatataaagatgagaaactgggtggagcagcgtgcagaggcacacg

SEQ ID NO: 99216 - DNA, 76 bp, Homo sapiens
tttttctgtaatataaagatgagaaactgggtggagcagcgtgcagaggcacacgggtgtttgtcctgtcttgttc

SEQ ID NO: 99217 - DNA, 74 bp, Homo sapiens
aactgggtggagcagcgtgcagaggcacacgggtgtttgtcctgtcttgttccaacagcccctctttcgcctaa

SEQ ID NO: 99218 - DNA, 76 bp, Homo sapiens
agcagcgtgcagaggcacacgggtgtttgtcctgtcttgttccaacagcccctctttcgcctaagtgctgttttga

SEQ ID NO: 99219 - DNA, 71 bp, Homo sapiens
agaggcacacgggtgtttgtcctgtcttgttccaacagcccctctttcgcctaagtgctgttttgaaggga

SEQ ID NO: 99220 - DNA, 72 bp, Homo sapiens
acacgggtgtttgtcctgtcttgttccaacagcccctctttcgcctaagtgctgttttgaagggactgctca

SEQ ID NO: 99221 - DNA, 73 bp, Homo sapiens
tttgtcctgtcttgttccaacagcccctctttcgcctaagtgctgttttgaagggactgctcaggacggttca

SEQ ID NO: 99222 - DNA, 75 bp, Homo sapiens
ttccaacagcccctctttcgcctaagtgctgttttgaagggactgctcaggacggttcacattgctacatccaaa

SEQ ID NO: 99223 - DNA, 75 bp, Homo sapiens
cctctttcgcctaagtgctgttttgaagggactgctcaggacggttcacattgctacatccaaatcctaggaatg

SEQ ID NO: 99224 - DNA, 77 bp, Homo sapiens
ttcgcctaagtgctgttttgaagggactgctcaggacggttcacattgctacatccaaatcctaggaatgtgtccaa

SEQ ID NO: 99225 - DNA, 74 bp, Homo sapiens
aagggactgctcaggacggttcacattgctacatccaaatcctaggaatgtgtccaagctggggaggaggggaa

SEQ ID NO: 99226 - DNA, 73 bp, Homo sapiens
aggacggttcacattgctacatccaaatcctaggaatgtgtccaagctggggaggaggggaaaggaaagctga

SEQ ID NO: 99227 - DNA, 77 bp, Homo sapiens
acattgctacatccaaatcctaggaatgtgtccaagctggggaggaggggaaaggaaagctgagcgctctgatatgg

SEQ ID NO: 99228 - DNA, 75 bp, Homo sapiens
acatccaaatcctaggaatgtgtccaagctggggaggaggggaaaggaaagctgagcgctctgatatgggtggta

SEQ ID NO: 99229 - DNA, 77 bp, Homo sapiens
taggaatgtgtccaagctggggaggaggggaaaggaaagctgagcgctctgatatgggtggtatctgtgtgaccctg

SEQ ID NO: 99230 - DNA, 75 bp, Homo sapiens
aagctggggaggaggggaaaggaaagctgagcgctctgatatgggtggtatctgtgtgaccctgggcaagtctct

SEQ ID NO: 99231 - DNA, 75 bp, Homo sapiens
aggaggggaaaggaaagctgagcgctctgatatgggtggtatctgtgtgaccctgggcaagtctcttaacctctc

SEQ ID NO: 99232 - DNA, 81 bp, Homo sapiens
ggaaagctgagcgctctgatatgggtggtatctgtgtgaccctgggcaagtctcttaacctctctgggctcatccatctaa

SEQ ID NO: 99233 - DNA, 80 bp, Homo sapiens
ctgagcgctctgatatgggtggtatctgtgtgaccctgggcaagtctcttaacctctctgggctcatccatctaacaagg

SEQ ID NO: 99234 - DNA, 75 bp, Homo sapiens
tatgggtggtatctgtgtgaccctgggcaagtctcttaacctctctgggctcatccatctaacaaggggtctagt

SEQ ID NO: 99235 - DNA, 76 bp, Homo sapiens
tatctgtgtgaccctgggcaagtctcttaacctctctgggctcatccatctaacaaggggtctagttttctgcgat

SEQ ID NO: 99236 - DNA, 79 bp, Homo sapiens
tctcttaacctctctgggctcatccatctaacaaggggtctagttttctgcgattcactcatctctaatgctcagaagt

SEQ ID NO: 99237 - DNA, 78 bp, Homo sapiens
aacctctctgggctcatccatctaacaaggggtctagttttctgcgattcactcatctctaatgctcagaagttcaaa

SEQ ID NO: 99238 - DNA, 79 bp, Homo sapiens
tcatccatctaacaaggggtctagttttctgcgattcactcatctctaatgctcagaagttcaaagtcactgtaagaag

SEQ ID NO: 99239 - DNA, 77 bp, Homo sapiens
atctaacaaggggtctagttttctgcgattcactcatctctaatgctcagaagttcaaagtcactgtaagaagtgcc

SEQ ID NO: 99240 - DNA, 80 bp, Homo sapiens
tagttttctgcgattcactcatctctaatgctcagaagttcaaagtcactgtaagaagtgcccaagtcagaggaggtcat

SEQ ID NO: 99241 - DNA, 81 bp, Homo sapiens
ttctgcgattcactcatctctaatgctcagaagttcaaagtcactgtaagaagtgcccaagtcagaggaggtcattacact

SEQ ID NO: 99242 - DNA, 77 bp, Homo sapiens
taatgctcagaagttcaaagtcactgtaagaagtgcccaagtcagaggaggtcattacacttgggaggaaactcaca

SEQ ID NO: 99243 - DNA, 74 bp, Homo sapiens
aagttcaaagtcactgtaagaagtgcccaagtcagaggaggtcattacacttgggaggaaactcacagcaccat

SEQ ID NO: 99244 - DNA, 78 bp, Homo sapiens
actgtaagaagtgcccaagtcagaggaggtcattacacttgggaggaaactcacagcaccattgaatgctgtttctga

SEQ ID NO: 99245 - DNA, 79 bp, Homo sapiens
cccaagtcagaggaggtcattacacttgggaggaaactcacagcaccattgaatgctgtttctgagtggatccatgtct

SEQ ID NO: 99246 - DNA, 80 bp, Homo sapiens
aggaggtcattacacttgggaggaaactcacagcaccattgaatgctgtttctgagtggatccatgtctttgagcaagaa

SEQ ID NO: 99247 - DNA, 79 bp, Homo sapiens
attacacttgggaggaaactcacagcaccattgaatgctgtttctgagtggatccatgtctttgagcaagaaaagtctc

SEQ ID NO: 99248 - DNA, 80 bp, Homo sapiens
acagcaccattgaatgctgtttctgagtggatccatgtctttgagcaagaaaagtctctcctcctcatacctgttcttta

SEQ ID NO: 99249 - DNA, 77 bp, Homo sapiens
attgaatgctgtttctgagtggatccatgtctttgagcaagaaaagtctctcctcctcatacctgttctttagaaac

SEQ ID NO: 99250 - DNA, 77 bp, Homo sapiens
atccatgtctttgagcaagaaaagtctctcctcctcatacctgttctttagaaacttgtggttctcagactgctgag

SEQ ID NO: 99251 - DNA, 77 bp, Homo sapiens
tttgagcaagaaaagtctctcctcctcatacctgttctttagaaacttgtggttctcagactgctgaggcaagccca

SEQ ID NO: 99252 - DNA, 76 bp, Homo sapiens
aagaaaagtctctcctcctcatacctgttctttagaaacttgtggttctcagactgctgaggcaagcccagagctc

SEQ ID NO: 99253 - DNA, 76 bp, Homo sapiens
tcctcatacctgttctttagaaacttgtggttctcagactgctgaggcaagcccagagctcgagcccccgggagtg

SEQ ID NO: 99254 - DNA, 84 bp, Homo sapiens
tggttctcagactgctgaggcaagcccagagctcgagcccccgggagtgtggtcatgacatggcaagagccacacgctatggga

SEQ ID NO: 99255 - DNA, 80 bp, Homo sapiens
actgctgaggcaagcccagagctcgagcccccgggagtgtggtcatgacatggcaagagccacacgctatgggaggggaa

SEQ ID NO: 99256 - DNA, 80 bp, Homo sapiens
aagcccagagctcgagcccccgggagtgtggtcatgacatggcaagagccacacgctatgggaggggaagatggagatga

SEQ ID NO: 99257 - DNA, 82 bp, Homo sapiens
agctcgagcccccgggagtgtggtcatgacatggcaagagccacacgctatgggaggggaagatggagatgacaggtctgca

SEQ ID NO: 99258 - DNA, 87 bp, Homo sapiens
ggagtgtggtcatgacatggcaagagccacacgctatgggaggggaagatggagatgacaggtctgcactgctagttactgccatgc

SEQ ID NO: 99259 - DNA, 88 bp, Homo sapiens
tggtcatgacatggcaagagccacacgctatgggaggggaagatggagatgacaggtctgcactgctagttactgccatgctccagtc

SEQ ID NO: 99260 - DNA, 83 bp, Homo sapiens
atggcaagagccacacgctatgggaggggaagatggagatgacaggtctgcactgctagttactgccatgctccagtccctct

SEQ ID NO: 99261 - DNA, 80 bp, Homo sapiens
acgctatgggaggggaagatggagatgacaggtctgcactgctagttactgccatgctccagtccctcttcctaatcaat

SEQ ID NO: 99262 - DNA, 80 bp, Homo sapiens
aggggaagatggagatgacaggtctgcactgctagttactgccatgctccagtccctcttcctaatcaattcttagataa

SEQ ID NO: 99263 - DNA, 82 bp, Homo sapiens
atggagatgacaggtctgcactgctagttactgccatgctccagtccctcttcctaatcaattcttagataagtttcattga

SEQ ID NO: 99264 - DNA, 78 bp, Homo sapiens
aggtctgcactgctagttactgccatgctccagtccctcttcctaatcaattcttagataagtttcattgaggaggga

SEQ ID NO: 99265 - DNA, 76 bp, Homo sapiens
ttactgccatgctccagtccctcttcctaatcaattcttagataagtttcattgaggagggaggattaccaagtca

SEQ ID NO: 99266 - DNA, 71 bp, Homo sapiens
agtccctcttcctaatcaattcttagataagtttcattgaggagggaggattaccaagtcaccaagtctta

SEQ ID NO: 99267 - DNA, 72 bp, Homo sapiens
ttcctaatcaattcttagataagtttcattgaggagggaggattaccaagtcaccaagtcttagtgaaggga

SEQ ID NO: 99268 - DNA, 69 bp, Homo sapiens
aattcttagataagtttcattgaggagggaggattaccaagtcaccaagtcttagtgaagggagggggc

SEQ ID NO: 99269 - DNA, 70 bp, Homo sapiens
ataagtttcattgaggagggaggattaccaagtcaccaagtcttagtgaagggagggggcccagaagcca

SEQ ID NO: 99270 - DNA, 69 bp, Homo sapiens
ggagggaggattaccaagtcaccaagtcttagtgaagggagggggcccagaagccacccgtcaatgcgg

SEQ ID NO: 99271 - DNA, 69 bp, Homo sapiens
aggattaccaagtcaccaagtcttagtgaagggagggggcccagaagccacccgtcaatgcgggagccc

SEQ ID NO: 99272 - DNA, 72 bp, Homo sapiens
tcttagtgaagggagggggcccagaagccacccgtcaatgcgggagcccccactctggtgcctctgaaagaa

SEQ ID NO: 99273 - DNA, 71 bp, Homo sapiens
agggggcccagaagccacccgtcaatgcgggagcccccactctggtgcctctgaaagaagggcatttggtc

SEQ ID NO: 99274 - DNA, 77 bp, Homo sapiens
tctggtgcctctgaaagaagggcatttggtctctgcaaattcctgtgacattccagggtagcttttggccctgccat

SEQ ID NO: 99275 - DNA, 76 bp, Homo sapiens
tctgaaagaagggcatttggtctctgcaaattcctgtgacattccagggtagcttttggccctgccattcgtcacc

SEQ ID NO: 99276 - DNA, 76 bp, Homo sapiens
gcatttggtctctgcaaattcctgtgacattccagggtagcttttggccctgccattcgtcaccctgaccctgaat

SEQ ID NO: 99277 - DNA, 78 bp, Homo sapiens
tctctgcaaattcctgtgacattccagggtagcttttggccctgccattcgtcaccctgaccctgaattcatggacaa

SEQ ID NO: 99278 - DNA, 74 bp, Homo sapiens
aaattcctgtgacattccagggtagcttttggccctgccattcgtcaccctgaccctgaattcatggacaagga

SEQ ID NO: 99279 - DNA, 74 bp, Homo sapiens
attccagggtagcttttggccctgccattcgtcaccctgaccctgaattcatggacaaggacgtggccgtcaca

SEQ ID NO: 99280 - DNA, 77 bp, Homo sapiens
tagcttttggccctgccattcgtcaccctgaccctgaattcatggacaaggacgtggccgtcacagggatgccttca

SEQ ID NO: 99281 - DNA, 77 bp, Homo sapiens
ccctgccattcgtcaccctgaccctgaattcatggacaaggacgtggccgtcacagggatgccttcatctggtccca

SEQ ID NO: 99282 - DNA, 78 bp, Homo sapiens
ttcgtcaccctgaccctgaattcatggacaaggacgtggccgtcacagggatgccttcatctggtcccagctctctcc

SEQ ID NO: 99283 - DNA, 80 bp, Homo sapiens
ttcatggacaaggacgtggccgtcacagggatgccttcatctggtcccagctctctccctctcatagccgtgtactctgt

SEQ ID NO: 99284 - DNA, 79 bp, Homo sapiens
acgtggccgtcacagggatgccttcatctggtcccagctctctccctctcatagccgtgtactctgttgggagcaattg

SEQ ID NO: 99285 - DNA, 80 bp, Homo sapiens
acagggatgccttcatctggtcccagctctctccctctcatagccgtgtactctgttgggagcaattggcatgaagtttg

SEQ ID NO: 99286 - DNA, 80 bp, Homo sapiens
tcccagctctctccctctcatagccgtgtactctgttgggagcaattggcatgaagtttggcagtggcatcctgaaccgg

SEQ ID NO: 99287 - DNA, 81 bp, Homo sapiens
atagccgtgtactctgttgggagcaattggcatgaagtttggcagtggcatcctgaaccgggatgacaggaccatcagtca

SEQ ID NO: 99288 - DNA, 83 bp, Homo sapiens
tgtactctgttgggagcaattggcatgaagtttggcagtggcatcctgaaccgggatgacaggaccatcagtcagcaccagcc

SEQ ID NO: 99289 - DNA, 78 bp, Homo sapiens
atgaagtttggcagtggcatcctgaaccgggatgacaggaccatcagtcagcaccagcctcccgcccctcctggcctc

SEQ ID NO: 99290 - DNA, 79 bp, Homo sapiens
tttggcagtggcatcctgaaccgggatgacaggaccatcagtcagcaccagcctcccgcccctcctggcctcggcctgc

SEQ ID NO: 99291 - DNA, 76 bp, Homo sapiens
atcctgaaccgggatgacaggaccatcagtcagcaccagcctcccgcccctcctggcctcggcctgccaaagcctc

SEQ ID NO: 99292 - DNA, 78 bp, Homo sapiens
atgacaggaccatcagtcagcaccagcctcccgcccctcctggcctcggcctgccaaagcctcgtattcccacagctg

SEQ ID NO: 99293 - DNA, 78 bp, Homo sapiens
accatcagtcagcaccagcctcccgcccctcctggcctcggcctgccaaagcctcgtattcccacagctgtggctcca

SEQ ID NO: 99294 - DNA, 79 bp, Homo sapiens
gtcagcaccagcctcccgcccctcctggcctcggcctgccaaagcctcgtattcccacagctgtggctccagcctctgc

SEQ ID NO: 99295 - DNA, 78 bp, Homo sapiens
tcccgcccctcctggcctcggcctgccaaagcctcgtattcccacagctgtggctccagcctctgccctgtcacactc

SEQ ID NO: 99296 - DNA, 82 bp, Homo sapiens
tggcctcggcctgccaaagcctcgtattcccacagctgtggctccagcctctgccctgtcacactcgcacacctgtttgcca

SEQ ID NO: 99297 - DNA, 83 bp, Homo sapiens
ctgccaaagcctcgtattcccacagctgtggctccagcctctgccctgtcacactcgcacacctgtttgccatcctgcttctg

SEQ ID NO: 99298 - DNA, 81 bp, Homo sapiens
aaagcctcgtattcccacagctgtggctccagcctctgccctgtcacactcgcacacctgtttgccatcctgcttctggcc

SEQ ID NO: 99299 - DNA, 82 bp, Homo sapiens
attcccacagctgtggctccagcctctgccctgtcacactcgcacacctgtttgccatcctgcttctggcccgccagcccaa

SEQ ID NO: 99300 - DNA, 81 bp, Homo sapiens
tctgccctgtcacactcgcacacctgtttgccatcctgcttctggcccgccagcccaagccacagcccccaagcaggctta

SEQ ID NO: 99301 - DNA, 74 bp, Homo sapiens
tttgccatcctgcttctggcccgccagcccaagccacagcccccaagcaggcttaaagggccgggcttgtggga

SEQ ID NO: 99302 - DNA, 73 bp, Homo sapiens
ttctggcccgccagcccaagccacagcccccaagcaggcttaaagggccgggcttgtgggaggaatcggcaca

SEQ ID NO: 99303 - DNA, 71 bp, Homo sapiens
agcccaagccacagcccccaagcaggcttaaagggccgggcttgtgggaggaatcggcacaggatggtatt

SEQ ID NO: 99304 - DNA, 72 bp, Homo sapiens
aagcaggcttaaagggccgggcttgtgggaggaatcggcacaggatggtatttactcaaaatcacacaggac

SEQ ID NO: 99305 - DNA, 71 bp, Homo sapiens
ttaaagggccgggcttgtgggaggaatcggcacaggatggtatttactcaaaatcacacaggacggtgaaa

SEQ ID NO: 99306 - DNA, 69 bp, Homo sapiens
gaatcggcacaggatggtatttactcaaaatcacacaggacggtgaaacttggttaaaagaaatccttt

SEQ ID NO: 99307 - DNA, 69 bp, Homo sapiens
aggatggtatttactcaaaatcacacaggacggtgaaacttggttaaaagaaatccttttgtagctgct

SEQ ID NO: 99308 - DNA, 70 bp, Homo sapiens
ggtatttactcaaaatcacacaggacggtgaaacttggttaaaagaaatccttttgtagctgcttcatta

SEQ ID NO: 99309 - DNA, 69 bp, Homo sapiens
caaaatcacacaggacggtgaaacttggttaaaagaaatccttttgtagctgcttcattaaaaacacca

SEQ ID NO: 99310 - DNA, 68 bp, Homo sapiens
aggacggtgaaacttggttaaaagaaatccttttgtagctgcttcattaaaaacaccaaagaggctga

SEQ ID NO: 99311 - DNA, 70 bp, Homo sapiens
cttggttaaaagaaatccttttgtagctgcttcattaaaaacaccaaagaggctgaccattcacatttgt

SEQ ID NO: 99312 - DNA, 75 bp, Homo sapiens
aagaaatccttttgtagctgcttcattaaaaacaccaaagaggctgaccattcacatttgttgaatgcatccaat

SEQ ID NO: 99313 - DNA, 80 bp, Homo sapiens
ttttgtagctgcttcattaaaaacaccaaagaggctgaccattcacatttgttgaatgcatccaattcatgcaagtaatg

SEQ ID NO: 99314 - DNA, 79 bp, Homo sapiens
ttcattaaaaacaccaaagaggctgaccattcacatttgttgaatgcatccaattcatgcaagtaatgggacaggtcag

SEQ ID NO: 99315 - DNA, 78 bp, Homo sapiens
aaaacaccaaagaggctgaccattcacatttgttgaatgcatccaattcatgcaagtaatgggacaggtcagggttca

SEQ ID NO: 99316 - DNA, 81 bp, Homo sapiens
agaggctgaccattcacatttgttgaatgcatccaattcatgcaagtaatgggacaggtcagggttcacccttgcctgcta

SEQ ID NO: 99317 - DNA, 78 bp, Homo sapiens
attcacatttgttgaatgcatccaattcatgcaagtaatgggacaggtcagggttcacccttgcctgctacccacgtg

SEQ ID NO: 99318 - DNA, 80 bp, Homo sapiens
ttgaatgcatccaattcatgcaagtaatgggacaggtcagggttcacccttgcctgctacccacgtgggctttgtgctca

SEQ ID NO: 99319 - DNA, 76 bp, Homo sapiens
atccaattcatgcaagtaatgggacaggtcagggttcacccttgcctgctacccacgtgggctttgtgctcaggaa

SEQ ID NO: 99320 - DNA, 73 bp, Homo sapiens
aagtaatgggacaggtcagggttcacccttgcctgctacccacgtgggctttgtgctcaggaagtgacctgtc

SEQ ID NO: 99321 - DNA, 74 bp, Homo sapiens
acaggtcagggttcacccttgcctgctacccacgtgggctttgtgctcaggaagtgacctgtcggtctcctgta

SEQ ID NO: 99322 - DNA, 72 bp, Homo sapiens
aggaagtgacctgtcggtctcctgtagctggttgtccccaacagggagcagggctggggtgccggctggggc

SEQ ID NO: 99323 - DNA, 73 bp, Homo sapiens
ctgtcggtctcctgtagctggttgtccccaacagggagcagggctggggtgccggctggggctgcggagggtg

SEQ ID NO: 99324 - DNA, 75 bp, Homo sapiens
ctgtagctggttgtccccaacagggagcagggctggggtgccggctggggctgcggagggtgggcatggctttga

SEQ ID NO: 99325 - DNA, 75 bp, Homo sapiens
ttgtccccaacagggagcagggctggggtgccggctggggctgcggagggtgggcatggctttgaggaggatatc

SEQ ID NO: 99326 - DNA, 75 bp, Homo sapiens
ggagcagggctggggtgccggctggggctgcggagggtgggcatggctttgaggaggatatcccttccttgctgg

SEQ ID NO: 99327 - DNA, 73 bp, Homo sapiens
agggctggggtgccggctggggctgcggagggtgggcatggctttgaggaggatatcccttccttgctgggtg

SEQ ID NO: 99328 - DNA, 75 bp, Homo sapiens
ggctggggctgcggagggtgggcatggctttgaggaggatatcccttccttgctgggtggggctgagtagaatgg

SEQ ID NO: 99329 - DNA, 73 bp, Homo sapiens
cggagggtgggcatggctttgaggaggatatcccttccttgctgggtggggctgagtagaatgggcgtggctt

SEQ ID NO: 99330 - DNA, 76 bp, Homo sapiens
gcatggctttgaggaggatatcccttccttgctgggtggggctgagtagaatgggcgtggctttgaggaggatttc

SEQ ID NO: 99331 - DNA, 72 bp, Homo sapiens
tttgaggaggatatcccttccttgctgggtggggctgagtagaatgggcgtggctttgaggaggatttccct

SEQ ID NO: 99332 - DNA, 73 bp, Homo sapiens
atatcccttccttgctgggtggggctgagtagaatgggcgtggctttgaggaggatttcccttccttgctgag

SEQ ID NO: 99333 - DNA, 75 bp, Homo sapiens
cttgctgggtggggctgagtagaatgggcgtggctttgaggaggatttcccttccttgctgagtggggctgagga

SEQ ID NO: 99334 - DNA, 74 bp, Homo sapiens
ggctgagtagaatgggcgtggctttgaggaggatttcccttccttgctgagtggggctgaggagggtaggtgtg

SEQ ID NO: 99335 - DNA, 74 bp, Homo sapiens
tagaatgggcgtggctttgaggaggatttcccttccttgctgagtggggctgaggagggtaggtgtggctttga

SEQ ID NO: 99336 - DNA, 71 bp, Homo sapiens
ctttgaggaggatttcccttccttgctgagtggggctgaggagggtaggtgtggctttgaggaggacttcc

SEQ ID NO: 99337 - DNA, 69 bp, Homo sapiens
aggatttcccttccttgctgagtggggctgaggagggtaggtgtggctttgaggaggacttcccttcct

SEQ ID NO: 99338 - DNA, 74 bp, Homo sapiens
ttccttgctgagtggggctgaggagggtaggtgtggctttgaggaggacttcccttccttgcatgctttaagaa

SEQ ID NO: 99339 - DNA, 73 bp, Homo sapiens
tggggctgaggagggtaggtgtggctttgaggaggacttcccttccttgcatgctttaagaatccctcctcca

SEQ ID NO: 99340 - DNA, 73 bp, Homo sapiens
ctgaggagggtaggtgtggctttgaggaggacttcccttccttgcatgctttaagaatccctcctccagccag

SEQ ID NO: 99341 - DNA, 76 bp, Homo sapiens
aaaaaagcatcactcctccttagcacgaattcaaccttttaaaaatggagactcagaagcagcacatgatactgaa

SEQ ID NO: 99342 - DNA, 76 bp, Homo sapiens
atcactcctccttagcacgaattcaaccttttaaaaatggagactcagaagcagcacatgatactgaacccaacca

SEQ ID NO: 99343 - DNA, 75 bp, Homo sapiens
cttagcacgaattcaaccttttaaaaatggagactcagaagcagcacatgatactgaacccaaccatgggaccta

SEQ ID NO: 99344 - DNA, 75 bp, Homo sapiens
aattcaaccttttaaaaatggagactcagaagcagcacatgatactgaacccaaccatgggacctagcatctccc

SEQ ID NO: 99345 - DNA, 79 bp, Homo sapiens
tttaaaaatggagactcagaagcagcacatgatactgaacccaaccatgggacctagcatctccctgagatggtgtatt

SEQ ID NO: 99346 - DNA, 79 bp, Homo sapiens
agactcagaagcagcacatgatactgaacccaaccatgggacctagcatctccctgagatggtgtatttccagaaaaag

SEQ ID NO: 99347 - DNA, 80 bp, Homo sapiens
aagcagcacatgatactgaacccaaccatgggacctagcatctccctgagatggtgtatttccagaaaaaggcagtgtga

SEQ ID NO: 99348 - DNA, 77 bp, Homo sapiens
atgatactgaacccaaccatgggacctagcatctccctgagatggtgtatttccagaaaaaggcagtgtgacgtaca

SEQ ID NO: 99349 - DNA, 77 bp, Homo sapiens
acccaaccatgggacctagcatctccctgagatggtgtatttccagaaaaaggcagtgtgacgtacagcatggttca

SEQ ID NO: 99350 - DNA, 80 bp, Homo sapiens
acctagcatctccctgagatggtgtatttccagaaaaaggcagtgtgacgtacagcatggttcagtgcccaagtgaatga

SEQ ID NO: 99351 - DNA, 80 bp, Homo sapiens
tccctgagatggtgtatttccagaaaaaggcagtgtgacgtacagcatggttcagtgcccaagtgaatgatccacaccaa

SEQ ID NO: 99352 - DNA, 78 bp, Homo sapiens
gatggtgtatttccagaaaaaggcagtgtgacgtacagcatggttcagtgcccaagtgaatgatccacaccaacccta

SEQ ID NO: 99353 - DNA, 77 bp, Homo sapiens
atggtgtatttccagaaaaaggcagtgtgacgtacagcatggttcagtgcccaagtgaatgatccacaccaacccta

SEQ ID NO: 99354 - DNA, 77 bp, Homo sapiens
tttccagaaaaaggcagtgtgacgtacagcatggttcagtgcccaagtgaatgatccacaccaaccctagagactgt

SEQ ID NO: 99355 - DNA, 78 bp, Homo sapiens
agaaaaaggcagtgtgacgtacagcatggttcagtgcccaagtgaatgatccacaccaaccctagagactgttctgag

SEQ ID NO: 99356 - DNA, 79 bp, Homo sapiens
aaaaggcagtgtgacgtacagcatggttcagtgcccaagtgaatgatccacaccaaccctagagactgttctgaggcta

SEQ ID NO: 99357 - DNA, 80 bp, Homo sapiens
agtgtgacgtacagcatggttcagtgcccaagtgaatgatccacaccaaccctagagactgttctgaggctacctctgag

SEQ ID NO: 99358 - DNA, 77 bp, Homo sapiens
atggttcagtgcccaagtgaatgatccacaccaaccctagagactgttctgaggctacctctgaggcagacccgaac

SEQ ID NO: 99359 - DNA, 78 bp, Homo sapiens
tggttcagtgcccaagtgaatgatccacaccaaccctagagactgttctgaggctacctctgaggcagacccgaacca

SEQ ID NO: 99360 - DNA, 77 bp, Homo sapiens
agtgcccaagtgaatgatccacaccaaccctagagactgttctgaggctacctctgaggcagacccgaaccagccaa

SEQ ID NO: 99361 - DNA, 79 bp, Homo sapiens
gtgaatgatccacaccaaccctagagactgttctgaggctacctctgaggcagacccgaaccagccaatgggaagagca

SEQ ID NO: 99362 - DNA, 76 bp, Homo sapiens
acaccaaccctagagactgttctgaggctacctctgaggcagacccgaaccagccaatgggaagagcactgggcca

SEQ ID NO: 99363 - DNA, 77 bp, Homo sapiens
tgaggcagacccgaaccagccaatgggaagagcactgggccaggagccagaaaacctggatgttaggtctgcctcta

SEQ ID NO: 99364 - DNA, 73 bp, Homo sapiens
agacccgaaccagccaatgggaagagcactgggccaggagccagaaaacctggatgttaggtctgcctctagt

SEQ ID NO: 99365 - DNA, 73 bp, Homo sapiens
aagagcactgggccaggagccagaaaacctggatgttaggtctgcctctagttcggaaaatcactgaaactcc

SEQ ID NO: 99366 - DNA, 72 bp, Homo sapiens
caggagccagaaaacctggatgttaggtctgcctctagttcggaaaatcactgaaactccctgggcctcgag

SEQ ID NO: 99367 - DNA, 74 bp, Homo sapiens
agaaaacctggatgttaggtctgcctctagttcggaaaatcactgaaactccctgggcctcgagtgtctcatga

SEQ ID NO: 99368 - DNA, 76 bp, Homo sapiens
tggatgttaggtctgcctctagttcggaaaatcactgaaactccctgggcctcgagtgtctcatgagtaaaatata

SEQ ID NO: 99369 - DNA, 76 bp, Homo sapiens
tgcctctagttcggaaaatcactgaaactccctgggcctcgagtgtctcatgagtaaaatatagggctttgagcaa

SEQ ID NO: 99370 - DNA, 74 bp, Homo sapiens
tagttcggaaaatcactgaaactccctgggcctcgagtgtctcatgagtaaaatatagggctttgagcaaagaa

SEQ ID NO: 99371 - DNA, 72 bp, Homo sapiens
aatcactgaaactccctgggcctcgagtgtctcatgagtaaaatatagggctttgagcaaagaagtttaagg

SEQ ID NO: 99372 - DNA, 71 bp, Homo sapiens
ctgggcctcgagtgtctcatgagtaaaatatagggctttgagcaaagaagtttaaggtcctttcaacttta

SEQ ID NO: 99373 - DNA, 70 bp, Homo sapiens
tcgagtgtctcatgagtaaaatatagggctttgagcaaagaagtttaaggtcctttcaactttaacagtt

SEQ ID NO: 99374 - DNA, 66 bp, Homo sapiens
gagtaaaatatagggctttgagcaaagaagtttaaggtcctttcaactttaacagtttaccatttg

SEQ ID NO: 99375 - DNA, 68 bp, Homo sapiens
tatagggctttgagcaaagaagtttaaggtcctttcaactttaacagtttaccatttggtcttgtgga

SEQ ID NO: 99376 - DNA, 68 bp, Homo sapiens
tgagcaaagaagtttaaggtcctttcaactttaacagtttaccatttggtcttgtggaacagtggtta

SEQ ID NO: 99377 - DNA, 67 bp, Homo sapiens
tttcaactttaacagtttaccatttggtcttgtggaacagtggttatgggaaggtctcctgtttggg

SEQ ID NO: 99378 - DNA, 66 bp, Homo sapiens
actttaacagtttaccatttggtcttgtggaacagtggttatgggaaggtctcctgtttgggttta

SEQ ID NO: 99379 - DNA, 68 bp, Homo sapiens
ttgtggaacagtggttatgggaaggtctcctgtttgggtttatccaaggaaacaaaactcaaatgaaa

SEQ ID NO: 99380 - DNA, 66 bp, Homo sapiens
aacagtggttatgggaaggtctcctgtttgggtttatccaaggaaacaaaactcaaatgaaaatac

SEQ ID NO: 99381 - DNA, 65 bp, Homo sapiens
atgggaaggtctcctgtttgggtttatccaaggaaacaaaactcaaatgaaaataccactaaaac

SEQ ID NO: 99382 - DNA, 67 bp, Homo sapiens
ttatccaaggaaacaaaactcaaatgaaaataccactaaaaccaccaatacctttatccactctggg

SEQ ID NO: 99383 - DNA, 66 bp, Homo sapiens
aaataccactaaaaccaccaatacctttatccactctggggctcccgaggaataaggagacaccgg

SEQ ID NO: 99384 - DNA, 66 bp, Homo sapiens
aaaaccaccaatacctttatccactctggggctcccgaggaataaggagacaccgggggaattatc

SEQ ID NO: 99385 - DNA, 73 bp, Homo sapiens
atacctttatccactctggggctcccgaggaataaggagacaccgggggaattatcgcagagtagctgtgtga

SEQ ID NO: 99386 - DNA, 73 bp, Homo sapiens
actctggggctcccgaggaataaggagacaccgggggaattatcgcagagtagctgtgtgacttggagaggac

SEQ ID NO: 99387 - DNA, 72 bp, Homo sapiens
aataaggagacaccgggggaattatcgcagagtagctgtgtgacttggagaggaccgatgggtacaactaac

SEQ ID NO: 99388 - DNA, 77 bp, Homo sapiens
ggggaattatcgcagagtagctgtgtgacttggagaggaccgatgggtacaactaactggtgatacaacaatgccgc

SEQ ID NO: 99389 - DNA, 78 bp, Homo sapiens
attatcgcagagtagctgtgtgacttggagaggaccgatgggtacaactaactggtgatacaacaatgccgccaataa

SEQ ID NO: 99390 - DNA, 79 bp, Homo sapiens
ctgtgtgacttggagaggaccgatgggtacaactaactggtgatacaacaatgccgccaataagagcacataaatagca

SEQ ID NO: 99391 - DNA, 76 bp, Homo sapiens
acttggagaggaccgatgggtacaactaactggtgatacaacaatgccgccaataagagcacataaatagcaataa

SEQ ID NO: 99392 - DNA, 75 bp, Homo sapiens
accgatgggtacaactaactggtgatacaacaatgccgccaataagagcacataaatagcaataatagtgaaaaa

SEQ ID NO: 99393 - DNA, 77 bp, Homo sapiens
actggtgatacaacaatgccgccaataagagcacataaatagcaataatagtgaaaaagaataacattgaccattta

SEQ ID NO: 99394 - DNA, 75 bp, Homo sapiens
caacaatgccgccaataagagcacataaatagcaataatagtgaaaaagaataacattgaccatttattaagtat

SEQ ID NO: 99395 - DNA, 73 bp, Homo sapiens
taagagcacataaatagcaataatagtgaaaaagaataacattgaccatttattaagtattgaaagtgtaccg

SEQ ID NO: 99396 - DNA, 72 bp, Homo sapiens
gtgaaaaagaataacattgaccatttattaagtattgaaagtgtaccgggatccatgctaaatatttgataa

SEQ ID NO: 99397 - DNA, 74 bp, Homo sapiens
cattgaccatttattaagtattgaaagtgtaccgggatccatgctaaatatttgataaaaatatatctcaaaga

SEQ ID NO: 99398 - DNA, 73 bp, Homo sapiens
agtattgaaagtgtaccgggatccatgctaaatatttgataaaaatatatctcaaagactttgtgaaggatta

SEQ ID NO: 99399 - DNA, 75 bp, Homo sapiens
ccgggatccatgctaaatatttgataaaaatatatctcaaagactttgtgaaggattaataaatacacacaatgc

SEQ ID NO: 99400 - DNA, 78 bp, Homo sapiens
tgctaaatatttgataaaaatatatctcaaagactttgtgaaggattaataaatacacacaatgcttcccatgtgctg

SEQ ID NO: 99401 - DNA, 81 bp, Homo sapiens
ttgataaaaatatatctcaaagactttgtgaaggattaataaatacacacaatgcttcccatgtgctgtgcatcaagtgat

SEQ ID NO: 99402 - DNA, 79 bp, Homo sapiens
aaaaatatatctcaaagactttgtgaaggattaataaatacacacaatgcttcccatgtgctgtgcatcaagtgatttc

SEQ ID NO: 99403 - DNA, 82 bp, Homo sapiens
agactttgtgaaggattaataaatacacacaatgcttcccatgtgctgtgcatcaagtgatttctgcaggctaactcattta

SEQ ID NO: 99404 - DNA, 84 bp, Homo sapiens
ttgtgaaggattaataaatacacacaatgcttcccatgtgctgtgcatcaagtgatttctgcaggctaactcatttaatcctca

SEQ ID NO: 99405 - DNA, 71 bp, Homo sapiens
ttaatcctcacaattgtcccatgtgttaggaactattattgttacgacggtttgcagagggggagaaggga

SEQ ID NO: 99406 - DNA, 69 bp, Homo sapiens
acaattgtcccatgtgttaggaactattattgttacgacggtttgcagagggggagaagggacacggag

SEQ ID NO: 99407 - DNA, 72 bp, Homo sapiens
tattgttacgacggtttgcagagggggagaagggacacggaggaattacagacccacattctgccttcctca

SEQ ID NO: 99408 - DNA, 75 bp, Homo sapiens
tttgcagagggggagaagggacacggaggaattacagacccacattctgccttcctcataacgtgcattctgagg

SEQ ID NO: 99409 - DNA, 77 bp, Homo sapiens
ggagaagggacacggaggaattacagacccacattctgccttcctcataacgtgcattctgagggctgtcatctttc

SEQ ID NO: 99410 - DNA, 78 bp, Homo sapiens
agggacacggaggaattacagacccacattctgccttcctcataacgtgcattctgagggctgtcatctttcttctga

SEQ ID NO: 99411 - DNA, 82 bp, Homo sapiens
aattacagacccacattctgccttcctcataacgtgcattctgagggctgtcatctttcttctgagtctcttctgaggatga

SEQ ID NO: 99412 - DNA, 83 bp, Homo sapiens
acattctgccttcctcataacgtgcattctgagggctgtcatctttcttctgagtctcttctgaggatgagatggaaaagata

SEQ ID NO: 99413 - DNA, 84 bp, Homo sapiens
ttcctcataacgtgcattctgagggctgtcatctttcttctgagtctcttctgaggatgagatggaaaagatagctctatcctg

SEQ ID NO: 99414 - DNA, 83 bp, Homo sapiens
ataacgtgcattctgagggctgtcatctttcttctgagtctcttctgaggatgagatggaaaagatagctctatcctggctgg

SEQ ID NO: 99415 - DNA, 81 bp, Homo sapiens
attctgagggctgtcatctttcttctgagtctcttctgaggatgagatggaaaagatagctctatcctggctggggagagg

SEQ ID NO: 99416 - DNA, 81 bp, Homo sapiens
ttctgagtctcttctgaggatgagatggaaaagatagctctatcctggctggggagagggatggacagaagaactgacttc

SEQ ID NO: 99417 - DNA, 80 bp, Homo sapiens
ttctgaggatgagatggaaaagatagctctatcctggctggggagagggatggacagaagaactgacttctgccttaaca

SEQ ID NO: 99418 - DNA, 79 bp, Homo sapiens
atgagatggaaaagatagctctatcctggctggggagagggatggacagaagaactgacttctgccttaacatctccag

SEQ ID NO: 99419 - DNA, 77 bp, Homo sapiens
aaaagatagctctatcctggctggggagagggatggacagaagaactgacttctgccttaacatctccagggtgctg

SEQ ID NO: 99420 - DNA, 80 bp, Homo sapiens
tctatcctggctggggagagggatggacagaagaactgacttctgccttaacatctccagggtgctgtgtcttcctctga

SEQ ID NO: 99421 - DNA, 80 bp, Homo sapiens
gacagaagaactgacttctgccttaacatctccagggtgctgtgtcttcctctgagggagccatgtgtgaccagggagaa

SEQ ID NO: 99422 - DNA, 74 bp, Homo sapiens
ccttaacatctccagggtgctgtgtcttcctctgagggagccatgtgtgaccagggagaaagttcgaaaataag

SEQ ID NO: 99423 - DNA, 74 bp, Homo sapiens
tccagggtgctgtgtcttcctctgagggagccatgtgtgaccagggagaaagttcgaaaataaggacaattctt

SEQ ID NO: 99424 - DNA, 74 bp, Homo sapiens
ctgtgtcttcctctgagggagccatgtgtgaccagggagaaagttcgaaaataaggacaattctttatagagcc

SEQ ID NO: 99425 - DNA, 76 bp, Homo sapiens
tctgagggagccatgtgtgaccagggagaaagttcgaaaataaggacaattctttatagagccgcgaatgcattcc

SEQ ID NO: 99426 - DNA, 73 bp, Homo sapiens
agccatgtgtgaccagggagaaagttcgaaaataaggacaattctttatagagccgcgaatgcattcccctcc

SEQ ID NO: 99427 - DNA, 68 bp, Homo sapiens
accagggagaaagttcgaaaataaggacaattctttatagagccgcgaatgcattcccctcccctacc

SEQ ID NO: 99428 - DNA, 68 bp, Homo sapiens
agaaagttcgaaaataaggacaattctttatagagccgcgaatgcattcccctcccctaccccaaggc

SEQ ID NO: 99429 - DNA, 70 bp, Homo sapiens
aataaggacaattctttatagagccgcgaatgcattcccctcccctaccccaaggcgtgaaagaatcaaa

SEQ ID NO: 99430 - DNA, 71 bp, Homo sapiens
acaattctttatagagccgcgaatgcattcccctcccctaccccaaggcgtgaaagaatcaaatgaggaaa

SEQ ID NO: 99431 - DNA, 73 bp, Homo sapiens
atagagccgcgaatgcattcccctcccctaccccaaggcgtgaaagaatcaaatgaggaaatcaggaagagat

SEQ ID NO: 99432 - DNA, 72 bp, Homo sapiens
aatgcattcccctcccctaccccaaggcgtgaaagaatcaaatgaggaaatcaggaagagattctggaatag

SEQ ID NO: 99433 - DNA, 71 bp, Homo sapiens
ccctaccccaaggcgtgaaagaatcaaatgaggaaatcaggaagagattctggaataggaataacaagatt

SEQ ID NO: 99434 - DNA, 71 bp, Homo sapiens
aaggcgtgaaagaatcaaatgaggaaatcaggaagagattctggaataggaataacaagatttcccttccc

SEQ ID NO: 99435 - DNA, 72 bp, Homo sapiens
agaatcaaatgaggaaatcaggaagagattctggaataggaataacaagatttcccttcccttccactgaat

SEQ ID NO: 99436 - DNA, 72 bp, Homo sapiens
aaatgaggaaatcaggaagagattctggaataggaataacaagatttcccttcccttccactgaattggcca

SEQ ID NO: 99437 - DNA, 72 bp, Homo sapiens
tggaataggaataacaagatttcccttcccttccactgaattggccatcagtaattttgcacaaattcaatt

SEQ ID NO: 99438 - DNA, 71 bp, Homo sapiens
aggaataacaagatttcccttcccttccactgaattggccatcagtaattttgcacaaattcaattttgaa

SEQ ID NO: 99439 - DNA, 73 bp, Homo sapiens
ttcccttcccttccactgaattggccatcagtaattttgcacaaattcaattttgaagtcatgcttcgtaatt

SEQ ID NO: 99440 - DNA, 76 bp, Homo sapiens
cttccactgaattggccatcagtaattttgcacaaattcaattttgaagtcatgcttcgtaatttgtggtaaatca

SEQ ID NO: 99441 - DNA, 76 bp, Homo sapiens
ctgaattggccatcagtaattttgcacaaattcaattttgaagtcatgcttcgtaatttgtggtaaatcatattaa

SEQ ID NO: 99442 - DNA, 77 bp, Homo sapiens
gcacaaattcaattttgaagtcatgcttcgtaatttgtggtaaatcatattaaattaaacagatccatgtctgggca

SEQ ID NO: 99443 - DNA, 74 bp, Homo sapiens
attttgaagtcatgcttcgtaatttgtggtaaatcatattaaattaaacagatccatgtctgggcaacggcttc

SEQ ID NO: 99444 - DNA, 78 bp, Homo sapiens
aaatcatattaaattaaacagatccatgtctgggcaacggcttctctcatttaggaacatatggtggctcagagcctc

SEQ ID NO: 99445 - DNA, 82 bp, Homo sapiens
tattaaattaaacagatccatgtctgggcaacggcttctctcatttaggaacatatggtggctcagagcctctcacacagca

SEQ ID NO: 99446 - DNA, 82 bp, Homo sapiens
aacagatccatgtctgggcaacggcttctctcatttaggaacatatggtggctcagagcctctcacacagcagaactataaa

SEQ ID NO: 99447 - DNA, 80 bp, Homo sapiens
tgggcaacggcttctctcatttaggaacatatggtggctcagagcctctcacacagcagaactataaaggctccttccaa

SEQ ID NO: 99448 - DNA, 78 bp, Homo sapiens
acggcttctctcatttaggaacatatggtggctcagagcctctcacacagcagaactataaaggctccttccaaataa

SEQ ID NO: 99449 - DNA, 80 bp, Homo sapiens
atttaggaacatatggtggctcagagcctctcacacagcagaactataaaggctccttccaaataagcagcagagtgagg

SEQ ID NO: 99450 - DNA, 81 bp, Homo sapiens
acatatggtggctcagagcctctcacacagcagaactataaaggctccttccaaataagcagcagagtgaggggctctggg

SEQ ID NO: 99451 - DNA, 77 bp, Homo sapiens
agagcctctcacacagcagaactataaaggctccttccaaataagcagcagagtgaggggctctggggcaaccctac

SEQ ID NO: 99452 - DNA, 73 bp, Homo sapiens
acacagcagaactataaaggctccttccaaataagcagcagagtgaggggctctggggcaaccctactggttt

SEQ ID NO: 99453 - DNA, 72 bp, Homo sapiens
tccttccaaataagcagcagagtgaggggctctggggcaaccctactggttttcctgagaatgttagttagg

SEQ ID NO: 99454 - DNA, 70 bp, Homo sapiens
agagtgaggggctctggggcaaccctactggttttcctgagaatgttagttaggggtgaccattaattca

SEQ ID NO: 99455 - DNA, 70 bp, Homo sapiens
aaccctactggttttcctgagaatgttagttaggggtgaccattaattcacgggaactgcagtatccaga

SEQ ID NO: 99456 - DNA, 74 bp, Homo sapiens
gttttcctgagaatgttagttaggggtgaccattaattcacgggaactgcagtatccagaatgacagaatgtta

SEQ ID NO: 99457 - DNA, 75 bp, Homo sapiens
agaatgttagttaggggtgaccattaattcacgggaactgcagtatccagaatgacagaatgttagtgttgaaga

SEQ ID NO: 99458 - DNA, 75 bp, Homo sapiens
taggggtgaccattaattcacgggaactgcagtatccagaatgacagaatgttagtgttgaagacaacctggtta

SEQ ID NO: 99459 - DNA, 77 bp, Homo sapiens
attaattcacgggaactgcagtatccagaatgacagaatgttagtgttgaagacaacctggttaatcacttacatga

SEQ ID NO: 99460 - DNA, 77 bp, Homo sapiens
agtatccagaatgacagaatgttagtgttgaagacaacctggttaatcacttacatgatagatgagggactgggact

SEQ ID NO: 99461 - DNA, 76 bp, Homo sapiens
tgacagaatgttagtgttgaagacaacctggttaatcacttacatgatagatgagggactgggacttggtggtaaa

SEQ ID NO: 99462 - DNA, 73 bp, Homo sapiens
atgttagtgttgaagacaacctggttaatcacttacatgatagatgagggactgggacttggtggtaaaggaa

SEQ ID NO: 99463 - DNA, 74 bp, Homo sapiens
ttgaagacaacctggttaatcacttacatgatagatgagggactgggacttggtggtaaaggaaacagtgctgg

SEQ ID NO: 99464 - DNA, 74 bp, Homo sapiens
ttaatcacttacatgatagatgagggactgggacttggtggtaaaggaaacagtgctgggtcacgtgaaaacaa

SEQ ID NO: 99465 - DNA, 72 bp, Homo sapiens
acttacatgatagatgagggactgggacttggtggtaaaggaaacagtgctgggtcacgtgaaaacaaacca

SEQ ID NO: 99466 - DNA, 72 bp, Homo sapiens
atagatgagggactgggacttggtggtaaaggaaacagtgctgggtcacgtgaaaacaaaccagacaccaca

SEQ ID NO: 99467 - DNA, 72 bp, Homo sapiens
gtaaaggaaacagtgctgggtcacgtgaaaacaaaccagacaccacaggcaggaccttccgggcaatgcttc

SEQ ID NO: 99468 - DNA, 75 bp, Homo sapiens
tcacgtgaaaacaaaccagacaccacaggcaggaccttccgggcaatgcttccccctaaccatgtcatgcaccta

SEQ ID NO: 99469 - DNA, 74 bp, Homo sapiens
aggaccttccgggcaatgcttccccctaaccatgtcatgcacctacaggtgactggtggtggggattcaatgaa

SEQ ID NO: 99470 - DNA, 77 bp, Homo sapiens
ttccgggcaatgcttccccctaaccatgtcatgcacctacaggtgactggtggtggggattcaatgaaccagcaaca

SEQ ID NO: 99471 - DNA, 78 bp, Homo sapiens
tccccctaaccatgtcatgcacctacaggtgactggtggtggggattcaatgaaccagcaacattggtctgttctata

SEQ ID NO: 99472 - DNA, 79 bp, Homo sapiens
taaccatgtcatgcacctacaggtgactggtggtggggattcaatgaaccagcaacattggtctgttctataaatacga

SEQ ID NO: 99473 - DNA, 76 bp, Homo sapiens
acctacaggtgactggtggtggggattcaatgaaccagcaacattggtctgttctataaatacgagctatcattat

SEQ ID NO: 99474 - DNA, 76 bp, Homo sapiens
tggggattcaatgaaccagcaacattggtctgttctataaatacgagctatcattattttattactcccttcagta

SEQ ID NO: 99475 - DNA, 78 bp, Homo sapiens
tcaatgaaccagcaacattggtctgttctataaatacgagctatcattattttattactcccttcagtaaacatgtga

SEQ ID NO: 99476 - DNA, 75 bp, Homo sapiens
acattggtctgttctataaatacgagctatcattattttattactcccttcagtaaacatgtgaaccaggcaatg

SEQ ID NO: 99477 - DNA, 76 bp, Homo sapiens
gttctataaatacgagctatcattattttattactcccttcagtaaacatgtgaaccaggcaatgtccttgtcata

SEQ ID NO: 99478 - DNA, 77 bp, Homo sapiens
taaatacgagctatcattattttattactcccttcagtaaacatgtgaaccaggcaatgtccttgtcataatcttgc

SEQ ID NO: 99479 - DNA, 79 bp, Homo sapiens
cattattttattactcccttcagtaaacatgtgaaccaggcaatgtccttgtcataatcttgctgtcataactgctctg

SEQ ID NO: 99480 - DNA, 80 bp, Homo sapiens
ttttattactcccttcagtaaacatgtgaaccaggcaatgtccttgtcataatcttgctgtcataactgctctgtgataa

SEQ ID NO: 99481 - DNA, 83 bp, Homo sapiens
tcagtaaacatgtgaaccaggcaatgtccttgtcataatcttgctgtcataactgctctgtgataacccaggtatagacacaa

SEQ ID NO: 99482 - DNA, 83 bp, Homo sapiens
aacatgtgaaccaggcaatgtccttgtcataatcttgctgtcataactgctctgtgataacccaggtatagacacaatcacaa

SEQ ID NO: 99483 - DNA, 82 bp, Homo sapiens
caatgtccttgtcataatcttgctgtcataactgctctgtgataacccaggtatagacacaatcacaaacaaaggctatcat

SEQ ID NO: 99484 - DNA, 80 bp, Homo sapiens
ttgtcataatcttgctgtcataactgctctgtgataacccaggtatagacacaatcacaaacaaaggctatcattttaaa

SEQ ID NO: 99485 - DNA, 76 bp, Homo sapiens
aatcttgctgtcataactgctctgtgataacccaggtatagacacaatcacaaacaaaggctatcattttaaaacg

SEQ ID NO: 99486 - DNA, 72 bp, Homo sapiens
ataactgctctgtgataacccaggtatagacacaatcacaaacaaaggctatcattttaaaacggggaagtg

SEQ ID NO: 99487 - DNA, 73 bp, Homo sapiens
tgtgataacccaggtatagacacaatcacaaacaaaggctatcattttaaaacggggaagtgggtgagtctca

SEQ ID NO: 99488 - DNA, 72 bp, Homo sapiens
aggtatagacacaatcacaaacaaaggctatcattttaaaacggggaagtgggtgagtctcatgcttcaaaa

SEQ ID NO: 99489 - DNA, 74 bp, Homo sapiens
aaaggctatcattttaaaacggggaagtgggtgagtctcatgcttcaaaagcttctgcattcatctttaagata

SEQ ID NO: 99490 - DNA, 81 bp, Homo sapiens
gtgagtctcatgcttcaaaagcttctgcattcatctttaagataccagccttgttggacgaccaacagaagcgcatcttaa

SEQ ID NO: 99491 - DNA, 77 bp, Homo sapiens
aagcttctgcattcatctttaagataccagccttgttggacgaccaacagaagcgcatcttaaaactcaggcagtta

SEQ ID NO: 99492 - DNA, 77 bp, Homo sapiens
tttaagataccagccttgttggacgaccaacagaagcgcatcttaaaactcaggcagttatggctgttccacatagc

SEQ ID NO: 99493 - DNA, 77 bp, Homo sapiens
ttgttggacgaccaacagaagcgcatcttaaaactcaggcagttatggctgttccacatagcgggtgatttacaaca

SEQ ID NO: 99494 - DNA, 77 bp, Homo sapiens
aagcgcatcttaaaactcaggcagttatggctgttccacatagcgggtgatttacaacaaagtatagatgaagatta

SEQ ID NO: 99495 - DNA, 74 bp, Homo sapiens
tcttaaaactcaggcagttatggctgttccacatagcgggtgatttacaacaaagtatagatgaagattaaccg

SEQ ID NO: 99496 - DNA, 77 bp, Homo sapiens
aggcagttatggctgttccacatagcgggtgatttacaacaaagtatagatgaagattaaccggccttgagatgaga

SEQ ID NO: 99497 - DNA, 76 bp, Homo sapiens
tgttccacatagcgggtgatttacaacaaagtatagatgaagattaaccggccttgagatgagagagctaaataaa

SEQ ID NO: 99498 - DNA, 73 bp, Homo sapiens
atagcgggtgatttacaacaaagtatagatgaagattaaccggccttgagatgagagagctaaataaaccact

SEQ ID NO: 99499 - DNA, 74 bp, Homo sapiens
ttacaacaaagtatagatgaagattaaccggccttgagatgagagagctaaataaaccacttagtgggcagaaa

SEQ ID NO: 99500 - DNA, 73 bp, Homo sapiens
aaagtatagatgaagattaaccggccttgagatgagagagctaaataaaccacttagtgggcagaaaggccaa

SEQ ID NO: 99501 - DNA, 71 bp, Homo sapiens
aagattaaccggccttgagatgagagagctaaataaaccacttagtgggcagaaaggccaagtcgagccct

SEQ ID NO: 99502 - DNA, 76 bp, Homo sapiens
ccttgagatgagagagctaaataaaccacttagtgggcagaaaggccaagtcgagcccttgagcttgtgctgactt

SEQ ID NO: 99503 - DNA, 83 bp, Homo sapiens
agatattttaataactttatcattatataatttgctatctgatatgtgcggagagatgcactaatggagtgagagtggccaca

SEQ ID NO: 99504 - DNA, 82 bp, Homo sapiens
ttttaataactttatcattatataatttgctatctgatatgtgcggagagatgcactaatggagtgagagtggccacaacag

SEQ ID NO: 99505 - DNA, 85 bp, Homo sapiens
cattatataatttgctatctgatatgtgcggagagatgcactaatggagtgagagtggccacaacagtgttataatcccgcgaga

SEQ ID NO: 99506 - DNA, 84 bp, Homo sapiens
tttgctatctgatatgtgcggagagatgcactaatggagtgagagtggccacaacagtgttataatcccgcgagacttaatcaa

SEQ ID NO: 99507 - DNA, 83 bp, Homo sapiens
tatctgatatgtgcggagagatgcactaatggagtgagagtggccacaacagtgttataatcccgcgagacttaatcaaacca

SEQ ID NO: 99508 - DNA, 79 bp, Homo sapiens
gagagatgcactaatggagtgagagtggccacaacagtgttataatcccgcgagacttaatcaaaccaccatgttcgtg

SEQ ID NO: 99509 - DNA, 76 bp, Homo sapiens
ctaatggagtgagagtggccacaacagtgttataatcccgcgagacttaatcaaaccaccatgttcgtgtccctca

SEQ ID NO: 99510 - DNA, 76 bp, Homo sapiens
agtgagagtggccacaacagtgttataatcccgcgagacttaatcaaaccaccatgttcgtgtccctcatgtgacc

SEQ ID NO: 99511 - DNA, 76 bp, Homo sapiens
acaacagtgttataatcccgcgagacttaatcaaaccaccatgttcgtgtccctcatgtgacctgcaactccagga

SEQ ID NO: 99512 - DNA, 77 bp, Homo sapiens
agtgttataatcccgcgagacttaatcaaaccaccatgttcgtgtccctcatgtgacctgcaactccaggaagtgca

SEQ ID NO: 99513 - DNA, 78 bp, Homo sapiens
cgagacttaatcaaaccaccatgttcgtgtccctcatgtgacctgcaactccaggaagtgcaatccctagtcacatta

SEQ ID NO: 99514 - DNA, 77 bp, Homo sapiens
ttaatcaaaccaccatgttcgtgtccctcatgtgacctgcaactccaggaagtgcaatccctagtcacattatttct

SEQ ID NO: 99515 - DNA, 77 bp, Homo sapiens
tgtccctcatgtgacctgcaactccaggaagtgcaatccctagtcacattatttcttcctccctttttatcttgaga

SEQ ID NO: 99516 - DNA, 73 bp, Homo sapiens
acctgcaactccaggaagtgcaatccctagtcacattatttcttcctccctttttatcttgagatgttcttta

SEQ ID NO: 99517 - DNA, 70 bp, Homo sapiens
aactccaggaagtgcaatccctagtcacattatttcttcctccctttttatcttgagatgttctttaaaa

SEQ ID NO: 99518 - DNA, 70 bp, Homo sapiens
gcaatccctagtcacattatttcttcctccctttttatcttgagatgttctttaaaaaaatcccaaagca

SEQ ID NO: 99519 - DNA, 69 bp, Homo sapiens
agtcacattatttcttcctccctttttatcttgagatgttctttaaaaaaatcccaaagcaactggaca

SEQ ID NO: 99520 - DNA, 70 bp, Homo sapiens
tcttcctccctttttatcttgagatgttctttaaaaaaatcccaaagcaactggacatatgtagtccttc

SEQ ID NO: 99521 - DNA, 71 bp, Homo sapiens
ccctttttatcttgagatgttctttaaaaaaatcccaaagcaactggacatatgtagtccttccagtgata

SEQ ID NO: 99522 - DNA, 73 bp, Homo sapiens
ttgagatgttctttaaaaaaatcccaaagcaactggacatatgtagtccttccagtgatataaagaggaactg

SEQ ID NO: 99523 - DNA, 74 bp, Homo sapiens
ctttaaaaaaatcccaaagcaactggacatatgtagtccttccagtgatataaagaggaactggcacagcataa

SEQ ID NO: 99524 - DNA, 80 bp, Homo sapiens
actggacatatgtagtccttccagtgatataaagaggaactggcacagcataagctctctgggtcttggatctggcttta

SEQ ID NO: 99525 - DNA, 82 bp, Homo sapiens
cagtgatataaagaggaactggcacagcataagctctctgggtcttggatctggctttagaatgactcaggttgaacacata

SEQ ID NO: 99526 - DNA, 79 bp, Homo sapiens
atataaagaggaactggcacagcataagctctctgggtcttggatctggctttagaatgactcaggttgaacacataaa

SEQ ID NO: 99527 - DNA, 78 bp, Homo sapiens
tggcacagcataagctctctgggtcttggatctggctttagaatgactcaggttgaacacataaagccgtaaggtaaa

SEQ ID NO: 99528 - DNA, 74 bp, Homo sapiens
ataagctctctgggtcttggatctggctttagaatgactcaggttgaacacataaagccgtaaggtaaagagga

SEQ ID NO: 99529 - DNA, 77 bp, Homo sapiens
tctgggtcttggatctggctttagaatgactcaggttgaacacataaagccgtaaggtaaagaggacatcatccata

SEQ ID NO: 99530 - DNA, 78 bp, Homo sapiens
tggatctggctttagaatgactcaggttgaacacataaagccgtaaggtaaagaggacatcatccatagcaggaactg

SEQ ID NO: 99531 - DNA, 76 bp, Homo sapiens
tttagaatgactcaggttgaacacataaagccgtaaggtaaagaggacatcatccatagcaggaactggcaattta

SEQ ID NO: 99532 - DNA, 74 bp, Homo sapiens
aggttgaacacataaagccgtaaggtaaagaggacatcatccatagcaggaactggcaatttacagggctggga

SEQ ID NO: 99533 - DNA, 73 bp, Homo sapiens
taaggtaaagaggacatcatccatagcaggaactggcaatttacagggctgggagacttaaccgtcccagacg

SEQ ID NO: 99534 - DNA, 77 bp, Homo sapiens
ggacatcatccatagcaggaactggcaatttacagggctgggagacttaaccgtcccagacgggtgagctcctgata

SEQ ID NO: 99535 - DNA, 74 bp, Homo sapiens
aactggcaatttacagggctgggagacttaaccgtcccagacgggtgagctcctgatactcaagttagcgctga

SEQ ID NO: 99536 - DNA, 75 bp, Homo sapiens
aatttacagggctgggagacttaaccgtcccagacgggtgagctcctgatactcaagttagcgctgactcagcga

SEQ ID NO: 99537 - DNA, 79 bp, Homo sapiens
ttaaccgtcccagacgggtgagctcctgatactcaagttagcgctgactcagcgagggccttgaggcttgactcacaga

SEQ ID NO: 99538 - DNA, 79 bp, Homo sapiens
agacgggtgagctcctgatactcaagttagcgctgactcagcgagggccttgaggcttgactcacagatcttccctagg

SEQ ID NO: 99539 - DNA, 80 bp, Homo sapiens
ctgatactcaagttagcgctgactcagcgagggccttgaggcttgactcacagatcttccctagggatgctttgctttta

SEQ ID NO: 99540 - DNA, 80 bp, Homo sapiens
aagttagcgctgactcagcgagggccttgaggcttgactcacagatcttccctagggatgctttgcttttatgacatcaa

SEQ ID NO: 99541 - DNA, 81 bp, Homo sapiens
tgactcagcgagggccttgaggcttgactcacagatcttccctagggatgctttgcttttatgacatcaactgaaggatcc

SEQ ID NO: 99542 - DNA, 80 bp, Homo sapiens
agggccttgaggcttgactcacagatcttccctagggatgctttgcttttatgacatcaactgaaggatcctgcagtgtc

SEQ ID NO: 99543 - DNA, 80 bp, Homo sapiens
aggcttgactcacagatcttccctagggatgctttgcttttatgacatcaactgaaggatcctgcagtgtcctccatact

SEQ ID NO: 99544 - DNA, 79 bp, Homo sapiens
cagatcttccctagggatgctttgcttttatgacatcaactgaaggatcctgcagtgtcctccatacttccaggaggat

SEQ ID NO: 99545 - DNA, 81 bp, Homo sapiens
ctagggatgctttgcttttatgacatcaactgaaggatcctgcagtgtcctccatacttccaggaggattgagctggacat

SEQ ID NO: 99546 - DNA, 82 bp, Homo sapiens
atgctttgcttttatgacatcaactgaaggatcctgcagtgtcctccatacttccaggaggattgagctggacattatagtg

SEQ ID NO: 99547 - DNA, 82 bp, Homo sapiens
tatgacatcaactgaaggatcctgcagtgtcctccatacttccaggaggattgagctggacattatagtggcccaagtctta

SEQ ID NO: 99548 - DNA, 79 bp, Homo sapiens
tgcagtgtcctccatacttccaggaggattgagctggacattatagtggcccaagtcttattaaacggaactgatgatg

SEQ ID NO: 99549 - DNA, 77 bp, Homo sapiens
tccatacttccaggaggattgagctggacattatagtggcccaagtcttattaaacggaactgatgatgttgactta

SEQ ID NO: 99550 - DNA, 74 bp, Homo sapiens
acttccaggaggattgagctggacattatagtggcccaagtcttattaaacggaactgatgatgttgacttacg

SEQ ID NO: 99551 - DNA, 76 bp, Homo sapiens
attgagctggacattatagtggcccaagtcttattaaacggaactgatgatgttgacttacggaggctaagattca

SEQ ID NO: 99552 - DNA, 74 bp, Homo sapiens
acattatagtggcccaagtcttattaaacggaactgatgatgttgacttacggaggctaagattcagtgaccca

SEQ ID NO: 99553 - DNA, 75 bp, Homo sapiens
ccaagtcttattaaacggaactgatgatgttgacttacggaggctaagattcagtgacccagttcagattgtgtg

SEQ ID NO: 99554 - DNA, 76 bp, Homo sapiens
tcttattaaacggaactgatgatgttgacttacggaggctaagattcagtgacccagttcagattgtgtggaagaa

SEQ ID NO: 99555 - DNA, 76 bp, Homo sapiens
aactgatgatgttgacttacggaggctaagattcagtgacccagttcagattgtgtggaagaaccaagacggtaga

SEQ ID NO: 99556 - DNA, 73 bp, Homo sapiens
ttgacttacggaggctaagattcagtgacccagttcagattgtgtggaagaaccaagacggtagaggaattaa

SEQ ID NO: 99557 - DNA, 74 bp, Homo sapiens
aggctaagattcagtgacccagttcagattgtgtggaagaaccaagacggtagaggaattaagcaccatttcca

SEQ ID NO: 99558 - DNA, 73 bp, Homo sapiens
aagattcagtgacccagttcagattgtgtggaagaaccaagacggtagaggaattaagcaccatttccattcc

SEQ ID NO: 99559 - DNA, 69 bp, Homo sapiens
agttcagattgtgtggaagaaccaagacggtagaggaattaagcaccatttccattcctggtgggtttt

SEQ ID NO: 99560 - DNA, 67 bp, Homo sapiens
agattgtgtggaagaaccaagacggtagaggaattaagcaccatttccattcctggtgggttttttt

SEQ ID NO: 99561 - DNA, 77 bp, Homo sapiens
ctgtgcctggcccctggtgtgttttaaagctcaagtttcatgccaccccataggtgttaggtgacatgagacacaca

SEQ ID NO: 99562 - DNA, 75 bp, Homo sapiens
cccctggtgtgttttaaagctcaagtttcatgccaccccataggtgttaggtgacatgagacacacaggtcagaa

SEQ ID NO: 99563 - DNA, 79 bp, Homo sapiens
tgttttaaagctcaagtttcatgccaccccataggtgttaggtgacatgagacacacaggtcagaatcgccatctcctc

SEQ ID NO: 99564 - DNA, 78 bp, Homo sapiens
ttttaaagctcaagtttcatgccaccccataggtgttaggtgacatgagacacacaggtcagaatcgccatctcctct

SEQ ID NO: 99565 - DNA, 78 bp, Homo sapiens
aaagctcaagtttcatgccaccccataggtgttaggtgacatgagacacacaggtcagaatcgccatctcctcttccc

SEQ ID NO: 99566 - DNA, 80 bp, Homo sapiens
agtttcatgccaccccataggtgttaggtgacatgagacacacaggtcagaatcgccatctcctcttccctctgcccata

SEQ ID NO: 99567 - DNA, 82 bp, Homo sapiens
ttcatgccaccccataggtgttaggtgacatgagacacacaggtcagaatcgccatctcctcttccctctgcccatactgat

SEQ ID NO: 99568 - DNA, 78 bp, Homo sapiens
accccataggtgttaggtgacatgagacacacaggtcagaatcgccatctcctcttccctctgcccatactgattccc

SEQ ID NO: 99569 - DNA, 80 bp, Homo sapiens
ataggtgttaggtgacatgagacacacaggtcagaatcgccatctcctcttccctctgcccatactgattccctccagga

SEQ ID NO: 99570 - DNA, 80 bp, Homo sapiens
tgttaggtgacatgagacacacaggtcagaatcgccatctcctcttccctctgcccatactgattccctccaggaaagaa

SEQ ID NO: 99571 - DNA, 79 bp, Homo sapiens
ttaggtgacatgagacacacaggtcagaatcgccatctcctcttccctctgcccatactgattccctccaggaaagaaa

SEQ ID NO: 99572 - DNA, 77 bp, Homo sapiens
acatgagacacacaggtcagaatcgccatctcctcttccctctgcccatactgattccctccaggaaagaaagtagg

SEQ ID NO: 99573 - DNA, 72 bp, Homo sapiens
aatcgccatctcctcttccctctgcccatactgattccctccaggaaagaaagtagggaatttcatctttaa

SEQ ID NO: 99574 - DNA, 71 bp, Homo sapiens
ctcttccctctgcccatactgattccctccaggaaagaaagtagggaatttcatctttaagaacaagaatc

SEQ ID NO: 99575 - DNA, 70 bp, Homo sapiens
tgcccatactgattccctccaggaaagaaagtagggaatttcatctttaagaacaagaatccccttccaa

SEQ ID NO: 99576 - DNA, 67 bp, Homo sapiens
atactgattccctccaggaaagaaagtagggaatttcatctttaagaacaagaatccccttccaaaa

SEQ ID NO: 99577 - DNA, 64 bp, Homo sapiens
cctccaggaaagaaagtagggaatttcatctttaagaacaagaatccccttccaaaaaggttaa

SEQ ID NO: 99578 - DNA, 66 bp, Homo sapiens
agtagggaatttcatctttaagaacaagaatccccttccaaaaaggttaattcccataacaggatc

SEQ ID NO: 99579 - DNA, 69 bp, Homo sapiens
ttaagaacaagaatccccttccaaaaaggttaattcccataacaggatctacggagatcagaattggaa

SEQ ID NO: 99580 - DNA, 68 bp, Homo sapiens
agaatccccttccaaaaaggttaattcccataacaggatctacggagatcagaattggaagacacttt

SEQ ID NO: 99581 - DNA, 70 bp, Homo sapiens
ccaaaaaggttaattcccataacaggatctacggagatcagaattggaagacacttttcaaaatcttgaa

SEQ ID NO: 99582 - DNA, 73 bp, Homo sapiens
taattcccataacaggatctacggagatcagaattggaagacacttttcaaaatcttgaaaccctattgagaa

SEQ ID NO: 99583 - DNA, 70 bp, Homo sapiens
aggatctacggagatcagaattggaagacacttttcaaaatcttgaaaccctattgagaaagttctaaac

SEQ ID NO: 99584 - DNA, 69 bp, Homo sapiens
tacggagatcagaattggaagacacttttcaaaatcttgaaaccctattgagaaagttctaaaccctaa

SEQ ID NO: 99585 - DNA, 64 bp, Homo sapiens
cacttttcaaaatcttgaaaccctattgagaaagttctaaaccctaaaaatgaccctaaggttg

SEQ ID NO: 99586 - DNA, 67 bp, Homo sapiens
cttgaaaccctattgagaaagttctaaaccctaaaaatgaccctaaggttgtatggaataatgatgg

SEQ ID NO: 99587 - DNA, 68 bp, Homo sapiens
aaccctattgagaaagttctaaaccctaaaaatgaccctaaggttgtatggaataatgatggtgccca

SEQ ID NO: 99588 - DNA, 71 bp, Homo sapiens
agaaagttctaaaccctaaaaatgaccctaaggttgtatggaataatgatggtgcccaggattgtggcatc

SEQ ID NO: 99589 - DNA, 73 bp, Homo sapiens
aaaccctaaaaatgaccctaaggttgtatggaataatgatggtgcccaggattgtggcatcctgtgtctggag

SEQ ID NO: 99590 - DNA, 82 bp, Homo sapiens
tgtatggaataatgatggtgcccaggattgtggcatcctgtgtctggaggcagtggctgtcttttctgcccaatctttccta

SEQ ID NO: 99591 - DNA, 82 bp, Homo sapiens
aataatgatggtgcccaggattgtggcatcctgtgtctggaggcagtggctgtcttttctgcccaatctttcctatccatga

SEQ ID NO: 99592 - DNA, 81 bp, Homo sapiens
ccaggattgtggcatcctgtgtctggaggcagtggctgtcttttctgcccaatctttcctatccatgattcagtcaacatt

SEQ ID NO: 99593 - DNA, 79 bp, Homo sapiens
ttttctgcccaatctttcctatccatgattcagtcaacatttagtcaaacattcagtcaagcatttagtgccattgttc

SEQ ID NO: 99594 - DNA, 77 bp, Homo sapiens
ccaatctttcctatccatgattcagtcaacatttagtcaaacattcagtcaagcatttagtgccattgttctatttt

SEQ ID NO: 99595 - DNA, 77 bp, Homo sapiens
ttcctatccatgattcagtcaacatttagtcaaacattcagtcaagcatttagtgccattgttctattttttcttaa

SEQ ID NO: 99596 - DNA, 73 bp, Homo sapiens
ttagtcaaacattcagtcaagcatttagtgccattgttctattttttcttaaaacagaaaatagtctattcca

SEQ ID NO: 99597 - DNA, 74 bp, Homo sapiens
caaacattcagtcaagcatttagtgccattgttctattttttcttaaaacagaaaatagtctattccatgccat

SEQ ID NO: 99598 - DNA, 71 bp, Homo sapiens
agcatttagtgccattgttctattttttcttaaaacagaaaatagtctattccatgccatttaggggagcg

SEQ ID NO: 99599 - DNA, 72 bp, Homo sapiens
tagtgccattgttctattttttcttaaaacagaaaatagtctattccatgccatttaggggagcgtgaactg

SEQ ID NO: 99600 - DNA, 69 bp, Homo sapiens
attttttcttaaaacagaaaatagtctattccatgccatttaggggagcgtgaactggctaaaactcaa

SEQ ID NO: 99601 - DNA, 72 bp, Homo sapiens
aaaatagtctattccatgccatttaggggagcgtgaactggctaaaactcaacctgaagactttccatagct

SEQ ID NO: 99602 - DNA, 75 bp, Homo sapiens
attccatgccatttaggggagcgtgaactggctaaaactcaacctgaagactttccatagcttgctaatcagaaa

SEQ ID NO: 99603 - DNA, 75 bp, Homo sapiens
ttaggggagcgtgaactggctaaaactcaacctgaagactttccatagcttgctaatcagaaatcacctgaatta

SEQ ID NO: 99604 - DNA, 76 bp, Homo sapiens
tgaactggctaaaactcaacctgaagactttccatagcttgctaatcagaaatcacctgaattagaggtggtacat

SEQ ID NO: 99605 - DNA, 78 bp, Homo sapiens
tttccatagcttgctaatcagaaatcacctgaattagaggtggtacattcttcccctatcaattctcaggagtgcaaa

SEQ ID NO: 99606 - DNA, 79 bp, Homo sapiens
agcttgctaatcagaaatcacctgaattagaggtggtacattcttcccctatcaattctcaggagtgcaaagagagaca

SEQ ID NO: 99607 - DNA, 73 bp, Homo sapiens
aaatcacctgaattagaggtggtacattcttcccctatcaattctcaggagtgcaaagagagacaaaaaataa

SEQ ID NO: 99608 - DNA, 72 bp, Homo sapiens
aattagaggtggtacattcttcccctatcaattctcaggagtgcaaagagagacaaaaaataaacatggttg

SEQ ID NO: 99609 - DNA, 72 bp, Homo sapiens
ttctcaggagtgcaaagagagacaaaaaataaacatggttggccaatgtttgtttttagggtgagttctata

SEQ ID NO: 99610 - DNA, 70 bp, Homo sapiens
aggagtgcaaagagagacaaaaaataaacatggttggccaatgtttgtttttagggtgagttctatacta

SEQ ID NO: 99611 - DNA, 68 bp, Homo sapiens
gagagacaaaaaataaacatggttggccaatgtttgtttttagggtgagttctatactatttttctat

SEQ ID NO: 99612 - DNA, 68 bp, Homo sapiens
aataaacatggttggccaatgtttgtttttagggtgagttctatactatttttctattattattttgc

SEQ ID NO: 99613 - DNA, 69 bp, Homo sapiens
tggccaatgtttgtttttagggtgagttctatactatttttctattattattttgctttatttactgtg

SEQ ID NO: 99614 - DNA, 67 bp, Homo sapiens
tgtttttagggtgagttctatactatttttctattattattttgctttatttactgtggttggtaac

SEQ ID NO: 99615 - DNA, 73 bp, Homo sapiens
gtgagttctatactatttttctattattattttgctttatttactgtggttggtaactgaatctctaacatca

SEQ ID NO: 99616 - DNA, 73 bp, Homo sapiens
tactatttttctattattattttgctttatttactgtggttggtaactgaatctctaacatcaaaacatgaga

SEQ ID NO: 99617 - DNA, 76 bp, Homo sapiens
ctattattattttgctttatttactgtggttggtaactgaatctctaacatcaaaacatgagatgttctgccagaa

SEQ ID NO: 99618 - DNA, 77 bp, Homo sapiens
ttttgctttatttactgtggttggtaactgaatctctaacatcaaaacatgagatgttctgccagaaagagattaca

SEQ ID NO: 99619 - DNA, 76 bp, Homo sapiens
atttactgtggttggtaactgaatctctaacatcaaaacatgagatgttctgccagaaagagattacagaagaaaa

SEQ ID NO: 99620 - DNA, 77 bp, Homo sapiens
gttggtaactgaatctctaacatcaaaacatgagatgttctgccagaaagagattacagaagaaaagcctatgaaaa

SEQ ID NO: 99621 - DNA, 77 bp, Homo sapiens
actgaatctctaacatcaaaacatgagatgttctgccagaaagagattacagaagaaaagcctatgaaaagaaactg

SEQ ID NO: 99622 - DNA, 76 bp, Homo sapiens
taacatcaaaacatgagatgttctgccagaaagagattacagaagaaaagcctatgaaaagaaactgggtttgtca

SEQ ID NO: 99623 - DNA, 73 bp, Homo sapiens
agatgttctgccagaaagagattacagaagaaaagcctatgaaaagaaactgggtttgtcagtgaagatttta

SEQ ID NO: 99624 - DNA, 71 bp, Homo sapiens
gccagaaagagattacagaagaaaagcctatgaaaagaaactgggtttgtcagtgaagattttatttacag

SEQ ID NO: 99625 - DNA, 71 bp, Homo sapiens
gattacagaagaaaagcctatgaaaagaaactgggtttgtcagtgaagattttatttacaggagttttgca

SEQ ID NO: 99626 - DNA, 70 bp, Homo sapiens
gaaaagcctatgaaaagaaactgggtttgtcagtgaagattttatttacaggagttttgcaatcggtatc

SEQ ID NO: 99627 - DNA, 75 bp, Homo sapiens
tcagtgaagattttatttacaggagttttgcaatcggtatctttaatctccataacaattgggctattctactgc

SEQ ID NO: 99628 - DNA, 75 bp, Homo sapiens
gagttttgcaatcggtatctttaatctccataacaattgggctattctactgctttgaaggcaattgttcaataa

SEQ ID NO: 99629 - DNA, 77 bp, Homo sapiens
tatctttaatctccataacaattgggctattctactgctttgaaggcaattgttcaataatgagaaggtccctgtga

SEQ ID NO: 99630 - DNA, 75 bp, Homo sapiens
attgggctattctactgctttgaaggcaattgttcaataatgagaaggtccctgtgaggctaaggcttggaagga

SEQ ID NO: 99631 - DNA, 76 bp, Homo sapiens
tctactgctttgaaggcaattgttcaataatgagaaggtccctgtgaggctaaggcttggaaggaagaatgtaaca

SEQ ID NO: 99632 - DNA, 75 bp, Homo sapiens
gcaattgttcaataatgagaaggtccctgtgaggctaaggcttggaaggaagaatgtaacagggctggtgacaat

SEQ ID NO: 99633 - DNA, 77 bp, Homo sapiens
tgttcaataatgagaaggtccctgtgaggctaaggcttggaaggaagaatgtaacagggctggtgacaattgaggca

SEQ ID NO: 99634 - DNA, 73 bp, Homo sapiens
agaaggtccctgtgaggctaaggcttggaaggaagaatgtaacagggctggtgacaattgaggcaggtgaaac

SEQ ID NO: 99635 - DNA, 77 bp, Homo sapiens
tgaggctaaggcttggaaggaagaatgtaacagggctggtgacaattgaggcaggtgaaaccctctgcctctgtcaa

SEQ ID NO: 99636 - DNA, 75 bp, Homo sapiens
taaggcttggaaggaagaatgtaacagggctggtgacaattgaggcaggtgaaaccctctgcctctgtcaatttc

SEQ ID NO: 99637 - DNA, 72 bp, Homo sapiens
aaggaagaatgtaacagggctggtgacaattgaggcaggtgaaaccctctgcctctgtcaatttcccctaaa

SEQ ID NO: 99638 - DNA, 72 bp, Homo sapiens
gtaacagggctggtgacaattgaggcaggtgaaaccctctgcctctgtcaatttcccctaaaggtcagggtg

SEQ ID NO: 99639 - DNA, 73 bp, Homo sapiens
tggtgacaattgaggcaggtgaaaccctctgcctctgtcaatttcccctaaaggtcagggtggggtgttctga

SEQ ID NO: 99640 - DNA, 71 bp, Homo sapiens
aggcaggtgaaaccctctgcctctgtcaatttcccctaaaggtcagggtggggtgttctgagggccagaga

SEQ ID NO: 99641 - DNA, 69 bp, Homo sapiens
aaaccctctgcctctgtcaatttcccctaaaggtcagggtggggtgttctgagggccagagagaaataa

SEQ ID NO: 99642 - DNA, 70 bp, Homo sapiens
ccctaaaggtcagggtggggtgttctgagggccagagagaaataagcaaagacacaggtaatgaaagtcc

SEQ ID NO: 99643 - DNA, 75 bp, Homo sapiens
tcagggtggggtgttctgagggccagagagaaataagcaaagacacaggtaatgaaagtccctccgcatcattta

SEQ ID NO: 99644 - DNA, 75 bp, Homo sapiens
gccagagagaaataagcaaagacacaggtaatgaaagtccctccgcatcatttaaatcacaaatactggatttta

SEQ ID NO: 99645 - DNA, 72 bp, Homo sapiens
aaataagcaaagacacaggtaatgaaagtccctccgcatcatttaaatcacaaatactggattttaaagagc

SEQ ID NO: 99646 - DNA, 70 bp, Homo sapiens
aggtaatgaaagtccctccgcatcatttaaatcacaaatactggattttaaagagccctaaaataactga

SEQ ID NO: 99647 - DNA, 70 bp, Homo sapiens
agtccctccgcatcatttaaatcacaaatactggattttaaagagccctaaaataactgaattcgagtgg

SEQ ID NO: 99648 - DNA, 70 bp, Homo sapiens
catttaaatcacaaatactggattttaaagagccctaaaataactgaattcgagtgggcctgaatttctg

SEQ ID NO: 99649 - DNA, 68 bp, Homo sapiens
attttaaagagccctaaaataactgaattcgagtgggcctgaatttctgttccataaggcaaggaaaa

SEQ ID NO: 99650 - DNA, 73 bp, Homo sapiens
ccctaaaataactgaattcgagtgggcctgaatttctgttccataaggcaaggaaaaatcatgtagatgagta

SEQ ID NO: 99651 - DNA, 74 bp, Homo sapiens
attcgagtgggcctgaatttctgttccataaggcaaggaaaaatcatgtagatgagtaaaaccaactcagtctg

SEQ ID NO: 99652 - DNA, 74 bp, Homo sapiens
ttccataaggcaaggaaaaatcatgtagatgagtaaaaccaactcagtctggagaactatgcctaataagaaaa

SEQ ID NO: 99653 - DNA, 75 bp, Homo sapiens
aatcatgtagatgagtaaaaccaactcagtctggagaactatgcctaataagaaaacccaagcagtagctttcta

SEQ ID NO: 99654 - DNA, 73 bp, Homo sapiens
atgagtaaaaccaactcagtctggagaactatgcctaataagaaaacccaagcagtagctttctaagtagagc

SEQ ID NO: 99655 - DNA, 73 bp, Homo sapiens
aactcagtctggagaactatgcctaataagaaaacccaagcagtagctttctaagtagagctgtttttcatat

SEQ ID NO: 99656 - DNA, 76 bp, Homo sapiens
tctggagaactatgcctaataagaaaacccaagcagtagctttctaagtagagctgtttttcatattagcatatat

SEQ ID NO: 99657 - DNA, 73 bp, Homo sapiens
gcctaataagaaaacccaagcagtagctttctaagtagagctgtttttcatattagcatatattgtttgttct

SEQ ID NO: 99658 - DNA, 74 bp, Homo sapiens
ctaagtagagctgtttttcatattagcatatattgtttgttcttctctcaatacaaacttgtggtaaactttga

SEQ ID NO: 99659 - DNA, 75 bp, Homo sapiens
gctgtttttcatattagcatatattgtttgttcttctctcaatacaaacttgtggtaaactttgatactacttca

SEQ ID NO: 99660 - DNA, 77 bp, Homo sapiens
catattagcatatattgtttgttcttctctcaatacaaacttgtggtaaactttgatactacttcatgactacagta

SEQ ID NO: 99661 - DNA, 71 bp, Homo sapiens
ttgtttgttcttctctcaatacaaacttgtggtaaactttgatactacttcatgactacagtaaaagtttc

SEQ ID NO: 99662 - DNA, 69 bp, Homo sapiens
tcaatacaaacttgtggtaaactttgatactacttcatgactacagtaaaagtttcttttttaaatgtc

SEQ ID NO: 99663 - DNA, 68 bp, Homo sapiens
cttgtggtaaactttgatactacttcatgactacagtaaaagtttcttttttaaatgtccaaatttga

SEQ ID NO: 99664 - DNA, 71 bp, Homo sapiens
gatactacttcatgactacagtaaaagtttcttttttaaatgtccaaatttgaaagactatcttcaggcga

SEQ ID NO: 99665 - DNA, 69 bp, Homo sapiens
acttcatgactacagtaaaagtttcttttttaaatgtccaaatttgaaagactatcttcaggcgatttg

SEQ ID NO: 99666 - DNA, 69 bp, Homo sapiens
cttttttaaatgtccaaatttgaaagactatcttcaggcgatttgtaaatcaccatcctttagaaatgg

SEQ ID NO: 99667 - DNA, 73 bp, Homo sapiens
aatgtccaaatttgaaagactatcttcaggcgatttgtaaatcaccatcctttagaaatgggtgtgtagtcaa

SEQ ID NO: 99668 - DNA, 73 bp, Homo sapiens
aaatttgaaagactatcttcaggcgatttgtaaatcaccatcctttagaaatgggtgtgtagtcaacaatgcc

SEQ ID NO: 99669 - DNA, 77 bp, Homo sapiens
tatcttcaggcgatttgtaaatcaccatcctttagaaatgggtgtgtagtcaacaatgcctggcaatcaagtcactt

SEQ ID NO: 99670 - DNA, 73 bp, Homo sapiens
aggcgatttgtaaatcaccatcctttagaaatgggtgtgtagtcaacaatgcctggcaatcaagtcacttttt

SEQ ID NO: 99671 - DNA, 74 bp, Homo sapiens
taaatcaccatcctttagaaatgggtgtgtagtcaacaatgcctggcaatcaagtcacttttttaaaaggcagc

SEQ ID NO: 99672 - DNA, 76 bp, Homo sapiens
atgggtgtgtagtcaacaatgcctggcaatcaagtcacttttttaaaaggcagcttgcttcaaaacaacagtgaca

SEQ ID NO: 99673 - DNA, 76 bp, Homo sapiens
agtcaacaatgcctggcaatcaagtcacttttttaaaaggcagcttgcttcaaaacaacagtgacatgcctggctt

SEQ ID NO: 99674 - DNA, 74 bp, Homo sapiens
gcaatcaagtcacttttttaaaaggcagcttgcttcaaaacaacagtgacatgcctggctttgggaggtcaaat

SEQ ID NO: 99675 - DNA, 75 bp, Homo sapiens
tttaaaaggcagcttgcttcaaaacaacagtgacatgcctggctttgggaggtcaaattcttgagtccatcccaa

SEQ ID NO: 99676 - DNA, 76 bp, Homo sapiens
agcttgcttcaaaacaacagtgacatgcctggctttgggaggtcaaattcttgagtccatcccaactgtctggctt

SEQ ID NO: 99677 - DNA, 77 bp, Homo sapiens
aaaacaacagtgacatgcctggctttgggaggtcaaattcttgagtccatcccaactgtctggctttggtcatcatg

SEQ ID NO: 99678 - DNA, 74 bp, Homo sapiens
tttgggaggtcaaattcttgagtccatcccaactgtctggctttggtcatcatgtcatcttttgttcccatttt

SEQ ID NO: 99679 - DNA, 75 bp, Homo sapiens
aggtcaaattcttgagtccatcccaactgtctggctttggtcatcatgtcatcttttgttcccatttttctgttc

SEQ ID NO: 99680 - DNA, 76 bp, Homo sapiens
cttgagtccatcccaactgtctggctttggtcatcatgtcatcttttgttcccatttttctgttcctaccatctaa

SEQ ID NO: 99681 - DNA, 77 bp, Homo sapiens
aactgtctggctttggtcatcatgtcatcttttgttcccatttttctgttcctaccatctaagctgtcatgagcttt

SEQ ID NO: 99682 - DNA, 78 bp, Homo sapiens
tttggtcatcatgtcatcttttgttcccatttttctgttcctaccatctaagctgtcatgagcttttggaggctagga

SEQ ID NO: 99683 - DNA, 77 bp, Homo sapiens
atcatgtcatcttttgttcccatttttctgttcctaccatctaagctgtcatgagcttttggaggctaggacaagag

SEQ ID NO: 99684 - DNA, 74 bp, Homo sapiens
atcttttgttcccatttttctgttcctaccatctaagctgtcatgagcttttggaggctaggacaagaggcacc

SEQ ID NO: 99685 - DNA, 74 bp, Homo sapiens
atttttctgttcctaccatctaagctgtcatgagcttttggaggctaggacaagaggcacctgggcctcctgtt

SEQ ID NO: 99686 - DNA, 77 bp, Homo sapiens
tgttcctaccatctaagctgtcatgagcttttggaggctaggacaagaggcacctgggcctcctgtttccccatctg

SEQ ID NO: 99687 - DNA, 78 bp, Homo sapiens
atctaagctgtcatgagcttttggaggctaggacaagaggcacctgggcctcctgtttccccatctggcactgctccc

SEQ ID NO: 99688 - DNA, 75 bp, Homo sapiens
atgagcttttggaggctaggacaagaggcacctgggcctcctgtttccccatctggcactgctcccgggacacag

SEQ ID NO: 99689 - DNA, 76 bp, Homo sapiens
aagaggcacctgggcctcctgtttccccatctggcactgctcccgggacacagggaagagagctctttctctatca

SEQ ID NO: 99690 - DNA, 80 bp, Homo sapiens
tgtttccccatctggcactgctcccgggacacagggaagagagctctttctctatcactgtcaggacctctgattccatc

SEQ ID NO: 99691 - DNA, 79 bp, Homo sapiens
atctggcactgctcccgggacacagggaagagagctctttctctatcactgtcaggacctctgattccatcggtatagg

SEQ ID NO: 99692 - DNA, 78 bp, Homo sapiens
tcccgggacacagggaagagagctctttctctatcactgtcaggacctctgattccatcggtataggtgctctagaaa

SEQ ID NO: 99693 - DNA, 78 bp, Homo sapiens
acacagggaagagagctctttctctatcactgtcaggacctctgattccatcggtataggtgctctagaaaatattaa

SEQ ID NO: 99694 - DNA, 78 bp, Homo sapiens
agagagctctttctctatcactgtcaggacctctgattccatcggtataggtgctctagaaaatattaaggaaatatc

SEQ ID NO: 99695 - DNA, 79 bp, Homo sapiens
tatcactgtcaggacctctgattccatcggtataggtgctctagaaaatattaaggaaatatctgatctcatctaaaaa

SEQ ID NO: 99696 - DNA, 76 bp, Homo sapiens
ctgtcaggacctctgattccatcggtataggtgctctagaaaatattaaggaaatatctgatctcatctaaaaaaa

SEQ ID NO: 99697 - DNA, 76 bp, Homo sapiens
ctctgattccatcggtataggtgctctagaaaatattaaggaaatatctgatctcatctaaaaaaaatcatacatt

SEQ ID NO: 99698 - DNA, 75 bp, Homo sapiens
tcggtataggtgctctagaaaatattaaggaaatatctgatctcatctaaaaaaaatcatacatttttctggctg

SEQ ID NO: 99699 - DNA, 74 bp, Homo sapiens
gtgctctagaaaatattaaggaaatatctgatctcatctaaaaaaaatcatacatttttctggctgggaaataa

SEQ ID NO: 99700 - DNA, 74 bp, Homo sapiens
tattaaggaaatatctgatctcatctaaaaaaaatcatacatttttctggctgggaaataaaaatactatgatg

SEQ ID NO: 99701 - DNA, 76 bp, Homo sapiens
tatctgatctcatctaaaaaaaatcatacatttttctggctgggaaataaaaatactatgatgttgcgttcaaaca

SEQ ID NO: 99702 - DNA, 73 bp, Homo sapiens
catctaaaaaaaatcatacatttttctggctgggaaataaaaatactatgatgttgcgttcaaacaaatgatg

SEQ ID NO: 99703 - DNA, 74 bp, Homo sapiens
tggctgggaaataaaaatactatgatgttgcgttcaaacaaatgatggactgaggttatagtaacacgattggg

SEQ ID NO: 99704 - DNA, 78 bp, Homo sapiens
ataaaaatactatgatgttgcgttcaaacaaatgatggactgaggttatagtaacacgattggggcatttgtgcatga

SEQ ID NO: 99705 - DNA, 83 bp, Homo sapiens
tatgatgttgcgttcaaacaaatgatggactgaggttatagtaacacgattggggcatttgtgcatgagatgttcagttcaca

SEQ ID NO: 99706 - DNA, 79 bp, Homo sapiens
ttcaaacaaatgatggactgaggttatagtaacacgattggggcatttgtgcatgagatgttcagttcacatttacctg

SEQ ID NO: 99707 - DNA, 78 bp, Homo sapiens
atggactgaggttatagtaacacgattggggcatttgtgcatgagatgttcagttcacatttacctgtctaccatgtt

SEQ ID NO: 99708 - DNA, 77 bp, Homo sapiens
aggttatagtaacacgattggggcatttgtgcatgagatgttcagttcacatttacctgtctaccatgtttgttctg

SEQ ID NO: 99709 - DNA, 78 bp, Homo sapiens
gtaacacgattggggcatttgtgcatgagatgttcagttcacatttacctgtctaccatgtttgttctgggggatgga

SEQ ID NO: 99710 - DNA, 75 bp, Homo sapiens
tgttcagttcacatttacctgtctaccatgtttgttctgggggatggacttgggagagttatctctggactcacc

SEQ ID NO: 99711 - DNA, 76 bp, Homo sapiens
acatttacctgtctaccatgtttgttctgggggatggacttgggagagttatctctggactcacctgctgtgcctg

SEQ ID NO: 99712 - DNA, 80 bp, Homo sapiens
taccatgtttgttctgggggatggacttgggagagttatctctggactcacctgctgtgcctggtcaatggtctgatgtc

SEQ ID NO: 99713 - DNA, 78 bp, Homo sapiens
ttctgggggatggacttgggagagttatctctggactcacctgctgtgcctggtcaatggtctgatgtcccctgtctt

SEQ ID NO: 99714 - DNA, 78 bp, Homo sapiens
atggacttgggagagttatctctggactcacctgctgtgcctggtcaatggtctgatgtcccctgtcttttgtacaaa

SEQ ID NO: 99715 - DNA, 79 bp, Homo sapiens
atctctggactcacctgctgtgcctggtcaatggtctgatgtcccctgtcttttgtacaaagatacagcagtttgaacg

SEQ ID NO: 99716 - DNA, 79 bp, Homo sapiens
tgctgtgcctggtcaatggtctgatgtcccctgtcttttgtacaaagatacagcagtttgaacggtggctccagaacca

SEQ ID NO: 99717 - DNA, 75 bp, Homo sapiens
ctggtcaatggtctgatgtcccctgtcttttgtacaaagatacagcagtttgaacggtggctccagaaccatttc

SEQ ID NO: 99718 - DNA, 74 bp, Homo sapiens
atggtctgatgtcccctgtcttttgtacaaagatacagcagtttgaacggtggctccagaaccatttcctcacc

SEQ ID NO: 99719 - DNA, 71 bp, Homo sapiens
ccctgtcttttgtacaaagatacagcagtttgaacggtggctccagaaccatttcctcacccccagaactg

SEQ ID NO: 99720 - DNA, 72 bp, Homo sapiens
tgaccttatttggaaaagggcctttgaagctataattaagtgaaggattttgagttcatcatgaattacctg

SEQ ID NO: 99721 - DNA, 71 bp, Homo sapiens
ttatttggaaaagggcctttgaagctataattaagtgaaggattttgagttcatcatgaattacctgggtg

SEQ ID NO: 99722 - DNA, 73 bp, Homo sapiens
gcctttgaagctataattaagtgaaggattttgagttcatcatgaattacctgggtgggtctaaatatagtaa

SEQ ID NO: 99723 - DNA, 75 bp, Homo sapiens
gaagctataattaagtgaaggattttgagttcatcatgaattacctgggtgggtctaaatatagtaacatgtatc

SEQ ID NO: 99724 - DNA, 74 bp, Homo sapiens
gctataattaagtgaaggattttgagttcatcatgaattacctgggtgggtctaaatatagtaacatgtatcct

SEQ ID NO: 99725 - DNA, 75 bp, Homo sapiens
tgaaggattttgagttcatcatgaattacctgggtgggtctaaatatagtaacatgtatccttagacaaaagaga

SEQ ID NO: 99726 - DNA, 76 bp, Homo sapiens
attttgagttcatcatgaattacctgggtgggtctaaatatagtaacatgtatccttagacaaaagagatgacaca

SEQ ID NO: 99727 - DNA, 74 bp, Homo sapiens
atgaattacctgggtgggtctaaatatagtaacatgtatccttagacaaaagagatgacacaaaggaggccata

SEQ ID NO: 99728 - DNA, 73 bp, Homo sapiens
ttacctgggtgggtctaaatatagtaacatgtatccttagacaaaagagatgacacaaaggaggccatataaa

SEQ ID NO: 99729 - DNA, 74 bp, Homo sapiens
tgggtctaaatatagtaacatgtatccttagacaaaagagatgacacaaaggaggccatataaagagggaagaa

SEQ ID NO: 99730 - DNA, 72 bp, Homo sapiens
aaatatagtaacatgtatccttagacaaaagagatgacacaaaggaggccatataaagagggaagaagaagt

SEQ ID NO: 99731 - DNA, 75 bp, Homo sapiens
aacatgtatccttagacaaaagagatgacacaaaggaggccatataaagagggaagaagaagttggaatgataca

SEQ ID NO: 99732 - DNA, 76 bp, Homo sapiens
aaaggaggccatataaagagggaagaagaagttggaatgatacagtctgatacagtcacaagccaaggaatgccac

SEQ ID NO: 99733 - DNA, 78 bp, Homo sapiens
atataaagagggaagaagaagttggaatgatacagtctgatacagtcacaagccaaggaatgccaccagtggctggaa

SEQ ID NO: 99734 - DNA, 79 bp, Homo sapiens
agaagaagttggaatgatacagtctgatacagtcacaagccaaggaatgccaccagtggctggaagagataaggaagta

SEQ ID NO: 99735 - DNA, 79 bp, Homo sapiens
agttggaatgatacagtctgatacagtcacaagccaaggaatgccaccagtggctggaagagataaggaagtatcctcc

SEQ ID NO: 99736 - DNA, 78 bp, Homo sapiens
atacagtctgatacagtcacaagccaaggaatgccaccagtggctggaagagataaggaagtatcctcccctagaggc

SEQ ID NO: 99737 - DNA, 77 bp, Homo sapiens
agtcacaagccaaggaatgccaccagtggctggaagagataaggaagtatcctcccctagaggcttcagagaatgta

SEQ ID NO: 99738 - DNA, 77 bp, Homo sapiens
aaggaatgccaccagtggctggaagagataaggaagtatcctcccctagaggcttcagagaatgtatggtcttgcca

SEQ ID NO: 99739 - DNA, 76 bp, Homo sapiens
accagtggctggaagagataaggaagtatcctcccctagaggcttcagagaatgtatggtcttgccaacactttga

SEQ ID NO: 99740 - DNA, 76 bp, Homo sapiens
tggctggaagagataaggaagtatcctcccctagaggcttcagagaatgtatggtcttgccaacactttgattttg

SEQ ID NO: 99741 - DNA, 74 bp, Homo sapiens
agataaggaagtatcctcccctagaggcttcagagaatgtatggtcttgccaacactttgattttggacttctg

SEQ ID NO: 99742 - DNA, 71 bp, Homo sapiens
ccaccaagtttgtggttatttgttaaaacagccacaggaaactaatatacttgtgctgtggtttgattatg

SEQ ID NO: 99743 - DNA, 72 bp, Homo sapiens
ttgtggttatttgttaaaacagccacaggaaactaatatacttgtgctgtggtttgattatgtccctcaaaa

SEQ ID NO: 99744 - DNA, 74 bp, Homo sapiens
tatttgttaaaacagccacaggaaactaatatacttgtgctgtggtttgattatgtccctcaaaagttcacatg

SEQ ID NO: 99745 - DNA, 73 bp, Homo sapiens
aaacagccacaggaaactaatatacttgtgctgtggtttgattatgtccctcaaaagttcacatgttggaaac

SEQ ID NO: 99746 - DNA, 73 bp, Homo sapiens
aaactaatatacttgtgctgtggtttgattatgtccctcaaaagttcacatgttggaaacttagatcccactg

SEQ ID NO: 99747 - DNA, 75 bp, Homo sapiens
tatacttgtgctgtggtttgattatgtccctcaaaagttcacatgttggaaacttagatcccactgtggtggtgt

SEQ ID NO: 99748 - DNA, 74 bp, Homo sapiens
tggtttgattatgtccctcaaaagttcacatgttggaaacttagatcccactgtggtggtgttgatgaggcctt

SEQ ID NO: 99749 - DNA, 75 bp, Homo sapiens
attatgtccctcaaaagttcacatgttggaaacttagatcccactgtggtggtgttgatgaggcctttgcaggga

SEQ ID NO: 99750 - DNA, 76 bp, Homo sapiens
aagttcacatgttggaaacttagatcccactgtggtggtgttgatgaggcctttgcagggagcaaacgggtcatga

SEQ ID NO: 99751 - DNA, 76 bp, Homo sapiens
acatgttggaaacttagatcccactgtggtggtgttgatgaggcctttgcagggagcaaacgggtcatgaggattc

SEQ ID NO: 99752 - DNA, 77 bp, Homo sapiens
aacttagatcccactgtggtggtgttgatgaggcctttgcagggagcaaacgggtcatgaggattctgccctcataa

SEQ ID NO: 99753 - DNA, 80 bp, Homo sapiens
tgtggtggtgttgatgaggcctttgcagggagcaaacgggtcatgaggattctgccctcataaatggattaatgccataa

SEQ ID NO: 99754 - DNA, 82 bp, Homo sapiens
ggtgttgatgaggcctttgcagggagcaaacgggtcatgaggattctgccctcataaatggattaatgccataatcatgtga

SEQ ID NO: 99755 - DNA, 79 bp, Homo sapiens
tttgcagggagcaaacgggtcatgaggattctgccctcataaatggattaatgccataatcatgtgagtgggttattgg

SEQ ID NO: 99756 - DNA, 78 bp, Homo sapiens
agggagcaaacgggtcatgaggattctgccctcataaatggattaatgccataatcatgtgagtgggttattggtgaa

SEQ ID NO: 99757 - DNA, 80 bp, Homo sapiens
tcatgaggattctgccctcataaatggattaatgccataatcatgtgagtgggttattggtgaagtgcctttgttataaa

SEQ ID NO: 99758 - DNA, 77 bp, Homo sapiens
attctgccctcataaatggattaatgccataatcatgtgagtgggttattggtgaagtgcctttgttataaaagcaa

SEQ ID NO: 99759 - DNA, 79 bp, Homo sapiens
ataaatggattaatgccataatcatgtgagtgggttattggtgaagtgcctttgttataaaagcaagctctcttgcaca

SEQ ID NO: 99760 - DNA, 79 bp, Homo sapiens
attaatgccataatcatgtgagtgggttattggtgaagtgcctttgttataaaagcaagctctcttgcacatgctttct

SEQ ID NO: 99761 - DNA, 78 bp, Homo sapiens
ataatcatgtgagtgggttattggtgaagtgcctttgttataaaagcaagctctcttgcacatgctttcttgtgcccc

SEQ ID NO: 99762 - DNA, 75 bp, Homo sapiens
agtgggttattggtgaagtgcctttgttataaaagcaagctctcttgcacatgctttcttgtgccccttgctttc

SEQ ID NO: 99763 - DNA, 76 bp, Homo sapiens
gtgaagtgcctttgttataaaagcaagctctcttgcacatgctttcttgtgccccttgctttctgccttgggttaa

SEQ ID NO: 99764 - DNA, 78 bp, Homo sapiens
tttgttataaaagcaagctctcttgcacatgctttcttgtgccccttgctttctgccttgggttaatgcagcaaggac

SEQ ID NO: 99765 - DNA, 78 bp, Homo sapiens
taaaagcaagctctcttgcacatgctttcttgtgccccttgctttctgccttgggttaatgcagcaaggaccccacca

SEQ ID NO: 99766 - DNA, 81 bp, Homo sapiens
ctctcttgcacatgctttcttgtgccccttgctttctgccttgggttaatgcagcaaggaccccaccagatgccagcacca

SEQ ID NO: 99767 - DNA, 80 bp, Homo sapiens
atgctttcttgtgccccttgctttctgccttgggttaatgcagcaaggaccccaccagatgccagcaccatgctcttgga

SEQ ID NO: 99768 - DNA, 70 bp, Homo sapiens
ccagtctcaggcatttaacaaaagaactaagacagaaagttggtaccaagatgtggggttgttactacaa

SEQ ID NO: 99769 - DNA, 68 bp, Homo sapiens
ggcatttaacaaaagaactaagacagaaagttggtaccaagatgtggggttgttactacaacaaatac

SEQ ID NO: 99770 - DNA, 67 bp, Homo sapiens
acaaaagaactaagacagaaagttggtaccaagatgtggggttgttactacaacaaatacctgaaag

SEQ ID NO: 99771 - DNA, 69 bp, Homo sapiens
actaagacagaaagttggtaccaagatgtggggttgttactacaacaaatacctgaaagtgtgtaagtg

SEQ ID NO: 99772 - DNA, 68 bp, Homo sapiens
aaagttggtaccaagatgtggggttgttactacaacaaatacctgaaagtgtgtaagtggctttggaa

SEQ ID NO: 99773 - DNA, 70 bp, Homo sapiens
agatgtggggttgttactacaacaaatacctgaaagtgtgtaagtggctttggaactgtataaccgtgaa

SEQ ID NO: 99774 - DNA, 71 bp, Homo sapiens
gttgttactacaacaaatacctgaaagtgtgtaagtggctttggaactgtataaccgtgaaggctgaacaa

SEQ ID NO: 99775 - DNA, 71 bp, Homo sapiens
tacaacaaatacctgaaagtgtgtaagtggctttggaactgtataaccgtgaaggctgaacaagtttggag

SEQ ID NO: 99776 - DNA, 71 bp, Homo sapiens
aaagtgtgtaagtggctttggaactgtataaccgtgaaggctgaacaagtttggaggagcaggctagaaaa

SEQ ID NO: 99777 - DNA, 73 bp, Homo sapiens
taagtggctttggaactgtataaccgtgaaggctgaacaagtttggaggagcaggctagaaaaaagcctgcat

SEQ ID NO: 99778 - DNA, 74 bp, Homo sapiens
tttggaactgtataaccgtgaaggctgaacaagtttggaggagcaggctagaaaaaagcctgcattgccaagaa

SEQ ID NO: 99779 - DNA, 75 bp, Homo sapiens
tataaccgtgaaggctgaacaagtttggaggagcaggctagaaaaaagcctgcattgccaagaacggttctgcca

SEQ ID NO: 99780 - DNA, 74 bp, Homo sapiens
ctgaacaagtttggaggagcaggctagaaaaaagcctgcattgccaagaacggttctgccattaggggcaattc

SEQ ID NO: 99781 - DNA, 74 bp, Homo sapiens
aagtttggaggagcaggctagaaaaaagcctgcattgccaagaacggttctgccattaggggcaattctggtga

SEQ ID NO: 99782 - DNA, 74 bp, Homo sapiens
aggctagaaaaaagcctgcattgccaagaacggttctgccattaggggcaattctggtgagggctctgaaagaa

SEQ ID NO: 99783 - DNA, 73 bp, Homo sapiens
aaaaagcctgcattgccaagaacggttctgccattaggggcaattctggtgagggctctgaaagaagacctta

SEQ ID NO: 99784 - DNA, 71 bp, Homo sapiens
attgccaagaacggttctgccattaggggcaattctggtgagggctctgaaagaagaccttagaactaggg

SEQ ID NO: 99785 - DNA, 70 bp, Homo sapiens
aacggttctgccattaggggcaattctggtgagggctctgaaagaagaccttagaactaggggaagtcta

SEQ ID NO: 99786 - DNA, 70 bp, Homo sapiens
attaggggcaattctggtgagggctctgaaagaagaccttagaactaggggaagtctaaatcttcgtaga

SEQ ID NO: 99787 - DNA, 70 bp, Homo sapiens
attctggtgagggctctgaaagaagaccttagaactaggggaagtctaaatcttcgtagagattacttaa

SEQ ID NO: 99788 - DNA, 69 bp, Homo sapiens
gggctctgaaagaagaccttagaactaggggaagtctaaatcttcgtagagattacttaagtgattact

SEQ ID NO: 99789 - DNA, 69 bp, Homo sapiens
tgaaagaagaccttagaactaggggaagtctaaatcttcgtagagattacttaagtgattacttaagtg

SEQ ID NO: 99790 - DNA, 70 bp, Homo sapiens
accttagaactaggggaagtctaaatcttcgtagagattacttaagtgattacttaagtgtatgtgacca

SEQ ID NO: 99791 - DNA, 77 bp, Homo sapiens
gaagtctaaatcttcgtagagattacttaagtgattacttaagtgtatgtgaccagagtgctggtagaatgctggta

SEQ ID NO: 99792 - DNA, 75 bp, Homo sapiens
ctaaatcttcgtagagattacttaagtgattacttaagtgtatgtgaccagagtgctggtagaatgctggtaaag

SEQ ID NO: 99793 - DNA, 82 bp, Homo sapiens
ttaagtgattacttaagtgtatgtgaccagagtgctggtagaatgctggtaaaggccattctgatgaggctgcagatagaaa

SEQ ID NO: 99794 - DNA, 83 bp, Homo sapiens
tacttaagtgtatgtgaccagagtgctggtagaatgctggtaaaggccattctgatgaggctgcagatagaaatgaggaacaa

SEQ ID NO: 99795 - DNA, 83 bp, Homo sapiens
tatgtgaccagagtgctggtagaatgctggtaaaggccattctgatgaggctgcagatagaaatgaggaacaaggtattggaa

SEQ ID NO: 99796 - DNA, 78 bp, Homo sapiens
ctggtagaatgctggtaaaggccattctgatgaggctgcagatagaaatgaggaacaaggtattggaaactggagtaa

SEQ ID NO: 99797 - DNA, 70 bp, Homo sapiens
aggtattggaaactggagtaaaggccatatttataaaatataaggttgcaaagagctgggtgaaattgtg

SEQ ID NO: 99798 - DNA, 72 bp, Homo sapiens
aaactggagtaaaggccatatttataaaatataaggttgcaaagagctgggtgaaattgtgtctgtgtccta

SEQ ID NO: 99799 - DNA, 73 bp, Homo sapiens
taaaggccatatttataaaatataaggttgcaaagagctgggtgaaattgtgtctgtgtcctaggacttaatg

SEQ ID NO: 99800 - DNA, 75 bp, Homo sapiens
ttataaaatataaggttgcaaagagctgggtgaaattgtgtctgtgtcctaggacttaatggaatgcagaactta

SEQ ID NO: 99801 - DNA, 77 bp, Homo sapiens
tataaggttgcaaagagctgggtgaaattgtgtctgtgtcctaggacttaatggaatgcagaacttaagagggatga

SEQ ID NO: 99802 - DNA, 75 bp, Homo sapiens
aaagagctgggtgaaattgtgtctgtgtcctaggacttaatggaatgcagaacttaagagggatgaactaggata

SEQ ID NO: 99803 - DNA, 74 bp, Homo sapiens
aaattgtgtctgtgtcctaggacttaatggaatgcagaacttaagagggatgaactaggatatttgtggaagaa

SEQ ID NO: 99804 - DNA, 74 bp, Homo sapiens
tctgtgtcctaggacttaatggaatgcagaacttaagagggatgaactaggatatttgtggaagaaatacttaa

SEQ ID NO: 99805 - DNA, 74 bp, Homo sapiens
ctaggacttaatggaatgcagaacttaagagggatgaactaggatatttgtggaagaaatacttaagcagcaaa

SEQ ID NO: 99806 - DNA, 84 bp, Homo sapiens
agcagcaaagcattgaggctgctgtgtggctacttttaactacatatagtgagatgtgatagcaaaagaatgacttaaagatga

SEQ ID NO: 99807 - DNA, 80 bp, Homo sapiens
aaagcattgaggctgctgtgtggctacttttaactacatatagtgagatgtgatagcaaaagaatgacttaaagatgaaa

SEQ ID NO: 99808 - DNA, 79 bp, Homo sapiens
ctacatatagtgagatgtgatagcaaaagaatgacttaaagatgaaatttgcaattaaaagagaagcagagtggaaaga

SEQ ID NO: 99809 - DNA, 77 bp, Homo sapiens
agtgagatgtgatagcaaaagaatgacttaaagatgaaatttgcaattaaaagagaagcagagtggaaagatttgga

SEQ ID NO: 99810 - DNA, 73 bp, Homo sapiens
gtgatagcaaaagaatgacttaaagatgaaatttgcaattaaaagagaagcagagtggaaagatttggaaaat

SEQ ID NO: 99811 - DNA, 73 bp, Homo sapiens
aagaatgacttaaagatgaaatttgcaattaaaagagaagcagagtggaaagatttggaaaattcgcagcctg

SEQ ID NO: 99812 - DNA, 74 bp, Homo sapiens
cagagtggaaagatttggaaaattcgcagcctggccatgtaaagagtgaaagtgtatttggaagagagtactaa

SEQ ID NO: 99813 - DNA, 73 bp, Homo sapiens
agatttggaaaattcgcagcctggccatgtaaagagtgaaagtgtatttggaagagagtactaagggtgtggc

SEQ ID NO: 99814 - DNA, 73 bp, Homo sapiens
aaaattcgcagcctggccatgtaaagagtgaaagtgtatttggaagagagtactaagggtgtggccaagcaac

SEQ ID NO: 99815 - DNA, 74 bp, Homo sapiens
aaagtgtatttggaagagagtactaagggtgtggccaagcaaccatttgccaaagagattagtatgaatgcgag

SEQ ID NO: 99816 - DNA, 76 bp, Homo sapiens
tttggaagagagtactaagggtgtggccaagcaaccatttgccaaagagattagtatgaatgcgaggaagccagat

SEQ ID NO: 99817 - DNA, 78 bp, Homo sapiens
agtactaagggtgtggccaagcaaccatttgccaaagagattagtatgaatgcgaggaagccagattctgttcatcaa

SEQ ID NO: 99818 - DNA, 79 bp, Homo sapiens
tggccaagcaaccatttgccaaagagattagtatgaatgcgaggaagccagattctgttcatcaaaacaatgggagaaa

SEQ ID NO: 99819 - DNA, 75 bp, Homo sapiens
aaccatttgccaaagagattagtatgaatgcgaggaagccagattctgttcatcaaaacaatgggagaaagaccc

SEQ ID NO: 99820 - DNA, 74 bp, Homo sapiens
aagagattagtatgaatgcgaggaagccagattctgttcatcaaaacaatgggagaaagaccccgaaaagcatt

SEQ ID NO: 99821 - DNA, 75 bp, Homo sapiens
atgcgaggaagccagattctgttcatcaaaacaatgggagaaagaccccgaaaagcatttcagagatcttcaagt

SEQ ID NO: 99822 - DNA, 76 bp, Homo sapiens
attctgttcatcaaaacaatgggagaaagaccccgaaaagcatttcagagatcttcaagttgctcctcccatcata

SEQ ID NO: 99823 - DNA, 75 bp, Homo sapiens
gttcatcaaaacaatgggagaaagaccccgaaaagcatttcagagatcttcaagttgctcctcccatcataggcc

SEQ ID NO: 99824 - DNA, 76 bp, Homo sapiens
accccgaaaagcatttcagagatcttcaagttgctcctcccatcataggcccagagctctaggagggtagaatgat

SEQ ID NO: 99825 - DNA, 76 bp, Homo sapiens
aaaagcatttcagagatcttcaagttgctcctcccatcataggcccagagctctaggagggtagaatgattttagg

SEQ ID NO: 99826 - DNA, 75 bp, Homo sapiens
agatcttcaagttgctcctcccatcataggcccagagctctaggagggtagaatgattttaggggacaggcctgg

SEQ ID NO: 99827 - DNA, 74 bp, Homo sapiens
atcttcaagttgctcctcccatcataggcccagagctctaggagggtagaatgattttaggggacaggcctggg

SEQ ID NO: 99828 - DNA, 76 bp, Homo sapiens
atcataggcccagagctctaggagggtagaatgattttaggggacaggcctggggcacccttcatgggctcactgc

SEQ ID NO: 99829 - DNA, 79 bp, Homo sapiens
atgattttaggggacaggcctggggcacccttcatgggctcactgcccagggctgcctctagtctctgcttcctgcatc

SEQ ID NO: 99830 - DNA, 82 bp, Homo sapiens
gggcacccttcatgggctcactgcccagggctgcctctagtctctgcttcctgcatcctggtgcagcacaccttggccaccc

SEQ ID NO: 99831 - DNA, 87 bp, Homo sapiens
tcatgggctcactgcccagggctgcctctagtctctgcttcctgcatcctggtgcagcacaccttggccaccccagctgtggcttca

SEQ ID NO: 99832 - DNA, 80 bp, Homo sapiens
cctctagtctctgcttcctgcatcctggtgcagcacaccttggccaccccagctgtggcttcagtgggcctaggtatacc

SEQ ID NO: 99833 - DNA, 82 bp, Homo sapiens
tctgcttcctgcatcctggtgcagcacaccttggccaccccagctgtggcttcagtgggcctaggtatacctaggctgccat

SEQ ID NO: 99834 - DNA, 80 bp, Homo sapiens
ttggccaccccagctgtggcttcagtgggcctaggtatacctaggctgccattctgaagggcacaagcagtatgccttga

SEQ ID NO: 99835 - DNA, 82 bp, Homo sapiens
agctgtggcttcagtgggcctaggtatacctaggctgccattctgaagggcacaagcagtatgccttgatggtctctatgtg

SEQ ID NO: 99836 - DNA, 81 bp, Homo sapiens
ttcagtgggcctaggtatacctaggctgccattctgaagggcacaagcagtatgccttgatggtctctatgtggtgctaat

SEQ ID NO: 99837 - DNA, 79 bp, Homo sapiens
cctaggtatacctaggctgccattctgaagggcacaagcagtatgccttgatggtctctatgtggtgctaattccgtag

SEQ ID NO: 99838 - DNA, 84 bp, Homo sapiens
atacctaggctgccattctgaagggcacaagcagtatgccttgatggtctctatgtggtgctaattccgtaggcatgcagaata

SEQ ID NO: 99839 - DNA, 87 bp, Homo sapiens
attctgaagggcacaagcagtatgccttgatggtctctatgtggtgctaattccgtaggcatgcagaatacatgctgtggaagcatg

SEQ ID NO: 99840 - DNA, 86 bp, Homo sapiens
aagggcacaagcagtatgccttgatggtctctatgtggtgctaattccgtaggcatgcagaatacatgctgtggaagcatggcttc

SEQ ID NO: 99841 - DNA, 86 bp, Homo sapiens
tatgccttgatggtctctatgtggtgctaattccgtaggcatgcagaatacatgctgtggaagcatggcttcctccacctagatta

SEQ ID NO: 99842 - DNA, 84 bp, Homo sapiens
ttgatggtctctatgtggtgctaattccgtaggcatgcagaatacatgctgtggaagcatggcttcctccacctagattacgaa

SEQ ID NO: 99843 - DNA, 85 bp, Homo sapiens
tatgtggtgctaattccgtaggcatgcagaatacatgctgtggaagcatggcttcctccacctagattacgaaggatgccacaga

SEQ ID NO: 99844 - DNA, 85 bp, Homo sapiens
atgcagaatacatgctgtggaagcatggcttcctccacctagattacgaaggatgccacagactgcctagaagctcaggccaaga

SEQ ID NO: 99845 - DNA, 82 bp, Homo sapiens
atacatgctgtggaagcatggcttcctccacctagattacgaaggatgccacagactgcctagaagctcaggccaagaccta

SEQ ID NO: 99846 - DNA, 77 bp, Homo sapiens
aagcatggcttcctccacctagattacgaaggatgccacagactgcctagaagctcaggccaagacctaccacaggg

SEQ ID NO: 99847 - DNA, 76 bp, Homo sapiens
ttcctccacctagattacgaaggatgccacagactgcctagaagctcaggccaagacctaccacaggggaatacca

SEQ ID NO: 99848 - DNA, 78 bp, Homo sapiens
aaggatgccacagactgcctagaagctcaggccaagacctaccacaggggaataccactgcagacagtacctagcagg

SEQ ID NO: 99849 - DNA, 78 bp, Homo sapiens
agactgcctagaagctcaggccaagacctaccacaggggaataccactgcagacagtacctagcagggcaatgttgaa

SEQ ID NO: 99850 - DNA, 77 bp, Homo sapiens
ctagaagctcaggccaagacctaccacaggggaataccactgcagacagtacctagcagggcaatgttgaacagaaa

SEQ ID NO: 99851 - DNA, 76 bp, Homo sapiens
ccaagacctaccacaggggaataccactgcagacagtacctagcagggcaatgttgaacagaaatgtgaggttgaa

SEQ ID NO: 99852 - DNA, 79 bp, Homo sapiens
taccacaggggaataccactgcagacagtacctagcagggcaatgttgaacagaaatgtgaggttgaagctgccacaaa

SEQ ID NO: 99853 - DNA, 79 bp, Homo sapiens
taccactgcagacagtacctagcagggcaatgttgaacagaaatgtgaggttgaagctgccacaaagagtccccactaa

SEQ ID NO: 99854 - DNA, 78 bp, Homo sapiens
agacagtacctagcagggcaatgttgaacagaaatgtgaggttgaagctgccacaaagagtccccactaaggctgtgc

SEQ ID NO: 99855 - DNA, 77 bp, Homo sapiens
acctagcagggcaatgttgaacagaaatgtgaggttgaagctgccacaaagagtccccactaaggctgtgcctaatg

SEQ ID NO: 99856 - DNA, 77 bp, Homo sapiens
aatgttgaacagaaatgtgaggttgaagctgccacaaagagtccccactaaggctgtgcctaatggagacacagaat

SEQ ID NO: 99857 - DNA, 76 bp, Homo sapiens
aaatgtgaggttgaagctgccacaaagagtccccactaaggctgtgcctaatggagacacagaattggggctatcc

SEQ ID NO: 99858 - DNA, 76 bp, Homo sapiens
aggttgaagctgccacaaagagtccccactaaggctgtgcctaatggagacacagaattggggctatccctgagaa

SEQ ID NO: 99859 - DNA, 76 bp, Homo sapiens
acaaagagtccccactaaggctgtgcctaatggagacacagaattggggctatccctgagaacccagaactgcaga

SEQ ID NO: 99860 - DNA, 80 bp, Homo sapiens
cccactaaggctgtgcctaatggagacacagaattggggctatccctgagaacccagaactgcagagccaccagtgtgca

SEQ ID NO: 99861 - DNA, 81 bp, Homo sapiens
taaggctgtgcctaatggagacacagaattggggctatccctgagaacccagaactgcagagccaccagtgtgcaactcta

SEQ ID NO: 99862 - DNA, 81 bp, Homo sapiens
taatggagacacagaattggggctatccctgagaacccagaactgcagagccaccagtgtgcaactctagcctggtaatgc

SEQ ID NO: 99863 - DNA, 82 bp, Homo sapiens
acagaattggggctatccctgagaacccagaactgcagagccaccagtgtgcaactctagcctggtaatgctgcagacacaa

SEQ ID NO: 99864 - DNA, 84 bp, Homo sapiens
tatccctgagaacccagaactgcagagccaccagtgtgcaactctagcctggtaatgctgcagacacaagacttcaacgtgaga

SEQ ID NO: 99865 - DNA, 82 bp, Homo sapiens
aacccagaactgcagagccaccagtgtgcaactctagcctggtaatgctgcagacacaagacttcaacgtgagagaggtgaa

SEQ ID NO: 99866 - DNA, 82 bp, Homo sapiens
agaactgcagagccaccagtgtgcaactctagcctggtaatgctgcagacacaagacttcaacgtgagagaggtgaagtttg

SEQ ID NO: 99867 - DNA, 81 bp, Homo sapiens
ccaccagtgtgcaactctagcctggtaatgctgcagacacaagacttcaacgtgagagaggtgaagtttgggctgagccca

SEQ ID NO: 99868 - DNA, 79 bp, Homo sapiens
actctagcctggtaatgctgcagacacaagacttcaacgtgagagaggtgaagtttgggctgagcccagcaaaactgta

SEQ ID NO: 99869 - DNA, 77 bp, Homo sapiens
agcctggtaatgctgcagacacaagacttcaacgtgagagaggtgaagtttgggctgagcccagcaaaactgtaggg

SEQ ID NO: 99870 - DNA, 76 bp, Homo sapiens
cagacacaagacttcaacgtgagagaggtgaagtttgggctgagcccagcaaaactgtaggggcagggctgcccaa

SEQ ID NO: 99871 - DNA, 74 bp, Homo sapiens
acaagacttcaacgtgagagaggtgaagtttgggctgagcccagcaaaactgtaggggcagggctgcccaaggc

SEQ ID NO: 99872 - DNA, 71 bp, Homo sapiens
aacgtgagagaggtgaagtttgggctgagcccagcaaaactgtaggggcagggctgcccaaggccttgggg

SEQ ID NO: 99873 - DNA, 71 bp, Homo sapiens
ggtgaagtttgggctgagcccagcaaaactgtaggggcagggctgcccaaggccttgggggcctagtctta

SEQ ID NO: 99874 - DNA, 74 bp, Homo sapiens
tgagcccagcaaaactgtaggggcagggctgcccaaggccttgggggcctagtcttagccccattgtatccaga

SEQ ID NO: 99875 - DNA, 71 bp, Homo sapiens
aaaactgtaggggcagggctgcccaaggccttgggggcctagtcttagccccattgtatccagaaggcaga

SEQ ID NO: 99876 - DNA, 68 bp, Homo sapiens
caaaggagattattctccagttttaagacttaatattgtttaccctgttggattttgaacttatatgg

SEQ ID NO: 99877 - DNA, 69 bp, Homo sapiens
gagattattctccagttttaagacttaatattgtttaccctgttggattttgaacttatatgggaccag

SEQ ID NO: 99878 - DNA, 65 bp, Homo sapiens
ccagttttaagacttaatattgtttaccctgttggattttgaacttatatgggaccagttacccc

SEQ ID NO: 99879 - DNA, 67 bp, Homo sapiens
cttaatattgtttaccctgttggattttgaacttatatgggaccagttacccctattttcttgcctg

SEQ ID NO: 99880 - DNA, 66 bp, Homo sapiens
ttgtttaccctgttggattttgaacttatatgggaccagttacccctattttcttgcctgtttttc

SEQ ID NO: 99881 - DNA, 68 bp, Homo sapiens
tgttggattttgaacttatatgggaccagttacccctattttcttgcctgtttttctcttttggagta

SEQ ID NO: 99882 - DNA, 68 bp, Homo sapiens
tgaacttatatgggaccagttacccctattttcttgcctgtttttctcttttggagtaggaatttcta

SEQ ID NO: 99883 - DNA, 67 bp, Homo sapiens
accagttacccctattttcttgcctgtttttctcttttggagtaggaatttctaccttgtgtctgtc

SEQ ID NO: 99884 - DNA, 69 bp, Homo sapiens
ctattttcttgcctgtttttctcttttggagtaggaatttctaccttgtgtctgtcccaccattatatt

SEQ ID NO: 99885 - DNA, 70 bp, Homo sapiens
ttcttgcctgtttttctcttttggagtaggaatttctaccttgtgtctgtcccaccattatattttggaa

SEQ ID NO: 99886 - DNA, 70 bp, Homo sapiens
ctcttttggagtaggaatttctaccttgtgtctgtcccaccattatattttggaagtattatagtagact

SEQ ID NO: 99887 - DNA, 73 bp, Homo sapiens
tctaccttgtgtctgtcccaccattatattttggaagtattatagtagacttgtttttgatttcacaaagcta

SEQ ID NO: 99888 - DNA, 72 bp, Homo sapiens
gtgtctgtcccaccattatattttggaagtattatagtagacttgtttttgatttcacaaagctaatggaat

SEQ ID NO: 99889 - DNA, 70 bp, Homo sapiens
cccaccattatattttggaagtattatagtagacttgtttttgatttcacaaagctaatggaatttgctt

SEQ ID NO: 99890 - DNA, 73 bp, Homo sapiens
tggaagtattatagtagacttgtttttgatttcacaaagctaatggaatttgctttaaatgtttccttgcatc

SEQ ID NO: 99891 - DNA, 74 bp, Homo sapiens
atagtagacttgtttttgatttcacaaagctaatggaatttgctttaaatgtttccttgcatctcacccatatc

SEQ ID NO: 99892 - DNA, 75 bp, Homo sapiens
tgtttttgatttcacaaagctaatggaatttgctttaaatgtttccttgcatctcacccatatctggtttagaca

SEQ ID NO: 99893 - DNA, 75 bp, Homo sapiens
tgatttcacaaagctaatggaatttgctttaaatgtttccttgcatctcacccatatctggtttagacaagactt

SEQ ID NO: 99894 - DNA, 72 bp, Homo sapiens
aaagctaatggaatttgctttaaatgtttccttgcatctcacccatatctggtttagacaagactttggact

SEQ ID NO: 99895 - DNA, 70 bp, Homo sapiens
aatttgctttaaatgtttccttgcatctcacccatatctggtttagacaagactttggactttcgacttt

SEQ ID NO: 99896 - DNA, 77 bp, Homo sapiens
ctatggtttgaatgtgtcttctcaaaagttcatatgttggaaacctggttgccatcatggcaatgttgagaggtggg

SEQ ID NO: 99897 - DNA, 75 bp, Homo sapiens
aatgtgtcttctcaaaagttcatatgttggaaacctggttgccatcatggcaatgttgagaggtggggcctttgg

SEQ ID NO: 99898 - DNA, 76 bp, Homo sapiens
ctttgggaggtgattgagtcataagggctccatcctcacaaatgaattcatgctaccattgagggagtaagttagt

SEQ ID NO: 99899 - DNA, 79 bp, Homo sapiens
aggtgattgagtcataagggctccatcctcacaaatgaattcatgctaccattgagggagtaagttagttatcatggag

SEQ ID NO: 99900 - DNA, 78 bp, Homo sapiens
ataagggctccatcctcacaaatgaattcatgctaccattgagggagtaagttagttatcatggaggtggctttgtca

SEQ ID NO: 99901 - DNA, 79 bp, Homo sapiens
tccatcctcacaaatgaattcatgctaccattgagggagtaagttagttatcatggaggtggctttgtcataaaagtga

SEQ ID NO: 99902 - DNA, 79 bp, Homo sapiens
aaatgaattcatgctaccattgagggagtaagttagttatcatggaggtggctttgtcataaaagtgagctctctgaca

SEQ ID NO: 99903 - DNA, 82 bp, Homo sapiens
attcatgctaccattgagggagtaagttagttatcatggaggtggctttgtcataaaagtgagctctctgacagatgctctc

SEQ ID NO: 99904 - DNA, 80 bp, Homo sapiens
attgagggagtaagttagttatcatggaggtggctttgtcataaaagtgagctctctgacagatgctctctgcccttcca

SEQ ID NO: 99905 - DNA, 81 bp, Homo sapiens
agtaagttagttatcatggaggtggctttgtcataaaagtgagctctctgacagatgctctctgcccttccacctatctgc

SEQ ID NO: 99906 - DNA, 87 bp, Homo sapiens
ttatcatggaggtggctttgtcataaaagtgagctctctgacagatgctctctgcccttccacctatctgccatgggatgactctca

SEQ ID NO: 99907 - DNA, 88 bp, Homo sapiens
ctttgtcataaaagtgagctctctgacagatgctctctgcccttccacctatctgccatgggatgactctcagcagatgatggcacct

SEQ ID NO: 99908 - DNA, 89 bp, Homo sapiens
ataaaagtgagctctctgacagatgctctctgcccttccacctatctgccatgggatgactctcagcagatgatggcaccttgctcttg

SEQ ID NO: 99909 - DNA, 89 bp, Homo sapiens
agctctctgacagatgctctctgcccttccacctatctgccatgggatgactctcagcagatgatggcaccttgctcttggacttccca

SEQ ID NO: 99910 - DNA, 74 bp, Homo sapiens
ttcccagcctccatagccatgagccgaataaacttttctttatatattacccagtctataatatataagactac

SEQ ID NO: 99911 - DNA, 74 bp, Homo sapiens
gcctccatagccatgagccgaataaacttttctttatatattacccagtctataatatataagactacgacaac

SEQ ID NO: 99912 - DNA, 73 bp, Homo sapiens
ccatgagccgaataaacttttctttatatattacccagtctataatatataagactacgacaacttgatatta

SEQ ID NO: 99913 - DNA, 76 bp, Homo sapiens
acttttctttatatattacccagtctataatatataagactacgacaacttgatattattgatgttgatcataaca

SEQ ID NO: 99914 - DNA, 77 bp, Homo sapiens
atatattacccagtctataatatataagactacgacaacttgatattattgatgttgatcataacagctaacagttt

SEQ ID NO: 99915 - DNA, 77 bp, Homo sapiens
cccagtctataatatataagactacgacaacttgatattattgatgttgatcataacagctaacagtttttgagtgt

SEQ ID NO: 99916 - DNA, 78 bp, Homo sapiens
tatataagactacgacaacttgatattattgatgttgatcataacagctaacagtttttgagtgttaaccatgggctg

SEQ ID NO: 99917 - DNA, 77 bp, Homo sapiens
actacgacaacttgatattattgatgttgatcataacagctaacagtttttgagtgttaaccatgggctggctctaa

SEQ ID NO: 99918 - DNA, 80 bp, Homo sapiens
ttgatattattgatgttgatcataacagctaacagtttttgagtgttaaccatgggctggctctaatgtccactgcttta

SEQ ID NO: 99919 - DNA, 78 bp, Homo sapiens
ttattgatgttgatcataacagctaacagtttttgagtgttaaccatgggctggctctaatgtccactgctttatgtt

SEQ ID NO: 99920 - DNA, 77 bp, Homo sapiens
atcataacagctaacagtttttgagtgttaaccatgggctggctctaatgtccactgctttatgtttcacagtggtc

SEQ ID NO: 99921 - DNA, 75 bp, Homo sapiens
ctaacagtttttgagtgttaaccatgggctggctctaatgtccactgctttatgtttcacagtggtcctaggatc

SEQ ID NO: 99922 - DNA, 77 bp, Homo sapiens
agtgttaaccatgggctggctctaatgtccactgctttatgtttcacagtggtcctaggatctgctagtataattat

SEQ ID NO: 99923 - DNA, 77 bp, Homo sapiens
atgggctggctctaatgtccactgctttatgtttcacagtggtcctaggatctgctagtataattattactcgtctt

SEQ ID NO: 99924 - DNA, 78 bp, Homo sapiens
ctctaatgtccactgctttatgtttcacagtggtcctaggatctgctagtataattattactcgtcttttgcagataa

SEQ ID NO: 99925 - DNA, 77 bp, Homo sapiens
tgtccactgctttatgtttcacagtggtcctaggatctgctagtataattattactcgtcttttgcagataagaaaa

SEQ ID NO: 99926 - DNA, 74 bp, Homo sapiens
tttatgtttcacagtggtcctaggatctgctagtataattattactcgtcttttgcagataagaaaactaaggc

SEQ ID NO: 99927 - DNA, 70 bp, Homo sapiens
gtggtcctaggatctgctagtataattattactcgtcttttgcagataagaaaactaaggctttaaaagg

SEQ ID NO: 99928 - DNA, 70 bp, Homo sapiens
taaaaggttaagtaacttgccaaaagtcctatagtgaatgtggtagaaactaaggtagtctgcctgttga

SEQ ID NO: 99929 - DNA, 72 bp, Homo sapiens
aacttgccaaaagtcctatagtgaatgtggtagaaactaaggtagtctgcctgttgagccctcattctttct

SEQ ID NO: 99930 - DNA, 73 bp, Homo sapiens
aaaagtcctatagtgaatgtggtagaaactaaggtagtctgcctgttgagccctcattctttcttagccacta

SEQ ID NO: 99931 - DNA, 79 bp, Homo sapiens
tatagtgaatgtggtagaaactaaggtagtctgcctgttgagccctcattctttcttagccactatgatctgctatctt

SEQ ID NO: 99932 - DNA, 79 bp, Homo sapiens
tagaaactaaggtagtctgcctgttgagccctcattctttcttagccactatgatctgctatctttcttggctattaga

SEQ ID NO: 99933 - DNA, 79 bp, Homo sapiens
ctaaggtagtctgcctgttgagccctcattctttcttagccactatgatctgctatctttcttggctattagattccca

SEQ ID NO: 99934 - DNA, 83 bp, Homo sapiens
tgttgagccctcattctttcttagccactatgatctgctatctttcttggctattagattcccagctcaagccttctgatatg

SEQ ID NO: 99935 - DNA, 85 bp, Homo sapiens
tcattctttcttagccactatgatctgctatctttcttggctattagattcccagctcaagccttctgatatgtagccatcaata

SEQ ID NO: 99936 - DNA, 83 bp, Homo sapiens
attctttcttagccactatgatctgctatctttcttggctattagattcccagctcaagccttctgatatgtagccatcaata

SEQ ID NO: 99937 - DNA, 84 bp, Homo sapiens
tttcttagccactatgatctgctatctttcttggctattagattcccagctcaagccttctgatatgtagccatcaatatcaaa

SEQ ID NO: 99938 - DNA, 84 bp, Homo sapiens
tgctatctttcttggctattagattcccagctcaagccttctgatatgtagccatcaatatcaaatacatgctccaactacaac

SEQ ID NO: 99939 - DNA, 82 bp, Homo sapiens
ctattagattcccagctcaagccttctgatatgtagccatcaatatcaaatacatgctccaactacaactttgctgaaacta

SEQ ID NO: 99940 - DNA, 81 bp, Homo sapiens
ttcccagctcaagccttctgatatgtagccatcaatatcaaatacatgctccaactacaactttgctgaaactattaatct

SEQ ID NO: 99941 - DNA, 80 bp, Homo sapiens
ctcaagccttctgatatgtagccatcaatatcaaatacatgctccaactacaactttgctgaaactattaatcttccaaa

SEQ ID NO: 99942 - DNA, 80 bp, Homo sapiens
gccttctgatatgtagccatcaatatcaaatacatgctccaactacaactttgctgaaactattaatcttccaaatgaaa

SEQ ID NO: 99943 - DNA, 77 bp, Homo sapiens
gccatcaatatcaaatacatgctccaactacaactttgctgaaactattaatcttccaaatgaaaccttttagtgca

SEQ ID NO: 99944 - DNA, 75 bp, Homo sapiens
tatcaaatacatgctccaactacaactttgctgaaactattaatcttccaaatgaaaccttttagtgcatgggtg

SEQ ID NO: 99945 - DNA, 75 bp, Homo sapiens
atgctccaactacaactttgctgaaactattaatcttccaaatgaaaccttttagtgcatgggtgtgctggccta

SEQ ID NO: 99946 - DNA, 74 bp, Homo sapiens
caactttgctgaaactattaatcttccaaatgaaaccttttagtgcatgggtgtgctggcctacatatttacaa

SEQ ID NO: 99947 - DNA, 76 bp, Homo sapiens
ttgctgaaactattaatcttccaaatgaaaccttttagtgcatgggtgtgctggcctacatatttacaagcataag

SEQ ID NO: 99948 - DNA, 76 bp, Homo sapiens
aaatgaaaccttttagtgcatgggtgtgctggcctacatatttacaagcataaggggaaagttcagaacatatgca

SEQ ID NO: 99949 - DNA, 79 bp, Homo sapiens
ttttagtgcatgggtgtgctggcctacatatttacaagcataaggggaaagttcagaacatatgcagtctacagaagaa

SEQ ID NO: 99950 - DNA, 78 bp, Homo sapiens
atgggtgtgctggcctacatatttacaagcataaggggaaagttcagaacatatgcagtctacagaagaaatatttca

SEQ ID NO: 99951 - DNA, 80 bp, Homo sapiens
tatttacaagcataaggggaaagttcagaacatatgcagtctacagaagaaatatttcatcactaagatcaagccctgca

SEQ ID NO: 99952 - DNA, 85 bp, Homo sapiens
tcagaacatatgcagtctacagaagaaatatttcatcactaagatcaagccctgcagtgaatctctgcagtcatcccactggttt

SEQ ID NO: 99953 - DNA, 83 bp, Homo sapiens
atatgcagtctacagaagaaatatttcatcactaagatcaagccctgcagtgaatctctgcagtcatcccactggttttcatt

SEQ ID NO: 99954 - DNA, 81 bp, Homo sapiens
ctacagaagaaatatttcatcactaagatcaagccctgcagtgaatctctgcagtcatcccactggttttcatttcttctc

SEQ ID NO: 99955 - DNA, 74 bp, Homo sapiens
tatttttatttattcctgtgaacacctgattcaggcttgttgtcggggtaagattataatgctatagacctgga

SEQ ID NO: 99956 - DNA, 74 bp, Homo sapiens
ttatttattcctgtgaacacctgattcaggcttgttgtcggggtaagattataatgctatagacctggaaaggc

SEQ ID NO: 99957 - DNA, 74 bp, Homo sapiens
tcaggcttgttgtcggggtaagattataatgctatagacctggaaaggctctcataccctactacaccttgtta

SEQ ID NO: 99958 - DNA, 71 bp, Homo sapiens
ttgttgtcggggtaagattataatgctatagacctggaaaggctctcataccctactacaccttgttaaaa

SEQ ID NO: 99959 - DNA, 70 bp, Homo sapiens
gggtaagattataatgctatagacctggaaaggctctcataccctactacaccttgttaaaagctatttt

SEQ ID NO: 99960 - DNA, 73 bp, Homo sapiens
atgctatagacctggaaaggctctcataccctactacaccttgttaaaagctatttttaaatgaaatcattca

SEQ ID NO: 99961 - DNA, 72 bp, Homo sapiens
tggaaaggctctcataccctactacaccttgttaaaagctatttttaaatgaaatcattcacctgtcatgtt

SEQ ID NO: 99962 - DNA, 73 bp, Homo sapiens
aggctctcataccctactacaccttgttaaaagctatttttaaatgaaatcattcacctgtcatgtttatagc

SEQ ID NO: 99963 - DNA, 71 bp, Homo sapiens
accctactacaccttgttaaaagctatttttaaatgaaatcattcacctgtcatgtttatagcctattata

SEQ ID NO: 99964 - DNA, 74 bp, Homo sapiens
tgttaaaagctatttttaaatgaaatcattcacctgtcatgtttatagcctattatataaattaatttctcaca

SEQ ID NO: 99965 - DNA, 77 bp, Homo sapiens
gctatttttaaatgaaatcattcacctgtcatgtttatagcctattatataaattaatttctcacattctgaatatg

SEQ ID NO: 99966 - DNA, 77 bp, Homo sapiens
aatgaaatcattcacctgtcatgtttatagcctattatataaattaatttctcacattctgaatatgttactttgtg

SEQ ID NO: 99967 - DNA, 76 bp, Homo sapiens
cattcacctgtcatgtttatagcctattatataaattaatttctcacattctgaatatgttactttgtgtaaccat

SEQ ID NO: 99968 - DNA, 76 bp, Homo sapiens
tcatgtttatagcctattatataaattaatttctcacattctgaatatgttactttgtgtaaccattaaatgacca

SEQ ID NO: 99969 - DNA, 74 bp, Homo sapiens
gcctattatataaattaatttctcacattctgaatatgttactttgtgtaaccattaaatgaccatttatagat

SEQ ID NO: 99970 - DNA, 77 bp, Homo sapiens
ctcacattctgaatatgttactttgtgtaaccattaaatgaccatttatagattcacatatgaggatttctggtgtt

SEQ ID NO: 99971 - DNA, 77 bp, Homo sapiens
tatgttactttgtgtaaccattaaatgaccatttatagattcacatatgaggatttctggtgtttgattgtagcctc

SEQ ID NO: 99972 - DNA, 76 bp, Homo sapiens
tactttgtgtaaccattaaatgaccatttatagattcacatatgaggatttctggtgtttgattgtagcctccact

SEQ ID NO: 99973 - DNA, 75 bp, Homo sapiens
atttatagattcacatatgaggatttctggtgtttgattgtagcctccactttcaaggtaatcaaatagtcccta

SEQ ID NO: 99974 - DNA, 73 bp, Homo sapiens
attcacatatgaggatttctggtgtttgattgtagcctccactttcaaggtaatcaaatagtccctactccct

SEQ ID NO: 99975 - DNA, 68 bp, Homo sapiens
aggatttctggtgtttgattgtagcctccactttcaaggtaatcaaatagtccctactccctttgttt

SEQ ID NO: 99976 - DNA, 69 bp, Homo sapiens
tctggtgtttgattgtagcctccactttcaaggtaatcaaatagtccctactccctttgttttcaaact

SEQ ID NO: 99977 - DNA, 69 bp, Homo sapiens
attgtagcctccactttcaaggtaatcaaatagtccctactccctttgttttcaaacttcaaattgcta

SEQ ID NO: 99978 - DNA, 69 bp, Homo sapiens
tccactttcaaggtaatcaaatagtccctactccctttgttttcaaacttcaaattgctagaagagtaa

SEQ ID NO: 99979 - DNA, 68 bp, Homo sapiens
aggtaatcaaatagtccctactccctttgttttcaaacttcaaattgctagaagagtaaggaagagag

SEQ ID NO: 99980 - DNA, 68 bp, Homo sapiens
atagtccctactccctttgttttcaaacttcaaattgctagaagagtaaggaagagagggaaggagag

SEQ ID NO: 99981 - DNA, 75 bp, Homo sapiens
gagggagagagaaaggaaagcaatgcaatgcagttggatattttacctccaaggctggaaagaggatttatctcc

SEQ ID NO: 99982 - DNA, 74 bp, Homo sapiens
agaaaggaaagcaatgcaatgcagttggatattttacctccaaggctggaaagaggatttatctccttctccta

SEQ ID NO: 99983 - DNA, 74 bp, Homo sapiens
aaagcaatgcaatgcagttggatattttacctccaaggctggaaagaggatttatctccttctcctacaggaag

SEQ ID NO: 99984 - DNA, 71 bp, Homo sapiens
aatgcagttggatattttacctccaaggctggaaagaggatttatctccttctcctacaggaaggtggaaa

SEQ ID NO: 99985 - DNA, 67 bp, Homo sapiens
tattttacctccaaggctggaaagaggatttatctccttctcctacaggaaggtggaaaggttttct

SEQ ID NO: 99986 - DNA, 66 bp, Homo sapiens
cctccaaggctggaaagaggatttatctccttctcctacaggaaggtggaaaggttttcttccttt

SEQ ID NO: 99987 - DNA, 70 bp, Homo sapiens
aagaggatttatctccttctcctacaggaaggtggaaaggttttcttccttttgtctatccagatgataa

SEQ ID NO: 99988 - DNA, 71 bp, Homo sapiens
ctacaggaaggtggaaaggttttcttccttttgtctatccagatgataaagagagaatcagacggacttaa

SEQ ID NO: 99989 - DNA, 69 bp, Homo sapiens
aaggtggaaaggttttcttccttttgtctatccagatgataaagagagaatcagacggacttaaataac

SEQ ID NO: 99990 - DNA, 75 bp, Homo sapiens
tttcttccttttgtctatccagatgataaagagagaatcagacggacttaaataactctatacaactgagaaaca

SEQ ID NO: 99991 - DNA, 75 bp, Homo sapiens
ttttgtctatccagatgataaagagagaatcagacggacttaaataactctatacaactgagaaacagggtcatt

SEQ ID NO: 99992 - DNA, 79 bp, Homo sapiens
tatccagatgataaagagagaatcagacggacttaaataactctatacaactgagaaacagggtcatttcagtatctca

SEQ ID NO: 99993 - DNA, 74 bp, Homo sapiens
taaagagagaatcagacggacttaaataactctatacaactgagaaacagggtcatttcagtatctcagagttt

SEQ ID NO: 99994 - DNA, 79 bp, Homo sapiens
aatcagacggacttaaataactctatacaactgagaaacagggtcatttcagtatctcagagttttgcagacagcagca

SEQ ID NO: 99995 - DNA, 79 bp, Homo sapiens
acttaaataactctatacaactgagaaacagggtcatttcagtatctcagagttttgcagacagcagcaccagaatata

SEQ ID NO: 99996 - DNA, 80 bp, Homo sapiens
tatacaactgagaaacagggtcatttcagtatctcagagttttgcagacagcagcaccagaatatagtccttcctaagta

SEQ ID NO: 99997 - DNA, 75 bp, Homo sapiens
aaacagggtcatttcagtatctcagagttttgcagacagcagcaccagaatatagtccttcctaagtaactttaa

SEQ ID NO: 99998 - DNA, 72 bp, Homo sapiens
agtatctcagagttttgcagacagcagcaccagaatatagtccttcctaagtaactttaattttgggggaaa

SEQ ID NO: 99999 - DNA, 71 bp, Homo sapiens
ttttgcagacagcagcaccagaatatagtccttcctaagtaactttaattttgggggaaaataattagcaa

SEQ ID NO: 100000 - DNA, 70 bp, Homo sapiens
acagcagcaccagaatatagtccttcctaagtaactttaattttgggggaaaataattagcaagacagaa

SEQ ID NO: 100001 - DNA, 66 bp, Homo sapiens
cagaatatagtccttcctaagtaactttaattttgggggaaaataattagcaagacagaagttact

SEQ ID NO: 100002 - DNA, 66 bp, Homo sapiens
tccttcctaagtaactttaattttgggggaaaataattagcaagacagaagttacttggaatacta

SEQ ID NO: 100003 - DNA, 68 bp, Homo sapiens
actttaattttgggggaaaataattagcaagacagaagttacttggaatactaaaaatcaagagatga

SEQ ID NO: 100004 - DNA, 72 bp, Homo sapiens
ggggaaaataattagcaagacagaagttacttggaatactaaaaatcaagagatgatttgagaggtcaggga

SEQ ID NO: 100005 - DNA, 71 bp, Homo sapiens
aaataattagcaagacagaagttacttggaatactaaaaatcaagagatgatttgagaggtcagggacccc

SEQ ID NO: 100006 - DNA, 74 bp, Homo sapiens
ttacttggaatactaaaaatcaagagatgatttgagaggtcagggacccctcttggccatatggaacactcaaa

SEQ ID NO: 100007 - DNA, 78 bp, Homo sapiens
aaaaatcaagagatgatttgagaggtcagggacccctcttggccatatggaacactcaaagtgaggcacgcatactca

SEQ ID NO: 100008 - DNA, 76 bp, Homo sapiens
atttgagaggtcagggacccctcttggccatatggaacactcaaagtgaggcacgcatactcataaaagtggatta

SEQ ID NO: 100009 - DNA, 76 bp, Homo sapiens
gacccctcttggccatatggaacactcaaagtgaggcacgcatactcataaaagtggattagatgttgactgggtt

SEQ ID NO: 100010 - DNA, 80 bp, Homo sapiens
tcttggccatatggaacactcaaagtgaggcacgcatactcataaaagtggattagatgttgactgggtttggatgataa

SEQ ID NO: 100011 - DNA, 77 bp, Homo sapiens
aaagtgaggcacgcatactcataaaagtggattagatgttgactgggtttggatgataagcacttggtcccaatgaa

SEQ ID NO: 100012 - DNA, 75 bp, Homo sapiens
catactcataaaagtggattagatgttgactgggtttggatgataagcacttggtcccaatgaacttcaaaagta

SEQ ID NO: 100013 - DNA, 72 bp, Homo sapiens
ataaaagtggattagatgttgactgggtttggatgataagcacttggtcccaatgaacttcaaaagtaggaa

SEQ ID NO: 100014 - DNA, 73 bp, Homo sapiens
attagatgttgactgggtttggatgataagcacttggtcccaatgaacttcaaaagtaggaaggcaatggccc

SEQ ID NO: 100015 - DNA, 69 bp, Homo sapiens
acttggtcccaatgaacttcaaaagtaggaaggcaatggccccaataaagtaaacagagtggctggtaa

SEQ ID NO: 100016 - DNA, 69 bp, Homo sapiens
aatgaacttcaaaagtaggaaggcaatggccccaataaagtaaacagagtggctggtaagccttctccc

SEQ ID NO: 100017 - DNA, 73 bp, Homo sapiens
caataaagtaaacagagtggctggtaagccttctccctgctcatataccccctctttcactcttatttagaga

SEQ ID NO: 100018 - DNA, 75 bp, Homo sapiens
taaacagagtggctggtaagccttctccctgctcatataccccctctttcactcttatttagagattcattattc

SEQ ID NO: 100019 - DNA, 73 bp, Homo sapiens
ctggtaagccttctccctgctcatataccccctctttcactcttatttagagattcattattctgagttttct

SEQ ID NO: 100020 - DNA, 71 bp, Homo sapiens
cctctttcactcttatttagagattcattattctgagttttcttttctcccaaactttataaacaaatgca

SEQ ID NO: 100021 - DNA, 74 bp, Homo sapiens
tcactcttatttagagattcattattctgagttttcttttctcccaaactttataaacaaatgcacatgtacca

SEQ ID NO: 100022 - DNA, 73 bp, Homo sapiens
tagagattcattattctgagttttcttttctcccaaactttataaacaaatgcacatgtaccaaaggagacag

SEQ ID NO: 100023 - DNA, 69 bp, Homo sapiens
tttcttttctcccaaactttataaacaaatgcacatgtaccaaaggagacagtttattaaggtgcccac

SEQ ID NO: 100024 - DNA, 73 bp, Homo sapiens
tctcccaaactttataaacaaatgcacatgtaccaaaggagacagtttattaaggtgcccaccacacagcctg

SEQ ID NO: 100025 - DNA, 72 bp, Homo sapiens
tttataaacaaatgcacatgtaccaaaggagacagtttattaaggtgcccaccacacagcctggccccaaaa

SEQ ID NO: 100026 - DNA, 72 bp, Homo sapiens
acatgtaccaaaggagacagtttattaaggtgcccaccacacagcctggccccaaaattcttcttattatca

SEQ ID NO: 100027 - DNA, 71 bp, Homo sapiens
aaggagacagtttattaaggtgcccaccacacagcctggccccaaaattcttcttattatcaacatctaat

SEQ ID NO: 100028 - DNA, 72 bp, Homo sapiens
acagtttattaaggtgcccaccacacagcctggccccaaaattcttcttattatcaacatctaattataata

SEQ ID NO: 100029 - DNA, 77 bp, Homo sapiens
tgcccaccacacagcctggccccaaaattcttcttattatcaacatctaattataatagaacatgttcaatacaaga

SEQ ID NO: 100030 - DNA, 76 bp, Homo sapiens
cacagcctggccccaaaattcttcttattatcaacatctaattataatagaacatgttcaatacaagaatgccaag

SEQ ID NO: 100031 - DNA, 77 bp, Homo sapiens
cttcttattatcaacatctaattataatagaacatgttcaatacaagaatgccaagtgagtggatagcccaacactt

SEQ ID NO: 100032 - DNA, 74 bp, Homo sapiens
taattataatagaacatgttcaatacaagaatgccaagtgagtggatagcccaacactttttccatccctcctt

SEQ ID NO: 100033 - DNA, 74 bp, Homo sapiens
tggatagcccaacactttttccatccctcctttggtgattgggattcttctcgacactggtcagccctgtagta

SEQ ID NO: 100034 - DNA, 72 bp, Homo sapiens
aacactttttccatccctcctttggtgattgggattcttctcgacactggtcagccctgtagtaaatcgatc

SEQ ID NO: 100035 - DNA, 74 bp, Homo sapiens
catccctcctttggtgattgggattcttctcgacactggtcagccctgtagtaaatcgatccttgacccaagag

SEQ ID NO: 100036 - DNA, 76 bp, Homo sapiens
tttggtgattgggattcttctcgacactggtcagccctgtagtaaatcgatccttgacccaagagtgcacgcccag

SEQ ID NO: 100037 - DNA, 74 bp, Homo sapiens
attgggattcttctcgacactggtcagccctgtagtaaatcgatccttgacccaagagtgcacgcccagggaac

SEQ ID NO: 100038 - DNA, 75 bp, Homo sapiens
ttctcgacactggtcagccctgtagtaaatcgatccttgacccaagagtgcacgcccagggaacggccatcccac

SEQ ID NO: 100039 - DNA, 76 bp, Homo sapiens
tcagccctgtagtaaatcgatccttgacccaagagtgcacgcccagggaacggccatcccacttgcactggctttg

SEQ ID NO: 100040 - DNA, 76 bp, Homo sapiens
ctgtagtaaatcgatccttgacccaagagtgcacgcccagggaacggccatcccacttgcactggctttgtagcaa

SEQ ID NO: 100041 - DNA, 76 bp, Homo sapiens
tcgatccttgacccaagagtgcacgcccagggaacggccatcccacttgcactggctttgtagcaaggaaggtctg

SEQ ID NO: 100042 - DNA, 74 bp, Homo sapiens
aagagtgcacgcccagggaacggccatcccacttgcactggctttgtagcaaggaaggtctgggtttgcgtcca

SEQ ID NO: 100043 - DNA, 73 bp, Homo sapiens
cccagggaacggccatcccacttgcactggctttgtagcaaggaaggtctgggtttgcgtccaagttcatcac

SEQ ID NO: 100044 - DNA, 76 bp, Homo sapiens
ggccatcccacttgcactggctttgtagcaaggaaggtctgggtttgcgtccaagttcatcacttacaatctttga

SEQ ID NO: 100045 - DNA, 72 bp, Homo sapiens
ctttgtagcaaggaaggtctgggtttgcgtccaagttcatcacttacaatctttgagatactgggcaatttt

SEQ ID NO: 100046 - DNA, 70 bp, Homo sapiens
aaggaaggtctgggtttgcgtccaagttcatcacttacaatctttgagatactgggcaatttttaacctc

SEQ ID NO: 100047 - DNA, 72 bp, Homo sapiens
tgggtttgcgtccaagttcatcacttacaatctttgagatactgggcaatttttaacctctgaatttcgatt

SEQ ID NO: 100048 - DNA, 75 bp, Homo sapiens
gtccaagttcatcacttacaatctttgagatactgggcaatttttaacctctgaatttcgatttctctgtctata

SEQ ID NO: 100049 - DNA, 76 bp, Homo sapiens
tctttgagatactgggcaatttttaacctctgaatttcgatttctctgtctataaatgataccacaggattgttga

SEQ ID NO: 100050 - DNA, 73 bp, Homo sapiens
caatttttaacctctgaatttcgatttctctgtctataaatgataccacaggattgttgagggaatggaataa

SEQ ID NO: 100051 - DNA, 79 bp, Homo sapiens
ctctgaatttcgatttctctgtctataaatgataccacaggattgttgagggaatggaataatatgtacaaatgtctga

SEQ ID NO: 100052 - DNA, 77 bp, Homo sapiens
ttctctgtctataaatgataccacaggattgttgagggaatggaataatatgtacaaatgtctgacccacgtcaaaa

SEQ ID NO: 100053 - DNA, 78 bp, Homo sapiens
tataaatgataccacaggattgttgagggaatggaataatatgtacaaatgtctgacccacgtcaaaatagctcacaa

SEQ ID NO: 100054 - DNA, 76 bp, Homo sapiens
ataccacaggattgttgagggaatggaataatatgtacaaatgtctgacccacgtcaaaatagctcacaactggtc

SEQ ID NO: 100055 - DNA, 74 bp, Homo sapiens
attgttgagggaatggaataatatgtacaaatgtctgacccacgtcaaaatagctcacaactggtccagttaaa

SEQ ID NO: 100056 - DNA, 73 bp, Homo sapiens
atggaataatatgtacaaatgtctgacccacgtcaaaatagctcacaactggtccagttaaagagttaaatct

SEQ ID NO: 100057 - DNA, 73 bp, Homo sapiens
atatgtacaaatgtctgacccacgtcaaaatagctcacaactggtccagttaaagagttaaatcttcttccta

SEQ ID NO: 100058 - DNA, 73 bp, Homo sapiens
aaatgtctgacccacgtcaaaatagctcacaactggtccagttaaagagttaaatcttcttcctacatgctta

SEQ ID NO: 100059 - DNA, 79 bp, Homo sapiens
gtcaaaatagctcacaactggtccagttaaagagttaaatcttcttcctacatgcttatgacaaccagcatgcagaaga

SEQ ID NO: 100060 - DNA, 78 bp, Homo sapiens
aatagctcacaactggtccagttaaagagttaaatcttcttcctacatgcttatgacaaccagcatgcagaagaacaa

SEQ ID NO: 100061 - DNA, 75 bp, Homo sapiens
aagagttaaatcttcttcctacatgcttatgacaaccagcatgcagaagaacaacaaaatgggcttcctagttta

SEQ ID NO: 100062 - DNA, 76 bp, Homo sapiens
ttatgacaaccagcatgcagaagaacaacaaaatgggcttcctagtttatctaggtttcagttttctgtaccagca

SEQ ID NO: 100063 - DNA, 74 bp, Homo sapiens
atgcagaagaacaacaaaatgggcttcctagtttatctaggtttcagttttctgtaccagcatctattactcca

SEQ ID NO: 100064 - DNA, 73 bp, Homo sapiens
acaacaaaatgggcttcctagtttatctaggtttcagttttctgtaccagcatctattactccatcctcatat

SEQ ID NO: 100065 - DNA, 73 bp, Homo sapiens
tttcagttttctgtaccagcatctattactccatcctcatattcccagaaaggaggaaattacgacaccttaa

SEQ ID NO: 100066 - DNA, 76 bp, Homo sapiens
ttactccatcctcatattcccagaaaggaggaaattacgacaccttaaatgtgatacatcatatttggtcaatcag

SEQ ID NO: 100067 - DNA, 72 bp, Homo sapiens
tattcccagaaaggaggaaattacgacaccttaaatgtgatacatcatatttggtcaatcaggggtgaaatt

SEQ ID NO: 100068 - DNA, 71 bp, Homo sapiens
cagaaaggaggaaattacgacaccttaaatgtgatacatcatatttggtcaatcaggggtgaaattttaaa

SEQ ID NO: 100069 - DNA, 72 bp, Homo sapiens
aattacgacaccttaaatgtgatacatcatatttggtcaatcaggggtgaaattttaaaatcactcactcgg

SEQ ID NO: 100070 - DNA, 72 bp, Homo sapiens
ttaaatgtgatacatcatatttggtcaatcaggggtgaaattttaaaatcactcactcgggttgcccaaacc

SEQ ID NO: 100071 - DNA, 72 bp, Homo sapiens
atacatcatatttggtcaatcaggggtgaaattttaaaatcactcactcgggttgcccaaacccatctctag

SEQ ID NO: 100072 - DNA, 69 bp, Homo sapiens
atatttggtcaatcaggggtgaaattttaaaatcactcactcgggttgcccaaacccatctctaggtgg

SEQ ID NO: 100073 - DNA, 69 bp, Homo sapiens
aggggtgaaattttaaaatcactcactcgggttgcccaaacccatctctaggtgggagttgtgactgaa

SEQ ID NO: 100074 - DNA, 77 bp, Homo sapiens
ttgcccaaacccatctctaggtgggagttgtgactgaacaggcatcggtaccactagctctagaatctgccctgttc

SEQ ID NO: 100075 - DNA, 71 bp, Homo sapiens
aacaggcatcggtaccactagctctagaatctgccctgttctatcttttgaaataaattaaaaaagaattc

SEQ ID NO: 100076 - DNA, 71 bp, Homo sapiens
gctctagaatctgccctgttctatcttttgaaataaattaaaaaagaattctaagactcgatcgtagaagt

SEQ ID NO: 100077 - DNA, 71 bp, Homo sapiens
tgccctgttctatcttttgaaataaattaaaaaagaattctaagactcgatcgtagaagttaatgatggtg

SEQ ID NO: 100078 - DNA, 70 bp, Homo sapiens
cttttgaaataaattaaaaaagaattctaagactcgatcgtagaagttaatgatggtgtcctgactggga

SEQ ID NO: 100079 - DNA, 70 bp, Homo sapiens
aaattaaaaaagaattctaagactcgatcgtagaagttaatgatggtgtcctgactgggagaaacgtgta

SEQ ID NO: 100080 - DNA, 71 bp, Homo sapiens
aaaagaattctaagactcgatcgtagaagttaatgatggtgtcctgactgggagaaacgtgtagcccaagg

SEQ ID NO: 100081 - DNA, 76 bp, Homo sapiens
taagactcgatcgtagaagttaatgatggtgtcctgactgggagaaacgtgtagcccaagggtctactcatgacaa

SEQ ID NO: 100082 - DNA, 75 bp, Homo sapiens
ttaatgatggtgtcctgactgggagaaacgtgtagcccaagggtctactcatgacaaaatggctttctattctat

SEQ ID NO: 100083 - DNA, 75 bp, Homo sapiens
ctgactgggagaaacgtgtagcccaagggtctactcatgacaaaatggctttctattctatttcatgacaaaatg

SEQ ID NO: 100084 - DNA, 73 bp, Homo sapiens
agaaacgtgtagcccaagggtctactcatgacaaaatggctttctattctatttcatgacaaaatggctttac

SEQ ID NO: 100085 - DNA, 73 bp, Homo sapiens
ggtctactcatgacaaaatggctttctattctatttcatgacaaaatggctttaccagtttaagacctggtaa

SEQ ID NO: 100086 - DNA, 72 bp, Homo sapiens
catgacaaaatggctttctattctatttcatgacaaaatggctttaccagtttaagacctggtaaaatagga

SEQ ID NO: 100087 - DNA, 69 bp, Homo sapiens
ggctttctattctatttcatgacaaaatggctttaccagtttaagacctggtaaaataggaagttgaaa

SEQ ID NO: 100088 - DNA, 68 bp, Homo sapiens
tttcatgacaaaatggctttaccagtttaagacctggtaaaataggaagttgaaataaacctcagccc

SEQ ID NO: 100089 - DNA, 66 bp, Homo sapiens
gacaaaatggctttaccagtttaagacctggtaaaataggaagttgaaataaacctcagcccttta

SEQ ID NO: 100090 - DNA, 64 bp, Homo sapiens
ggtaaaataggaagttgaaataaacctcagccctttaatagttaagaccccaacaaataaacag

SEQ ID NO: 100091 - DNA, 69 bp, Homo sapiens
ttgaaataaacctcagccctttaatagttaagaccccaacaaataaacagtggtttagtggcatgacaa

SEQ ID NO: 100092 - DNA, 69 bp, Homo sapiens
taaacctcagccctttaatagttaagaccccaacaaataaacagtggtttagtggcatgacaacttgcc

SEQ ID NO: 100093 - DNA, 71 bp, Homo sapiens
tttaatagttaagaccccaacaaataaacagtggtttagtggcatgacaacttgccccctctcaatctgta

SEQ ID NO: 100094 - DNA, 75 bp, Homo sapiens
aacaaataaacagtggtttagtggcatgacaacttgccccctctcaatctgtaccgtgcttcagataatttgaga

SEQ ID NO: 100095 - DNA, 78 bp, Homo sapiens
acagtggtttagtggcatgacaacttgccccctctcaatctgtaccgtgcttcagataatttgagatgtctattttga

SEQ ID NO: 100096 - DNA, 79 bp, Homo sapiens
agtggcatgacaacttgccccctctcaatctgtaccgtgcttcagataatttgagatgtctattttgagtgaccctcca

SEQ ID NO: 100097 - DNA, 79 bp, Homo sapiens
aacttgccccctctcaatctgtaccgtgcttcagataatttgagatgtctattttgagtgaccctccagcacatgtgat

SEQ ID NO: 100098 - DNA, 81 bp, Homo sapiens
tctcaatctgtaccgtgcttcagataatttgagatgtctattttgagtgaccctccagcacatgtgattctaggtaagtat

SEQ ID NO: 100099 - DNA, 81 bp, Homo sapiens
cgtgcttcagataatttgagatgtctattttgagtgaccctccagcacatgtgattctaggtaagtattggtgctattcta

SEQ ID NO: 100100 - DNA, 80 bp, Homo sapiens
ataatttgagatgtctattttgagtgaccctccagcacatgtgattctaggtaagtattggtgctattctatatcagtat

SEQ ID NO: 100101 - DNA, 80 bp, Homo sapiens
ttgagatgtctattttgagtgaccctccagcacatgtgattctaggtaagtattggtgctattctatatcagtattttct

SEQ ID NO: 100102 - DNA, 81 bp, Homo sapiens
tattttgagtgaccctccagcacatgtgattctaggtaagtattggtgctattctatatcagtattttcttgctgacagag

SEQ ID NO: 100103 - DNA, 80 bp, Homo sapiens
atgtgattctaggtaagtattggtgctattctatatcagtattttcttgctgacagagtcagaggagctggcataaccct

SEQ ID NO: 100104 - DNA, 82 bp, Homo sapiens
tattggtgctattctatatcagtattttcttgctgacagagtcagaggagctggcataacccttctgacaaagtcctagcaa

SEQ ID NO: 100105 - DNA, 78 bp, Homo sapiens
attctatatcagtattttcttgctgacagagtcagaggagctggcataacccttctgacaaagtcctagcaaggtagg

SEQ ID NO: 100106 - DNA, 76 bp, Homo sapiens
agtattttcttgctgacagagtcagaggagctggcataacccttctgacaaagtcctagcaaggtagggttcctga

SEQ ID NO: 100107 - DNA, 74 bp, Homo sapiens
acagagtcagaggagctggcataacccttctgacaaagtcctagcaaggtagggttcctgagcctttctataaa

SEQ ID NO: 100108 - DNA, 71 bp, Homo sapiens
ataacccttctgacaaagtcctagcaaggtagggttcctgagcctttctataaatcccggcaagctcgcca

SEQ ID NO: 100109 - DNA, 70 bp, Homo sapiens
cttctgacaaagtcctagcaaggtagggttcctgagcctttctataaatcccggcaagctcgccaaaccc

SEQ ID NO: 100110 - DNA, 67 bp, Homo sapiens
agtcctagcaaggtagggttcctgagcctttctataaatcccggcaagctcgccaaacccccggtta

SEQ ID NO: 100111 - DNA, 66 bp, Homo sapiens
aaggtagggttcctgagcctttctataaatcccggcaagctcgccaaacccccggttactgacatt

SEQ ID NO: 100112 - DNA, 68 bp, Homo sapiens
agcctttctataaatcccggcaagctcgccaaacccccggttactgacatttctgtaaagctgaaaaa

SEQ ID NO: 100113 - DNA, 73 bp, Homo sapiens
ttctataaatcccggcaagctcgccaaacccccggttactgacatttctgtaaagctgaaaaacattcatgca

SEQ ID NO: 100114 - DNA, 77 bp, Homo sapiens
caagctcgccaaacccccggttactgacatttctgtaaagctgaaaaacattcatgcatctggacagcaccactgtg

SEQ ID NO: 100115 - DNA, 74 bp, Homo sapiens
aaacccccggttactgacatttctgtaaagctgaaaaacattcatgcatctggacagcaccactgtggaactac

SEQ ID NO: 100116 - DNA, 78 bp, Homo sapiens
acatttctgtaaagctgaaaaacattcatgcatctggacagcaccactgtggaactactctgacaaattggatatttt

SEQ ID NO: 100117 - DNA, 78 bp, Homo sapiens
aagctgaaaaacattcatgcatctggacagcaccactgtggaactactctgacaaattggatatttttctgaaaacta

SEQ ID NO: 100118 - DNA, 75 bp, Homo sapiens
tggacagcaccactgtggaactactctgacaaattggatatttttctgaaaactaccactgccatttcaaagaaa

SEQ ID NO: 100119 - DNA, 73 bp, Homo sapiens
cactgtggaactactctgacaaattggatatttttctgaaaactaccactgccatttcaaagaaagccagaaa

SEQ ID NO: 100120 - DNA, 75 bp, Homo sapiens
actactctgacaaattggatatttttctgaaaactaccactgccatttcaaagaaagccagaaacacatgctgta

SEQ ID NO: 100121 - DNA, 75 bp, Homo sapiens
tgacaaattggatatttttctgaaaactaccactgccatttcaaagaaagccagaaacacatgctgtatttctta

SEQ ID NO: 100122 - DNA, 72 bp, Homo sapiens
tttttctgaaaactaccactgccatttcaaagaaagccagaaacacatgctgtatttcttaaagtatcttcg

SEQ ID NO: 100123 - DNA, 73 bp, Homo sapiens
ctgaaaactaccactgccatttcaaagaaagccagaaacacatgctgtatttcttaaagtatcttcgtaaata

SEQ ID NO: 100124 - DNA, 74 bp, Homo sapiens
agaaagccagaaacacatgctgtatttcttaaagtatcttcgtaaatataacatagaaatttcagggctgagcc

SEQ ID NO: 100125 - DNA, 74 bp, Homo sapiens
ccagaaacacatgctgtatttcttaaagtatcttcgtaaatataacatagaaatttcagggctgagcctggaaa

SEQ ID NO: 100126 - DNA, 74 bp, Homo sapiens
catgctgtatttcttaaagtatcttcgtaaatataacatagaaatttcagggctgagcctggaaaataagcatt

SEQ ID NO: 100127 - DNA, 74 bp, Homo sapiens
tcgtaaatataacatagaaatttcagggctgagcctggaaaataagcattttcctactgtcaagaacaaactga

SEQ ID NO: 100128 - DNA, 73 bp, Homo sapiens
tataacatagaaatttcagggctgagcctggaaaataagcattttcctactgtcaagaacaaactgaaggtct

SEQ ID NO: 100129 - DNA, 73 bp, Homo sapiens
aatttcagggctgagcctggaaaataagcattttcctactgtcaagaacaaactgaaggtcttggctgaacaa

SEQ ID NO: 100130 - DNA, 75 bp, Homo sapiens
agcctggaaaataagcattttcctactgtcaagaacaaactgaaggtcttggctgaacaagacttgcatattata

SEQ ID NO: 100131 - DNA, 74 bp, Homo sapiens
aataagcattttcctactgtcaagaacaaactgaaggtcttggctgaacaagacttgcatattatacctgttaa

SEQ ID NO: 100132 - DNA, 72 bp, Homo sapiens
attttcctactgtcaagaacaaactgaaggtcttggctgaacaagacttgcatattatacctgttaactttc

SEQ ID NO: 100133 - DNA, 72 bp, Homo sapiens
aagaacaaactgaaggtcttggctgaacaagacttgcatattatacctgttaactttccaatttcaagagaa

SEQ ID NO: 100134 - DNA, 71 bp, Homo sapiens
aaactgaaggtcttggctgaacaagacttgcatattatacctgttaactttccaatttcaagagaaaaagc

SEQ ID NO: 100135 - DNA, 72 bp, Homo sapiens
tcttggctgaacaagacttgcatattatacctgttaactttccaatttcaagagaaaaagcccaagggtcta

SEQ ID NO: 100136 - DNA, 70 bp, Homo sapiens
caagacttgcatattatacctgttaactttccaatttcaagagaaaaagcccaagggtctactcaaaaca

SEQ ID NO: 100137 - DNA, 70 bp, Homo sapiens
catattatacctgttaactttccaatttcaagagaaaaagcccaagggtctactcaaaacatgattagcg

SEQ ID NO: 100138 - DNA, 68 bp, Homo sapiens
taactttccaatttcaagagaaaaagcccaagggtctactcaaaacatgattagcgtaaaacagcgtt

SEQ ID NO: 100139 - DNA, 69 bp, Homo sapiens
atttcaagagaaaaagcccaagggtctactcaaaacatgattagcgtaaaacagcgttttcttatagga

SEQ ID NO: 100140 - DNA, 68 bp, Homo sapiens
gcccaagggtctactcaaaacatgattagcgtaaaacagcgttttcttataggaaagaaagaacaaaa

SEQ ID NO: 100141 - DNA, 67 bp, Homo sapiens
ctactcaaaacatgattagcgtaaaacagcgttttcttataggaaagaaagaacaaaaggaaaagga

SEQ ID NO: 100142 - DNA, 65 bp, Homo sapiens
ggaaaaggaaaagttgtttcacatgaaaatattctggatacttattttttaaaagttgttcctaa

SEQ ID NO: 100143 - DNA, 67 bp, Homo sapiens
gttgtttcacatgaaaatattctggatacttattttttaaaagttgttcctaaaattttacaagtga

SEQ ID NO: 100144 - DNA, 69 bp, Homo sapiens
tcacatgaaaatattctggatacttattttttaaaagttgttcctaaaattttacaagtgaagtactga

SEQ ID NO: 100145 - DNA, 69 bp, Homo sapiens
tctggatacttattttttaaaagttgttcctaaaattttacaagtgaagtactgaatatcaaattcata

SEQ ID NO: 100146 - DNA, 67 bp, Homo sapiens
tattttttaaaagttgttcctaaaattttacaagtgaagtactgaatatcaaattcatattttggaa

SEQ ID NO: 100147 - DNA, 75 bp, Homo sapiens
ttttacaagtgaagtactgaatatcaaattcatattttggaaagaaagaacaccagcaatatagttcacacattc

SEQ ID NO: 100148 - DNA, 76 bp, Homo sapiens
caagtgaagtactgaatatcaaattcatattttggaaagaaagaacaccagcaatatagttcacacattctttaga

SEQ ID NO: 100149 - DNA, 77 bp, Homo sapiens
gaagtactgaatatcaaattcatattttggaaagaaagaacaccagcaatatagttcacacattctttagagtagca

SEQ ID NO: 100150 - DNA, 75 bp, Homo sapiens
atatcaaattcatattttggaaagaaagaacaccagcaatatagttcacacattctttagagtagcaaccaagcc

SEQ ID NO: 100151 - DNA, 73 bp, Homo sapiens
aattcatattttggaaagaaagaacaccagcaatatagttcacacattctttagagtagcaaccaagcccgta

SEQ ID NO: 100152 - DNA, 71 bp, Homo sapiens
aaagaaagaacaccagcaatatagttcacacattctttagagtagcaaccaagcccgtaggaactctaaaa

SEQ ID NO: 100153 - DNA, 74 bp, Homo sapiens
caccagcaatatagttcacacattctttagagtagcaaccaagcccgtaggaactctaaaagcgagttatgatt

SEQ ID NO: 100154 - DNA, 72 bp, Homo sapiens
aatatagttcacacattctttagagtagcaaccaagcccgtaggaactctaaaagcgagttatgatttctta

SEQ ID NO: 100155 - DNA, 71 bp, Homo sapiens
tttagagtagcaaccaagcccgtaggaactctaaaagcgagttatgatttcttaaatgttgcagaagtaaa

SEQ ID NO: 100156 - DNA, 69 bp, Homo sapiens
caaccaagcccgtaggaactctaaaagcgagttatgatttcttaaatgttgcagaagtaaaagttttca

SEQ ID NO: 100157 - DNA, 66 bp, Homo sapiens
ctaaaagcgagttatgatttcttaaatgttgcagaagtaaaagttttcaagaggaacaaaaaaggg

SEQ ID NO: 100158 - DNA, 69 bp, Homo sapiens
gttatgatttcttaaatgttgcagaagtaaaagttttcaagaggaacaaaaaaggggcgatgcttagtg

SEQ ID NO: 100159 - DNA, 68 bp, Homo sapiens
aatgttgcagaagtaaaagttttcaagaggaacaaaaaaggggcgatgcttagtgttaaacctgatac

SEQ ID NO: 100160 - DNA, 68 bp, Homo sapiens
agtaaaagttttcaagaggaacaaaaaaggggcgatgcttagtgttaaacctgatactctactaagca

SEQ ID NO: 100161 - DNA, 72 bp, Homo sapiens
ttcaagaggaacaaaaaaggggcgatgcttagtgttaaacctgatactctactaagcatataggtctccaaa

SEQ ID NO: 100162 - DNA, 73 bp, Homo sapiens
aacaaaaaaggggcgatgcttagtgttaaacctgatactctactaagcatataggtctccaaagagctgacga

SEQ ID NO: 100163 - DNA, 79 bp, Homo sapiens
ggcgatgcttagtgttaaacctgatactctactaagcatataggtctccaaagagctgacgaatgcccatcacacggtc

SEQ ID NO: 100164 - DNA, 78 bp, Homo sapiens
tagtgttaaacctgatactctactaagcatataggtctccaaagagctgacgaatgcccatcacacggtccacaataa

SEQ ID NO: 100165 - DNA, 78 bp, Homo sapiens
taaacctgatactctactaagcatataggtctccaaagagctgacgaatgcccatcacacggtccacaataatgcttt

SEQ ID NO: 100166 - DNA, 81 bp, Homo sapiens
tctactaagcatataggtctccaaagagctgacgaatgcccatcacacggtccacaataatgcttttgcccaggagcttca

SEQ ID NO: 100167 - DNA, 81 bp, Homo sapiens
atataggtctccaaagagctgacgaatgcccatcacacggtccacaataatgcttttgcccaggagcttcagaggatgaga

SEQ ID NO: 100168 - DNA, 82 bp, Homo sapiens
aaagagctgacgaatgcccatcacacggtccacaataatgcttttgcccaggagcttcagaggatgagaactcaatgtgcaa

SEQ ID NO: 100169 - DNA, 79 bp, Homo sapiens
acgaatgcccatcacacggtccacaataatgcttttgcccaggagcttcagaggatgagaactcaatgtgcaacttccc

SEQ ID NO: 100170 - DNA, 72 bp, Homo sapiens
acaataatgcttttgcccaggagcttcagaggatgagaactcaatgtgcaacttccccccatttttttgttt

SEQ ID NO: 100171 - DNA, 76 bp, Homo sapiens
tttgtttttgttgttaaagaggcatatctgatgaagaaggaaatcagattagattcactcttcaccaagaaacaga

SEQ ID NO: 100172 - DNA, 79 bp, Homo sapiens
tttgttgttaaagaggcatatctgatgaagaaggaaatcagattagattcactcttcaccaagaaacagagcaactcaa

SEQ ID NO: 100173 - DNA, 82 bp, Homo sapiens
aggcatatctgatgaagaaggaaatcagattagattcactcttcaccaagaaacagagcaactcaatggtgacaatatcaat

SEQ ID NO: 100174 - DNA, 80 bp, Homo sapiens
atctgatgaagaaggaaatcagattagattcactcttcaccaagaaacagagcaactcaatggtgacaatatcaattttc

SEQ ID NO: 100175 - DNA, 76 bp, Homo sapiens
aaggaaatcagattagattcactcttcaccaagaaacagagcaactcaatggtgacaatatcaattttcccccatg

SEQ ID NO: 100176 - DNA, 76 bp, Homo sapiens
ttcaccaagaaacagagcaactcaatggtgacaatatcaattttcccccatgtggctgaattttccattgccttta

SEQ ID NO: 100177 - DNA, 72 bp, Homo sapiens
aactcaatggtgacaatatcaattttcccccatgtggctgaattttccattgcctttaaaaatgcttaagac

SEQ ID NO: 100178 - DNA, 71 bp, Homo sapiens
caatggtgacaatatcaattttcccccatgtggctgaattttccattgcctttaaaaatgcttaagacttt

SEQ ID NO: 100179 - DNA, 70 bp, Homo sapiens
ggtgacaatatcaattttcccccatgtggctgaattttccattgcctttaaaaatgcttaagactttttg

SEQ ID NO: 100180 - DNA, 70 bp, Homo sapiens
caattttcccccatgtggctgaattttccattgcctttaaaaatgcttaagactttttgttcccatatca

SEQ ID NO: 100181 - DNA, 71 bp, Homo sapiens
ccccatgtggctgaattttccattgcctttaaaaatgcttaagactttttgttcccatatcagcagaaaaa

SEQ ID NO: 100182 - DNA, 71 bp, Homo sapiens
gtggctgaattttccattgcctttaaaaatgcttaagactttttgttcccatatcagcagaaaaaggcaaa

SEQ ID NO: 100183 - DNA, 70 bp, Homo sapiens
cattgcctttaaaaatgcttaagactttttgttcccatatcagcagaaaaaggcaaatcccttaatcaac

SEQ ID NO: 100184 - DNA, 69 bp, Homo sapiens
aaaaatgcttaagactttttgttcccatatcagcagaaaaaggcaaatcccttaatcaacctagtagta

SEQ ID NO: 100185 - DNA, 72 bp, Homo sapiens
ttttgttcccatatcagcagaaaaaggcaaatcccttaatcaacctagtagtataaatggccagttaggcaa

SEQ ID NO: 100186 - DNA, 73 bp, Homo sapiens
atatcagcagaaaaaggcaaatcccttaatcaacctagtagtataaatggccagttaggcaacgagagactaa

SEQ ID NO: 100187 - DNA, 68 bp, Homo sapiens
aaaaaggcaaatcccttaatcaacctagtagtataaatggccagttaggcaacgagagactaagaaaa

SEQ ID NO: 100188 - DNA, 69 bp, Homo sapiens
aatcccttaatcaacctagtagtataaatggccagttaggcaacgagagactaagaaaacagtcttcct

SEQ ID NO: 100189 - DNA, 69 bp, Homo sapiens
aacctagtagtataaatggccagttaggcaacgagagactaagaaaacagtcttccttttgattttaca

SEQ ID NO: 100190 - DNA, 74 bp, Homo sapiens
ccagttaggcaacgagagactaagaaaacagtcttccttttgattttacacatgaatagatgatgtgaattagt

SEQ ID NO: 100191 - DNA, 75 bp, Homo sapiens
caacgagagactaagaaaacagtcttccttttgattttacacatgaatagatgatgtgaattagttttctgaaga

SEQ ID NO: 100192 - DNA, 75 bp, Homo sapiens
gaaaacagtcttccttttgattttacacatgaatagatgatgtgaattagttttctgaagattatgtgaattagt

SEQ ID NO: 100193 - DNA, 75 bp, Homo sapiens
tccttttgattttacacatgaatagatgatgtgaattagttttctgaagattatgtgaattagtttaaatgacct

SEQ ID NO: 100194 - DNA, 76 bp, Homo sapiens
tttacacatgaatagatgatgtgaattagttttctgaagattatgtgaattagtttaaatgaccttaaaggcaaga

SEQ ID NO: 100195 - DNA, 77 bp, Homo sapiens
catgaatagatgatgtgaattagttttctgaagattatgtgaattagtttaaatgaccttaaaggcaagatgaaaga

SEQ ID NO: 100196 - DNA, 74 bp, Homo sapiens
atgatgtgaattagttttctgaagattatgtgaattagtttaaatgaccttaaaggcaagatgaaagaatctcc

SEQ ID NO: 100197 - DNA, 74 bp, Homo sapiens
tttctgaagattatgtgaattagtttaaatgaccttaaaggcaagatgaaagaatctccttgagagttgtatcc

SEQ ID NO: 100198 - DNA, 74 bp, Homo sapiens
gattatgtgaattagtttaaatgaccttaaaggcaagatgaaagaatctccttgagagttgtatcctctttgga

SEQ ID NO: 100199 - DNA, 71 bp, Homo sapiens
attagtttaaatgaccttaaaggcaagatgaaagaatctccttgagagttgtatcctctttggaagcaaag

SEQ ID NO: 100200 - DNA, 71 bp, Homo sapiens
aaatgaccttaaaggcaagatgaaagaatctccttgagagttgtatcctctttggaagcaaagtattgttt

SEQ ID NO: 100201 - DNA, 75 bp, Homo sapiens
aagaatctccttgagagttgtatcctctttggaagcaaagtattgttttgccccaagcccatctcgctcactgaa

SEQ ID NO: 100202 - DNA, 77 bp, Homo sapiens
ttgagagttgtatcctctttggaagcaaagtattgttttgccccaagcccatctcgctcactgaacataccatttga

SEQ ID NO: 100203 - DNA, 74 bp, Homo sapiens
tatcctctttggaagcaaagtattgttttgccccaagcccatctcgctcactgaacataccatttgacttaatt

SEQ ID NO: 100204 - DNA, 75 bp, Homo sapiens
ttggaagcaaagtattgttttgccccaagcccatctcgctcactgaacataccatttgacttaatttaccatata

SEQ ID NO: 100205 - DNA, 74 bp, Homo sapiens
tattgttttgccccaagcccatctcgctcactgaacataccatttgacttaatttaccatatacgcttgtattt

SEQ ID NO: 100206 - DNA, 72 bp, Homo sapiens
gcccatctcgctcactgaacataccatttgacttaatttaccatatacgcttgtattttggaatttaaaaaa

SEQ ID NO: 100207 - DNA, 70 bp, Homo sapiens
ctcactgaacataccatttgacttaatttaccatatacgcttgtattttggaatttaaaaaaaatcaatg

SEQ ID NO: 100208 - DNA, 71 bp, Homo sapiens
taaaaaaaatcaatgtacacattttaaatcattattaatgattattatgtaacaggaaaccagtggtttca

SEQ ID NO: 100209 - DNA, 75 bp, Homo sapiens
tcaatgtacacattttaaatcattattaatgattattatgtaacaggaaaccagtggtttcatggatcctcttcc

SEQ ID NO: 100210 - DNA, 73 bp, Homo sapiens
cattttaaatcattattaatgattattatgtaacaggaaaccagtggtttcatggatcctcttcctaaataca

SEQ ID NO: 100211 - DNA, 73 bp, Homo sapiens
cattattaatgattattatgtaacaggaaaccagtggtttcatggatcctcttcctaaatacacctaaatgaa

SEQ ID NO: 100212 - DNA, 75 bp, Homo sapiens
tgattattatgtaacaggaaaccagtggtttcatggatcctcttcctaaatacacctaaatgaacctatagatga

SEQ ID NO: 100213 - DNA, 76 bp, Homo sapiens
tatgtaacaggaaaccagtggtttcatggatcctcttcctaaatacacctaaatgaacctatagatgacaggcagc

SEQ ID NO: 100214 - DNA, 72 bp, Homo sapiens
aaccagtggtttcatggatcctcttcctaaatacacctaaatgaacctatagatgacaggcagccccccaaa

SEQ ID NO: 100215 - DNA, 75 bp, Homo sapiens
ttcatggatcctcttcctaaatacacctaaatgaacctatagatgacaggcagccccccaaaacatcaagcttta

SEQ ID NO: 100216 - DNA, 71 bp, Homo sapiens
ttcctaaatacacctaaatgaacctatagatgacaggcagccccccaaaacatcaagctttaggtttctgt

SEQ ID NO: 100217 - DNA, 70 bp, Homo sapiens
aaatacacctaaatgaacctatagatgacaggcagccccccaaaacatcaagctttaggtttctgtttgt

SEQ ID NO: 100218 - DNA, 69 bp, Homo sapiens
aaatgaacctatagatgacaggcagccccccaaaacatcaagctttaggtttctgtttgtttacaaaag

SEQ ID NO: 100219 - DNA, 69 bp, Homo sapiens
atagatgacaggcagccccccaaaacatcaagctttaggtttctgtttgtttacaaaagggttactcca

SEQ ID NO: 100220 - DNA, 69 bp, Homo sapiens
aaaacatcaagctttaggtttctgtttgtttacaaaagggttactccacagacaggccacttagctgtg

SEQ ID NO: 100221 - DNA, 73 bp, Homo sapiens
tttaggtttctgtttgtttacaaaagggttactccacagacaggccacttagctgtgtgcatagtatcttctg

SEQ ID NO: 100222 - DNA, 73 bp, Homo sapiens
tttgtttacaaaagggttactccacagacaggccacttagctgtgtgcatagtatcttctggaaagatttatt

SEQ ID NO: 100223 - DNA, 74 bp, Homo sapiens
ttacaaaagggttactccacagacaggccacttagctgtgtgcatagtatcttctggaaagatttatttggaaa

SEQ ID NO: 100224 - DNA, 77 bp, Homo sapiens
tccacagacaggccacttagctgtgtgcatagtatcttctggaaagatttatttggaaattttccaatcaagtagaa

SEQ ID NO: 100225 - DNA, 75 bp, Homo sapiens
agacaggccacttagctgtgtgcatagtatcttctggaaagatttatttggaaattttccaatcaagtagaagaa

SEQ ID NO: 100226 - DNA, 72 bp, Homo sapiens
cttagctgtgtgcatagtatcttctggaaagatttatttggaaattttccaatcaagtagaagaaccttccc

SEQ ID NO: 100227 - DNA, 70 bp, Homo sapiens
tgcatagtatcttctggaaagatttatttggaaattttccaatcaagtagaagaaccttccccagaaacc

SEQ ID NO: 100228 - DNA, 68 bp, Homo sapiens
ctggaaagatttatttggaaattttccaatcaagtagaagaaccttccccagaaacctaacagtgaga

SEQ ID NO: 100229 - DNA, 70 bp, Homo sapiens
atttatttggaaattttccaatcaagtagaagaaccttccccagaaacctaacagtgagagctaatggca

SEQ ID NO: 100230 - DNA, 73 bp, Homo sapiens
aaattttccaatcaagtagaagaaccttccccagaaacctaacagtgagagctaatggcatgggctgtcaagc

SEQ ID NO: 100231 - DNA, 77 bp, Homo sapiens
aatcaagtagaagaaccttccccagaaacctaacagtgagagctaatggcatgggctgtcaagctccatgggagaca

SEQ ID NO: 100232 - DNA, 77 bp, Homo sapiens
accttccccagaaacctaacagtgagagctaatggcatgggctgtcaagctccatgggagacagtgggcatgccttt

SEQ ID NO: 100233 - DNA, 79 bp, Homo sapiens
aaacctaacagtgagagctaatggcatgggctgtcaagctccatgggagacagtgggcatgccttttgagaacccatgt

SEQ ID NO: 100234 - DNA, 80 bp, Homo sapiens
taacagtgagagctaatggcatgggctgtcaagctccatgggagacagtgggcatgccttttgagaacccatgtttttgt

SEQ ID NO: 100235 - DNA, 69 bp, Homo sapiens
accgcgcccggcctgagaacccatgtttgaacccaaaatagagagctactggcctggaaacccaaagga

SEQ ID NO: 100236 - DNA, 72 bp, Homo sapiens
ggcctgagaacccatgtttgaacccaaaatagagagctactggcctggaaacccaaaggaacagatgatatt

SEQ ID NO: 100237 - DNA, 73 bp, Homo sapiens
gcctgagaacccatgtttgaacccaaaatagagagctactggcctggaaacccaaaggaacagatgatatttg

SEQ ID NO: 100238 - DNA, 72 bp, Homo sapiens
agaacccatgtttgaacccaaaatagagagctactggcctggaaacccaaaggaacagatgatatttgtaca

SEQ ID NO: 100239 - DNA, 74 bp, Homo sapiens
ttgaacccaaaatagagagctactggcctggaaacccaaaggaacagatgatatttgtacatcccacaatacaa

SEQ ID NO: 100240 - DNA, 77 bp, Homo sapiens
aaatagagagctactggcctggaaacccaaaggaacagatgatatttgtacatcccacaatacaactcacatacaga

SEQ ID NO: 100241 - DNA, 76 bp, Homo sapiens
ctactggcctggaaacccaaaggaacagatgatatttgtacatcccacaatacaactcacatacagaaaatgcctg

SEQ ID NO: 100242 - DNA, 79 bp, Homo sapiens
aacagatgatatttgtacatcccacaatacaactcacatacagaaaatgcctggggaagctaattcctgctgtccgaga

SEQ ID NO: 100243 - DNA, 77 bp, Homo sapiens
tatttgtacatcccacaatacaactcacatacagaaaatgcctggggaagctaattcctgctgtccgagaggggcaa

SEQ ID NO: 100244 - DNA, 76 bp, Homo sapiens
atcccacaatacaactcacatacagaaaatgcctggggaagctaattcctgctgtccgagaggggcaaagagctac

SEQ ID NO: 100245 - DNA, 79 bp, Homo sapiens
tacaactcacatacagaaaatgcctggggaagctaattcctgctgtccgagaggggcaaagagctaccacatcgattgc

SEQ ID NO: 100246 - DNA, 77 bp, Homo sapiens
atacagaaaatgcctggggaagctaattcctgctgtccgagaggggcaaagagctaccacatcgattgctggccacc

SEQ ID NO: 100247 - DNA, 75 bp, Homo sapiens
cctggggaagctaattcctgctgtccgagaggggcaaagagctaccacatcgattgctggccacctgcccttttc

SEQ ID NO: 100248 - DNA, 76 bp, Homo sapiens
ctaattcctgctgtccgagaggggcaaagagctaccacatcgattgctggccacctgcccttttccccagatgtgt

SEQ ID NO: 100249 - DNA, 76 bp, Homo sapiens
tgtccgagaggggcaaagagctaccacatcgattgctggccacctgcccttttccccagatgtgttgcttatcttt

SEQ ID NO: 100250 - DNA, 75 bp, Homo sapiens
ggcaaagagctaccacatcgattgctggccacctgcccttttccccagatgtgttgcttatcttttccttaacaa

SEQ ID NO: 100251 - DNA, 75 bp, Homo sapiens
taccacatcgattgctggccacctgcccttttccccagatgtgttgcttatcttttccttaacaagcctgctact

SEQ ID NO: 100252 - DNA, 73 bp, Homo sapiens
attgctggccacctgcccttttccccagatgtgttgcttatcttttccttaacaagcctgctactttgagaaa

SEQ ID NO: 100253 - DNA, 72 bp, Homo sapiens
tggccacctgcccttttccccagatgtgttgcttatcttttccttaacaagcctgctactttgagaaagaaa

SEQ ID NO: 100254 - DNA, 71 bp, Homo sapiens
ccttttccccagatgtgttgcttatcttttccttaacaagcctgctactttgagaaagaaatattactgta

SEQ ID NO: 100255 - DNA, 71 bp, Homo sapiens
cttttccccagatgtgttgcttatcttttccttaacaagcctgctactttgagaaagaaatattactgtaa

SEQ ID NO: 100256 - DNA, 75 bp, Homo sapiens
ccagatgtgttgcttatcttttccttaacaagcctgctactttgagaaagaaatattactgtaaaccatatcaca

SEQ ID NO: 100257 - DNA, 76 bp, Homo sapiens
gatgtgttgcttatcttttccttaacaagcctgctactttgagaaagaaatattactgtaaaccatatcacacaca

SEQ ID NO: 100258 - DNA, 78 bp, Homo sapiens
ttgcttatcttttccttaacaagcctgctactttgagaaagaaatattactgtaaaccatatcacacacagctgcatc

SEQ ID NO: 100259 - DNA, 76 bp, Homo sapiens
cttatcttttccttaacaagcctgctactttgagaaagaaatattactgtaaaccatatcacacacagctgcatcc

SEQ ID NO: 100260 - DNA, 82 bp, Homo sapiens
ttgagaaagaaatattactgtaaaccatatcacacacagctgcatcctgcatggcacagagaaaagtctgcattttggattt

SEQ ID NO: 100261 - DNA, 81 bp, Homo sapiens
aagaaatattactgtaaaccatatcacacacagctgcatcctgcatggcacagagaaaagtctgcattttggatttttgaa

SEQ ID NO: 100262 - DNA, 82 bp, Homo sapiens
actgtaaaccatatcacacacagctgcatcctgcatggcacagagaaaagtctgcattttggatttttgaaacggtatcaca

SEQ ID NO: 100263 - DNA, 83 bp, Homo sapiens
tgcatcctgcatggcacagagaaaagtctgcattttggatttttgaaacggtatcacagagcaaacagtcattgacgtcactg

SEQ ID NO: 100264 - DNA, 78 bp, Homo sapiens
atggcacagagaaaagtctgcattttggatttttgaaacggtatcacagagcaaacagtcattgacgtcactggtcta

SEQ ID NO: 100265 - DNA, 75 bp, Homo sapiens
aaaagtctgcattttggatttttgaaacggtatcacagagcaaacagtcattgacgtcactggtctacagtgtaa

SEQ ID NO: 100266 - DNA, 75 bp, Homo sapiens
atttttgaaacggtatcacagagcaaacagtcattgacgtcactggtctacagtgtaaatgaacttcttgtatta

SEQ ID NO: 100267 - DNA, 76 bp, Homo sapiens
aacggtatcacagagcaaacagtcattgacgtcactggtctacagtgtaaatgaacttcttgtattatctaatttg

SEQ ID NO: 100268 - DNA, 76 bp, Homo sapiens
caaacagtcattgacgtcactggtctacagtgtaaatgaacttcttgtattatctaatttggcacagtgggcctta

SEQ ID NO: 100269 - DNA, 75 bp, Homo sapiens
attgacgtcactggtctacagtgtaaatgaacttcttgtattatctaatttggcacagtgggccttaggcaatta

SEQ ID NO: 100270 - DNA, 76 bp, Homo sapiens
actggtctacagtgtaaatgaacttcttgtattatctaatttggcacagtgggccttaggcaattattgcatctta

SEQ ID NO: 100271 - DNA, 77 bp, Homo sapiens
tgtaaatgaacttcttgtattatctaatttggcacagtgggccttaggcaattattgcatcttacagcgctttagta

SEQ ID NO: 100272 - DNA, 77 bp, Homo sapiens
aatttggcacagtgggccttaggcaattattgcatcttacagcgctttagtaattgccagctagccccatgggctgg

SEQ ID NO: 100273 - DNA, 78 bp, Homo sapiens
gccttaggcaattattgcatcttacagcgctttagtaattgccagctagccccatgggctggggggacctgcattctc

SEQ ID NO: 100274 - DNA, 77 bp, Homo sapiens
aattattgcatcttacagcgctttagtaattgccagctagccccatgggctggggggacctgcattctctattgatt

SEQ ID NO: 100275 - DNA, 77 bp, Homo sapiens
atcttacagcgctttagtaattgccagctagccccatgggctggggggacctgcattctctattgatttgcaaataa

SEQ ID NO: 100276 - DNA, 76 bp, Homo sapiens
tttagtaattgccagctagccccatgggctggggggacctgcattctctattgatttgcaaataacacccttgatg

SEQ ID NO: 100277 - DNA, 81 bp, Homo sapiens
taattgccagctagccccatgggctggggggacctgcattctctattgatttgcaaataacacccttgatgtgatgacatc

SEQ ID NO: 100278 - DNA, 79 bp, Homo sapiens
cccatgggctggggggacctgcattctctattgatttgcaaataacacccttgatgtgatgacatccatacatttcaac

SEQ ID NO: 100279 - DNA, 79 bp, Homo sapiens
tggggggacctgcattctctattgatttgcaaataacacccttgatgtgatgacatccatacatttcaactatttctta

SEQ ID NO: 100280 - DNA, 80 bp, Homo sapiens
gacctgcattctctattgatttgcaaataacacccttgatgtgatgacatccatacatttcaactatttcttaataataa

SEQ ID NO: 100281 - DNA, 75 bp, Homo sapiens
gcaaataacacccttgatgtgatgacatccatacatttcaactatttcttaataataaaaaaacactagatacaa

SEQ ID NO: 100282 - DNA, 73 bp, Homo sapiens
cccttgatgtgatgacatccatacatttcaactatttcttaataataaaaaaacactagatacaaaacccaca

SEQ ID NO: 100283 - DNA, 72 bp, Homo sapiens
gacatccatacatttcaactatttcttaataataaaaaaacactagatacaaaacccacaaataatctggca

SEQ ID NO: 100284 - DNA, 71 bp, Homo sapiens
catttcaactatttcttaataataaaaaaacactagatacaaaacccacaaataatctggcaatagcgaga

SEQ ID NO: 100285 - DNA, 70 bp, Homo sapiens
ctatttcttaataataaaaaaacactagatacaaaacccacaaataatctggcaatagcgagaacttgaa

SEQ ID NO: 100286 - DNA, 72 bp, Homo sapiens
aataaaaaaacactagatacaaaacccacaaataatctggcaatagcgagaacttgaaacatcccatcttca

SEQ ID NO: 100287 - DNA, 73 bp, Homo sapiens
aaaaacactagatacaaaacccacaaataatctggcaatagcgagaacttgaaacatcccatcttcactttgc

SEQ ID NO: 100288 - DNA, 76 bp, Homo sapiens
atacaaaacccacaaataatctggcaatagcgagaacttgaaacatcccatcttcactttgcttgacgtgtgtgtg

SEQ ID NO: 100289 - DNA, 76 bp, Homo sapiens
tgtgtgtgtgtctgcgtgtgtgtcttcaagcctaatgggtaggtaaaaaaatagcatagccaaagctaactcttaa

SEQ ID NO: 100290 - DNA, 72 bp, Homo sapiens
gtgtctgcgtgtgtgtcttcaagcctaatgggtaggtaaaaaaatagcatagccaaagctaactcttaaaaa

SEQ ID NO: 100291 - DNA, 73 bp, Homo sapiens
tgggtaggtaaaaaaatagcatagccaaagctaactcttaaaaaattcaagagagctatctatccaatatgga

SEQ ID NO: 100292 - DNA, 77 bp, Homo sapiens
aaaatagcatagccaaagctaactcttaaaaaattcaagagagctatctatccaatatggatatccatacccagagc

SEQ ID NO: 100293 - DNA, 77 bp, Homo sapiens
atagccaaagctaactcttaaaaaattcaagagagctatctatccaatatggatatccatacccagagctcctcgta

SEQ ID NO: 100294 - DNA, 80 bp, Homo sapiens
tcttaaaaaattcaagagagctatctatccaatatggatatccatacccagagctcctcgtatcctctgtagcagtgctt

SEQ ID NO: 100295 - DNA, 79 bp, Homo sapiens
ctatctatccaatatggatatccatacccagagctcctcgtatcctctgtagcagtgcttttccttgtggggatctggt

SEQ ID NO: 100296 - DNA, 79 bp, Homo sapiens
tatccaatatggatatccatacccagagctcctcgtatcctctgtagcagtgcttttccttgtggggatctggttacaa

SEQ ID NO: 100297 - DNA, 81 bp, Homo sapiens
atatccatacccagagctcctcgtatcctctgtagcagtgcttttccttgtggggatctggttacaatgcagatctgactc

SEQ ID NO: 100298 - DNA, 79 bp, Homo sapiens
agagctcctcgtatcctctgtagcagtgcttttccttgtggggatctggttacaatgcagatctgactcggtgggtctg

SEQ ID NO: 100299 - DNA, 77 bp, Homo sapiens
ctcgtatcctctgtagcagtgcttttccttgtggggatctggttacaatgcagatctgactcggtgggtctggggtg

SEQ ID NO: 100300 - DNA, 76 bp, Homo sapiens
tctgtagcagtgcttttccttgtggggatctggttacaatgcagatctgactcggtgggtctggggtgggtggggc

SEQ ID NO: 100301 - DNA, 72 bp, Homo sapiens
ttttccttgtggggatctggttacaatgcagatctgactcggtgggtctggggtgggtggggcccaagactc

SEQ ID NO: 100302 - DNA, 77 bp, Homo sapiens
ggatctggttacaatgcagatctgactcggtgggtctggggtgggtggggcccaagactctgcatttccaacagctc

SEQ ID NO: 100303 - DNA, 76 bp, Homo sapiens
tggttacaatgcagatctgactcggtgggtctggggtgggtggggcccaagactctgcatttccaacagctcccag

SEQ ID NO: 100304 - DNA, 73 bp, Homo sapiens
tcggtgggtctggggtgggtggggcccaagactctgcatttccaacagctcccaggtggtgctgttggttcga

SEQ ID NO: 100305 - DNA, 78 bp, Homo sapiens
gtgggtggggcccaagactctgcatttccaacagctcccaggtggtgctgttggttcgaggcctttctctgagcatca

SEQ ID NO: 100306 - DNA, 76 bp, Homo sapiens
cccaagactctgcatttccaacagctcccaggtggtgctgttggttcgaggcctttctctgagcatcaaggggaaa

SEQ ID NO: 100307 - DNA, 75 bp, Homo sapiens
tgcatttccaacagctcccaggtggtgctgttggttcgaggcctttctctgagcatcaaggggaaaccccagttg

SEQ ID NO: 100308 - DNA, 71 bp, Homo sapiens
aggtggtgctgttggttcgaggcctttctctgagcatcaaggggaaaccccagttggtctgggaaggtgtg

SEQ ID NO: 100309 - DNA, 73 bp, Homo sapiens
ctgttggttcgaggcctttctctgagcatcaaggggaaaccccagttggtctgggaaggtgtgtgcacatggg

SEQ ID NO: 100310 - DNA, 75 bp, Homo sapiens
tctctgagcatcaaggggaaaccccagttggtctgggaaggtgtgtgcacatgggggccagttgtgggtggtggc

SEQ ID NO: 100311 - DNA, 72 bp, Homo sapiens
gggaaaccccagttggtctgggaaggtgtgtgcacatgggggccagttgtgggtggtggcccaggtgcagga

SEQ ID NO: 100312 - DNA, 75 bp, Homo sapiens
agttggtctgggaaggtgtgtgcacatgggggccagttgtgggtggtggcccaggtgcaggagaggcgggcagtg

SEQ ID NO: 100313 - DNA, 78 bp, Homo sapiens
tgggaaggtgtgtgcacatgggggccagttgtgggtggtggcccaggtgcaggagaggcgggcagtgggctccatctg

SEQ ID NO: 100314 - DNA, 78 bp, Homo sapiens
ggccagttgtgggtggtggcccaggtgcaggagaggcgggcagtgggctccatctggtacttaccctgcatctgactc

SEQ ID NO: 100315 - DNA, 77 bp, Homo sapiens
cccaggtgcaggagaggcgggcagtgggctccatctggtacttaccctgcatctgactctgaggctgagggttaaag

SEQ ID NO: 100316 - DNA, 77 bp, Homo sapiens
aggagaggcgggcagtgggctccatctggtacttaccctgcatctgactctgaggctgagggttaaaggcagtggag

SEQ ID NO: 100317 - DNA, 77 bp, Homo sapiens
cagtgggctccatctggtacttaccctgcatctgactctgaggctgagggttaaaggcagtggagtggttcagggag

SEQ ID NO: 100318 - DNA, 77 bp, Homo sapiens
ctccatctggtacttaccctgcatctgactctgaggctgagggttaaaggcagtggagtggttcagggaggcacgag

SEQ ID NO: 100319 - DNA, 74 bp, Homo sapiens
gtacttaccctgcatctgactctgaggctgagggttaaaggcagtggagtggttcagggaggcacgagggttgg

SEQ ID NO: 100320 - DNA, 73 bp, Homo sapiens
atctgactctgaggctgagggttaaaggcagtggagtggttcagggaggcacgagggttgggcgtgggggctg

SEQ ID NO: 100321 - DNA, 71 bp, Homo sapiens
ctctgaggctgagggttaaaggcagtggagtggttcagggaggcacgagggttgggcgtgggggctgggtg

SEQ ID NO: 100322 - DNA, 79 bp, Homo sapiens
ttcagggaggcacgagggttgggcgtgggggctgggtggtgtgggctgaccctcatggctgtgcgccgcagctgctcca

SEQ ID NO: 100323 - DNA, 80 bp, Homo sapiens
gcgtgggggctgggtggtgtgggctgaccctcatggctgtgcgccgcagctgctccagttcactgagccgctcggaaaag

SEQ ID NO: 100324 - DNA, 81 bp, Homo sapiens
tgggtggtgtgggctgaccctcatggctgtgcgccgcagctgctccagttcactgagccgctcggaaaaggacaagctccc

SEQ ID NO: 100325 - DNA, 81 bp, Homo sapiens
tgtgggctgaccctcatggctgtgcgccgcagctgctccagttcactgagccgctcggaaaaggacaagctcccgggcttg

SEQ ID NO: 100326 - DNA, 83 bp, Homo sapiens
tcatggctgtgcgccgcagctgctccagttcactgagccgctcggaaaaggacaagctcccgggcttggtctgatcatctagt

SEQ ID NO: 100327 - DNA, 80 bp, Homo sapiens
ctgtgcgccgcagctgctccagttcactgagccgctcggaaaaggacaagctcccgggcttggtctgatcatctagtttc

SEQ ID NO: 100328 - DNA, 79 bp, Homo sapiens
tgctccagttcactgagccgctcggaaaaggacaagctcccgggcttggtctgatcatctagtttctgccgatgtccta

SEQ ID NO: 100329 - DNA, 76 bp, Homo sapiens
agttcactgagccgctcggaaaaggacaagctcccgggcttggtctgatcatctagtttctgccgatgtcctattg

SEQ ID NO: 100330 - DNA, 76 bp, Homo sapiens
agccgctcggaaaaggacaagctcccgggcttggtctgatcatctagtttctgccgatgtcctattgtggggagca

SEQ ID NO: 100331 - DNA, 73 bp, Homo sapiens
aaaaggacaagctcccgggcttggtctgatcatctagtttctgccgatgtcctattgtggggagcagggaggg

SEQ ID NO: 100332 - DNA, 73 bp, Homo sapiens
ctcccgggcttggtctgatcatctagtttctgccgatgtcctattgtggggagcagggaggggaggggatggg

SEQ ID NO: 100333 - DNA, 73 bp, Homo sapiens
ttggtctgatcatctagtttctgccgatgtcctattgtggggagcagggaggggaggggatggggggagggaa

SEQ ID NO: 100334 - DNA, 67 bp, Homo sapiens
gaaggagggagggaagagatcagaaaaagtattgtggatttcctaaaactggggcttttcttgtctt

SEQ ID NO: 100335 - DNA, 66 bp, Homo sapiens
agggagggaagagatcagaaaaagtattgtggatttcctaaaactggggcttttcttgtctttccc

SEQ ID NO: 100336 - DNA, 67 bp, Homo sapiens
agatcagaaaaagtattgtggatttcctaaaactggggcttttcttgtctttcccctctctctcccc

SEQ ID NO: 100337 - DNA, 68 bp, Homo sapiens
atttcctaaaactggggcttttcttgtctttcccctctctctcccctcaccccaacatagactcgcta

SEQ ID NO: 100338 - DNA, 75 bp, Homo sapiens
tggggcttttcttgtctttcccctctctctcccctcaccccaacatagactcgctagagatatgccagctgaatt

SEQ ID NO: 100339 - DNA, 75 bp, Homo sapiens
ttttcttgtctttcccctctctctcccctcaccccaacatagactcgctagagatatgccagctgaatttggggc

SEQ ID NO: 100340 - DNA, 81 bp, Homo sapiens
cctctctctcccctcaccccaacatagactcgctagagatatgccagctgaatttggggccactgtcctctcagcagaatg

SEQ ID NO: 100341 - DNA, 79 bp, Homo sapiens
ctcccctcaccccaacatagactcgctagagatatgccagctgaatttggggccactgtcctctcagcagaatgggccc

SEQ ID NO: 100342 - DNA, 78 bp, Homo sapiens
cccaacatagactcgctagagatatgccagctgaatttggggccactgtcctctcagcagaatgggccccctttcacc

SEQ ID NO: 100343 - DNA, 78 bp, Homo sapiens
agactcgctagagatatgccagctgaatttggggccactgtcctctcagcagaatgggccccctttcaccgcctcggc

SEQ ID NO: 100344 - DNA, 77 bp, Homo sapiens
atgccagctgaatttggggccactgtcctctcagcagaatgggccccctttcaccgcctcggccacagagtgctccc

SEQ ID NO: 100345 - DNA, 73 bp, Homo sapiens
aatttggggccactgtcctctcagcagaatgggccccctttcaccgcctcggccacagagtgctcccccagtc

SEQ ID NO: 100346 - DNA, 76 bp, Homo sapiens
ccactgtcctctcagcagaatgggccccctttcaccgcctcggccacagagtgctcccccagtctgggccttggca

SEQ ID NO: 100347 - DNA, 70 bp, Homo sapiens
agaatgggccccctttcaccgcctcggccacagagtgctcccccagtctgggccttggcaccctccccaa

SEQ ID NO: 100348 - DNA, 70 bp, Homo sapiens
ccctttcaccgcctcggccacagagtgctcccccagtctgggccttggcaccctccccaaccctctacac

SEQ ID NO: 100349 - DNA, 71 bp, Homo sapiens
ctttcaccgcctcggccacagagtgctcccccagtctgggccttggcaccctccccaaccctctacaccca

SEQ ID NO: 100350 - DNA, 72 bp, Homo sapiens
gcctcggccacagagtgctcccccagtctgggccttggcaccctccccaaccctctacacccacttccaatg

SEQ ID NO: 100351 - DNA, 71 bp, Homo sapiens
acagagtgctcccccagtctgggccttggcaccctccccaaccctctacacccacttccaatgggcacaac

SEQ ID NO: 100352 - DNA, 74 bp, Homo sapiens
tctgggccttggcaccctccccaaccctctacacccacttccaatgggcacaactcactgagatacagaacttg

SEQ ID NO: 100353 - DNA, 74 bp, Homo sapiens
aaccctctacacccacttccaatgggcacaactcactgagatacagaacttggcggtggtggtgatgccgggag

SEQ ID NO: 100354 - DNA, 75 bp, Homo sapiens
tacacccacttccaatgggcacaactcactgagatacagaacttggcggtggtggtgatgccgggagggaaagag

SEQ ID NO: 100355 - DNA, 75 bp, Homo sapiens
aatgggcacaactcactgagatacagaacttggcggtggtggtgatgccgggagggaaagaggcgcattaattgt

SEQ ID NO: 100356 - DNA, 77 bp, Homo sapiens
acaactcactgagatacagaacttggcggtggtggtgatgccgggagggaaagaggcgcattaattgttggcacatg

SEQ ID NO: 100357 - DNA, 78 bp, Homo sapiens
agatacagaacttggcggtggtggtgatgccgggagggaaagaggcgcattaattgttggcacatggccacatgccag

SEQ ID NO: 100358 - DNA, 82 bp, Homo sapiens
tggtgatgccgggagggaaagaggcgcattaattgttggcacatggccacatgccaggggctatgctgtggcagccaggaaa

SEQ ID NO: 100359 - DNA, 78 bp, Homo sapiens
ccgggagggaaagaggcgcattaattgttggcacatggccacatgccaggggctatgctgtggcagccaggaaaggtg

SEQ ID NO: 100360 - DNA, 79 bp, Homo sapiens
aagaggcgcattaattgttggcacatggccacatgccaggggctatgctgtggcagccaggaaaggtggcctcccaggg

SEQ ID NO: 100361 - DNA, 80 bp, Homo sapiens
ttaattgttggcacatggccacatgccaggggctatgctgtggcagccaggaaaggtggcctcccaggggcatcagaacg

SEQ ID NO: 100362 - DNA, 79 bp, Homo sapiens
acatggccacatgccaggggctatgctgtggcagccaggaaaggtggcctcccaggggcatcagaacggctgttcctta

SEQ ID NO: 100363 - DNA, 78 bp, Homo sapiens
acatgccaggggctatgctgtggcagccaggaaaggtggcctcccaggggcatcagaacggctgttccttactgcaaa

SEQ ID NO: 100364 - DNA, 77 bp, Homo sapiens
ctatgctgtggcagccaggaaaggtggcctcccaggggcatcagaacggctgttccttactgcaaacccagccactg

SEQ ID NO: 100365 - DNA, 72 bp, Homo sapiens
gccaggaaaggtggcctcccaggggcatcagaacggctgttccttactgcaaacccagccactggcacgttt

SEQ ID NO: 100366 - DNA, 71 bp, Homo sapiens
aaaggtggcctcccaggggcatcagaacggctgttccttactgcaaacccagccactggcacgttttagag

SEQ ID NO: 100367 - DNA, 72 bp, Homo sapiens
aggggcatcagaacggctgttccttactgcaaacccagccactggcacgttttagaggcggcaaagtgggcc

SEQ ID NO: 100368 - DNA, 72 bp, Homo sapiens
gaacggctgttccttactgcaaacccagccactggcacgttttagaggcggcaaagtgggccccgcagctta

SEQ ID NO: 100369 - DNA, 68 bp, Homo sapiens
actggcacgttttagaggcggcaaagtgggccccgcagcttagtggtagggccccttccaagaggaaa

SEQ ID NO: 100370 - DNA, 68 bp, Homo sapiens
acgttttagaggcggcaaagtgggccccgcagcttagtggtagggccccttccaagaggaaatgaggc

SEQ ID NO: 100371 - DNA, 72 bp, Homo sapiens
ggcaaagtgggccccgcagcttagtggtagggccccttccaagaggaaatgaggcgtggctgcaaacccaca

SEQ ID NO: 100372 - DNA, 73 bp, Homo sapiens
gtgggccccgcagcttagtggtagggccccttccaagaggaaatgaggcgtggctgcaaacccacagcctctg

SEQ ID NO: 100373 - DNA, 71 bp, Homo sapiens
ttagtggtagggccccttccaagaggaaatgaggcgtggctgcaaacccacagcctctggggaggtcccat

SEQ ID NO: 100374 - DNA, 76 bp, Homo sapiens
agaggaaatgaggcgtggctgcaaacccacagcctctggggaggtcccatttccaggtacacgcagggcatcctca

SEQ ID NO: 100375 - DNA, 75 bp, Homo sapiens
aaatgaggcgtggctgcaaacccacagcctctggggaggtcccatttccaggtacacgcagggcatcctcagccc

SEQ ID NO: 100376 - DNA, 75 bp, Homo sapiens
ctgcaaacccacagcctctggggaggtcccatttccaggtacacgcagggcatcctcagcccctcagcccctctc

SEQ ID NO: 100377 - DNA, 74 bp, Homo sapiens
cccacagcctctggggaggtcccatttccaggtacacgcagggcatcctcagcccctcagcccctctccctctc

SEQ ID NO: 100378 - DNA, 72 bp, Homo sapiens
ctctccctctcctcacaggcttttcacaagcattccttcttccctgaagccgactcccccatgtacccctaa

SEQ ID NO: 100379 - DNA, 72 bp, Homo sapiens
ctcacaggcttttcacaagcattccttcttccctgaagccgactcccccatgtacccctaaggaggagttga

SEQ ID NO: 100380 - DNA, 72 bp, Homo sapiens
tcttccctgaagccgactcccccatgtacccctaaggaggagttgacaggaaggcctcgcctgtgtcttgtc

SEQ ID NO: 100381 - DNA, 71 bp, Homo sapiens
aagccgactcccccatgtacccctaaggaggagttgacaggaaggcctcgcctgtgtcttgtccaatattc

SEQ ID NO: 100382 - DNA, 74 bp, Homo sapiens
atgtacccctaaggaggagttgacaggaaggcctcgcctgtgtcttgtccaatattcccagcagaataggccca

SEQ ID NO: 100383 - DNA, 75 bp, Homo sapiens
ccctaaggaggagttgacaggaaggcctcgcctgtgtcttgtccaatattcccagcagaataggcccactggagc

SEQ ID NO: 100384 - DNA, 77 bp, Homo sapiens
agttgacaggaaggcctcgcctgtgtcttgtccaatattcccagcagaataggcccactggagcccagaggtagcta

SEQ ID NO: 100385 - DNA, 78 bp, Homo sapiens
aaggcctcgcctgtgtcttgtccaatattcccagcagaataggcccactggagcccagaggtagctacagcctatctg

SEQ ID NO: 100386 - DNA, 79 bp, Homo sapiens
cctgtgtcttgtccaatattcccagcagaataggcccactggagcccagaggtagctacagcctatctggtgagcttcc

SEQ ID NO: 100387 - DNA, 76 bp, Homo sapiens
gtccaatattcccagcagaataggcccactggagcccagaggtagctacagcctatctggtgagcttccccagggg

SEQ ID NO: 100388 - DNA, 78 bp, Homo sapiens
ccactggagcccagaggtagctacagcctatctggtgagcttccccagggggctcaggactggtgggatgggatgatg

SEQ ID NO: 100389 - DNA, 76 bp, Homo sapiens
agcccagaggtagctacagcctatctggtgagcttccccagggggctcaggactggtgggatgggatgatgggccc

SEQ ID NO: 100390 - DNA, 78 bp, Homo sapiens
ctacagcctatctggtgagcttccccagggggctcaggactggtgggatgggatgatgggcccctcagtgtctatata

SEQ ID NO: 100391 - DNA, 76 bp, Homo sapiens
tatctggtgagcttccccagggggctcaggactggtgggatgggatgatgggcccctcagtgtctatatagggtgg

SEQ ID NO: 100392 - DNA, 76 bp, Homo sapiens
tgagcttccccagggggctcaggactggtgggatgggatgatgggcccctcagtgtctatatagggtgggatggtg

SEQ ID NO: 100393 - DNA, 74 bp, Homo sapiens
agcttccccagggggctcaggactggtgggatgggatgatgggcccctcagtgtctatatagggtgggatggtg

SEQ ID NO: 100394 - DNA, 73 bp, Homo sapiens
cccagggggctcaggactggtgggatgggatgatgggcccctcagtgtctatatagggtgggatggtgggccc

SEQ ID NO: 100395 - DNA, 76 bp, Homo sapiens
aggactggtgggatgggatgatgggcccctcagtgtctatatagggtgggatggtgggcccctcagtgtctatata

SEQ ID NO: 100396 - DNA, 77 bp, Homo sapiens
actggtgggatgggatgatgggcccctcagtgtctatatagggtgggatggtgggcccctcagtgtctatatagata

SEQ ID NO: 100397 - DNA, 79 bp, Homo sapiens
ggatgggatgatgggcccctcagtgtctatatagggtgggatggtgggcccctcagtgtctatatagatagcaagtgtc

SEQ ID NO: 100398 - DNA, 78 bp, Homo sapiens
atgggatgatgggcccctcagtgtctatatagggtgggatggtgggcccctcagtgtctatatagatagcaagtgtcc

SEQ ID NO: 100399 - DNA, 82 bp, Homo sapiens
atgatgggcccctcagtgtctatatagggtgggatggtgggcccctcagtgtctatatagatagcaagtgtcctcatcatgc

SEQ ID NO: 100400 - DNA, 82 bp, Homo sapiens
tcagtgtctatatagggtgggatggtgggcccctcagtgtctatatagatagcaagtgtcctcatcatgctcttcaccaaaa

SEQ ID NO: 100401 - DNA, 80 bp, Homo sapiens
tctatatagggtgggatggtgggcccctcagtgtctatatagatagcaagtgtcctcatcatgctcttcaccaaaacaac

SEQ ID NO: 100402 - DNA, 80 bp, Homo sapiens
atggtgggcccctcagtgtctatatagatagcaagtgtcctcatcatgctcttcaccaaaacaaccgtcaccaggaagca

SEQ ID NO: 100403 - DNA, 83 bp, Homo sapiens
ccctcagtgtctatatagatagcaagtgtcctcatcatgctcttcaccaaaacaaccgtcaccaggaagcagcaagcagaggc

SEQ ID NO: 100404 - DNA, 85 bp, Homo sapiens
tgtctatatagatagcaagtgtcctcatcatgctcttcaccaaaacaaccgtcaccaggaagcagcaagcagaggccactcatgg

SEQ ID NO: 100405 - DNA, 81 bp, Homo sapiens
agatagcaagtgtcctcatcatgctcttcaccaaaacaaccgtcaccaggaagcagcaagcagaggccactcatgggggac

SEQ ID NO: 100406 - DNA, 71 bp, Homo sapiens
accaggaagcagcaagcagaggccactcatgggggactggggcctacggttttctcaaaatgtccttaaac

SEQ ID NO: 100407 - DNA, 70 bp, Homo sapiens
agaggccactcatgggggactggggcctacggttttctcaaaatgtccttaaaccagagccagtcctgtc

SEQ ID NO: 100408 - DNA, 71 bp, Homo sapiens
ggggactggggcctacggttttctcaaaatgtccttaaaccagagccagtcctgtcgtgcaaagctgaggc

SEQ ID NO: 100409 - DNA, 72 bp, Homo sapiens
gggcctacggttttctcaaaatgtccttaaaccagagccagtcctgtcgtgcaaagctgaggctccaaggta

SEQ ID NO: 100410 - DNA, 74 bp, Homo sapiens
ttttctcaaaatgtccttaaaccagagccagtcctgtcgtgcaaagctgaggctccaaggtagggaggtagcca

SEQ ID NO: 100411 - DNA, 73 bp, Homo sapiens
aaaatgtccttaaaccagagccagtcctgtcgtgcaaagctgaggctccaaggtagggaggtagccacaggag

SEQ ID NO: 100412 - DNA, 77 bp, Homo sapiens
taaaccagagccagtcctgtcgtgcaaagctgaggctccaaggtagggaggtagccacaggaggcctgggccattca

SEQ ID NO: 100413 - DNA, 74 bp, Homo sapiens
agtcctgtcgtgcaaagctgaggctccaaggtagggaggtagccacaggaggcctgggccattcatttctcttt

SEQ ID NO: 100414 - DNA, 72 bp, Homo sapiens
aaagctgaggctccaaggtagggaggtagccacaggaggcctgggccattcatttctcttttaaagacaatg

SEQ ID NO: 100415 - DNA, 71 bp, Homo sapiens
aggctccaaggtagggaggtagccacaggaggcctgggccattcatttctcttttaaagacaatggcctcc

SEQ ID NO: 100416 - DNA, 73 bp, Homo sapiens
aggtagggaggtagccacaggaggcctgggccattcatttctcttttaaagacaatggcctcctgctgcttcc

SEQ ID NO: 100417 - DNA, 75 bp, Homo sapiens
catttctcttttaaagacaatggcctcctgctgcttcctcagccttatggttccaataaagagtccttgatcgat

SEQ ID NO: 100418 - DNA, 77 bp, Homo sapiens
atggcctcctgctgcttcctcagccttatggttccaataaagagtccttgatcgattgcacaacctctgttccctat

SEQ ID NO: 100419 - DNA, 77 bp, Homo sapiens
ctgcttcctcagccttatggttccaataaagagtccttgatcgattgcacaacctctgttccctattgccaaatgtc

SEQ ID NO: 100420 - DNA, 73 bp, Homo sapiens
agccttatggttccaataaagagtccttgatcgattgcacaacctctgttccctattgccaaatgtccccaaa

SEQ ID NO: 100421 - DNA, 76 bp, Homo sapiens
ttccaataaagagtccttgatcgattgcacaacctctgttccctattgccaaatgtccccaaagccagactgagaa

SEQ ID NO: 100422 - DNA, 76 bp, Homo sapiens
ataaagagtccttgatcgattgcacaacctctgttccctattgccaaatgtccccaaagccagactgagaaacagc

SEQ ID NO: 100423 - DNA, 78 bp, Homo sapiens
cttgatcgattgcacaacctctgttccctattgccaaatgtccccaaagccagactgagaaacagcctgcccgctgcc

SEQ ID NO: 100424 - DNA, 73 bp, Homo sapiens
acaacctctgttccctattgccaaatgtccccaaagccagactgagaaacagcctgcccgctgcccccataaa

SEQ ID NO: 100425 - DNA, 76 bp, Homo sapiens
tgttccctattgccaaatgtccccaaagccagactgagaaacagcctgcccgctgcccccataaagtgctatttca

SEQ ID NO: 100426 - DNA, 77 bp, Homo sapiens
aaagccagactgagaaacagcctgcccgctgcccccataaagtgctatttcacatgccctgacccaatcctagacta

SEQ ID NO: 100427 - DNA, 76 bp, Homo sapiens
actgagaaacagcctgcccgctgcccccataaagtgctatttcacatgccctgacccaatcctagactagaaagag

SEQ ID NO: 100428 - DNA, 74 bp, Homo sapiens
aacagcctgcccgctgcccccataaagtgctatttcacatgccctgacccaatcctagactagaaagaggcccc

SEQ ID NO: 100429 - DNA, 74 bp, Homo sapiens
tgcccccataaagtgctatttcacatgccctgacccaatcctagactagaaagaggcccccttgattccactcc

SEQ ID NO: 100430 - DNA, 74 bp, Homo sapiens
ataaagtgctatttcacatgccctgacccaatcctagactagaaagaggcccccttgattccactcccgcagcc

SEQ ID NO: 100431 - DNA, 73 bp, Homo sapiens
tatttcacatgccctgacccaatcctagactagaaagaggcccccttgattccactcccgcagcctggggtaa

SEQ ID NO: 100432 - DNA, 74 bp, Homo sapiens
tgacccaatcctagactagaaagaggcccccttgattccactcccgcagcctggggtaagagcagaccacgaga

SEQ ID NO: 100433 - DNA, 75 bp, Homo sapiens
tagactagaaagaggcccccttgattccactcccgcagcctggggtaagagcagaccacgagaagtgcactgtag

SEQ ID NO: 100434 - DNA, 76 bp, Homo sapiens
tagaaagaggcccccttgattccactcccgcagcctggggtaagagcagaccacgagaagtgcactgtagtccagc

SEQ ID NO: 100435 - DNA, 79 bp, Homo sapiens
ttgattccactcccgcagcctggggtaagagcagaccacgagaagtgcactgtagtccagctcccaatggctacaatta

SEQ ID NO: 100436 - DNA, 76 bp, Homo sapiens
actcccgcagcctggggtaagagcagaccacgagaagtgcactgtagtccagctcccaatggctacaattataaaa

SEQ ID NO: 100437 - DNA, 76 bp, Homo sapiens
tggggtaagagcagaccacgagaagtgcactgtagtccagctcccaatggctacaattataaaattaaatggtata

SEQ ID NO: 100438 - DNA, 78 bp, Homo sapiens
taagagcagaccacgagaagtgcactgtagtccagctcccaatggctacaattataaaattaaatggtataacttgca

SEQ ID NO: 100439 - DNA, 80 bp, Homo sapiens
agaagtgcactgtagtccagctcccaatggctacaattataaaattaaatggtataacttgcatgatggctgcaaatctc

SEQ ID NO: 100440 - DNA, 80 bp, Homo sapiens
actgtagtccagctcccaatggctacaattataaaattaaatggtataacttgcatgatggctgcaaatctccatggctg

SEQ ID NO: 100441 - DNA, 80 bp, Homo sapiens
tataaaattaaatggtataacttgcatgatggctgcaaatctccatggctggccatttcttcctgctgccaggccccttg

SEQ ID NO: 100442 - DNA, 84 bp, Homo sapiens
aacttgcatgatggctgcaaatctccatggctggccatttcttcctgctgccaggccccttggcacagttgacattgtctcaaa

SEQ ID NO: 100443 - DNA, 82 bp, Homo sapiens
tgcaaatctccatggctggccatttcttcctgctgccaggccccttggcacagttgacattgtctcaaattccagaccagaa

SEQ ID NO: 100444 - DNA, 79 bp, Homo sapiens
atctccatggctggccatttcttcctgctgccaggccccttggcacagttgacattgtctcaaattccagaccagaaaa

SEQ ID NO: 100445 - DNA, 78 bp, Homo sapiens
tgctgccaggccccttggcacagttgacattgtctcaaattccagaccagaaaaaaagggcccactatattgcagtga

SEQ ID NO: 100446 - DNA, 73 bp, Homo sapiens
ccccttggcacagttgacattgtctcaaattccagaccagaaaaaaagggcccactatattgcagtgatttta

SEQ ID NO: 100447 - DNA, 74 bp, Homo sapiens
acagttgacattgtctcaaattccagaccagaaaaaaagggcccactatattgcagtgattttatcattaacga

SEQ ID NO: 100448 - DNA, 72 bp, Homo sapiens
ttgtctcaaattccagaccagaaaaaaagggcccactatattgcagtgattttatcattaacgagacctgtt

SEQ ID NO: 100449 - DNA, 71 bp, Homo sapiens
aaattccagaccagaaaaaaagggcccactatattgcagtgattttatcattaacgagacctgtttggctc

SEQ ID NO: 100450 - DNA, 70 bp, Homo sapiens
aaaaaaagggcccactatattgcagtgattttatcattaacgagacctgtttggctccaaaatgaggaaa

SEQ ID NO: 100451 - DNA, 74 bp, Homo sapiens
cccactatattgcagtgattttatcattaacgagacctgtttggctccaaaatgaggaaaaacacttaagcata

SEQ ID NO: 100452 - DNA, 71 bp, Homo sapiens
gattttatcattaacgagacctgtttggctccaaaatgaggaaaaacacttaagcataatatttatgtagt

SEQ ID NO: 100453 - DNA, 74 bp, Homo sapiens
taacgagacctgtttggctccaaaatgaggaaaaacacttaagcataatatttatgtagttcaaatgcaatggc

SEQ ID NO: 100454 - DNA, 75 bp, Homo sapiens
tttggctccaaaatgaggaaaaacacttaagcataatatttatgtagttcaaatgcaatggcccctcttgtcatg

SEQ ID NO: 100455 - DNA, 76 bp, Homo sapiens
aaaaacacttaagcataatatttatgtagttcaaatgcaatggcccctcttgtcatgtgtcaccaaggcaaatctg

SEQ ID NO: 100456 - DNA, 82 bp, Homo sapiens
ttaagcataatatttatgtagttcaaatgcaatggcccctcttgtcatgtgtcaccaaggcaaatctggactctgattcagc

SEQ ID NO: 100457 - DNA, 83 bp, Homo sapiens
tatttatgtagttcaaatgcaatggcccctcttgtcatgtgtcaccaaggcaaatctggactctgattcagcgctccagccca

SEQ ID NO: 100458 - DNA, 81 bp, Homo sapiens
aaatgcaatggcccctcttgtcatgtgtcaccaaggcaaatctggactctgattcagcgctccagcccacaacaggagact

SEQ ID NO: 100459 - DNA, 80 bp, Homo sapiens
cccctcttgtcatgtgtcaccaaggcaaatctggactctgattcagcgctccagcccacaacaggagacttgaacgcaaa

SEQ ID NO: 100460 - DNA, 83 bp, Homo sapiens
ttgtcatgtgtcaccaaggcaaatctggactctgattcagcgctccagcccacaacaggagacttgaacgcaaacagcctgag

SEQ ID NO: 100461 - DNA, 82 bp, Homo sapiens
gtcaccaaggcaaatctggactctgattcagcgctccagcccacaacaggagacttgaacgcaaacagcctgagtcacgcag

SEQ ID NO: 100462 - DNA, 87 bp, Homo sapiens
aaatctggactctgattcagcgctccagcccacaacaggagacttgaacgcaaacagcctgagtcacgcaggctcagcatgcatgtg

SEQ ID NO: 100463 - DNA, 87 bp, Homo sapiens
tctgattcagcgctccagcccacaacaggagacttgaacgcaaacagcctgagtcacgcaggctcagcatgcatgtgggaggcctgt

SEQ ID NO: 100464 - DNA, 82 bp, Homo sapiens
acaggagacttgaacgcaaacagcctgagtcacgcaggctcagcatgcatgtgggaggcctgttcttggctgcgtattttaa

SEQ ID NO: 100465 - DNA, 82 bp, Homo sapiens
agacttgaacgcaaacagcctgagtcacgcaggctcagcatgcatgtgggaggcctgttcttggctgcgtattttaagcacc

SEQ ID NO: 100466 - DNA, 83 bp, Homo sapiens
aacagcctgagtcacgcaggctcagcatgcatgtgggaggcctgttcttggctgcgtattttaagcaccggctttgtggatga

SEQ ID NO: 100467 - DNA, 81 bp, Homo sapiens
agtcacgcaggctcagcatgcatgtgggaggcctgttcttggctgcgtattttaagcaccggctttgtggatgaaaggcca

SEQ ID NO: 100468 - DNA, 79 bp, Homo sapiens
aggctcagcatgcatgtgggaggcctgttcttggctgcgtattttaagcaccggctttgtggatgaaaggccatggggc

SEQ ID NO: 100469 - DNA, 73 bp, Homo sapiens
atgtgggaggcctgttcttggctgcgtattttaagcaccggctttgtggatgaaaggccatggggccaggtct

SEQ ID NO: 100470 - DNA, 72 bp, Homo sapiens
attttaagcaccggctttgtggatgaaaggccatggggccaggtcttgcagcaacccccatcatccctttcc

SEQ ID NO: 100471 - DNA, 74 bp, Homo sapiens
ctttgtggatgaaaggccatggggccaggtcttgcagcaacccccatcatccctttccctcagaagtatgaaaa

SEQ ID NO: 100472 - DNA, 73 bp, Homo sapiens
atgaaaggccatggggccaggtcttgcagcaacccccatcatccctttccctcagaagtatgaaaatgtcttt

SEQ ID NO: 100473 - DNA, 74 bp, Homo sapiens
gggccaggtcttgcagcaacccccatcatccctttccctcagaagtatgaaaatgtcttttttctagagcgctc

SEQ ID NO: 100474 - DNA, 77 bp, Homo sapiens
tcttgcagcaacccccatcatccctttccctcagaagtatgaaaatgtcttttttctagagcgctctgtgttggtca

SEQ ID NO: 100475 - DNA, 77 bp, Homo sapiens
ccccatcatccctttccctcagaagtatgaaaatgtcttttttctagagcgctctgtgttggtcagccatggtgtga

SEQ ID NO: 100476 - DNA, 78 bp, Homo sapiens
atccctttccctcagaagtatgaaaatgtcttttttctagagcgctctgtgttggtcagccatggtgtgactcagtgc

SEQ ID NO: 100477 - DNA, 80 bp, Homo sapiens
agaagtatgaaaatgtcttttttctagagcgctctgtgttggtcagccatggtgtgactcagtgcctctggatgaagcct

SEQ ID NO: 100478 - DNA, 79 bp, Homo sapiens
aaaatgtcttttttctagagcgctctgtgttggtcagccatggtgtgactcagtgcctctggatgaagccttccttagc

SEQ ID NO: 100479 - DNA, 80 bp, Homo sapiens
tttttctagagcgctctgtgttggtcagccatggtgtgactcagtgcctctggatgaagccttccttagctcctccctcc

SEQ ID NO: 100480 - DNA, 84 bp, Homo sapiens
gctctgtgttggtcagccatggtgtgactcagtgcctctggatgaagccttccttagctcctccctcctcttatctctgccata

SEQ ID NO: 100481 - DNA, 82 bp, Homo sapiens
ttggtcagccatggtgtgactcagtgcctctggatgaagccttccttagctcctccctcctcttatctctgccatagatcct

SEQ ID NO: 100482 - DNA, 80 bp, Homo sapiens
atggtgtgactcagtgcctctggatgaagccttccttagctcctccctcctcttatctctgccatagatccttggcttcc

SEQ ID NO: 100483 - DNA, 80 bp, Homo sapiens
agtgcctctggatgaagccttccttagctcctccctcctcttatctctgccatagatccttggcttcctgatgatcaaac

SEQ ID NO: 100484 - DNA, 79 bp, Homo sapiens
tggatgaagccttccttagctcctccctcctcttatctctgccatagatccttggcttcctgatgatcaaactgaaaaa

SEQ ID NO: 100485 - DNA, 78 bp, Homo sapiens
ttccttagctcctccctcctcttatctctgccatagatccttggcttcctgatgatcaaactgaaaaatctgcagttt

SEQ ID NO: 100486 - DNA, 79 bp, Homo sapiens
ctccctcctcttatctctgccatagatccttggcttcctgatgatcaaactgaaaaatctgcagttttcttgcagaaaa

SEQ ID NO: 100487 - DNA, 79 bp, Homo sapiens
tcctcttatctctgccatagatccttggcttcctgatgatcaaactgaaaaatctgcagttttcttgcagaaaaacaaa

SEQ ID NO: 100488 - DNA, 77 bp, Homo sapiens
catagatccttggcttcctgatgatcaaactgaaaaatctgcagttttcttgcagaaaaacaaacaattccaatgga

SEQ ID NO: 100489 - DNA, 75 bp, Homo sapiens
tggcttcctgatgatcaaactgaaaaatctgcagttttcttgcagaaaaacaaacaattccaatggaacaaccat

SEQ ID NO: 100490 - DNA, 71 bp, Homo sapiens
ctgaaaaatctgcagttttcttgcagaaaaacaaacaattccaatggaacaaccattcaaaacataataac

SEQ ID NO: 100491 - DNA, 70 bp, Homo sapiens
caaacaattccaatggaacaaccattcaaaacataataactcagccctttaacctcctaccacagtctaa

SEQ ID NO: 100492 - DNA, 71 bp, Homo sapiens
aattccaatggaacaaccattcaaaacataataactcagccctttaacctcctaccacagtctaatgcctg

SEQ ID NO: 100493 - DNA, 71 bp, Homo sapiens
aacaaccattcaaaacataataactcagccctttaacctcctaccacagtctaatgcctggcattacgagt

SEQ ID NO: 100494 - DNA, 69 bp, Homo sapiens
aaaacataataactcagccctttaacctcctaccacagtctaatgcctggcattacgagttggggtaaa

SEQ ID NO: 100495 - DNA, 71 bp, Homo sapiens
ataactcagccctttaacctcctaccacagtctaatgcctggcattacgagttggggtaaagaagaaggca

SEQ ID NO: 100496 - DNA, 72 bp, Homo sapiens
tttaacctcctaccacagtctaatgcctggcattacgagttggggtaaagaagaaggcaggaacaatgattg

SEQ ID NO: 100497 - DNA, 77 bp, Homo sapiens
ctaccacagtctaatgcctggcattacgagttggggtaaagaagaaggcaggaacaatgattgtggagagctctatc

SEQ ID NO: 100498 - DNA, 79 bp, Homo sapiens
taatgcctggcattacgagttggggtaaagaagaaggcaggaacaatgattgtggagagctctatctgcctcagaaata

SEQ ID NO: 100499 - DNA, 76 bp, Homo sapiens
agaaataatgccagtcggcaaaggctgccggcaggttttgtgctcatttcaaaacttcacattcctcaggcactta

SEQ ID NO: 100500 - DNA, 75 bp, Homo sapiens
cagtcggcaaaggctgccggcaggttttgtgctcatttcaaaacttcacattcctcaggcacttagtggcatttt

SEQ ID NO: 100501 - DNA, 74 bp, Homo sapiens
aaaggctgccggcaggttttgtgctcatttcaaaacttcacattcctcaggcacttagtggcatttttgaagaa

SEQ ID NO: 100502 - DNA, 76 bp, Homo sapiens
caggttttgtgctcatttcaaaacttcacattcctcaggcacttagtggcatttttgaagaacactgtgtcaagga

SEQ ID NO: 100503 - DNA, 79 bp, Homo sapiens
attcctcaggcacttagtggcatttttgaagaacactgtgtcaaggacagtgggtgacccaggagagtgatgtgagcga

SEQ ID NO: 100504 - DNA, 80 bp, Homo sapiens
atttttgaagaacactgtgtcaaggacagtgggtgacccaggagagtgatgtgagcgaggtcattctgaatacacagcac

SEQ ID NO: 100505 - DNA, 81 bp, Homo sapiens
aacactgtgtcaaggacagtgggtgacccaggagagtgatgtgagcgaggtcattctgaatacacagcacttgacgtggta

SEQ ID NO: 100506 - DNA, 83 bp, Homo sapiens
tgtcaaggacagtgggtgacccaggagagtgatgtgagcgaggtcattctgaatacacagcacttgacgtggtagagtctaca

SEQ ID NO: 100507 - DNA, 82 bp, Homo sapiens
agtgggtgacccaggagagtgatgtgagcgaggtcattctgaatacacagcacttgacgtggtagagtctacagccacagct

SEQ ID NO: 100508 - DNA, 82 bp, Homo sapiens
aggagagtgatgtgagcgaggtcattctgaatacacagcacttgacgtggtagagtctacagccacagcttggaaaaacagc

SEQ ID NO: 100509 - DNA, 82 bp, Homo sapiens
atgtgagcgaggtcattctgaatacacagcacttgacgtggtagagtctacagccacagcttggaaaaacagctcttggcag

SEQ ID NO: 100510 - DNA, 82 bp, Homo sapiens
tcattctgaatacacagcacttgacgtggtagagtctacagccacagcttggaaaaacagctcttggcagttgtgtctctct

SEQ ID NO: 100511 - DNA, 79 bp, Homo sapiens
acttgacgtggtagagtctacagccacagcttggaaaaacagctcttggcagttgtgtctctcttagccagcaagcgtg

SEQ ID NO: 100512 - DNA, 79 bp, Homo sapiens
tggtagagtctacagccacagcttggaaaaacagctcttggcagttgtgtctctcttagccagcaagcgtggggacctg

SEQ ID NO: 100513 - DNA, 80 bp, Homo sapiens
tacagccacagcttggaaaaacagctcttggcagttgtgtctctcttagccagcaagcgtggggacctgtgccacggaga

SEQ ID NO: 100514 - DNA, 77 bp, Homo sapiens
ttggaaaaacagctcttggcagttgtgtctctcttagccagcaagcgtggggacctgtgccacggagacacccaaca

SEQ ID NO: 100515 - DNA, 77 bp, Homo sapiens
agttgtgtctctcttagccagcaagcgtggggacctgtgccacggagacacccaacaggaatcatcattccaggtaa

SEQ ID NO: 100516 - DNA, 78 bp, Homo sapiens
tctctcttagccagcaagcgtggggacctgtgccacggagacacccaacaggaatcatcattccaggtaagccagtcc

SEQ ID NO: 100517 - DNA, 77 bp, Homo sapiens
aagcgtggggacctgtgccacggagacacccaacaggaatcatcattccaggtaagccagtcctgtggtcaggcaca

SEQ ID NO: 100518 - DNA, 77 bp, Homo sapiens
acctgtgccacggagacacccaacaggaatcatcattccaggtaagccagtcctgtggtcaggcacaacgtgaggta

SEQ ID NO: 100519 - DNA, 73 bp, Homo sapiens
acggagacacccaacaggaatcatcattccaggtaagccagtcctgtggtcaggcacaacgtgaggtattttt

SEQ ID NO: 100520 - DNA, 73 bp, Homo sapiens
acacccaacaggaatcatcattccaggtaagccagtcctgtggtcaggcacaacgtgaggtattttttgtttg

SEQ ID NO: 100521 - DNA, 69 bp, Homo sapiens
gttttttattttaattagtccccctcattactatatacttagaaatgagagctttaacttgtgagcaat

SEQ ID NO: 100522 - DNA, 76 bp, Homo sapiens
ccctcattactatatacttagaaatgagagctttaacttgtgagcaatttctataccagctgatacctgccaaaat

SEQ ID NO: 100523 - DNA, 77 bp, Homo sapiens
ctatatacttagaaatgagagctttaacttgtgagcaatttctataccagctgatacctgccaaaattgtagtcatt

SEQ ID NO: 100524 - DNA, 79 bp, Homo sapiens
agagctttaacttgtgagcaatttctataccagctgatacctgccaaaattgtagtcatttatagagattaactgatga

SEQ ID NO: 100525 - DNA, 81 bp, Homo sapiens
cttgtgagcaatttctataccagctgatacctgccaaaattgtagtcatttatagagattaactgatgactgtctgcttta

SEQ ID NO: 100526 - DNA, 79 bp, Homo sapiens
aatttctataccagctgatacctgccaaaattgtagtcatttatagagattaactgatgactgtctgctttagcagaag

SEQ ID NO: 100527 - DNA, 83 bp, Homo sapiens
tgatacctgccaaaattgtagtcatttatagagattaactgatgactgtctgctttagcagaagtgttcaggcataactctca

SEQ ID NO: 100528 - DNA, 80 bp, Homo sapiens
caaaattgtagtcatttatagagattaactgatgactgtctgctttagcagaagtgttcaggcataactctcagagaaaa

SEQ ID NO: 100529 - DNA, 81 bp, Homo sapiens
ttgtagtcatttatagagattaactgatgactgtctgctttagcagaagtgttcaggcataactctcagagaaaacaattc

SEQ ID NO: 100530 - DNA, 81 bp, Homo sapiens
ttatagagattaactgatgactgtctgctttagcagaagtgttcaggcataactctcagagaaaacaattcttcactctaa

SEQ ID NO: 100531 - DNA, 80 bp, Homo sapiens
taactgatgactgtctgctttagcagaagtgttcaggcataactctcagagaaaacaattcttcactctaagctgttttc

SEQ ID NO: 100532 - DNA, 78 bp, Homo sapiens
tgtctgctttagcagaagtgttcaggcataactctcagagaaaacaattcttcactctaagctgttttctaagccctg

SEQ ID NO: 100533 - DNA, 75 bp, Homo sapiens
agaagtgttcaggcataactctcagagaaaacaattcttcactctaagctgttttctaagccctgggagtctcag

SEQ ID NO: 100534 - DNA, 75 bp, Homo sapiens
ggcataactctcagagaaaacaattcttcactctaagctgttttctaagccctgggagtctcagggctgagttta

SEQ ID NO: 100535 - DNA, 74 bp, Homo sapiens
aactctcagagaaaacaattcttcactctaagctgttttctaagccctgggagtctcagggctgagtttaatgc

SEQ ID NO: 100536 - DNA, 73 bp, Homo sapiens
actctaagctgttttctaagccctgggagtctcagggctgagtttaatgctggaggattggggaagagcccat

SEQ ID NO: 100537 - DNA, 74 bp, Homo sapiens
ctgttttctaagccctgggagtctcagggctgagtttaatgctggaggattggggaagagcccattccactctc

SEQ ID NO: 100538 - DNA, 74 bp, Homo sapiens
cctgggagtctcagggctgagtttaatgctggaggattggggaagagcccattccactctccccacgtgtgttc

SEQ ID NO: 100539 - DNA, 74 bp, Homo sapiens
agtctcagggctgagtttaatgctggaggattggggaagagcccattccactctccccacgtgtgttcctggga

SEQ ID NO: 100540 - DNA, 72 bp, Homo sapiens
agtttaatgctggaggattggggaagagcccattccactctccccacgtgtgttcctgggagtcagtaggaa

SEQ ID NO: 100541 - DNA, 72 bp, Homo sapiens
atgctggaggattggggaagagcccattccactctccccacgtgtgttcctgggagtcagtaggaacgttat

SEQ ID NO: 100542 - DNA, 70 bp, Homo sapiens
gggaagagcccattccactctccccacgtgtgttcctgggagtcagtaggaacgttattgccttggtagg

SEQ ID NO: 100543 - DNA, 69 bp, Homo sapiens
attccactctccccacgtgtgttcctgggagtcagtaggaacgttattgccttggtaggggtcttgacc

SEQ ID NO: 100544 - DNA, 69 bp, Homo sapiens
actctccccacgtgtgttcctgggagtcagtaggaacgttattgccttggtaggggtcttgaccctcag

SEQ ID NO: 100545 - DNA, 77 bp, Homo sapiens
agtcagtaggaacgttattgccttggtaggggtcttgaccctcaggctcacaatggtgctggagagctgtgacacca

SEQ ID NO: 100546 - DNA, 78 bp, Homo sapiens
taggaacgttattgccttggtaggggtcttgaccctcaggctcacaatggtgctggagagctgtgacaccaaggcaca

SEQ ID NO: 100547 - DNA, 78 bp, Homo sapiens
attgccttggtaggggtcttgaccctcaggctcacaatggtgctggagagctgtgacaccaaggcacaggggaaatga

SEQ ID NO: 100548 - DNA, 83 bp, Homo sapiens
gggtcttgaccctcaggctcacaatggtgctggagagctgtgacaccaaggcacaggggaaatgagaagcattatcatattca

SEQ ID NO: 100549 - DNA, 83 bp, Homo sapiens
tcaggctcacaatggtgctggagagctgtgacaccaaggcacaggggaaatgagaagcattatcatattcagggtgtggtttg

SEQ ID NO: 100550 - DNA, 82 bp, Homo sapiens
gagagctgtgacaccaaggcacaggggaaatgagaagcattatcatattcagggtgtggtttggatgcacttacaagctaga

SEQ ID NO: 100551 - DNA, 78 bp, Homo sapiens
acaccaaggcacaggggaaatgagaagcattatcatattcagggtgtggtttggatgcacttacaagctagatcgaag

SEQ ID NO: 100552 - DNA, 78 bp, Homo sapiens
acaggggaaatgagaagcattatcatattcagggtgtggtttggatgcacttacaagctagatcgaaggaacatctaa

SEQ ID NO: 100553 - DNA, 78 bp, Homo sapiens
atgagaagcattatcatattcagggtgtggtttggatgcacttacaagctagatcgaaggaacatctaattcttactt

SEQ ID NO: 100554 - DNA, 76 bp, Homo sapiens
attatcatattcagggtgtggtttggatgcacttacaagctagatcgaaggaacatctaattcttactttctgaaa

SEQ ID NO: 100555 - DNA, 77 bp, Homo sapiens
tattcagggtgtggtttggatgcacttacaagctagatcgaaggaacatctaattcttactttctgaaaccatcaga

SEQ ID NO: 100556 - DNA, 79 bp, Homo sapiens
tttggatgcacttacaagctagatcgaaggaacatctaattcttactttctgaaaccatcagacctcatgtgccaaata

SEQ ID NO: 100557 - DNA, 77 bp, Homo sapiens
ttacaagctagatcgaaggaacatctaattcttactttctgaaaccatcagacctcatgtgccaaatagcaatattt

SEQ ID NO: 100558 - DNA, 78 bp, Homo sapiens
aaggaacatctaattcttactttctgaaaccatcagacctcatgtgccaaatagcaatattttgcatgaaatatagga

SEQ ID NO: 100559 - DNA, 77 bp, Homo sapiens
cttactttctgaaaccatcagacctcatgtgccaaatagcaatattttgcatgaaatataggaacttccgatataaa

SEQ ID NO: 100560 - DNA, 75 bp, Homo sapiens
tgtgccaaatagcaatattttgcatgaaatataggaacttccgatataaactttcaagctggggaaaatgaatac

SEQ ID NO: 100561 - DNA, 72 bp, Homo sapiens
gcatgaaatataggaacttccgatataaactttcaagctggggaaaatgaatactttatgtcttcagtttcc

SEQ ID NO: 100562 - DNA, 71 bp, Homo sapiens
ataggaacttccgatataaactttcaagctggggaaaatgaatactttatgtcttcagtttcctgtatctg

SEQ ID NO: 100563 - DNA, 72 bp, Homo sapiens
ctttcaagctggggaaaatgaatactttatgtcttcagtttcctgtatctgtgttcagttaaaaggctcatt

SEQ ID NO: 100564 - DNA, 72 bp, Homo sapiens
gaaaatgaatactttatgtcttcagtttcctgtatctgtgttcagttaaaaggctcatttgccccccgaatg

SEQ ID NO: 100565 - DNA, 71 bp, Homo sapiens
atactttatgtcttcagtttcctgtatctgtgttcagttaaaaggctcatttgccccccgaatgttaaata

SEQ ID NO: 100566 - DNA, 72 bp, Homo sapiens
ttcagtttcctgtatctgtgttcagttaaaaggctcatttgccccccgaatgttaaatagaggagtatggaa

SEQ ID NO: 100567 - DNA, 73 bp, Homo sapiens
tgtatctgtgttcagttaaaaggctcatttgccccccgaatgttaaatagaggagtatggaaaatgtctacta

SEQ ID NO: 100568 - DNA, 70 bp, Homo sapiens
taaaaggctcatttgccccccgaatgttaaatagaggagtatggaaaatgtctactatccaattcacttt

SEQ ID NO: 100569 - DNA, 69 bp, Homo sapiens
atttgccccccgaatgttaaatagaggagtatggaaaatgtctactatccaattcacttttcttctttc

SEQ ID NO: 100570 - DNA, 71 bp, Homo sapiens
aatgttaaatagaggagtatggaaaatgtctactatccaattcacttttcttctttctcactgagtaccgg

SEQ ID NO: 100571 - DNA, 72 bp, Homo sapiens
aatagaggagtatggaaaatgtctactatccaattcacttttcttctttctcactgagtaccgggctttaga

SEQ ID NO: 100572 - DNA, 70 bp, Homo sapiens
aaaatgtctactatccaattcacttttcttctttctcactgagtaccgggctttagagggcaacagggaa

SEQ ID NO: 100573 - DNA, 71 bp, Homo sapiens
tctactatccaattcacttttcttctttctcactgagtaccgggctttagagggcaacagggaattcgacc

SEQ ID NO: 100574 - DNA, 69 bp, Homo sapiens
attcacttttcttctttctcactgagtaccgggctttagagggcaacagggaattcgaccctgggtcaa

SEQ ID NO: 100575 - DNA, 69 bp, Homo sapiens
ctttctcactgagtaccgggctttagagggcaacagggaattcgaccctgggtcaagcccttgggtaga

SEQ ID NO: 100576 - DNA, 67 bp, Homo sapiens
actgagtaccgggctttagagggcaacagggaattcgaccctgggtcaagcccttgggtagaaccag

SEQ ID NO: 100577 - DNA, 72 bp, Homo sapiens
ctttagagggcaacagggaattcgaccctgggtcaagcccttgggtagaaccaggatgcagctctgaacacc

SEQ ID NO: 100578 - DNA, 80 bp, Homo sapiens
aattcgaccctgggtcaagcccttgggtagaaccaggatgcagctctgaacacctgcatgctggcagcttggcttcttca

SEQ ID NO: 100579 - DNA, 85 bp, Homo sapiens
ttgggtagaaccaggatgcagctctgaacacctgcatgctggcagcttggcttcttcagcatgtttggaatcaactgtgaatgtt

SEQ ID NO: 100580 - DNA, 86 bp, Homo sapiens
tagaaccaggatgcagctctgaacacctgcatgctggcagcttggcttcttcagcatgtttggaatcaactgtgaatgtttacagg

SEQ ID NO: 100581 - DNA, 83 bp, Homo sapiens
gctctgaacacctgcatgctggcagcttggcttcttcagcatgtttggaatcaactgtgaatgtttacagggcggtgctttaa

SEQ ID NO: 100582 - DNA, 80 bp, Homo sapiens
acacctgcatgctggcagcttggcttcttcagcatgtttggaatcaactgtgaatgtttacagggcggtgctttaaagta

SEQ ID NO: 100583 - DNA, 80 bp, Homo sapiens
tggcagcttggcttcttcagcatgtttggaatcaactgtgaatgtttacagggcggtgctttaaagtagtgggcacatca

SEQ ID NO: 100584 - DNA, 77 bp, Homo sapiens
cttcttcagcatgtttggaatcaactgtgaatgtttacagggcggtgctttaaagtagtgggcacatcaagatttca

SEQ ID NO: 100585 - DNA, 74 bp, Homo sapiens
atcaactgtgaatgtttacagggcggtgctttaaagtagtgggcacatcaagatttcaccctgggacatcttaa

SEQ ID NO: 100586 - DNA, 73 bp, Homo sapiens
gtgaatgtttacagggcggtgctttaaagtagtgggcacatcaagatttcaccctgggacatcttaatcttaa

SEQ ID NO: 100587 - DNA, 72 bp, Homo sapiens
tttaaagtagtgggcacatcaagatttcaccctgggacatcttaatcttaagcagagttgaaaaaggtccta

SEQ ID NO: 100588 - DNA, 69 bp, Homo sapiens
gatttcaccctgggacatcttaatcttaagcagagttgaaaaaggtcctaaattcttctagtaccattt

SEQ ID NO: 100589 - DNA, 69 bp, Homo sapiens
accctgggacatcttaatcttaagcagagttgaaaaaggtcctaaattcttctagtaccattttctcat

SEQ ID NO: 100590 - DNA, 69 bp, Homo sapiens
catcttaatcttaagcagagttgaaaaaggtcctaaattcttctagtaccattttctcatttttgaaaa

SEQ ID NO: 100591 - DNA, 67 bp, Homo sapiens
gcagagttgaaaaaggtcctaaattcttctagtaccattttctcatttttgaaaaaaatgaaagtac

SEQ ID NO: 100592 - DNA, 67 bp, Homo sapiens
tgaaaaaggtcctaaattcttctagtaccattttctcatttttgaaaaaaatgaaagtacttgcttg

SEQ ID NO: 100593 - DNA, 71 bp, Homo sapiens
ctcatttttgaaaaaaatgaaagtacttgcttggaattttattatgtatgcagagtcataaaaatccaaaa

SEQ ID NO: 100594 - DNA, 69 bp, Homo sapiens
ttgaaaaaaatgaaagtacttgcttggaattttattatgtatgcagagtcataaaaatccaaaaaaggg

SEQ ID NO: 100595 - DNA, 69 bp, Homo sapiens
tgaaagtacttgcttggaattttattatgtatgcagagtcataaaaatccaaaaaaggggaaaaaattg

SEQ ID NO: 100596 - DNA, 70 bp, Homo sapiens
cttgcttggaattttattatgtatgcagagtcataaaaatccaaaaaaggggaaaaaattgtatataata

SEQ ID NO: 100597 - DNA, 67 bp, Homo sapiens
ttttattatgtatgcagagtcataaaaatccaaaaaaggggaaaaaattgtatataataaaaataag

SEQ ID NO: 100598 - DNA, 63 bp, Homo sapiens
aaaatccaaaaaaggggaaaaaattgtatataataaaaataagtcaatgccgtttgcaaaatt

SEQ ID NO: 100599 - DNA, 66 bp, Homo sapiens
aaaggggaaaaaattgtatataataaaaataagtcaatgccgtttgcaaaattttacttcattcca

SEQ ID NO: 100600 - DNA, 69 bp, Homo sapiens
aaattgtatataataaaaataagtcaatgccgtttgcaaaattttacttcattccaaaggcattcctat

SEQ ID NO: 100601 - DNA, 68 bp, Homo sapiens
taataaaaataagtcaatgccgtttgcaaaattttacttcattccaaaggcattcctattgttttcgg

SEQ ID NO: 100602 - DNA, 67 bp, Homo sapiens
aaataagtcaatgccgtttgcaaaattttacttcattccaaaggcattcctattgttttcggggttg

SEQ ID NO: 100603 - DNA, 70 bp, Homo sapiens
attttacttcattccaaaggcattcctattgttttcggggttggctgctcattaggccatccttaaatgt

SEQ ID NO: 100604 - DNA, 73 bp, Homo sapiens
ttcattccaaaggcattcctattgttttcggggttggctgctcattaggccatccttaaatgttatgatattt

SEQ ID NO: 100605 - DNA, 75 bp, Homo sapiens
cattcctattgttttcggggttggctgctcattaggccatccttaaatgttatgatattttgtgacggatagtga

SEQ ID NO: 100606 - DNA, 75 bp, Homo sapiens
ctattgttttcggggttggctgctcattaggccatccttaaatgttatgatattttgtgacggatagtgagacca

SEQ ID NO: 100607 - DNA, 76 bp, Homo sapiens
gggttggctgctcattaggccatccttaaatgttatgatattttgtgacggatagtgagaccagctttcacttttc

SEQ ID NO: 100608 - DNA, 75 bp, Homo sapiens
attaggccatccttaaatgttatgatattttgtgacggatagtgagaccagctttcacttttctgccatacaaaa

SEQ ID NO: 100609 - DNA, 74 bp, Homo sapiens
ccatccttaaatgttatgatattttgtgacggatagtgagaccagctttcacttttctgccatacaaaataaac

SEQ ID NO: 100610 - DNA, 80 bp, Homo sapiens
tttgtgacggatagtgagaccagctttcacttttctgccatacaaaataaactgagcaggtatgcatatctcgttgataa

SEQ ID NO: 100611 - DNA, 80 bp, Homo sapiens
tagtgagaccagctttcacttttctgccatacaaaataaactgagcaggtatgcatatctcgttgataaccgagctgcct

SEQ ID NO: 100612 - DNA, 77 bp, Homo sapiens
agctttcacttttctgccatacaaaataaactgagcaggtatgcatatctcgttgataaccgagctgcctttttcaa

SEQ ID NO: 100613 - DNA, 77 bp, Homo sapiens
acttttctgccatacaaaataaactgagcaggtatgcatatctcgttgataaccgagctgcctttttcaagacacca

SEQ ID NO: 100614 - DNA, 81 bp, Homo sapiens
caaaataaactgagcaggtatgcatatctcgttgataaccgagctgcctttttcaagacaccattgtgatctgtggctgta

SEQ ID NO: 100615 - DNA, 81 bp, Homo sapiens
taaactgagcaggtatgcatatctcgttgataaccgagctgcctttttcaagacaccattgtgatctgtggctgtaagtaa

SEQ ID NO: 100616 - DNA, 81 bp, Homo sapiens
tatgcatatctcgttgataaccgagctgcctttttcaagacaccattgtgatctgtggctgtaagtaacataaatgtaata

SEQ ID NO: 100617 - DNA, 79 bp, Homo sapiens
atctcgttgataaccgagctgcctttttcaagacaccattgtgatctgtggctgtaagtaacataaatgtaatatatga

SEQ ID NO: 100618 - DNA, 79 bp, Homo sapiens
gagctgcctttttcaagacaccattgtgatctgtggctgtaagtaacataaatgtaatatatgatcttccattaaagaa

SEQ ID NO: 100619 - DNA, 76 bp, Homo sapiens
gcctttttcaagacaccattgtgatctgtggctgtaagtaacataaatgtaatatatgatcttccattaaagaaac

SEQ ID NO: 100620 - DNA, 73 bp, Homo sapiens
ctgtggctgtaagtaacataaatgtaatatatgatcttccattaaagaaaccagataaggttaaattgccacc

SEQ ID NO: 100621 - DNA, 71 bp, Homo sapiens
gctgtaagtaacataaatgtaatatatgatcttccattaaagaaaccagataaggttaaattgccaccgtt

SEQ ID NO: 100622 - DNA, 68 bp, Homo sapiens
aatgtaatatatgatcttccattaaagaaaccagataaggttaaattgccaccgtttcttggaaaatt

SEQ ID NO: 100623 - DNA, 67 bp, Homo sapiens
atgatcttccattaaagaaaccagataaggttaaattgccaccgtttcttggaaaattttggttaga

SEQ ID NO: 100624 - DNA, 65 bp, Homo sapiens
agaaaccagataaggttaaattgccaccgtttcttggaaaattttggttagatagaataaagaat

SEQ ID NO: 100625 - DNA, 68 bp, Homo sapiens
ggttaaattgccaccgtttcttggaaaattttggttagatagaataaagaattttctggcagtcaaca

SEQ ID NO: 100626 - DNA, 70 bp, Homo sapiens
gccaccgtttcttggaaaattttggttagatagaataaagaattttctggcagtcaacaacatattagtc

SEQ ID NO: 100627 - DNA, 72 bp, Homo sapiens
ggaaaattttggttagatagaataaagaattttctggcagtcaacaacatattagtctatgtttccgatatg

SEQ ID NO: 100628 - DNA, 72 bp, Homo sapiens
gaataaagaattttctggcagtcaacaacatattagtctatgtttccgatatgggtttactagttttcttga

SEQ ID NO: 100629 - DNA, 76 bp, Homo sapiens
tttctggcagtcaacaacatattagtctatgtttccgatatgggtttactagttttcttgatagattcttagcaga

SEQ ID NO: 100630 - DNA, 74 bp, Homo sapiens
ggcagtcaacaacatattagtctatgtttccgatatgggtttactagttttcttgatagattcttagcagaaaa

SEQ ID NO: 100631 - DNA, 72 bp, Homo sapiens
aacatattagtctatgtttccgatatgggtttactagttttcttgatagattcttagcagaaaaatgaggaa

SEQ ID NO: 100632 - DNA, 73 bp, Homo sapiens
ctatgtttccgatatgggtttactagttttcttgatagattcttagcagaaaaatgaggaaggtatatactca

SEQ ID NO: 100633 - DNA, 78 bp, Homo sapiens
tatgggtttactagttttcttgatagattcttagcagaaaaatgaggaaggtatatactcagaagactgtcatgatga

SEQ ID NO: 100634 - DNA, 79 bp, Homo sapiens
ttactagttttcttgatagattcttagcagaaaaatgaggaaggtatatactcagaagactgtcatgatgagccgttga

SEQ ID NO: 100635 - DNA, 81 bp, Homo sapiens
atagattcttagcagaaaaatgaggaaggtatatactcagaagactgtcatgatgagccgttgagccaaatctatgcaaaa

SEQ ID NO: 100636 - DNA, 83 bp, Homo sapiens
tcttagcagaaaaatgaggaaggtatatactcagaagactgtcatgatgagccgttgagccaaatctatgcaaaagcataata

SEQ ID NO: 100637 - DNA, 79 bp, Homo sapiens
aaggtatatactcagaagactgtcatgatgagccgttgagccaaatctatgcaaaagcataataccaaaaagatatatt

SEQ ID NO: 100638 - DNA, 82 bp, Homo sapiens
agaagactgtcatgatgagccgttgagccaaatctatgcaaaagcataataccaaaaagatatatttctctctgtatataca

SEQ ID NO: 100639 - DNA, 82 bp, Homo sapiens
gtcatgatgagccgttgagccaaatctatgcaaaagcataataccaaaaagatatatttctctctgtatatacatgtataaa

SEQ ID NO: 100640 - DNA, 76 bp, Homo sapiens
ccaaatctatgcaaaagcataataccaaaaagatatatttctctctgtatatacatgtataaaattgtggttcttc

SEQ ID NO: 100641 - DNA, 76 bp, Homo sapiens
gcaaaagcataataccaaaaagatatatttctctctgtatatacatgtataaaattgtggttcttctaaaagcata

SEQ ID NO: 100642 - DNA, 73 bp, Homo sapiens
ccaaaaagatatatttctctctgtatatacatgtataaaattgtggttcttctaaaagcatataagaatttta

SEQ ID NO: 100643 - DNA, 73 bp, Homo sapiens
ctctctgtatatacatgtataaaattgtggttcttctaaaagcatataagaattttatatagtcaattttaaa

SEQ ID NO: 100644 - DNA, 72 bp, Homo sapiens
catgtataaaattgtggttcttctaaaagcatataagaattttatatagtcaattttaaaaggatatctgta

SEQ ID NO: 100645 - DNA, 73 bp, Homo sapiens
ttgtggttcttctaaaagcatataagaattttatatagtcaattttaaaaggatatctgtatttcagaagatg

SEQ ID NO: 100646 - DNA, 74 bp, Homo sapiens
ctaaaagcatataagaattttatatagtcaattttaaaaggatatctgtatttcagaagatgttggccagtcaa

SEQ ID NO: 100647 - DNA, 76 bp, Homo sapiens
gcatataagaattttatatagtcaattttaaaaggatatctgtatttcagaagatgttggccagtcaattggatac

SEQ ID NO: 100648 - DNA, 80 bp, Homo sapiens
tatatagtcaattttaaaaggatatctgtatttcagaagatgttggccagtcaattggatactcactacatgaatctgga

SEQ ID NO: 100649 - DNA, 79 bp, Homo sapiens
gtcaattttaaaaggatatctgtatttcagaagatgttggccagtcaattggatactcactacatgaatctggatataa

SEQ ID NO: 100650 - DNA, 78 bp, Homo sapiens
aaaaggatatctgtatttcagaagatgttggccagtcaattggatactcactacatgaatctggatataaaaatatgg

SEQ ID NO: 100651 - DNA, 75 bp, Homo sapiens
tttcagaagatgttggccagtcaattggatactcactacatgaatctggatataaaaatatggggttttcttcct

SEQ ID NO: 100652 - DNA, 74 bp, Homo sapiens
aagatgttggccagtcaattggatactcactacatgaatctggatataaaaatatggggttttcttcctttgat

SEQ ID NO: 100653 - DNA, 74 bp, Homo sapiens
ccagtcaattggatactcactacatgaatctggatataaaaatatggggttttcttcctttgatttgctactgt

SEQ ID NO: 100654 - DNA, 72 bp, Homo sapiens
ctacatgaatctggatataaaaatatggggttttcttcctttgatttgctactgttttatgacaatggaaaa

SEQ ID NO: 100655 - DNA, 70 bp, Homo sapiens
ctggatataaaaatatggggttttcttcctttgatttgctactgttttatgacaatggaaaagaaatcaa

SEQ ID NO: 100656 - DNA, 74 bp, Homo sapiens
tatggggttttcttcctttgatttgctactgttttatgacaatggaaaagaaatcaatgtgtgtagagaacagc

SEQ ID NO: 100657 - DNA, 73 bp, Homo sapiens
cttcctttgatttgctactgttttatgacaatggaaaagaaatcaatgtgtgtagagaacagcttacttttcc

SEQ ID NO: 100658 - DNA, 77 bp, Homo sapiens
ttgatttgctactgttttatgacaatggaaaagaaatcaatgtgtgtagagaacagcttacttttcctggtatcaca

SEQ ID NO: 100659 - DNA, 73 bp, Homo sapiens
aatggaaaagaaatcaatgtgtgtagagaacagcttacttttcctggtatcacagtctaacctttaggttgca

SEQ ID NO: 100660 - DNA, 73 bp, Homo sapiens
aaatcaatgtgtgtagagaacagcttacttttcctggtatcacagtctaacctttaggttgcagggtcattag

SEQ ID NO: 100661 - DNA, 73 bp, Homo sapiens
tgtgtagagaacagcttacttttcctggtatcacagtctaacctttaggttgcagggtcattaggatttcaaa

SEQ ID NO: 100662 - DNA, 72 bp, Homo sapiens
acagcttacttttcctggtatcacagtctaacctttaggttgcagggtcattaggatttcaaagtgacagta

SEQ ID NO: 100663 - DNA, 74 bp, Homo sapiens
ttttcctggtatcacagtctaacctttaggttgcagggtcattaggatttcaaagtgacagtactgaatgtgac

SEQ ID NO: 100664 - DNA, 77 bp, Homo sapiens
tatcacagtctaacctttaggttgcagggtcattaggatttcaaagtgacagtactgaatgtgactcttcctgaagc

SEQ ID NO: 100665 - DNA, 75 bp, Homo sapiens
taacctttaggttgcagggtcattaggatttcaaagtgacagtactgaatgtgactcttcctgaagccccttgca

SEQ ID NO: 100666 - DNA, 74 bp, Homo sapiens
agggtcattaggatttcaaagtgacagtactgaatgtgactcttcctgaagccccttgcagatggtaaaataaa

SEQ ID NO: 100667 - DNA, 74 bp, Homo sapiens
attaggatttcaaagtgacagtactgaatgtgactcttcctgaagccccttgcagatggtaaaataaatctccc

SEQ ID NO: 100668 - DNA, 74 bp, Homo sapiens
aaagtgacagtactgaatgtgactcttcctgaagccccttgcagatggtaaaataaatctccctaattgcaaac

SEQ ID NO: 100669 - DNA, 74 bp, Homo sapiens
gtactgaatgtgactcttcctgaagccccttgcagatggtaaaataaatctccctaattgcaaacctaaccata

SEQ ID NO: 100670 - DNA, 74 bp, Homo sapiens
tcttcctgaagccccttgcagatggtaaaataaatctccctaattgcaaacctaaccatatgctggctaattta

SEQ ID NO: 100671 - DNA, 72 bp, Homo sapiens
aagccccttgcagatggtaaaataaatctccctaattgcaaacctaaccatatgctggctaatttaatgttg

SEQ ID NO: 100672 - DNA, 73 bp, Homo sapiens
gcagatggtaaaataaatctccctaattgcaaacctaaccatatgctggctaatttaatgttgggaaatattc

SEQ ID NO: 100673 - DNA, 72 bp, Homo sapiens
ctccctaattgcaaacctaaccatatgctggctaatttaatgttgggaaatattcttcaatattatttacca

SEQ ID NO: 100674 - DNA, 75 bp, Homo sapiens
gcaaacctaaccatatgctggctaatttaatgttgggaaatattcttcaatattatttaccataccacatgtata

SEQ ID NO: 100675 - DNA, 84 bp, Homo sapiens
tatactatataatataaactatataatggtatatagtatgtcagtatacattctaattcatattatatatgcatgcttatatat

SEQ ID NO: 100676 - DNA, 84 bp, Homo sapiens
aatataaactatataatggtatatagtatgtcagtatacattctaattcatattatatatgcatgcttatatattgtccagtgc

SEQ ID NO: 100677 - DNA, 84 bp, Homo sapiens
ctatataatggtatatagtatgtcagtatacattctaattcatattatatatgcatgcttatatattgtccagtgctacgtaac

SEQ ID NO: 100678 - DNA, 83 bp, Homo sapiens
atatagtatgtcagtatacattctaattcatattatatatgcatgcttatatattgtccagtgctacgtaactatgggtagcc

SEQ ID NO: 100679 - DNA, 83 bp, Homo sapiens
tatgtcagtatacattctaattcatattatatatgcatgcttatatattgtccagtgctacgtaactatgggtagcctcactt

SEQ ID NO: 100680 - DNA, 80 bp, Homo sapiens
agtatacattctaattcatattatatatgcatgcttatatattgtccagtgctacgtaactatgggtagcctcactttcc

SEQ ID NO: 100681 - DNA, 79 bp, Homo sapiens
atacattctaattcatattatatatgcatgcttatatattgtccagtgctacgtaactatgggtagcctcactttcccc

SEQ ID NO: 100682 - DNA, 78 bp, Homo sapiens
ttctaattcatattatatatgcatgcttatatattgtccagtgctacgtaactatgggtagcctcactttcccccacc

SEQ ID NO: 100683 - DNA, 76 bp, Homo sapiens
tattatatatgcatgcttatatattgtccagtgctacgtaactatgggtagcctcactttcccccaccccaatttc

SEQ ID NO: 100684 - DNA, 75 bp, Homo sapiens
ttatatatgcatgcttatatattgtccagtgctacgtaactatgggtagcctcactttcccccaccccaatttct

SEQ ID NO: 100685 - DNA, 73 bp, Homo sapiens
tatatattgtccagtgctacgtaactatgggtagcctcactttcccccaccccaatttcttctcatatcgtta

SEQ ID NO: 100686 - DNA, 71 bp, Homo sapiens
atattgtccagtgctacgtaactatgggtagcctcactttcccccaccccaatttcttctcatatcgttaa

SEQ ID NO: 100687 - DNA, 70 bp, Homo sapiens
ctacgtaactatgggtagcctcactttcccccaccccaatttcttctcatatcgttaagctaagacaaca

SEQ ID NO: 100688 - DNA, 70 bp, Homo sapiens
actatgggtagcctcactttcccccaccccaatttcttctcatatcgttaagctaagacaacaccacaag

SEQ ID NO: 100689 - DNA, 72 bp, Homo sapiens
accccaatttcttctcatatcgttaagctaagacaacaccacaaggttggagtacttcagaactggagaatg

SEQ ID NO: 100690 - DNA, 75 bp, Homo sapiens
tttcttctcatatcgttaagctaagacaacaccacaaggttggagtacttcagaactggagaatggccacagaaa

SEQ ID NO: 100691 - DNA, 75 bp, Homo sapiens
atatcgttaagctaagacaacaccacaaggttggagtacttcagaactggagaatggccacagaaatcagccttg

SEQ ID NO: 100692 - DNA, 72 bp, Homo sapiens
ctaagacaacaccacaaggttggagtacttcagaactggagaatggccacagaaatcagccttggtttttaa

SEQ ID NO: 100693 - DNA, 72 bp, Homo sapiens
acaccacaaggttggagtacttcagaactggagaatggccacagaaatcagccttggtttttaactaatgtg

SEQ ID NO: 100694 - DNA, 73 bp, Homo sapiens
agtacttcagaactggagaatggccacagaaatcagccttggtttttaactaatgtgtgggaagtgaggttca

SEQ ID NO: 100695 - DNA, 74 bp, Homo sapiens
ttcagaactggagaatggccacagaaatcagccttggtttttaactaatgtgtgggaagtgaggttcagagagg

SEQ ID NO: 100696 - DNA, 73 bp, Homo sapiens
agaatggccacagaaatcagccttggtttttaactaatgtgtgggaagtgaggttcagagaggttatgtcatt

SEQ ID NO: 100697 - DNA, 74 bp, Homo sapiens
agaaatcagccttggtttttaactaatgtgtgggaagtgaggttcagagaggttatgtcatttgcccaatctca

SEQ ID NO: 100698 - DNA, 76 bp, Homo sapiens
ttaactaatgtgtgggaagtgaggttcagagaggttatgtcatttgcccaatctcacacggccagttacaggaaga

SEQ ID NO: 100699 - DNA, 76 bp, Homo sapiens
gaagtgaggttcagagaggttatgtcatttgcccaatctcacacggccagttacaggaagagggcaggtctgaaaa

SEQ ID NO: 100700 - DNA, 77 bp, Homo sapiens
ggttcagagaggttatgtcatttgcccaatctcacacggccagttacaggaagagggcaggtctgaaaacacacaca

SEQ ID NO: 100701 - DNA, 77 bp, Homo sapiens
aggttatgtcatttgcccaatctcacacggccagttacaggaagagggcaggtctgaaaacacacacactctcaaca

SEQ ID NO: 100702 - DNA, 75 bp, Homo sapiens
atttgcccaatctcacacggccagttacaggaagagggcaggtctgaaaacacacacactctcaacacccaccga

SEQ ID NO: 100703 - DNA, 77 bp, Homo sapiens
atctcacacggccagttacaggaagagggcaggtctgaaaacacacacactctcaacacccaccgacacacacactc

SEQ ID NO: 100704 - DNA, 75 bp, Homo sapiens
agttacaggaagagggcaggtctgaaaacacacacactctcaacacccaccgacacacacactcggaatgtacac

SEQ ID NO: 100705 - DNA, 78 bp, Homo sapiens
tgaaaacacacacactctcaacacccaccgacacacacactcggaatgtacactcagtgcacctagaaattcaacacc

SEQ ID NO: 100706 - DNA, 77 bp, Homo sapiens
acacactctcaacacccaccgacacacacactcggaatgtacactcagtgcacctagaaattcaacacccacggaca

SEQ ID NO: 100707 - DNA, 81 bp, Homo sapiens
acacacacactcggaatgtacactcagtgcacctagaaattcaacacccacggacacacacactcagatatgtacactcag

SEQ ID NO: 100708 - DNA, 82 bp, Homo sapiens
tcggaatgtacactcagtgcacctagaaattcaacacccacggacacacacactcagatatgtacactcagtgcacctagaa

SEQ ID NO: 100709 - DNA, 82 bp, Homo sapiens
atgtacactcagtgcacctagaaattcaacacccacggacacacacactcagatatgtacactcagtgcacctagaaattca

SEQ ID NO: 100710 - DNA, 78 bp, Homo sapiens
acctagaaattcaacacccacggacacacacactcagatatgtacactcagtgcacctagaaattcaacactcaccga

SEQ ID NO: 100711 - DNA, 80 bp, Homo sapiens
aaattcaacacccacggacacacacactcagatatgtacactcagtgcacctagaaattcaacactcaccgacacacaca

SEQ ID NO: 100712 - DNA, 81 bp, Homo sapiens
acggacacacacactcagatatgtacactcagtgcacctagaaattcaacactcaccgacacacacactcgggatgtacac

SEQ ID NO: 100713 - DNA, 83 bp, Homo sapiens
acactcagatatgtacactcagtgcacctagaaattcaacactcaccgacacacacactcgggatgtacactcagtgtgccta

SEQ ID NO: 100714 - DNA, 80 bp, Homo sapiens
atatgtacactcagtgcacctagaaattcaacactcaccgacacacacactcgggatgtacactcagtgtgcctagaaat

SEQ ID NO: 100715 - DNA, 79 bp, Homo sapiens
actcagtgcacctagaaattcaacactcaccgacacacacactcgggatgtacactcagtgtgcctagaaattcaacac

SEQ ID NO: 100716 - DNA, 77 bp, Homo sapiens
aaattcaacactcaccgacacacacactcgggatgtacactcagtgtgcctagaaattcaacacccaccgacacaca

SEQ ID NO: 100717 - DNA, 77 bp, Homo sapiens
aacactcaccgacacacacactcgggatgtacactcagtgtgcctagaaattcaacacccaccgacacacacactcg

SEQ ID NO: 100718 - DNA, 79 bp, Homo sapiens
acacacacactcgggatgtacactcagtgtgcctagaaattcaacacccaccgacacacacactcgggatgtacactca

SEQ ID NO: 100719 - DNA, 78 bp, Homo sapiens
actcagtgtgcctagaaattcaacacccaccgacacacacactcgggatgtacactcagtgcacctagaaatacacat

SEQ ID NO: 100720 - DNA, 79 bp, Homo sapiens
tagaaattcaacacccaccgacacacacactcgggatgtacactcagtgcacctagaaatacacatttctgtgaactca

SEQ ID NO: 100721 - DNA, 78 bp, Homo sapiens
attcaacacccaccgacacacacactcgggatgtacactcagtgcacctagaaatacacatttctgtgaactcaaagc

SEQ ID NO: 100722 - DNA, 78 bp, Homo sapiens
acacacacactcgggatgtacactcagtgcacctagaaatacacatttctgtgaactcaaagcgaacagggtggagaa

SEQ ID NO: 100723 - DNA, 78 bp, Homo sapiens
acctagaaatacacatttctgtgaactcaaagcgaacagggtggagaagtgcacaatgcttcatagttttagatctca

SEQ ID NO: 100724 - DNA, 80 bp, Homo sapiens
tgtgaactcaaagcgaacagggtggagaagtgcacaatgcttcatagttttagatctcagagacacgaaagcacttgaac

SEQ ID NO: 100725 - DNA, 77 bp, Homo sapiens
ctcaaagcgaacagggtggagaagtgcacaatgcttcatagttttagatctcagagacacgaaagcacttgaacttt

SEQ ID NO: 100726 - DNA, 80 bp, Homo sapiens
agggtggagaagtgcacaatgcttcatagttttagatctcagagacacgaaagcacttgaacttttgcattctgcctcaa

SEQ ID NO: 100727 - DNA, 81 bp, Homo sapiens
aagtgcacaatgcttcatagttttagatctcagagacacgaaagcacttgaacttttgcattctgcctcaaccatctcact

SEQ ID NO: 100728 - DNA, 82 bp, Homo sapiens
atgcttcatagttttagatctcagagacacgaaagcacttgaacttttgcattctgcctcaaccatctcacttctgctccca

SEQ ID NO: 100729 - DNA, 82 bp, Homo sapiens
ttttagatctcagagacacgaaagcacttgaacttttgcattctgcctcaaccatctcacttctgctcccagtgtgtgtgta

SEQ ID NO: 100730 - DNA, 82 bp, Homo sapiens
agagacacgaaagcacttgaacttttgcattctgcctcaaccatctcacttctgctcccagtgtgtgtgtagaatcagaaga

SEQ ID NO: 100731 - DNA, 83 bp, Homo sapiens
aacttttgcattctgcctcaaccatctcacttctgctcccagtgtgtgtgtagaatcagaagacagccccagccacactgtga

SEQ ID NO: 100732 - DNA, 85 bp, Homo sapiens
attctgcctcaaccatctcacttctgctcccagtgtgtgtgtagaatcagaagacagccccagccacactgtgacctgcaggctg

SEQ ID NO: 100733 - DNA, 86 bp, Homo sapiens
atctcacttctgctcccagtgtgtgtgtagaatcagaagacagccccagccacactgtgacctgcaggctgtgaggctgtgtttca

SEQ ID NO: 100734 - DNA, 85 bp, Homo sapiens
ttctgctcccagtgtgtgtgtagaatcagaagacagccccagccacactgtgacctgcaggctgtgaggctgtgtttcacctgct

SEQ ID NO: 100735 - DNA, 86 bp, Homo sapiens
tgtgtgtagaatcagaagacagccccagccacactgtgacctgcaggctgtgaggctgtgtttcacctgcttgagtgggcaatgga

SEQ ID NO: 100736 - DNA, 84 bp, Homo sapiens
tagaatcagaagacagccccagccacactgtgacctgcaggctgtgaggctgtgtttcacctgcttgagtgggcaatggaatta

SEQ ID NO: 100737 - DNA, 79 bp, Homo sapiens
acactgtgacctgcaggctgtgaggctgtgtttcacctgcttgagtgggcaatggaattacctgggcattctagtttgg

SEQ ID NO: 100738 - DNA, 76 bp, Homo sapiens
acctgcaggctgtgaggctgtgtttcacctgcttgagtgggcaatggaattacctgggcattctagtttggtaggt

SEQ ID NO: 100739 - DNA, 73 bp, Homo sapiens
tgtgtttcacctgcttgagtgggcaatggaattacctgggcattctagtttggtaggttggtctagggtgaag

SEQ ID NO: 100740 - DNA, 67 bp, Homo sapiens
attctagtttggtaggttggtctagggtgaagggcctgagaatttggagttctaataaggtcccagg

SEQ ID NO: 100741 - DNA, 75 bp, Homo sapiens
taggttggtctagggtgaagggcctgagaatttggagttctaataaggtcccaggtgatgctgaggctgccgata

SEQ ID NO: 100742 - DNA, 77 bp, Homo sapiens
tctagggtgaagggcctgagaatttggagttctaataaggtcccaggtgatgctgaggctgccgatacagggagcac

SEQ ID NO: 100743 - DNA, 85 bp, Homo sapiens
taataaggtcccaggtgatgctgaggctgccgatacagggagcacgctgggaatatctgcatgagagggagagctcctcctgata

SEQ ID NO: 100744 - DNA, 87 bp, Homo sapiens
caggtgatgctgaggctgccgatacagggagcacgctgggaatatctgcatgagagggagagctcctcctgatactcaagcttccaa

SEQ ID NO: 100745 - DNA, 87 bp, Homo sapiens
ctgaggctgccgatacagggagcacgctgggaatatctgcatgagagggagagctcctcctgatactcaagcttccaatgtgcatta

SEQ ID NO: 100746 - DNA, 84 bp, Homo sapiens
cgatacagggagcacgctgggaatatctgcatgagagggagagctcctcctgatactcaagcttccaatgtgcattactacttc

SEQ ID NO: 100747 - DNA, 81 bp, Homo sapiens
agggagcacgctgggaatatctgcatgagagggagagctcctcctgatactcaagcttccaatgtgcattactacttccct

SEQ ID NO: 100748 - DNA, 83 bp, Homo sapiens
tgggaatatctgcatgagagggagagctcctcctgatactcaagcttccaatgtgcattactacttcccttctcctgcctgct

SEQ ID NO: 100749 - DNA, 82 bp, Homo sapiens
atgagagggagagctcctcctgatactcaagcttccaatgtgcattactacttcccttctcctgcctgcttctgatttgctg

SEQ ID NO: 100750 - DNA, 82 bp, Homo sapiens
agagctcctcctgatactcaagcttccaatgtgcattactacttcccttctcctgcctgcttctgatttgctgtgtgctggg

SEQ ID NO: 100751 - DNA, 82 bp, Homo sapiens
tcctgatactcaagcttccaatgtgcattactacttcccttctcctgcctgcttctgatttgctgtgtgctggggagaaaca

SEQ ID NO: 100752 - DNA, 78 bp, Homo sapiens
cttccaatgtgcattactacttcccttctcctgcctgcttctgatttgctgtgtgctggggagaaacacgcgaactaa

SEQ ID NO: 100753 - DNA, 79 bp, Homo sapiens
aatgtgcattactacttcccttctcctgcctgcttctgatttgctgtgtgctggggagaaacacgcgaactaaatatgc

SEQ ID NO: 100754 - DNA, 82 bp, Homo sapiens
ctgcctgcttctgatttgctgtgtgctggggagaaacacgcgaactaaatatgcctgaactgtgtttagactgtgttcatga

SEQ ID NO: 100755 - DNA, 82 bp, Homo sapiens
ttctgatttgctgtgtgctggggagaaacacgcgaactaaatatgcctgaactgtgtttagactgtgttcatgagcaatgac

SEQ ID NO: 100756 - DNA, 80 bp, Homo sapiens
gtgtgctggggagaaacacgcgaactaaatatgcctgaactgtgtttagactgtgttcatgagcaatgactgacggcctc

SEQ ID NO: 100757 - DNA, 77 bp, Homo sapiens
ggagaaacacgcgaactaaatatgcctgaactgtgtttagactgtgttcatgagcaatgactgacggcctccttttg

SEQ ID NO: 100758 - DNA, 77 bp, Homo sapiens
cgaactaaatatgcctgaactgtgtttagactgtgttcatgagcaatgactgacggcctccttttggtgataactat

SEQ ID NO: 100759 - DNA, 73 bp, Homo sapiens
ttagactgtgttcatgagcaatgactgacggcctccttttggtgataactatttggccgtcttttcatttttt

SEQ ID NO: 100760 - DNA, 72 bp, Homo sapiens
tgagcaatgactgacggcctccttttggtgataactatttggccgtcttttcatttttttaactcttcaata

SEQ ID NO: 100761 - DNA, 71 bp, Homo sapiens
ccttttggtgataactatttggccgtcttttcatttttttaactcttcaatacacacagagcagctgaaaa

SEQ ID NO: 100762 - DNA, 75 bp, Homo sapiens
atttggccgtcttttcatttttttaactcttcaatacacacagagcagctgaaaatgcccaaactctgccctgca

SEQ ID NO: 100763 - DNA, 79 bp, Homo sapiens
ttcatttttttaactcttcaatacacacagagcagctgaaaatgcccaaactctgccctgcagataggccggtgtgtga

SEQ ID NO: 100764 - DNA, 79 bp, Homo sapiens
ttttaactcttcaatacacacagagcagctgaaaatgcccaaactctgccctgcagataggccggtgtgtgaccgtctc

SEQ ID NO: 100765 - DNA, 81 bp, Homo sapiens
atacacacagagcagctgaaaatgcccaaactctgccctgcagataggccggtgtgtgaccgtctctgtctcctacaataa

SEQ ID NO: 100766 - DNA, 79 bp, Homo sapiens
cagctgaaaatgcccaaactctgccctgcagataggccggtgtgtgaccgtctctgtctcctacaataactgggcacat

SEQ ID NO: 100767 - DNA, 85 bp, Homo sapiens
tctgccctgcagataggccggtgtgtgaccgtctctgtctcctacaataactgggcacattctgtcagagtcactgtcatgataa

SEQ ID NO: 100768 - DNA, 84 bp, Homo sapiens
agataggccggtgtgtgaccgtctctgtctcctacaataactgggcacattctgtcagagtcactgtcatgataatcagtctga

SEQ ID NO: 100769 - DNA, 82 bp, Homo sapiens
accgtctctgtctcctacaataactgggcacattctgtcagagtcactgtcatgataatcagtctgattgctaaggtgaacc

SEQ ID NO: 100770 - DNA, 83 bp, Homo sapiens
ctacaataactgggcacattctgtcagagtcactgtcatgataatcagtctgattgctaaggtgaaccccagattctcaagta

SEQ ID NO: 100771 - DNA, 82 bp, Homo sapiens
tgggcacattctgtcagagtcactgtcatgataatcagtctgattgctaaggtgaaccccagattctcaagtaggaagtaat

SEQ ID NO: 100772 - DNA, 76 bp, Homo sapiens
agtctgattgctaaggtgaaccccagattctcaagtaggaagtaatttctgctgtgccatctatagaaagactttg

SEQ ID NO: 100773 - DNA, 73 bp, Homo sapiens
ctaaggtgaaccccagattctcaagtaggaagtaatttctgctgtgccatctatagaaagactttggggaatg

SEQ ID NO: 100774 - DNA, 73 bp, Homo sapiens
agattctcaagtaggaagtaatttctgctgtgccatctatagaaagactttggggaatggcagggaagggtta

SEQ ID NO: 100775 - DNA, 72 bp, Homo sapiens
aagtaggaagtaatttctgctgtgccatctatagaaagactttggggaatggcagggaagggttacatggaa

SEQ ID NO: 100776 - DNA, 71 bp, Homo sapiens
agtaatttctgctgtgccatctatagaaagactttggggaatggcagggaagggttacatggaacctttat

SEQ ID NO: 100777 - DNA, 70 bp, Homo sapiens
tgccatctatagaaagactttggggaatggcagggaagggttacatggaacctttattccgttccacaaa

SEQ ID NO: 100778 - DNA, 72 bp, Homo sapiens
tctatagaaagactttggggaatggcagggaagggttacatggaacctttattccgttccacaaatgcagca

SEQ ID NO: 100779 - DNA, 68 bp, Homo sapiens
actttggggaatggcagggaagggttacatggaacctttattccgttccacaaatgcagcagttaagt

SEQ ID NO: 100780 - DNA, 73 bp, Homo sapiens
aatggcagggaagggttacatggaacctttattccgttccacaaatgcagcagttaagttctctgagtgccca

SEQ ID NO: 100781 - DNA, 73 bp, Homo sapiens
ttacatggaacctttattccgttccacaaatgcagcagttaagttctctgagtgcccacaggaccgggtgtta

SEQ ID NO: 100782 - DNA, 75 bp, Homo sapiens
tggaacctttattccgttccacaaatgcagcagttaagttctctgagtgcccacaggaccgggtgttaatgcaga

SEQ ID NO: 100783 - DNA, 78 bp, Homo sapiens
attccgttccacaaatgcagcagttaagttctctgagtgcccacaggaccgggtgttaatgcagatgccacaatcctc

SEQ ID NO: 100784 - DNA, 78 bp, Homo sapiens
acaaatgcagcagttaagttctctgagtgcccacaggaccgggtgttaatgcagatgccacaatcctcctcccctcta

SEQ ID NO: 100785 - DNA, 74 bp, Homo sapiens
agtgcccacaggaccgggtgttaatgcagatgccacaatcctcctcccctctagagaaacaacatggtcccagg

SEQ ID NO: 100786 - DNA, 77 bp, Homo sapiens
tgttaatgcagatgccacaatcctcctcccctctagagaaacaacatggtcccagggaaacgtgaatgctagagtag

SEQ ID NO: 100787 - DNA, 73 bp, Homo sapiens
atgccacaatcctcctcccctctagagaaacaacatggtcccagggaaacgtgaatgctagagtaggcgttaa

SEQ ID NO: 100788 - DNA, 72 bp, Homo sapiens
ctcctcccctctagagaaacaacatggtcccagggaaacgtgaatgctagagtaggcgttaagaattctcca

SEQ ID NO: 100789 - DNA, 72 bp, Homo sapiens
cctctagagaaacaacatggtcccagggaaacgtgaatgctagagtaggcgttaagaattctccattctaaa

SEQ ID NO: 100790 - DNA, 71 bp, Homo sapiens
aaacaacatggtcccagggaaacgtgaatgctagagtaggcgttaagaattctccattctaaatctgcttt

SEQ ID NO: 100791 - DNA, 70 bp, Homo sapiens
ccagggaaacgtgaatgctagagtaggcgttaagaattctccattctaaatctgcttttctaccaacctt

SEQ ID NO: 100792 - DNA, 73 bp, Homo sapiens
aaacgtgaatgctagagtaggcgttaagaattctccattctaaatctgcttttctaccaacctttgctgtgga

SEQ ID NO: 100793 - DNA, 73 bp, Homo sapiens
tagagtaggcgttaagaattctccattctaaatctgcttttctaccaacctttgctgtggacaagaacaagtc

SEQ ID NO: 100794 - DNA, 76 bp, Homo sapiens
gttaagaattctccattctaaatctgcttttctaccaacctttgctgtggacaagaacaagtctcttcatcactga

SEQ ID NO: 100795 - DNA, 77 bp, Homo sapiens
ttctccattctaaatctgcttttctaccaacctttgctgtggacaagaacaagtctcttcatcactgaggctccgta

SEQ ID NO: 100796 - DNA, 76 bp, Homo sapiens
aaatctgcttttctaccaacctttgctgtggacaagaacaagtctcttcatcactgaggctccgtatctggaagcc

SEQ ID NO: 100797 - DNA, 76 bp, Homo sapiens
tttctaccaacctttgctgtggacaagaacaagtctcttcatcactgaggctccgtatctggaagcctggaattaa

SEQ ID NO: 100798 - DNA, 77 bp, Homo sapiens
cctttgctgtggacaagaacaagtctcttcatcactgaggctccgtatctggaagcctggaattaagagactaagaa

SEQ ID NO: 100799 - DNA, 75 bp, Homo sapiens
aagaacaagtctcttcatcactgaggctccgtatctggaagcctggaattaagagactaagaaggattactccaa

SEQ ID NO: 100800 - DNA, 74 bp, Homo sapiens
atcactgaggctccgtatctggaagcctggaattaagagactaagaaggattactccaagggactctaaaagca

SEQ ID NO: 100801 - DNA, 74 bp, Homo sapiens
tatctggaagcctggaattaagagactaagaaggattactccaagggactctaaaagcatccacaacaattaca

SEQ ID NO: 100802 - DNA, 75 bp, Homo sapiens
cctggaattaagagactaagaaggattactccaagggactctaaaagcatccacaacaattacatctgctgccat

SEQ ID NO: 100803 - DNA, 76 bp, Homo sapiens
aattaagagactaagaaggattactccaagggactctaaaagcatccacaacaattacatctgctgccattatcta

SEQ ID NO: 100804 - DNA, 76 bp, Homo sapiens
aaggattactccaagggactctaaaagcatccacaacaattacatctgctgccattatctactcaactggttctaa

SEQ ID NO: 100805 - DNA, 77 bp, Homo sapiens
tccaagggactctaaaagcatccacaacaattacatctgctgccattatctactcaactggttctaagcacggtctt

SEQ ID NO: 100806 - DNA, 78 bp, Homo sapiens
actctaaaagcatccacaacaattacatctgctgccattatctactcaactggttctaagcacggtctttcttgaaca

SEQ ID NO: 100807 - DNA, 76 bp, Homo sapiens
acaattacatctgctgccattatctactcaactggttctaagcacggtctttcttgaacaacttctaatgaggtta

SEQ ID NO: 100808 - DNA, 73 bp, Homo sapiens
tgccattatctactcaactggttctaagcacggtctttcttgaacaacttctaatgaggttacgactttcaaa

SEQ ID NO: 100809 - DNA, 66 bp, Homo sapiens
tggttctaagcacggtctttcttgaacaacttctaatgaggttacgactttcaaagttttcccttt

SEQ ID NO: 100810 - DNA, 68 bp, Homo sapiens
tcttgaacaacttctaatgaggttacgactttcaaagttttcccttttgtcttttttcaggcagacac

SEQ ID NO: 100811 - DNA, 68 bp, Homo sapiens
acttctaatgaggttacgactttcaaagttttcccttttgtcttttttcaggcagacacctggctgcg

SEQ ID NO: 100812 - DNA, 70 bp, Homo sapiens
gttacgactttcaaagttttcccttttgtcttttttcaggcagacacctggctgcgggagccactgccaa

SEQ ID NO: 100813 - DNA, 74 bp, Homo sapiens
tttcaaagttttcccttttgtcttttttcaggcagacacctggctgcgggagccactgccaagtctagctgtca

SEQ ID NO: 100814 - DNA, 80 bp, Homo sapiens
ttttgtcttttttcaggcagacacctggctgcgggagccactgccaagtctagctgtcaggttggtctcagagctctgtc

SEQ ID NO: 100815 - DNA, 83 bp, Homo sapiens
tgcgggagccactgccaagtctagctgtcaggttggtctcagagctctgtcttgatccccaccaggtcgcccagcctgcgatc

SEQ ID NO: 100816 - DNA, 80 bp, Homo sapiens
actgccaagtctagctgtcaggttggtctcagagctctgtcttgatccccaccaggtcgcccagcctgcgatcccacctg

SEQ ID NO: 100817 - DNA, 79 bp, Homo sapiens
aggttggtctcagagctctgtcttgatccccaccaggtcgcccagcctgcgatcccacctggcctgctctatctttctg

SEQ ID NO: 100818 - DNA, 82 bp, Homo sapiens
tctcagagctctgtcttgatccccaccaggtcgcccagcctgcgatcccacctggcctgctctatctttctgtgtgctgggg

SEQ ID NO: 100819 - DNA, 80 bp, Homo sapiens
tcttgatccccaccaggtcgcccagcctgcgatcccacctggcctgctctatctttctgtgtgctgggggtcagcagctt

SEQ ID NO: 100820 - DNA, 80 bp, Homo sapiens
accaggtcgcccagcctgcgatcccacctggcctgctctatctttctgtgtgctgggggtcagcagctttgcacgaggtg

SEQ ID NO: 100821 - DNA, 82 bp, Homo sapiens
cagcctgcgatcccacctggcctgctctatctttctgtgtgctgggggtcagcagctttgcacgaggtgtcctaagaattca

SEQ ID NO: 100822 - DNA, 79 bp, Homo sapiens
atcccacctggcctgctctatctttctgtgtgctgggggtcagcagctttgcacgaggtgtcctaagaattcactctcc

SEQ ID NO: 100823 - DNA, 81 bp, Homo sapiens
tatctttctgtgtgctgggggtcagcagctttgcacgaggtgtcctaagaattcactctccctctgcctccagctgtttca

SEQ ID NO: 100824 - DNA, 80 bp, Homo sapiens
tgctgggggtcagcagctttgcacgaggtgtcctaagaattcactctccctctgcctccagctgtttcatcagtgaccct

SEQ ID NO: 100825 - DNA, 78 bp, Homo sapiens
agcagctttgcacgaggtgtcctaagaattcactctccctctgcctccagctgtttcatcagtgaccctttggacagt

SEQ ID NO: 100826 - DNA, 77 bp, Homo sapiens
ttgcacgaggtgtcctaagaattcactctccctctgcctccagctgtttcatcagtgaccctttggacagttagtta

SEQ ID NO: 100827 - DNA, 77 bp, Homo sapiens
tcctaagaattcactctccctctgcctccagctgtttcatcagtgaccctttggacagttagttatgagtgaccttg

SEQ ID NO: 100828 - DNA, 77 bp, Homo sapiens
aattcactctccctctgcctccagctgtttcatcagtgaccctttggacagttagttatgagtgaccttggacttca

SEQ ID NO: 100829 - DNA, 78 bp, Homo sapiens
tctgcctccagctgtttcatcagtgaccctttggacagttagttatgagtgaccttggacttcagtattcaaaggtgc

SEQ ID NO: 100830 - DNA, 74 bp, Homo sapiens
agctgtttcatcagtgaccctttggacagttagttatgagtgaccttggacttcagtattcaaaggtgccctcc

SEQ ID NO: 100831 - DNA, 73 bp, Homo sapiens
atcagtgaccctttggacagttagttatgagtgaccttggacttcagtattcaaaggtgccctcctctctccc

SEQ ID NO: 100832 - DNA, 73 bp, Homo sapiens
ttagttatgagtgaccttggacttcagtattcaaaggtgccctcctctctcccttaagccttcacagagcctt

SEQ ID NO: 100833 - DNA, 73 bp, Homo sapiens
agtgaccttggacttcagtattcaaaggtgccctcctctctcccttaagccttcacagagcctttcgtgctac

SEQ ID NO: 100834 - DNA, 73 bp, Homo sapiens
acttcagtattcaaaggtgccctcctctctcccttaagccttcacagagcctttcgtgctaccctactgactg

SEQ ID NO: 100835 - DNA, 75 bp, Homo sapiens
tcctctctcccttaagccttcacagagcctttcgtgctaccctactgactgggacattccattctgctttcaccc

SEQ ID NO: 100836 - DNA, 74 bp, Homo sapiens
ttcacagagcctttcgtgctaccctactgactgggacattccattctgctttcacccctccccctctaccatcc

SEQ ID NO: 100837 - DNA, 73 bp, Homo sapiens
ctttcgtgctaccctactgactgggacattccattctgctttcacccctccccctctaccatcccaaggctga

SEQ ID NO: 100838 - DNA, 73 bp, Homo sapiens
ggacattccattctgctttcacccctccccctctaccatcccaaggctgagtccagagggagtgggacattaa

SEQ ID NO: 100839 - DNA, 73 bp, Homo sapiens
ttccattctgctttcacccctccccctctaccatcccaaggctgagtccagagggagtgggacattaaacaca

SEQ ID NO: 100840 - DNA, 67 bp, Homo sapiens
acccctccccctctaccatcccaaggctgagtccagagggagtgggacattaaacacaccttaaaat

SEQ ID NO: 100841 - DNA, 71 bp, Homo sapiens
ctctaccatcccaaggctgagtccagagggagtgggacattaaacacaccttaaaatttgctaggaagttg

SEQ ID NO: 100842 - DNA, 72 bp, Homo sapiens
atcccaaggctgagtccagagggagtgggacattaaacacaccttaaaatttgctaggaagttgtcagaggc

SEQ ID NO: 100843 - DNA, 72 bp, Homo sapiens
agtccagagggagtgggacattaaacacaccttaaaatttgctaggaagttgtcagaggctgcacctgggaa

SEQ ID NO: 100844 - DNA, 71 bp, Homo sapiens
agggagtgggacattaaacacaccttaaaatttgctaggaagttgtcagaggctgcacctgggaagaaagc

SEQ ID NO: 100845 - DNA, 73 bp, Homo sapiens
attaaacacaccttaaaatttgctaggaagttgtcagaggctgcacctgggaagaaagccactctgcggaaca

SEQ ID NO: 100846 - DNA, 78 bp, Homo sapiens
ttaaaatttgctaggaagttgtcagaggctgcacctgggaagaaagccactctgcggaacactcatccaggctctcat

SEQ ID NO: 100847 - DNA, 79 bp, Homo sapiens
aagttgtcagaggctgcacctgggaagaaagccactctgcggaacactcatccaggctctcatttcccagcttcttgtc

SEQ ID NO: 100848 - DNA, 77 bp, Homo sapiens
tgcacctgggaagaaagccactctgcggaacactcatccaggctctcatttcccagcttcttgtctgggttggaaaa

SEQ ID NO: 100849 - DNA, 77 bp, Homo sapiens
aagaaagccactctgcggaacactcatccaggctctcatttcccagcttcttgtctgggttggaaaacaatgagaca

SEQ ID NO: 100850 - DNA, 77 bp, Homo sapiens
actcatccaggctctcatttcccagcttcttgtctgggttggaaaacaatgagacatctgccctgaatgcccacctt

SEQ ID NO: 100851 - DNA, 79 bp, Homo sapiens
tgtctgggttggaaaacaatgagacatctgccctgaatgcccaccttttccatcagtggcagtaggcacataagtctta

SEQ ID NO: 100852 - DNA, 79 bp, Homo sapiens
ttggaaaacaatgagacatctgccctgaatgcccaccttttccatcagtggcagtaggcacataagtcttaggtgagta

SEQ ID NO: 100853 - DNA, 80 bp, Homo sapiens
acaatgagacatctgccctgaatgcccaccttttccatcagtggcagtaggcacataagtcttaggtgagtacctgtcac

SEQ ID NO: 100854 - DNA, 74 bp, Homo sapiens
aatgcccaccttttccatcagtggcagtaggcacataagtcttaggtgagtacctgtcacccaccccgcccaca

SEQ ID NO: 100855 - DNA, 76 bp, Homo sapiens
ttttccatcagtggcagtaggcacataagtcttaggtgagtacctgtcacccaccccgcccacactccctgtgcag

SEQ ID NO: 100856 - DNA, 74 bp, Homo sapiens
acataagtcttaggtgagtacctgtcacccaccccgcccacactccctgtgcaggcccctgttcctctagctca

SEQ ID NO: 100857 - DNA, 74 bp, Homo sapiens
ttaggtgagtacctgtcacccaccccgcccacactccctgtgcaggcccctgttcctctagctcatgcccctaa

SEQ ID NO: 100858 - DNA, 75 bp, Homo sapiens
tacctgtcacccaccccgcccacactccctgtgcaggcccctgttcctctagctcatgcccctaagcctcttaga

SEQ ID NO: 100859 - DNA, 78 bp, Homo sapiens
ccgcccacactccctgtgcaggcccctgttcctctagctcatgcccctaagcctcttagaggtggatgaatcctggca

SEQ ID NO: 100860 - DNA, 77 bp, Homo sapiens
acactccctgtgcaggcccctgttcctctagctcatgcccctaagcctcttagaggtggatgaatcctggcaagtcc

SEQ ID NO: 100861 - DNA, 74 bp, Homo sapiens
aggcccctgttcctctagctcatgcccctaagcctcttagaggtggatgaatcctggcaagtcccctaggatac

SEQ ID NO: 100862 - DNA, 72 bp, Homo sapiens
atgcccctaagcctcttagaggtggatgaatcctggcaagtcccctaggatacctccacttcctaggaatcc

SEQ ID NO: 100863 - DNA, 71 bp, Homo sapiens
taagcctcttagaggtggatgaatcctggcaagtcccctaggatacctccacttcctaggaatccctttta

SEQ ID NO: 100864 - DNA, 71 bp, Homo sapiens
ttagaggtggatgaatcctggcaagtcccctaggatacctccacttcctaggaatcccttttacccactca

SEQ ID NO: 100865 - DNA, 71 bp, Homo sapiens
atgaatcctggcaagtcccctaggatacctccacttcctaggaatcccttttacccactcagcgatttcta

SEQ ID NO: 100866 - DNA, 68 bp, Homo sapiens
aagtcccctaggatacctccacttcctaggaatcccttttacccactcagcgatttctagaggggtga

SEQ ID NO: 100867 - DNA, 71 bp, Homo sapiens
taggatacctccacttcctaggaatcccttttacccactcagcgatttctagaggggtgatgctttagccc

SEQ ID NO: 100868 - DNA, 72 bp, Homo sapiens
acttcctaggaatcccttttacccactcagcgatttctagaggggtgatgctttagccccagagaatcacca

SEQ ID NO: 100869 - DNA, 78 bp, Homo sapiens
ttacccactcagcgatttctagaggggtgatgctttagccccagagaatcaccagcaggaatagcagagcctttggtc

SEQ ID NO: 100870 - DNA, 77 bp, Homo sapiens
ggtgatgctttagccccagagaatcaccagcaggaatagcagagcctttggtcggaaagagcttttgtactcttgtg

SEQ ID NO: 100871 - DNA, 75 bp, Homo sapiens
ttagccccagagaatcaccagcaggaatagcagagcctttggtcggaaagagcttttgtactcttgtgggtggta

SEQ ID NO: 100872 - DNA, 73 bp, Homo sapiens
agaatcaccagcaggaatagcagagcctttggtcggaaagagcttttgtactcttgtgggtggtaacaggaaa

SEQ ID NO: 100873 - DNA, 74 bp, Homo sapiens
accagcaggaatagcagagcctttggtcggaaagagcttttgtactcttgtgggtggtaacaggaaagcaagca

SEQ ID NO: 100874 - DNA, 73 bp, Homo sapiens
atagcagagcctttggtcggaaagagcttttgtactcttgtgggtggtaacaggaaagcaagcactcactggg

SEQ ID NO: 100875 - DNA, 73 bp, Homo sapiens
ttggtcggaaagagcttttgtactcttgtgggtggtaacaggaaagcaagcactcactgggtccacctgtgta

SEQ ID NO: 100876 - DNA, 72 bp, Homo sapiens
aagagcttttgtactcttgtgggtggtaacaggaaagcaagcactcactgggtccacctgtgtatggggctt

SEQ ID NO: 100877 - DNA, 72 bp, Homo sapiens
aaagcaagcactcactgggtccacctgtgtatggggctttcctactctgggccttcccgaaccatggtccta

SEQ ID NO: 100878 - DNA, 71 bp, Homo sapiens
actcactgggtccacctgtgtatggggctttcctactctgggccttcccgaaccatggtcctacagtggcc

SEQ ID NO: 100879 - DNA, 75 bp, Homo sapiens
cacctgtgtatggggctttcctactctgggccttcccgaaccatggtcctacagtggcctctcaggtgacatgaa

SEQ ID NO: 100880 - DNA, 75 bp, Homo sapiens
gtgtatggggctttcctactctgggccttcccgaaccatggtcctacagtggcctctcaggtgacatgaagtaca

SEQ ID NO: 100881 - DNA, 76 bp, Homo sapiens
tttcctactctgggccttcccgaaccatggtcctacagtggcctctcaggtgacatgaagtacaggtcatgtcacc

SEQ ID NO: 100882 - DNA, 73 bp, Homo sapiens
cctgaggtcaggtggcattttcttaagcctgttttctaaggcaaatgcctcctacttgaaactagaaggcaga

SEQ ID NO: 100883 - DNA, 71 bp, Homo sapiens
attttcttaagcctgttttctaaggcaaatgcctcctacttgaaactagaaggcagataggttgagctccc

SEQ ID NO: 100884 - DNA, 73 bp, Homo sapiens
agcctgttttctaaggcaaatgcctcctacttgaaactagaaggcagataggttgagctcccctctttgctcc

SEQ ID NO: 100885 - DNA, 77 bp, Homo sapiens
ctaaggcaaatgcctcctacttgaaactagaaggcagataggttgagctcccctctttgctccggcagcagtggcca

SEQ ID NO: 100886 - DNA, 77 bp, Homo sapiens
cctcctacttgaaactagaaggcagataggttgagctcccctctttgctccggcagcagtggccaccttgctcttgc

SEQ ID NO: 100887 - DNA, 78 bp, Homo sapiens
aaggcagataggttgagctcccctctttgctccggcagcagtggccaccttgctcttgcccctgtgtcactgccctgg

SEQ ID NO: 100888 - DNA, 79 bp, Homo sapiens
cagcagtggccaccttgctcttgcccctgtgtcactgccctggggcctttgcacttactgtttcctctgctcaggaagc

SEQ ID NO: 100889 - DNA, 76 bp, Homo sapiens
ccaccttgctcttgcccctgtgtcactgccctggggcctttgcacttactgtttcctctgctcaggaagctcttcc

SEQ ID NO: 100890 - DNA, 77 bp, Homo sapiens
ctcttgcccctgtgtcactgccctggggcctttgcacttactgtttcctctgctcaggaagctcttccctgagatcc

SEQ ID NO: 100891 - DNA, 77 bp, Homo sapiens
tgcacttactgtttcctctgctcaggaagctcttccctgagatccctgtggacctgatccctcccacccttcaagta

SEQ ID NO: 100892 - DNA, 79 bp, Homo sapiens
tctgctcaggaagctcttccctgagatccctgtggacctgatccctcccacccttcaagtatttgctgaaatgtcatct

SEQ ID NO: 100893 - DNA, 75 bp, Homo sapiens
agatccctgtggacctgatccctcccacccttcaagtatttgctgaaatgtcatcttctccctgaggagttcctg

SEQ ID NO: 100894 - DNA, 76 bp, Homo sapiens
tgtggacctgatccctcccacccttcaagtatttgctgaaatgtcatcttctccctgaggagttcctggagatccc

SEQ ID NO: 100895 - DNA, 74 bp, Homo sapiens
tcccacccttcaagtatttgctgaaatgtcatcttctccctgaggagttcctggagatccccttttaagttgca

SEQ ID NO: 100896 - DNA, 76 bp, Homo sapiens
ttcaagtatttgctgaaatgtcatcttctccctgaggagttcctggagatccccttttaagttgcagactatccca

SEQ ID NO: 100897 - DNA, 77 bp, Homo sapiens
atttgctgaaatgtcatcttctccctgaggagttcctggagatccccttttaagttgcagactatcccacatccagc

SEQ ID NO: 100898 - DNA, 76 bp, Homo sapiens
atgtcatcttctccctgaggagttcctggagatccccttttaagttgcagactatcccacatccagccagtcccta

SEQ ID NO: 100899 - DNA, 74 bp, Homo sapiens
tgaggagttcctggagatccccttttaagttgcagactatcccacatccagccagtccctagccctttggctta

SEQ ID NO: 100900 - DNA, 71 bp, Homo sapiens
ttcctggagatccccttttaagttgcagactatcccacatccagccagtccctagccctttggcttaggtt

SEQ ID NO: 100901 - DNA, 74 bp, Homo sapiens
ccttttaagttgcagactatcccacatccagccagtccctagccctttggcttaggttttctccatagcacatg

SEQ ID NO: 100902 - DNA, 74 bp, Homo sapiens
actatcccacatccagccagtccctagccctttggcttaggttttctccatagcacatgttaatgttatccagg

SEQ ID NO: 100903 - DNA, 76 bp, Homo sapiens
tagccctttggcttaggttttctccatagcacatgttaatgttatccagggtctgtctgcacccatgggactgtaa

SEQ ID NO: 100904 - DNA, 75 bp, Homo sapiens
cttaggttttctccatagcacatgttaatgttatccagggtctgtctgcacccatgggactgtaaagtctacaaa

SEQ ID NO: 100905 - DNA, 77 bp, Homo sapiens
tctccatagcacatgttaatgttatccagggtctgtctgcacccatgggactgtaaagtctacaaagacagggattt

SEQ ID NO: 100906 - DNA, 73 bp, Homo sapiens
acatgttaatgttatccagggtctgtctgcacccatgggactgtaaagtctacaaagacagggattttgtatt

SEQ ID NO: 100907 - DNA, 72 bp, Homo sapiens
taatgttatccagggtctgtctgcacccatgggactgtaaagtctacaaagacagggattttgtattttttc

SEQ ID NO: 100908 - DNA, 75 bp, Homo sapiens
agggtctgtctgcacccatgggactgtaaagtctacaaagacagggattttgtattttttctgcacagccatgtc

SEQ ID NO: 100909 - DNA, 75 bp, Homo sapiens
acccatgggactgtaaagtctacaaagacagggattttgtattttttctgcacagccatgtctccagcacctata

SEQ ID NO: 100910 - DNA, 73 bp, Homo sapiens
actgtaaagtctacaaagacagggattttgtattttttctgcacagccatgtctccagcacctataaaaccaa

SEQ ID NO: 100911 - DNA, 76 bp, Homo sapiens
ggattttgtattttttctgcacagccatgtctccagcacctataaaaccaactggagcctaggaggctcactaatg

SEQ ID NO: 100912 - DNA, 80 bp, Homo sapiens
tattttttctgcacagccatgtctccagcacctataaaaccaactggagcctaggaggctcactaatgttggctgaatga

SEQ ID NO: 100913 - DNA, 80 bp, Homo sapiens
tgaatgaatgagtactcaggtccttcatgattggtgctgtccaatcaccctccactaggttgtgggaaagcagaaatcat

SEQ ID NO: 100914 - DNA, 78 bp, Homo sapiens
aatgagtactcaggtccttcatgattggtgctgtccaatcaccctccactaggttgtgggaaagcagaaatcatttca

SEQ ID NO: 100915 - DNA, 76 bp, Homo sapiens
tccttcatgattggtgctgtccaatcaccctccactaggttgtgggaaagcagaaatcatttcaggtgaaggaagt

SEQ ID NO: 100916 - DNA, 74 bp, Homo sapiens
ttggtgctgtccaatcaccctccactaggttgtgggaaagcagaaatcatttcaggtgaaggaagttgtaatta

SEQ ID NO: 100917 - DNA, 70 bp, Homo sapiens
tccaatcaccctccactaggttgtgggaaagcagaaatcatttcaggtgaaggaagttgtaattaaagtt

SEQ ID NO: 100918 - DNA, 72 bp, Homo sapiens
tccactaggttgtgggaaagcagaaatcatttcaggtgaaggaagttgtaattaaagttttcagctgaaatg

SEQ ID NO: 100919 - DNA, 70 bp, Homo sapiens
aggttgtgggaaagcagaaatcatttcaggtgaaggaagttgtaattaaagttttcagctgaaatgtaac

SEQ ID NO: 100920 - DNA, 71 bp, Homo sapiens
gcagaaatcatttcaggtgaaggaagttgtaattaaagttttcagctgaaatgtaactacagaaaaacttc

SEQ ID NO: 100921 - DNA, 70 bp, Homo sapiens
ttcaggtgaaggaagttgtaattaaagttttcagctgaaatgtaactacagaaaaacttcttgttgagaa

SEQ ID NO: 100922 - DNA, 68 bp, Homo sapiens
gtgaaggaagttgtaattaaagttttcagctgaaatgtaactacagaaaaacttcttgttgagaaaaa

SEQ ID NO: 100923 - DNA, 71 bp, Homo sapiens
attaaagttttcagctgaaatgtaactacagaaaaacttcttgttgagaaaaaatacaatatcataactga

SEQ ID NO: 100924 - DNA, 77 bp, Homo sapiens
ttcagctgaaatgtaactacagaaaaacttcttgttgagaaaaaatacaatatcataactgagcagtttcatgagaa

SEQ ID NO: 100925 - DNA, 76 bp, Homo sapiens
atgtaactacagaaaaacttcttgttgagaaaaaatacaatatcataactgagcagtttcatgagaattgtctcat

SEQ ID NO: 100926 - DNA, 77 bp, Homo sapiens
cagaaaaacttcttgttgagaaaaaatacaatatcataactgagcagtttcatgagaattgtctcattagaagttga

SEQ ID NO: 100927 - DNA, 78 bp, Homo sapiens
ttcttgttgagaaaaaatacaatatcataactgagcagtttcatgagaattgtctcattagaagttgaatcagtccgg

SEQ ID NO: 100928 - DNA, 80 bp, Homo sapiens
ttgagaaaaaatacaatatcataactgagcagtttcatgagaattgtctcattagaagttgaatcagtccgggcctgatg

SEQ ID NO: 100929 - DNA, 81 bp, Homo sapiens
aaaaatacaatatcataactgagcagtttcatgagaattgtctcattagaagttgaatcagtccgggcctgatggctcatc

SEQ ID NO: 100930 - DNA, 81 bp, Homo sapiens
aaaatacaatatcataactgagcagtttcatgagaattgtctcattagaagttgaatcagtccgggcctgatggctcatcc

SEQ ID NO: 100931 - DNA, 84 bp, Homo sapiens
acaatatcataactgagcagtttcatgagaattgtctcattagaagttgaatcagtccgggcctgatggctcatcccagcactc

SEQ ID NO: 100932 - DNA, 67 bp, Homo sapiens
aaaaattaaatcaatcaggaaaactcatttattttcatagtgaaaaatcaaaaagaataggtcaaag

SEQ ID NO: 100933 - DNA, 72 bp, Homo sapiens
tcaatcaggaaaactcatttattttcatagtgaaaaatcaaaaagaataggtcaaaggctcttttgctgagt

SEQ ID NO: 100934 - DNA, 73 bp, Homo sapiens
aaactcatttattttcatagtgaaaaatcaaaaagaataggtcaaaggctcttttgctgagttgagagtggca

SEQ ID NO: 100935 - DNA, 76 bp, Homo sapiens
ttattttcatagtgaaaaatcaaaaagaataggtcaaaggctcttttgctgagttgagagtggcactctgacataa

SEQ ID NO: 100936 - DNA, 76 bp, Homo sapiens
atagtgaaaaatcaaaaagaataggtcaaaggctcttttgctgagttgagagtggcactctgacataagcaaagtc

SEQ ID NO: 100937 - DNA, 76 bp, Homo sapiens
aaatcaaaaagaataggtcaaaggctcttttgctgagttgagagtggcactctgacataagcaaagtccaccagct

SEQ ID NO: 100938 - DNA, 77 bp, Homo sapiens
aatcaaaaagaataggtcaaaggctcttttgctgagttgagagtggcactctgacataagcaaagtccaccagcttc

SEQ ID NO: 100939 - DNA, 77 bp, Homo sapiens
aaagaataggtcaaaggctcttttgctgagttgagagtggcactctgacataagcaaagtccaccagcttctcctgt

SEQ ID NO: 100940 - DNA, 77 bp, Homo sapiens
aataggtcaaaggctcttttgctgagttgagagtggcactctgacataagcaaagtccaccagcttctcctgtttct

SEQ ID NO: 100941 - DNA, 78 bp, Homo sapiens
aaaggctcttttgctgagttgagagtggcactctgacataagcaaagtccaccagcttctcctgtttctttgtagtga

SEQ ID NO: 100942 - DNA, 79 bp, Homo sapiens
aggctcttttgctgagttgagagtggcactctgacataagcaaagtccaccagcttctcctgtttctttgtagtgagta

SEQ ID NO: 100943 - DNA, 78 bp, Homo sapiens
ttttgctgagttgagagtggcactctgacataagcaaagtccaccagcttctcctgtttctttgtagtgagtaccctc

SEQ ID NO: 100944 - DNA, 79 bp, Homo sapiens
ctgagttgagagtggcactctgacataagcaaagtccaccagcttctcctgtttctttgtagtgagtaccctctcacac

SEQ ID NO: 100945 - DNA, 80 bp, Homo sapiens
gttgagagtggcactctgacataagcaaagtccaccagcttctcctgtttctttgtagtgagtaccctctcacacgcaca

SEQ ID NO: 100946 - DNA, 80 bp, Homo sapiens
agtggcactctgacataagcaaagtccaccagcttctcctgtttctttgtagtgagtaccctctcacacgcacacacaga

SEQ ID NO: 100947 - DNA, 82 bp, Homo sapiens
tctgacataagcaaagtccaccagcttctcctgtttctttgtagtgagtaccctctcacacgcacacacagagagacataca

SEQ ID NO: 100948 - DNA, 78 bp, Homo sapiens
ataagcaaagtccaccagcttctcctgtttctttgtagtgagtaccctctcacacgcacacacagagagacatacaaa

SEQ ID NO: 100949 - DNA, 80 bp, Homo sapiens
accagcttctcctgtttctttgtagtgagtaccctctcacacgcacacacagagagacatacaaaaacacagatggcaca

SEQ ID NO: 100950 - DNA, 86 bp, Homo sapiens
atacacacatacagacatgcatggacaaacatacacacggacacagccatacacataaaaacatacagatgcagctgggcgcggtg

SEQ ID NO: 100951 - DNA, 85 bp, Homo sapiens
cacacacagatataaaacacacatggggatacacacatataaatacacacagacacatgtacatacgtcacacagacacatatat

SEQ ID NO: 100952 - DNA, 83 bp, Homo sapiens
agatataaaacacacatggggatacacacatataaatacacacagacacatgtacatacgtcacacagacacatatattaaga

SEQ ID NO: 100953 - DNA, 87 bp, Homo sapiens
aacacacatggggatacacacatataaatacacacagacacatgtacatacgtcacacagacacatatattaagacatgcacagaca

SEQ ID NO: 100954 - DNA, 90 bp, Homo sapiens
atatacatatatcacacagggacacacatgcatatacacacaggcagatatacagacatggggacacatatatacaaacatacacacata

SEQ ID NO: 100955 - DNA, 91 bp, Homo sapiens
tatatcacacagggacacacatgcatatacacacaggcagatatacagacatggggacacatatatacaaacatacacacatactgacata

SEQ ID NO: 100956 - DNA, 89 bp, Homo sapiens
agggacacacatgcatatacacacaggcagatatacagacatggggacacatatatacaaacatacacacatactgacatacacacata

SEQ ID NO: 100957 - DNA, 81 bp, Homo sapiens
cacacacacacaccgttctgtgatcgccctcaggacatgggccaagacaagtgtagcaagcaacagtcaatggacaggaaa

SEQ ID NO: 100958 - DNA, 79 bp, Homo sapiens
acacacaccgttctgtgatcgccctcaggacatgggccaagacaagtgtagcaagcaacagtcaatggacaggaaaggc

SEQ ID NO: 100959 - DNA, 81 bp, Homo sapiens
ttctgtgatcgccctcaggacatgggccaagacaagtgtagcaagcaacagtcaatggacaggaaaggctggccaacgcca

SEQ ID NO: 100960 - DNA, 81 bp, Homo sapiens
tcaggacatgggccaagacaagtgtagcaagcaacagtcaatggacaggaaaggctggccaacgccaaggcaagatcaaca

SEQ ID NO: 100961 - DNA, 78 bp, Homo sapiens
acatgggccaagacaagtgtagcaagcaacagtcaatggacaggaaaggctggccaacgccaaggcaagatcaacaac

SEQ ID NO: 100962 - DNA, 79 bp, Homo sapiens
gccaagacaagtgtagcaagcaacagtcaatggacaggaaaggctggccaacgccaaggcaagatcaacaaccaataca

SEQ ID NO: 100963 - DNA, 77 bp, Homo sapiens
agtgtagcaagcaacagtcaatggacaggaaaggctggccaacgccaaggcaagatcaacaaccaatacaacttcaa

SEQ ID NO: 100964 - DNA, 79 bp, Homo sapiens
tgtagcaagcaacagtcaatggacaggaaaggctggccaacgccaaggcaagatcaacaaccaatacaacttcaagcca

SEQ ID NO: 100965 - DNA, 77 bp, Homo sapiens
aagcaacagtcaatggacaggaaaggctggccaacgccaaggcaagatcaacaaccaatacaacttcaagccagaga

SEQ ID NO: 100966 - DNA, 77 bp, Homo sapiens
aacagtcaatggacaggaaaggctggccaacgccaaggcaagatcaacaaccaatacaacttcaagccagagacgca

SEQ ID NO: 100967 - DNA, 78 bp, Homo sapiens
gtcaatggacaggaaaggctggccaacgccaaggcaagatcaacaaccaatacaacttcaagccagagacgcacacag

SEQ ID NO: 100968 - DNA, 77 bp, Homo sapiens
acaggaaaggctggccaacgccaaggcaagatcaacaaccaatacaacttcaagccagagacgcacacaggcctgcc

SEQ ID NO: 100969 - DNA, 76 bp, Homo sapiens
aggaaaggctggccaacgccaaggcaagatcaacaaccaatacaacttcaagccagagacgcacacaggcctgccc

SEQ ID NO: 100970 - DNA, 76 bp, Homo sapiens
aggctggccaacgccaaggcaagatcaacaaccaatacaacttcaagccagagacgcacacaggcctgcccctccc

SEQ ID NO: 100971 - DNA, 77 bp, Homo sapiens
aagatcaacaaccaatacaacttcaagccagagacgcacacaggcctgcccctccccagcccccctgcaccatgcgc

SEQ ID NO: 100972 - DNA, 77 bp, Homo sapiens
accaatacaacttcaagccagagacgcacacaggcctgcccctccccagcccccctgcaccatgcgcccaagactca

SEQ ID NO: 100973 - DNA, 76 bp, Homo sapiens
ttcaagccagagacgcacacaggcctgcccctccccagcccccctgcaccatgcgcccaagactcacgggacaaaa

SEQ ID NO: 100974 - DNA, 70 bp, Homo sapiens
ctgcccctccccagcccccctgcaccatgcgcccaagactcacgggacaaaaacccaaacaaaactctgc

SEQ ID NO: 100975 - DNA, 72 bp, Homo sapiens
ccagcccccctgcaccatgcgcccaagactcacgggacaaaaacccaaacaaaactctgctccctgagtcca

SEQ ID NO: 100976 - DNA, 76 bp, Homo sapiens
ctgcaccatgcgcccaagactcacgggacaaaaacccaaacaaaactctgctccctgagtccagggctcattgcca

SEQ ID NO: 100977 - DNA, 72 bp, Homo sapiens
tcacgggacaaaaacccaaacaaaactctgctccctgagtccagggctcattgccacgagcagtggagtttt

SEQ ID NO: 100978 - DNA, 74 bp, Homo sapiens
aaacccaaacaaaactctgctccctgagtccagggctcattgccacgagcagtggagtttttcgcccactcaca

SEQ ID NO: 100979 - DNA, 77 bp, Homo sapiens
tccctgagtccagggctcattgccacgagcagtggagtttttcgcccactcacatgagactcgggcctctcctaaaa

SEQ ID NO: 100980 - DNA, 79 bp, Homo sapiens
agtccagggctcattgccacgagcagtggagtttttcgcccactcacatgagactcgggcctctcctaaaagcagagca

SEQ ID NO: 100981 - DNA, 78 bp, Homo sapiens
attgccacgagcagtggagtttttcgcccactcacatgagactcgggcctctcctaaaagcagagcactcaaaatcta

SEQ ID NO: 100982 - DNA, 77 bp, Homo sapiens
agtggagtttttcgcccactcacatgagactcgggcctctcctaaaagcagagcactcaaaatctaaatctgccatc

SEQ ID NO: 100983 - DNA, 75 bp, Homo sapiens
agtttttcgcccactcacatgagactcgggcctctcctaaaagcagagcactcaaaatctaaatctgccatcccc

SEQ ID NO: 100984 - DNA, 78 bp, Homo sapiens
actcacatgagactcgggcctctcctaaaagcagagcactcaaaatctaaatctgccatccccggtcgccagggctca

SEQ ID NO: 100985 - DNA, 76 bp, Homo sapiens
tcgggcctctcctaaaagcagagcactcaaaatctaaatctgccatccccggtcgccagggctcactgtccatttc

SEQ ID NO: 100986 - DNA, 78 bp, Homo sapiens
aagcagagcactcaaaatctaaatctgccatccccggtcgccagggctcactgtccatttctgtctggtgactaagga

SEQ ID NO: 100987 - DNA, 72 bp, Homo sapiens
aaaatctaaatctgccatccccggtcgccagggctcactgtccatttctgtctggtgactaaggaggtaact

SEQ ID NO: 100988 - DNA, 76 bp, Homo sapiens
cccggtcgccagggctcactgtccatttctgtctggtgactaaggaggtaacttgagctcagggcagagaagccac

SEQ ID NO: 100989 - DNA, 80 bp, Homo sapiens
tgtccatttctgtctggtgactaaggaggtaacttgagctcagggcagagaagccacctgctggcttttgctcttgacca

SEQ ID NO: 100990 - DNA, 79 bp, Homo sapiens
ctgtctggtgactaaggaggtaacttgagctcagggcagagaagccacctgctggcttttgctcttgaccagaggtagc

SEQ ID NO: 100991 - DNA, 77 bp, Homo sapiens
actaaggaggtaacttgagctcagggcagagaagccacctgctggcttttgctcttgaccagaggtagccctctgtg

SEQ ID NO: 100992 - DNA, 77 bp, Homo sapiens
aacttgagctcagggcagagaagccacctgctggcttttgctcttgaccagaggtagccctctgtgggggaagtgga

SEQ ID NO: 100993 - DNA, 76 bp, Homo sapiens
gcagagaagccacctgctggcttttgctcttgaccagaggtagccctctgtgggggaagtggaggcagtttcttaa

SEQ ID NO: 100994 - DNA, 74 bp, Homo sapiens
cttttgctcttgaccagaggtagccctctgtgggggaagtggaggcagtttcttaagaagggtgcagacagctc

SEQ ID NO: 100995 - DNA, 70 bp, Homo sapiens
tagccctctgtgggggaagtggaggcagtttcttaagaagggtgcagacagctcccaaattcaaggtttt

SEQ ID NO: 100996 - DNA, 70 bp, Homo sapiens
tgggggaagtggaggcagtttcttaagaagggtgcagacagctcccaaattcaaggtttttcttcttcta

SEQ ID NO: 100997 - DNA, 72 bp, Homo sapiens
tggaggcagtttcttaagaagggtgcagacagctcccaaattcaaggtttttcttcttctaccagcctataa

SEQ ID NO: 100998 - DNA, 71 bp, Homo sapiens
ttcttaagaagggtgcagacagctcccaaattcaaggtttttcttcttctaccagcctataatcccaaata

SEQ ID NO: 100999 - DNA, 72 bp, Homo sapiens
agaagggtgcagacagctcccaaattcaaggtttttcttcttctaccagcctataatcccaaatattagcaa

SEQ ID NO: 101000 - DNA, 69 bp, Homo sapiens
acagctcccaaattcaaggtttttcttcttctaccagcctataatcccaaatattagcaaccctcccta

SEQ ID NO: 101001 - DNA, 66 bp, Homo sapiens
aattcaaggtttttcttcttctaccagcctataatcccaaatattagcaaccctccctaggttaag

SEQ ID NO: 101002 - DNA, 69 bp, Homo sapiens
tttttcttcttctaccagcctataatcccaaatattagcaaccctccctaggttaaggtcttatctcaa

SEQ ID NO: 101003 - DNA, 68 bp, Homo sapiens
ttctaccagcctataatcccaaatattagcaaccctccctaggttaaggtcttatctcaaggaaaccc

SEQ ID NO: 101004 - DNA, 67 bp, Homo sapiens
tattagcaaccctccctaggttaaggtcttatctcaaggaaacccccagttacagcgtaactgaaaa

SEQ ID NO: 101005 - DNA, 64 bp, Homo sapiens
aaccctccctaggttaaggtcttatctcaaggaaacccccagttacagcgtaactgaaaagtaa

SEQ ID NO: 101006 - DNA, 68 bp, Homo sapiens
ttaaggtcttatctcaaggaaacccccagttacagcgtaactgaaaagtaaccagagagtggtaacca

SEQ ID NO: 101007 - DNA, 71 bp, Homo sapiens
ttatctcaaggaaacccccagttacagcgtaactgaaaagtaaccagagagtggtaaccaccagtgacatg

SEQ ID NO: 101008 - DNA, 70 bp, Homo sapiens
aaacccccagttacagcgtaactgaaaagtaaccagagagtggtaaccaccagtgacatggatttgttga

SEQ ID NO: 101009 - DNA, 79 bp, Homo sapiens
taaccagagagtggtaaccaccagtgacatggatttgttgatcagagtagctcctgcccagggacagactctaaagaga

SEQ ID NO: 101010 - DNA, 80 bp, Homo sapiens
accagtgacatggatttgttgatcagagtagctcctgcccagggacagactctaaagagaaggcgacttgcagaagagaa

SEQ ID NO: 101011 - DNA, 76 bp, Homo sapiens
atttgttgatcagagtagctcctgcccagggacagactctaaagagaaggcgacttgcagaagagaaagaaagtat

SEQ ID NO: 101012 - DNA, 76 bp, Homo sapiens
atcagagtagctcctgcccagggacagactctaaagagaaggcgacttgcagaagagaaagaaagtattggtggcg

SEQ ID NO: 101013 - DNA, 76 bp, Homo sapiens
tgcccagggacagactctaaagagaaggcgacttgcagaagagaaagaaagtattggtggcgggtggcgcactatg

SEQ ID NO: 101014 - DNA, 79 bp, Homo sapiens
acagactctaaagagaaggcgacttgcagaagagaaagaaagtattggtggcgggtggcgcactatggagatatgagca

SEQ ID NO: 101015 - DNA, 81 bp, Homo sapiens
tctaaagagaaggcgacttgcagaagagaaagaaagtattggtggcgggtggcgcactatggagatatgagcactgactca

SEQ ID NO: 101016 - DNA, 82 bp, Homo sapiens
acttgcagaagagaaagaaagtattggtggcgggtggcgcactatggagatatgagcactgactcacagaacgctgcctgga

SEQ ID NO: 101017 - DNA, 84 bp, Homo sapiens
gagaaagaaagtattggtggcgggtggcgcactatggagatatgagcactgactcacagaacgctgcctggagcttctgacatg

SEQ ID NO: 101018 - DNA, 83 bp, Homo sapiens
agaaagtattggtggcgggtggcgcactatggagatatgagcactgactcacagaacgctgcctggagcttctgacatggctt

SEQ ID NO: 101019 - DNA, 88 bp, Homo sapiens
gtggcgggtggcgcactatggagatatgagcactgactcacagaacgctgcctggagcttctgacatggctttggagttcaggcatca

SEQ ID NO: 101020 - DNA, 87 bp, Homo sapiens
actatggagatatgagcactgactcacagaacgctgcctggagcttctgacatggctttggagttcaggcatcagcagggctagtcc

SEQ ID NO: 101021 - DNA, 86 bp, Homo sapiens
ggagatatgagcactgactcacagaacgctgcctggagcttctgacatggctttggagttcaggcatcagcagggctagtcctggg

SEQ ID NO: 101022 - DNA, 82 bp, Homo sapiens
actgactcacagaacgctgcctggagcttctgacatggctttggagttcaggcatcagcagggctagtcctggggtagacag

SEQ ID NO: 101023 - DNA, 81 bp, Homo sapiens
acagaacgctgcctggagcttctgacatggctttggagttcaggcatcagcagggctagtcctggggtagacaggcaagac

SEQ ID NO: 101024 - DNA, 79 bp, Homo sapiens
ctggagcttctgacatggctttggagttcaggcatcagcagggctagtcctggggtagacaggcaagacctgggggcca

SEQ ID NO: 101025 - DNA, 76 bp, Homo sapiens
acatggctttggagttcaggcatcagcagggctagtcctggggtagacaggcaagacctgggggccaggagaagaa

SEQ ID NO: 101026 - DNA, 76 bp, Homo sapiens
tttggagttcaggcatcagcagggctagtcctggggtagacaggcaagacctgggggccaggagaagaagatccag

SEQ ID NO: 101027 - DNA, 77 bp, Homo sapiens
atcagcagggctagtcctggggtagacaggcaagacctgggggccaggagaagaagatccaggaggcgcacacacac

SEQ ID NO: 101028 - DNA, 82 bp, Homo sapiens
acaggcaagacctgggggccaggagaagaagatccaggaggcgcacacacactgcttgcgtgagcatgttaccagcactgag

SEQ ID NO: 101029 - DNA, 85 bp, Homo sapiens
gggccaggagaagaagatccaggaggcgcacacacactgcttgcgtgagcatgttaccagcactgaggctctccacactggcctc

SEQ ID NO: 101030 - DNA, 84 bp, Homo sapiens
aggagaagaagatccaggaggcgcacacacactgcttgcgtgagcatgttaccagcactgaggctctccacactggcctcctaa

SEQ ID NO: 101031 - DNA, 83 bp, Homo sapiens
aggaggcgcacacacactgcttgcgtgagcatgttaccagcactgaggctctccacactggcctcctaacctccctgcaggaa

SEQ ID NO: 101032 - DNA, 83 bp, Homo sapiens
acacacactgcttgcgtgagcatgttaccagcactgaggctctccacactggcctcctaacctccctgcaggaatctcagttc

SEQ ID NO: 101033 - DNA, 80 bp, Homo sapiens
actgcttgcgtgagcatgttaccagcactgaggctctccacactggcctcctaacctccctgcaggaatctcagttcccc

SEQ ID NO: 101034 - DNA, 80 bp, Homo sapiens
atgttaccagcactgaggctctccacactggcctcctaacctccctgcaggaatctcagttcccctcccgcagcagcaga

SEQ ID NO: 101035 - DNA, 83 bp, Homo sapiens
tctccacactggcctcctaacctccctgcaggaatctcagttcccctcccgcagcagcagatctcatacataatgggcagaga

SEQ ID NO: 101036 - DNA, 82 bp, Homo sapiens
actggcctcctaacctccctgcaggaatctcagttcccctcccgcagcagcagatctcatacataatgggcagagacactga

SEQ ID NO: 101037 - DNA, 85 bp, Homo sapiens
taacctccctgcaggaatctcagttcccctcccgcagcagcagatctcatacataatgggcagagacactgagcatgtttggaca

SEQ ID NO: 101038 - DNA, 83 bp, Homo sapiens
gaatctcagttcccctcccgcagcagcagatctcatacataatgggcagagacactgagcatgtttggacaggaccgaggtaa

SEQ ID NO: 101039 - DNA, 81 bp, Homo sapiens
agttcccctcccgcagcagcagatctcatacataatgggcagagacactgagcatgtttggacaggaccgaggtaaaggca

SEQ ID NO: 101040 - DNA, 81 bp, Homo sapiens
cagcagcagatctcatacataatgggcagagacactgagcatgtttggacaggaccgaggtaaaggcagggcccttccaag

SEQ ID NO: 101041 - DNA, 76 bp, Homo sapiens
atctcatacataatgggcagagacactgagcatgtttggacaggaccgaggtaaaggcagggcccttccaaggttg

SEQ ID NO: 101042 - DNA, 73 bp, Homo sapiens
agacactgagcatgtttggacaggaccgaggtaaaggcagggcccttccaaggttgggtgatgcctccataaa

SEQ ID NO: 101043 - DNA, 72 bp, Homo sapiens
tggacaggaccgaggtaaaggcagggcccttccaaggttgggtgatgcctccataaatgctggacaaataaa

SEQ ID NO: 101044 - DNA, 74 bp, Homo sapiens
cgaggtaaaggcagggcccttccaaggttgggtgatgcctccataaatgctggacaaataaatgaatgagtgag

SEQ ID NO: 101045 - DNA, 83 bp, Homo sapiens
aatgaatgaatgagtgagcccctttcctggactagatttattctggaatgctcatccagcagtgtggaggatgatctctcctc

SEQ ID NO: 101046 - DNA, 83 bp, Homo sapiens
atgaatgagtgagcccctttcctggactagatttattctggaatgctcatccagcagtgtggaggatgatctctcctcctctg

SEQ ID NO: 101047 - DNA, 79 bp, Homo sapiens
cctttcctggactagatttattctggaatgctcatccagcagtgtggaggatgatctctcctcctctgtacttctaaaa

SEQ ID NO: 101048 - DNA, 78 bp, Homo sapiens
actagatttattctggaatgctcatccagcagtgtggaggatgatctctcctcctctgtacttctaaaaagagggaag

SEQ ID NO: 101049 - DNA, 77 bp, Homo sapiens
atttattctggaatgctcatccagcagtgtggaggatgatctctcctcctctgtacttctaaaaagagggaaggaaa

SEQ ID NO: 101050 - DNA, 74 bp, Homo sapiens
ctcatccagcagtgtggaggatgatctctcctcctctgtacttctaaaaagagggaaggaaattccctcctatt

SEQ ID NO: 101051 - DNA, 70 bp, Homo sapiens
agtgtggaggatgatctctcctcctctgtacttctaaaaagagggaaggaaattccctcctatttctaaa

SEQ ID NO: 101052 - DNA, 66 bp, Homo sapiens
ctctcctcctctgtacttctaaaaagagggaaggaaattccctcctatttctaaaagccctgcccc

SEQ ID NO: 101053 - DNA, 65 bp, Homo sapiens
tgtacttctaaaaagagggaaggaaattccctcctatttctaaaagccctgccccctgggcctcg

SEQ ID NO: 101054 - DNA, 64 bp, Homo sapiens
gagggaaggaaattccctcctatttctaaaagccctgccccctgggcctcggggactttcccaa

SEQ ID NO: 101055 - DNA, 65 bp, Homo sapiens
aaggaaattccctcctatttctaaaagccctgccccctgggcctcggggactttcccaacagcag

SEQ ID NO: 101056 - DNA, 72 bp, Homo sapiens
tatttctaaaagccctgccccctgggcctcggggactttcccaacagcaggggaacagcatctgactctgac

SEQ ID NO: 101057 - DNA, 74 bp, Homo sapiens
taaaagccctgccccctgggcctcggggactttcccaacagcaggggaacagcatctgactctgacgctctctc

SEQ ID NO: 101058 - DNA, 77 bp, Homo sapiens
cctgggcctcggggactttcccaacagcaggggaacagcatctgactctgacgctctctcctgtcacagacgccaac

SEQ ID NO: 101059 - DNA, 79 bp, Homo sapiens
tcggggactttcccaacagcaggggaacagcatctgactctgacgctctctcctgtcacagacgccaactgaggttcta

SEQ ID NO: 101060 - DNA, 80 bp, Homo sapiens
ggactttcccaacagcaggggaacagcatctgactctgacgctctctcctgtcacagacgccaactgaggttctaggctg

SEQ ID NO: 101061 - DNA, 80 bp, Homo sapiens
tttcccaacagcaggggaacagcatctgactctgacgctctctcctgtcacagacgccaactgaggttctaggctggcct

SEQ ID NO: 101062 - DNA, 81 bp, Homo sapiens
gggaacagcatctgactctgacgctctctcctgtcacagacgccaactgaggttctaggctggccttgcaaagcccttgga

SEQ ID NO: 101063 - DNA, 82 bp, Homo sapiens
aacagcatctgactctgacgctctctcctgtcacagacgccaactgaggttctaggctggccttgcaaagcccttggacaga

SEQ ID NO: 101064 - DNA, 83 bp, Homo sapiens
atctgactctgacgctctctcctgtcacagacgccaactgaggttctaggctggccttgcaaagcccttggacagatggctga

SEQ ID NO: 101065 - DNA, 85 bp, Homo sapiens
tctgactctgacgctctctcctgtcacagacgccaactgaggttctaggctggccttgcaaagcccttggacagatggctgagca

SEQ ID NO: 101066 - DNA, 83 bp, Homo sapiens
tctgacgctctctcctgtcacagacgccaactgaggttctaggctggccttgcaaagcccttggacagatggctgagcaggtc

SEQ ID NO: 101067 - DNA, 81 bp, Homo sapiens
tcctgtcacagacgccaactgaggttctaggctggccttgcaaagcccttggacagatggctgagcaggtcctggctggta

SEQ ID NO: 101068 - DNA, 77 bp, Homo sapiens
aactgaggttctaggctggccttgcaaagcccttggacagatggctgagcaggtcctggctggtacagaaggacagg

SEQ ID NO: 101069 - DNA, 77 bp, Homo sapiens
ttctaggctggccttgcaaagcccttggacagatggctgagcaggtcctggctggtacagaaggacagggtaccctg

SEQ ID NO: 101070 - DNA, 79 bp, Homo sapiens
tggccttgcaaagcccttggacagatggctgagcaggtcctggctggtacagaaggacagggtaccctggccactcaca

SEQ ID NO: 101071 - DNA, 80 bp, Homo sapiens
cttggacagatggctgagcaggtcctggctggtacagaaggacagggtaccctggccactcacagctcctgagtactcac

SEQ ID NO: 101072 - DNA, 79 bp, Homo sapiens
tggctgagcaggtcctggctggtacagaaggacagggtaccctggccactcacagctcctgagtactcactagtacaaa

SEQ ID NO: 101073 - DNA, 76 bp, Homo sapiens
tggtacagaaggacagggtaccctggccactcacagctcctgagtactcactagtacaaaagccaaccgcagcaag

SEQ ID NO: 101074 - DNA, 73 bp, Homo sapiens
aggacagggtaccctggccactcacagctcctgagtactcactagtacaaaagccaaccgcagcaagttgttt

SEQ ID NO: 101075 - DNA, 73 bp, Homo sapiens
tgagtactcactagtacaaaagccaaccgcagcaagttgttttgaacagaacgttgaccctccctcacaaata

SEQ ID NO: 101076 - DNA, 69 bp, Homo sapiens
actagtacaaaagccaaccgcagcaagttgttttgaacagaacgttgaccctccctcacaaataaggct

SEQ ID NO: 101077 - DNA, 67 bp, Homo sapiens
aaaagccaaccgcagcaagttgttttgaacagaacgttgaccctccctcacaaataaggcttccggt

SEQ ID NO: 101078 - DNA, 72 bp, Homo sapiens
agcaagttgttttgaacagaacgttgaccctccctcacaaataaggcttccggttgtttgtgtcatgacagc

SEQ ID NO: 101079 - DNA, 74 bp, Homo sapiens
ttgttttgaacagaacgttgaccctccctcacaaataaggcttccggttgtttgtgtcatgacagcctcattca

SEQ ID NO: 101080 - DNA, 76 bp, Homo sapiens
aacgttgaccctccctcacaaataaggcttccggttgtttgtgtcatgacagcctcattcaggcatcaggctcact

SEQ ID NO: 101081 - DNA, 83 bp, Homo sapiens
tccctcacaaataaggcttccggttgtttgtgtcatgacagcctcattcaggcatcaggctcacttctatgcactgttgtcca

SEQ ID NO: 101082 - DNA, 85 bp, Homo sapiens
cttccggttgtttgtgtcatgacagcctcattcaggcatcaggctcacttctatgcactgttgtccacgtgccagaagcagccac

SEQ ID NO: 101083 - DNA, 90 bp, Homo sapiens
tttgtgtcatgacagcctcattcaggcatcaggctcacttctatgcactgttgtccacgtgccagaagcagccacctgctgagaagggca

SEQ ID NO: 101084 - DNA, 89 bp, Homo sapiens
acagcctcattcaggcatcaggctcacttctatgcactgttgtccacgtgccagaagcagccacctgctgagaagggcatctgtgagga

SEQ ID NO: 101085 - DNA, 81 bp, Homo sapiens
ctatgcactgttgtccacgtgccagaagcagccacctgctgagaagggcatctgtgaggagggagacctcttctaaagtta

SEQ ID NO: 101086 - DNA, 79 bp, Homo sapiens
ttgtccacgtgccagaagcagccacctgctgagaagggcatctgtgaggagggagacctcttctaaagttacctgaatg

SEQ ID NO: 101087 - DNA, 76 bp, Homo sapiens
acctgctgagaagggcatctgtgaggagggagacctcttctaaagttacctgaatgggcaagtggctgtttgccta

SEQ ID NO: 101088 - DNA, 79 bp, Homo sapiens
tgtgaggagggagacctcttctaaagttacctgaatgggcaagtggctgtttgcctagactcccacagagcacagcatg

SEQ ID NO: 101089 - DNA, 80 bp, Homo sapiens
ggagacctcttctaaagttacctgaatgggcaagtggctgtttgcctagactcccacagagcacagcatggtgatgaaga

SEQ ID NO: 101090 - DNA, 82 bp, Homo sapiens
ttctaaagttacctgaatgggcaagtggctgtttgcctagactcccacagagcacagcatggtgatgaagatgctggtccca

SEQ ID NO: 101091 - DNA, 84 bp, Homo sapiens
aatgggcaagtggctgtttgcctagactcccacagagcacagcatggtgatgaagatgctggtcccactgtctgccaggtaaca

SEQ ID NO: 101092 - DNA, 83 bp, Homo sapiens
aagtggctgtttgcctagactcccacagagcacagcatggtgatgaagatgctggtcccactgtctgccaggtaacattggga

SEQ ID NO: 101093 - DNA, 81 bp, Homo sapiens
cacagagcacagcatggtgatgaagatgctggtcccactgtctgccaggtaacattgggagggaaagttctgtttattcca

SEQ ID NO: 101094 - DNA, 78 bp, Homo sapiens
acagcatggtgatgaagatgctggtcccactgtctgccaggtaacattgggagggaaagttctgtttattccaagaca

SEQ ID NO: 101095 - DNA, 75 bp, Homo sapiens
atgaagatgctggtcccactgtctgccaggtaacattgggagggaaagttctgtttattccaagacactagtgcc

SEQ ID NO: 101096 - DNA, 74 bp, Homo sapiens
tggtcccactgtctgccaggtaacattgggagggaaagttctgtttattccaagacactagtgcctcctattca

SEQ ID NO: 101097 - DNA, 72 bp, Homo sapiens
actgtctgccaggtaacattgggagggaaagttctgtttattccaagacactagtgcctcctattcaccttg

SEQ ID NO: 101098 - DNA, 73 bp, Homo sapiens
taacattgggagggaaagttctgtttattccaagacactagtgcctcctattcaccttggtgaccacatttga

SEQ ID NO: 101099 - DNA, 74 bp, Homo sapiens
agttctgtttattccaagacactagtgcctcctattcaccttggtgaccacatttgagccagttaggaaatgaa

SEQ ID NO: 101100 - DNA, 72 bp, Homo sapiens
actagtgcctcctattcaccttggtgaccacatttgagccagttaggaaatgaaggaagggaaggttccatc

SEQ ID NO: 101101 - DNA, 73 bp, Homo sapiens
tattcaccttggtgaccacatttgagccagttaggaaatgaaggaagggaaggttccatccttgccagggatg

SEQ ID NO: 101102 - DNA, 73 bp, Homo sapiens
ttggtgaccacatttgagccagttaggaaatgaaggaagggaaggttccatccttgccagggatggagacagg

SEQ ID NO: 101103 - DNA, 73 bp, Homo sapiens
atttgagccagttaggaaatgaaggaagggaaggttccatccttgccagggatggagacagggatggagggca

SEQ ID NO: 101104 - DNA, 72 bp, Homo sapiens
agttaggaaatgaaggaagggaaggttccatccttgccagggatggagacagggatggagggcaaggatgga

SEQ ID NO: 101105 - DNA, 73 bp, Homo sapiens
aaggaagggaaggttccatccttgccagggatggagacagggatggagggcaaggatggacgcccaggacagc

SEQ ID NO: 101106 - DNA, 72 bp, Homo sapiens
tggagggcaaggatggacgcccaggacagccttctgtccggcaacattccccctcctcaatcctttcccgat

SEQ ID NO: 101107 - DNA, 70 bp, Homo sapiens
aaggatggacgcccaggacagccttctgtccggcaacattccccctcctcaatcctttcccgattcgaaa

SEQ ID NO: 101108 - DNA, 69 bp, Homo sapiens
ccaggacagccttctgtccggcaacattccccctcctcaatcctttcccgattcgaaaggtacacaact

SEQ ID NO: 101109 - DNA, 68 bp, Homo sapiens
acagccttctgtccggcaacattccccctcctcaatcctttcccgattcgaaaggtacacaacttccc

SEQ ID NO: 101110 - DNA, 68 bp, Homo sapiens
cggcaacattccccctcctcaatcctttcccgattcgaaaggtacacaacttccccctggcctgtcta

SEQ ID NO: 101111 - DNA, 70 bp, Homo sapiens
ccctcctcaatcctttcccgattcgaaaggtacacaacttccccctggcctgtctaccttgagtctctgc

SEQ ID NO: 101112 - DNA, 72 bp, Homo sapiens
ctcaatcctttcccgattcgaaaggtacacaacttccccctggcctgtctaccttgagtctctgcctatggc

SEQ ID NO: 101113 - DNA, 75 bp, Homo sapiens
aaaggtacacaacttccccctggcctgtctaccttgagtctctgcctatggctgcctggcctggtgagaccagcc

SEQ ID NO: 101114 - DNA, 77 bp, Homo sapiens
aacttccccctggcctgtctaccttgagtctctgcctatggctgcctggcctggtgagaccagcctcccagctcctc

SEQ ID NO: 101115 - DNA, 83 bp, Homo sapiens
tgtctaccttgagtctctgcctatggctgcctggcctggtgagaccagcctcccagctcctctgtgttacgcaggcaatagga

SEQ ID NO: 101116 - DNA, 81 bp, Homo sapiens
ctatggctgcctggcctggtgagaccagcctcccagctcctctgtgttacgcaggcaataggagagctgccttttcaacaa

SEQ ID NO: 101117 - DNA, 77 bp, Homo sapiens
ctggcctggtgagaccagcctcccagctcctctgtgttacgcaggcaataggagagctgccttttcaacaactgttt

SEQ ID NO: 101118 - DNA, 77 bp, Homo sapiens
tgagaccagcctcccagctcctctgtgttacgcaggcaataggagagctgccttttcaacaactgttttgaactttc

SEQ ID NO: 101119 - DNA, 74 bp, Homo sapiens
tcccagctcctctgtgttacgcaggcaataggagagctgccttttcaacaactgttttgaactttcctctcctt

SEQ ID NO: 101120 - DNA, 69 bp, Homo sapiens
cttttcaacaactgttttgaactttcctctccttttaactccttcaacagtccctcttctgtgtgaaca

SEQ ID NO: 101121 - DNA, 69 bp, Homo sapiens
aacaactgttttgaactttcctctccttttaactccttcaacagtccctcttctgtgtgaacactctgg

SEQ ID NO: 101122 - DNA, 73 bp, Homo sapiens
tttgaactttcctctccttttaactccttcaacagtccctcttctgtgtgaacactctggtgtgtgaaagcaa

SEQ ID NO: 101123 - DNA, 77 bp, Homo sapiens
tccttttaactccttcaacagtccctcttctgtgtgaacactctggtgtgtgaaagcaagacctcagctcagggaga

SEQ ID NO: 101124 - DNA, 80 bp, Homo sapiens
tccttcaacagtccctcttctgtgtgaacactctggtgtgtgaaagcaagacctcagctcagggagacagccctcataaa

SEQ ID NO: 101125 - DNA, 82 bp, Homo sapiens
tccctcttctgtgtgaacactctggtgtgtgaaagcaagacctcagctcagggagacagccctcataaactgccgcagatta

SEQ ID NO: 101126 - DNA, 81 bp, Homo sapiens
tgtgtgaacactctggtgtgtgaaagcaagacctcagctcagggagacagccctcataaactgccgcagattaccctgtct

SEQ ID NO: 101127 - DNA, 77 bp, Homo sapiens
aacactctggtgtgtgaaagcaagacctcagctcagggagacagccctcataaactgccgcagattaccctgtcttt

SEQ ID NO: 101128 - DNA, 78 bp, Homo sapiens
tgtgtgaaagcaagacctcagctcagggagacagccctcataaactgccgcagattaccctgtcttttcccagccgga

SEQ ID NO: 101129 - DNA, 68 bp, Homo sapiens
agggagacagccctcataaactgccgcagattaccctgtcttttcccagccggagggggaccccgccc

SEQ ID NO: 101130 - DNA, 68 bp, Homo sapiens
acagccctcataaactgccgcagattaccctgtcttttcccagccggagggggaccccgccccactcc

SEQ ID NO: 101131 - DNA, 64 bp, Homo sapiens
agattaccctgtcttttcccagccggagggggaccccgccccactcccttcccagtctcttccc

SEQ ID NO: 101132 - DNA, 60 bp, Homo sapiens
agccggagggggaccccgccccactcccttcccagtctcttccccacccccaactttttt

SEQ ID NO: 101133 - DNA, 76 bp, Homo sapiens
ttttttttttaaccacttctgcttccttcattttctcagcagctgcagcggagagatatagtaaagctactgtata

SEQ ID NO: 101134 - DNA, 77 bp, Homo sapiens
tttttaaccacttctgcttccttcattttctcagcagctgcagcggagagatatagtaaagctactgtataggattt

SEQ ID NO: 101135 - DNA, 81 bp, Homo sapiens
tgcttccttcattttctcagcagctgcagcggagagatatagtaaagctactgtataggattttgaaagcagggcctccaa

SEQ ID NO: 101136 - DNA, 79 bp, Homo sapiens
attttctcagcagctgcagcggagagatatagtaaagctactgtataggattttgaaagcagggcctccaagagctttc

SEQ ID NO: 101137 - DNA, 77 bp, Homo sapiens
agctgcagcggagagatatagtaaagctactgtataggattttgaaagcagggcctccaagagctttccaaactcca

SEQ ID NO: 101138 - DNA, 74 bp, Homo sapiens
cggagagatatagtaaagctactgtataggattttgaaagcagggcctccaagagctttccaaactccacacaa

SEQ ID NO: 101139 - DNA, 74 bp, Homo sapiens
tatagtaaagctactgtataggattttgaaagcagggcctccaagagctttccaaactccacacaagccagtta

SEQ ID NO: 101140 - DNA, 74 bp, Homo sapiens
tgtataggattttgaaagcagggcctccaagagctttccaaactccacacaagccagttattctctgccttgtt

SEQ ID NO: 101141 - DNA, 71 bp, Homo sapiens
attttgaaagcagggcctccaagagctttccaaactccacacaagccagttattctctgccttgttttctt

SEQ ID NO: 101142 - DNA, 72 bp, Homo sapiens
gggcctccaagagctttccaaactccacacaagccagttattctctgccttgttttctttggcttcaggtta

SEQ ID NO: 101143 - DNA, 72 bp, Homo sapiens
aagagctttccaaactccacacaagccagttattctctgccttgttttctttggcttcaggttagtaacaca

SEQ ID NO: 101144 - DNA, 73 bp, Homo sapiens
aaactccacacaagccagttattctctgccttgttttctttggcttcaggttagtaacacagaatgagtcaaa

SEQ ID NO: 101145 - DNA, 73 bp, Homo sapiens
acaagccagttattctctgccttgttttctttggcttcaggttagtaacacagaatgagtcaaacagtattaa

SEQ ID NO: 101146 - DNA, 70 bp, Homo sapiens
ttgttttctttggcttcaggttagtaacacagaatgagtcaaacagtattaactttcaatagggaagtgg

SEQ ID NO: 101147 - DNA, 73 bp, Homo sapiens
tctttggcttcaggttagtaacacagaatgagtcaaacagtattaactttcaatagggaagtggtgtggtcaa

SEQ ID NO: 101148 - DNA, 71 bp, Homo sapiens
gttagtaacacagaatgagtcaaacagtattaactttcaatagggaagtggtgtggtcaaccaaagctgtt

SEQ ID NO: 101149 - DNA, 73 bp, Homo sapiens
agaatgagtcaaacagtattaactttcaatagggaagtggtgtggtcaaccaaagctgtttgcggctagatta

SEQ ID NO: 101150 - DNA, 73 bp, Homo sapiens
attaactttcaatagggaagtggtgtggtcaaccaaagctgtttgcggctagattatgaagataggtagggca

SEQ ID NO: 101151 - DNA, 80 bp, Homo sapiens
tgtggtcaaccaaagctgtttgcggctagattatgaagataggtagggcaggtaatgcagaatagcccataatactgtga

SEQ ID NO: 101152 - DNA, 80 bp, Homo sapiens
tgtttgcggctagattatgaagataggtagggcaggtaatgcagaatagcccataatactgtgaggaggcagaggaggga

SEQ ID NO: 101153 - DNA, 78 bp, Homo sapiens
tagattatgaagataggtagggcaggtaatgcagaatagcccataatactgtgaggaggcagaggagggaggcggccc

SEQ ID NO: 101154 - DNA, 76 bp, Homo sapiens
ataggtagggcaggtaatgcagaatagcccataatactgtgaggaggcagaggagggaggcggccccactcagaaa

SEQ ID NO: 101155 - DNA, 77 bp, Homo sapiens
gtaatgcagaatagcccataatactgtgaggaggcagaggagggaggcggccccactcagaaacactccaacaatta

SEQ ID NO: 101156 - DNA, 74 bp, Homo sapiens
aatagcccataatactgtgaggaggcagaggagggaggcggccccactcagaaacactccaacaattaagtcaa

SEQ ID NO: 101157 - DNA, 72 bp, Homo sapiens
gaggcagaggagggaggcggccccactcagaaacactccaacaattaagtcaacagaacttacaccatcttt

SEQ ID NO: 101158 - DNA, 69 bp, Homo sapiens
agaggagggaggcggccccactcagaaacactccaacaattaagtcaacagaacttacaccatcttttt

SEQ ID NO: 101159 - DNA, 70 bp, Homo sapiens
ccccactcagaaacactccaacaattaagtcaacagaacttacaccatctttttttagttggctgaggaa

SEQ ID NO: 101160 - DNA, 70 bp, Homo sapiens
cagaaacactccaacaattaagtcaacagaacttacaccatctttttttagttggctgaggaattaacac

SEQ ID NO: 101161 - DNA, 70 bp, Homo sapiens
aacaattaagtcaacagaacttacaccatctttttttagttggctgaggaattaacaccaaggtctctga

SEQ ID NO: 101162 - DNA, 73 bp, Homo sapiens
taagtcaacagaacttacaccatctttttttagttggctgaggaattaacaccaaggtctctgaccagccagc

SEQ ID NO: 101163 - DNA, 70 bp, Homo sapiens
aacttacaccatctttttttagttggctgaggaattaacaccaaggtctctgaccagccagctttgggaa

SEQ ID NO: 101164 - DNA, 74 bp, Homo sapiens
ttggctgaggaattaacaccaaggtctctgaccagccagctttgggaagttggccataatggggcttggacaat

SEQ ID NO: 101165 - DNA, 72 bp, Homo sapiens
attaacaccaaggtctctgaccagccagctttgggaagttggccataatggggcttggacaattgagtactt

SEQ ID NO: 101166 - DNA, 72 bp, Homo sapiens
ggtctctgaccagccagctttgggaagttggccataatggggcttggacaattgagtactttgtgggtttaa

SEQ ID NO: 101167 - DNA, 71 bp, Homo sapiens
cagccagctttgggaagttggccataatggggcttggacaattgagtactttgtgggtttaaggatgtctt

SEQ ID NO: 101168 - DNA, 67 bp, Homo sapiens
ctttgggaagttggccataatggggcttggacaattgagtactttgtgggtttaaggatgtcttttt

SEQ ID NO: 101169 - DNA, 69 bp, Homo sapiens
ttttttttttcaaatgttgccaaagtcatgggaactctagttaggaagatttcccctacttagagcatg

SEQ ID NO: 101170 - DNA, 74 bp, Homo sapiens
tttttcaaatgttgccaaagtcatgggaactctagttaggaagatttcccctacttagagcatgtcactctggc

SEQ ID NO: 101171 - DNA, 76 bp, Homo sapiens
caaagtcatgggaactctagttaggaagatttcccctacttagagcatgtcactctggcgtggaccttcattcatc

SEQ ID NO: 101172 - DNA, 75 bp, Homo sapiens
atgggaactctagttaggaagatttcccctacttagagcatgtcactctggcgtggaccttcattcatctctttc

SEQ ID NO: 101173 - DNA, 74 bp, Homo sapiens
tagttaggaagatttcccctacttagagcatgtcactctggcgtggaccttcattcatctctttccccggcctg

SEQ ID NO: 101174 - DNA, 76 bp, Homo sapiens
tacttagagcatgtcactctggcgtggaccttcattcatctctttccccggcctggggttgatccattctcccttc

SEQ ID NO: 101175 - DNA, 72 bp, Homo sapiens
atgtcactctggcgtggaccttcattcatctctttccccggcctggggttgatccattctcccttcttcccc

SEQ ID NO: 101176 - DNA, 70 bp, Homo sapiens
tggcgtggaccttcattcatctctttccccggcctggggttgatccattctcccttcttcccccttctcc

SEQ ID NO: 101177 - DNA, 70 bp, Homo sapiens
cttcattcatctctttccccggcctggggttgatccattctcccttcttcccccttctcctgccctgccc

SEQ ID NO: 101178 - DNA, 68 bp, Homo sapiens
tttccccggcctggggttgatccattctcccttcttcccccttctcctgccctgcccccaccttctca

SEQ ID NO: 101179 - DNA, 72 bp, Homo sapiens
tggggttgatccattctcccttcttcccccttctcctgccctgcccccaccttctcagtcacaatctttgtc

SEQ ID NO: 101180 - DNA, 70 bp, Homo sapiens
cattctcccttcttcccccttctcctgccctgcccccaccttctcagtcacaatctttgtcttcccagtt

SEQ ID NO: 101181 - DNA, 73 bp, Homo sapiens
ttcttcccccttctcctgccctgcccccaccttctcagtcacaatctttgtcttcccagtttggcaggacatc

SEQ ID NO: 101182 - DNA, 72 bp, Homo sapiens
cccttctcctgccctgcccccaccttctcagtcacaatctttgtcttcccagtttggcaggacatcccaggg

SEQ ID NO: 101183 - DNA, 72 bp, Homo sapiens
tgcccccaccttctcagtcacaatctttgtcttcccagtttggcaggacatcccaggggcccctgggctttc

SEQ ID NO: 101184 - DNA, 70 bp, Homo sapiens
accttctcagtcacaatctttgtcttcccagtttggcaggacatcccaggggcccctgggctttccttcc

SEQ ID NO: 101185 - DNA, 69 bp, Homo sapiens
acaatctttgtcttcccagtttggcaggacatcccaggggcccctgggctttccttcctgaggttagaa

SEQ ID NO: 101186 - DNA, 72 bp, Homo sapiens
tcttcccagtttggcaggacatcccaggggcccctgggctttccttcctgaggttagaagatggtgctttga

SEQ ID NO: 101187 - DNA, 71 bp, Homo sapiens
tttggcaggacatcccaggggcccctgggctttccttcctgaggttagaagatggtgctttgaaagaacaa

SEQ ID NO: 101188 - DNA, 71 bp, Homo sapiens
tcccaggggcccctgggctttccttcctgaggttagaagatggtgctttgaaagaacaattgctcctacaa

SEQ ID NO: 101189 - DNA, 75 bp, Homo sapiens
tgaggttagaagatggtgctttgaaagaacaattgctcctacaaccatcaaatcaaacttttagaagctgataaa

SEQ ID NO: 101190 - DNA, 74 bp, Homo sapiens
gaagatggtgctttgaaagaacaattgctcctacaaccatcaaatcaaacttttagaagctgataaagacctta

SEQ ID NO: 101191 - DNA, 71 bp, Homo sapiens
ctttgaaagaacaattgctcctacaaccatcaaatcaaacttttagaagctgataaagaccttaaaaatca

SEQ ID NO: 101192 - DNA, 72 bp, Homo sapiens
ctacaaccatcaaatcaaacttttagaagctgataaagaccttaaaaatcattcaatctcctcttctttctc

SEQ ID NO: 101193 - DNA, 73 bp, Homo sapiens
caaacttttagaagctgataaagaccttaaaaatcattcaatctcctcttctttctccttctgtagatgagga

SEQ ID NO: 101194 - DNA, 75 bp, Homo sapiens
ttttagaagctgataaagaccttaaaaatcattcaatctcctcttctttctccttctgtagatgaggaatctgag

SEQ ID NO: 101195 - DNA, 81 bp, Homo sapiens
ttaaaaatcattcaatctcctcttctttctccttctgtagatgaggaatctgagggtctaagaggagacatgagctgctga

SEQ ID NO: 101196 - DNA, 85 bp, Homo sapiens
ttcaatctcctcttctttctccttctgtagatgaggaatctgagggtctaagaggagacatgagctgctgagattgactgagcta

SEQ ID NO: 101197 - DNA, 86 bp, Homo sapiens
ctttctccttctgtagatgaggaatctgagggtctaagaggagacatgagctgctgagattgactgagctagcagggccagacata

SEQ ID NO: 101198 - DNA, 88 bp, Homo sapiens
tccttctgtagatgaggaatctgagggtctaagaggagacatgagctgctgagattgactgagctagcagggccagacatagactcca

SEQ ID NO: 101199 - DNA, 84 bp, Homo sapiens
aggaatctgagggtctaagaggagacatgagctgctgagattgactgagctagcagggccagacatagactccacgggcaggcc

SEQ ID NO: 101200 - DNA, 84 bp, Homo sapiens
ggtctaagaggagacatgagctgctgagattgactgagctagcagggccagacatagactccacgggcaggcccgcagtctttc

SEQ ID NO: 101201 - DNA, 84 bp, Homo sapiens
aagaggagacatgagctgctgagattgactgagctagcagggccagacatagactccacgggcaggcccgcagtctttccacca

SEQ ID NO: 101202 - DNA, 84 bp, Homo sapiens
atgagctgctgagattgactgagctagcagggccagacatagactccacgggcaggcccgcagtctttccaccaggtcaggcca

SEQ ID NO: 101203 - DNA, 78 bp, Homo sapiens
agattgactgagctagcagggccagacatagactccacgggcaggcccgcagtctttccaccaggtcaggccactccc

SEQ ID NO: 101204 - DNA, 76 bp, Homo sapiens
agctagcagggccagacatagactccacgggcaggcccgcagtctttccaccaggtcaggccactccctcgcccag

SEQ ID NO: 101205 - DNA, 75 bp, Homo sapiens
agacatagactccacgggcaggcccgcagtctttccaccaggtcaggccactccctcgcccagggctcaagattc

SEQ ID NO: 101206 - DNA, 73 bp, Homo sapiens
tccacgggcaggcccgcagtctttccaccaggtcaggccactccctcgcccagggctcaagattccttttaga

SEQ ID NO: 101207 - DNA, 72 bp, Homo sapiens
aggcccgcagtctttccaccaggtcaggccactccctcgcccagggctcaagattccttttagagttcaaca

SEQ ID NO: 101208 - DNA, 74 bp, Homo sapiens
agtctttccaccaggtcaggccactccctcgcccagggctcaagattccttttagagttcaacagagcagctcc

SEQ ID NO: 101209 - DNA, 75 bp, Homo sapiens
aggtcaggccactccctcgcccagggctcaagattccttttagagttcaacagagcagctcccgagaacagacca

SEQ ID NO: 101210 - DNA, 75 bp, Homo sapiens
actccctcgcccagggctcaagattccttttagagttcaacagagcagctcccgagaacagaccagccctcaaga

SEQ ID NO: 101211 - DNA, 75 bp, Homo sapiens
agggctcaagattccttttagagttcaacagagcagctcccgagaacagaccagccctcaagactcaaatttcag

SEQ ID NO: 101212 - DNA, 73 bp, Homo sapiens
aagattccttttagagttcaacagagcagctcccgagaacagaccagccctcaagactcaaatttcagtggtt

SEQ ID NO: 101213 - DNA, 74 bp, Homo sapiens
ttttagagttcaacagagcagctcccgagaacagaccagccctcaagactcaaatttcagtggtttccagttct

SEQ ID NO: 101214 - DNA, 75 bp, Homo sapiens
aacagagcagctcccgagaacagaccagccctcaagactcaaatttcagtggtttccagttctttctccctgcac

SEQ ID NO: 101215 - DNA, 72 bp, Homo sapiens
agaccagccctcaagactcaaatttcagtggtttccagttctttctccctgcactcagctacctatttattt

SEQ ID NO: 101216 - DNA, 79 bp, Homo sapiens
tatttattttgagactggctgaatcacccgaagaatagaacgggtttctctgaagctgctcccggcagcatgtcagcaa

SEQ ID NO: 101217 - DNA, 79 bp, Homo sapiens
attttgagactggctgaatcacccgaagaatagaacgggtttctctgaagctgctcccggcagcatgtcagcaaatgaa

SEQ ID NO: 101218 - DNA, 81 bp, Homo sapiens
ctgaatcacccgaagaatagaacgggtttctctgaagctgctcccggcagcatgtcagcaaatgaacaggacagcgagctg

SEQ ID NO: 101219 - DNA, 79 bp, Homo sapiens
acccgaagaatagaacgggtttctctgaagctgctcccggcagcatgtcagcaaatgaacaggacagcgagctggcctc

SEQ ID NO: 101220 - DNA, 82 bp, Homo sapiens
tagaacgggtttctctgaagctgctcccggcagcatgtcagcaaatgaacaggacagcgagctggcctctggagccttggaa

SEQ ID NO: 101221 - DNA, 86 bp, Homo sapiens
tctctgaagctgctcccggcagcatgtcagcaaatgaacaggacagcgagctggcctctggagccttggaagattctcacctccaa

SEQ ID NO: 101222 - DNA, 85 bp, Homo sapiens
tcccggcagcatgtcagcaaatgaacaggacagcgagctggcctctggagccttggaagattctcacctccaagcagctgcagtt

SEQ ID NO: 101223 - DNA, 83 bp, Homo sapiens
atgtcagcaaatgaacaggacagcgagctggcctctggagccttggaagattctcacctccaagcagctgcagtttttgactc

SEQ ID NO: 101224 - DNA, 79 bp, Homo sapiens
aaatgaacaggacagcgagctggcctctggagccttggaagattctcacctccaagcagctgcagtttttgactcgtcc

SEQ ID NO: 101225 - DNA, 78 bp, Homo sapiens
acagcgagctggcctctggagccttggaagattctcacctccaagcagctgcagtttttgactcgtcctgggaaactg

SEQ ID NO: 101226 - DNA, 77 bp, Homo sapiens
attctcacctccaagcagctgcagtttttgactcgtcctgggaaactggcactgagactcaggggtgtaacatttca

SEQ ID NO: 101227 - DNA, 75 bp, Homo sapiens
aagcagctgcagtttttgactcgtcctgggaaactggcactgagactcaggggtgtaacatttcacctccctgaa

SEQ ID NO: 101228 - DNA, 71 bp, Homo sapiens
agtttttgactcgtcctgggaaactggcactgagactcaggggtgtaacatttcacctccctgaaatcaaa

SEQ ID NO: 101229 - DNA, 74 bp, Homo sapiens
ttgactcgtcctgggaaactggcactgagactcaggggtgtaacatttcacctccctgaaatcaaatccagaaa

SEQ ID NO: 101230 - DNA, 79 bp, Homo sapiens
aaactggcactgagactcaggggtgtaacatttcacctccctgaaatcaaatccagaaatctcaggcgagcagcatata

SEQ ID NO: 101231 - DNA, 77 bp, Homo sapiens
actgagactcaggggtgtaacatttcacctccctgaaatcaaatccagaaatctcaggcgagcagcatatataaaaa

SEQ ID NO: 101232 - DNA, 75 bp, Homo sapiens
aggggtgtaacatttcacctccctgaaatcaaatccagaaatctcaggcgagcagcatatataaaaagccacagg

SEQ ID NO: 101233 - DNA, 75 bp, Homo sapiens
taacatttcacctccctgaaatcaaatccagaaatctcaggcgagcagcatatataaaaagccacaggggaaaaa

SEQ ID NO: 101234 - DNA, 75 bp, Homo sapiens
ctgaaatcaaatccagaaatctcaggcgagcagcatatataaaaagccacaggggaaaaaaggaatacggactca

SEQ ID NO: 101235 - DNA, 75 bp, Homo sapiens
atccagaaatctcaggcgagcagcatatataaaaagccacaggggaaaaaaggaatacggactcagcaactctta

SEQ ID NO: 101236 - DNA, 75 bp, Homo sapiens
agcagcatatataaaaagccacaggggaaaaaaggaatacggactcagcaactcttaggtgctctgagcctcttc

SEQ ID NO: 101237 - DNA, 72 bp, Homo sapiens
tatataaaaagccacaggggaaaaaaggaatacggactcagcaactcttaggtgctctgagcctcttcccaa

SEQ ID NO: 101238 - DNA, 71 bp, Homo sapiens
aggggaaaaaaggaatacggactcagcaactcttaggtgctctgagcctcttcccaagccttctggttctg

SEQ ID NO: 101239 - DNA, 78 bp, Homo sapiens
tacggactcagcaactcttaggtgctctgagcctcttcccaagccttctggttctgtgagcatttcattgaaagaaaa

SEQ ID NO: 101240 - DNA, 76 bp, Homo sapiens
tctgagcctcttcccaagccttctggttctgtgagcatttcattgaaagaaaatggaataacagagttttagaaga

SEQ ID NO: 101241 - DNA, 71 bp, Homo sapiens
cttcccaagccttctggttctgtgagcatttcattgaaagaaaatggaataacagagttttagaagaaaaa

SEQ ID NO: 101242 - DNA, 72 bp, Homo sapiens
gccttctggttctgtgagcatttcattgaaagaaaatggaataacagagttttagaagaaaaactgtatttg

SEQ ID NO: 101243 - DNA, 70 bp, Homo sapiens
cattgaaagaaaatggaataacagagttttagaagaaaaactgtatttggtcttgcaagagaaaagtata

SEQ ID NO: 101244 - DNA, 71 bp, Homo sapiens
agaaaatggaataacagagttttagaagaaaaactgtatttggtcttgcaagagaaaagtatattcatata

SEQ ID NO: 101245 - DNA, 72 bp, Homo sapiens
acagagttttagaagaaaaactgtatttggtcttgcaagagaaaagtatattcatataaaactcagttctca

SEQ ID NO: 101246 - DNA, 73 bp, Homo sapiens
agaagaaaaactgtatttggtcttgcaagagaaaagtatattcatataaaactcagttctcaactatttgcca

SEQ ID NO: 101247 - DNA, 73 bp, Homo sapiens
ctgtatttggtcttgcaagagaaaagtatattcatataaaactcagttctcaactatttgccaaggttacttc

SEQ ID NO: 101248 - DNA, 72 bp, Homo sapiens
ttggtcttgcaagagaaaagtatattcatataaaactcagttctcaactatttgccaaggttacttcttttg

SEQ ID NO: 101249 - DNA, 70 bp, Homo sapiens
gagaaaagtatattcatataaaactcagttctcaactatttgccaaggttacttcttttgtttccaacat

SEQ ID NO: 101250 - DNA, 67 bp, Homo sapiens
ttcatataaaactcagttctcaactatttgccaaggttacttcttttgtttccaacatttaaaaagg

SEQ ID NO: 101251 - DNA, 66 bp, Homo sapiens
caactatttgccaaggttacttcttttgtttccaacatttaaaaagggtatctagttgtaggtaga

SEQ ID NO: 101252 - DNA, 69 bp, Homo sapiens
tccaacatttaaaaagggtatctagttgtaggtagagaaaacattaagatatgtgaatggaaaaaggta

SEQ ID NO: 101253 - DNA, 67 bp, Homo sapiens
gggtatctagttgtaggtagagaaaacattaagatatgtgaatggaaaaaggtaaaatttctaaaag

SEQ ID NO: 101254 - DNA, 69 bp, Homo sapiens
ggtagagaaaacattaagatatgtgaatggaaaaaggtaaaatttctaaaagtatggattcacagtggg

SEQ ID NO: 101255 - DNA, 70 bp, Homo sapiens
gaaaacattaagatatgtgaatggaaaaaggtaaaatttctaaaagtatggattcacagtggggtctgat

SEQ ID NO: 101256 - DNA, 69 bp, Homo sapiens
aagatatgtgaatggaaaaaggtaaaatttctaaaagtatggattcacagtggggtctgatttaaatgt

SEQ ID NO: 101257 - DNA, 69 bp, Homo sapiens
agtatggattcacagtggggtctgatttaaatgtttaaattttttctctttaatttcttctcaccaatc

SEQ ID NO: 101258 - DNA, 69 bp, Homo sapiens
ggattcacagtggggtctgatttaaatgtttaaattttttctctttaatttcttctcaccaatcctgaa

SEQ ID NO: 101259 - DNA, 69 bp, Homo sapiens
ggtctgatttaaatgtttaaattttttctctttaatttcttctcaccaatcctgaaagacacgacgaga

SEQ ID NO: 101260 - DNA, 69 bp, Homo sapiens
atgtttaaattttttctctttaatttcttctcaccaatcctgaaagacacgacgagataatatctactt

SEQ ID NO: 101261 - DNA, 72 bp, Homo sapiens
tttttctctttaatttcttctcaccaatcctgaaagacacgacgagataatatctactttcaataaatcaat

SEQ ID NO: 101262 - DNA, 72 bp, Homo sapiens
ctctttaatttcttctcaccaatcctgaaagacacgacgagataatatctactttcaataaatcaattaatt

SEQ ID NO: 101263 - DNA, 72 bp, Homo sapiens
tcttctcaccaatcctgaaagacacgacgagataatatctactttcaataaatcaattaattttatttaaaa

SEQ ID NO: 101264 - DNA, 70 bp, Homo sapiens
atcctgaaagacacgacgagataatatctactttcaataaatcaattaattttatttaaaatccctaaga

SEQ ID NO: 101265 - DNA, 70 bp, Homo sapiens
ttcaataaatcaattaattttatttaaaatccctaagattttaatatagtacatgcaaaacaataataga

SEQ ID NO: 101266 - DNA, 68 bp, Homo sapiens
caattaattttatttaaaatccctaagattttaatatagtacatgcaaaacaataatagattttctat

SEQ ID NO: 101267 - DNA, 67 bp, Homo sapiens
ttttatttaaaatccctaagattttaatatagtacatgcaaaacaataatagattttctatttttta

SEQ ID NO: 101268 - DNA, 70 bp, Homo sapiens
atccctaagattttaatatagtacatgcaaaacaataatagattttctattttttaattatctaattata

SEQ ID NO: 101269 - DNA, 74 bp, Homo sapiens
ttctattttttaattatctaattatatttatattatctaattgacagactacttaaaaagcacattgatatata

SEQ ID NO: 101270 - DNA, 79 bp, Homo sapiens
taattatctaattatatttatattatctaattgacagactacttaaaaagcacattgatatatattatctcaatgtgtc

SEQ ID NO: 101271 - DNA, 80 bp, Homo sapiens
tattatctaattgacagactacttaaaaagcacattgatatatattatctcaatgtgtcctcaagaaccctgtgcagtag

SEQ ID NO: 101272 - DNA, 81 bp, Homo sapiens
tctaattgacagactacttaaaaagcacattgatatatattatctcaatgtgtcctcaagaaccctgtgcagtaggcagaa

SEQ ID NO: 101273 - DNA, 80 bp, Homo sapiens
tacttaaaaagcacattgatatatattatctcaatgtgtcctcaagaaccctgtgcagtaggcagaactcatagtattat

SEQ ID NO: 101274 - DNA, 81 bp, Homo sapiens
aaaagcacattgatatatattatctcaatgtgtcctcaagaaccctgtgcagtaggcagaactcatagtattattcccatc

SEQ ID NO: 101275 - DNA, 81 bp, Homo sapiens
atatatattatctcaatgtgtcctcaagaaccctgtgcagtaggcagaactcatagtattattcccatcttatagatgacc

SEQ ID NO: 101276 - DNA, 80 bp, Homo sapiens
tatctcaatgtgtcctcaagaaccctgtgcagtaggcagaactcatagtattattcccatcttatagatgacccagggga

SEQ ID NO: 101277 - DNA, 78 bp, Homo sapiens
tgtcctcaagaaccctgtgcagtaggcagaactcatagtattattcccatcttatagatgacccaggggaagcttcta

SEQ ID NO: 101278 - DNA, 80 bp, Homo sapiens
ccctgtgcagtaggcagaactcatagtattattcccatcttatagatgacccaggggaagcttctagatgctcagagctt

SEQ ID NO: 101279 - DNA, 81 bp, Homo sapiens
agtaggcagaactcatagtattattcccatcttatagatgacccaggggaagcttctagatgctcagagctttgcaggtca

SEQ ID NO: 101280 - DNA, 83 bp, Homo sapiens
actcatagtattattcccatcttatagatgacccaggggaagcttctagatgctcagagctttgcaggtcacacaacagcata

SEQ ID NO: 101281 - DNA, 84 bp, Homo sapiens
tcccatcttatagatgacccaggggaagcttctagatgctcagagctttgcaggtcacacaacagcataggtgcttcatgttaa

SEQ ID NO: 101282 - DNA, 85 bp, Homo sapiens
ttatagatgacccaggggaagcttctagatgctcagagctttgcaggtcacacaacagcataggtgcttcatgttaagaagcaga

SEQ ID NO: 101283 - DNA, 83 bp, Homo sapiens
ttctagatgctcagagctttgcaggtcacacaacagcataggtgcttcatgttaagaagcagaactgcattttgataaaacct

SEQ ID NO: 101284 - DNA, 74 bp, Homo sapiens
aggtcacacaacagcataggtgcttcatgttaagaagcagaactgcattttgataaaacctttaattggaaaaa

SEQ ID NO: 101285 - DNA, 75 bp, Homo sapiens
acacaacagcataggtgcttcatgttaagaagcagaactgcattttgataaaacctttaattggaaaaagatcac

SEQ ID NO: 101286 - DNA, 72 bp, Homo sapiens
ataggtgcttcatgttaagaagcagaactgcattttgataaaacctttaattggaaaaagatcacctctccc

SEQ ID NO: 101287 - DNA, 70 bp, Homo sapiens
ttaagaagcagaactgcattttgataaaacctttaattggaaaaagatcacctctccctcaaggaagtag

SEQ ID NO: 101288 - DNA, 69 bp, Homo sapiens
attttgataaaacctttaattggaaaaagatcacctctccctcaaggaagtagggcaacatggttgaca

SEQ ID NO: 101289 - DNA, 72 bp, Homo sapiens
tttaattggaaaaagatcacctctccctcaaggaagtagggcaacatggttgacagggttatgtttcaatga

SEQ ID NO: 101290 - DNA, 72 bp, Homo sapiens
aaaaagatcacctctccctcaaggaagtagggcaacatggttgacagggttatgtttcaatgaggaatacat

SEQ ID NO: 101291 - DNA, 74 bp, Homo sapiens
atcacctctccctcaaggaagtagggcaacatggttgacagggttatgtttcaatgaggaatacatttgttgaa

SEQ ID NO: 101292 - DNA, 77 bp, Homo sapiens
aaggaagtagggcaacatggttgacagggttatgtttcaatgaggaatacatttgttgaagccagttcagtgatgca

SEQ ID NO: 101293 - DNA, 79 bp, Homo sapiens
gcaacatggttgacagggttatgtttcaatgaggaatacatttgttgaagccagttcagtgatgcagtaattggaatta

SEQ ID NO: 101294 - DNA, 77 bp, Homo sapiens
gttgacagggttatgtttcaatgaggaatacatttgttgaagccagttcagtgatgcagtaattggaattaataata

SEQ ID NO: 101295 - DNA, 75 bp, Homo sapiens
gggttatgtttcaatgaggaatacatttgttgaagccagttcagtgatgcagtaattggaattaataataggtag

SEQ ID NO: 101296 - DNA, 76 bp, Homo sapiens
tgaggaatacatttgttgaagccagttcagtgatgcagtaattggaattaataataggtagtatggaaggaaaaga

SEQ ID NO: 101297 - DNA, 74 bp, Homo sapiens
atacatttgttgaagccagttcagtgatgcagtaattggaattaataataggtagtatggaaggaaaagagaaa

SEQ ID NO: 101298 - DNA, 71 bp, Homo sapiens
aagccagttcagtgatgcagtaattggaattaataataggtagtatggaaggaaaagagaaaaagccctta

SEQ ID NO: 101299 - DNA, 73 bp, Homo sapiens
tcagtgatgcagtaattggaattaataataggtagtatggaaggaaaagagaaaaagcccttattgtactgta

SEQ ID NO: 101300 - DNA, 70 bp, Homo sapiens
ttggaattaataataggtagtatggaaggaaaagagaaaaagcccttattgtactgtattgtgagggcca

SEQ ID NO: 101301 - DNA, 71 bp, Homo sapiens
ttaataataggtagtatggaaggaaaagagaaaaagcccttattgtactgtattgtgagggccaaatctgc

SEQ ID NO: 101302 - DNA, 66 bp, Homo sapiens
aaggaaaagagaaaaagcccttattgtactgtattgtgagggccaaatctgccaagcttttttttt

SEQ ID NO: 101303 - DNA, 65 bp, Homo sapiens
ctttttttttaagtacttggcaatggtaaatatttggcccccacttgaacagaattccatttgtt

SEQ ID NO: 101304 - DNA, 70 bp, Homo sapiens
ttttaagtacttggcaatggtaaatatttggcccccacttgaacagaattccatttgtttcctctcataa

SEQ ID NO: 101305 - DNA, 71 bp, Homo sapiens
caatggtaaatatttggcccccacttgaacagaattccatttgtttcctctcataaggtctttgggacatg

SEQ ID NO: 101306 - DNA, 71 bp, Homo sapiens
gtaaatatttggcccccacttgaacagaattccatttgtttcctctcataaggtctttgggacatggtcaa

SEQ ID NO: 101307 - DNA, 71 bp, Homo sapiens
taaatatttggcccccacttgaacagaattccatttgtttcctctcataaggtctttgggacatggtcaag

SEQ ID NO: 101308 - DNA, 71 bp, Homo sapiens
tatttggcccccacttgaacagaattccatttgtttcctctcataaggtctttgggacatggtcaaggggc

SEQ ID NO: 101309 - DNA, 70 bp, Homo sapiens
ccacttgaacagaattccatttgtttcctctcataaggtctttgggacatggtcaaggggcctacccgtc

SEQ ID NO: 101310 - DNA, 70 bp, Homo sapiens
acttgaacagaattccatttgtttcctctcataaggtctttgggacatggtcaaggggcctacccgtcta

SEQ ID NO: 101311 - DNA, 72 bp, Homo sapiens
aacagaattccatttgtttcctctcataaggtctttgggacatggtcaaggggcctacccgtctagagcatg

SEQ ID NO: 101312 - DNA, 74 bp, Homo sapiens
tccatttgtttcctctcataaggtctttgggacatggtcaaggggcctacccgtctagagcatgtgctttaata

SEQ ID NO: 101313 - DNA, 75 bp, Homo sapiens
ttgtttcctctcataaggtctttgggacatggtcaaggggcctacccgtctagagcatgtgctttaataatagca

SEQ ID NO: 101314 - DNA, 74 bp, Homo sapiens
ataaggtctttgggacatggtcaaggggcctacccgtctagagcatgtgctttaataatagcagctaatattta

SEQ ID NO: 101315 - DNA, 75 bp, Homo sapiens
ggtcaaggggcctacccgtctagagcatgtgctttaataatagcagctaatatttaaggaacacttctgtgccca

SEQ ID NO: 101316 - DNA, 79 bp, Homo sapiens
ccgtctagagcatgtgctttaataatagcagctaatatttaaggaacacttctgtgcccagcacggtgctatgccctaa

SEQ ID NO: 101317 - DNA, 76 bp, Homo sapiens
tttaataatagcagctaatatttaaggaacacttctgtgcccagcacggtgctatgccctaacatgaattatttta

SEQ ID NO: 101318 - DNA, 77 bp, Homo sapiens
gctaatatttaaggaacacttctgtgcccagcacggtgctatgccctaacatgaattattttattcaatccgcacaa

SEQ ID NO: 101319 - DNA, 77 bp, Homo sapiens
tatttaaggaacacttctgtgcccagcacggtgctatgccctaacatgaattattttattcaatccgcacaataatc

SEQ ID NO: 101320 - DNA, 78 bp, Homo sapiens
ttctgtgcccagcacggtgctatgccctaacatgaattattttattcaatccgcacaataatccccaacagagggata

SEQ ID NO: 101321 - DNA, 75 bp, Homo sapiens
tatgccctaacatgaattattttattcaatccgcacaataatccccaacagagggatatcatactcctggtttta

SEQ ID NO: 101322 - DNA, 72 bp, Homo sapiens
atgaattattttattcaatccgcacaataatccccaacagagggatatcatactcctggttttatacccaag

SEQ ID NO: 101323 - DNA, 73 bp, Homo sapiens
attttattcaatccgcacaataatccccaacagagggatatcatactcctggttttatacccaaggaggctga

SEQ ID NO: 101324 - DNA, 71 bp, Homo sapiens
aatccgcacaataatccccaacagagggatatcatactcctggttttatacccaaggaggctgagggtggg

SEQ ID NO: 101325 - DNA, 69 bp, Homo sapiens
ataatccccaacagagggatatcatactcctggttttatacccaaggaggctgagggtggggaggttaa

SEQ ID NO: 101326 - DNA, 71 bp, Homo sapiens
acagagggatatcatactcctggttttatacccaaggaggctgagggtggggaggttaatctgatcccgaa

SEQ ID NO: 101327 - DNA, 70 bp, Homo sapiens
tatcatactcctggttttatacccaaggaggctgagggtggggaggttaatctgatcccgaaggggaggc

SEQ ID NO: 101328 - DNA, 71 bp, Homo sapiens
tggttttatacccaaggaggctgagggtggggaggttaatctgatcccgaaggggaggccaggctgaatca

SEQ ID NO: 101329 - DNA, 74 bp, Homo sapiens
aaggaggctgagggtggggaggttaatctgatcccgaaggggaggccaggctgaatcaggaagccagctctgga

SEQ ID NO: 101330 - DNA, 76 bp, Homo sapiens
agggtggggaggttaatctgatcccgaaggggaggccaggctgaatcaggaagccagctctggagcttcgccatca

SEQ ID NO: 101331 - DNA, 84 bp, Homo sapiens
tctgatcccgaaggggaggccaggctgaatcaggaagccagctctggagcttcgccatcagccactgctccagctcgcctttca

SEQ ID NO: 101332 - DNA, 84 bp, Homo sapiens
gaggccaggctgaatcaggaagccagctctggagcttcgccatcagccactgctccagctcgcctttcaggctatctcttttaa

SEQ ID NO: 101333 - DNA, 84 bp, Homo sapiens
aggctgaatcaggaagccagctctggagcttcgccatcagccactgctccagctcgcctttcaggctatctcttttaatcctca

SEQ ID NO: 101334 - DNA, 83 bp, Homo sapiens
agccagctctggagcttcgccatcagccactgctccagctcgcctttcaggctatctcttttaatcctcacatcccctagcaa

SEQ ID NO: 101335 - DNA, 82 bp, Homo sapiens
tggagcttcgccatcagccactgctccagctcgcctttcaggctatctcttttaatcctcacatcccctagcaagagaggta

SEQ ID NO: 101336 - DNA, 84 bp, Homo sapiens
catcagccactgctccagctcgcctttcaggctatctcttttaatcctcacatcccctagcaagagaggtatcatgcagtccat

SEQ ID NO: 101337 - DNA, 80 bp, Homo sapiens
tcgcctttcaggctatctcttttaatcctcacatcccctagcaagagaggtatcatgcagtccattctacagatgggaaa

SEQ ID NO: 101338 - DNA, 79 bp, Homo sapiens
aggctatctcttttaatcctcacatcccctagcaagagaggtatcatgcagtccattctacagatgggaaaactgtgaa

SEQ ID NO: 101339 - DNA, 78 bp, Homo sapiens
ttaatcctcacatcccctagcaagagaggtatcatgcagtccattctacagatgggaaaactgtgaaacgcagtttta

SEQ ID NO: 101340 - DNA, 77 bp, Homo sapiens
acatcccctagcaagagaggtatcatgcagtccattctacagatgggaaaactgtgaaacgcagttttagacttgaa

SEQ ID NO: 101341 - DNA, 78 bp, Homo sapiens
tagcaagagaggtatcatgcagtccattctacagatgggaaaactgtgaaacgcagttttagacttgaagctccaaac

SEQ ID NO: 101342 - DNA, 74 bp, Homo sapiens
aggtatcatgcagtccattctacagatgggaaaactgtgaaacgcagttttagacttgaagctccaaactcctt

SEQ ID NO: 101343 - DNA, 73 bp, Homo sapiens
agtccattctacagatgggaaaactgtgaaacgcagttttagacttgaagctccaaactcctttctcgctcac

SEQ ID NO: 101344 - DNA, 73 bp, Homo sapiens
gatgggaaaactgtgaaacgcagttttagacttgaagctccaaactcctttctcgctcaccgaggctacctga

SEQ ID NO: 101345 - DNA, 72 bp, Homo sapiens
aaaactgtgaaacgcagttttagacttgaagctccaaactcctttctcgctcaccgaggctacctgagcacc

SEQ ID NO: 101346 - DNA, 72 bp, Homo sapiens
cagttttagacttgaagctccaaactcctttctcgctcaccgaggctacctgagcaccctggttcactttat

SEQ ID NO: 101347 - DNA, 71 bp, Homo sapiens
ttagacttgaagctccaaactcctttctcgctcaccgaggctacctgagcaccctggttcactttattttt

SEQ ID NO: 101348 - DNA, 76 bp, Homo sapiens
tgagctaccgcgcccagccccctggttcacttttgaaacactgggctatgcctggcgagtagtgtccgagaggcgc

SEQ ID NO: 101349 - DNA, 73 bp, Homo sapiens
cgcccagccccctggttcacttttgaaacactgggctatgcctggcgagtagtgtccgagaggcgcgtgggac

SEQ ID NO: 101350 - DNA, 76 bp, Homo sapiens
cctggttcacttttgaaacactgggctatgcctggcgagtagtgtccgagaggcgcgtgggacgtggctccgcata

SEQ ID NO: 101351 - DNA, 76 bp, Homo sapiens
cttttgaaacactgggctatgcctggcgagtagtgtccgagaggcgcgtgggacgtggctccgcatatttctccta

SEQ ID NO: 101352 - DNA, 76 bp, Homo sapiens
aaacactgggctatgcctggcgagtagtgtccgagaggcgcgtgggacgtggctccgcatatttctcctagctctt

SEQ ID NO: 101353 - DNA, 79 bp, Homo sapiens
ctatgcctggcgagtagtgtccgagaggcgcgtgggacgtggctccgcatatttctcctagctctttcaaatgaatgaa

SEQ ID NO: 101354 - DNA, 79 bp, Homo sapiens
tagtgtccgagaggcgcgtgggacgtggctccgcatatttctcctagctctttcaaatgaatgaactggaaatatcata

SEQ ID NO: 101355 - DNA, 76 bp, Homo sapiens
gacgtggctccgcatatttctcctagctctttcaaatgaatgaactggaaatatcatacaaccacttcaaaggtaa

SEQ ID NO: 101356 - DNA, 75 bp, Homo sapiens
tccgcatatttctcctagctctttcaaatgaatgaactggaaatatcatacaaccacttcaaaggtaagtgaaaa

SEQ ID NO: 101357 - DNA, 73 bp, Homo sapiens
tctcctagctctttcaaatgaatgaactggaaatatcatacaaccacttcaaaggtaagtgaaaataaggtgg

SEQ ID NO: 101358 - DNA, 71 bp, Homo sapiens
ctttcaaatgaatgaactggaaatatcatacaaccacttcaaaggtaagtgaaaataaggtggtaccagga

SEQ ID NO: 101359 - DNA, 71 bp, Homo sapiens
gaatgaactggaaatatcatacaaccacttcaaaggtaagtgaaaataaggtggtaccaggaaaatattca

SEQ ID NO: 101360 - DNA, 69 bp, Homo sapiens
gaaatatcatacaaccacttcaaaggtaagtgaaaataaggtggtaccaggaaaatattcaaagggcca

SEQ ID NO: 101361 - DNA, 68 bp, Homo sapiens
caaccacttcaaaggtaagtgaaaataaggtggtaccaggaaaatattcaaagggccataaatctatg

SEQ ID NO: 101362 - DNA, 69 bp, Homo sapiens
aggtaagtgaaaataaggtggtaccaggaaaatattcaaagggccataaatctatgtagtatctaggaa

SEQ ID NO: 101363 - DNA, 69 bp, Homo sapiens
agtgaaaataaggtggtaccaggaaaatattcaaagggccataaatctatgtagtatctaggaacttat

SEQ ID NO: 101364 - DNA, 69 bp, Homo sapiens
ggaaaatattcaaagggccataaatctatgtagtatctaggaacttatttcaaatgtttactctttatt

SEQ ID NO: 101365 - DNA, 70 bp, Homo sapiens
caaagggccataaatctatgtagtatctaggaacttatttcaaatgtttactctttattttaaataatca

SEQ ID NO: 101366 - DNA, 71 bp, Homo sapiens
ataaatctatgtagtatctaggaacttatttcaaatgtttactctttattttaaataatcagaatatgact

SEQ ID NO: 101367 - DNA, 72 bp, Homo sapiens
tatctaggaacttatttcaaatgtttactctttattttaaataatcagaatatgacttttaagccatggtga

SEQ ID NO: 101368 - DNA, 70 bp, Homo sapiens
ggaacttatttcaaatgtttactctttattttaaataatcagaatatgacttttaagccatggtgaacaa

SEQ ID NO: 101369 - DNA, 71 bp, Homo sapiens
tcaaatgtttactctttattttaaataatcagaatatgacttttaagccatggtgaacaaaaacaaataca

SEQ ID NO: 101370 - DNA, 70 bp, Homo sapiens
ctctttattttaaataatcagaatatgacttttaagccatggtgaacaaaaacaaatacaaaatcaaaca

SEQ ID NO: 101371 - DNA, 74 bp, Homo sapiens
taatcagaatatgacttttaagccatggtgaacaaaaacaaatacaaaatcaaacaagtatcaaatgttcgaca

SEQ ID NO: 101372 - DNA, 73 bp, Homo sapiens
tatgacttttaagccatggtgaacaaaaacaaatacaaaatcaaacaagtatcaaatgttcgacatttcagta

SEQ ID NO: 101373 - DNA, 74 bp, Homo sapiens
agccatggtgaacaaaaacaaatacaaaatcaaacaagtatcaaatgttcgacatttcagtatatggaagtaca

SEQ ID NO: 101374 - DNA, 74 bp, Homo sapiens
tggtgaacaaaaacaaatacaaaatcaaacaagtatcaaatgttcgacatttcagtatatggaagtacactgaa

SEQ ID NO: 101375 - DNA, 76 bp, Homo sapiens
aatacaaaatcaaacaagtatcaaatgttcgacatttcagtatatggaagtacactgaaagatttcaatagcagtc

SEQ ID NO: 101376 - DNA, 75 bp, Homo sapiens
aatcaaacaagtatcaaatgttcgacatttcagtatatggaagtacactgaaagatttcaatagcagtctgggtt

SEQ ID NO: 101377 - DNA, 75 bp, Homo sapiens
aagtatcaaatgttcgacatttcagtatatggaagtacactgaaagatttcaatagcagtctgggtttttgtcaa

SEQ ID NO: 101378 - DNA, 75 bp, Homo sapiens
gttcgacatttcagtatatggaagtacactgaaagatttcaatagcagtctgggtttttgtcaataattgcttta

SEQ ID NO: 101379 - DNA, 74 bp, Homo sapiens
cagtatatggaagtacactgaaagatttcaatagcagtctgggtttttgtcaataattgctttaatggaaacta

SEQ ID NO: 101380 - DNA, 72 bp, Homo sapiens
ggaagtacactgaaagatttcaatagcagtctgggtttttgtcaataattgctttaatggaaactaagtata

SEQ ID NO: 101381 - DNA, 75 bp, Homo sapiens
gatttcaatagcagtctgggtttttgtcaataattgctttaatggaaactaagtatatgtatatcatgaaagtac

SEQ ID NO: 101382 - DNA, 73 bp, Homo sapiens
gtcaataattgctttaatggaaactaagtatatgtatatcatgaaagtaccaaaccaatgtactgcctttaaa

SEQ ID NO: 101383 - DNA, 71 bp, Homo sapiens
gctttaatggaaactaagtatatgtatatcatgaaagtaccaaaccaatgtactgcctttaaataactttc

SEQ ID NO: 101384 - DNA, 71 bp, Homo sapiens
aagtatatgtatatcatgaaagtaccaaaccaatgtactgcctttaaataactttctaggggtcttgagag

SEQ ID NO: 101385 - DNA, 74 bp, Homo sapiens
tatatcatgaaagtaccaaaccaatgtactgcctttaaataactttctaggggtcttgagagttggcagattga

SEQ ID NO: 101386 - DNA, 71 bp, Homo sapiens
atgaaagtaccaaaccaatgtactgcctttaaataactttctaggggtcttgagagttggcagattgattc

SEQ ID NO: 101387 - DNA, 71 bp, Homo sapiens
caatgtactgcctttaaataactttctaggggtcttgagagttggcagattgattccattgtgttactttt

SEQ ID NO: 101388 - DNA, 70 bp, Homo sapiens
actgcctttaaataactttctaggggtcttgagagttggcagattgattccattgtgttactttttgaaa

SEQ ID NO: 101389 - DNA, 70 bp, Homo sapiens
aaataactttctaggggtcttgagagttggcagattgattccattgtgttactttttgaaaaggcaaaca

SEQ ID NO: 101390 - DNA, 71 bp, Homo sapiens
ggtcttgagagttggcagattgattccattgtgttactttttgaaaaggcaaacagaaaagaactttgctt

SEQ ID NO: 101391 - DNA, 70 bp, Homo sapiens
agttggcagattgattccattgtgttactttttgaaaaggcaaacagaaaagaactttgctttgggtaca

SEQ ID NO: 101392 - DNA, 72 bp, Homo sapiens
cagattgattccattgtgttactttttgaaaaggcaaacagaaaagaactttgctttgggtacatatatata

SEQ ID NO: 101393 - DNA, 82 bp, Homo sapiens
tatatatatattagcttggctttcacctatgaatgtgaatccagaatatttggctattcatgacagcaaattttaccagtga

SEQ ID NO: 101394 - DNA, 80 bp, Homo sapiens
atatattagcttggctttcacctatgaatgtgaatccagaatatttggctattcatgacagcaaattttaccagtgacac

SEQ ID NO: 101395 - DNA, 80 bp, Homo sapiens
tttcacctatgaatgtgaatccagaatatttggctattcatgacagcaaattttaccagtgacacggcataatttacaca

SEQ ID NO: 101396 - DNA, 80 bp, Homo sapiens
tatgaatgtgaatccagaatatttggctattcatgacagcaaattttaccagtgacacggcataatttacacatagaagt

SEQ ID NO: 101397 - DNA, 78 bp, Homo sapiens
aatccagaatatttggctattcatgacagcaaattttaccagtgacacggcataatttacacatagaagttgatgaaa

SEQ ID NO: 101398 - DNA, 78 bp, Homo sapiens
atttggctattcatgacagcaaattttaccagtgacacggcataatttacacatagaagttgatgaaaatataccatg

SEQ ID NO: 101399 - DNA, 82 bp, Homo sapiens
tcatgacagcaaattttaccagtgacacggcataatttacacatagaagttgatgaaaatataccatgtgtcaatcatacta

SEQ ID NO: 101400 - DNA, 78 bp, Homo sapiens
gcaaattttaccagtgacacggcataatttacacatagaagttgatgaaaatataccatgtgtcaatcatactataaa

SEQ ID NO: 101401 - DNA, 76 bp, Homo sapiens
ccagtgacacggcataatttacacatagaagttgatgaaaatataccatgtgtcaatcatactataaaaaaggaat

SEQ ID NO: 101402 - DNA, 77 bp, Homo sapiens
gcataatttacacatagaagttgatgaaaatataccatgtgtcaatcatactataaaaaaggaatttcacatccaac

SEQ ID NO: 101403 - DNA, 77 bp, Homo sapiens
tagaagttgatgaaaatataccatgtgtcaatcatactataaaaaaggaatttcacatccaactaaatgtcactggc

SEQ ID NO: 101404 - DNA, 79 bp, Homo sapiens
tgaaaatataccatgtgtcaatcatactataaaaaaggaatttcacatccaactaaatgtcactggcttgtgatatgtc

SEQ ID NO: 101405 - DNA, 81 bp, Homo sapiens
ccatgtgtcaatcatactataaaaaaggaatttcacatccaactaaatgtcactggcttgtgatatgtctgataatatagc

SEQ ID NO: 101406 - DNA, 80 bp, Homo sapiens
gtcaatcatactataaaaaaggaatttcacatccaactaaatgtcactggcttgtgatatgtctgataatatagccataa

SEQ ID NO: 101407 - DNA, 76 bp, Homo sapiens
aaaaaaggaatttcacatccaactaaatgtcactggcttgtgatatgtctgataatatagccataatgtacggtaa

SEQ ID NO: 101408 - DNA, 79 bp, Homo sapiens
aatttcacatccaactaaatgtcactggcttgtgatatgtctgataatatagccataatgtacggtaatagattatacc

SEQ ID NO: 101409 - DNA, 77 bp, Homo sapiens
ccaactaaatgtcactggcttgtgatatgtctgataatatagccataatgtacggtaatagattatacctaatttac

SEQ ID NO: 101410 - DNA, 77 bp, Homo sapiens
atgtcactggcttgtgatatgtctgataatatagccataatgtacggtaatagattatacctaatttaccctttctg

SEQ ID NO: 101411 - DNA, 77 bp, Homo sapiens
gcttgtgatatgtctgataatatagccataatgtacggtaatagattatacctaatttaccctttctgtattgccaa

SEQ ID NO: 101412 - DNA, 71 bp, Homo sapiens
tatagccataatgtacggtaatagattatacctaatttaccctttctgtattgccaacttttcataattaa

SEQ ID NO: 101413 - DNA, 69 bp, Homo sapiens
atagattatacctaatttaccctttctgtattgccaacttttcataattaatactttgatagcaaaaaa

SEQ ID NO: 101414 - DNA, 67 bp, Homo sapiens
cctaatttaccctttctgtattgccaacttttcataattaatactttgatagcaaaaaaaagcaaac

SEQ ID NO: 101415 - DNA, 69 bp, Homo sapiens
ctgtattgccaacttttcataattaatactttgatagcaaaaaaaagcaaaccttctctaaaagttgcc

SEQ ID NO: 101416 - DNA, 67 bp, Homo sapiens
gccaacttttcataattaatactttgatagcaaaaaaaagcaaaccttctctaaaagttgcctttaa

SEQ ID NO: 101417 - DNA, 70 bp, Homo sapiens
ttgatagcaaaaaaaagcaaaccttctctaaaagttgcctttaaaggaaaagaatatgcgatgaacagga

SEQ ID NO: 101418 - DNA, 69 bp, Homo sapiens
aaaaaagcaaaccttctctaaaagttgcctttaaaggaaaagaatatgcgatgaacaggagaacacaga

SEQ ID NO: 101419 - DNA, 70 bp, Homo sapiens
aaaccttctctaaaagttgcctttaaaggaaaagaatatgcgatgaacaggagaacacagaaattgccta

SEQ ID NO: 101420 - DNA, 75 bp, Homo sapiens
taaaagttgcctttaaaggaaaagaatatgcgatgaacaggagaacacagaaattgcctatcagctcaaatgaat

SEQ ID NO: 101421 - DNA, 79 bp, Homo sapiens
ttaaaggaaaagaatatgcgatgaacaggagaacacagaaattgcctatcagctcaaatgaatttaaatgcagatatgg

SEQ ID NO: 101422 - DNA, 79 bp, Homo sapiens
aaaagaatatgcgatgaacaggagaacacagaaattgcctatcagctcaaatgaatttaaatgcagatatggtgtaagg

SEQ ID NO: 101423 - DNA, 76 bp, Homo sapiens
atgaacaggagaacacagaaattgcctatcagctcaaatgaatttaaatgcagatatggtgtaagggggtagcttt

SEQ ID NO: 101424 - DNA, 74 bp, Homo sapiens
gaacacagaaattgcctatcagctcaaatgaatttaaatgcagatatggtgtaagggggtagcttttacttatt

SEQ ID NO: 101425 - DNA, 74 bp, Homo sapiens
cagaaattgcctatcagctcaaatgaatttaaatgcagatatggtgtaagggggtagcttttacttatttaagc

SEQ ID NO: 101426 - DNA, 73 bp, Homo sapiens
ctatcagctcaaatgaatttaaatgcagatatggtgtaagggggtagcttttacttatttaagctaaactgga

SEQ ID NO: 101427 - DNA, 69 bp, Homo sapiens
aatgaatttaaatgcagatatggtgtaagggggtagcttttacttatttaagctaaactggaattatta

SEQ ID NO: 101428 - DNA, 73 bp, Homo sapiens
tactattattattttggtggtagtagtggagttccatgagacccagtgtatcaaattcttactaatgcctttc

SEQ ID NO: 101429 - DNA, 72 bp, Homo sapiens
ttattttggtggtagtagtggagttccatgagacccagtgtatcaaattcttactaatgcctttcctagtta

SEQ ID NO: 101430 - DNA, 75 bp, Homo sapiens
tagtagtggagttccatgagacccagtgtatcaaattcttactaatgcctttcctagttacatggcttacaggaa

SEQ ID NO: 101431 - DNA, 74 bp, Homo sapiens
tagtggagttccatgagacccagtgtatcaaattcttactaatgcctttcctagttacatggcttacaggaaaa

SEQ ID NO: 101432 - DNA, 72 bp, Homo sapiens
gttccatgagacccagtgtatcaaattcttactaatgcctttcctagttacatggcttacaggaaaaaacaa

SEQ ID NO: 101433 - DNA, 65 bp, Homo sapiens
caacaaaaaaaactgaagcctttgagaaaactcaaggagaaatttttcaaaatgaaaaatggaaa

SEQ ID NO: 101434 - DNA, 66 bp, Homo sapiens
aaactgaagcctttgagaaaactcaaggagaaatttttcaaaatgaaaaatggaaagtggctaggg

SEQ ID NO: 101435 - DNA, 68 bp, Homo sapiens
gcctttgagaaaactcaaggagaaatttttcaaaatgaaaaatggaaagtggctagggtatgagaaaa

SEQ ID NO: 101436 - DNA, 68 bp, Homo sapiens
ctcaaggagaaatttttcaaaatgaaaaatggaaagtggctagggtatgagaaaaattctaaatctac

SEQ ID NO: 101437 - DNA, 72 bp, Homo sapiens
aatgaaaaatggaaagtggctagggtatgagaaaaattctaaatctacctgaaagcacaggagttgatgtat

SEQ ID NO: 101438 - DNA, 72 bp, Homo sapiens
aatggaaagtggctagggtatgagaaaaattctaaatctacctgaaagcacaggagttgatgtattttaatg

SEQ ID NO: 101439 - DNA, 77 bp, Homo sapiens
ctagggtatgagaaaaattctaaatctacctgaaagcacaggagttgatgtattttaatgtgctgggatgctgtgac

SEQ ID NO: 101440 - DNA, 78 bp, Homo sapiens
gaaaaattctaaatctacctgaaagcacaggagttgatgtattttaatgtgctgggatgctgtgactgccaaccgcaa

SEQ ID NO: 101441 - DNA, 82 bp, Homo sapiens
tctaaatctacctgaaagcacaggagttgatgtattttaatgtgctgggatgctgtgactgccaaccgcaatccatctgaaa

SEQ ID NO: 101442 - DNA, 82 bp, Homo sapiens
tacctgaaagcacaggagttgatgtattttaatgtgctgggatgctgtgactgccaaccgcaatccatctgaaagctgtggg

SEQ ID NO: 101443 - DNA, 82 bp, Homo sapiens
acaggagttgatgtattttaatgtgctgggatgctgtgactgccaaccgcaatccatctgaaagctgtgggtccatccatcc

SEQ ID NO: 101444 - DNA, 82 bp, Homo sapiens
atgtattttaatgtgctgggatgctgtgactgccaaccgcaatccatctgaaagctgtgggtccatccatccccatgggaga

SEQ ID NO: 101445 - DNA, 85 bp, Homo sapiens
tgctgggatgctgtgactgccaaccgcaatccatctgaaagctgtgggtccatccatccccatgggagacgtgcacccaatgaca

SEQ ID NO: 101446 - DNA, 82 bp, Homo sapiens
tgtgactgccaaccgcaatccatctgaaagctgtgggtccatccatccccatgggagacgtgcacccaatgacaaggcctga

SEQ ID NO: 101447 - DNA, 80 bp, Homo sapiens
aaccgcaatccatctgaaagctgtgggtccatccatccccatgggagacgtgcacccaatgacaaggcctgaccatctca

SEQ ID NO: 101448 - DNA, 80 bp, Homo sapiens
aatccatctgaaagctgtgggtccatccatccccatgggagacgtgcacccaatgacaaggcctgaccatctcagactgg

SEQ ID NO: 101449 - DNA, 78 bp, Homo sapiens
aaagctgtgggtccatccatccccatgggagacgtgcacccaatgacaaggcctgaccatctcagactggggctgccc

SEQ ID NO: 101450 - DNA, 79 bp, Homo sapiens
ggtccatccatccccatgggagacgtgcacccaatgacaaggcctgaccatctcagactggggctgccccatcagaccc

SEQ ID NO: 101451 - DNA, 79 bp, Homo sapiens
aatgacaaggcctgaccatctcagactggggctgccccatcagacccccaaaggacacaggcagcaggcggagctgcct

SEQ ID NO: 101452 - DNA, 82 bp, Homo sapiens
tgaccatctcagactggggctgccccatcagacccccaaaggacacaggcagcaggcggagctgccttgcacacatggaagg

SEQ ID NO: 101453 - DNA, 83 bp, Homo sapiens
tgccccatcagacccccaaaggacacaggcagcaggcggagctgccttgcacacatggaagggtctccagtgctggtcactga

SEQ ID NO: 101454 - DNA, 81 bp, Homo sapiens
atcagacccccaaaggacacaggcagcaggcggagctgccttgcacacatggaagggtctccagtgctggtcactgattta

SEQ ID NO: 101455 - DNA, 80 bp, Homo sapiens
aaaggacacaggcagcaggcggagctgccttgcacacatggaagggtctccagtgctggtcactgatttaggaaactcag

SEQ ID NO: 101456 - DNA, 78 bp, Homo sapiens
ctgccttgcacacatggaagggtctccagtgctggtcactgatttaggaaactcagtgggtggccggccatgtttatg

SEQ ID NO: 101457 - DNA, 78 bp, Homo sapiens
acacatggaagggtctccagtgctggtcactgatttaggaaactcagtgggtggccggccatgtttatgtgcttgcaa

SEQ ID NO: 101458 - DNA, 76 bp, Homo sapiens
aagggtctccagtgctggtcactgatttaggaaactcagtgggtggccggccatgtttatgtgcttgcaaagcttg

SEQ ID NO: 101459 - DNA, 78 bp, Homo sapiens
agtgctggtcactgatttaggaaactcagtgggtggccggccatgtttatgtgcttgcaaagcttggctgcggggaga

SEQ ID NO: 101460 - DNA, 76 bp, Homo sapiens
actgatttaggaaactcagtgggtggccggccatgtttatgtgcttgcaaagcttggctgcggggagagatcccag

SEQ ID NO: 101461 - DNA, 80 bp, Homo sapiens
ggtggccggccatgtttatgtgcttgcaaagcttggctgcggggagagatcccaggcacgcttgggagacacactgcatt

SEQ ID NO: 101462 - DNA, 81 bp, Homo sapiens
atgtttatgtgcttgcaaagcttggctgcggggagagatcccaggcacgcttgggagacacactgcatttgcctagtacaa

SEQ ID NO: 101463 - DNA, 81 bp, Homo sapiens
atgtgcttgcaaagcttggctgcggggagagatcccaggcacgcttgggagacacactgcatttgcctagtacaagaattc

SEQ ID NO: 101464 - DNA, 76 bp, Homo sapiens
aaagcttggctgcggggagagatcccaggcacgcttgggagacacactgcatttgcctagtacaagaattccgacc

SEQ ID NO: 101465 - DNA, 77 bp, Homo sapiens
atcccaggcacgcttgggagacacactgcatttgcctagtacaagaattccgaccccaagacacctgctacattaca

SEQ ID NO: 101466 - DNA, 76 bp, Homo sapiens
tgggagacacactgcatttgcctagtacaagaattccgaccccaagacacctgctacattacacgtcacgtttcta

SEQ ID NO: 101467 - DNA, 74 bp, Homo sapiens
actgcatttgcctagtacaagaattccgaccccaagacacctgctacattacacgtcacgtttctaggacagtg

SEQ ID NO: 101468 - DNA, 77 bp, Homo sapiens
tacaagaattccgaccccaagacacctgctacattacacgtcacgtttctaggacagtgtggagacttctgcagctg

SEQ ID NO: 101469 - DNA, 82 bp, Homo sapiens
cccaagacacctgctacattacacgtcacgtttctaggacagtgtggagacttctgcagctgtgtcatgcctctactgaaca

SEQ ID NO: 101470 - DNA, 81 bp, Homo sapiens
acctgctacattacacgtcacgtttctaggacagtgtggagacttctgcagctgtgtcatgcctctactgaacaggaccca

SEQ ID NO: 101471 - DNA, 81 bp, Homo sapiens
acattacacgtcacgtttctaggacagtgtggagacttctgcagctgtgtcatgcctctactgaacaggacccatgtgtta

SEQ ID NO: 101472 - DNA, 85 bp, Homo sapiens
agtgtggagacttctgcagctgtgtcatgcctctactgaacaggacccatgtgttagatcttaagcactgatgtttgatgtcacc

SEQ ID NO: 101473 - DNA, 85 bp, Homo sapiens
acttctgcagctgtgtcatgcctctactgaacaggacccatgtgttagatcttaagcactgatgtttgatgtcacccacacgtga

SEQ ID NO: 101474 - DNA, 81 bp, Homo sapiens
tgtgtcatgcctctactgaacaggacccatgtgttagatcttaagcactgatgtttgatgtcacccacacgtgacttttct

SEQ ID NO: 101475 - DNA, 78 bp, Homo sapiens
atgcctctactgaacaggacccatgtgttagatcttaagcactgatgtttgatgtcacccacacgtgacttttctttc

SEQ ID NO: 101476 - DNA, 74 bp, Homo sapiens
aacaggacccatgtgttagatcttaagcactgatgtttgatgtcacccacacgtgacttttctttctgactttt

SEQ ID NO: 101477 - DNA, 77 bp, Homo sapiens
atgtgttagatcttaagcactgatgtttgatgtcacccacacgtgacttttctttctgactttttcacaaagtgcaa

SEQ ID NO: 101478 - DNA, 76 bp, Homo sapiens
agatcttaagcactgatgtttgatgtcacccacacgtgacttttctttctgactttttcacaaagtgcaacatttg

SEQ ID NO: 101479 - DNA, 73 bp, Homo sapiens
actgatgtttgatgtcacccacacgtgacttttctttctgactttttcacaaagtgcaacatttgggggcaag

SEQ ID NO: 101480 - DNA, 69 bp, Homo sapiens
acacgtgacttttctttctgactttttcacaaagtgcaacatttgggggcaaggccatttcacccgtta

SEQ ID NO: 101481 - DNA, 70 bp, Homo sapiens
tttctgactttttcacaaagtgcaacatttgggggcaaggccatttcacccgttagtgacttaggaacag

SEQ ID NO: 101482 - DNA, 70 bp, Homo sapiens
actttttcacaaagtgcaacatttgggggcaaggccatttcacccgttagtgacttaggaacagtgccca

SEQ ID NO: 101483 - DNA, 71 bp, Homo sapiens
aaagtgcaacatttgggggcaaggccatttcacccgttagtgacttaggaacagtgcccagagtgtttcca

SEQ ID NO: 101484 - DNA, 73 bp, Homo sapiens
ttgggggcaaggccatttcacccgttagtgacttaggaacagtgcccagagtgtttccagggcccatgctata

SEQ ID NO: 101485 - DNA, 72 bp, Homo sapiens
ccatttcacccgttagtgacttaggaacagtgcccagagtgtttccagggcccatgctatactagaaaagaa

SEQ ID NO: 101486 - DNA, 71 bp, Homo sapiens
acttaggaacagtgcccagagtgtttccagggcccatgctatactagaaaagaaattttactgggtctcaa

SEQ ID NO: 101487 - DNA, 71 bp, Homo sapiens
tgcccagagtgtttccagggcccatgctatactagaaaagaaattttactgggtctcaacacaaaacgaaa

SEQ ID NO: 101488 - DNA, 70 bp, Homo sapiens
tgtttccagggcccatgctatactagaaaagaaattttactgggtctcaacacaaaacgaaatccagaaa

SEQ ID NO: 101489 - DNA, 69 bp, Homo sapiens
cagggcccatgctatactagaaaagaaattttactgggtctcaacacaaaacgaaatccagaaaaataa

SEQ ID NO: 101490 - DNA, 65 bp, Homo sapiens
aaagaaattttactgggtctcaacacaaaacgaaatccagaaaaataaatcaaaatttataaatg

SEQ ID NO: 101491 - DNA, 67 bp, Homo sapiens
tactgggtctcaacacaaaacgaaatccagaaaaataaatcaaaatttataaatgtttaattaaatg

SEQ ID NO: 101492 - DNA, 68 bp, Homo sapiens
atgtaaaaaaaaaagtgtaccattatggcaacttcatgaatttttaaatttaggagccacagatcttt

SEQ ID NO: 101493 - DNA, 69 bp, Homo sapiens
tgtaccattatggcaacttcatgaatttttaaatttaggagccacagatcttttttggttaaagttttc

SEQ ID NO: 101494 - DNA, 69 bp, Homo sapiens
ggcaacttcatgaatttttaaatttaggagccacagatcttttttggttaaagttttctcatttccaga

SEQ ID NO: 101495 - DNA, 67 bp, Homo sapiens
tttttaaatttaggagccacagatcttttttggttaaagttttctcatttccagaaggatttcaaga

SEQ ID NO: 101496 - DNA, 70 bp, Homo sapiens
ttaggagccacagatcttttttggttaaagttttctcatttccagaaggatttcaagactaaatctgaat

SEQ ID NO: 101497 - DNA, 70 bp, Homo sapiens
gccacagatcttttttggttaaagttttctcatttccagaaggatttcaagactaaatctgaattatacc

SEQ ID NO: 101498 - DNA, 70 bp, Homo sapiens
ttggttaaagttttctcatttccagaaggatttcaagactaaatctgaattatacctgtcctcttttgag

SEQ ID NO: 101499 - DNA, 76 bp, Homo sapiens
ttttctcatttccagaaggatttcaagactaaatctgaattatacctgtcctcttttgagtatgtattgtgtgcca

SEQ ID NO: 101500 - DNA, 76 bp, Homo sapiens
atttccagaaggatttcaagactaaatctgaattatacctgtcctcttttgagtatgtattgtgtgccaggcatgg

SEQ ID NO: 101501 - DNA, 78 bp, Homo sapiens
atttcaagactaaatctgaattatacctgtcctcttttgagtatgtattgtgtgccaggcatggttctaagccacaga

SEQ ID NO: 101502 - DNA, 81 bp, Homo sapiens
actaaatctgaattatacctgtcctcttttgagtatgtattgtgtgccaggcatggttctaagccacagaggctgctgcat

SEQ ID NO: 101503 - DNA, 85 bp, Homo sapiens
tcttttgagtatgtattgtgtgccaggcatggttctaagccacagaggctgctgcattcagccttccagtgatgtgacggtggta

SEQ ID NO: 101504 - DNA, 84 bp, Homo sapiens
tatgtattgtgtgccaggcatggttctaagccacagaggctgctgcattcagccttccagtgatgtgacggtggtactaccaac

SEQ ID NO: 101505 - DNA, 83 bp, Homo sapiens
ttgtgtgccaggcatggttctaagccacagaggctgctgcattcagccttccagtgatgtgacggtggtactaccaactgtcc

SEQ ID NO: 101506 - DNA, 76 bp, Homo sapiens
atggttctaagccacagaggctgctgcattcagccttccagtgatgtgacggtggtactaccaactgtccccgttt

SEQ ID NO: 101507 - DNA, 78 bp, Homo sapiens
aggctgctgcattcagccttccagtgatgtgacggtggtactaccaactgtccccgttttggagaggctcagtcagac

SEQ ID NO: 101508 - DNA, 77 bp, Homo sapiens
attcagccttccagtgatgtgacggtggtactaccaactgtccccgttttggagaggctcagtcagaccagctgctc

SEQ ID NO: 101509 - DNA, 74 bp, Homo sapiens
agtgatgtgacggtggtactaccaactgtccccgttttggagaggctcagtcagaccagctgctcccccaggaa

SEQ ID NO: 101510 - DNA, 76 bp, Homo sapiens
tggtactaccaactgtccccgttttggagaggctcagtcagaccagctgctcccccaggaatcggctctcatagtg

SEQ ID NO: 101511 - DNA, 77 bp, Homo sapiens
taccaactgtccccgttttggagaggctcagtcagaccagctgctcccccaggaatcggctctcatagtgttagcaa

SEQ ID NO: 101512 - DNA, 79 bp, Homo sapiens
cgttttggagaggctcagtcagaccagctgctcccccaggaatcggctctcatagtgttagcaagtgccaaaatggaga

SEQ ID NO: 101513 - DNA, 77 bp, Homo sapiens
gaccagctgctcccccaggaatcggctctcatagtgttagcaagtgccaaaatggagacctcaacccctagtcttga

SEQ ID NO: 101514 - DNA, 75 bp, Homo sapiens
tcccccaggaatcggctctcatagtgttagcaagtgccaaaatggagacctcaacccctagtcttgattacatgt

SEQ ID NO: 101515 - DNA, 77 bp, Homo sapiens
aggaatcggctctcatagtgttagcaagtgccaaaatggagacctcaacccctagtcttgattacatgttggtggca

SEQ ID NO: 101516 - DNA, 78 bp, Homo sapiens
tagcaagtgccaaaatggagacctcaacccctagtcttgattacatgttggtggcagagaaggcagggcagccactta

SEQ ID NO: 101517 - DNA, 77 bp, Homo sapiens
aatggagacctcaacccctagtcttgattacatgttggtggcagagaaggcagggcagccacttacagccagagaat

SEQ ID NO: 101518 - DNA, 78 bp, Homo sapiens
tcaacccctagtcttgattacatgttggtggcagagaaggcagggcagccacttacagccagagaatttcagaacaaa

SEQ ID NO: 101519 - DNA, 76 bp, Homo sapiens
ttacatgttggtggcagagaaggcagggcagccacttacagccagagaatttcagaacaaattagaaagcccttta

SEQ ID NO: 101520 - DNA, 72 bp, Homo sapiens
gcagagaaggcagggcagccacttacagccagagaatttcagaacaaattagaaagccctttaaaaacttta

SEQ ID NO: 101521 - DNA, 70 bp, Homo sapiens
cagggcagccacttacagccagagaatttcagaacaaattagaaagccctttaaaaactttacagcaaaa

SEQ ID NO: 101522 - DNA, 67 bp, Homo sapiens
gccacttacagccagagaatttcagaacaaattagaaagccctttaaaaactttacagcaaaaaaac

SEQ ID NO: 101523 - DNA, 67 bp, Homo sapiens
gccagagaatttcagaacaaattagaaagccctttaaaaactttacagcaaaaaaacgacgtctatc

SEQ ID NO: 101524 - DNA, 67 bp, Homo sapiens
cagaacaaattagaaagccctttaaaaactttacagcaaaaaaacgacgtctatctcatgtaccacc

SEQ ID NO: 101525 - DNA, 76 bp, Homo sapiens
ttaaaaactttacagcaaaaaaacgacgtctatctcatgtaccacctgagtgcatgtggatttgcctgatgtgatt

SEQ ID NO: 101526 - DNA, 80 bp, Homo sapiens
aaaaacgacgtctatctcatgtaccacctgagtgcatgtggatttgcctgatgtgatttaggatggcactgcccagggaa

SEQ ID NO: 101527 - DNA, 82 bp, Homo sapiens
acgtctatctcatgtaccacctgagtgcatgtggatttgcctgatgtgatttaggatggcactgcccagggaaggcctggag

SEQ ID NO: 101528 - DNA, 81 bp, Homo sapiens
taccacctgagtgcatgtggatttgcctgatgtgatttaggatggcactgcccagggaaggcctggaggcctcggcctcta

SEQ ID NO: 101529 - DNA, 79 bp, Homo sapiens
ctgagtgcatgtggatttgcctgatgtgatttaggatggcactgcccagggaaggcctggaggcctcggcctctaaggg

SEQ ID NO: 101530 - DNA, 74 bp, Homo sapiens
atttgcctgatgtgatttaggatggcactgcccagggaaggcctggaggcctcggcctctaaggggccagttta

SEQ ID NO: 101531 - DNA, 68 bp, Homo sapiens
atggcactgcccagggaaggcctggaggcctcggcctctaaggggccagtttacgggaacgaacttac

SEQ ID NO: 101532 - DNA, 65 bp, Homo sapiens
ccagggaaggcctggaggcctcggcctctaaggggccagtttacgggaacgaacttacggcttta

SEQ ID NO: 101533 - DNA, 67 bp, Homo sapiens
aggcctggaggcctcggcctctaaggggccagtttacgggaacgaacttacggctttattttgctga

SEQ ID NO: 101534 - DNA, 67 bp, Homo sapiens
tcggcctctaaggggccagtttacgggaacgaacttacggctttattttgctgaccatattttgtta

SEQ ID NO: 101535 - DNA, 67 bp, Homo sapiens
agtttacgggaacgaacttacggctttattttgctgaccatattttgttaccctttttgcatgagaa

SEQ ID NO: 101536 - DNA, 69 bp, Homo sapiens
ggaacgaacttacggctttattttgctgaccatattttgttaccctttttgcatgagaactaatttaga

SEQ ID NO: 101537 - DNA, 74 bp, Homo sapiens
gctttattttgctgaccatattttgttaccctttttgcatgagaactaatttagagattatctcgtcccattgc

SEQ ID NO: 101538 - DNA, 73 bp, Homo sapiens
ttttgctgaccatattttgttaccctttttgcatgagaactaatttagagattatctcgtcccattgcctggt

SEQ ID NO: 101539 - DNA, 73 bp, Homo sapiens
atattttgttaccctttttgcatgagaactaatttagagattatctcgtcccattgcctggttcaacaggaga

SEQ ID NO: 101540 - DNA, 74 bp, Homo sapiens
taccctttttgcatgagaactaatttagagattatctcgtcccattgcctggttcaacaggagaggaaaatgaa

SEQ ID NO: 101541 - DNA, 71 bp, Homo sapiens
agaactaatttagagattatctcgtcccattgcctggttcaacaggagaggaaaatgaagacgaaagtatt

SEQ ID NO: 101542 - DNA, 73 bp, Homo sapiens
taatttagagattatctcgtcccattgcctggttcaacaggagaggaaaatgaagacgaaagtatttaagata

SEQ ID NO: 101543 - DNA, 73 bp, Homo sapiens
attatctcgtcccattgcctggttcaacaggagaggaaaatgaagacgaaagtatttaagataattgctcaag

SEQ ID NO: 101544 - DNA, 73 bp, Homo sapiens
gttcaacaggagaggaaaatgaagacgaaagtatttaagataattgctcaagttcacacccactggcctggtg

SEQ ID NO: 101545 - DNA, 72 bp, Homo sapiens
aagacgaaagtatttaagataattgctcaagttcacacccactggcctggtggcaccagtgtgaaaacccag

SEQ ID NO: 101546 - DNA, 72 bp, Homo sapiens
tatttaagataattgctcaagttcacacccactggcctggtggcaccagtgtgaaaacccaggtccctaaat

SEQ ID NO: 101547 - DNA, 70 bp, Homo sapiens
ttcacacccactggcctggtggcaccagtgtgaaaacccaggtccctaaattcaggatccagaaaacttt

SEQ ID NO: 101548 - DNA, 69 bp, Homo sapiens
actggcctggtggcaccagtgtgaaaacccaggtccctaaattcaggatccagaaaactttttacatgt

SEQ ID NO: 101549 - DNA, 69 bp, Homo sapiens
caccagtgtgaaaacccaggtccctaaattcaggatccagaaaactttttacatgtttgaagcttaaga

SEQ ID NO: 101550 - DNA, 68 bp, Homo sapiens
gtgtgaaaacccaggtccctaaattcaggatccagaaaactttttacatgtttgaagcttaagaaaca

SEQ ID NO: 101551 - DNA, 70 bp, Homo sapiens
aggtccctaaattcaggatccagaaaactttttacatgtttgaagcttaagaaacagaagcctaaatgca

SEQ ID NO: 101552 - DNA, 70 bp, Homo sapiens
aattcaggatccagaaaactttttacatgtttgaagcttaagaaacagaagcctaaatgcagacagggtt

SEQ ID NO: 101553 - DNA, 76 bp, Homo sapiens
tttttttttcttatggcatgtcatacaatgaattctaacaaggactgcaatatattagtttagatcctgacctcac

SEQ ID NO: 101554 - DNA, 81 bp, Homo sapiens
tttcttatggcatgtcatacaatgaattctaacaaggactgcaatatattagtttagatcctgacctcactggtgtggcat

SEQ ID NO: 101555 - DNA, 82 bp, Homo sapiens
ttatggcatgtcatacaatgaattctaacaaggactgcaatatattagtttagatcctgacctcactggtgtggcattcaaa

SEQ ID NO: 101556 - DNA, 81 bp, Homo sapiens
tcatacaatgaattctaacaaggactgcaatatattagtttagatcctgacctcactggtgtggcattcaaattagtgata

SEQ ID NO: 101557 - DNA, 76 bp, Homo sapiens
aattctaacaaggactgcaatatattagtttagatcctgacctcactggtgtggcattcaaattagtgatatggtt

SEQ ID NO: 101558 - DNA, 75 bp, Homo sapiens
aatatattagtttagatcctgacctcactggtgtggcattcaaattagtgatatggttttgcgagggtccagacg

SEQ ID NO: 101559 - DNA, 75 bp, Homo sapiens
ttagatcctgacctcactggtgtggcattcaaattagtgatatggttttgcgagggtccagacggaaagagaaat

SEQ ID NO: 101560 - DNA, 74 bp, Homo sapiens
tgtggcattcaaattagtgatatggttttgcgagggtccagacggaaagagaaattcaatgtaatggtgtaagt

SEQ ID NO: 101561 - DNA, 71 bp, Homo sapiens
ttcaaattagtgatatggttttgcgagggtccagacggaaagagaaattcaatgtaatggtgtaagtttct

SEQ ID NO: 101562 - DNA, 71 bp, Homo sapiens
gtgatatggttttgcgagggtccagacggaaagagaaattcaatgtaatggtgtaagtttcttccctcttc

SEQ ID NO: 101563 - DNA, 73 bp, Homo sapiens
tttgcgagggtccagacggaaagagaaattcaatgtaatggtgtaagtttcttccctcttctctgctcccaca

SEQ ID NO: 101564 - DNA, 73 bp, Homo sapiens
agacggaaagagaaattcaatgtaatggtgtaagtttcttccctcttctctgctcccacattggattgagaag

SEQ ID NO: 101565 - DNA, 77 bp, Homo sapiens
aaattcaatgtaatggtgtaagtttcttccctcttctctgctcccacattggattgagaaggtgcctagatcatctc

SEQ ID NO: 101566 - DNA, 76 bp, Homo sapiens
aatgtaatggtgtaagtttcttccctcttctctgctcccacattggattgagaaggtgcctagatcatctctttgg

SEQ ID NO: 101567 - DNA, 76 bp, Homo sapiens
taagtttcttccctcttctctgctcccacattggattgagaaggtgcctagatcatctctttgggttttcacatta

SEQ ID NO: 101568 - DNA, 76 bp, Homo sapiens
ctcttctctgctcccacattggattgagaaggtgcctagatcatctctttgggttttcacattacctggaaggaac

SEQ ID NO: 101569 - DNA, 76 bp, Homo sapiens
ctctgctcccacattggattgagaaggtgcctagatcatctctttgggttttcacattacctggaaggaactctta

SEQ ID NO: 101570 - DNA, 73 bp, Homo sapiens
ctcccacattggattgagaaggtgcctagatcatctctttgggttttcacattacctggaaggaactcttatt

SEQ ID NO: 101571 - DNA, 72 bp, Homo sapiens
acattggattgagaaggtgcctagatcatctctttgggttttcacattacctggaaggaactcttattttgt

SEQ ID NO: 101572 - DNA, 70 bp, Homo sapiens
attgagaaggtgcctagatcatctctttgggttttcacattacctggaaggaactcttattttgttttct

SEQ ID NO: 101573 - DNA, 69 bp, Homo sapiens
agaaggtgcctagatcatctctttgggttttcacattacctggaaggaactcttattttgttttctttc

SEQ ID NO: 101574 - DNA, 72 bp, Homo sapiens
gcctagatcatctctttgggttttcacattacctggaaggaactcttattttgttttctttctatagcaata

SEQ ID NO: 101575 - DNA, 72 bp, Homo sapiens
ctagatcatctctttgggttttcacattacctggaaggaactcttattttgttttctttctatagcaataca

SEQ ID NO: 101576 - DNA, 70 bp, Homo sapiens
ctctttgggttttcacattacctggaaggaactcttattttgttttctttctatagcaatacaaatgcca

SEQ ID NO: 101577 - DNA, 70 bp, Homo sapiens
ctttgggttttcacattacctggaaggaactcttattttgttttctttctatagcaatacaaatgccatc

SEQ ID NO: 101578 - DNA, 71 bp, Homo sapiens
gggttttcacattacctggaaggaactcttattttgttttctttctatagcaatacaaatgccatcttaga

SEQ ID NO: 101579 - DNA, 72 bp, Homo sapiens
acctggaaggaactcttattttgttttctttctatagcaatacaaatgccatcttagaaaatctcagtggtg

SEQ ID NO: 101580 - DNA, 75 bp, Homo sapiens
aggaactcttattttgttttctttctatagcaatacaaatgccatcttagaaaatctcagtggtggccaagcaca

SEQ ID NO: 101581 - DNA, 66 bp, Homo sapiens
aaacaaaacaacaaccacacacaaaaaacctcagtggtttctgtataagacaggaaaagttaccaa

SEQ ID NO: 101582 - DNA, 69 bp, Homo sapiens
aacaacaaccacacacaaaaaacctcagtggtttctgtataagacaggaaaagttaccaagaatacaca

SEQ ID NO: 101583 - DNA, 72 bp, Homo sapiens
acacaaaaaacctcagtggtttctgtataagacaggaaaagttaccaagaatacacaggccacgccagctca

SEQ ID NO: 101584 - DNA, 77 bp, Homo sapiens
aaacctcagtggtttctgtataagacaggaaaagttaccaagaatacacaggccacgccagctcactcagagctgca

SEQ ID NO: 101585 - DNA, 77 bp, Homo sapiens
tttctgtataagacaggaaaagttaccaagaatacacaggccacgccagctcactcagagctgcaccaggtgggtta

SEQ ID NO: 101586 - DNA, 77 bp, Homo sapiens
taagacaggaaaagttaccaagaatacacaggccacgccagctcactcagagctgcaccaggtgggttactgccgct

SEQ ID NO: 101587 - DNA, 78 bp, Homo sapiens
aagttaccaagaatacacaggccacgccagctcactcagagctgcaccaggtgggttactgccgcttctgggacagaa

SEQ ID NO: 101588 - DNA, 78 bp, Homo sapiens
aatacacaggccacgccagctcactcagagctgcaccaggtgggttactgccgcttctgggacagaagcccattccct

SEQ ID NO: 101589 - DNA, 77 bp, Homo sapiens
acgccagctcactcagagctgcaccaggtgggttactgccgcttctgggacagaagcccattcccttcacggtcctc

SEQ ID NO: 101590 - DNA, 73 bp, Homo sapiens
actcagagctgcaccaggtgggttactgccgcttctgggacagaagcccattcccttcacggtcctcttaggt

SEQ ID NO: 101591 - DNA, 71 bp, Homo sapiens
caccaggtgggttactgccgcttctgggacagaagcccattcccttcacggtcctcttaggttcccattca

SEQ ID NO: 101592 - DNA, 68 bp, Homo sapiens
cttctgggacagaagcccattcccttcacggtcctcttaggttcccattcaccccaggggccctttca

SEQ ID NO: 101593 - DNA, 66 bp, Homo sapiens
agaagcccattcccttcacggtcctcttaggttcccattcaccccaggggccctttcagaccttaa

SEQ ID NO: 101594 - DNA, 65 bp, Homo sapiens
attcccttcacggtcctcttaggttcccattcaccccaggggccctttcagaccttaacctccac

SEQ ID NO: 101595 - DNA, 67 bp, Homo sapiens
gtcctcttaggttcccattcaccccaggggccctttcagaccttaacctccactctagggtcaagga

SEQ ID NO: 101596 - DNA, 68 bp, Homo sapiens
taggttcccattcaccccaggggccctttcagaccttaacctccactctagggtcaaggaagtctgta

SEQ ID NO: 101597 - DNA, 71 bp, Homo sapiens
cattcaccccaggggccctttcagaccttaacctccactctagggtcaaggaagtctgtatgcatgtaaaa

SEQ ID NO: 101598 - DNA, 70 bp, Homo sapiens
attcaccccaggggccctttcagaccttaacctccactctagggtcaaggaagtctgtatgcatgtaaaa

SEQ ID NO: 101599 - DNA, 70 bp, Homo sapiens
aggggccctttcagaccttaacctccactctagggtcaaggaagtctgtatgcatgtaaaattcttcttc

SEQ ID NO: 101600 - DNA, 71 bp, Homo sapiens
ccctttcagaccttaacctccactctagggtcaaggaagtctgtatgcatgtaaaattcttcttcttggac

SEQ ID NO: 101601 - DNA, 72 bp, Homo sapiens
tttcagaccttaacctccactctagggtcaaggaagtctgtatgcatgtaaaattcttcttcttggactggt

SEQ ID NO: 101602 - DNA, 74 bp, Homo sapiens
taacctccactctagggtcaaggaagtctgtatgcatgtaaaattcttcttcttggactggtttgatactacta

SEQ ID NO: 101603 - DNA, 73 bp, Homo sapiens
cactctagggtcaaggaagtctgtatgcatgtaaaattcttcttcttggactggtttgatactactaaaaata

SEQ ID NO: 101604 - DNA, 72 bp, Homo sapiens
actctagggtcaaggaagtctgtatgcatgtaaaattcttcttcttggactggtttgatactactaaaaata

SEQ ID NO: 101605 - DNA, 73 bp, Homo sapiens
gggtcaaggaagtctgtatgcatgtaaaattcttcttcttggactggtttgatactactaaaaatattcaaca

SEQ ID NO: 101606 - DNA, 74 bp, Homo sapiens
ggaagtctgtatgcatgtaaaattcttcttcttggactggtttgatactactaaaaatattcaacagaaagaca

SEQ ID NO: 101607 - DNA, 74 bp, Homo sapiens
ctgtatgcatgtaaaattcttcttcttggactggtttgatactactaaaaatattcaacagaaagacattctaa

SEQ ID NO: 101608 - DNA, 71 bp, Homo sapiens
attcttcttcttggactggtttgatactactaaaaatattcaacagaaagacattctaaaattcgctggaa

SEQ ID NO: 101609 - DNA, 72 bp, Homo sapiens
ttggactggtttgatactactaaaaatattcaacagaaagacattctaaaattcgctggaaacatttaggca

SEQ ID NO: 101610 - DNA, 71 bp, Homo sapiens
ctggtttgatactactaaaaatattcaacagaaagacattctaaaattcgctggaaacatttaggcacgat

SEQ ID NO: 101611 - DNA, 72 bp, Homo sapiens
ctactaaaaatattcaacagaaagacattctaaaattcgctggaaacatttaggcacgattattattaatgc

SEQ ID NO: 101612 - DNA, 71 bp, Homo sapiens
caacagaaagacattctaaaattcgctggaaacatttaggcacgattattattaatgctttaaaaactgcc

SEQ ID NO: 101613 - DNA, 71 bp, Homo sapiens
gacattctaaaattcgctggaaacatttaggcacgattattattaatgctttaaaaactgcctttgccaag

SEQ ID NO: 101614 - DNA, 71 bp, Homo sapiens
aaaattcgctggaaacatttaggcacgattattattaatgctttaaaaactgcctttgccaagtcatcagg

SEQ ID NO: 101615 - DNA, 73 bp, Homo sapiens
aacatttaggcacgattattattaatgctttaaaaactgcctttgccaagtcatcaggtagttgaggagctta

SEQ ID NO: 101616 - DNA, 71 bp, Homo sapiens
attaatgctttaaaaactgcctttgccaagtcatcaggtagttgaggagcttaacacagaaggaattaaaa

SEQ ID NO: 101617 - DNA, 70 bp, Homo sapiens
tttaaaaactgcctttgccaagtcatcaggtagttgaggagcttaacacagaaggaattaaaagtaccag

SEQ ID NO: 101618 - DNA, 69 bp, Homo sapiens
ctttgccaagtcatcaggtagttgaggagcttaacacagaaggaattaaaagtaccagggggaagttcc

SEQ ID NO: 101619 - DNA, 68 bp, Homo sapiens
aagtcatcaggtagttgaggagcttaacacagaaggaattaaaagtaccagggggaagttcccccaga

SEQ ID NO: 101620 - DNA, 64 bp, Homo sapiens
aggtagttgaggagcttaacacagaaggaattaaaagtaccagggggaagttcccccagaactt

SEQ ID NO: 101621 - DNA, 66 bp, Homo sapiens
cttaacacagaaggaattaaaagtaccagggggaagttcccccagaactttcagcttggcctgaaa

SEQ ID NO: 101622 - DNA, 66 bp, Homo sapiens
aggaattaaaagtaccagggggaagttcccccagaactttcagcttggcctgaaatgcctttcaaa

SEQ ID NO: 101623 - DNA, 66 bp, Homo sapiens
ttaaaagtaccagggggaagttcccccagaactttcagcttggcctgaaatgcctttcaaagtggg

SEQ ID NO: 101624 - DNA, 71 bp, Homo sapiens
ggaagttcccccagaactttcagcttggcctgaaatgcctttcaaagtggggaggaggggatgtgagtcac

SEQ ID NO: 101625 - DNA, 75 bp, Homo sapiens
ctgaaatgcctttcaaagtggggaggaggggatgtgagtcacgacagcattttcctcctctttgagcctctgcct

SEQ ID NO: 101626 - DNA, 77 bp, Homo sapiens
ttcaaagtggggaggaggggatgtgagtcacgacagcattttcctcctctttgagcctctgccttgctcctgcttta

SEQ ID NO: 101627 - DNA, 76 bp, Homo sapiens
ggaggaggggatgtgagtcacgacagcattttcctcctctttgagcctctgccttgctcctgctttaggtgggagg

SEQ ID NO: 101628 - DNA, 76 bp, Homo sapiens
atgtgagtcacgacagcattttcctcctctttgagcctctgccttgctcctgctttaggtgggaggggaggaagaa

SEQ ID NO: 101629 - DNA, 72 bp, Homo sapiens
acgacagcattttcctcctctttgagcctctgccttgctcctgctttaggtgggaggggaggaagaattact

SEQ ID NO: 101630 - DNA, 70 bp, Homo sapiens
ttttcctcctctttgagcctctgccttgctcctgctttaggtgggaggggaggaagaattactttctaat

SEQ ID NO: 101631 - DNA, 75 bp, Homo sapiens
tctttgagcctctgccttgctcctgctttaggtgggaggggaggaagaattactttctaattcctgtgtggatca

SEQ ID NO: 101632 - DNA, 77 bp, Homo sapiens
tgccttgctcctgctttaggtgggaggggaggaagaattactttctaattcctgtgtggatcaggattgcatctaga

SEQ ID NO: 101633 - DNA, 74 bp, Homo sapiens
tgctttaggtgggaggggaggaagaattactttctaattcctgtgtggatcaggattgcatctagaaagaacta

SEQ ID NO: 101634 - DNA, 72 bp, Homo sapiens
gggaggggaggaagaattactttctaattcctgtgtggatcaggattgcatctagaaagaactaaagtccaa

SEQ ID NO: 101635 - DNA, 77 bp, Homo sapiens
ttactttctaattcctgtgtggatcaggattgcatctagaaagaactaaagtccaagtccaaatctgatgaattcaa

SEQ ID NO: 101636 - DNA, 76 bp, Homo sapiens
aattcctgtgtggatcaggattgcatctagaaagaactaaagtccaagtccaaatctgatgaattcaagggaagag

SEQ ID NO: 101637 - DNA, 76 bp, Homo sapiens
tggatcaggattgcatctagaaagaactaaagtccaagtccaaatctgatgaattcaagggaagaggaattaagta

SEQ ID NO: 101638 - DNA, 76 bp, Homo sapiens
tctagaaagaactaaagtccaagtccaaatctgatgaattcaagggaagaggaattaagtagctcatcattcacta

SEQ ID NO: 101639 - DNA, 73 bp, Homo sapiens
aaagaactaaagtccaagtccaaatctgatgaattcaagggaagaggaattaagtagctcatcattcactacc

SEQ ID NO: 101640 - DNA, 75 bp, Homo sapiens
aagtccaaatctgatgaattcaagggaagaggaattaagtagctcatcattcactacctggaaaatacgcttgaa

SEQ ID NO: 101641 - DNA, 76 bp, Homo sapiens
aaatctgatgaattcaagggaagaggaattaagtagctcatcattcactacctggaaaatacgcttgaagcaattc

SEQ ID NO: 101642 - DNA, 79 bp, Homo sapiens
aggaattaagtagctcatcattcactacctggaaaatacgcttgaagcaattcccagtgagcaatgcgattgtggattg

SEQ ID NO: 101643 - DNA, 80 bp, Homo sapiens
taagtagctcatcattcactacctggaaaatacgcttgaagcaattcccagtgagcaatgcgattgtggattggtaatta

SEQ ID NO: 101644 - DNA, 79 bp, Homo sapiens
atcattcactacctggaaaatacgcttgaagcaattcccagtgagcaatgcgattgtggattggtaattacaatcctga

SEQ ID NO: 101645 - DNA, 83 bp, Homo sapiens
ttgaagcaattcccagtgagcaatgcgattgtggattggtaattacaatcctgagatcacagatccataaaaccatctgacat

SEQ ID NO: 101646 - DNA, 81 bp, Homo sapiens
aattcccagtgagcaatgcgattgtggattggtaattacaatcctgagatcacagatccataaaaccatctgacattttca

SEQ ID NO: 101647 - DNA, 83 bp, Homo sapiens
agcaatgcgattgtggattggtaattacaatcctgagatcacagatccataaaaccatctgacattttcataatcattcaaga

SEQ ID NO: 101648 - DNA, 82 bp, Homo sapiens
taattacaatcctgagatcacagatccataaaaccatctgacattttcataatcattcaagagcaaagagtgacacatcttt

SEQ ID NO: 101649 - DNA, 75 bp, Homo sapiens
ataaaaccatctgacattttcataatcattcaagagcaaagagtgacacatcttttcatccccccggcggctacg

SEQ ID NO: 101650 - DNA, 78 bp, Homo sapiens
acattttcataatcattcaagagcaaagagtgacacatcttttcatccccccggcggctacgtgctgtgcacacgggc

SEQ ID NO: 101651 - DNA, 77 bp, Homo sapiens
ataatcattcaagagcaaagagtgacacatcttttcatccccccggcggctacgtgctgtgcacacgggccctccac

SEQ ID NO: 101652 - DNA, 72 bp, Homo sapiens
agcaaagagtgacacatcttttcatccccccggcggctacgtgctgtgcacacgggccctccacgaaaccct

SEQ ID NO: 101653 - DNA, 71 bp, Homo sapiens
tgacacatcttttcatccccccggcggctacgtgctgtgcacacgggccctccacgaaaccctttgttaaa

SEQ ID NO: 101654 - DNA, 67 bp, Homo sapiens
atcttttcatccccccggcggctacgtgctgtgcacacgggccctccacgaaaccctttgttaaagg

SEQ ID NO: 101655 - DNA, 68 bp, Homo sapiens
cggcggctacgtgctgtgcacacgggccctccacgaaaccctttgttaaagggggacccagacttgga

SEQ ID NO: 101656 - DNA, 68 bp, Homo sapiens
tacgtgctgtgcacacgggccctccacgaaaccctttgttaaagggggacccagacttggaccactac

SEQ ID NO: 101657 - DNA, 67 bp, Homo sapiens
acacgggccctccacgaaaccctttgttaaagggggacccagacttggaccactactctgcaggtca

SEQ ID NO: 101658 - DNA, 68 bp, Homo sapiens
ctccacgaaaccctttgttaaagggggacccagacttggaccactactctgcaggtcactccacttta

SEQ ID NO: 101659 - DNA, 71 bp, Homo sapiens
taaagggggacccagacttggaccactactctgcaggtcactccactttacccatctttcgtgaaggccaa

SEQ ID NO: 101660 - DNA, 73 bp, Homo sapiens
actactctgcaggtcactccactttacccatctttcgtgaaggccaacaccggaagaagaggtctatgttgta

SEQ ID NO: 101661 - DNA, 70 bp, Homo sapiens
aggtcactccactttacccatctttcgtgaaggccaacaccggaagaagaggtctatgttgtacaacacc

SEQ ID NO: 101662 - DNA, 68 bp, Homo sapiens
actccactttacccatctttcgtgaaggccaacaccggaagaagaggtctatgttgtacaacaccccg

SEQ ID NO: 101663 - DNA, 68 bp, Homo sapiens
acccatctttcgtgaaggccaacaccggaagaagaggtctatgttgtacaacaccccggggtcaggtc

SEQ ID NO: 101664 - DNA, 68 bp, Homo sapiens
aaggccaacaccggaagaagaggtctatgttgtacaacaccccggggtcaggtcccccttcatgccag

SEQ ID NO: 101665 - DNA, 67 bp, Homo sapiens
aacaccggaagaagaggtctatgttgtacaacaccccggggtcaggtcccccttcatgccaggtccc

SEQ ID NO: 101666 - DNA, 67 bp, Homo sapiens
aagaggtctatgttgtacaacaccccggggtcaggtcccccttcatgccaggtccccaagtggaccc

SEQ ID NO: 101667 - DNA, 69 bp, Homo sapiens
atgttgtacaacaccccggggtcaggtcccccttcatgccaggtccccaagtggaccctggtgacagaa

SEQ ID NO: 101668 - DNA, 71 bp, Homo sapiens
cccggggtcaggtcccccttcatgccaggtccccaagtggaccctggtgacagaagcagaaccaactgctg

SEQ ID NO: 101669 - DNA, 75 bp, Homo sapiens
aggtcccccttcatgccaggtccccaagtggaccctggtgacagaagcagaaccaactgctggcacctgtgacca

SEQ ID NO: 101670 - DNA, 82 bp, Homo sapiens
atgccaggtccccaagtggaccctggtgacagaagcagaaccaactgctggcacctgtgaccagcatggccatggctgtgta

SEQ ID NO: 101671 - DNA, 82 bp, Homo sapiens
cccaagtggaccctggtgacagaagcagaaccaactgctggcacctgtgaccagcatggccatggctgtgtattatgaactc

SEQ ID NO: 101672 - DNA, 81 bp, Homo sapiens
accctggtgacagaagcagaaccaactgctggcacctgtgaccagcatggccatggctgtgtattatgaactctggggagg

SEQ ID NO: 101673 - DNA, 81 bp, Homo sapiens
acagaagcagaaccaactgctggcacctgtgaccagcatggccatggctgtgtattatgaactctggggaggtgtgggagg

SEQ ID NO: 101674 - DNA, 78 bp, Homo sapiens
agaaccaactgctggcacctgtgaccagcatggccatggctgtgtattatgaactctggggaggtgtgggaggggagg

SEQ ID NO: 101675 - DNA, 79 bp, Homo sapiens
ctggcacctgtgaccagcatggccatggctgtgtattatgaactctggggaggtgtgggaggggagggtacttcctgca

SEQ ID NO: 101676 - DNA, 79 bp, Homo sapiens
tgtgaccagcatggccatggctgtgtattatgaactctggggaggtgtgggaggggagggtacttcctgcagccctgcc

SEQ ID NO: 101677 - DNA, 71 bp, Homo sapiens
tgtattatgaactctggggaggtgtgggaggggagggtacttcctgcagccctgccggggaaaacactgat

SEQ ID NO: 101678 - DNA, 70 bp, Homo sapiens
tgtgggaggggagggtacttcctgcagccctgccggggaaaacactgattccctcctgtcagtacaaaaa

SEQ ID NO: 101679 - DNA, 71 bp, Homo sapiens
gggagggtacttcctgcagccctgccggggaaaacactgattccctcctgtcagtacaaaaaaaatgatga

SEQ ID NO: 101680 - DNA, 75 bp, Homo sapiens
ttcctgcagccctgccggggaaaacactgattccctcctgtcagtacaaaaaaaatgatgaatgccaaagcaaca

SEQ ID NO: 101681 - DNA, 74 bp, Homo sapiens
attccctcctgtcagtacaaaaaaaatgatgaatgccaaagcaacagggctctgctttcttgaagaaaactgta

SEQ ID NO: 101682 - DNA, 74 bp, Homo sapiens
agtacaaaaaaaatgatgaatgccaaagcaacagggctctgctttcttgaagaaaactgtatgtgacccagaac

SEQ ID NO: 101683 - DNA, 76 bp, Homo sapiens
aaaatgatgaatgccaaagcaacagggctctgctttcttgaagaaaactgtatgtgacccagaactttactgataa

SEQ ID NO: 101684 - DNA, 76 bp, Homo sapiens
atgaatgccaaagcaacagggctctgctttcttgaagaaaactgtatgtgacccagaactttactgataaactctc

SEQ ID NO: 101685 - DNA, 71 bp, Homo sapiens
aacagggctctgctttcttgaagaaaactgtatgtgacccagaactttactgataaactctcccaataaaa

SEQ ID NO: 101686 - DNA, 71 bp, Homo sapiens
ctctgctttcttgaagaaaactgtatgtgacccagaactttactgataaactctcccaataaaaaatacag

SEQ ID NO: 101687 - DNA, 70 bp, Homo sapiens
cttgaagaaaactgtatgtgacccagaactttactgataaactctcccaataaaaaatacaggaattaca

SEQ ID NO: 101688 - DNA, 74 bp, Homo sapiens
ctgtatgtgacccagaactttactgataaactctcccaataaaaaatacaggaattacattaccatgaagctca

SEQ ID NO: 101689 - DNA, 71 bp, Homo sapiens
gaactttactgataaactctcccaataaaaaatacaggaattacattaccatgaagctcaaaaagcggcca

SEQ ID NO: 101690 - DNA, 73 bp, Homo sapiens
gataaactctcccaataaaaaatacaggaattacattaccatgaagctcaaaaagcggccagtgcagttctta

SEQ ID NO: 101691 - DNA, 72 bp, Homo sapiens
tctcccaataaaaaatacaggaattacattaccatgaagctcaaaaagcggccagtgcagttcttaaaaaca

SEQ ID NO: 101692 - DNA, 72 bp, Homo sapiens
aaaaatacaggaattacattaccatgaagctcaaaaagcggccagtgcagttcttaaaaacagaccctggca

SEQ ID NO: 101693 - DNA, 78 bp, Homo sapiens
atgaagctcaaaaagcggccagtgcagttcttaaaaacagaccctggcatcggtgcgtgccagcatctggacgcctta

SEQ ID NO: 101694 - DNA, 74 bp, Homo sapiens
aaaaagcggccagtgcagttcttaaaaacagaccctggcatcggtgcgtgccagcatctggacgccttagttta

SEQ ID NO: 101695 - DNA, 78 bp, Homo sapiens
agtgcagttcttaaaaacagaccctggcatcggtgcgtgccagcatctggacgccttagtttacatgctggcttacta

SEQ ID NO: 101696 - DNA, 75 bp, Homo sapiens
agttcttaaaaacagaccctggcatcggtgcgtgccagcatctggacgccttagtttacatgctggcttactagt

SEQ ID NO: 101697 - DNA, 78 bp, Homo sapiens
aacagaccctggcatcggtgcgtgccagcatctggacgccttagtttacatgctggcttactagttgcgtgactttgg

SEQ ID NO: 101698 - DNA, 78 bp, Homo sapiens
atcggtgcgtgccagcatctggacgccttagtttacatgctggcttactagttgcgtgactttgggcaaggtatacga

SEQ ID NO: 101699 - DNA, 71 bp, Homo sapiens
tggacgccttagtttacatgctggcttactagttgcgtgactttgggcaaggtatacgatttattttttct

SEQ ID NO: 101700 - DNA, 71 bp, Homo sapiens
ttagtttacatgctggcttactagttgcgtgactttgggcaaggtatacgatttattttttcttcaatttc

SEQ ID NO: 101701 - DNA, 69 bp, Homo sapiens
gcttactagttgcgtgactttgggcaaggtatacgatttattttttcttcaatttccctgcctgttctt

SEQ ID NO: 101702 - DNA, 70 bp, Homo sapiens
ttgcgtgactttgggcaaggtatacgatttattttttcttcaatttccctgcctgttcttttgaagatta

SEQ ID NO: 101703 - DNA, 69 bp, Homo sapiens
gactttgggcaaggtatacgatttattttttcttcaatttccctgcctgttcttttgaagattatataa

SEQ ID NO: 101704 - DNA, 72 bp, Homo sapiens
atacgatttattttttcttcaatttccctgcctgttcttttgaagattatataaattaatatgcgtgaagca

SEQ ID NO: 101705 - DNA, 74 bp, Homo sapiens
ttttttcttcaatttccctgcctgttcttttgaagattatataaattaatatgcgtgaagcactgtgaacagtg

SEQ ID NO: 101706 - DNA, 75 bp, Homo sapiens
aatttccctgcctgttcttttgaagattatataaattaatatgcgtgaagcactgtgaacagtgttgggcaaata

SEQ ID NO: 101707 - DNA, 76 bp, Homo sapiens
ctgcctgttcttttgaagattatataaattaatatgcgtgaagcactgtgaacagtgttgggcaaataacactatt

SEQ ID NO: 101708 - DNA, 79 bp, Homo sapiens
tgaagattatataaattaatatgcgtgaagcactgtgaacagtgttgggcaaataacactatttaatgttagctattgc

SEQ ID NO: 101709 - DNA, 78 bp, Homo sapiens
ataaattaatatgcgtgaagcactgtgaacagtgttgggcaaataacactatttaatgttagctattgctattatcga

SEQ ID NO: 101710 - DNA, 77 bp, Homo sapiens
gaagcactgtgaacagtgttgggcaaataacactatttaatgttagctattgctattatcgagtatttttatgatta

SEQ ID NO: 101711 - DNA, 75 bp, Homo sapiens
tgaacagtgttgggcaaataacactatttaatgttagctattgctattatcgagtatttttatgattaagagaaa

SEQ ID NO: 101712 - DNA, 74 bp, Homo sapiens
tgggcaaataacactatttaatgttagctattgctattatcgagtatttttatgattaagagaaaataacaatg

SEQ ID NO: 101713 - DNA, 74 bp, Homo sapiens
cactatttaatgttagctattgctattatcgagtatttttatgattaagagaaaataacaatgtgaactaggtg

SEQ ID NO: 101714 - DNA, 74 bp, Homo sapiens
gttagctattgctattatcgagtatttttatgattaagagaaaataacaatgtgaactaggtgttactcaatcc

SEQ ID NO: 101715 - DNA, 71 bp, Homo sapiens
cgagtatttttatgattaagagaaaataacaatgtgaactaggtgttactcaatcctaagagcaattattt

SEQ ID NO: 101716 - DNA, 72 bp, Homo sapiens
ttaagagaaaataacaatgtgaactaggtgttactcaatcctaagagcaattatttttaggtccattatcac

SEQ ID NO: 101717 - DNA, 72 bp, Homo sapiens
gaaaataacaatgtgaactaggtgttactcaatcctaagagcaattatttttaggtccattatcaccaccag

SEQ ID NO: 101718 - DNA, 71 bp, Homo sapiens
atgtgaactaggtgttactcaatcctaagagcaattatttttaggtccattatcaccaccagtttacaggt

SEQ ID NO: 101719 - DNA, 69 bp, Homo sapiens
aggtgttactcaatcctaagagcaattatttttaggtccattatcaccaccagtttacaggttggttcc

SEQ ID NO: 101720 - DNA, 67 bp, Homo sapiens
aatcctaagagcaattatttttaggtccattatcaccaccagtttacaggttggttccttcccttcc

SEQ ID NO: 101721 - DNA, 79 bp, Homo sapiens
actgcgcctggcccataggtacttttcatgcatttctcttcttcacttgaagcacattctccatatataaagatcctat

SEQ ID NO: 101722 - DNA, 80 bp, Homo sapiens
tggcccataggtacttttcatgcatttctcttcttcacttgaagcacattctccatatataaagatcctatttctcatgt

SEQ ID NO: 101723 - DNA, 81 bp, Homo sapiens
aggtacttttcatgcatttctcttcttcacttgaagcacattctccatatataaagatcctatttctcatgttcacatata

SEQ ID NO: 101724 - DNA, 83 bp, Homo sapiens
catgcatttctcttcttcacttgaagcacattctccatatataaagatcctatttctcatgttcacatatataataggtttgc

SEQ ID NO: 101725 - DNA, 81 bp, Homo sapiens
cttcttcacttgaagcacattctccatatataaagatcctatttctcatgttcacatatataataggtttgctatacacac

SEQ ID NO: 101726 - DNA, 82 bp, Homo sapiens
cttgaagcacattctccatatataaagatcctatttctcatgttcacatatataataggtttgctatacacactcaaagtca

SEQ ID NO: 101727 - DNA, 83 bp, Homo sapiens
gcacattctccatatataaagatcctatttctcatgttcacatatataataggtttgctatacacactcaaagtcatagaaga

SEQ ID NO: 101728 - DNA, 80 bp, Homo sapiens
ctccatatataaagatcctatttctcatgttcacatatataataggtttgctatacacactcaaagtcatagaagaatta

SEQ ID NO: 101729 - DNA, 80 bp, Homo sapiens
ccatatataaagatcctatttctcatgttcacatatataataggtttgctatacacactcaaagtcatagaagaattata

SEQ ID NO: 101730 - DNA, 84 bp, Homo sapiens
agatcctatttctcatgttcacatatataataggtttgctatacacactcaaagtcatagaagaattatactcatatgacatga

SEQ ID NO: 101731 - DNA, 85 bp, Homo sapiens
tctcatgttcacatatataataggtttgctatacacactcaaagtcatagaagaattatactcatatgacatgatctcaaccaag

SEQ ID NO: 101732 - DNA, 84 bp, Homo sapiens
ctcatgttcacatatataataggtttgctatacacactcaaagtcatagaagaattatactcatatgacatgatctcaaccaag

SEQ ID NO: 101733 - DNA, 80 bp, Homo sapiens
acatatataataggtttgctatacacactcaaagtcatagaagaattatactcatatgacatgatctcaaccaagtactt

SEQ ID NO: 101734 - DNA, 77 bp, Homo sapiens
aataggtttgctatacacactcaaagtcatagaagaattatactcatatgacatgatctcaaccaagtactttaaaa

SEQ ID NO: 101735 - DNA, 77 bp, Homo sapiens
taggtttgctatacacactcaaagtcatagaagaattatactcatatgacatgatctcaaccaagtactttaaaaag

SEQ ID NO: 101736 - DNA, 79 bp, Homo sapiens
cacactcaaagtcatagaagaattatactcatatgacatgatctcaaccaagtactttaaaaagtagctgagtgaagat

SEQ ID NO: 101737 - DNA, 76 bp, Homo sapiens
catagaagaattatactcatatgacatgatctcaaccaagtactttaaaaagtagctgagtgaagattaggccctt

SEQ ID NO: 101738 - DNA, 76 bp, Homo sapiens
aattatactcatatgacatgatctcaaccaagtactttaaaaagtagctgagtgaagattaggccctttgatcaac

SEQ ID NO: 101739 - DNA, 76 bp, Homo sapiens
tcatatgacatgatctcaaccaagtactttaaaaagtagctgagtgaagattaggccctttgatcaacctatttta

SEQ ID NO: 101740 - DNA, 71 bp, Homo sapiens
atgatctcaaccaagtactttaaaaagtagctgagtgaagattaggccctttgatcaacctattttaacta

SEQ ID NO: 101741 - DNA, 70 bp, Homo sapiens
ctgagtgaagattaggccctttgatcaacctattttaactataactccctctaaaaacaaaaatcagaca

SEQ ID NO: 101742 - DNA, 71 bp, Homo sapiens
attttaactataactccctctaaaaacaaaaatcagacagaaagaaagctagtgcctcaggaagcactcta

SEQ ID NO: 101743 - DNA, 72 bp, Homo sapiens
ataactccctctaaaaacaaaaatcagacagaaagaaagctagtgcctcaggaagcactctacagtttgtaa

SEQ ID NO: 101744 - DNA, 74 bp, Homo sapiens
aacaaaaatcagacagaaagaaagctagtgcctcaggaagcactctacagtttgtaagtaatggctccacctta

SEQ ID NO: 101745 - DNA, 77 bp, Homo sapiens
agacagaaagaaagctagtgcctcaggaagcactctacagtttgtaagtaatggctccaccttaccatctctatgaa

SEQ ID NO: 101746 - DNA, 74 bp, Homo sapiens
aaagaaagctagtgcctcaggaagcactctacagtttgtaagtaatggctccaccttaccatctctatgaaaaa

SEQ ID NO: 101747 - DNA, 73 bp, Homo sapiens
tagtgcctcaggaagcactctacagtttgtaagtaatggctccaccttaccatctctatgaaaaaaattaaaa

SEQ ID NO: 101748 - DNA, 75 bp, Homo sapiens
agaaaaaagaaagctgcacattttaccttactccctagctgccctctaagccagtatcccagatgtcacctgatg

SEQ ID NO: 101749 - DNA, 78 bp, Homo sapiens
acattttaccttactccctagctgccctctaagccagtatcccagatgtcacctgatgtatggatgctagaagcccca

SEQ ID NO: 101750 - DNA, 78 bp, Homo sapiens
ttactccctagctgccctctaagccagtatcccagatgtcacctgatgtatggatgctagaagccccacccttaaaca

SEQ ID NO: 101751 - DNA, 81 bp, Homo sapiens
tgccctctaagccagtatcccagatgtcacctgatgtatggatgctagaagccccacccttaaacagaccacatcacaaga

SEQ ID NO: 101752 - DNA, 80 bp, Homo sapiens
ctaagccagtatcccagatgtcacctgatgtatggatgctagaagccccacccttaaacagaccacatcacaagactcta

SEQ ID NO: 101753 - DNA, 78 bp, Homo sapiens
atcccagatgtcacctgatgtatggatgctagaagccccacccttaaacagaccacatcacaagactctacgttaaca

SEQ ID NO: 101754 - DNA, 77 bp, Homo sapiens
ctgatgtatggatgctagaagccccacccttaaacagaccacatcacaagactctacgttaacagcctggtcctcaa

SEQ ID NO: 101755 - DNA, 75 bp, Homo sapiens
tatggatgctagaagccccacccttaaacagaccacatcacaagactctacgttaacagcctggtcctcaaggac

SEQ ID NO: 101756 - DNA, 72 bp, Homo sapiens
agaagccccacccttaaacagaccacatcacaagactctacgttaacagcctggtcctcaaggacgggctgc

SEQ ID NO: 101757 - DNA, 75 bp, Homo sapiens
cccttaaacagaccacatcacaagactctacgttaacagcctggtcctcaaggacgggctgcccagagagcagag

SEQ ID NO: 101758 - DNA, 78 bp, Homo sapiens
acatcacaagactctacgttaacagcctggtcctcaaggacgggctgcccagagagcagaggcaacgctgcctccacc

SEQ ID NO: 101759 - DNA, 75 bp, Homo sapiens
aagactctacgttaacagcctggtcctcaaggacgggctgcccagagagcagaggcaacgctgcctccacccaaa

SEQ ID NO: 101760 - DNA, 74 bp, Homo sapiens
cgttaacagcctggtcctcaaggacgggctgcccagagagcagaggcaacgctgcctccacccaaaaggaatcc

SEQ ID NO: 101761 - DNA, 78 bp, Homo sapiens
tggtcctcaaggacgggctgcccagagagcagaggcaacgctgcctccacccaaaaggaatcccgtgagctctagaca

SEQ ID NO: 101762 - DNA, 79 bp, Homo sapiens
acgggctgcccagagagcagaggcaacgctgcctccacccaaaaggaatcccgtgagctctagacatggtcatccttgc

SEQ ID NO: 101763 - DNA, 79 bp, Homo sapiens
agagagcagaggcaacgctgcctccacccaaaaggaatcccgtgagctctagacatggtcatccttgcctgtgaggagg

SEQ ID NO: 101764 - DNA, 75 bp, Homo sapiens
agaggcaacgctgcctccacccaaaaggaatcccgtgagctctagacatggtcatccttgcctgtgaggaggggg

SEQ ID NO: 101765 - DNA, 78 bp, Homo sapiens
ctccacccaaaaggaatcccgtgagctctagacatggtcatccttgcctgtgaggaggggggcagctgcagaggcctg

SEQ ID NO: 101766 - DNA, 77 bp, Homo sapiens
aaaaggaatcccgtgagctctagacatggtcatccttgcctgtgaggaggggggcagctgcagaggcctgtccttcc

SEQ ID NO: 101767 - DNA, 79 bp, Homo sapiens
cgtgagctctagacatggtcatccttgcctgtgaggaggggggcagctgcagaggcctgtccttccctccaggtttgta

SEQ ID NO: 101768 - DNA, 77 bp, Homo sapiens
tctagacatggtcatccttgcctgtgaggaggggggcagctgcagaggcctgtccttccctccaggtttgtacttcc

SEQ ID NO: 101769 - DNA, 78 bp, Homo sapiens
tcatccttgcctgtgaggaggggggcagctgcagaggcctgtccttccctccaggtttgtacttcccggcatctgctg

SEQ ID NO: 101770 - DNA, 75 bp, Homo sapiens
tgtgaggaggggggcagctgcagaggcctgtccttccctccaggtttgtacttcccggcatctgctgggttacac

SEQ ID NO: 101771 - DNA, 73 bp, Homo sapiens
ggcagctgcagaggcctgtccttccctccaggtttgtacttcccggcatctgctgggttacacctttccaaaa

SEQ ID NO: 101772 - DNA, 69 bp, Homo sapiens
agaggcctgtccttccctccaggtttgtacttcccggcatctgctgggttacacctttccaaaattaca

SEQ ID NO: 101773 - DNA, 71 bp, Homo sapiens
cttccctccaggtttgtacttcccggcatctgctgggttacacctttccaaaattacagccagctctttca

SEQ ID NO: 101774 - DNA, 69 bp, Homo sapiens
aggtttgtacttcccggcatctgctgggttacacctttccaaaattacagccagctctttcacttttaa

SEQ ID NO: 101775 - DNA, 70 bp, Homo sapiens
tacttcccggcatctgctgggttacacctttccaaaattacagccagctctttcacttttaaaatagaaa

SEQ ID NO: 101776 - DNA, 67 bp, Homo sapiens
ggttacacctttccaaaattacagccagctctttcacttttaaaatagaaataactatatttaatta

SEQ ID NO: 101777 - DNA, 72 bp, Homo sapiens
aacaaaaaaatcaagagctcaagcagaacacagtcacgtgaaagactcctttaacctggggacagacagaag

SEQ ID NO: 101778 - DNA, 75 bp, Homo sapiens
aaaaatcaagagctcaagcagaacacagtcacgtgaaagactcctttaacctggggacagacagaagttatctca

SEQ ID NO: 101779 - DNA, 74 bp, Homo sapiens
aagcagaacacagtcacgtgaaagactcctttaacctggggacagacagaagttatctcagaaatggccaatac

SEQ ID NO: 101780 - DNA, 72 bp, Homo sapiens
cagtcacgtgaaagactcctttaacctggggacagacagaagttatctcagaaatggccaatacgttaatta

SEQ ID NO: 101781 - DNA, 68 bp, Homo sapiens
tcctttaacctggggacagacagaagttatctcagaaatggccaatacgttaattaacctttttgatt

SEQ ID NO: 101782 - DNA, 67 bp, Homo sapiens
gggacagacagaagttatctcagaaatggccaatacgttaattaacctttttgatttttaatttagt

SEQ ID NO: 101783 - DNA, 68 bp, Homo sapiens
cagaagttatctcagaaatggccaatacgttaattaacctttttgatttttaatttagtttctcaatg

SEQ ID NO: 101784 - DNA, 67 bp, Homo sapiens
ctcagaaatggccaatacgttaattaacctttttgatttttaatttagtttctcaatgttccagacg

SEQ ID NO: 101785 - DNA, 70 bp, Homo sapiens
gatttttaatttagtttctcaatgttccagacgtaacaaacacctgaccagacaggtaaaggctgcccaa

SEQ ID NO: 101786 - DNA, 73 bp, Homo sapiens
tttagtttctcaatgttccagacgtaacaaacacctgaccagacaggtaaaggctgcccaatccataccacca

SEQ ID NO: 101787 - DNA, 75 bp, Homo sapiens
ttctcaatgttccagacgtaacaaacacctgaccagacaggtaaaggctgcccaatccataccaccaggaccagc

SEQ ID NO: 101788 - DNA, 71 bp, Homo sapiens
acacctgaccagacaggtaaaggctgcccaatccataccaccaggaccagccccccaagacgggtcagtta

SEQ ID NO: 101789 - DNA, 69 bp, Homo sapiens
accagacaggtaaaggctgcccaatccataccaccaggaccagccccccaagacgggtcagttagggtc

SEQ ID NO: 101790 - DNA, 70 bp, Homo sapiens
aatccataccaccaggaccagccccccaagacgggtcagttagggtccccactgctcactctcctcaacc

SEQ ID NO: 101791 - DNA, 71 bp, Homo sapiens
caggaccagccccccaagacgggtcagttagggtccccactgctcactctcctcaacctctccttggcaaa

SEQ ID NO: 101792 - DNA, 75 bp, Homo sapiens
acgggtcagttagggtccccactgctcactctcctcaacctctccttggcaaaatatcttcctccatggcattga

SEQ ID NO: 101793 - DNA, 74 bp, Homo sapiens
agttagggtccccactgctcactctcctcaacctctccttggcaaaatatcttcctccatggcattgaaccaat

SEQ ID NO: 101794 - DNA, 79 bp, Homo sapiens
tgctcactctcctcaacctctccttggcaaaatatcttcctccatggcattgaaccaattcctgcattgaaattattta

SEQ ID NO: 101795 - DNA, 75 bp, Homo sapiens
actctcctcaacctctccttggcaaaatatcttcctccatggcattgaaccaattcctgcattgaaattatttaa

SEQ ID NO: 101796 - DNA, 78 bp, Homo sapiens
tccttggcaaaatatcttcctccatggcattgaaccaattcctgcattgaaattatttaatgaaatctctgtagagaa

SEQ ID NO: 101797 - DNA, 78 bp, Homo sapiens
aaatatcttcctccatggcattgaaccaattcctgcattgaaattatttaatgaaatctctgtagagaagatgctttg

SEQ ID NO: 101798 - DNA, 81 bp, Homo sapiens
tccatggcattgaaccaattcctgcattgaaattatttaatgaaatctctgtagagaagatgctttgggatctcaatatta

SEQ ID NO: 101799 - DNA, 82 bp, Homo sapiens
gcattgaaccaattcctgcattgaaattatttaatgaaatctctgtagagaagatgctttgggatctcaatattagcataga

SEQ ID NO: 101800 - DNA, 79 bp, Homo sapiens
cctgcattgaaattatttaatgaaatctctgtagagaagatgctttgggatctcaatattagcatagagacacctaaat

SEQ ID NO: 101801 - DNA, 82 bp, Homo sapiens
tttaatgaaatctctgtagagaagatgctttgggatctcaatattagcatagagacacctaaattacagatttgtgagctga

SEQ ID NO: 101802 - DNA, 81 bp, Homo sapiens
tgtagagaagatgctttgggatctcaatattagcatagagacacctaaattacagatttgtgagctgagagctggagtttt

SEQ ID NO: 101803 - DNA, 80 bp, Homo sapiens
aagatgctttgggatctcaatattagcatagagacacctaaattacagatttgtgagctgagagctggagtttttcatta

SEQ ID NO: 101804 - DNA, 80 bp, Homo sapiens
atctcaatattagcatagagacacctaaattacagatttgtgagctgagagctggagtttttcattagatcctagaaata

SEQ ID NO: 101805 - DNA, 78 bp, Homo sapiens
atattagcatagagacacctaaattacagatttgtgagctgagagctggagtttttcattagatcctagaaatataaa

SEQ ID NO: 101806 - DNA, 76 bp, Homo sapiens
agagacacctaaattacagatttgtgagctgagagctggagtttttcattagatcctagaaatataaaacatacat

SEQ ID NO: 101807 - DNA, 73 bp, Homo sapiens
aaattacagatttgtgagctgagagctggagtttttcattagatcctagaaatataaaacatacattaaaaaa

SEQ ID NO: 101808 - DNA, 75 bp, Homo sapiens
gagctgagagctggagtttttcattagatcctagaaatataaaacatacattaaaaaaacaactctcagccattc

SEQ ID NO: 101809 - DNA, 72 bp, Homo sapiens
gagctggagtttttcattagatcctagaaatataaaacatacattaaaaaaacaactctcagccattcgtag

SEQ ID NO: 101810 - DNA, 74 bp, Homo sapiens
gtttttcattagatcctagaaatataaaacatacattaaaaaaacaactctcagccattcgtagtagctcatgc

SEQ ID NO: 101811 - DNA, 68 bp, Homo sapiens
caaacaaaaaactctcaaatatccttttcttgaaaaatcctttcgctctatcttttgtgcttaaggag

SEQ ID NO: 101812 - DNA, 70 bp, Homo sapiens
aaaactctcaaatatccttttcttgaaaaatcctttcgctctatcttttgtgcttaaggaggagacactc

SEQ ID NO: 101813 - DNA, 74 bp, Homo sapiens
atatccttttcttgaaaaatcctttcgctctatcttttgtgcttaaggaggagacactctcagtatatcaacaa

SEQ ID NO: 101814 - DNA, 75 bp, Homo sapiens
tttcttgaaaaatcctttcgctctatcttttgtgcttaaggaggagacactctcagtatatcaacaagctactaa

SEQ ID NO: 101815 - DNA, 77 bp, Homo sapiens
tatcttttgtgcttaaggaggagacactctcagtatatcaacaagctactaagtgctctacgtgctaaccgaaaaca

SEQ ID NO: 101816 - DNA, 75 bp, Homo sapiens
ttaaggaggagacactctcagtatatcaacaagctactaagtgctctacgtgctaaccgaaaacagagcccacct

SEQ ID NO: 101817 - DNA, 77 bp, Homo sapiens
gacactctcagtatatcaacaagctactaagtgctctacgtgctaaccgaaaacagagcccaccttggtgctggtaa

SEQ ID NO: 101818 - DNA, 73 bp, Homo sapiens
agtatatcaacaagctactaagtgctctacgtgctaaccgaaaacagagcccaccttggtgctggtaagaacc

SEQ ID NO: 101819 - DNA, 72 bp, Homo sapiens
aacaagctactaagtgctctacgtgctaaccgaaaacagagcccaccttggtgctggtaagaacccattcca

SEQ ID NO: 101820 - DNA, 74 bp, Homo sapiens
ctaagtgctctacgtgctaaccgaaaacagagcccaccttggtgctggtaagaacccattccaggcagaggata

SEQ ID NO: 101821 - DNA, 72 bp, Homo sapiens
tacgtgctaaccgaaaacagagcccaccttggtgctggtaagaacccattccaggcagaggataccttttga

SEQ ID NO: 101822 - DNA, 75 bp, Homo sapiens
aaaacagagcccaccttggtgctggtaagaacccattccaggcagaggataccttttgatggtgctcttgctcca

SEQ ID NO: 101823 - DNA, 76 bp, Homo sapiens
caccttggtgctggtaagaacccattccaggcagaggataccttttgatggtgctcttgctccatgataaagttaa

SEQ ID NO: 101824 - DNA, 74 bp, Homo sapiens
ctggtaagaacccattccaggcagaggataccttttgatggtgctcttgctccatgataaagttaatttttcaa

SEQ ID NO: 101825 - DNA, 75 bp, Homo sapiens
tccaggcagaggataccttttgatggtgctcttgctccatgataaagttaatttttcaacaattaataatttcta

SEQ ID NO: 101826 - DNA, 73 bp, Homo sapiens
ggataccttttgatggtgctcttgctccatgataaagttaatttttcaacaattaataatttctatattactc

SEQ ID NO: 101827 - DNA, 75 bp, Homo sapiens
tgatggtgctcttgctccatgataaagttaatttttcaacaattaataatttctatattactctaagatatttct

SEQ ID NO: 101828 - DNA, 70 bp, Homo sapiens
agttaatttttcaacaattaataatttctatattactctaagatatttcttaaaatcctatggaatatga

SEQ ID NO: 101829 - DNA, 71 bp, Homo sapiens
ttcaacaattaataatttctatattactctaagatatttcttaaaatcctatggaatatgagaaaaacaag

SEQ ID NO: 101830 - DNA, 69 bp, Homo sapiens
ataatttctatattactctaagatatttcttaaaatcctatggaatatgagaaaaacaagttttgattt

SEQ ID NO: 101831 - DNA, 70 bp, Homo sapiens
tctatattactctaagatatttcttaaaatcctatggaatatgagaaaaacaagttttgattttctaagg

SEQ ID NO: 101832 - DNA, 69 bp, Homo sapiens
ctaagatatttcttaaaatcctatggaatatgagaaaaacaagttttgattttctaaggggcaggtcca

SEQ ID NO: 101833 - DNA, 69 bp, Homo sapiens
tcttaaaatcctatggaatatgagaaaaacaagttttgattttctaaggggcaggtccattactgtaaa

SEQ ID NO: 101834 - DNA, 70 bp, Homo sapiens
cctatggaatatgagaaaaacaagttttgattttctaaggggcaggtccattactgtaaaagagcaagaa

SEQ ID NO: 101835 - DNA, 68 bp, Homo sapiens
gaaaaacaagttttgattttctaaggggcaggtccattactgtaaaagagcaagaaaccatctgaaac

SEQ ID NO: 101836 - DNA, 68 bp, Homo sapiens
ttttgattttctaaggggcaggtccattactgtaaaagagcaagaaaccatctgaaacgaaaaacact

SEQ ID NO: 101837 - DNA, 67 bp, Homo sapiens
attttctaaggggcaggtccattactgtaaaagagcaagaaaccatctgaaacgaaaaacactttaa

SEQ ID NO: 101838 - DNA, 67 bp, Homo sapiens
ggtccattactgtaaaagagcaagaaaccatctgaaacgaaaaacactttaaattccctttggcgta

SEQ ID NO: 101839 - DNA, 67 bp, Homo sapiens
caagaaaccatctgaaacgaaaaacactttaaattccctttggcgtaaacttttggctacagcttca

SEQ ID NO: 101840 - DNA, 65 bp, Homo sapiens
actttaaattccctttggcgtaaacttttggctacagcttcaccactgaaaaccctggaagaggg

SEQ ID NO: 101841 - DNA, 70 bp, Homo sapiens
taaacttttggctacagcttcaccactgaaaaccctggaagaggggagggatgcatcaagtttacccgtc

SEQ ID NO: 101842 - DNA, 73 bp, Homo sapiens
tacagcttcaccactgaaaaccctggaagaggggagggatgcatcaagtttacccgtcggcatgaaaaacaga

SEQ ID NO: 101843 - DNA, 79 bp, Homo sapiens
tggaagaggggagggatgcatcaagtttacccgtcggcatgaaaaacagacgagctgtggcacagcttctcattctcag

SEQ ID NO: 101844 - DNA, 78 bp, Homo sapiens
gagggatgcatcaagtttacccgtcggcatgaaaaacagacgagctgtggcacagcttctcattctcagtccttaact

SEQ ID NO: 101845 - DNA, 77 bp, Homo sapiens
tttacccgtcggcatgaaaaacagacgagctgtggcacagcttctcattctcagtccttaacttagtcagcggaatg

SEQ ID NO: 101846 - DNA, 80 bp, Homo sapiens
atgaaaaacagacgagctgtggcacagcttctcattctcagtccttaacttagtcagcggaatggcaggttgaatggcag

SEQ ID NO: 101847 - DNA, 79 bp, Homo sapiens
cacagcttctcattctcagtccttaacttagtcagcggaatggcaggttgaatggcagtttgtccctccaaatgccaga

SEQ ID NO: 101848 - DNA, 77 bp, Homo sapiens
ttctcattctcagtccttaacttagtcagcggaatggcaggttgaatggcagtttgtccctccaaatgccagataac

SEQ ID NO: 101849 - DNA, 75 bp, Homo sapiens
tccttaacttagtcagcggaatggcaggttgaatggcagtttgtccctccaaatgccagataactgctttattta

SEQ ID NO: 101850 - DNA, 76 bp, Homo sapiens
aatggcaggttgaatggcagtttgtccctccaaatgccagataactgctttatttagttaagcttgcacgcatacc

SEQ ID NO: 101851 - DNA, 77 bp, Homo sapiens
ttgaatggcagtttgtccctccaaatgccagataactgctttatttagttaagcttgcacgcatacctcaagtcaaa

SEQ ID NO: 101852 - DNA, 75 bp, Homo sapiens
agtttgtccctccaaatgccagataactgctttatttagttaagcttgcacgcatacctcaagtcaaaggctcca

SEQ ID NO: 101853 - DNA, 80 bp, Homo sapiens
aatgccagataactgctttatttagttaagcttgcacgcatacctcaagtcaaaggctccacacctgcaatgaggcacta

SEQ ID NO: 101854 - DNA, 77 bp, Homo sapiens
ataactgctttatttagttaagcttgcacgcatacctcaagtcaaaggctccacacctgcaatgaggcactaccatt

SEQ ID NO: 101855 - DNA, 80 bp, Homo sapiens
ttaagcttgcacgcatacctcaagtcaaaggctccacacctgcaatgaggcactaccatttgcccttctataatagacag

SEQ ID NO: 101856 - DNA, 80 bp, Homo sapiens
atacctcaagtcaaaggctccacacctgcaatgaggcactaccatttgcccttctataatagacagtcttcgagatgagc

SEQ ID NO: 101857 - DNA, 81 bp, Homo sapiens
aatgaggcactaccatttgcccttctataatagacagtcttcgagatgagccaaatatgccagccaatcatataagccaac

SEQ ID NO: 101858 - DNA, 80 bp, Homo sapiens
taccatttgcccttctataatagacagtcttcgagatgagccaaatatgccagccaatcatataagccaactcctcattt

SEQ ID NO: 101859 - DNA, 80 bp, Homo sapiens
cccttctataatagacagtcttcgagatgagccaaatatgccagccaatcatataagccaactcctcattttaaatgtga

SEQ ID NO: 101860 - DNA, 81 bp, Homo sapiens
taatagacagtcttcgagatgagccaaatatgccagccaatcatataagccaactcctcattttaaatgtgaggataccga

SEQ ID NO: 101861 - DNA, 80 bp, Homo sapiens
ttcgagatgagccaaatatgccagccaatcatataagccaactcctcattttaaatgtgaggataccgaggccaggtcaa

SEQ ID NO: 101862 - DNA, 77 bp, Homo sapiens
aaatatgccagccaatcatataagccaactcctcattttaaatgtgaggataccgaggccaggtcaaagagtctata

SEQ ID NO: 101863 - DNA, 73 bp, Homo sapiens
atataagccaactcctcattttaaatgtgaggataccgaggccaggtcaaagagtctataagaaagaaataga

SEQ ID NO: 101864 - DNA, 75 bp, Homo sapiens
aactcctcattttaaatgtgaggataccgaggccaggtcaaagagtctataagaaagaaatagatgatgtacaga

SEQ ID NO: 101865 - DNA, 76 bp, Homo sapiens
ttttaaatgtgaggataccgaggccaggtcaaagagtctataagaaagaaatagatgatgtacagacagtatggta

SEQ ID NO: 101866 - DNA, 80 bp, Homo sapiens
ataccgaggccaggtcaaagagtctataagaaagaaatagatgatgtacagacagtatggtatggatagagagatgaaca

SEQ ID NO: 101867 - DNA, 82 bp, Homo sapiens
aggccaggtcaaagagtctataagaaagaaatagatgatgtacagacagtatggtatggatagagagatgaacagatgaatg

SEQ ID NO: 101868 - DNA, 83 bp, Homo sapiens
taagaaagaaatagatgatgtacagacagtatggtatggatagagagatgaacagatgaatggacaggtagataaatgaagga

SEQ ID NO: 101869 - DNA, 84 bp, Homo sapiens
agacagtatggtatggatagagagatgaacagatgaatggacaggtagataaatgaaggacagcacagaagtagacatcaggaa

SEQ ID NO: 101870 - DNA, 83 bp, Homo sapiens
tagagagatgaacagatgaatggacaggtagataaatgaaggacagcacagaagtagacatcaggaactcctcattctgttaa

SEQ ID NO: 101871 - DNA, 80 bp, Homo sapiens
aggtagataaatgaaggacagcacagaagtagacatcaggaactcctcattctgttaacgcttcatcatcaactatctct

SEQ ID NO: 101872 - DNA, 79 bp, Homo sapiens
taaatgaaggacagcacagaagtagacatcaggaactcctcattctgttaacgcttcatcatcaactatctcttttaaa

SEQ ID NO: 101873 - DNA, 79 bp, Homo sapiens
acagcacagaagtagacatcaggaactcctcattctgttaacgcttcatcatcaactatctcttttaaagctaggcaaa

SEQ ID NO: 101874 - DNA, 72 bp, Homo sapiens
aactcctcattctgttaacgcttcatcatcaactatctcttttaaagctaggcaaaccgtttcatttttctg

SEQ ID NO: 101875 - DNA, 71 bp, Homo sapiens
attctgttaacgcttcatcatcaactatctcttttaaagctaggcaaaccgtttcatttttctggggctat

SEQ ID NO: 101876 - DNA, 69 bp, Homo sapiens
cttcatcatcaactatctcttttaaagctaggcaaaccgtttcatttttctggggctattttcccttac

SEQ ID NO: 101877 - DNA, 67 bp, Homo sapiens
atcaactatctcttttaaagctaggcaaaccgtttcatttttctggggctattttcccttacctatg

SEQ ID NO: 101878 - DNA, 68 bp, Homo sapiens
tttaaagctaggcaaaccgtttcatttttctggggctattttcccttacctatggggtgatgatccta

SEQ ID NO: 101879 - DNA, 69 bp, Homo sapiens
accgtttcatttttctggggctattttcccttacctatggggtgatgatcctaaaggctcttctcaggc

SEQ ID NO: 101880 - DNA, 71 bp, Homo sapiens
ttttctggggctattttcccttacctatggggtgatgatcctaaaggctcttctcaggcccctcctagctc

SEQ ID NO: 101881 - DNA, 74 bp, Homo sapiens
tattttcccttacctatggggtgatgatcctaaaggctcttctcaggcccctcctagctctcattgtctttgat

SEQ ID NO: 101882 - DNA, 75 bp, Homo sapiens
ttacctatggggtgatgatcctaaaggctcttctcaggcccctcctagctctcattgtctttgattttatgaaac

SEQ ID NO: 101883 - DNA, 72 bp, Homo sapiens
ctaaaggctcttctcaggcccctcctagctctcattgtctttgattttatgaaactagagaattttccaaaa

SEQ ID NO: 101884 - DNA, 75 bp, Homo sapiens
ttctcaggcccctcctagctctcattgtctttgattttatgaaactagagaattttccaaaatgattcaatttga

SEQ ID NO: 101885 - DNA, 76 bp, Homo sapiens
ctcctagctctcattgtctttgattttatgaaactagagaattttccaaaatgattcaatttgaccttggcaatgc

SEQ ID NO: 101886 - DNA, 72 bp, Homo sapiens
aaactagagaattttccaaaatgattcaatttgaccttggcaatgccagggccattttgccaggatttccca

SEQ ID NO: 101887 - DNA, 77 bp, Homo sapiens
ttccaaaatgattcaatttgaccttggcaatgccagggccattttgccaggatttcccagaattcattgcaccataa

SEQ ID NO: 101888 - DNA, 77 bp, Homo sapiens
tttgaccttggcaatgccagggccattttgccaggatttcccagaattcattgcaccataatcatggaggggactcg

SEQ ID NO: 101889 - DNA, 75 bp, Homo sapiens
atgccagggccattttgccaggatttcccagaattcattgcaccataatcatggaggggactcgggaggtcttat

SEQ ID NO: 101890 - DNA, 77 bp, Homo sapiens
attttgccaggatttcccagaattcattgcaccataatcatggaggggactcgggaggtcttattcatccagagatc

SEQ ID NO: 101891 - DNA, 79 bp, Homo sapiens
aggatttcccagaattcattgcaccataatcatggaggggactcgggaggtcttattcatccagagatctggcaacatc

SEQ ID NO: 101892 - DNA, 82 bp, Homo sapiens
attcattgcaccataatcatggaggggactcgggaggtcttattcatccagagatctggcaacatctgggcatcctgattta

SEQ ID NO: 101893 - DNA, 82 bp, Homo sapiens
accataatcatggaggggactcgggaggtcttattcatccagagatctggcaacatctgggcatcctgatttacatgcagtg

SEQ ID NO: 101894 - DNA, 81 bp, Homo sapiens
atggaggggactcgggaggtcttattcatccagagatctggcaacatctgggcatcctgatttacatgcagtgtcctctct

SEQ ID NO: 101895 - DNA, 82 bp, Homo sapiens
actcgggaggtcttattcatccagagatctggcaacatctgggcatcctgatttacatgcagtgtcctctctttatgttaca

SEQ ID NO: 101896 - DNA, 84 bp, Homo sapiens
gtcttattcatccagagatctggcaacatctgggcatcctgatttacatgcagtgtcctctctttatgttacactggaaagcaa

SEQ ID NO: 101897 - DNA, 85 bp, Homo sapiens
atccagagatctggcaacatctgggcatcctgatttacatgcagtgtcctctctttatgttacactggaaagcaactgtgagcaa

SEQ ID NO: 101898 - DNA, 81 bp, Homo sapiens
aacatctgggcatcctgatttacatgcagtgtcctctctttatgttacactggaaagcaactgtgagcaaagcttactata

SEQ ID NO: 101899 - DNA, 76 bp, Homo sapiens
atttacatgcagtgtcctctctttatgttacactggaaagcaactgtgagcaaagcttactatagaaagttcccac

SEQ ID NO: 101900 - DNA, 76 bp, Homo sapiens
tgtcctctctttatgttacactggaaagcaactgtgagcaaagcttactatagaaagttcccaccctgaatgaaga

SEQ ID NO: 101901 - DNA, 72 bp, Homo sapiens
actatagaaagttcccaccctgaatgaagacgttcaaaccataagaaaccagcatactaaaattagcagtga

SEQ ID NO: 101902 - DNA, 76 bp, Homo sapiens
caccctgaatgaagacgttcaaaccataagaaaccagcatactaaaattagcagtgatggcccctcttgcttcaca

SEQ ID NO: 101903 - DNA, 76 bp, Homo sapiens
tgaagacgttcaaaccataagaaaccagcatactaaaattagcagtgatggcccctcttgcttcacagggcaaata

SEQ ID NO: 101904 - DNA, 74 bp, Homo sapiens
gttcaaaccataagaaaccagcatactaaaattagcagtgatggcccctcttgcttcacagggcaaatagaaaa

SEQ ID NO: 101905 - DNA, 76 bp, Homo sapiens
ataagaaaccagcatactaaaattagcagtgatggcccctcttgcttcacagggcaaatagaaaagtcagcattac

SEQ ID NO: 101906 - DNA, 74 bp, Homo sapiens
atactaaaattagcagtgatggcccctcttgcttcacagggcaaatagaaaagtcagcattacccaagtcaacc

SEQ ID NO: 101907 - DNA, 76 bp, Homo sapiens
cccctcttgcttcacagggcaaatagaaaagtcagcattacccaagtcaacctgggagtctgcatgcacttggctt

SEQ ID NO: 101908 - DNA, 76 bp, Homo sapiens
ttcacagggcaaatagaaaagtcagcattacccaagtcaacctgggagtctgcatgcacttggcttttttctagaa

SEQ ID NO: 101909 - DNA, 72 bp, Homo sapiens
aaatagaaaagtcagcattacccaagtcaacctgggagtctgcatgcacttggcttttttctagaagtccct

SEQ ID NO: 101910 - DNA, 72 bp, Homo sapiens
aaaagtcagcattacccaagtcaacctgggagtctgcatgcacttggcttttttctagaagtcccttgtaaa

SEQ ID NO: 101911 - DNA, 72 bp, Homo sapiens
attacccaagtcaacctgggagtctgcatgcacttggcttttttctagaagtcccttgtaaaatgtgagact

SEQ ID NO: 101912 - DNA, 76 bp, Homo sapiens
tgcatgcacttggcttttttctagaagtcccttgtaaaatgtgagactttctacctggggctattgcacctctata

SEQ ID NO: 101913 - DNA, 74 bp, Homo sapiens
tttttctagaagtcccttgtaaaatgtgagactttctacctggggctattgcacctctatatatcatacttata

SEQ ID NO: 101914 - DNA, 76 bp, Homo sapiens
cttgtaaaatgtgagactttctacctggggctattgcacctctatatatcatacttatacttattccacgcattta

SEQ ID NO: 101915 - DNA, 72 bp, Homo sapiens
actttctacctggggctattgcacctctatatatcatacttatacttattccacgcatttagtttttcccca

SEQ ID NO: 101916 - DNA, 72 bp, Homo sapiens
ctattgcacctctatatatcatacttatacttattccacgcatttagtttttccccaggccccaaattccat

SEQ ID NO: 101917 - DNA, 71 bp, Homo sapiens
acctctatatatcatacttatacttattccacgcatttagtttttccccaggccccaaattccatttggca

SEQ ID NO: 101918 - DNA, 70 bp, Homo sapiens
atatcatacttatacttattccacgcatttagtttttccccaggccccaaattccatttggcagggaaga

SEQ ID NO: 101919 - DNA, 69 bp, Homo sapiens
tatacttattccacgcatttagtttttccccaggccccaaattccatttggcagggaagactgtgtaaa

SEQ ID NO: 101920 - DNA, 68 bp, Homo sapiens
catttagtttttccccaggccccaaattccatttggcagggaagactgtgtaaaaatggatgcttctt

SEQ ID NO: 101921 - DNA, 70 bp, Homo sapiens
tttttccccaggccccaaattccatttggcagggaagactgtgtaaaaatggatgcttctttggcgcaaa

SEQ ID NO: 101922 - DNA, 76 bp, Homo sapiens
cccaaattccatttggcagggaagactgtgtaaaaatggatgcttctttggcgcaaatcccttctgtctgctcaga

SEQ ID NO: 101923 - DNA, 76 bp, Homo sapiens
taaaaatggatgcttctttggcgcaaatcccttctgtctgctcagagggtgcttctccatataacaactgttttct

SEQ ID NO: 101924 - DNA, 76 bp, Homo sapiens
atgcttctttggcgcaaatcccttctgtctgctcagagggtgcttctccatataacaactgttttcttaagttgta

SEQ ID NO: 101925 - DNA, 75 bp, Homo sapiens
cttctgtctgctcagagggtgcttctccatataacaactgttttcttaagttgtaaaacagcaggggcagagtaa

SEQ ID NO: 101926 - DNA, 71 bp, Homo sapiens
atataacaactgttttcttaagttgtaaaacagcaggggcagagtaaactgtatatacagccagaccgtta

SEQ ID NO: 101927 - DNA, 74 bp, Homo sapiens
taagttgtaaaacagcaggggcagagtaaactgtatatacagccagaccgttacaatcgcatagacatcttttt

SEQ ID NO: 101928 - DNA, 75 bp, Homo sapiens
aaacagcaggggcagagtaaactgtatatacagccagaccgttacaatcgcatagacatcttttttcccctctga

SEQ ID NO: 101929 - DNA, 74 bp, Homo sapiens
agtaaactgtatatacagccagaccgttacaatcgcatagacatcttttttcccctctgactgccaattcttaa

SEQ ID NO: 101930 - DNA, 75 bp, Homo sapiens
actgtatatacagccagaccgttacaatcgcatagacatcttttttcccctctgactgccaattcttaaaagtca

SEQ ID NO: 101931 - DNA, 73 bp, Homo sapiens
agaccgttacaatcgcatagacatcttttttcccctctgactgccaattcttaaaagtcagagtcgccaccat

SEQ ID NO: 101932 - DNA, 73 bp, Homo sapiens
ttacaatcgcatagacatcttttttcccctctgactgccaattcttaaaagtcagagtcgccaccatttgttt

SEQ ID NO: 101933 - DNA, 73 bp, Homo sapiens
acatcttttttcccctctgactgccaattcttaaaagtcagagtcgccaccatttgttttctgaagctcaata

SEQ ID NO: 101934 - DNA, 71 bp, Homo sapiens
tttttcccctctgactgccaattcttaaaagtcagagtcgccaccatttgttttctgaagctcaataactt

SEQ ID NO: 101935 - DNA, 73 bp, Homo sapiens
tctgactgccaattcttaaaagtcagagtcgccaccatttgttttctgaagctcaataactttgttatttctt

SEQ ID NO: 101936 - DNA, 71 bp, Homo sapiens
cttaaaagtcagagtcgccaccatttgttttctgaagctcaataactttgttatttctttgaatgttacag

SEQ ID NO: 101937 - DNA, 74 bp, Homo sapiens
agtcagagtcgccaccatttgttttctgaagctcaataactttgttatttctttgaatgttacaggaaatgctg

SEQ ID NO: 101938 - DNA, 74 bp, Homo sapiens
catttgttttctgaagctcaataactttgttatttctttgaatgttacaggaaatgctggcagtgaggcaaaac

SEQ ID NO: 101939 - DNA, 74 bp, Homo sapiens
tttctgaagctcaataactttgttatttctttgaatgttacaggaaatgctggcagtgaggcaaaacccagcct

SEQ ID NO: 101940 - DNA, 75 bp, Homo sapiens
aataactttgttatttctttgaatgttacaggaaatgctggcagtgaggcaaaacccagccttctttatgcatga

SEQ ID NO: 101941 - DNA, 76 bp, Homo sapiens
ttgttatttctttgaatgttacaggaaatgctggcagtgaggcaaaacccagccttctttatgcatgaggaaataa

SEQ ID NO: 101942 - DNA, 76 bp, Homo sapiens
tacaggaaatgctggcagtgaggcaaaacccagccttctttatgcatgaggaaataagagaagtagagggtatacc

SEQ ID NO: 101943 - DNA, 70 bp, Homo sapiens
aaaacccagccttctttatgcatgaggaaataagagaagtagagggtatacccagggtcacctggcttcg

SEQ ID NO: 101944 - DNA, 73 bp, Homo sapiens
agccttctttatgcatgaggaaataagagaagtagagggtatacccagggtcacctggcttcggcttcttcag

SEQ ID NO: 101945 - DNA, 72 bp, Homo sapiens
atgaggaaataagagaagtagagggtatacccagggtcacctggcttcggcttcttcaggctggtcggcatt

SEQ ID NO: 101946 - DNA, 71 bp, Homo sapiens
aaataagagaagtagagggtatacccagggtcacctggcttcggcttcttcaggctggtcggcatttcaac

SEQ ID NO: 101947 - DNA, 75 bp, Homo sapiens
ccagggtcacctggcttcggcttcttcaggctggtcggcatttcaactgtcccagagacggctgttgcttctagt

SEQ ID NO: 101948 - DNA, 75 bp, Homo sapiens
acctggcttcggcttcttcaggctggtcggcatttcaactgtcccagagacggctgttgcttctagttctaaata

SEQ ID NO: 101949 - DNA, 76 bp, Homo sapiens
cttcttcaggctggtcggcatttcaactgtcccagagacggctgttgcttctagttctaaatacagtggttctaca

SEQ ID NO: 101950 - DNA, 75 bp, Homo sapiens
atttcaactgtcccagagacggctgttgcttctagttctaaatacagtggttctacagcctcctgaaggagcatt

SEQ ID NO: 101951 - DNA, 75 bp, Homo sapiens
tcccagagacggctgttgcttctagttctaaatacagtggttctacagcctcctgaaggagcatttctctaagtt

SEQ ID NO: 101952 - DNA, 75 bp, Homo sapiens
agacggctgttgcttctagttctaaatacagtggttctacagcctcctgaaggagcatttctctaagtttagtca

SEQ ID NO: 101953 - DNA, 73 bp, Homo sapiens
ttctagttctaaatacagtggttctacagcctcctgaaggagcatttctctaagtttagtcaccctcaaagtc

SEQ ID NO: 101954 - DNA, 73 bp, Homo sapiens
atacagtggttctacagcctcctgaaggagcatttctctaagtttagtcaccctcaaagtcgattttcttata

SEQ ID NO: 101955 - DNA, 72 bp, Homo sapiens
ttctacagcctcctgaaggagcatttctctaagtttagtcaccctcaaagtcgattttcttatacctaacaa

SEQ ID NO: 101956 - DNA, 70 bp, Homo sapiens
aggagcatttctctaagtttagtcaccctcaaagtcgattttcttatacctaacaactgcctccctccca

SEQ ID NO: 101957 - DNA, 69 bp, Homo sapiens
ctctaagtttagtcaccctcaaagtcgattttcttatacctaacaactgcctccctcccagccaggccc

SEQ ID NO: 101958 - DNA, 70 bp, Homo sapiens
accctcaaagtcgattttcttatacctaacaactgcctccctcccagccaggccccttgccataattcaa

SEQ ID NO: 101959 - DNA, 71 bp, Homo sapiens
aaagtcgattttcttatacctaacaactgcctccctcccagccaggccccttgccataattcaagcctgct

SEQ ID NO: 101960 - DNA, 74 bp, Homo sapiens
tcccagccaggccccttgccataattcaagcctgcttcctctttggtcctctgtggagaacaaacttgctttgg

SEQ ID NO: 101961 - DNA, 72 bp, Homo sapiens
ataattcaagcctgcttcctctttggtcctctgtggagaacaaacttgctttggtgtttatgttctgtttaa

SEQ ID NO: 101962 - DNA, 72 bp, Homo sapiens
cctgcttcctctttggtcctctgtggagaacaaacttgctttggtgtttatgttctgtttaatgcagggtta

SEQ ID NO: 101963 - DNA, 71 bp, Homo sapiens
tctttggtcctctgtggagaacaaacttgctttggtgtttatgttctgtttaatgcagggttacattaacg

SEQ ID NO: 101964 - DNA, 73 bp, Homo sapiens
tctgtggagaacaaacttgctttggtgtttatgttctgtttaatgcagggttacattaacgtaggaatgtcca

SEQ ID NO: 101965 - DNA, 72 bp, Homo sapiens
tttggtgtttatgttctgtttaatgcagggttacattaacgtaggaatgtccaggttgacattcctactctg

SEQ ID NO: 101966 - DNA, 71 bp, Homo sapiens
atgttctgtttaatgcagggttacattaacgtaggaatgtccaggttgacattcctactctggaaacctaa

SEQ ID NO: 101967 - DNA, 73 bp, Homo sapiens
tttaatgcagggttacattaacgtaggaatgtccaggttgacattcctactctggaaacctaagaagagctca

SEQ ID NO: 101968 - DNA, 74 bp, Homo sapiens
ttacattaacgtaggaatgtccaggttgacattcctactctggaaacctaagaagagctcacagtcattcctta

SEQ ID NO: 101969 - DNA, 74 bp, Homo sapiens
taacgtaggaatgtccaggttgacattcctactctggaaacctaagaagagctcacagtcattccttagacctg

SEQ ID NO: 101970 - DNA, 77 bp, Homo sapiens
acattcctactctggaaacctaagaagagctcacagtcattccttagacctgtgtggtcctgtctgtgtctatggcc

SEQ ID NO: 101971 - DNA, 80 bp, Homo sapiens
taagaagagctcacagtcattccttagacctgtgtggtcctgtctgtgtctatggcctgcttttcactcataaagaagaa

SEQ ID NO: 101972 - DNA, 78 bp, Homo sapiens
cagtcattccttagacctgtgtggtcctgtctgtgtctatggcctgcttttcactcataaagaagaatcagggtctgt

SEQ ID NO: 101973 - DNA, 80 bp, Homo sapiens
tgtgtggtcctgtctgtgtctatggcctgcttttcactcataaagaagaatcagggtctgttatcaagtcccacagtctc

SEQ ID NO: 101974 - DNA, 79 bp, Homo sapiens
tgtctgtgtctatggcctgcttttcactcataaagaagaatcagggtctgttatcaagtcccacagtctcccaagtcta

SEQ ID NO: 101975 - DNA, 79 bp, Homo sapiens
tatggcctgcttttcactcataaagaagaatcagggtctgttatcaagtcccacagtctcccaagtctaggcatggcca

SEQ ID NO: 101976 - DNA, 76 bp, Homo sapiens
ttttcactcataaagaagaatcagggtctgttatcaagtcccacagtctcccaagtctaggcatggccagaaagtc

SEQ ID NO: 101977 - DNA, 76 bp, Homo sapiens
agaagaatcagggtctgttatcaagtcccacagtctcccaagtctaggcatggccagaaagtctcgatcagaaaaa

SEQ ID NO: 101978 - DNA, 78 bp, Homo sapiens
aatcagggtctgttatcaagtcccacagtctcccaagtctaggcatggccagaaagtctcgatcagaaaaagctgaga

SEQ ID NO: 101979 - DNA, 78 bp, Homo sapiens
tgttatcaagtcccacagtctcccaagtctaggcatggccagaaagtctcgatcagaaaaagctgagagggccctctg

SEQ ID NO: 101980 - DNA, 76 bp, Homo sapiens
acagtctcccaagtctaggcatggccagaaagtctcgatcagaaaaagctgagagggccctctggggaaaaatgca

SEQ ID NO: 101981 - DNA, 78 bp, Homo sapiens
aagtctaggcatggccagaaagtctcgatcagaaaaagctgagagggccctctggggaaaaatgcagtcagatctgga

SEQ ID NO: 101982 - DNA, 77 bp, Homo sapiens
atggccagaaagtctcgatcagaaaaagctgagagggccctctggggaaaaatgcagtcagatctggagggagtcac

SEQ ID NO: 101983 - DNA, 77 bp, Homo sapiens
agaaagtctcgatcagaaaaagctgagagggccctctggggaaaaatgcagtcagatctggagggagtcaccgagca

SEQ ID NO: 101984 - DNA, 78 bp, Homo sapiens
atcagaaaaagctgagagggccctctggggaaaaatgcagtcagatctggagggagtcaccgagcacagcaaatggaa

SEQ ID NO: 101985 - DNA, 75 bp, Homo sapiens
agatctggagggagtcaccgagcacagcaaatggaaggaagggaaaaagcagacgaggaacaccatatcctggtg

SEQ ID NO: 101986 - DNA, 75 bp, Homo sapiens
agcacagcaaatggaaggaagggaaaaagcagacgaggaacaccatatcctggtggcctgcccctggtgggcatg

SEQ ID NO: 101987 - DNA, 73 bp, Homo sapiens
tggaaggaagggaaaaagcagacgaggaacaccatatcctggtggcctgcccctggtgggcatggtgattatt

SEQ ID NO: 101988 - DNA, 76 bp, Homo sapiens
aagggaaaaagcagacgaggaacaccatatcctggtggcctgcccctggtgggcatggtgattatttgcagagctc

SEQ ID NO: 101989 - DNA, 78 bp, Homo sapiens
acgaggaacaccatatcctggtggcctgcccctggtgggcatggtgattatttgcagagctccatccactcaaggact

SEQ ID NO: 101990 - DNA, 76 bp, Homo sapiens
attatttgcagagctccatccactcaaggactttgggaaagttgatgcagcttggggaatggttccagaaggtgac

SEQ ID NO: 101991 - DNA, 78 bp, Homo sapiens
agctccatccactcaaggactttgggaaagttgatgcagcttggggaatggttccagaaggtgacccagatgccatga

SEQ ID NO: 101992 - DNA, 75 bp, Homo sapiens
actcaaggactttgggaaagttgatgcagcttggggaatggttccagaaggtgacccagatgccatgaggttgtg

SEQ ID NO: 101993 - DNA, 77 bp, Homo sapiens
tttgggaaagttgatgcagcttggggaatggttccagaaggtgacccagatgccatgaggttgtggccaggaccaca

SEQ ID NO: 101994 - DNA, 77 bp, Homo sapiens
agttgatgcagcttggggaatggttccagaaggtgacccagatgccatgaggttgtggccaggaccacagggaaggc

SEQ ID NO: 101995 - DNA, 77 bp, Homo sapiens
gggaatggttccagaaggtgacccagatgccatgaggttgtggccaggaccacagggaaggctgccataaaagctgc

SEQ ID NO: 101996 - DNA, 83 bp, Homo sapiens
acccagatgccatgaggttgtggccaggaccacagggaaggctgccataaaagctgccgtgatcacaggatagcctgcagaga

SEQ ID NO: 101997 - DNA, 80 bp, Homo sapiens
catgaggttgtggccaggaccacagggaaggctgccataaaagctgccgtgatcacaggatagcctgcagagaactacct

SEQ ID NO: 101998 - DNA, 78 bp, Homo sapiens
ttgtggccaggaccacagggaaggctgccataaaagctgccgtgatcacaggatagcctgcagagaactaccttaaaa

SEQ ID NO: 101999 - DNA, 76 bp, Homo sapiens
cacagggaaggctgccataaaagctgccgtgatcacaggatagcctgcagagaactaccttaaaaccccacctaga

SEQ ID NO: 102000 - DNA, 74 bp, Homo sapiens
aaggctgccataaaagctgccgtgatcacaggatagcctgcagagaactaccttaaaaccccacctagaaacca

SEQ ID NO: 102001 - DNA, 74 bp, Homo sapiens
ataaaagctgccgtgatcacaggatagcctgcagagaactaccttaaaaccccacctagaaaccaccatgcagg

SEQ ID NO: 102002 - DNA, 76 bp, Homo sapiens
tgatcacaggatagcctgcagagaactaccttaaaaccccacctagaaaccaccatgcagggaaggtcatctagag

SEQ ID NO: 102003 - DNA, 70 bp, Homo sapiens
agaactaccttaaaaccccacctagaaaccaccatgcagggaaggtcatctagaggggactggagcagta

SEQ ID NO: 102004 - DNA, 73 bp, Homo sapiens
ttaaaaccccacctagaaaccaccatgcagggaaggtcatctagaggggactggagcagtagccagggatgaa

SEQ ID NO: 102005 - DNA, 77 bp, Homo sapiens
cctagaaaccaccatgcagggaaggtcatctagaggggactggagcagtagccagggatgaaagcagggatgcccta

SEQ ID NO: 102006 - DNA, 77 bp, Homo sapiens
gaaggtcatctagaggggactggagcagtagccagggatgaaagcagggatgccctactggggatcactaacatttc

SEQ ID NO: 102007 - DNA, 81 bp, Homo sapiens
actggagcagtagccagggatgaaagcagggatgccctactggggatcactaacatttcctgccttcattctctgcatcag

SEQ ID NO: 102008 - DNA, 85 bp, Homo sapiens
tagccagggatgaaagcagggatgccctactggggatcactaacatttcctgccttcattctctgcatcaggcacacagcatcat

SEQ ID NO: 102009 - DNA, 85 bp, Homo sapiens
atgaaagcagggatgccctactggggatcactaacatttcctgccttcattctctgcatcaggcacacagcatcatttggcttga

SEQ ID NO: 102010 - DNA, 84 bp, Homo sapiens
atgccctactggggatcactaacatttcctgccttcattctctgcatcaggcacacagcatcatttggcttgatcttataaaga

SEQ ID NO: 102011 - DNA, 85 bp, Homo sapiens
gggatcactaacatttcctgccttcattctctgcatcaggcacacagcatcatttggcttgatcttataaagaagctctcattat

SEQ ID NO: 102012 - DNA, 84 bp, Homo sapiens
actaacatttcctgccttcattctctgcatcaggcacacagcatcatttggcttgatcttataaagaagctctcattattatcc

SEQ ID NO: 102013 - DNA, 78 bp, Homo sapiens
tacagaagaggaaagtgaggttcagcaaggctctgtagctcactgaaggcttaagaattccactggcttgcccataaa

SEQ ID NO: 102014 - DNA, 75 bp, Homo sapiens
aaagtgaggttcagcaaggctctgtagctcactgaaggcttaagaattccactggcttgcccataaagcccaaat

SEQ ID NO: 102015 - DNA, 74 bp, Homo sapiens
agcaaggctctgtagctcactgaaggcttaagaattccactggcttgcccataaagcccaaattcttaaccact

SEQ ID NO: 102016 - DNA, 69 bp, Homo sapiens
actgaaggcttaagaattccactggcttgcccataaagcccaaattcttaaccacttcattttacaacc

SEQ ID NO: 102017 - DNA, 69 bp, Homo sapiens
ttaagaattccactggcttgcccataaagcccaaattcttaaccacttcattttacaacctgacctccc

SEQ ID NO: 102018 - DNA, 72 bp, Homo sapiens
tggcttgcccataaagcccaaattcttaaccacttcattttacaacctgacctccctgcatcttggcttttg

SEQ ID NO: 102019 - DNA, 70 bp, Homo sapiens
taaagcccaaattcttaaccacttcattttacaacctgacctccctgcatcttggcttttggggacagta

SEQ ID NO: 102020 - DNA, 69 bp, Homo sapiens
aaattcttaaccacttcattttacaacctgacctccctgcatcttggcttttggggacagtaggaagcc

SEQ ID NO: 102021 - DNA, 70 bp, Homo sapiens
acttcattttacaacctgacctccctgcatcttggcttttggggacagtaggaagccctgtttttcaata

SEQ ID NO: 102022 - DNA, 69 bp, Homo sapiens
attttacaacctgacctccctgcatcttggcttttggggacagtaggaagccctgtttttcaatatccc

SEQ ID NO: 102023 - DNA, 73 bp, Homo sapiens
ctccctgcatcttggcttttggggacagtaggaagccctgtttttcaatatccctcactccaagaagagagta

SEQ ID NO: 102024 - DNA, 71 bp, Homo sapiens
atcttggcttttggggacagtaggaagccctgtttttcaatatccctcactccaagaagagagtatattaa

SEQ ID NO: 102025 - DNA, 69 bp, Homo sapiens
cttttggggacagtaggaagccctgtttttcaatatccctcactccaagaagagagtatattaattttc

SEQ ID NO: 102026 - DNA, 72 bp, Homo sapiens
taggaagccctgtttttcaatatccctcactccaagaagagagtatattaattttccaccagggacctgata

SEQ ID NO: 102027 - DNA, 73 bp, Homo sapiens
actccaagaagagagtatattaattttccaccagggacctgatacggtttggagacatctggatgctgggcgg

SEQ ID NO: 102028 - DNA, 73 bp, Homo sapiens
agagagtatattaattttccaccagggacctgatacggtttggagacatctggatgctgggcgggggtgctgg

SEQ ID NO: 102029 - DNA, 74 bp, Homo sapiens
atacggtttggagacatctggatgctgggcgggggtgctgggcagttccacagacctggaactgtaacccagcc

SEQ ID NO: 102030 - DNA, 78 bp, Homo sapiens
tggagacatctggatgctgggcgggggtgctgggcagttccacagacctggaactgtaacccagcctcagatcctggg

SEQ ID NO: 102031 - DNA, 73 bp, Homo sapiens
atgctgggcgggggtgctgggcagttccacagacctggaactgtaacccagcctcagatcctggggaagggtg

SEQ ID NO: 102032 - DNA, 70 bp, Homo sapiens
agttccacagacctggaactgtaacccagcctcagatcctggggaagggtgtggttctggaaaagagcgt

SEQ ID NO: 102033 - DNA, 71 bp, Homo sapiens
acagacctggaactgtaacccagcctcagatcctggggaagggtgtggttctggaaaagagcgttactctg

SEQ ID NO: 102034 - DNA, 71 bp, Homo sapiens
tgtaacccagcctcagatcctggggaagggtgtggttctggaaaagagcgttactctggtgtttactcaaa

SEQ ID NO: 102035 - DNA, 72 bp, Homo sapiens
ctcagatcctggggaagggtgtggttctggaaaagagcgttactctggtgtttactcaaagatagtcattaa

SEQ ID NO: 102036 - DNA, 72 bp, Homo sapiens
ggggaagggtgtggttctggaaaagagcgttactctggtgtttactcaaagatagtcattaagtcactgtga

SEQ ID NO: 102037 - DNA, 75 bp, Homo sapiens
tgtggttctggaaaagagcgttactctggtgtttactcaaagatagtcattaagtcactgtgaagacatcttttc

SEQ ID NO: 102038 - DNA, 75 bp, Homo sapiens
aaaagagcgttactctggtgtttactcaaagatagtcattaagtcactgtgaagacatcttttctgcagactaaa

SEQ ID NO: 102039 - DNA, 78 bp, Homo sapiens
tactctggtgtttactcaaagatagtcattaagtcactgtgaagacatcttttctgcagactaaacaacctcactcat

SEQ ID NO: 102040 - DNA, 75 bp, Homo sapiens
gtgtttactcaaagatagtcattaagtcactgtgaagacatcttttctgcagactaaacaacctcactcattttt

SEQ ID NO: 102041 - DNA, 75 bp, Homo sapiens
tcaaagatagtcattaagtcactgtgaagacatcttttctgcagactaaacaacctcactcatttttttaaaagc

SEQ ID NO: 102042 - DNA, 73 bp, Homo sapiens
attaagtcactgtgaagacatcttttctgcagactaaacaacctcactcatttttttaaaagcttccctcaca

SEQ ID NO: 102043 - DNA, 67 bp, Homo sapiens
caacctcactcatttttttaaaagcttccctcacaggagttattttttggtactatctttctatatt

SEQ ID NO: 102044 - DNA, 65 bp, Homo sapiens
ttttaaaagcttccctcacaggagttattttttggtactatctttctatatttactggttttccc

SEQ ID NO: 102045 - DNA, 68 bp, Homo sapiens
aagcttccctcacaggagttattttttggtactatctttctatatttactggttttccccagacattc

SEQ ID NO: 102046 - DNA, 69 bp, Homo sapiens
tcacaggagttattttttggtactatctttctatatttactggttttccccagacattcttctaccctc

SEQ ID NO: 102047 - DNA, 70 bp, Homo sapiens
tttggtactatctttctatatttactggttttccccagacattcttctaccctcccactctctatcttaa

SEQ ID NO: 102048 - DNA, 71 bp, Homo sapiens
tactatctttctatatttactggttttccccagacattcttctaccctcccactctctatcttaaaaatgc

SEQ ID NO: 102049 - DNA, 70 bp, Homo sapiens
tatttactggttttccccagacattcttctaccctcccactctctatcttaaaaatgcctgtaataagat

SEQ ID NO: 102050 - DNA, 72 bp, Homo sapiens
tggttttccccagacattcttctaccctcccactctctatcttaaaaatgcctgtaataagattttgatctg

SEQ ID NO: 102051 - DNA, 74 bp, Homo sapiens
acattcttctaccctcccactctctatcttaaaaatgcctgtaataagattttgatctgtgccatagaaagaaa

SEQ ID NO: 102052 - DNA, 72 bp, Homo sapiens
cctcccactctctatcttaaaaatgcctgtaataagattttgatctgtgccatagaaagaaaagggtcattt

SEQ ID NO: 102053 - DNA, 74 bp, Homo sapiens
cactctctatcttaaaaatgcctgtaataagattttgatctgtgccatagaaagaaaagggtcattttcatagt

SEQ ID NO: 102054 - DNA, 74 bp, Homo sapiens
aaaatgcctgtaataagattttgatctgtgccatagaaagaaaagggtcattttcatagttttcatctctggcc

SEQ ID NO: 102055 - DNA, 76 bp, Homo sapiens
gtaataagattttgatctgtgccatagaaagaaaagggtcattttcatagttttcatctctggccctcatgaatta

SEQ ID NO: 102056 - DNA, 75 bp, Homo sapiens
gattttgatctgtgccatagaaagaaaagggtcattttcatagttttcatctctggccctcatgaattaataaaa

SEQ ID NO: 102057 - DNA, 74 bp, Homo sapiens
catagaaagaaaagggtcattttcatagttttcatctctggccctcatgaattaataaaaggccagcatagacg

SEQ ID NO: 102058 - DNA, 72 bp, Homo sapiens
aaaagggtcattttcatagttttcatctctggccctcatgaattaataaaaggccagcatagacggtaatta

SEQ ID NO: 102059 - DNA, 73 bp, Homo sapiens
attttcatagttttcatctctggccctcatgaattaataaaaggccagcatagacggtaattactcccttgtg

SEQ ID NO: 102060 - DNA, 73 bp, Homo sapiens
agttttcatctctggccctcatgaattaataaaaggccagcatagacggtaattactcccttgtggtccactc

SEQ ID NO: 102061 - DNA, 70 bp, Homo sapiens
aattaataaaaggccagcatagacggtaattactcccttgtggtccactctgaccctcagacctctttgg

SEQ ID NO: 102062 - DNA, 74 bp, Homo sapiens
taaaaggccagcatagacggtaattactcccttgtggtccactctgaccctcagacctctttgggctgcctctg

SEQ ID NO: 102063 - DNA, 75 bp, Homo sapiens
atagacggtaattactcccttgtggtccactctgaccctcagacctctttgggctgcctctgtgcctggccaatc

SEQ ID NO: 102064 - DNA, 76 bp, Homo sapiens
taattactcccttgtggtccactctgaccctcagacctctttgggctgcctctgtgcctggccaatcttccattta

SEQ ID NO: 102065 - DNA, 76 bp, Homo sapiens
ttgtggtccactctgaccctcagacctctttgggctgcctctgtgcctggccaatcttccatttactatttgtttc

SEQ ID NO: 102066 - DNA, 78 bp, Homo sapiens
tctgaccctcagacctctttgggctgcctctgtgcctggccaatcttccatttactatttgtttctgatcctgttgaa

SEQ ID NO: 102067 - DNA, 75 bp, Homo sapiens
cctctttgggctgcctctgtgcctggccaatcttccatttactatttgtttctgatcctgttgaactttactgta

SEQ ID NO: 102068 - DNA, 78 bp, Homo sapiens
ctgcctctgtgcctggccaatcttccatttactatttgtttctgatcctgttgaactttactgtatattgaggaagca

SEQ ID NO: 102069 - DNA, 76 bp, Homo sapiens
tgcctggccaatcttccatttactatttgtttctgatcctgttgaactttactgtatattgaggaagcagtcctta

SEQ ID NO: 102070 - DNA, 75 bp, Homo sapiens
atcttccatttactatttgtttctgatcctgttgaactttactgtatattgaggaagcagtccttagtttcatgc

SEQ ID NO: 102071 - DNA, 76 bp, Homo sapiens
tttactatttgtttctgatcctgttgaactttactgtatattgaggaagcagtccttagtttcatgctgccctgaa

SEQ ID NO: 102072 - DNA, 78 bp, Homo sapiens
tttctgatcctgttgaactttactgtatattgaggaagcagtccttagtttcatgctgccctgaatggttctaacata

SEQ ID NO: 102073 - DNA, 80 bp, Homo sapiens
ctgttgaactttactgtatattgaggaagcagtccttagtttcatgctgccctgaatggttctaacatatgattcagtca

SEQ ID NO: 102074 - DNA, 79 bp, Homo sapiens
tttactgtatattgaggaagcagtccttagtttcatgctgccctgaatggttctaacatatgattcagtcagcctaatt

SEQ ID NO: 102075 - DNA, 79 bp, Homo sapiens
tattgaggaagcagtccttagtttcatgctgccctgaatggttctaacatatgattcagtcagcctaatttccttttgc

SEQ ID NO: 102076 - DNA, 75 bp, Homo sapiens
agtccttagtttcatgctgccctgaatggttctaacatatgattcagtcagcctaatttccttttgccctctaaa

SEQ ID NO: 102077 - DNA, 73 bp, Homo sapiens
ccctgaatggttctaacatatgattcagtcagcctaatttccttttgccctctaaaaggatgcttcaaaaaga

SEQ ID NO: 102078 - DNA, 78 bp, Homo sapiens
ttctaacatatgattcagtcagcctaatttccttttgccctctaaaaggatgcttcaaaaagagctcagtgcacagaa

SEQ ID NO: 102079 - DNA, 75 bp, Homo sapiens
taatttccttttgccctctaaaaggatgcttcaaaaagagctcagtgcacagaaacaagctttgagtagcgagag

SEQ ID NO: 102080 - DNA, 77 bp, Homo sapiens
cttttgccctctaaaaggatgcttcaaaaagagctcagtgcacagaaacaagctttgagtagcgagagtattgacaa

SEQ ID NO: 102081 - DNA, 78 bp, Homo sapiens
taaaaggatgcttcaaaaagagctcagtgcacagaaacaagctttgagtagcgagagtattgacaatgcaactttttg

SEQ ID NO: 102082 - DNA, 78 bp, Homo sapiens
atgcttcaaaaagagctcagtgcacagaaacaagctttgagtagcgagagtattgacaatgcaactttttggctttac

SEQ ID NO: 102083 - DNA, 77 bp, Homo sapiens
ctcagtgcacagaaacaagctttgagtagcgagagtattgacaatgcaactttttggctttacgggggcctgacatc

SEQ ID NO: 102084 - DNA, 72 bp, Homo sapiens
acagaaacaagctttgagtagcgagagtattgacaatgcaactttttggctttacgggggcctgacatcccc

SEQ ID NO: 102085 - DNA, 70 bp, Homo sapiens
aagctttgagtagcgagagtattgacaatgcaactttttggctttacgggggcctgacatccccctgggg

SEQ ID NO: 102086 - DNA, 67 bp, Homo sapiens
tattgacaatgcaactttttggctttacgggggcctgacatccccctgggggaaaggttgaacccaa

SEQ ID NO: 102087 - DNA, 64 bp, Homo sapiens
aactttttggctttacgggggcctgacatccccctgggggaaaggttgaacccaaggaatctga

SEQ ID NO: 102088 - DNA, 70 bp, Homo sapiens
tacgggggcctgacatccccctgggggaaaggttgaacccaaggaatctgagacatggtccctgagtata

SEQ ID NO: 102089 - DNA, 71 bp, Homo sapiens
cctgggggaaaggttgaacccaaggaatctgagacatggtccctgagtataccagcctggagggtgtacca

SEQ ID NO: 102090 - DNA, 72 bp, Homo sapiens
aaaggttgaacccaaggaatctgagacatggtccctgagtataccagcctggagggtgtaccagcctggagg

SEQ ID NO: 102091 - DNA, 74 bp, Homo sapiens
aacccaaggaatctgagacatggtccctgagtataccagcctggagggtgtaccagcctggagggtgtaccagc

SEQ ID NO: 102092 - DNA, 75 bp, Homo sapiens
agacatggtccctgagtataccagcctggagggtgtaccagcctggagggtgtaccagccccaagtggatgcact

SEQ ID NO: 102093 - DNA, 75 bp, Homo sapiens
tccctgagtataccagcctggagggtgtaccagcctggagggtgtaccagccccaagtggatgcacttacttcga

SEQ ID NO: 102094 - DNA, 74 bp, Homo sapiens
tataccagcctggagggtgtaccagcctggagggtgtaccagccccaagtggatgcacttacttcgaggttctc

SEQ ID NO: 102095 - DNA, 71 bp, Homo sapiens
agggtgtaccagcctggagggtgtaccagccccaagtggatgcacttacttcgaggttctcggggcccatc

SEQ ID NO: 102096 - DNA, 72 bp, Homo sapiens
agcctggagggtgtaccagccccaagtggatgcacttacttcgaggttctcggggcccatccactgtgattt

SEQ ID NO: 102097 - DNA, 77 bp, Homo sapiens
tgtaccagccccaagtggatgcacttacttcgaggttctcggggcccatccactgtgattttgatggctctgtggta

SEQ ID NO: 102098 - DNA, 76 bp, Homo sapiens
cccaagtggatgcacttacttcgaggttctcggggcccatccactgtgattttgatggctctgtggtaggtggcga

SEQ ID NO: 102099 - DNA, 76 bp, Homo sapiens
atgcacttacttcgaggttctcggggcccatccactgtgattttgatggctctgtggtaggtggcgacttgcggtg

SEQ ID NO: 102100 - DNA, 75 bp, Homo sapiens
ggctctgtggtaggtggcgacttgcggtgggtttgtgaagacagtgatggtcagagtgaagcttttccctgtggg

SEQ ID NO: 102101 - DNA, 74 bp, Homo sapiens
cttgcggtgggtttgtgaagacagtgatggtcagagtgaagcttttccctgtggggacacgatagagaacaaaa

SEQ ID NO: 102102 - DNA, 72 bp, Homo sapiens
tttgttgccatgaaacgtgtttcaagcatagttttgacagataacgtacctcttccacttcgaccgacaaac

SEQ ID NO: 102103 - DNA, 70 bp, Homo sapiens
aaacgtgtttcaagcatagttttgacagataacgtacctcttccacttcgaccgacaaacctgaggtcat

SEQ ID NO: 102104 - DNA, 74 bp, Homo sapiens
ttcaagcatagttttgacagataacgtacctcttccacttcgaccgacaaacctgaggtcattaaatcttgcaa

SEQ ID NO: 102105 - DNA, 71 bp, Homo sapiens
ttttgacagataacgtacctcttccacttcgaccgacaaacctgaggtcattaaatcttgcaacctggttc

SEQ ID NO: 102106 - DNA, 73 bp, Homo sapiens
ataacgtacctcttccacttcgaccgacaaacctgaggtcattaaatcttgcaacctggttcttcatggctgc

SEQ ID NO: 102107 - DNA, 77 bp, Homo sapiens
tcttccacttcgaccgacaaacctgaggtcattaaatcttgcaacctggttcttcatggctgcggtagcatttctca

SEQ ID NO: 102108 - DNA, 78 bp, Homo sapiens
accgacaaacctgaggtcattaaatcttgcaacctggttcttcatggctgcggtagcatttctcagctcagccgagta

SEQ ID NO: 102109 - DNA, 78 bp, Homo sapiens
aacctgaggtcattaaatcttgcaacctggttcttcatggctgcggtagcatttctcagctcagccgagtagttttca

SEQ ID NO: 102110 - DNA, 84 bp, Homo sapiens
ttaaatcttgcaacctggttcttcatggctgcggtagcatttctcagctcagccgagtagttttcatcattgccagccatcaca

SEQ ID NO: 102111 - DNA, 83 bp, Homo sapiens
aacctggttcttcatggctgcggtagcatttctcagctcagccgagtagttttcatcattgccagccatcacagtgaccagag

SEQ ID NO: 102112 - DNA, 88 bp, Homo sapiens
ttcttcatggctgcggtagcatttctcagctcagccgagtagttttcatcattgccagccatcacagtgaccagagtgccatctggaa

SEQ ID NO: 102113 - DNA, 84 bp, Homo sapiens
gtagcatttctcagctcagccgagtagttttcatcattgccagccatcacagtgaccagagtgccatctggaacatcccctagg

SEQ ID NO: 102114 - DNA, 83 bp, Homo sapiens
atttctcagctcagccgagtagttttcatcattgccagccatcacagtgaccagagtgccatctggaacatcccctagggcca

SEQ ID NO: 102115 - DNA, 79 bp, Homo sapiens
cgagtagttttcatcattgccagccatcacagtgaccagagtgccatctggaacatcccctagggccaccacctaaaca

SEQ ID NO: 102116 - DNA, 80 bp, Homo sapiens
tttcatcattgccagccatcacagtgaccagagtgccatctggaacatcccctagggccaccacctaaacaccagtcaaa

SEQ ID NO: 102117 - DNA, 76 bp, Homo sapiens
ccagccatcacagtgaccagagtgccatctggaacatcccctagggccaccacctaaacaccagtcaaaggacaaa

SEQ ID NO: 102118 - DNA, 77 bp, Homo sapiens
gtgccatctggaacatcccctagggccaccacctaaacaccagtcaaaggacaaatgcagacatcagggatgttata

SEQ ID NO: 102119 - DNA, 76 bp, Homo sapiens
atctggaacatcccctagggccaccacctaaacaccagtcaaaggacaaatgcagacatcagggatgttatacata

SEQ ID NO: 102120 - DNA, 75 bp, Homo sapiens
tagggccaccacctaaacaccagtcaaaggacaaatgcagacatcagggatgttatacatacacttttagggcat

SEQ ID NO: 102121 - DNA, 76 bp, Homo sapiens
acctaaacaccagtcaaaggacaaatgcagacatcagggatgttatacatacacttttagggcatttgtgtagtga

SEQ ID NO: 102122 - DNA, 77 bp, Homo sapiens
cagtcaaaggacaaatgcagacatcagggatgttatacatacacttttagggcatttgtgtagtgattattctaaaa

SEQ ID NO: 102123 - DNA, 75 bp, Homo sapiens
aaaggacaaatgcagacatcagggatgttatacatacacttttagggcatttgtgtagtgattattctaaaatta

SEQ ID NO: 102124 - DNA, 74 bp, Homo sapiens
gggatgttatacatacacttttagggcatttgtgtagtgattattctaaaattaaatgtatattcaatgatttc

SEQ ID NO: 102125 - DNA, 71 bp, Homo sapiens
catacacttttagggcatttgtgtagtgattattctaaaattaaatgtatattcaatgatttctttttagg

SEQ ID NO: 102126 - DNA, 75 bp, Homo sapiens
gggcatttgtgtagtgattattctaaaattaaatgtatattcaatgatttctttttaggttgcagaggaatagca

SEQ ID NO: 102127 - DNA, 76 bp, Homo sapiens
tgtgtagtgattattctaaaattaaatgtatattcaatgatttctttttaggttgcagaggaatagcaatgataac

SEQ ID NO: 102128 - DNA, 74 bp, Homo sapiens
tctaaaattaaatgtatattcaatgatttctttttaggttgcagaggaatagcaatgataacttaagcaaaaca

SEQ ID NO: 102129 - DNA, 73 bp, Homo sapiens
aatgtatattcaatgatttctttttaggttgcagaggaatagcaatgataacttaagcaaaacaacagaaaag

SEQ ID NO: 102130 - DNA, 72 bp, Homo sapiens
tctttttaggttgcagaggaatagcaatgataacttaagcaaaacaacagaaaagttataaagagaagacac

SEQ ID NO: 102131 - DNA, 70 bp, Homo sapiens
aggttgcagaggaatagcaatgataacttaagcaaaacaacagaaaagttataaagagaagacacttttt

SEQ ID NO: 102132 - DNA, 69 bp, Homo sapiens
ggaatagcaatgataacttaagcaaaacaacagaaaagttataaagagaagacacttttttattatatt

SEQ ID NO: 102133 - DNA, 67 bp, Homo sapiens
acttaagcaaaacaacagaaaagttataaagagaagacacttttttattatattttaggttggtgca

SEQ ID NO: 102134 - DNA, 74 bp, Homo sapiens
caccaacctaatacattatgtataactatatgtaaattttcaaatagtgacacatatactaaatttacctcata

SEQ ID NO: 102135 - DNA, 74 bp, Homo sapiens
cctaatacattatgtataactatatgtaaattttcaaatagtgacacatatactaaatttacctcataaagcca

SEQ ID NO: 102136 - DNA, 77 bp, Homo sapiens
tataactatatgtaaattttcaaatagtgacacatatactaaatttacctcataaagccatagtaggtcacatagca

SEQ ID NO: 102137 - DNA, 76 bp, Homo sapiens
tgtaaattttcaaatagtgacacatatactaaatttacctcataaagccatagtaggtcacatagcacagttggaa

SEQ ID NO: 102138 - DNA, 77 bp, Homo sapiens
ttcaaatagtgacacatatactaaatttacctcataaagccatagtaggtcacatagcacagttggaacaagactaa

SEQ ID NO: 102139 - DNA, 78 bp, Homo sapiens
cacatatactaaatttacctcataaagccatagtaggtcacatagcacagttggaacaagactaaccatagcaagata

SEQ ID NO: 102140 - DNA, 77 bp, Homo sapiens
atactaaatttacctcataaagccatagtaggtcacatagcacagttggaacaagactaaccatagcaagatatcaa

SEQ ID NO: 102141 - DNA, 79 bp, Homo sapiens
tacctcataaagccatagtaggtcacatagcacagttggaacaagactaaccatagcaagatatcaaggattttgagta

SEQ ID NO: 102142 - DNA, 80 bp, Homo sapiens
ttggaacaagactaaccatagcaagatatcaaggattttgagtagctatgccgtctcctgaatacaagcatctcttctta

SEQ ID NO: 102143 - DNA, 78 bp, Homo sapiens
acaagactaaccatagcaagatatcaaggattttgagtagctatgccgtctcctgaatacaagcatctcttcttaatt

SEQ ID NO: 102144 - DNA, 78 bp, Homo sapiens
atagcaagatatcaaggattttgagtagctatgccgtctcctgaatacaagcatctcttcttaatttctcccgtttga

SEQ ID NO: 102145 - DNA, 76 bp, Homo sapiens
atatcaaggattttgagtagctatgccgtctcctgaatacaagcatctcttcttaatttctcccgtttgagaaaca

SEQ ID NO: 102146 - DNA, 76 bp, Homo sapiens
ttttgagtagctatgccgtctcctgaatacaagcatctcttcttaatttctcccgtttgagaaacagaacatcctg

SEQ ID NO: 102147 - DNA, 75 bp, Homo sapiens
ctatgccgtctcctgaatacaagcatctcttcttaatttctcccgtttgagaaacagaacatcctgtgtttgtaa

SEQ ID NO: 102148 - DNA, 72 bp, Homo sapiens
cctgaatacaagcatctcttcttaatttctcccgtttgagaaacagaacatcctgtgtttgtaagtttataa

SEQ ID NO: 102149 - DNA, 70 bp, Homo sapiens
tctcttcttaatttctcccgtttgagaaacagaacatcctgtgtttgtaagtttataatccaacccatct

SEQ ID NO: 102150 - DNA, 73 bp, Homo sapiens
tttgagaaacagaacatcctgtgtttgtaagtttataatccaacccatcttttacttgctcagacctccacta

SEQ ID NO: 102151 - DNA, 71 bp, Homo sapiens
aaacagaacatcctgtgtttgtaagtttataatccaacccatcttttacttgctcagacctccactaacag

SEQ ID NO: 102152 - DNA, 72 bp, Homo sapiens
atcctgtgtttgtaagtttataatccaacccatcttttacttgctcagacctccactaacaggctgaacaag

SEQ ID NO: 102153 - DNA, 72 bp, Homo sapiens
gtttataatccaacccatcttttacttgctcagacctccactaacaggctgaacaaggtgcagactttactt

SEQ ID NO: 102154 - DNA, 73 bp, Homo sapiens
taatccaacccatcttttacttgctcagacctccactaacaggctgaacaaggtgcagactttacttttagaa

SEQ ID NO: 102155 - DNA, 71 bp, Homo sapiens
atcttttacttgctcagacctccactaacaggctgaacaaggtgcagactttacttttagaaaataaaaca

SEQ ID NO: 102156 - DNA, 69 bp, Homo sapiens
aaaacccaatttctgctaaaagtagatttcatcttgctgacgattcttaagtaacttaaactgtccctc

SEQ ID NO: 102157 - DNA, 76 bp, Homo sapiens
tctgctaaaagtagatttcatcttgctgacgattcttaagtaacttaaactgtccctctacagttcatctttgata

SEQ ID NO: 102158 - DNA, 73 bp, Homo sapiens
taaaagtagatttcatcttgctgacgattcttaagtaacttaaactgtccctctacagttcatctttgatacc

SEQ ID NO: 102159 - DNA, 73 bp, Homo sapiens
aaagtagatttcatcttgctgacgattcttaagtaacttaaactgtccctctacagttcatctttgatacctc

SEQ ID NO: 102160 - DNA, 76 bp, Homo sapiens
tagatttcatcttgctgacgattcttaagtaacttaaactgtccctctacagttcatctttgatacctcctactca

SEQ ID NO: 102161 - DNA, 74 bp, Homo sapiens
ctgacgattcttaagtaacttaaactgtccctctacagttcatctttgatacctcctactcatcgctattatct

SEQ ID NO: 102162 - DNA, 74 bp, Homo sapiens
acgattcttaagtaacttaaactgtccctctacagttcatctttgatacctcctactcatcgctattatcttga

SEQ ID NO: 102163 - DNA, 73 bp, Homo sapiens
ttcttaagtaacttaaactgtccctctacagttcatctttgatacctcctactcatcgctattatcttgagtt

SEQ ID NO: 102164 - DNA, 73 bp, Homo sapiens
agtaacttaaactgtccctctacagttcatctttgatacctcctactcatcgctattatcttgagttttacta

SEQ ID NO: 102165 - DNA, 75 bp, Homo sapiens
taacttaaactgtccctctacagttcatctttgatacctcctactcatcgctattatcttgagttttactagcaa

SEQ ID NO: 102166 - DNA, 77 bp, Homo sapiens
taaactgtccctctacagttcatctttgatacctcctactcatcgctattatcttgagttttactagcaatgaattc

SEQ ID NO: 102167 - DNA, 80 bp, Homo sapiens
ctctacagttcatctttgatacctcctactcatcgctattatcttgagttttactagcaatgaattctagcacacaagaa

SEQ ID NO: 102168 - DNA, 77 bp, Homo sapiens
agttcatctttgatacctcctactcatcgctattatcttgagttttactagcaatgaattctagcacacaagaaaaa

SEQ ID NO: 102169 - DNA, 77 bp, Homo sapiens
ttgatacctcctactcatcgctattatcttgagttttactagcaatgaattctagcacacaagaaaaaaaaatcaga

SEQ ID NO: 102170 - DNA, 72 bp, Homo sapiens
aatcagaaatgcacccttcgtttactaattacaaaatcaacagacctcagaaagacgggacattcacttcta

SEQ ID NO: 102171 - DNA, 73 bp, Homo sapiens
tttactaattacaaaatcaacagacctcagaaagacgggacattcacttctatgcactcccctcaattcaggg

SEQ ID NO: 102172 - DNA, 72 bp, Homo sapiens
aaatcaacagacctcagaaagacgggacattcacttctatgcactcccctcaattcaggggtggaattgggt

SEQ ID NO: 102173 - DNA, 74 bp, Homo sapiens
aaagacgggacattcacttctatgcactcccctcaattcaggggtggaattgggttgcatttttgtatctgtga

SEQ ID NO: 102174 - DNA, 76 bp, Homo sapiens
acttctatgcactcccctcaattcaggggtggaattgggttgcatttttgtatctgtgagtctcagcgtgtgtaaa

SEQ ID NO: 102175 - DNA, 79 bp, Homo sapiens
tatgcactcccctcaattcaggggtggaattgggttgcatttttgtatctgtgagtctcagcgtgtgtaaactcatgtc

SEQ ID NO: 102176 - DNA, 80 bp, Homo sapiens
aattcaggggtggaattgggttgcatttttgtatctgtgagtctcagcgtgtgtaaactcatgtcctcacagatgcctga

SEQ ID NO: 102177 - DNA, 82 bp, Homo sapiens
tggaattgggttgcatttttgtatctgtgagtctcagcgtgtgtaaactcatgtcctcacagatgcctgaggttttctgcta

SEQ ID NO: 102178 - DNA, 85 bp, Homo sapiens
ttgcatttttgtatctgtgagtctcagcgtgtgtaaactcatgtcctcacagatgcctgaggttttctgctagcccagctgatct

SEQ ID NO: 102179 - DNA, 85 bp, Homo sapiens
ttttgtatctgtgagtctcagcgtgtgtaaactcatgtcctcacagatgcctgaggttttctgctagcccagctgatcttgacca

SEQ ID NO: 102180 - DNA, 82 bp, Homo sapiens
tctcagcgtgtgtaaactcatgtcctcacagatgcctgaggttttctgctagcccagctgatcttgaccaggaatttattta

SEQ ID NO: 102181 - DNA, 80 bp, Homo sapiens
tgtgtaaactcatgtcctcacagatgcctgaggttttctgctagcccagctgatcttgaccaggaatttatttaatgtaa

SEQ ID NO: 102182 - DNA, 75 bp, Homo sapiens
aggttttctgctagcccagctgatcttgaccaggaatttatttaatgtaactgagtaagtatgaagtcttatcag

SEQ ID NO: 102183 - DNA, 73 bp, Homo sapiens
gaccaggaatttatttaatgtaactgagtaagtatgaagtcttatcagggctattggagaaaactggtagata

SEQ ID NO: 102184 - DNA, 73 bp, Homo sapiens
taactgagtaagtatgaagtcttatcagggctattggagaaaactggtagataaatgtttttatactcaggta

SEQ ID NO: 102185 - DNA, 70 bp, Homo sapiens
cttatcagggctattggagaaaactggtagataaatgtttttatactcaggtaattaagaaaatgaattc

SEQ ID NO: 102186 - DNA, 68 bp, Homo sapiens
ctattggagaaaactggtagataaatgtttttatactcaggtaattaagaaaatgaattccaaagtaa

SEQ ID NO: 102187 - DNA, 70 bp, Homo sapiens
tggtagataaatgtttttatactcaggtaattaagaaaatgaattccaaagtaaaatactctgaaaagca

SEQ ID NO: 102188 - DNA, 70 bp, Homo sapiens
tgtttttatactcaggtaattaagaaaatgaattccaaagtaaaatactctgaaaagcatgacctaaaga

SEQ ID NO: 102189 - DNA, 71 bp, Homo sapiens
ctcaggtaattaagaaaatgaattccaaagtaaaatactctgaaaagcatgacctaaagatactttgtaca

SEQ ID NO: 102190 - DNA, 73 bp, Homo sapiens
taagaaaatgaattccaaagtaaaatactctgaaaagcatgacctaaagatactttgtacaatagcatcaatt

SEQ ID NO: 102191 - DNA, 76 bp, Homo sapiens
gaattccaaagtaaaatactctgaaaagcatgacctaaagatactttgtacaatagcatcaatttcttggctatca

SEQ ID NO: 102192 - DNA, 76 bp, Homo sapiens
taaaatactctgaaaagcatgacctaaagatactttgtacaatagcatcaatttcttggctatcatttaggccttc

SEQ ID NO: 102193 - DNA, 76 bp, Homo sapiens
ctgaaaagcatgacctaaagatactttgtacaatagcatcaatttcttggctatcatttaggccttctagaaacta

SEQ ID NO: 102194 - DNA, 75 bp, Homo sapiens
agcatgacctaaagatactttgtacaatagcatcaatttcttggctatcatttaggccttctagaaactattttc

SEQ ID NO: 102195 - DNA, 75 bp, Homo sapiens
gatactttgtacaatagcatcaatttcttggctatcatttaggccttctagaaactattttcttggtctagacat

SEQ ID NO: 102196 - DNA, 75 bp, Homo sapiens
caatagcatcaatttcttggctatcatttaggccttctagaaactattttcttggtctagacatttactattggc

SEQ ID NO: 102197 - DNA, 74 bp, Homo sapiens
catcaatttcttggctatcatttaggccttctagaaactattttcttggtctagacatttactattggctgtat

SEQ ID NO: 102198 - DNA, 69 bp, Homo sapiens
tttaggccttctagaaactattttcttggtctagacatttactattggctgtatttcctttgtttctat

SEQ ID NO: 102199 - DNA, 71 bp, Homo sapiens
gaaactattttcttggtctagacatttactattggctgtatttcctttgtttctatttttcaaagcagtca

SEQ ID NO: 102200 - DNA, 72 bp, Homo sapiens
cttggtctagacatttactattggctgtatttcctttgtttctatttttcaaagcagtcatacaacttcaaa

SEQ ID NO: 102201 - DNA, 74 bp, Homo sapiens
tattggctgtatttcctttgtttctatttttcaaagcagtcatacaacttcaaatcgaaatgccccaagctgta

SEQ ID NO: 102202 - DNA, 75 bp, Homo sapiens
tcctttgtttctatttttcaaagcagtcatacaacttcaaatcgaaatgccccaagctgtatttattctgatcat

SEQ ID NO: 102203 - DNA, 76 bp, Homo sapiens
aagcagtcatacaacttcaaatcgaaatgccccaagctgtatttattctgatcatttctgacattctttacggtaa

SEQ ID NO: 102204 - DNA, 75 bp, Homo sapiens
tacaacttcaaatcgaaatgccccaagctgtatttattctgatcatttctgacattctttacggtaaagtcagta

SEQ ID NO: 102205 - DNA, 76 bp, Homo sapiens
atcgaaatgccccaagctgtatttattctgatcatttctgacattctttacggtaaagtcagtagtgacatttata

SEQ ID NO: 102206 - DNA, 76 bp, Homo sapiens
cccaagctgtatttattctgatcatttctgacattctttacggtaaagtcagtagtgacatttatattactcattc

SEQ ID NO: 102207 - DNA, 77 bp, Homo sapiens
gctgtatttattctgatcatttctgacattctttacggtaaagtcagtagtgacatttatattactcattccaatta

SEQ ID NO: 102208 - DNA, 77 bp, Homo sapiens
ctgatcatttctgacattctttacggtaaagtcagtagtgacatttatattactcattccaattacatcatcatttt

SEQ ID NO: 102209 - DNA, 76 bp, Homo sapiens
ctgacattctttacggtaaagtcagtagtgacatttatattactcattccaattacatcatcatttttggttgctg

SEQ ID NO: 102210 - DNA, 72 bp, Homo sapiens
ctttacggtaaagtcagtagtgacatttatattactcattccaattacatcatcatttttggttgctgtttt

SEQ ID NO: 102211 - DNA, 75 bp, Homo sapiens
agtcagtagtgacatttatattactcattccaattacatcatcatttttggttgctgtttttgaattggtaacag

SEQ ID NO: 102212 - DNA, 74 bp, Homo sapiens
catttatattactcattccaattacatcatcatttttggttgctgtttttgaattggtaacagtaaagcattcc

SEQ ID NO: 102213 - DNA, 74 bp, Homo sapiens
ctcattccaattacatcatcatttttggttgctgtttttgaattggtaacagtaaagcattccttaatctagtg

SEQ ID NO: 102214 - DNA, 74 bp, Homo sapiens
tacatcatcatttttggttgctgtttttgaattggtaacagtaaagcattccttaatctagtgttatcactcct

SEQ ID NO: 102215 - DNA, 71 bp, Homo sapiens
catttttggttgctgtttttgaattggtaacagtaaagcattccttaatctagtgttatcactccttcctc

SEQ ID NO: 102216 - DNA, 70 bp, Homo sapiens
aattggtaacagtaaagcattccttaatctagtgttatcactccttcctctgcctcctacttcccaattt

SEQ ID NO: 102217 - DNA, 69 bp, Homo sapiens
cactccttcctctgcctcctacttcccaatttttaccttaataactgctacataattttttgtagtata

SEQ ID NO: 102218 - DNA, 69 bp, Homo sapiens
tgcctcctacttcccaatttttaccttaataactgctacataattttttgtagtatatattttcaggcc

SEQ ID NO: 102219 - DNA, 67 bp, Homo sapiens
ctacttcccaatttttaccttaataactgctacataattttttgtagtatatattttcaggcctctt

SEQ ID NO: 102220 - DNA, 69 bp, Homo sapiens
atttttaccttaataactgctacataattttttgtagtatatattttcaggcctctttttctatatgta

SEQ ID NO: 102221 - DNA, 72 bp, Homo sapiens
actgctacataattttttgtagtatatattttcaggcctctttttctatatgtaaaaaaggctgccatagac

SEQ ID NO: 102222 - DNA, 72 bp, Homo sapiens
cataattttttgtagtatatattttcaggcctctttttctatatgtaaaaaaggctgccatagactcacttg

SEQ ID NO: 102223 - DNA, 77 bp, Homo sapiens
agtatatattttcaggcctctttttctatatgtaaaaaaggctgccatagactcacttgtatgatatcgaagtcatg

SEQ ID NO: 102224 - DNA, 76 bp, Homo sapiens
atattttcaggcctctttttctatatgtaaaaaaggctgccatagactcacttgtatgatatcgaagtcatgtttc

SEQ ID NO: 102225 - DNA, 76 bp, Homo sapiens
ctttttctatatgtaaaaaaggctgccatagactcacttgtatgatatcgaagtcatgtttctcaagattcccatt

SEQ ID NO: 102226 - DNA, 82 bp, Homo sapiens
tatatgtaaaaaaggctgccatagactcacttgtatgatatcgaagtcatgtttctcaagattcccattttcatgatctgct

SEQ ID NO: 102227 - DNA, 83 bp, Homo sapiens
aaaaggctgccatagactcacttgtatgatatcgaagtcatgtttctcaagattcccattttcatgatctgcttagccatcac

SEQ ID NO: 102228 - DNA, 80 bp, Homo sapiens
atagactcacttgtatgatatcgaagtcatgtttctcaagattcccattttcatgatctgcttagccatcaccctttccc

SEQ ID NO: 102229 - DNA, 80 bp, Homo sapiens
cttgtatgatatcgaagtcatgtttctcaagattcccattttcatgatctgcttagccatcaccctttccctgtggcctc

SEQ ID NO: 102230 - DNA, 80 bp, Homo sapiens
agtcatgtttctcaagattcccattttcatgatctgcttagccatcaccctttccctgtggcctccagatgactatctat

SEQ ID NO: 102231 - DNA, 79 bp, Homo sapiens
tctcaagattcccattttcatgatctgcttagccatcaccctttccctgtggcctccagatgactatctattgttttta

SEQ ID NO: 102232 - DNA, 81 bp, Homo sapiens
ttcatgatctgcttagccatcaccctttccctgtggcctccagatgactatctattgtttttattcattagaactgcttca

SEQ ID NO: 102233 - DNA, 78 bp, Homo sapiens
tttccctgtggcctccagatgactatctattgtttttattcattagaactgcttcagtccttgtggcacagaacacga

SEQ ID NO: 102234 - DNA, 79 bp, Homo sapiens
tgtttttattcattagaactgcttcagtccttgtggcacagaacacgaactaactcactatgagagatgaacatacttc

SEQ ID NO: 102235 - DNA, 79 bp, Homo sapiens
ttattcattagaactgcttcagtccttgtggcacagaacacgaactaactcactatgagagatgaacatacttccaacc

SEQ ID NO: 102236 - DNA, 77 bp, Homo sapiens
aactgcttcagtccttgtggcacagaacacgaactaactcactatgagagatgaacatacttccaaccccaagacta

SEQ ID NO: 102237 - DNA, 78 bp, Homo sapiens
ttgtggcacagaacacgaactaactcactatgagagatgaacatacttccaaccccaagactacaccaggataatcta

SEQ ID NO: 102238 - DNA, 77 bp, Homo sapiens
agaacacgaactaactcactatgagagatgaacatacttccaaccccaagactacaccaggataatctagtctcata

SEQ ID NO: 102239 - DNA, 77 bp, Homo sapiens
actatgagagatgaacatacttccaaccccaagactacaccaggataatctagtctcatagaagcagggaggcattt

SEQ ID NO: 102240 - DNA, 73 bp, Homo sapiens
aacatacttccaaccccaagactacaccaggataatctagtctcatagaagcagggaggcattttcctctatt

SEQ ID NO: 102241 - DNA, 77 bp, Homo sapiens
agactacaccaggataatctagtctcatagaagcagggaggcattttcctctattttatccaacttgcactgccaaa

SEQ ID NO: 102242 - DNA, 74 bp, Homo sapiens
tagtctcatagaagcagggaggcattttcctctattttatccaacttgcactgccaaacaaggtctgggccttt

SEQ ID NO: 102243 - DNA, 68 bp, Homo sapiens
ttttcctctattttatccaacttgcactgccaaacaaggtctgggccttttctctctttttaatcctt

SEQ ID NO: 102244 - DNA, 70 bp, Homo sapiens
tattttatccaacttgcactgccaaacaaggtctgggccttttctctctttttaatcctttcattccaat

SEQ ID NO: 102245 - DNA, 71 bp, Homo sapiens
aacttgcactgccaaacaaggtctgggccttttctctctttttaatcctttcattccaattgttggacatg

SEQ ID NO: 102246 - DNA, 70 bp, Homo sapiens
gtctgggccttttctctctttttaatcctttcattccaattgttggacatgttttccatataggagattt

SEQ ID NO: 102247 - DNA, 72 bp, Homo sapiens
tctctctttttaatcctttcattccaattgttggacatgttttccatataggagattttaaaactctgctat

SEQ ID NO: 102248 - DNA, 71 bp, Homo sapiens
ttaatcctttcattccaattgttggacatgttttccatataggagattttaaaactctgctatttattccc

SEQ ID NO: 102249 - DNA, 72 bp, Homo sapiens
ctttcattccaattgttggacatgttttccatataggagattttaaaactctgctatttattccccaagcac

SEQ ID NO: 102250 - DNA, 72 bp, Homo sapiens
ttggacatgttttccatataggagattttaaaactctgctatttattccccaagcaccctctaattagctat

SEQ ID NO: 102251 - DNA, 70 bp, Homo sapiens
tttccatataggagattttaaaactctgctatttattccccaagcaccctctaattagctatttagttcc

SEQ ID NO: 102252 - DNA, 69 bp, Homo sapiens
ggagattttaaaactctgctatttattccccaagcaccctctaattagctatttagttcccattataag

SEQ ID NO: 102253 - DNA, 71 bp, Homo sapiens
aaactctgctatttattccccaagcaccctctaattagctatttagttcccattataagtgtgtttgttgc

SEQ ID NO: 102254 - DNA, 71 bp, Homo sapiens
gctatttattccccaagcaccctctaattagctatttagttcccattataagtgtgtttgttgccatttaa

SEQ ID NO: 102255 - DNA, 74 bp, Homo sapiens
ccaagcaccctctaattagctatttagttcccattataagtgtgtttgttgccatttaattaagagcagtgata

SEQ ID NO: 102256 - DNA, 73 bp, Homo sapiens
ccctctaattagctatttagttcccattataagtgtgtttgttgccatttaattaagagcagtgatacgacaa

SEQ ID NO: 102257 - DNA, 71 bp, Homo sapiens
gctatttagttcccattataagtgtgtttgttgccatttaattaagagcagtgatacgacaattccctttt

SEQ ID NO: 102258 - DNA, 70 bp, Homo sapiens
gttcccattataagtgtgtttgttgccatttaattaagagcagtgatacgacaattccctttttgtttta

SEQ ID NO: 102259 - DNA, 70 bp, Homo sapiens
gtgtttgttgccatttaattaagagcagtgatacgacaattccctttttgttttaaaaagatatcacgga

SEQ ID NO: 102260 - DNA, 69 bp, Homo sapiens
gccatttaattaagagcagtgatacgacaattccctttttgttttaaaaagatatcacggaaataaatc

SEQ ID NO: 102261 - DNA, 70 bp, Homo sapiens
aagagcagtgatacgacaattccctttttgttttaaaaagatatcacggaaataaatctccctgatcagt

SEQ ID NO: 102262 - DNA, 69 bp, Homo sapiens
cagtgatacgacaattccctttttgttttaaaaagatatcacggaaataaatctccctgatcagttatt

SEQ ID NO: 102263 - DNA, 68 bp, Homo sapiens
tttgttttaaaaagatatcacggaaataaatctccctgatcagttatttggttattgctactgttttt

SEQ ID NO: 102264 - DNA, 66 bp, Homo sapiens
ttttttttctattcccgaaaaatgggcttgctttattttgctctttttagtctctcacaacaaatt

SEQ ID NO: 102265 - DNA, 67 bp, Homo sapiens
tttctattcccgaaaaatgggcttgctttattttgctctttttagtctctcacaacaaattttcccc

SEQ ID NO: 102266 - DNA, 65 bp, Homo sapiens
attcccgaaaaatgggcttgctttattttgctctttttagtctctcacaacaaattttccccttt

SEQ ID NO: 102267 - DNA, 69 bp, Homo sapiens
tgggcttgctttattttgctctttttagtctctcacaacaaattttcccctttttttcatgattttcac

SEQ ID NO: 102268 - DNA, 67 bp, Homo sapiens
gctttattttgctctttttagtctctcacaacaaattttcccctttttttcatgattttcacttccc

SEQ ID NO: 102269 - DNA, 67 bp, Homo sapiens
ttttgctctttttagtctctcacaacaaattttcccctttttttcatgattttcacttcccgttgta

SEQ ID NO: 102270 - DNA, 68 bp, Homo sapiens
tttagtctctcacaacaaattttcccctttttttcatgattttcacttcccgttgtaaagttagctca

SEQ ID NO: 102271 - DNA, 69 bp, Homo sapiens
tctctcacaacaaattttcccctttttttcatgattttcacttcccgttgtaaagttagctcacagtgt

SEQ ID NO: 102272 - DNA, 70 bp, Homo sapiens
tctcacaacaaattttcccctttttttcatgattttcacttcccgttgtaaagttagctcacagtgttga

SEQ ID NO: 102273 - DNA, 68 bp, Homo sapiens
cacaacaaattttcccctttttttcatgattttcacttcccgttgtaaagttagctcacagtgttgaa

SEQ ID NO: 102274 - DNA, 68 bp, Homo sapiens
tttcccctttttttcatgattttcacttcccgttgtaaagttagctcacagtgttgaaatgccctctt

SEQ ID NO: 102275 - DNA, 72 bp, Homo sapiens
ttttcatgattttcacttcccgttgtaaagttagctcacagtgttgaaatgccctctttgaacacatatttt

SEQ ID NO: 102276 - DNA, 71 bp, Homo sapiens
atgattttcacttcccgttgtaaagttagctcacagtgttgaaatgccctctttgaacacatatttttact

SEQ ID NO: 102277 - DNA, 72 bp, Homo sapiens
cttcccgttgtaaagttagctcacagtgttgaaatgccctctttgaacacatatttttacttcctcatcctc

SEQ ID NO: 102278 - DNA, 71 bp, Homo sapiens
agtgttgaaatgccctctttgaacacatatttttacttcctcatcctcctctccctgtggtaacccaggct

SEQ ID NO: 102279 - DNA, 71 bp, Homo sapiens
aaatgccctctttgaacacatatttttacttcctcatcctcctctccctgtggtaacccaggcttctctat

SEQ ID NO: 102280 - DNA, 73 bp, Homo sapiens
aacacatatttttacttcctcatcctcctctccctgtggtaacccaggcttctctattgtaactcaacattca

SEQ ID NO: 102281 - DNA, 79 bp, Homo sapiens
tcatcctcctctccctgtggtaacccaggcttctctattgtaactcaacattcagcaggtatacagagactgcctccac

SEQ ID NO: 102282 - DNA, 77 bp, Homo sapiens
tctccctgtggtaacccaggcttctctattgtaactcaacattcagcaggtatacagagactgcctccactacgtgg

SEQ ID NO: 102283 - DNA, 76 bp, Homo sapiens
attgtaactcaacattcagcaggtatacagagactgcctccactacgtgggtttcaaactgaataactcattgttg

SEQ ID NO: 102284 - DNA, 77 bp, Homo sapiens
attcagcaggtatacagagactgcctccactacgtgggtttcaaactgaataactcattgttgggtctggatctgta

SEQ ID NO: 102285 - DNA, 73 bp, Homo sapiens
ggtatacagagactgcctccactacgtgggtttcaaactgaataactcattgttgggtctggatctgtaaaaa

SEQ ID NO: 102286 - DNA, 70 bp, Homo sapiens
actgcctccactacgtgggtttcaaactgaataactcattgttgggtctggatctgtaaaaaggtgaaaa

SEQ ID NO: 102287 - DNA, 68 bp, Homo sapiens
gtttcaaactgaataactcattgttgggtctggatctgtaaaaaggtgaaaataaataaatcttcttt

SEQ ID NO: 102288 - DNA, 69 bp, Homo sapiens
actcattgttgggtctggatctgtaaaaaggtgaaaataaataaatcttcttttataactacaggaatg

SEQ ID NO: 102289 - DNA, 71 bp, Homo sapiens
tgttgggtctggatctgtaaaaaggtgaaaataaataaatcttcttttataactacaggaatgtattctga

SEQ ID NO: 102290 - DNA, 72 bp, Homo sapiens
tggatctgtaaaaaggtgaaaataaataaatcttcttttataactacaggaatgtattctgaattatctgcc

SEQ ID NO: 102291 - DNA, 73 bp, Homo sapiens
gtgaaaataaataaatcttcttttataactacaggaatgtattctgaattatctgcctcctactgctgttccc

SEQ ID NO: 102292 - DNA, 74 bp, Homo sapiens
ataaataaatcttcttttataactacaggaatgtattctgaattatctgcctcctactgctgttcccctcacag

SEQ ID NO: 102293 - DNA, 78 bp, Homo sapiens
tcttcttttataactacaggaatgtattctgaattatctgcctcctactgctgttcccctcacagtgctccaagcctg

SEQ ID NO: 102294 - DNA, 82 bp, Homo sapiens
taactacaggaatgtattctgaattatctgcctcctactgctgttcccctcacagtgctccaagcctgtgcctctctcatct

SEQ ID NO: 102295 - DNA, 81 bp, Homo sapiens
aattatctgcctcctactgctgttcccctcacagtgctccaagcctgtgcctctctcatctttccaatactatcctcattg

SEQ ID NO: 102296 - DNA, 80 bp, Homo sapiens
tactgctgttcccctcacagtgctccaagcctgtgcctctctcatctttccaatactatcctcattggtaatttggcaaa

SEQ ID NO: 102297 - DNA, 79 bp, Homo sapiens
tgttcccctcacagtgctccaagcctgtgcctctctcatctttccaatactatcctcattggtaatttggcaaattcag

SEQ ID NO: 102298 - DNA, 76 bp, Homo sapiens
ctgtgcctctctcatctttccaatactatcctcattggtaatttggcaaattcaggagaccttcgccaagtcgaaa

SEQ ID NO: 102299 - DNA, 74 bp, Homo sapiens
ctcatctttccaatactatcctcattggtaatttggcaaattcaggagaccttcgccaagtcgaaacaaacata

SEQ ID NO: 102300 - DNA, 73 bp, Homo sapiens
tttccaatactatcctcattggtaatttggcaaattcaggagaccttcgccaagtcgaaacaaacatagaata

SEQ ID NO: 102301 - DNA, 73 bp, Homo sapiens
ctatcctcattggtaatttggcaaattcaggagaccttcgccaagtcgaaacaaacatagaataaaattatca

SEQ ID NO: 102302 - DNA, 72 bp, Homo sapiens
atttggcaaattcaggagaccttcgccaagtcgaaacaaacatagaataaaattatcatggaggctaaataa

SEQ ID NO: 102303 - DNA, 72 bp, Homo sapiens
gcaaattcaggagaccttcgccaagtcgaaacaaacatagaataaaattatcatggaggctaaataagaaaa

SEQ ID NO: 102304 - DNA, 71 bp, Homo sapiens
accttcgccaagtcgaaacaaacatagaataaaattatcatggaggctaaataagaaaaggctgttgatgt

SEQ ID NO: 102305 - DNA, 71 bp, Homo sapiens
ccaagtcgaaacaaacatagaataaaattatcatggaggctaaataagaaaaggctgttgatgttggaact

SEQ ID NO: 102306 - DNA, 71 bp, Homo sapiens
acaaacatagaataaaattatcatggaggctaaataagaaaaggctgttgatgttggaacttaagaagaaa

SEQ ID NO: 102307 - DNA, 66 bp, Homo sapiens
ggaggctaaataagaaaaggctgttgatgttggaacttaagaagaaaaaaattagaagtttaactc

SEQ ID NO: 102308 - DNA, 64 bp, Homo sapiens
aaggctgttgatgttggaacttaagaagaaaaaaattagaagtttaactcccactcctcttttt

SEQ ID NO: 102309 - DNA, 70 bp, Homo sapiens
attagaagtttaactcccactcctctttttttttaaatgcagcagaatcaaccatatttgggcacctaca

SEQ ID NO: 102310 - DNA, 73 bp, Homo sapiens
tttaactcccactcctctttttttttaaatgcagcagaatcaaccatatttgggcacctacatatcattcact

SEQ ID NO: 102311 - DNA, 77 bp, Homo sapiens
tcctctttttttttaaatgcagcagaatcaaccatatttgggcacctacatatcattcacttggccttgtattgatc

SEQ ID NO: 102312 - DNA, 78 bp, Homo sapiens
tttaaatgcagcagaatcaaccatatttgggcacctacatatcattcacttggccttgtattgatctctgagggtttt

SEQ ID NO: 102313 - DNA, 77 bp, Homo sapiens
atgcagcagaatcaaccatatttgggcacctacatatcattcacttggccttgtattgatctctgagggtttttttt

SEQ ID NO: 102314 - DNA, 74 bp, Homo sapiens
atcaaccatatttgggcacctacatatcattcacttggccttgtattgatctctgagggtttttttttggtgga

SEQ ID NO: 102315 - DNA, 70 bp, Homo sapiens
tacatatcattcacttggccttgtattgatctctgagggtttttttttggtggaggcgggtgggtaaagg

SEQ ID NO: 102316 - DNA, 66 bp, Homo sapiens
ttggccttgtattgatctctgagggtttttttttggtggaggcgggtgggtaaaggggaactagta

SEQ ID NO: 102317 - DNA, 66 bp, Homo sapiens
ttgtattgatctctgagggtttttttttggtggaggcgggtgggtaaaggggaactagtaaatcca

SEQ ID NO: 102318 - DNA, 62 bp, Homo sapiens
agggtttttttttggtggaggcgggtgggtaaaggggaactagtaaatccagggcaattcat

SEQ ID NO: 102319 - DNA, 68 bp, Homo sapiens
tttttggtggaggcgggtgggtaaaggggaactagtaaatccagggcaattcattaatactgtatatc

SEQ ID NO: 102320 - DNA, 69 bp, Homo sapiens
gcgggtgggtaaaggggaactagtaaatccagggcaattcattaatactgtatatcgtccaattgttaa

SEQ ID NO: 102321 - DNA, 71 bp, Homo sapiens
gtaaaggggaactagtaaatccagggcaattcattaatactgtatatcgtccaattgttaacaagcatact

SEQ ID NO: 102322 - DNA, 72 bp, Homo sapiens
actagtaaatccagggcaattcattaatactgtatatcgtccaattgttaacaagcatacttaagccaggtt

SEQ ID NO: 102323 - DNA, 71 bp, Homo sapiens
atccagggcaattcattaatactgtatatcgtccaattgttaacaagcatacttaagccaggtttaaaaag

SEQ ID NO: 102324 - DNA, 68 bp, Homo sapiens
aattcattaatactgtatatcgtccaattgttaacaagcatacttaagccaggtttaaaaagtttctt

SEQ ID NO: 102325 - DNA, 67 bp, Homo sapiens
actgtatatcgtccaattgttaacaagcatacttaagccaggtttaaaaagtttctttttaattcaa

SEQ ID NO: 102326 - DNA, 69 bp, Homo sapiens
caagcatacttaagccaggtttaaaaagtttctttttaattcaaaactaacatgcgtgctaatttgata

SEQ ID NO: 102327 - DNA, 76 bp, Homo sapiens
ctttttaattcaaaactaacatgcgtgctaatttgatacaggttttgtcactgatgggcaatatggagagaatgta

SEQ ID NO: 102328 - DNA, 77 bp, Homo sapiens
attcaaaactaacatgcgtgctaatttgatacaggttttgtcactgatgggcaatatggagagaatgtaaaaatatc

SEQ ID NO: 102329 - DNA, 78 bp, Homo sapiens
taacatgcgtgctaatttgatacaggttttgtcactgatgggcaatatggagagaatgtaaaaatatctaacttcaaa

SEQ ID NO: 102330 - DNA, 72 bp, Homo sapiens
acaggttttgtcactgatgggcaatatggagagaatgtaaaaatatctaacttcaaacagaaaaaagaaaca

SEQ ID NO: 102331 - DNA, 74 bp, Homo sapiens
gtcactgatgggcaatatggagagaatgtaaaaatatctaacttcaaacagaaaaaagaaacaactggaatgaa

SEQ ID NO: 102332 - DNA, 71 bp, Homo sapiens
gggcaatatggagagaatgtaaaaatatctaacttcaaacagaaaaaagaaacaactggaatgaaaagcta

SEQ ID NO: 102333 - DNA, 68 bp, Homo sapiens
gaatgtaaaaatatctaacttcaaacagaaaaaagaaacaactggaatgaaaagctataaacaatagg

SEQ ID NO: 102334 - DNA, 69 bp, Homo sapiens
tatctaacttcaaacagaaaaaagaaacaactggaatgaaaagctataaacaataggtaaggaaacaca

SEQ ID NO: 102335 - DNA, 67 bp, Homo sapiens
aaagaaacaactggaatgaaaagctataaacaataggtaaggaaacacaaacatttacattttaaca

SEQ ID NO: 102336 - DNA, 69 bp, Homo sapiens
ctggaatgaaaagctataaacaataggtaaggaaacacaaacatttacattttaacacagaccaaacag

SEQ ID NO: 102337 - DNA, 68 bp, Homo sapiens
aagctataaacaataggtaaggaaacacaaacatttacattttaacacagaccaaacaggcaagaagg

SEQ ID NO: 102338 - DNA, 72 bp, Homo sapiens
taaggaaacacaaacatttacattttaacacagaccaaacaggcaagaagggacttgctggccaaagatatc

SEQ ID NO: 102339 - DNA, 73 bp, Homo sapiens
tacattttaacacagaccaaacaggcaagaagggacttgctggccaaagatatctcatattttgttttacttc

SEQ ID NO: 102340 - DNA, 70 bp, Homo sapiens
accaaacaggcaagaagggacttgctggccaaagatatctcatattttgttttacttctctgtttttaaa

SEQ ID NO: 102341 - DNA, 70 bp, Homo sapiens
agggacttgctggccaaagatatctcatattttgttttacttctctgtttttaaagtatcaggaagttgg

SEQ ID NO: 102342 - DNA, 72 bp, Homo sapiens
tggccaaagatatctcatattttgttttacttctctgtttttaaagtatcaggaagttgggccaaatatcaa

SEQ ID NO: 102343 - DNA, 71 bp, Homo sapiens
ctcatattttgttttacttctctgtttttaaagtatcaggaagttgggccaaatatcaactctcttctata

SEQ ID NO: 102344 - DNA, 72 bp, Homo sapiens
tttacttctctgtttttaaagtatcaggaagttgggccaaatatcaactctcttctatattacatggacctc

SEQ ID NO: 102345 - DNA, 72 bp, Homo sapiens
tgtttttaaagtatcaggaagttgggccaaatatcaactctcttctatattacatggacctcccaatactgt

SEQ ID NO: 102346 - DNA, 74 bp, Homo sapiens
aaagtatcaggaagttgggccaaatatcaactctcttctatattacatggacctcccaatactgttcttggcta

SEQ ID NO: 102347 - DNA, 75 bp, Homo sapiens
aggaagttgggccaaatatcaactctcttctatattacatggacctcccaatactgttcttggctagcctgttca

SEQ ID NO: 102348 - DNA, 74 bp, Homo sapiens
aaatatcaactctcttctatattacatggacctcccaatactgttcttggctagcctgttcacggtccaaactg

SEQ ID NO: 102349 - DNA, 74 bp, Homo sapiens
actctcttctatattacatggacctcccaatactgttcttggctagcctgttcacggtccaaactggcatttta

SEQ ID NO: 102350 - DNA, 72 bp, Homo sapiens
tatattacatggacctcccaatactgttcttggctagcctgttcacggtccaaactggcattttaaaccaat

SEQ ID NO: 102351 - DNA, 71 bp, Homo sapiens
tcccaatactgttcttggctagcctgttcacggtccaaactggcattttaaaccaattctaattaggttga

SEQ ID NO: 102352 - DNA, 70 bp, Homo sapiens
tactgttcttggctagcctgttcacggtccaaactggcattttaaaccaattctaattaggttgaaatta

SEQ ID NO: 102353 - DNA, 69 bp, Homo sapiens
gctagcctgttcacggtccaaactggcattttaaaccaattctaattaggttgaaattacagttacaat

SEQ ID NO: 102354 - DNA, 68 bp, Homo sapiens
gttcacggtccaaactggcattttaaaccaattctaattaggttgaaattacagttacaattcattta

SEQ ID NO: 102355 - DNA, 68 bp, Homo sapiens
ctggcattttaaaccaattctaattaggttgaaattacagttacaattcatttacttcaaatccgtta

SEQ ID NO: 102356 - DNA, 69 bp, Homo sapiens
ctaattaggttgaaattacagttacaattcatttacttcaaatccgttaaccttccagtgttgcaaaga

SEQ ID NO: 102357 - DNA, 71 bp, Homo sapiens
gttgaaattacagttacaattcatttacttcaaatccgttaaccttccagtgttgcaaagaaggctgtgga

SEQ ID NO: 102358 - DNA, 72 bp, Homo sapiens
ttacaattcatttacttcaaatccgttaaccttccagtgttgcaaagaaggctgtggagtggaacacagaat

SEQ ID NO: 102359 - DNA, 77 bp, Homo sapiens
tttacttcaaatccgttaaccttccagtgttgcaaagaaggctgtggagtggaacacagaattcagctgagatgata

SEQ ID NO: 102360 - DNA, 80 bp, Homo sapiens
taaccttccagtgttgcaaagaaggctgtggagtggaacacagaattcagctgagatgatatttaaggcatagctaggga

SEQ ID NO: 102361 - DNA, 84 bp, Homo sapiens
tgcaaagaaggctgtggagtggaacacagaattcagctgagatgatatttaaggcatagctagggactgtgatcttgccgacaa

SEQ ID NO: 102362 - DNA, 81 bp, Homo sapiens
ctgtggagtggaacacagaattcagctgagatgatatttaaggcatagctagggactgtgatcttgccgacaaaaatatta

SEQ ID NO: 102363 - DNA, 79 bp, Homo sapiens
agtggaacacagaattcagctgagatgatatttaaggcatagctagggactgtgatcttgccgacaaaaatattactta

SEQ ID NO: 102364 - DNA, 75 bp, Homo sapiens
aattcagctgagatgatatttaaggcatagctagggactgtgatcttgccgacaaaaatattacttatttccttt

SEQ ID NO: 102365 - DNA, 75 bp, Homo sapiens
ctgagatgatatttaaggcatagctagggactgtgatcttgccgacaaaaatattacttatttcctttttatgaa

SEQ ID NO: 102366 - DNA, 70 bp, Homo sapiens
atttaaggcatagctagggactgtgatcttgccgacaaaaatattacttatttcctttttatgaaaagaa

SEQ ID NO: 102367 - DNA, 72 bp, Homo sapiens
agctagggactgtgatcttgccgacaaaaatattacttatttcctttttatgaaaagaatattaccatcaga

SEQ ID NO: 102368 - DNA, 71 bp, Homo sapiens
gtgatcttgccgacaaaaatattacttatttcctttttatgaaaagaatattaccatcagaatccaagacc

SEQ ID NO: 102369 - DNA, 69 bp, Homo sapiens
gccgacaaaaatattacttatttcctttttatgaaaagaatattaccatcagaatccaagacctccgaa

SEQ ID NO: 102370 - DNA, 70 bp, Homo sapiens
ttacttatttcctttttatgaaaagaatattaccatcagaatccaagacctccgaacttccctgctgaag

SEQ ID NO: 102371 - DNA, 71 bp, Homo sapiens
tttttatgaaaagaatattaccatcagaatccaagacctccgaacttccctgctgaaggcacgtttacgtc

SEQ ID NO: 102372 - DNA, 73 bp, Homo sapiens
tccgaacttccctgctgaaggcacgtttacgtctttggactctggtgtaccagggcctgaacaagctataaca

SEQ ID NO: 102373 - DNA, 75 bp, Homo sapiens
tgctgaaggcacgtttacgtctttggactctggtgtaccagggcctgaacaagctataacaccatggtattacca

SEQ ID NO: 102374 - DNA, 71 bp, Homo sapiens
acgtttacgtctttggactctggtgtaccagggcctgaacaagctataacaccatggtattaccaaataca

SEQ ID NO: 102375 - DNA, 76 bp, Homo sapiens
tctttggactctggtgtaccagggcctgaacaagctataacaccatggtattaccaaatacatcctaagtcatcaa

SEQ ID NO: 102376 - DNA, 74 bp, Homo sapiens
tggtgtaccagggcctgaacaagctataacaccatggtattaccaaatacatcctaagtcatcaaaacagcttt

SEQ ID NO: 102377 - DNA, 73 bp, Homo sapiens
taccagggcctgaacaagctataacaccatggtattaccaaatacatcctaagtcatcaaaacagctttttag

SEQ ID NO: 102378 - DNA, 73 bp, Homo sapiens
caccatggtattaccaaatacatcctaagtcatcaaaacagctttttaggctaattctgtaagtacagcaaaa

SEQ ID NO: 102379 - DNA, 71 bp, Homo sapiens
atcctaagtcatcaaaacagctttttaggctaattctgtaagtacagcaaaacacacagcaaacttaaggt

SEQ ID NO: 102380 - DNA, 70 bp, Homo sapiens
catcaaaacagctttttaggctaattctgtaagtacagcaaaacacacagcaaacttaaggttttcttag

SEQ ID NO: 102381 - DNA, 69 bp, Homo sapiens
aacagctttttaggctaattctgtaagtacagcaaaacacacagcaaacttaaggttttcttagtagta

SEQ ID NO: 102382 - DNA, 70 bp, Homo sapiens
ggctaattctgtaagtacagcaaaacacacagcaaacttaaggttttcttagtagtaaaaaacatgtatc

SEQ ID NO: 102383 - DNA, 72 bp, Homo sapiens
ctgtaagtacagcaaaacacacagcaaacttaaggttttcttagtagtaaaaaacatgtatctctcatactg

SEQ ID NO: 102384 - DNA, 69 bp, Homo sapiens
agcaaaacacacagcaaacttaaggttttcttagtagtaaaaaacatgtatctctcatactgtaaaaaa

SEQ ID NO: 102385 - DNA, 67 bp, Homo sapiens
acagcaaacttaaggttttcttagtagtaaaaaacatgtatctctcatactgtaaaaaataaaggtg

SEQ ID NO: 102386 - DNA, 68 bp, Homo sapiens
ggttttcttagtagtaaaaaacatgtatctctcatactgtaaaaaataaaggtgttccatgggaggga

SEQ ID NO: 102387 - DNA, 69 bp, Homo sapiens
tagtagtaaaaaacatgtatctctcatactgtaaaaaataaaggtgttccatgggagggaaggagtagg

SEQ ID NO: 102388 - DNA, 66 bp, Homo sapiens
aaaataaaggtgttccatgggagggaaggagtagggggagaacaggttggggctcaaaataagcaa

SEQ ID NO: 102389 - DNA, 68 bp, Homo sapiens
tgttccatgggagggaaggagtagggggagaacaggttggggctcaaaataagcaagtagggttattg

SEQ ID NO: 102390 - DNA, 67 bp, Homo sapiens
gagggaaggagtagggggagaacaggttggggctcaaaataagcaagtagggttattgtaatctatt

SEQ ID NO: 102391 - DNA, 66 bp, Homo sapiens
agtagggggagaacaggttggggctcaaaataagcaagtagggttattgtaatctattttaaagaa

SEQ ID NO: 102392 - DNA, 68 bp, Homo sapiens
gggagaacaggttggggctcaaaataagcaagtagggttattgtaatctattttaaagaaaattcata

SEQ ID NO: 102393 - DNA, 68 bp, Homo sapiens
gggctcaaaataagcaagtagggttattgtaatctattttaaagaaaattcataattttaaatctctc

SEQ ID NO: 102394 - DNA, 68 bp, Homo sapiens
gggttattgtaatctattttaaagaaaattcataattttaaatctctctttagttcagaagattgacg

SEQ ID NO: 102395 - DNA, 69 bp, Homo sapiens
atctattttaaagaaaattcataattttaaatctctctttagttcagaagattgacgtagaggatttac

SEQ ID NO: 102396 - DNA, 69 bp, Homo sapiens
aagaaaattcataattttaaatctctctttagttcagaagattgacgtagaggatttacctacagaact

SEQ ID NO: 102397 - DNA, 72 bp, Homo sapiens
ttaaatctctctttagttcagaagattgacgtagaggatttacctacagaacttcaggagattcctaagaag

SEQ ID NO: 102398 - DNA, 74 bp, Homo sapiens
tttagttcagaagattgacgtagaggatttacctacagaacttcaggagattcctaagaaggccttcagtgatc

SEQ ID NO: 102399 - DNA, 74 bp, Homo sapiens
aagattgacgtagaggatttacctacagaacttcaggagattcctaagaaggccttcagtgatcttttcatcaa

SEQ ID NO: 102400 - DNA, 76 bp, Homo sapiens
aggatttacctacagaacttcaggagattcctaagaaggccttcagtgatcttttcatcaatatcatcaggcctta

SEQ ID NO: 102401 - DNA, 80 bp, Homo sapiens
tacagaacttcaggagattcctaagaaggccttcagtgatcttttcatcaatatcatcaggccttatcattgtttcacat

SEQ ID NO: 102402 - DNA, 78 bp, Homo sapiens
attcctaagaaggccttcagtgatcttttcatcaatatcatcaggccttatcattgtttcacatttgcttctctttac

SEQ ID NO: 102403 - DNA, 79 bp, Homo sapiens
ccttcagtgatcttttcatcaatatcatcaggccttatcattgtttcacatttgcttctctttaccatagggaatataa

SEQ ID NO: 102404 - DNA, 79 bp, Homo sapiens
gtgatcttttcatcaatatcatcaggccttatcattgtttcacatttgcttctctttaccatagggaatataataatta

SEQ ID NO: 102405 - DNA, 77 bp, Homo sapiens
catcaatatcatcaggccttatcattgtttcacatttgcttctctttaccatagggaatataataattatttactgg

SEQ ID NO: 102406 - DNA, 70 bp, Homo sapiens
atttgcttctctttaccatagggaatataataattatttactggttaacttcctagggagattgcctgcg

SEQ ID NO: 102407 - DNA, 70 bp, Homo sapiens
tctctttaccatagggaatataataattatttactggttaacttcctagggagattgcctgcggcttatt

SEQ ID NO: 102408 - DNA, 69 bp, Homo sapiens
gggaatataataattatttactggttaacttcctagggagattgcctgcggcttatttaagatccaaat

SEQ ID NO: 102409 - DNA, 67 bp, Homo sapiens
ataattatttactggttaacttcctagggagattgcctgcggcttatttaagatccaaattttaaag

SEQ ID NO: 102410 - DNA, 68 bp, Homo sapiens
ctggttaacttcctagggagattgcctgcggcttatttaagatccaaattttaaagtaataatttctg

SEQ ID NO: 102411 - DNA, 72 bp, Homo sapiens
ttcctagggagattgcctgcggcttatttaagatccaaattttaaagtaataatttctgttgaagctgcttg

SEQ ID NO: 102412 - DNA, 72 bp, Homo sapiens
agattgcctgcggcttatttaagatccaaattttaaagtaataatttctgttgaagctgcttgtgaggtggt

SEQ ID NO: 102413 - DNA, 74 bp, Homo sapiens
taagatccaaattttaaagtaataatttctgttgaagctgcttgtgaggtggttgggtgggcagatagagtgaa

SEQ ID NO: 102414 - DNA, 77 bp, Homo sapiens
taaagtaataatttctgttgaagctgcttgtgaggtggttgggtgggcagatagagtgaagccagggacacacacta

SEQ ID NO: 102415 - DNA, 78 bp, Homo sapiens
aataatttctgttgaagctgcttgtgaggtggttgggtgggcagatagagtgaagccagggacacacactaaatgagc

SEQ ID NO: 102416 - DNA, 78 bp, Homo sapiens
ttgaagctgcttgtgaggtggttgggtgggcagatagagtgaagccagggacacacactaaatgagcccgggatgtag

SEQ ID NO: 102417 - DNA, 76 bp, Homo sapiens
tgaggtggttgggtgggcagatagagtgaagccagggacacacactaaatgagcccgggatgtaggcaggttttga

SEQ ID NO: 102418 - DNA, 74 bp, Homo sapiens
gttgggtgggcagatagagtgaagccagggacacacactaaatgagcccgggatgtaggcaggttttgatgttt

SEQ ID NO: 102419 - DNA, 72 bp, Homo sapiens
ccagggacacacactaaatgagcccgggatgtaggcaggttttgatgttttgcttgcttttatccctaacat

SEQ ID NO: 102420 - DNA, 72 bp, Homo sapiens
acacacactaaatgagcccgggatgtaggcaggttttgatgttttgcttgcttttatccctaacattttatc

SEQ ID NO: 102421 - DNA, 70 bp, Homo sapiens
aaatgagcccgggatgtaggcaggttttgatgttttgcttgcttttatccctaacattttatcccttcac

SEQ ID NO: 102422 - DNA, 71 bp, Homo sapiens
atgtaggcaggttttgatgttttgcttgcttttatccctaacattttatcccttcacgtttactgtctcac

SEQ ID NO: 102423 - DNA, 73 bp, Homo sapiens
ttgcttgcttttatccctaacattttatcccttcacgtttactgtctcactgaacattttgtctactcttcta

SEQ ID NO: 102424 - DNA, 71 bp, Homo sapiens
gcttttatccctaacattttatcccttcacgtttactgtctcactgaacattttgtctactcttctagtta

SEQ ID NO: 102425 - DNA, 77 bp, Homo sapiens
taacattttatcccttcacgtttactgtctcactgaacattttgtctactcttctagttatgcagtgagcaggtctc

SEQ ID NO: 102426 - DNA, 77 bp, Homo sapiens
atcccttcacgtttactgtctcactgaacattttgtctactcttctagttatgcagtgagcaggtctcctccaggaa

SEQ ID NO: 102427 - DNA, 77 bp, Homo sapiens
tttactgtctcactgaacattttgtctactcttctagttatgcagtgagcaggtctcctccaggaagaagcctcttt

SEQ ID NO: 102428 - DNA, 76 bp, Homo sapiens
actgaacattttgtctactcttctagttatgcagtgagcaggtctcctccaggaagaagcctctttttatgaggat

SEQ ID NO: 102429 - DNA, 75 bp, Homo sapiens
ttttgtctactcttctagttatgcagtgagcaggtctcctccaggaagaagcctctttttatgaggattggggtg

SEQ ID NO: 102430 - DNA, 77 bp, Homo sapiens
ttctagttatgcagtgagcaggtctcctccaggaagaagcctctttttatgaggattggggtggtgacagacaataa

SEQ ID NO: 102431 - DNA, 75 bp, Homo sapiens
agtgagcaggtctcctccaggaagaagcctctttttatgaggattggggtggtgacagacaataatcaaatggtc

SEQ ID NO: 102432 - DNA, 73 bp, Homo sapiens
aggtctcctccaggaagaagcctctttttatgaggattggggtggtgacagacaataatcaaatggtctgatt

SEQ ID NO: 102433 - DNA, 75 bp, Homo sapiens
aagaagcctctttttatgaggattggggtggtgacagacaataatcaaatggtctgatttctctgctatcctttc

SEQ ID NO: 102434 - DNA, 74 bp, Homo sapiens
cctctttttatgaggattggggtggtgacagacaataatcaaatggtctgatttctctgctatcctttcctttc

SEQ ID NO: 102435 - DNA, 72 bp, Homo sapiens
aggattggggtggtgacagacaataatcaaatggtctgatttctctgctatcctttcctttcccctaaatgt

SEQ ID NO: 102436 - DNA, 73 bp, Homo sapiens
gggtggtgacagacaataatcaaatggtctgatttctctgctatcctttcctttcccctaaatgttctcaggg

SEQ ID NO: 102437 - DNA, 70 bp, Homo sapiens
aaatggtctgatttctctgctatcctttcctttcccctaaatgttctcaggggatctgcttgaacttttt

SEQ ID NO: 102438 - DNA, 74 bp, Homo sapiens
gggatctgcttgaacttttttcaagagctctgtatttggatttttagtagcctatagattatcactcaataaaa

SEQ ID NO: 102439 - DNA, 72 bp, Homo sapiens
ttgaacttttttcaagagctctgtatttggatttttagtagcctatagattatcactcaataaaacaaatta

SEQ ID NO: 102440 - DNA, 72 bp, Homo sapiens
gagctctgtatttggatttttagtagcctatagattatcactcaataaaacaaattaattgtttttaagtga

SEQ ID NO: 102441 - DNA, 65 bp, Homo sapiens
cactcaataaaacaaattaattgtttttaagtgaattgccaaaagtcattttaaaaaggaaactc

SEQ ID NO: 102442 - DNA, 66 bp, Homo sapiens
caaattaattgtttttaagtgaattgccaaaagtcattttaaaaaggaaactctatggttattatg

SEQ ID NO: 102443 - DNA, 69 bp, Homo sapiens
tgtttttaagtgaattgccaaaagtcattttaaaaaggaaactctatggttattatggtttctgctaga

SEQ ID NO: 102444 - DNA, 71 bp, Homo sapiens
gtgaattgccaaaagtcattttaaaaaggaaactctatggttattatggtttctgctagaaagaattctga

SEQ ID NO: 102445 - DNA, 73 bp, Homo sapiens
gccaaaagtcattttaaaaaggaaactctatggttattatggtttctgctagaaagaattctgacagctcata

SEQ ID NO: 102446 - DNA, 74 bp, Homo sapiens
aaaaaggaaactctatggttattatggtttctgctagaaagaattctgacagctcataaaagcaatatgtataa

SEQ ID NO: 102447 - DNA, 76 bp, Homo sapiens
ggaaactctatggttattatggtttctgctagaaagaattctgacagctcataaaagcaatatgtataatttttca

SEQ ID NO: 102448 - DNA, 74 bp, Homo sapiens
ggttattatggtttctgctagaaagaattctgacagctcataaaagcaatatgtataatttttcattttttaga

SEQ ID NO: 102449 - DNA, 74 bp, Homo sapiens
ttttcattttttagaagaaaataaatactttcatgtaatggcttgagactctgaattgctccaattcctgaaga

SEQ ID NO: 102450 - DNA, 75 bp, Homo sapiens
ttagaagaaaataaatactttcatgtaatggcttgagactctgaattgctccaattcctgaagattatttattaa

SEQ ID NO: 102451 - DNA, 76 bp, Homo sapiens
tactttcatgtaatggcttgagactctgaattgctccaattcctgaagattatttattaatcatttagtcttttaa

SEQ ID NO: 102452 - DNA, 77 bp, Homo sapiens
tggcttgagactctgaattgctccaattcctgaagattatttattaatcatttagtcttttaatatatttgagtgtg

SEQ ID NO: 102453 - DNA, 72 bp, Homo sapiens
ctgaattgctccaattcctgaagattatttattaatcatttagtcttttaatatatttgagtgtgggttccc

SEQ ID NO: 102454 - DNA, 73 bp, Homo sapiens
gctccaattcctgaagattatttattaatcatttagtcttttaatatatttgagtgtgggttccctggcagag

SEQ ID NO: 102455 - DNA, 71 bp, Homo sapiens
ctgaagattatttattaatcatttagtcttttaatatatttgagtgtgggttccctggcagaggagggagt

SEQ ID NO: 102456 - DNA, 72 bp, Homo sapiens
atttattaatcatttagtcttttaatatatttgagtgtgggttccctggcagaggagggagttcagaagaga

SEQ ID NO: 102457 - DNA, 71 bp, Homo sapiens
atttagtcttttaatatatttgagtgtgggttccctggcagaggagggagttcagaagagaccctgatttc

SEQ ID NO: 102458 - DNA, 70 bp, Homo sapiens
taatatatttgagtgtgggttccctggcagaggagggagttcagaagagaccctgatttcccccccaaaa

SEQ ID NO: 102459 - DNA, 69 bp, Homo sapiens
tttgagtgtgggttccctggcagaggagggagttcagaagagaccctgatttcccccccaaaaggaagc

SEQ ID NO: 102460 - DNA, 69 bp, Homo sapiens
ggttccctggcagaggagggagttcagaagagaccctgatttcccccccaaaaggaagccacaaatctc

SEQ ID NO: 102461 - DNA, 70 bp, Homo sapiens
cagaggagggagttcagaagagaccctgatttcccccccaaaaggaagccacaaatctcttagagcccta

SEQ ID NO: 102462 - DNA, 71 bp, Homo sapiens
gagggagttcagaagagaccctgatttcccccccaaaaggaagccacaaatctcttagagccctagtgcat

SEQ ID NO: 102463 - DNA, 70 bp, Homo sapiens
agttcagaagagaccctgatttcccccccaaaaggaagccacaaatctcttagagccctagtgcattggg

SEQ ID NO: 102464 - DNA, 70 bp, Homo sapiens
cctgatttcccccccaaaaggaagccacaaatctcttagagccctagtgcattggggcagccaggtttta

SEQ ID NO: 102465 - DNA, 71 bp, Homo sapiens
aaaggaagccacaaatctcttagagccctagtgcattggggcagccaggttttaatggcctttggtggtta

SEQ ID NO: 102466 - DNA, 72 bp, Homo sapiens
acaaatctcttagagccctagtgcattggggcagccaggttttaatggcctttggtggttatcagcccgtct

SEQ ID NO: 102467 - DNA, 76 bp, Homo sapiens
tctcttagagccctagtgcattggggcagccaggttttaatggcctttggtggttatcagcccgtcttgcctctgc

SEQ ID NO: 102468 - DNA, 77 bp, Homo sapiens
ctagtgcattggggcagccaggttttaatggcctttggtggttatcagcccgtcttgcctctgctctttatctgata

SEQ ID NO: 102469 - DNA, 75 bp, Homo sapiens
ttggggcagccaggttttaatggcctttggtggttatcagcccgtcttgcctctgctctttatctgatagtgacc

SEQ ID NO: 102470 - DNA, 74 bp, Homo sapiens
ttttaatggcctttggtggttatcagcccgtcttgcctctgctctttatctgatagtgaccccatggcccaacc

SEQ ID NO: 102471 - DNA, 74 bp, Homo sapiens
tttggtggttatcagcccgtcttgcctctgctctttatctgatagtgaccccatggcccaaccctgttgggtcc

SEQ ID NO: 102472 - DNA, 74 bp, Homo sapiens
ccatggcccaaccctgttgggtcccctctcaatgcgggtgccctaaagagtcatcgctgagtccatttaggcaa

SEQ ID NO: 102473 - DNA, 71 bp, Homo sapiens
accctgttgggtcccctctcaatgcgggtgccctaaagagtcatcgctgagtccatttaggcaaagggtta

SEQ ID NO: 102474 - DNA, 73 bp, Homo sapiens
gtcccctctcaatgcgggtgccctaaagagtcatcgctgagtccatttaggcaaagggttagaatgatttaaa

SEQ ID NO: 102475 - DNA, 70 bp, Homo sapiens
aatgcgggtgccctaaagagtcatcgctgagtccatttaggcaaagggttagaatgatttaaaagtaaaa

SEQ ID NO: 102476 - DNA, 70 bp, Homo sapiens
ccctaaagagtcatcgctgagtccatttaggcaaagggttagaatgatttaaaagtaaaatggtctccca

SEQ ID NO: 102477 - DNA, 69 bp, Homo sapiens
aagagtcatcgctgagtccatttaggcaaagggttagaatgatttaaaagtaaaatggtctcccaaacc

SEQ ID NO: 102478 - DNA, 68 bp, Homo sapiens
gctgagtccatttaggcaaagggttagaatgatttaaaagtaaaatggtctcccaaacccaaatctaa

SEQ ID NO: 102479 - DNA, 64 bp, Homo sapiens
gttagaatgatttaaaagtaaaatggtctcccaaacccaaatctaagtaaacggagggagggaa

SEQ ID NO: 102480 - DNA, 63 bp, Homo sapiens
taaaagtaaaatggtctcccaaacccaaatctaagtaaacggagggagggaaaaaagagtcaa

SEQ ID NO: 102481 - DNA, 66 bp, Homo sapiens
taaaatggtctcccaaacccaaatctaagtaaacggagggagggaaaaaagagtcaagcaagccac

SEQ ID NO: 102482 - DNA, 64 bp, Homo sapiens
aacccaaatctaagtaaacggagggagggaaaaaagagtcaagcaagccaccacgttccttcgt

SEQ ID NO: 102483 - DNA, 65 bp, Homo sapiens
aaatctaagtaaacggagggagggaaaaaagagtcaagcaagccaccacgttccttcgttccttc

SEQ ID NO: 102484 - DNA, 67 bp, Homo sapiens
aaacggagggagggaaaaaagagtcaagcaagccaccacgttccttcgttccttctcctcatttcca

SEQ ID NO: 102485 - DNA, 67 bp, Homo sapiens
agtcaagcaagccaccacgttccttcgttccttctcctcatttccacccccactaaaaaacaaaaca

SEQ ID NO: 102486 - DNA, 70 bp, Homo sapiens
caaaaaaaactgcttttagaaaagtgagtggaaaaagaggccaatctatagacacagccaactgcaaatt

SEQ ID NO: 102487 - DNA, 71 bp, Homo sapiens
tgcttttagaaaagtgagtggaaaaagaggccaatctatagacacagccaactgcaaatttcgttttgttt

SEQ ID NO: 102488 - DNA, 69 bp, Homo sapiens
cttttagaaaagtgagtggaaaaagaggccaatctatagacacagccaactgcaaatttcgttttgttt

SEQ ID NO: 102489 - DNA, 71 bp, Homo sapiens
ttagaaaagtgagtggaaaaagaggccaatctatagacacagccaactgcaaatttcgttttgttttagaa

SEQ ID NO: 102490 - DNA, 74 bp, Homo sapiens
tgagtggaaaaagaggccaatctatagacacagccaactgcaaatttcgttttgttttagaaatcacaatctaa

SEQ ID NO: 102491 - DNA, 73 bp, Homo sapiens
gaaaaagaggccaatctatagacacagccaactgcaaatttcgttttgttttagaaatcacaatctaagtgtg

SEQ ID NO: 102492 - DNA, 75 bp, Homo sapiens
gccaatctatagacacagccaactgcaaatttcgttttgttttagaaatcacaatctaagtgtggaaactgtata

SEQ ID NO: 102493 - DNA, 74 bp, Homo sapiens
ccaatctatagacacagccaactgcaaatttcgttttgttttagaaatcacaatctaagtgtggaaactgtata

SEQ ID NO: 102494 - DNA, 73 bp, Homo sapiens
ctatagacacagccaactgcaaatttcgttttgttttagaaatcacaatctaagtgtggaaactgtataaagc

SEQ ID NO: 102495 - DNA, 69 bp, Homo sapiens
agccaactgcaaatttcgttttgttttagaaatcacaatctaagtgtggaaactgtataaagcttaaaa

SEQ ID NO: 102496 - DNA, 67 bp, Homo sapiens
gcaaatttcgttttgttttagaaatcacaatctaagtgtggaaactgtataaagcttaaaaataacc

SEQ ID NO: 102497 - DNA, 68 bp, Homo sapiens
ttgttttagaaatcacaatctaagtgtggaaactgtataaagcttaaaaataaccgcaacaatacttt

SEQ ID NO: 102498 - DNA, 68 bp, Homo sapiens
ttagaaatcacaatctaagtgtggaaactgtataaagcttaaaaataaccgcaacaatacttttttaa

SEQ ID NO: 102499 - DNA, 66 bp, Homo sapiens
caatctaagtgtggaaactgtataaagcttaaaaataaccgcaacaatacttttttaaaaagtgaa

SEQ ID NO: 102500 - DNA, 67 bp, Homo sapiens
agcttaaaaataaccgcaacaatacttttttaaaaagtgaatattcgtcgttgtaataagatcaaga

SEQ ID NO: 102501 - DNA, 70 bp, Homo sapiens
ataaccgcaacaatacttttttaaaaagtgaatattcgtcgttgtaataagatcaagacccagctgaggc

SEQ ID NO: 102502 - DNA, 72 bp, Homo sapiens
taaaaagtgaatattcgtcgttgtaataagatcaagacccagctgaggcttggaactataaaaagcttatat

SEQ ID NO: 102503 - DNA, 71 bp, Homo sapiens
gtcgttgtaataagatcaagacccagctgaggcttggaactataaaaagcttatattaaattaatctccct

SEQ ID NO: 102504 - DNA, 68 bp, Homo sapiens
gacccagctgaggcttggaactataaaaagcttatattaaattaatctccctttaaaggggacaatta

SEQ ID NO: 102505 - DNA, 64 bp, Homo sapiens
ggcttggaactataaaaagcttatattaaattaatctccctttaaaggggacaattatttaaac

SEQ ID NO: 102506 - DNA, 61 bp, Homo sapiens
ctataaaaagcttatattaaattaatctccctttaaaggggacaattatttaaactttttt

SEQ ID NO: 102507 - DNA, 67 bp, Homo sapiens
gacaattatttaaactttttttttagtagcttatctttacacttggaaccacctgccttgattcgcc

SEQ ID NO: 102508 - DNA, 65 bp, Homo sapiens
taaactttttttttagtagcttatctttacacttggaaccacctgccttgattcgccctttaaac

SEQ ID NO: 102509 - DNA, 69 bp, Homo sapiens
tttttagtagcttatctttacacttggaaccacctgccttgattcgccctttaaacgaacaggaaatga

SEQ ID NO: 102510 - DNA, 70 bp, Homo sapiens
ttatctttacacttggaaccacctgccttgattcgccctttaaacgaacaggaaatgacccgcactgatt

SEQ ID NO: 102511 - DNA, 71 bp, Homo sapiens
acctgccttgattcgccctttaaacgaacaggaaatgacccgcactgattttacttagtcgcatcttttca

SEQ ID NO: 102512 - DNA, 69 bp, Homo sapiens
ccttgattcgccctttaaacgaacaggaaatgacccgcactgattttacttagtcgcatcttttcaaac

SEQ ID NO: 102513 - DNA, 69 bp, Homo sapiens
tttaaacgaacaggaaatgacccgcactgattttacttagtcgcatcttttcaaacccaccaaagacaa

SEQ ID NO: 102514 - DNA, 70 bp, Homo sapiens
aacaggaaatgacccgcactgattttacttagtcgcatcttttcaaacccaccaaagacaaaacagaatc

SEQ ID NO: 102515 - DNA, 73 bp, Homo sapiens
cgcactgattttacttagtcgcatcttttcaaacccaccaaagacaaaacagaatctccactgcagaaattaa

SEQ ID NO: 102516 - DNA, 76 bp, Homo sapiens
tagtcgcatcttttcaaacccaccaaagacaaaacagaatctccactgcagaaattaaattcctactgcttgctgc

SEQ ID NO: 102517 - DNA, 75 bp, Homo sapiens
tttcaaacccaccaaagacaaaacagaatctccactgcagaaattaaattcctactgcttgctgctagtgtagta

SEQ ID NO: 102518 - DNA, 76 bp, Homo sapiens
aagacaaaacagaatctccactgcagaaattaaattcctactgcttgctgctagtgtagtagggtgattgtttaga

SEQ ID NO: 102519 - DNA, 74 bp, Homo sapiens
aaaacagaatctccactgcagaaattaaattcctactgcttgctgctagtgtagtagggtgattgtttagaaac

SEQ ID NO: 102520 - DNA, 71 bp, Homo sapiens
aattaaattcctactgcttgctgctagtgtagtagggtgattgtttagaaacgcctggggttgttttcata

SEQ ID NO: 102521 - DNA, 72 bp, Homo sapiens
tactgcttgctgctagtgtagtagggtgattgtttagaaacgcctggggttgttttcatacccctgttgaag

SEQ ID NO: 102522 - DNA, 71 bp, Homo sapiens
ttgctgctagtgtagtagggtgattgtttagaaacgcctggggttgttttcatacccctgttgaaggtcaa

SEQ ID NO: 102523 - DNA, 67 bp, Homo sapiens
ctagtgtagtagggtgattgtttagaaacgcctggggttgttttcatacccctgttgaaggtcaagg

SEQ ID NO: 102524 - DNA, 65 bp, Homo sapiens
tagggtgattgtttagaaacgcctggggttgttttcatacccctgttgaaggtcaaggtttttaa

SEQ ID NO: 102525 - DNA, 64 bp, Homo sapiens
agggtgattgtttagaaacgcctggggttgttttcatacccctgttgaaggtcaaggtttttaa

SEQ ID NO: 102526 - DNA, 65 bp, Homo sapiens
attgtttagaaacgcctggggttgttttcatacccctgttgaaggtcaaggtttttaaaggcagc

SEQ ID NO: 102527 - DNA, 66 bp, Homo sapiens
tttagaaacgcctggggttgttttcatacccctgttgaaggtcaaggtttttaaaggcagctcaaa

SEQ ID NO: 102528 - DNA, 69 bp, Homo sapiens
gttgttttcatacccctgttgaaggtcaaggtttttaaaggcagctcaaagctttggggatgatcaggg

SEQ ID NO: 102529 - DNA, 70 bp, Homo sapiens
ttcatacccctgttgaaggtcaaggtttttaaaggcagctcaaagctttggggatgatcaggggtgaaaa

SEQ ID NO: 102530 - DNA, 69 bp, Homo sapiens
cctgttgaaggtcaaggtttttaaaggcagctcaaagctttggggatgatcaggggtgaaaagtgaagg

SEQ ID NO: 102531 - DNA, 71 bp, Homo sapiens
gtcaaggtttttaaaggcagctcaaagctttggggatgatcaggggtgaaaagtgaagggagatctttgga

SEQ ID NO: 102532 - DNA, 75 bp, Homo sapiens
ttaaaggcagctcaaagctttggggatgatcaggggtgaaaagtgaagggagatctttggagccgccgcgctgaa

SEQ ID NO: 102533 - DNA, 73 bp, Homo sapiens
aaagctttggggatgatcaggggtgaaaagtgaagggagatctttggagccgccgcgctgaagtctccggcta

SEQ ID NO: 102534 - DNA, 74 bp, Homo sapiens
gggatgatcaggggtgaaaagtgaagggagatctttggagccgccgcgctgaagtctccggctacgcgccgccc

SEQ ID NO: 102535 - DNA, 74 bp, Homo sapiens
gtgaaaagtgaagggagatctttggagccgccgcgctgaagtctccggctacgcgccgccccctcctctagcag

SEQ ID NO: 102536 - DNA, 73 bp, Homo sapiens
aagtgaagggagatctttggagccgccgcgctgaagtctccggctacgcgccgccccctcctctagcaggaaa

SEQ ID NO: 102537 - DNA, 74 bp, Homo sapiens
agatctttggagccgccgcgctgaagtctccggctacgcgccgccccctcctctagcaggaaagcgggccgctg

SEQ ID NO: 102538 - DNA, 71 bp, Homo sapiens
agccgccgcgctgaagtctccggctacgcgccgccccctcctctagcaggaaagcgggccgctgggacccc

SEQ ID NO: 102539 - DNA, 72 bp, Homo sapiens
tacgcgccgccccctcctctagcaggaaagcgggccgctgggacccctggctctccgaaaacagcctcgtca

SEQ ID NO: 102540 - DNA, 71 bp, Homo sapiens
ccctcctctagcaggaaagcgggccgctgggacccctggctctccgaaaacagcctcgtcacctttcgcta

SEQ ID NO: 102541 - DNA, 68 bp, Homo sapiens
aaagcgggccgctgggacccctggctctccgaaaacagcctcgtcacctttcgctacccctggcttaa

SEQ ID NO: 102542 - DNA, 76 bp, Homo sapiens
gacccctggctctccgaaaacagcctcgtcacctttcgctacccctggcttaatctaggtgagctgatgatagcat

SEQ ID NO: 102543 - DNA, 76 bp, Homo sapiens
tctccgaaaacagcctcgtcacctttcgctacccctggcttaatctaggtgagctgatgatagcattcagaacggt

SEQ ID NO: 102544 - DNA, 74 bp, Homo sapiens
aaaacagcctcgtcacctttcgctacccctggcttaatctaggtgagctgatgatagcattcagaacggttccg

SEQ ID NO: 102545 - DNA, 76 bp, Homo sapiens
ttaatctaggtgagctgatgatagcattcagaacggttccgggaaaagaaacaggattcgatacttgcggcttctg

SEQ ID NO: 102546 - DNA, 79 bp, Homo sapiens
taggtgagctgatgatagcattcagaacggttccgggaaaagaaacaggattcgatacttgcggcttctggcaggagca

SEQ ID NO: 102547 - DNA, 73 bp, Homo sapiens
atagcattcagaacggttccgggaaaagaaacaggattcgatacttgcggcttctggcaggagcaggctaaaa

SEQ ID NO: 102548 - DNA, 75 bp, Homo sapiens
ggaaaagaaacaggattcgatacttgcggcttctggcaggagcaggctaaaaagctcagagaactcttcagaaaa

SEQ ID NO: 102549 - DNA, 74 bp, Homo sapiens
agaaacaggattcgatacttgcggcttctggcaggagcaggctaaaaagctcagagaactcttcagaaaacttt

SEQ ID NO: 102550 - DNA, 74 bp, Homo sapiens
atacttgcggcttctggcaggagcaggctaaaaagctcagagaactcttcagaaaacttttgcaaacttaacta

SEQ ID NO: 102551 - DNA, 74 bp, Homo sapiens
ttctggcaggagcaggctaaaaagctcagagaactcttcagaaaacttttgcaaacttaactacgcccgctgtg

SEQ ID NO: 102552 - DNA, 71 bp, Homo sapiens
agcaggctaaaaagctcagagaactcttcagaaaacttttgcaaacttaactacgcccgctgtggactttg

SEQ ID NO: 102553 - DNA, 72 bp, Homo sapiens
aaagctcagagaactcttcagaaaacttttgcaaacttaactacgcccgctgtggactttggacatgctaat

SEQ ID NO: 102554 - DNA, 72 bp, Homo sapiens
agagaactcttcagaaaacttttgcaaacttaactacgcccgctgtggactttggacatgctaattcctata

SEQ ID NO: 102555 - DNA, 68 bp, Homo sapiens
cttaactacgcccgctgtggactttggacatgctaattcctatagggcggttagagaaggggaaaaaa

SEQ ID NO: 102556 - DNA, 69 bp, Homo sapiens
tgtggactttggacatgctaattcctatagggcggttagagaaggggaaaaaaaatccctgacagtttc

SEQ ID NO: 102557 - DNA, 68 bp, Homo sapiens
tggacatgctaattcctatagggcggttagagaaggggaaaaaaaatccctgacagtttccctagtta

SEQ ID NO: 102558 - DNA, 64 bp, Homo sapiens
taattcctatagggcggttagagaaggggaaaaaaaatccctgacagtttccctagttagtttc

SEQ ID NO: 102559 - DNA, 64 bp, Homo sapiens
tatagggcggttagagaaggggaaaaaaaatccctgacagtttccctagttagtttcttttcac

SEQ ID NO: 102560 - DNA, 66 bp, Homo sapiens
gaaggggaaaaaaaatccctgacagtttccctagttagtttcttttcactgacttgaaggcagaaa

SEQ ID NO: 102561 - DNA, 67 bp, Homo sapiens
aaaaatccctgacagtttccctagttagtttcttttcactgacttgaaggcagaaaagtcttactat

SEQ ID NO: 102562 - DNA, 67 bp, Homo sapiens
ccctgacagtttccctagttagtttcttttcactgacttgaaggcagaaaagtcttactattttatt

SEQ ID NO: 102563 - DNA, 71 bp, Homo sapiens
actgacttgaaggcagaaaagtcttactattttatttcctgatcctttcatctgaggaagacaaaatggtt

SEQ ID NO: 102564 - DNA, 72 bp, Homo sapiens
attttatttcctgatcctttcatctgaggaagacaaaatggtttgggtgttaatccagcggtaggggcagca

SEQ ID NO: 102565 - DNA, 73 bp, Homo sapiens
atcctttcatctgaggaagacaaaatggtttgggtgttaatccagcggtaggggcagcagtaagttagcagac

SEQ ID NO: 102566 - DNA, 73 bp, Homo sapiens
taatccagcggtaggggcagcagtaagttagcagacgggctgtctctgccgggctgggttataacttttccta

SEQ ID NO: 102567 - DNA, 74 bp, Homo sapiens
ggcagcagtaagttagcagacgggctgtctctgccgggctgggttataacttttcctactttgtatcaaagcta

SEQ ID NO: 102568 - DNA, 70 bp, Homo sapiens
agtaagttagcagacgggctgtctctgccgggctgggttataacttttcctactttgtatcaaagctaag

SEQ ID NO: 102569 - DNA, 70 bp, Homo sapiens
agacgggctgtctctgccgggctgggttataacttttcctactttgtatcaaagctaaggcccctgccag

SEQ ID NO: 102570 - DNA, 69 bp, Homo sapiens
tctgccgggctgggttataacttttcctactttgtatcaaagctaaggcccctgccagggaggtcccga

SEQ ID NO: 102571 - DNA, 67 bp, Homo sapiens
tgggttataacttttcctactttgtatcaaagctaaggcccctgccagggaggtcccgaccggctcc

SEQ ID NO: 102572 - DNA, 69 bp, Homo sapiens
ttttcctactttgtatcaaagctaaggcccctgccagggaggtcccgaccggctcccagtggatatctt

SEQ ID NO: 102573 - DNA, 71 bp, Homo sapiens
tactttgtatcaaagctaaggcccctgccagggaggtcccgaccggctcccagtggatatctttggggaca

SEQ ID NO: 102574 - DNA, 74 bp, Homo sapiens
ggatatctttggggacaccctgatgttttcagccctcctgggaggccgccccagaaagctgagacgagtgcctc

SEQ ID NO: 102575 - DNA, 75 bp, Homo sapiens
tgatgttttcagccctcctgggaggccgccccagaaagctgagacgagtgcctcccgagggtcgccacggcaaca

SEQ ID NO: 102576 - DNA, 75 bp, Homo sapiens
ttttcagccctcctgggaggccgccccagaaagctgagacgagtgcctcccgagggtcgccacggcaacacagca

SEQ ID NO: 102577 - DNA, 76 bp, Homo sapiens
tcctgggaggccgccccagaaagctgagacgagtgcctcccgagggtcgccacggcaacacagcatcccccacatc

SEQ ID NO: 102578 - DNA, 75 bp, Homo sapiens
aagctgagacgagtgcctcccgagggtcgccacggcaacacagcatcccccacatcccaagctaggaagaccgac

SEQ ID NO: 102579 - DNA, 71 bp, Homo sapiens
agtgcctcccgagggtcgccacggcaacacagcatcccccacatcccaagctaggaagaccgacccggggc

SEQ ID NO: 102580 - DNA, 70 bp, Homo sapiens
agggtcgccacggcaacacagcatcccccacatcccaagctaggaagaccgacccggggctgcgggggcc

SEQ ID NO: 102581 - DNA, 70 bp, Homo sapiens
caacacagcatcccccacatcccaagctaggaagaccgacccggggctgcgggggcccctttccagaatc

SEQ ID NO: 102582 - DNA, 66 bp, Homo sapiens
atcccccacatcccaagctaggaagaccgacccggggctgcgggggcccctttccagaatccggcc

SEQ ID NO: 102583 - DNA, 67 bp, Homo sapiens
taggaagaccgacccggggctgcgggggcccctttccagaatccggccccgcccgcctggccgctgc

SEQ ID NO: 102584 - DNA, 68 bp, Homo sapiens
ccggggctgcgggggcccctttccagaatccggccccgcccgcctggccgctgccctcgcggatctcc

SEQ ID NO: 102585 - DNA, 67 bp, Homo sapiens
gggggcccctttccagaatccggccccgcccgcctggccgctgccctcgcggatctcccccggcctc

SEQ ID NO: 102586 - DNA, 69 bp, Homo sapiens
cctttccagaatccggccccgcccgcctggccgctgccctcgcggatctcccccggcctcgccggcctc

SEQ ID NO: 102587 - DNA, 69 bp, Homo sapiens
aatccggccccgcccgcctggccgctgccctcgcggatctcccccggcctcgccggcctccgcctgtcc

SEQ ID NO: 102588 - DNA, 70 bp, Homo sapiens
ccgcccgcctggccgctgccctcgcggatctcccccggcctcgccggcctccgcctgtcctcccaccacc

SEQ ID NO: 102589 - DNA, 70 bp, Homo sapiens
ctgccctcgcggatctcccccggcctcgccggcctccgcctgtcctcccaccaccctctccgggccagta

SEQ ID NO: 102590 - DNA, 68 bp, Homo sapiens
ggatctcccccggcctcgccggcctccgcctgtcctcccaccaccctctccgggccagtaccttgaaa

SEQ ID NO: 102591 - DNA, 72 bp, Homo sapiens
cggcctccgcctgtcctcccaccaccctctccgggccagtaccttgaaagcgatgggcagggtcttgttgca

SEQ ID NO: 102592 - DNA, 75 bp, Homo sapiens
tgtcctcccaccaccctctccgggccagtaccttgaaagcgatgggcagggtcttgttgcagcgccagtgcgtag

SEQ ID NO: 102593 - DNA, 76 bp, Homo sapiens
accaccctctccgggccagtaccttgaaagcgatgggcagggtcttgttgcagcgccagtgcgtaggcagcacgga

SEQ ID NO: 102594 - DNA, 78 bp, Homo sapiens
agtaccttgaaagcgatgggcagggtcttgttgcagcgccagtgcgtaggcagcacggagcagaggaagttggggctg

SEQ ID NO: 102595 - DNA, 80 bp, Homo sapiens
aaagcgatgggcagggtcttgttgcagcgccagtgcgtaggcagcacggagcagaggaagttggggctgtcggtgcgcac

SEQ ID NO: 102596 - DNA, 79 bp, Homo sapiens
tgcgtaggcagcacggagcagaggaagttggggctgtcggtgcgcaccagctcgcccgggtggtcggccagcacctcca

SEQ ID NO: 102597 - DNA, 77 bp, Homo sapiens
acggagcagaggaagttggggctgtcggtgcgcaccagctcgcccgggtggtcggccagcacctccaccatgctgcg

SEQ ID NO: 102598 - DNA, 77 bp, Homo sapiens
ggaagttggggctgtcggtgcgcaccagctcgcccgggtggtcggccagcacctccaccatgctgcggtcgccgctc

SEQ ID NO: 102599 - DNA, 81 bp, Homo sapiens
gtgcgcaccagctcgcccgggtggtcggccagcacctccaccatgctgcggtcgccgctcctcagcttgccggccagggca

SEQ ID NO: 102600 - DNA, 78 bp, Homo sapiens
agctcgcccgggtggtcggccagcacctccaccatgctgcggtcgccgctcctcagcttgccggccagggcagcgccg

SEQ ID NO: 102601 - DNA, 77 bp, Homo sapiens
gggtggtcggccagcacctccaccatgctgcggtcgccgctcctcagcttgccggccagggcagcgccggcgtccgg

SEQ ID NO: 102602 - DNA, 77 bp, Homo sapiens
acctccaccatgctgcggtcgccgctcctcagcttgccggccagggcagcgccggcgtccggggcgcccagcggcaa

SEQ ID NO: 102603 - DNA, 79 bp, Homo sapiens
atgctgcggtcgccgctcctcagcttgccggccagggcagcgccggcgtccggggcgcccagcggcaacgcctcgctca

SEQ ID NO: 102604 - DNA, 80 bp, Homo sapiens
tcctcagcttgccggccagggcagcgccggcgtccggggcgcccagcggcaacgcctcgctcatcttgcctgggctcagc

SEQ ID NO: 102605 - DNA, 77 bp, Homo sapiens
ccagggcagcgccggcgtccggggcgcccagcggcaacgcctcgctcatcttgcctgggctcagcgcggtggaaggc

SEQ ID NO: 102606 - DNA, 76 bp, Homo sapiens
cgccggcgtccggggcgcccagcggcaacgcctcgctcatcttgcctgggctcagcgcggtggaaggcggcgtgaa

SEQ ID NO: 102607 - DNA, 78 bp, Homo sapiens
tccggggcgcccagcggcaacgcctcgctcatcttgcctgggctcagcgcggtggaaggcggcgtgaagcggcggctc

SEQ ID NO: 102608 - DNA, 81 bp, Homo sapiens
agcggcaacgcctcgctcatcttgcctgggctcagcgcggtggaaggcggcgtgaagcggcggctcgtgctggcatctacg

SEQ ID NO: 102609 - DNA, 83 bp, Homo sapiens
ctcgctcatcttgcctgggctcagcgcggtggaaggcggcgtgaagcggcggctcgtgctggcatctacggggatacgcatca

SEQ ID NO: 102610 - DNA, 81 bp, Homo sapiens
ttgcctgggctcagcgcggtggaaggcggcgtgaagcggcggctcgtgctggcatctacggggatacgcatcacaacaagc

SEQ ID NO: 102611 - DNA, 80 bp, Homo sapiens
tcagcgcggtggaaggcggcgtgaagcggcggctcgtgctggcatctacggggatacgcatcacaacaagccgattgagt

SEQ ID NO: 102612 - DNA, 78 bp, Homo sapiens
ggtggaaggcggcgtgaagcggcggctcgtgctggcatctacggggatacgcatcacaacaagccgattgagttagga

SEQ ID NO: 102613 - DNA, 78 bp, Homo sapiens
cggcgtgaagcggcggctcgtgctggcatctacggggatacgcatcacaacaagccgattgagttaggaccctgcaaa

SEQ ID NO: 102614 - DNA, 79 bp, Homo sapiens
cggctcgtgctggcatctacggggatacgcatcacaacaagccgattgagttaggaccctgcaaacagctcctaccaga

SEQ ID NO: 102615 - DNA, 78 bp, Homo sapiens
ctggcatctacggggatacgcatcacaacaagccgattgagttaggaccctgcaaacagctcctaccagacggcgaca

SEQ ID NO: 102616 - DNA, 74 bp, Homo sapiens
ctacggggatacgcatcacaacaagccgattgagttaggaccctgcaaacagctcctaccagacggcgacaggg

SEQ ID NO: 102617 - DNA, 77 bp, Homo sapiens
atcacaacaagccgattgagttaggaccctgcaaacagctcctaccagacggcgacaggggcgcggatcttcagcaa

SEQ ID NO: 102618 - DNA, 78 bp, Homo sapiens
acaagccgattgagttaggaccctgcaaacagctcctaccagacggcgacaggggcgcggatcttcagcaagcagctc

SEQ ID NO: 102619 - DNA, 77 bp, Homo sapiens
caaacagctcctaccagacggcgacaggggcgcggatcttcagcaagcagctcccgggagaccaacatacacgttca

SEQ ID NO: 102620 - DNA, 75 bp, Homo sapiens
agctcctaccagacggcgacaggggcgcggatcttcagcaagcagctcccgggagaccaacatacacgttcaggg

SEQ ID NO: 102621 - DNA, 70 bp, Homo sapiens
atcttcagcaagcagctcccgggagaccaacatacacgttcaggggcctttattactgcggggggtgggg

SEQ ID NO: 102622 - DNA, 66 bp, Homo sapiens
agcagctcccgggagaccaacatacacgttcaggggcctttattactgcggggggtgggggggggc

SEQ ID NO: 102623 - DNA, 62 bp, Homo sapiens
accaacatacacgttcaggggcctttattactgcggggggtgggggggggcgggggtggtta

SEQ ID NO: 102624 - DNA, 61 bp, Homo sapiens
ggcctttattactgcggggggtgggggggggcgggggtggttaggggaggagggagactaa

SEQ ID NO: 102625 - DNA, 62 bp, Homo sapiens
tattactgcggggggtgggggggggcgggggtggttaggggaggagggagactaagttacta

SEQ ID NO: 102626 - DNA, 62 bp, Homo sapiens
gtgggggggggcgggggtggttaggggaggagggagactaagttactaacagtccaggaggg

SEQ ID NO: 102627 - DNA, 63 bp, Homo sapiens
cgggggtggttaggggaggagggagactaagttactaacagtccaggaggggaaaacgttctg

SEQ ID NO: 102628 - DNA, 69 bp, Homo sapiens
agggagactaagttactaacagtccaggaggggaaaacgttctggttctgcggatcggcctctgaccca

SEQ ID NO: 102629 - DNA, 69 bp, Homo sapiens
actaagttactaacagtccaggaggggaaaacgttctggttctgcggatcggcctctgacccaggatgg

SEQ ID NO: 102630 - DNA, 75 bp, Homo sapiens
ggaaaacgttctggttctgcggatcggcctctgacccaggatgggctcctagcaaccgattgcttagtgcattaa

SEQ ID NO: 102631 - DNA, 74 bp, Homo sapiens
acgttctggttctgcggatcggcctctgacccaggatgggctcctagcaaccgattgcttagtgcattaaaaag

SEQ ID NO: 102632 - DNA, 78 bp, Homo sapiens
tctgcggatcggcctctgacccaggatgggctcctagcaaccgattgcttagtgcattaaaaagtggagactatcttc

SEQ ID NO: 102633 - DNA, 77 bp, Homo sapiens
tctgacccaggatgggctcctagcaaccgattgcttagtgcattaaaaagtggagactatcttccacgaatcttgct

SEQ ID NO: 102634 - DNA, 77 bp, Homo sapiens
atgggctcctagcaaccgattgcttagtgcattaaaaagtggagactatcttccacgaatcttgcttgcagaggtta

SEQ ID NO: 102635 - DNA, 75 bp, Homo sapiens
ctcctagcaaccgattgcttagtgcattaaaaagtggagactatcttccacgaatcttgcttgcagaggttaagt

SEQ ID NO: 102636 - DNA, 75 bp, Homo sapiens
ccgattgcttagtgcattaaaaagtggagactatcttccacgaatcttgcttgcagaggttaagttctgtctttg

SEQ ID NO: 102637 - DNA, 72 bp, Homo sapiens
attaaaaagtggagactatcttccacgaatcttgcttgcagaggttaagttctgtctttggctgttagaaaa

SEQ ID NO: 102638 - DNA, 72 bp, Homo sapiens
aaagtggagactatcttccacgaatcttgcttgcagaggttaagttctgtctttggctgttagaaaagttcc

SEQ ID NO: 102639 - DNA, 73 bp, Homo sapiens
aatcttgcttgcagaggttaagttctgtctttggctgttagaaaagttcctgaaggcaaaattctcatacact

SEQ ID NO: 102640 - DNA, 73 bp, Homo sapiens
tctgtctttggctgttagaaaagttcctgaaggcaaaattctcatacacttcctaaaatatttatgcgaagag

SEQ ID NO: 102641 - DNA, 70 bp, Homo sapiens
ggctgttagaaaagttcctgaaggcaaaattctcatacacttcctaaaatatttatgcgaagagtaaaac

SEQ ID NO: 102642 - DNA, 73 bp, Homo sapiens
aagttcctgaaggcaaaattctcatacacttcctaaaatatttatgcgaagagtaaaacgatcagcaaacaca

SEQ ID NO: 102643 - DNA, 73 bp, Homo sapiens
ctcatacacttcctaaaatatttatgcgaagagtaaaacgatcagcaaacacattatttggaagttccagtag

SEQ ID NO: 102644 - DNA, 73 bp, Homo sapiens
tcctaaaatatttatgcgaagagtaaaacgatcagcaaacacattatttggaagttccagtagttaatgcctg

SEQ ID NO: 102645 - DNA, 73 bp, Homo sapiens
aaatatttatgcgaagagtaaaacgatcagcaaacacattatttggaagttccagtagttaatgcctgtcagt

SEQ ID NO: 102646 - DNA, 73 bp, Homo sapiens
aagagtaaaacgatcagcaaacacattatttggaagttccagtagttaatgcctgtcagttttttgcaggtga

SEQ ID NO: 102647 - DNA, 73 bp, Homo sapiens
atcagcaaacacattatttggaagttccagtagttaatgcctgtcagttttttgcaggtgagttttgtctaaa

SEQ ID NO: 102648 - DNA, 70 bp, Homo sapiens
aaacacattatttggaagttccagtagttaatgcctgtcagttttttgcaggtgagttttgtctaaagtc

SEQ ID NO: 102649 - DNA, 70 bp, Homo sapiens
atttggaagttccagtagttaatgcctgtcagttttttgcaggtgagttttgtctaaagtcccaacagaa

SEQ ID NO: 102650 - DNA, 72 bp, Homo sapiens
tagttaatgcctgtcagttttttgcaggtgagttttgtctaaagtcccaacagaacacaattatctcccgta

SEQ ID NO: 102651 - DNA, 71 bp, Homo sapiens
aatgcctgtcagttttttgcaggtgagttttgtctaaagtcccaacagaacacaattatctcccgtaacaa

SEQ ID NO: 102652 - DNA, 69 bp, Homo sapiens
tttttgcaggtgagttttgtctaaagtcccaacagaacacaattatctcccgtaacaaggccactttta

SEQ ID NO: 102653 - DNA, 70 bp, Homo sapiens
agttttgtctaaagtcccaacagaacacaattatctcccgtaacaaggccacttttatcatgcaaaactg

SEQ ID NO: 102654 - DNA, 74 bp, Homo sapiens
tgtctaaagtcccaacagaacacaattatctcccgtaacaaggccacttttatcatgcaaaactggcttcagtc

SEQ ID NO: 102655 - DNA, 72 bp, Homo sapiens
aacagaacacaattatctcccgtaacaaggccacttttatcatgcaaaactggcttcagtcccgaaaagcaa

SEQ ID NO: 102656 - DNA, 73 bp, Homo sapiens
aattatctcccgtaacaaggccacttttatcatgcaaaactggcttcagtcccgaaaagcaagagctgagact

SEQ ID NO: 102657 - DNA, 73 bp, Homo sapiens
cgtaacaaggccacttttatcatgcaaaactggcttcagtcccgaaaagcaagagctgagacttccaaaggta

SEQ ID NO: 102658 - DNA, 79 bp, Homo sapiens
tgcaaaactggcttcagtcccgaaaagcaagagctgagacttccaaaggtagtgctactaatgtatgtgcacgtatata

SEQ ID NO: 102659 - DNA, 77 bp, Homo sapiens
actggcttcagtcccgaaaagcaagagctgagacttccaaaggtagtgctactaatgtatgtgcacgtatatataaa

SEQ ID NO: 102660 - DNA, 76 bp, Homo sapiens
aaatatatacatatgctctacttcataaaatatttacaatacaatctgtggagaatttaaacacaacagaaatcca

SEQ ID NO: 102661 - DNA, 76 bp, Homo sapiens
catatgctctacttcataaaatatttacaatacaatctgtggagaatttaaacacaacagaaatccattaatgtac

SEQ ID NO: 102662 - DNA, 76 bp, Homo sapiens
ctacttcataaaatatttacaatacaatctgtggagaatttaaacacaacagaaatccattaatgtacgctgcaga

SEQ ID NO: 102663 - DNA, 73 bp, Homo sapiens
acaatacaatctgtggagaatttaaacacaacagaaatccattaatgtacgctgcagatttttttaagtagcc

SEQ ID NO: 102664 - DNA, 73 bp, Homo sapiens
gtggagaatttaaacacaacagaaatccattaatgtacgctgcagatttttttaagtagccttgaaaatcagc

SEQ ID NO: 102665 - DNA, 78 bp, Homo sapiens
acagaaatccattaatgtacgctgcagatttttttaagtagccttgaaaatcagcttcagtagttggagcagtgctga

SEQ ID NO: 102666 - DNA, 78 bp, Homo sapiens
attaatgtacgctgcagatttttttaagtagccttgaaaatcagcttcagtagttggagcagtgctgagctagaagta

SEQ ID NO: 102667 - DNA, 79 bp, Homo sapiens
tttttaagtagccttgaaaatcagcttcagtagttggagcagtgctgagctagaagtacttgtcatgttctctgttctc

SEQ ID NO: 102668 - DNA, 84 bp, Homo sapiens
ttgaaaatcagcttcagtagttggagcagtgctgagctagaagtacttgtcatgttctctgttctctcaatgaattctgtcaaa

SEQ ID NO: 102669 - DNA, 86 bp, Homo sapiens
ttcagtagttggagcagtgctgagctagaagtacttgtcatgttctctgttctctcaatgaattctgtcaaaacgctcagtgcaga

SEQ ID NO: 102670 - DNA, 79 bp, Homo sapiens
atgaattctgtcaaaacgctcagtgcagaaaattcagcgtttcagagatcttcagctaatcttaaaacaacaatcataa

SEQ ID NO: 102671 - DNA, 76 bp, Homo sapiens
aaaacgctcagtgcagaaaattcagcgtttcagagatcttcagctaatcttaaaacaacaatcataagaaggccca

SEQ ID NO: 102672 - DNA, 78 bp, Homo sapiens
agtgcagaaaattcagcgtttcagagatcttcagctaatcttaaaacaacaatcataagaaggcccagtcgatgacac

SEQ ID NO: 102673 - DNA, 76 bp, Homo sapiens
aaaattcagcgtttcagagatcttcagctaatcttaaaacaacaatcataagaaggcccagtcgatgacactcagg

SEQ ID NO: 102674 - DNA, 78 bp, Homo sapiens
agctaatcttaaaacaacaatcataagaaggcccagtcgatgacactcagggttctacagctctcccacatctgtgaa

SEQ ID NO: 102675 - DNA, 75 bp, Homo sapiens
aaaacaacaatcataagaaggcccagtcgatgacactcagggttctacagctctcccacatctgtgaactcgggt

SEQ ID NO: 102676 - DNA, 75 bp, Homo sapiens
aacaatcataagaaggcccagtcgatgacactcagggttctacagctctcccacatctgtgaactcgggtttggg

SEQ ID NO: 102677 - DNA, 74 bp, Homo sapiens
aaggcccagtcgatgacactcagggttctacagctctcccacatctgtgaactcgggtttggggatgttggtta

SEQ ID NO: 102678 - DNA, 74 bp, Homo sapiens
gtcgatgacactcagggttctacagctctcccacatctgtgaactcgggtttggggatgttggttaagtttgtg

SEQ ID NO: 102679 - DNA, 71 bp, Homo sapiens
agggttctacagctctcccacatctgtgaactcgggtttggggatgttggttaagtttgtggctggtcctc

SEQ ID NO: 102680 - DNA, 72 bp, Homo sapiens
tacagctctcccacatctgtgaactcgggtttggggatgttggttaagtttgtggctggtcctctggtttgt

SEQ ID NO: 102681 - DNA, 70 bp, Homo sapiens
aactcgggtttggggatgttggttaagtttgtggctggtcctctggtttgttgggagttgagcagccgca

SEQ ID NO: 102682 - DNA, 78 bp, Homo sapiens
gggatgttggttaagtttgtggctggtcctctggtttgttgggagttgagcagccgcagagtcacacacatgcaaaca

SEQ ID NO: 102683 - DNA, 79 bp, Homo sapiens
ttaagtttgtggctggtcctctggtttgttgggagttgagcagccgcagagtcacacacatgcaaacacgcactcttcg

SEQ ID NO: 102684 - DNA, 81 bp, Homo sapiens
ctggtcctctggtttgttgggagttgagcagccgcagagtcacacacatgcaaacacgcactcttcggaaggcagccactg

SEQ ID NO: 102685 - DNA, 87 bp, Homo sapiens
ttgggagttgagcagccgcagagtcacacacatgcaaacacgcactcttcggaaggcagccactgtctacatcagctgggtgactca

SEQ ID NO: 102686 - DNA, 85 bp, Homo sapiens
agccgcagagtcacacacatgcaaacacgcactcttcggaaggcagccactgtctacatcagctgggtgactcagccctgactcg

SEQ ID NO: 102687 - DNA, 86 bp, Homo sapiens
agagtcacacacatgcaaacacgcactcttcggaaggcagccactgtctacatcagctgggtgactcagccctgactcgggcagca

SEQ ID NO: 102688 - DNA, 82 bp, Homo sapiens
aaggcagccactgtctacatcagctgggtgactcagccctgactcgggcagcagcgagacgatactcctccaccgtcgccca

SEQ ID NO: 102689 - DNA, 81 bp, Homo sapiens
actgtctacatcagctgggtgactcagccctgactcgggcagcagcgagacgatactcctccaccgtcgcccagcacccgc

SEQ ID NO: 102690 - DNA, 78 bp, Homo sapiens
atcagctgggtgactcagccctgactcgggcagcagcgagacgatactcctccaccgtcgcccagcacccgccggtta

SEQ ID NO: 102691 - DNA, 79 bp, Homo sapiens
tcagccctgactcgggcagcagcgagacgatactcctccaccgtcgcccagcacccgccggttagctgctccgaggcac

SEQ ID NO: 102692 - DNA, 76 bp, Homo sapiens
actcgggcagcagcgagacgatactcctccaccgtcgcccagcacccgccggttagctgctccgaggcacgaacac

SEQ ID NO: 102693 - DNA, 76 bp, Homo sapiens
agcagcgagacgatactcctccaccgtcgcccagcacccgccggttagctgctccgaggcacgaacacccacgagc

SEQ ID NO: 102694 - DNA, 73 bp, Homo sapiens
atactcctccaccgtcgcccagcacccgccggttagctgctccgaggcacgaacacccacgagcgccgcgtaa

SEQ ID NO: 102695 - DNA, 73 bp, Homo sapiens
accgtcgcccagcacccgccggttagctgctccgaggcacgaacacccacgagcgccgcgtaaccgcagcagg

SEQ ID NO: 102696 - DNA, 74 bp, Homo sapiens
cccagcacccgccggttagctgctccgaggcacgaacacccacgagcgccgcgtaaccgcagcaggtggagcgg

SEQ ID NO: 102697 - DNA, 74 bp, Homo sapiens
ccggttagctgctccgaggcacgaacacccacgagcgccgcgtaaccgcagcaggtggagcgggccttgaggga

SEQ ID NO: 102698 - DNA, 74 bp, Homo sapiens
aacacccacgagcgccgcgtaaccgcagcaggtggagcgggccttgagggagggctccgcggcgcagatcgaaa

SEQ ID NO: 102699 - DNA, 75 bp, Homo sapiens
acgagcgccgcgtaaccgcagcaggtggagcgggccttgagggagggctccgcggcgcagatcgaaacagatcgg

SEQ ID NO: 102700 - DNA, 78 bp, Homo sapiens
gccttgagggagggctccgcggcgcagatcgaaacagatcgggcggctcgggttacacacgcacgcacatcctgccac

SEQ ID NO: 102701 - DNA, 78 bp, Homo sapiens
agggagggctccgcggcgcagatcgaaacagatcgggcggctcgggttacacacgcacgcacatcctgccacgcacac

SEQ ID NO: 102702 - DNA, 82 bp, Homo sapiens
ggcgcagatcgaaacagatcgggcggctcgggttacacacgcacgcacatcctgccacgcacactgccacgcacacgcaact

SEQ ID NO: 102703 - DNA, 81 bp, Homo sapiens
agatcgaaacagatcgggcggctcgggttacacacgcacgcacatcctgccacgcacactgccacgcacacgcaacttcac

SEQ ID NO: 102704 - DNA, 81 bp, Homo sapiens
agatcgggcggctcgggttacacacgcacgcacatcctgccacgcacactgccacgcacacgcaacttcacggctcgcctc

SEQ ID NO: 102705 - DNA, 82 bp, Homo sapiens
ggttacacacgcacgcacatcctgccacgcacactgccacgcacacgcaacttcacggctcgcctcggaccacagagcactt

SEQ ID NO: 102706 - DNA, 82 bp, Homo sapiens
acacgcacgcacatcctgccacgcacactgccacgcacacgcaacttcacggctcgcctcggaccacagagcactttctccc

SEQ ID NO: 102707 - DNA, 79 bp, Homo sapiens
tcctgccacgcacactgccacgcacacgcaacttcacggctcgcctcggaccacagagcactttctccccctgttgtaa

SEQ ID NO: 102708 - DNA, 74 bp, Homo sapiens
acactgccacgcacacgcaacttcacggctcgcctcggaccacagagcactttctccccctgttgtaaaaggaa

SEQ ID NO: 102709 - DNA, 71 bp, Homo sapiens
acgcacacgcaacttcacggctcgcctcggaccacagagcactttctccccctgttgtaaaaggaaaacaa

SEQ ID NO: 102710 - DNA, 69 bp, Homo sapiens
cgcaacttcacggctcgcctcggaccacagagcactttctccccctgttgtaaaaggaaaacaattggg

SEQ ID NO: 102711 - DNA, 68 bp, Homo sapiens
ctcgcctcggaccacagagcactttctccccctgttgtaaaaggaaaacaattggggaaaagttcgca

SEQ ID NO: 102712 - DNA, 65 bp, Homo sapiens
tttctccccctgttgtaaaaggaaaacaattggggaaaagttcgcagccaggaaagaagttgaaa

SEQ ID NO: 102713 - DNA, 69 bp, Homo sapiens
tgttgtaaaaggaaaacaattggggaaaagttcgcagccaggaaagaagttgaaaacatccagccaaga

SEQ ID NO: 102714 - DNA, 69 bp, Homo sapiens
taaaaggaaaacaattggggaaaagttcgcagccaggaaagaagttgaaaacatccagccaagaagcca

SEQ ID NO: 102715 - DNA, 69 bp, Homo sapiens
aattggggaaaagttcgcagccaggaaagaagttgaaaacatccagccaagaagccagttaattcaaaa

SEQ ID NO: 102716 - DNA, 69 bp, Homo sapiens
aaaagttcgcagccaggaaagaagttgaaaacatccagccaagaagccagttaattcaaaaggaagaaa

SEQ ID NO: 102717 - DNA, 65 bp, Homo sapiens
gaagttgaaaacatccagccaagaagccagttaattcaaaaggaagaaaggggaaaaacaaaaaa

SEQ ID NO: 102718 - DNA, 70 bp, Homo sapiens
aaacaacaaaaaaaggaaggtccaacgcaggccaaggagaagcagcagaggttgacttccttctggcgtc

SEQ ID NO: 102719 - DNA, 71 bp, Homo sapiens
aaaaaggaaggtccaacgcaggccaaggagaagcagcagaggttgacttccttctggcgtccctaggagcc

SEQ ID NO: 102720 - DNA, 71 bp, Homo sapiens
aaggtccaacgcaggccaaggagaagcagcagaggttgacttccttctggcgtccctaggagccccggaaa

SEQ ID NO: 102721 - DNA, 72 bp, Homo sapiens
aggccaaggagaagcagcagaggttgacttccttctggcgtccctaggagccccggaaagaagtgcctggcg

SEQ ID NO: 102722 - DNA, 72 bp, Homo sapiens
aagcagcagaggttgacttccttctggcgtccctaggagccccggaaagaagtgcctggcggcgcagggccg

SEQ ID NO: 102723 - DNA, 71 bp, Homo sapiens
agaggttgacttccttctggcgtccctaggagccccggaaagaagtgcctggcggcgcagggccgggcagc

SEQ ID NO: 102724 - DNA, 72 bp, Homo sapiens
ttccttctggcgtccctaggagccccggaaagaagtgcctggcggcgcagggccgggcagcgtggtgccctg

SEQ ID NO: 102725 - DNA, 71 bp, Homo sapiens
cgtccctaggagccccggaaagaagtgcctggcggcgcagggccgggcagcgtggtgccctggctgggtcc

SEQ ID NO: 102726 - DNA, 70 bp, Homo sapiens
agccccggaaagaagtgcctggcggcgcagggccgggcagcgtggtgccctggctgggtccggccgcggg

SEQ ID NO: 102727 - DNA, 71 bp, Homo sapiens
aagaagtgcctggcggcgcagggccgggcagcgtggtgccctggctgggtccggccgcggggcgcccgtcc

SEQ ID NO: 102728 - DNA, 71 bp, Homo sapiens
tggcggcgcagggccgggcagcgtggtgccctggctgggtccggccgcggggcgcccgtcccgcccgcgcc

SEQ ID NO: 102729 - DNA, 74 bp, Homo sapiens
gggcagcgtggtgccctggctgggtccggccgcggggcgcccgtcccgcccgcgcccgctggctctatgaatga

SEQ ID NO: 102730 - DNA, 75 bp, Homo sapiens
gtgccctggctgggtccggccgcggggcgcccgtcccgcccgcgcccgctggctctatgaatgagagtgcctgga

SEQ ID NO: 102731 - DNA, 75 bp, Homo sapiens
tggctgggtccggccgcggggcgcccgtcccgcccgcgcccgctggctctatgaatgagagtgcctggaaatgaa

SEQ ID NO: 102732 - DNA, 74 bp, Homo sapiens
cgcggggcgcccgtcccgcccgcgcccgctggctctatgaatgagagtgcctggaaatgaacgtgcttttactg

SEQ ID NO: 102733 - DNA, 75 bp, Homo sapiens
cgcgcccgctggctctatgaatgagagtgcctggaaatgaacgtgcttttactgtaagcccggccggaggaattc

SEQ ID NO: 102734 - DNA, 76 bp, Homo sapiens
tggctctatgaatgagagtgcctggaaatgaacgtgcttttactgtaagcccggccggaggaattccattccctca

SEQ ID NO: 102735 - DNA, 72 bp, Homo sapiens
atgagagtgcctggaaatgaacgtgcttttactgtaagcccggccggaggaattccattccctcagctcgtt

SEQ ID NO: 102736 - DNA, 71 bp, Homo sapiens
ctggaaatgaacgtgcttttactgtaagcccggccggaggaattccattccctcagctcgtttgcataggg

SEQ ID NO: 102737 - DNA, 71 bp, Homo sapiens
aatgaacgtgcttttactgtaagcccggccggaggaattccattccctcagctcgtttgcataggggcggc

SEQ ID NO: 102738 - DNA, 72 bp, Homo sapiens
tttactgtaagcccggccggaggaattccattccctcagctcgtttgcataggggcggccggcggccaatca

SEQ ID NO: 102739 - DNA, 71 bp, Homo sapiens
aagcccggccggaggaattccattccctcagctcgtttgcataggggcggccggcggccaatcacaggcct

SEQ ID NO: 102740 - DNA, 73 bp, Homo sapiens
aattccattccctcagctcgtttgcataggggcggccggcggccaatcacaggcctttccggtatcagccagg

SEQ ID NO: 102741 - DNA, 74 bp, Homo sapiens
attccctcagctcgtttgcataggggcggccggcggccaatcacaggcctttccggtatcagccagggcgcggc

SEQ ID NO: 102742 - DNA, 73 bp, Homo sapiens
ggcggccggcggccaatcacaggcctttccggtatcagccagggcgcggctcgccgccgccggctcctggaat

SEQ ID NO: 102743 - DNA, 73 bp, Homo sapiens
ccggcggccaatcacaggcctttccggtatcagccagggcgcggctcgccgccgccggctcctggaattggcc

SEQ ID NO: 102744 - DNA, 73 bp, Homo sapiens
atcacaggcctttccggtatcagccagggcgcggctcgccgccgccggctcctggaattggcccgcgcgcccc

SEQ ID NO: 102745 - DNA, 72 bp, Homo sapiens
tttccggtatcagccagggcgcggctcgccgccgccggctcctggaattggcccgcgcgcccccgccgccgc

SEQ ID NO: 102746 - DNA, 73 bp, Homo sapiens
tcgccgccgccggctcctggaattggcccgcgcgcccccgccgccgcgccgcgcgctactgtacgcagcccgg

SEQ ID NO: 102747 - DNA, 71 bp, Homo sapiens
ccgccggctcctggaattggcccgcgcgcccccgccgccgcgccgcgcgctactgtacgcagcccgggcgg

SEQ ID NO: 102748 - DNA, 71 bp, Homo sapiens
cctggaattggcccgcgcgcccccgccgccgcgccgcgcgctactgtacgcagcccgggcggggagtcgga

SEQ ID NO: 102749 - DNA, 71 bp, Homo sapiens
ccgccgcgccgcgcgctactgtacgcagcccgggcggggagtcggaggccacccccgcgccccgcatccaa

SEQ ID NO: 102750 - DNA, 75 bp, Homo sapiens
ccgcgcgctactgtacgcagcccgggcggggagtcggaggccacccccgcgccccgcatccaagcctgcatgctg

SEQ ID NO: 102751 - DNA, 73 bp, Homo sapiens
ctactgtacgcagcccgggcggggagtcggaggccacccccgcgccccgcatccaagcctgcatgctggcccg

SEQ ID NO: 102752 - DNA, 69 bp, Homo sapiens
agcccgggcggggagtcggaggccacccccgcgccccgcatccaagcctgcatgctggcccggggcccc

SEQ ID NO: 102753 - DNA, 71 bp, Homo sapiens
agtcggaggccacccccgcgccccgcatccaagcctgcatgctggcccggggccccgcccgcgtgcggacc

SEQ ID NO: 102754 - DNA, 70 bp, Homo sapiens
acccccgcgccccgcatccaagcctgcatgctggcccggggccccgcccgcgtgcggacccctttccgca

SEQ ID NO: 102755 - DNA, 74 bp, Homo sapiens
cccgcatccaagcctgcatgctggcccggggccccgcccgcgtgcggacccctttccgcagccacacgcaggct

SEQ ID NO: 102756 - DNA, 75 bp, Homo sapiens
atccaagcctgcatgctggcccggggccccgcccgcgtgcggacccctttccgcagccacacgcaggcttgtgcg

SEQ ID NO: 102757 - DNA, 73 bp, Homo sapiens
gggccccgcccgcgtgcggacccctttccgcagccacacgcaggcttgtgcggctccgcgagtggccacggtc

SEQ ID NO: 102758 - DNA, 74 bp, Homo sapiens
cgtgcggacccctttccgcagccacacgcaggcttgtgcggctccgcgagtggccacggtccggagacctggaa

SEQ ID NO: 102759 - DNA, 72 bp, Homo sapiens
ccctttccgcagccacacgcaggcttgtgcggctccgcgagtggccacggtccggagacctggaaaaagaaa

SEQ ID NO: 102760 - DNA, 74 bp, Homo sapiens
ccgcagccacacgcaggcttgtgcggctccgcgagtggccacggtccggagacctggaaaaagaaagcaggccc

SEQ ID NO: 102761 - DNA, 71 bp, Homo sapiens
acgcaggcttgtgcggctccgcgagtggccacggtccggagacctggaaaaagaaagcaggccccgccggc

SEQ ID NO: 102762 - DNA, 71 bp, Homo sapiens
cgccggcccgaggaggacccggccggcgcgccgcacccggagaggcccggccccgcgagccgctgcaggca

SEQ ID NO: 102763 - DNA, 73 bp, Homo sapiens
ccgaggaggacccggccggcgcgccgcacccggagaggcccggccccgcgagccgctgcaggcaggcgcagtg

SEQ ID NO: 102764 - DNA, 74 bp, Homo sapiens
acccggccggcgcgccgcacccggagaggcccggccccgcgagccgctgcaggcaggcgcagtggccgccacga

SEQ ID NO: 102765 - DNA, 73 bp, Homo sapiens
cgcacccggagaggcccggccccgcgagccgctgcaggcaggcgcagtggccgccacgaggctcccgaaccgg

SEQ ID NO: 102766 - DNA, 76 bp, Homo sapiens
ccggagaggcccggccccgcgagccgctgcaggcaggcgcagtggccgccacgaggctcccgaaccgggctgcagc

SEQ ID NO: 102767 - DNA, 76 bp, Homo sapiens
cccgcgagccgctgcaggcaggcgcagtggccgccacgaggctcccgaaccgggctgcagcccgcggacggcccca

SEQ ID NO: 102768 - DNA, 78 bp, Homo sapiens
agccgctgcaggcaggcgcagtggccgccacgaggctcccgaaccgggctgcagcccgcggacggccccagatcctgc

SEQ ID NO: 102769 - DNA, 72 bp, Homo sapiens
agtggccgccacgaggctcccgaaccgggctgcagcccgcggacggccccagatcctgcgcggccgcccagg

SEQ ID NO: 102770 - DNA, 72 bp, Homo sapiens
acgaggctcccgaaccgggctgcagcccgcggacggccccagatcctgcgcggccgcccagggccaggcctc

SEQ ID NO: 102771 - DNA, 72 bp, Homo sapiens
cgaaccgggctgcagcccgcggacggccccagatcctgcgcggccgcccagggccaggcctccgcttccagg

SEQ ID NO: 102772 - DNA, 71 bp, Homo sapiens
acggccccagatcctgcgcggccgcccagggccaggcctccgcttccagggcgggggtgcgatttggccgc

SEQ ID NO: 102773 - DNA, 70 bp, Homo sapiens
agatcctgcgcggccgcccagggccaggcctccgcttccagggcgggggtgcgatttggccgcggggccc

SEQ ID NO: 102774 - DNA, 70 bp, Homo sapiens
aggcctccgcttccagggcgggggtgcgatttggccgcggggcccgggggagccactccgcgctcctgca

SEQ ID NO: 102775 - DNA, 70 bp, Homo sapiens
tccgcttccagggcgggggtgcgatttggccgcggggcccgggggagccactccgcgctcctgcaccgtc

SEQ ID NO: 102776 - DNA, 74 bp, Homo sapiens
ggggtgcgatttggccgcggggcccgggggagccactccgcgctcctgcaccgtccggctggcagctgcggcga

SEQ ID NO: 102777 - DNA, 76 bp, Homo sapiens
ttggccgcggggcccgggggagccactccgcgctcctgcaccgtccggctggcagctgcggcgaagcggcgctgat

SEQ ID NO: 102778 - DNA, 79 bp, Homo sapiens
gggcccgggggagccactccgcgctcctgcaccgtccggctggcagctgcggcgaagcggcgctgattccttgcatgag

SEQ ID NO: 102779 - DNA, 81 bp, Homo sapiens
agccactccgcgctcctgcaccgtccggctggcagctgcggcgaagcggcgctgattccttgcatgaggccggacggcgtc

SEQ ID NO: 102780 - DNA, 81 bp, Homo sapiens
cgctcctgcaccgtccggctggcagctgcggcgaagcggcgctgattccttgcatgaggccggacggcgtccgcgcgtgcc

SEQ ID NO: 102781 - DNA, 78 bp, Homo sapiens
accgtccggctggcagctgcggcgaagcggcgctgattccttgcatgaggccggacggcgtccgcgcgtgccgtttgc

SEQ ID NO: 102782 - DNA, 79 bp, Homo sapiens
tgcggcgaagcggcgctgattccttgcatgaggccggacggcgtccgcgcgtgccgtttgctctcagcgtcttcccttg

SEQ ID NO: 102783 - DNA, 75 bp, Homo sapiens
gctgattccttgcatgaggccggacggcgtccgcgcgtgccgtttgctctcagcgtcttcccttgggtcggtttc

SEQ ID NO: 102784 - DNA, 74 bp, Homo sapiens
tccttgcatgaggccggacggcgtccgcgcgtgccgtttgctctcagcgtcttcccttgggtcggtttctgtaa

SEQ ID NO: 102785 - DNA, 69 bp, Homo sapiens
cggacggcgtccgcgcgtgccgtttgctctcagcgtcttcccttgggtcggtttctgtaatgggtgttt

SEQ ID NO: 102786 - DNA, 68 bp, Homo sapiens
cgtccgcgcgtgccgtttgctctcagcgtcttcccttgggtcggtttctgtaatgggtgttttttacc

SEQ ID NO: 102787 - DNA, 67 bp, Homo sapiens
ccgtttgctctcagcgtcttcccttgggtcggtttctgtaatgggtgttttttaccgctgcgcccgg

SEQ ID NO: 102788 - DNA, 69 bp, Homo sapiens
tcagcgtcttcccttgggtcggtttctgtaatgggtgttttttaccgctgcgcccgggccgcggctcga

SEQ ID NO: 102789 - DNA, 70 bp, Homo sapiens
tcggtttctgtaatgggtgttttttaccgctgcgcccgggccgcggctcgatccctccgcgcgtctcact

SEQ ID NO: 102790 - DNA, 76 bp, Homo sapiens
tgtaatgggtgttttttaccgctgcgcccgggccgcggctcgatccctccgcgcgtctcacttgctgcgtgcgtca

SEQ ID NO: 102791 - DNA, 78 bp, Homo sapiens
gcccgggccgcggctcgatccctccgcgcgtctcacttgctgcgtgcgtcagcggccagcgaagagtttcctagtcag

SEQ ID NO: 102792 - DNA, 76 bp, Homo sapiens
atccctccgcgcgtctcacttgctgcgtgcgtcagcggccagcgaagagtttcctagtcaggaaagaccccaagaa

SEQ ID NO: 102793 - DNA, 75 bp, Homo sapiens
ttgctgcgtgcgtcagcggccagcgaagagtttcctagtcaggaaagaccccaagaacgcgcggctggaaggaaa

SEQ ID NO: 102794 - DNA, 71 bp, Homo sapiens
ccagcgaagagtttcctagtcaggaaagaccccaagaacgcgcggctggaaggaaagttgaaagcagccac

SEQ ID NO: 102795 - DNA, 70 bp, Homo sapiens
aaagaccccaagaacgcgcggctggaaggaaagttgaaagcagccacgcggcttgctcccgggccttgta

SEQ ID NO: 102796 - DNA, 72 bp, Homo sapiens
aagaacgcgcggctggaaggaaagttgaaagcagccacgcggcttgctcccgggccttgtagcgccggcacc

SEQ ID NO: 102797 - DNA, 75 bp, Homo sapiens
ctggaaggaaagttgaaagcagccacgcggcttgctcccgggccttgtagcgccggcacccgcagcagccggaca

SEQ ID NO: 102798 - DNA, 75 bp, Homo sapiens
aaagttgaaagcagccacgcggcttgctcccgggccttgtagcgccggcacccgcagcagccggacagcctgccc

SEQ ID NO: 102799 - DNA, 74 bp, Homo sapiens
aaagcagccacgcggcttgctcccgggccttgtagcgccggcacccgcagcagccggacagcctgcccgggccc

SEQ ID NO: 102800 - DNA, 72 bp, Homo sapiens
cggcttgctcccgggccttgtagcgccggcacccgcagcagccggacagcctgcccgggccccgcgtctccc

SEQ ID NO: 102801 - DNA, 71 bp, Homo sapiens
tcccgggccttgtagcgccggcacccgcagcagccggacagcctgcccgggccccgcgtctcccctccggc

SEQ ID NO: 102802 - DNA, 72 bp, Homo sapiens
tgtagcgccggcacccgcagcagccggacagcctgcccgggccccgcgtctcccctccggctccccggaagc

SEQ ID NO: 102803 - DNA, 67 bp, Homo sapiens
acccgcagcagccggacagcctgcccgggccccgcgtctcccctccggctccccggaagcggccccc

SEQ ID NO: 102804 - DNA, 67 bp, Homo sapiens
agccggacagcctgcccgggccccgcgtctcccctccggctccccggaagcggcccccgctcctctc

SEQ ID NO: 102805 - DNA, 64 bp, Homo sapiens
cctgcccgggccccgcgtctcccctccggctccccggaagcggcccccgctcctctccccgccc

SEQ ID NO: 102806 - DNA, 67 bp, Homo sapiens
ccgcgtctcccctccggctccccggaagcggcccccgctcctctccccgcccccgtgcgctcgagcg

SEQ ID NO: 102807 - DNA, 69 bp, Homo sapiens
tccggctccccggaagcggcccccgctcctctccccgcccccgtgcgctcgagcggccccaggtgcgga

SEQ ID NO: 102808 - DNA, 67 bp, Homo sapiens
cccggaagcggcccccgctcctctccccgcccccgtgcgctcgagcggccccaggtgcggaacccac

SEQ ID NO: 102809 - DNA, 67 bp, Homo sapiens
ccccgctcctctccccgcccccgtgcgctcgagcggccccaggtgcggaacccaccccggcttcgcg

SEQ ID NO: 102810 - DNA, 69 bp, Homo sapiens
tctccccgcccccgtgcgctcgagcggccccaggtgcggaacccaccccggcttcgcgtgcgggcggcc

SEQ ID NO: 102811 - DNA, 69 bp, Homo sapiens
tcgagcggccccaggtgcggaacccaccccggcttcgcgtgcgggcggccgcttccccctgcgccggtc

SEQ ID NO: 102812 - DNA, 68 bp, Homo sapiens
cccaccccggcttcgcgtgcgggcggccgcttccccctgcgccggtccccgcggtgctgcgggcattt

SEQ ID NO: 102813 - DNA, 71 bp, Homo sapiens
cgtgcgggcggccgcttccccctgcgccggtccccgcggtgctgcgggcattttcgcggagctcggagggc

SEQ ID NO: 102814 - DNA, 68 bp, Homo sapiens
ccgcttccccctgcgccggtccccgcggtgctgcgggcattttcgcggagctcggagggccccgcccc

SEQ ID NO: 102815 - DNA, 70 bp, Homo sapiens
tgcgccggtccccgcggtgctgcgggcattttcgcggagctcggagggccccgcccccggtccggcgtgc

SEQ ID NO: 102816 - DNA, 72 bp, Homo sapiens
gcggtgctgcgggcattttcgcggagctcggagggccccgcccccggtccggcgtgcgctgccaactccgac

SEQ ID NO: 102817 - DNA, 69 bp, Homo sapiens
ctgcgggcattttcgcggagctcggagggccccgcccccggtccggcgtgcgctgccaactccgacccc

SEQ ID NO: 102818 - DNA, 67 bp, Homo sapiens
ttttcgcggagctcggagggccccgcccccggtccggcgtgcgctgccaactccgaccccgcccggc

SEQ ID NO: 102819 - DNA, 66 bp, Homo sapiens
tcggagggccccgcccccggtccggcgtgcgctgccaactccgaccccgcccggcggggctccctc

SEQ ID NO: 102820 - DNA, 69 bp, Homo sapiens
cccccggtccggcgtgcgctgccaactccgaccccgcccggcggggctccctcccagcggaggctgctc

SEQ ID NO: 102821 - DNA, 74 bp, Homo sapiens
tccggcgtgcgctgccaactccgaccccgcccggcggggctccctcccagcggaggctgctcccgtcaccatga

SEQ ID NO: 102822 - DNA, 72 bp, Homo sapiens
ctgccaactccgaccccgcccggcggggctccctcccagcggaggctgctcccgtcaccatgagtccctcca

SEQ ID NO: 102823 - DNA, 71 bp, Homo sapiens
tccgaccccgcccggcggggctccctcccagcggaggctgctcccgtcaccatgagtccctccacgccctc

SEQ ID NO: 102824 - DNA, 71 bp, Homo sapiens
cccggcggggctccctcccagcggaggctgctcccgtcaccatgagtccctccacgccctccctgccgggc

SEQ ID NO: 102825 - DNA, 74 bp, Homo sapiens
aggctgctcccgtcaccatgagtccctccacgccctccctgccgggccctgcacctcccggggcctctcatcca

SEQ ID NO: 102826 - DNA, 71 bp, Homo sapiens
atgagtccctccacgccctccctgccgggccctgcacctcccggggcctctcatccaccccggggctgcaa

SEQ ID NO: 102827 - DNA, 68 bp, Homo sapiens
acgccctccctgccgggccctgcacctcccggggcctctcatccaccccggggctgcaacccagtccc

SEQ ID NO: 102828 - DNA, 69 bp, Homo sapiens
tccctgccgggccctgcacctcccggggcctctcatccaccccggggctgcaacccagtccccggatcc

SEQ ID NO: 102829 - DNA, 68 bp, Homo sapiens
tgcacctcccggggcctctcatccaccccggggctgcaacccagtccccggatcccggccccgttcca

SEQ ID NO: 102830 - DNA, 68 bp, Homo sapiens
gggcctctcatccaccccggggctgcaacccagtccccggatcccggccccgttccaccgcgggctgc

SEQ ID NO: 102831 - DNA, 69 bp, Homo sapiens
tctcatccaccccggggctgcaacccagtccccggatcccggccccgttccaccgcgggctgctttgtg

SEQ ID NO: 102832 - DNA, 68 bp, Homo sapiens
ggctgcaacccagtccccggatcccggccccgttccaccgcgggctgctttgtggtccccgcggagcc

SEQ ID NO: 102833 - DNA, 67 bp, Homo sapiens
cagtccccggatcccggccccgttccaccgcgggctgctttgtggtccccgcggagcccctcaatta

SEQ ID NO: 102834 - DNA, 67 bp, Homo sapiens
cccggatcccggccccgttccaccgcgggctgctttgtggtccccgcggagcccctcaattaagctc

SEQ ID NO: 102835 - DNA, 66 bp, Homo sapiens
ccccgttccaccgcgggctgctttgtggtccccgcggagcccctcaattaagctccccggcgcggg

SEQ ID NO: 102836 - DNA, 67 bp, Homo sapiens
cgggctgctttgtggtccccgcggagcccctcaattaagctccccggcgcgggggtccctcgccgac

SEQ ID NO: 102837 - DNA, 66 bp, Homo sapiens
tttgtggtccccgcggagcccctcaattaagctccccggcgcgggggtccctcgccgacctcacgg

SEQ ID NO: 102838 - DNA, 66 bp, Homo sapiens
cccgcggagcccctcaattaagctccccggcgcgggggtccctcgccgacctcacggggcccctga

SEQ ID NO: 102839 - DNA, 66 bp, Homo sapiens
gggggtccctcgccgacctcacggggcccctgacgcccgctcctccctcccccagggctagggtgc

SEQ ID NO: 102840 - DNA, 70 bp, Homo sapiens
tccctcgccgacctcacggggcccctgacgcccgctcctccctcccccagggctagggtgctgtggccgc

SEQ ID NO: 102841 - DNA, 73 bp, Homo sapiens
tcacggggcccctgacgcccgctcctccctcccccagggctagggtgctgtggccgctgccgcgcagggactg

SEQ ID NO: 102842 - DNA, 72 bp, Homo sapiens
tgacgcccgctcctccctcccccagggctagggtgctgtggccgctgccgcgcagggactgtccccgggcgt

SEQ ID NO: 102843 - DNA, 72 bp, Homo sapiens
tcctccctcccccagggctagggtgctgtggccgctgccgcgcagggactgtccccgggcgttgccgcgggc

SEQ ID NO: 102844 - DNA, 72 bp, Homo sapiens
cccagggctagggtgctgtggccgctgccgcgcagggactgtccccgggcgttgccgcgggcccggacgcag

SEQ ID NO: 102845 - DNA, 72 bp, Homo sapiens
ggctagggtgctgtggccgctgccgcgcagggactgtccccgggcgttgccgcgggcccggacgcaggaggg

SEQ ID NO: 102846 - DNA, 67 bp, Homo sapiens
cgcagggactgtccccgggcgttgccgcgggcccggacgcaggagggggccggggttgactggcgtg

SEQ ID NO: 102847 - DNA, 65 bp, Homo sapiens
cgggcgttgccgcgggcccggacgcaggagggggccggggttgactggcgtggaggcctttcccg

SEQ ID NO: 102848 - DNA, 66 bp, Homo sapiens
gcccggacgcaggagggggccggggttgactggcgtggaggcctttcccgggcgggcccggactgc

SEQ ID NO: 102849 - DNA, 67 bp, Homo sapiens
aggagggggccggggttgactggcgtggaggcctttcccgggcgggcccggactgcgcggagctgtc

SEQ ID NO: 102850 - DNA, 68 bp, Homo sapiens
ccggggttgactggcgtggaggcctttcccgggcgggcccggactgcgcggagctgtcgggacgcgcc

SEQ ID NO: 102851 - DNA, 72 bp, Homo sapiens
ttgactggcgtggaggcctttcccgggcgggcccggactgcgcggagctgtcgggacgcgccgcgggctctg

SEQ ID NO: 102852 - DNA, 70 bp, Homo sapiens
aggcctttcccgggcgggcccggactgcgcggagctgtcgggacgcgccgcgggctctggcggacgccag

SEQ ID NO: 102853 - DNA, 74 bp, Homo sapiens
tcccgggcgggcccggactgcgcggagctgtcgggacgcgccgcgggctctggcggacgccagggggcagcagc

SEQ ID NO: 102854 - DNA, 76 bp, Homo sapiens
agctgtcgggacgcgccgcgggctctggcggacgccagggggcagcagccgccctccctggacgccgcgcgcagtc

SEQ ID NO: 102855 - DNA, 72 bp, Homo sapiens
tggcggacgccagggggcagcagccgccctccctggacgccgcgcgcagtccccggagctcccggaacgccc

SEQ ID NO: 102856 - DNA, 70 bp, Homo sapiens
ggcagcagccgccctccctggacgccgcgcgcagtccccggagctcccggaacgcccccgacggcgcggg

SEQ ID NO: 102857 - DNA, 70 bp, Homo sapiens
gacgccgcgcgcagtccccggagctcccggaacgcccccgacggcgcggggctgtgcggcccgcctcgtg

SEQ ID NO: 102858 - DNA, 68 bp, Homo sapiens
gcagtccccggagctcccggaacgcccccgacggcgcggggctgtgcggcccgcctcgtggccttcgg

SEQ ID NO: 102859 - DNA, 66 bp, Homo sapiens
aacgcccccgacggcgcggggctgtgcggcccgcctcgtggccttcgggtcgcccgggaagaacta

SEQ ID NO: 102860 - DNA, 69 bp, Homo sapiens
acggcgcggggctgtgcggcccgcctcgtggccttcgggtcgcccgggaagaactagcgttcgaggata

SEQ ID NO: 102861 - DNA, 69 bp, Homo sapiens
gggctgtgcggcccgcctcgtggccttcgggtcgcccgggaagaactagcgttcgaggataaaagacag

SEQ ID NO: 102862 - DNA, 67 bp, Homo sapiens
cggcccgcctcgtggccttcgggtcgcccgggaagaactagcgttcgaggataaaagacaggaagcc

SEQ ID NO: 102863 - DNA, 69 bp, Homo sapiens
tcgtggccttcgggtcgcccgggaagaactagcgttcgaggataaaagacaggaagccgccccagagcc

SEQ ID NO: 102864 - DNA, 71 bp, Homo sapiens
ggtcgcccgggaagaactagcgttcgaggataaaagacaggaagccgccccagagcccacttgagctggaa

SEQ ID NO: 102865 - DNA, 71 bp, Homo sapiens
agcgttcgaggataaaagacaggaagccgccccagagcccacttgagctggaacggccaaggcgcgtttcc

SEQ ID NO: 102866 - DNA, 71 bp, Homo sapiens
aaagacaggaagccgccccagagcccacttgagctggaacggccaaggcgcgtttccgaggttccaatata

SEQ ID NO: 102867 - DNA, 73 bp, Homo sapiens
aggaagccgccccagagcccacttgagctggaacggccaaggcgcgtttccgaggttccaatatagagtcgca

SEQ ID NO: 102868 - DNA, 73 bp, Homo sapiens
agagcccacttgagctggaacggccaaggcgcgtttccgaggttccaatatagagtcgcagccggccaggtgg

SEQ ID NO: 102869 - DNA, 71 bp, Homo sapiens
aggttccaatatagagtcgcagccggccaggtggggactctcggaccaggcctccccgctgtgcggcccgg

SEQ ID NO: 102870 - DNA, 71 bp, Homo sapiens
atatagagtcgcagccggccaggtggggactctcggaccaggcctccccgctgtgcggcccggtcggggtc

SEQ ID NO: 102871 - DNA, 67 bp, Homo sapiens
ccggccaggtggggactctcggaccaggcctccccgctgtgcggcccggtcggggtctcttcccgaa

SEQ ID NO: 102872 - DNA, 67 bp, Homo sapiens
gggactctcggaccaggcctccccgctgtgcggcccggtcggggtctcttcccgaagcccctgttcc

SEQ ID NO: 102873 - DNA, 68 bp, Homo sapiens
gaccaggcctccccgctgtgcggcccggtcggggtctcttcccgaagcccctgttcctggggcttgac

SEQ ID NO: 102874 - DNA, 70 bp, Homo sapiens
tgcggcccggtcggggtctcttcccgaagcccctgttcctggggcttgactcgggccgctcttggctatc

SEQ ID NO: 102875 - DNA, 73 bp, Homo sapiens
tcttcccgaagcccctgttcctggggcttgactcgggccgctcttggctatctgtgcttcaggagcccgggct

SEQ ID NO: 102876 - DNA, 72 bp, Homo sapiens
ctgttcctggggcttgactcgggccgctcttggctatctgtgcttcaggagcccgggcttccggggggctaa

SEQ ID NO: 102877 - DNA, 71 bp, Homo sapiens
gggcttgactcgggccgctcttggctatctgtgcttcaggagcccgggcttccggggggctaaggcgggcg

SEQ ID NO: 102878 - DNA, 70 bp, Homo sapiens
actcgggccgctcttggctatctgtgcttcaggagcccgggcttccggggggctaaggcgggcggcccgc

SEQ ID NO: 102879 - DNA, 70 bp, Homo sapiens
ttggctatctgtgcttcaggagcccgggcttccggggggctaaggcgggcggcccgcggcctcaaccctc

SEQ ID NO: 102880 - DNA, 69 bp, Homo sapiens
atctgtgcttcaggagcccgggcttccggggggctaaggcgggcggcccgcggcctcaaccctctccgc

SEQ ID NO: 102881 - DNA, 66 bp, Homo sapiens
aggagcccgggcttccggggggctaaggcgggcggcccgcggcctcaaccctctccgcctccgctc

SEQ ID NO: 102882 - DNA, 68 bp, Homo sapiens
ttccggggggctaaggcgggcggcccgcggcctcaaccctctccgcctccgctccccctgggcactgc

SEQ ID NO: 102883 - DNA, 72 bp, Homo sapiens
taaggcgggcggcccgcggcctcaaccctctccgcctccgctccccctgggcactgccagcacccgagttca

SEQ ID NO: 102884 - DNA, 70 bp, Homo sapiens
gcccgcggcctcaaccctctccgcctccgctccccctgggcactgccagcacccgagttcagttttgttt

SEQ ID NO: 102885 - DNA, 71 bp, Homo sapiens
tcaaccctctccgcctccgctccccctgggcactgccagcacccgagttcagttttgttttaatggacctg

SEQ ID NO: 102886 - DNA, 71 bp, Homo sapiens
tctccgcctccgctccccctgggcactgccagcacccgagttcagttttgttttaatggacctggggtctc

SEQ ID NO: 102887 - DNA, 68 bp, Homo sapiens
tccccctgggcactgccagcacccgagttcagttttgttttaatggacctggggtctcggaaagaaaa

SEQ ID NO: 102888 - DNA, 68 bp, Homo sapiens
cactgccagcacccgagttcagttttgttttaatggacctggggtctcggaaagaaaacttactacat

SEQ ID NO: 102889 - DNA, 63 bp, Homo sapiens
acccgagttcagttttgttttaatggacctggggtctcggaaagaaaacttactacatttttc

SEQ ID NO: 102890 - DNA, 63 bp, Homo sapiens
agttcagttttgttttaatggacctggggtctcggaaagaaaacttactacatttttctttta

SEQ ID NO: 102891 - DNA, 62 bp, Homo sapiens
gttttaatggacctggggtctcggaaagaaaacttactacatttttcttttaaaatgatttt

SEQ ID NO: 102892 - DNA, 61 bp, Homo sapiens
ttttcttttaaaatgatttttttaagcctaattccagttgtaaatccccccctccccccgc

SEQ ID NO: 102893 - DNA, 62 bp, Homo sapiens
atgatttttttaagcctaattccagttgtaaatccccccctccccccgcccaaacgtccact

SEQ ID NO: 102894 - DNA, 62 bp, Homo sapiens
tttttaagcctaattccagttgtaaatccccccctccccccgcccaaacgtccactttctaa

SEQ ID NO: 102895 - DNA, 66 bp, Homo sapiens
taattccagttgtaaatccccccctccccccgcccaaacgtccactttctaactctgtccctgaga

SEQ ID NO: 102896 - DNA, 69 bp, Homo sapiens
ttgtaaatccccccctccccccgcccaaacgtccactttctaactctgtccctgagaagagtgcatcgc

SEQ ID NO: 102897 - DNA, 71 bp, Homo sapiens
cctccccccgcccaaacgtccactttctaactctgtccctgagaagagtgcatcgcgcgcgcccgcccgcc

SEQ ID NO: 102898 - DNA, 74 bp, Homo sapiens
cccaaacgtccactttctaactctgtccctgagaagagtgcatcgcgcgcgcccgcccgcccgcaggggccgca

SEQ ID NO: 102899 - DNA, 77 bp, Homo sapiens
actttctaactctgtccctgagaagagtgcatcgcgcgcgcccgcccgcccgcaggggccgcagcgcctttgcctgc

SEQ ID NO: 102900 - DNA, 77 bp, Homo sapiens
taactctgtccctgagaagagtgcatcgcgcgcgcccgcccgcccgcaggggccgcagcgcctttgcctgcgggttc

SEQ ID NO: 102901 - DNA, 76 bp, Homo sapiens
gtgcatcgcgcgcgcccgcccgcccgcaggggccgcagcgcctttgcctgcgggttcggacgcggcccgctctaga

SEQ ID NO: 102902 - DNA, 73 bp, Homo sapiens
gcaggggccgcagcgcctttgcctgcgggttcggacgcggcccgctctagaggcaagttctgggcaagggaaa

SEQ ID NO: 102903 - DNA, 70 bp, Homo sapiens
cagcgcctttgcctgcgggttcggacgcggcccgctctagaggcaagttctgggcaagggaaaccttttc

SEQ ID NO: 102904 - DNA, 69 bp, Homo sapiens
ctttgcctgcgggttcggacgcggcccgctctagaggcaagttctgggcaagggaaaccttttcgcctg

SEQ ID NO: 102905 - DNA, 72 bp, Homo sapiens
ttcggacgcggcccgctctagaggcaagttctgggcaagggaaaccttttcgcctggtctccaatgcatttc

SEQ ID NO: 102906 - DNA, 71 bp, Homo sapiens
cccgctctagaggcaagttctgggcaagggaaaccttttcgcctggtctccaatgcatttccccgagatcc

SEQ ID NO: 102907 - DNA, 72 bp, Homo sapiens
tctagaggcaagttctgggcaagggaaaccttttcgcctggtctccaatgcatttccccgagatcccaccca

SEQ ID NO: 102908 - DNA, 72 bp, Homo sapiens
ttttcgcctggtctccaatgcatttccccgagatcccacccagggctcctggggccacccccacgtgcatcc

SEQ ID NO: 102909 - DNA, 70 bp, Homo sapiens
tctccaatgcatttccccgagatcccacccagggctcctggggccacccccacgtgcatcccccggaacc

SEQ ID NO: 102910 - DNA, 65 bp, Homo sapiens
atttccccgagatcccacccagggctcctggggccacccccacgtgcatcccccggaacccccga

SEQ ID NO: 102911 - DNA, 69 bp, Homo sapiens
ctcctggggccacccccacgtgcatcccccggaacccccgagatgcgggagggagcacgagggtgtggc

SEQ ID NO: 102912 - DNA, 69 bp, Homo sapiens
cacccccacgtgcatcccccggaacccccgagatgcgggagggagcacgagggtgtggcggctccaaaa

SEQ ID NO: 102913 - DNA, 69 bp, Homo sapiens
gtgcatcccccggaacccccgagatgcgggagggagcacgagggtgtggcggctccaaaagtaggcttt

SEQ ID NO: 102914 - DNA, 71 bp, Homo sapiens
gggagcacgagggtgtggcggctccaaaagtaggcttttgactccaggggaaatagcagactcgggtgatt

SEQ ID NO: 102915 - DNA, 70 bp, Homo sapiens
acgagggtgtggcggctccaaaagtaggcttttgactccaggggaaatagcagactcgggtgatttgccc

SEQ ID NO: 102916 - DNA, 67 bp, Homo sapiens
aaaagtaggcttttgactccaggggaaatagcagactcgggtgatttgcccctcggaaaggtccagg

SEQ ID NO: 102917 - DNA, 70 bp, Homo sapiens
ttttgactccaggggaaatagcagactcgggtgatttgcccctcggaaaggtccagggaggctcctctgg

SEQ ID NO: 102918 - DNA, 71 bp, Homo sapiens
aaatagcagactcgggtgatttgcccctcggaaaggtccagggaggctcctctgggtctcgggccgcttgc

SEQ ID NO: 102919 - DNA, 68 bp, Homo sapiens
actcgggtgatttgcccctcggaaaggtccagggaggctcctctgggtctcgggccgcttgcctaaaa

SEQ ID NO: 102920 - DNA, 66 bp, Homo sapiens
ctcggaaaggtccagggaggctcctctgggtctcgggccgcttgcctaaaaccctaaaccccgcga

SEQ ID NO: 102921 - DNA, 67 bp, Homo sapiens
gggaggctcctctgggtctcgggccgcttgcctaaaaccctaaaccccgcgacgggggctgcgagtc

SEQ ID NO: 102922 - DNA, 68 bp, Homo sapiens
tctcgggccgcttgcctaaaaccctaaaccccgcgacgggggctgcgagtcggactcgggctgcggtc

SEQ ID NO: 102923 - DNA, 68 bp, Homo sapiens
taaaccccgcgacgggggctgcgagtcggactcgggctgcggtctcccaggagggagtcaagttcctt

SEQ ID NO: 102924 - DNA, 71 bp, Homo sapiens
gacgggggctgcgagtcggactcgggctgcggtctcccaggagggagtcaagttcctttatcgagtaagga

SEQ ID NO: 102925 - DNA, 71 bp, Homo sapiens
tgcgagtcggactcgggctgcggtctcccaggagggagtcaagttcctttatcgagtaaggaaagttggtc

SEQ ID NO: 102926 - DNA, 68 bp, Homo sapiens
actcgggctgcggtctcccaggagggagtcaagttcctttatcgagtaaggaaagttggtcccagcct

SEQ ID NO: 102927 - DNA, 71 bp, Homo sapiens
ggtctcccaggagggagtcaagttcctttatcgagtaaggaaagttggtcccagccttgcatgcaccgagt

SEQ ID NO: 102928 - DNA, 73 bp, Homo sapiens
gagggagtcaagttcctttatcgagtaaggaaagttggtcccagccttgcatgcaccgagtttagccgtcaga

SEQ ID NO: 102929 - DNA, 74 bp, Homo sapiens
agtcaagttcctttatcgagtaaggaaagttggtcccagccttgcatgcaccgagtttagccgtcagaggcagc

SEQ ID NO: 102930 - DNA, 75 bp, Homo sapiens
ctttatcgagtaaggaaagttggtcccagccttgcatgcaccgagtttagccgtcagaggcagcgtcgtgggagc

SEQ ID NO: 102931 - DNA, 79 bp, Homo sapiens
aaagttggtcccagccttgcatgcaccgagtttagccgtcagaggcagcgtcgtgggagctgctcagctaggagtttca

SEQ ID NO: 102932 - DNA, 78 bp, Homo sapiens
ttgcatgcaccgagtttagccgtcagaggcagcgtcgtgggagctgctcagctaggagtttcaaccgataaaccccga

SEQ ID NO: 102933 - DNA, 73 bp, Homo sapiens
agtttagccgtcagaggcagcgtcgtgggagctgctcagctaggagtttcaaccgataaaccccgagtttgaa

SEQ ID NO: 102934 - DNA, 72 bp, Homo sapiens
agaggcagcgtcgtgggagctgctcagctaggagtttcaaccgataaaccccgagtttgaagcccgacaaaa

SEQ ID NO: 102935 - DNA, 72 bp, Homo sapiens
cgtcgtgggagctgctcagctaggagtttcaaccgataaaccccgagtttgaagcccgacaaaaagctgata

SEQ ID NO: 102936 - DNA, 74 bp, Homo sapiens
tgctcagctaggagtttcaaccgataaaccccgagtttgaagcccgacaaaaagctgatagcaatcacagcttt

SEQ ID NO: 102937 - DNA, 74 bp, Homo sapiens
ttcaaccgataaaccccgagtttgaagcccgacaaaaagctgatagcaatcacagcttttgctccttgactcga

SEQ ID NO: 102938 - DNA, 76 bp, Homo sapiens
ttgaagcccgacaaaaagctgatagcaatcacagcttttgctccttgactcgatgggatcgcgggacatttgggtt

SEQ ID NO: 102939 - DNA, 74 bp, Homo sapiens
acaaaaagctgatagcaatcacagcttttgctccttgactcgatgggatcgcgggacatttgggtttccccgga

SEQ ID NO: 102940 - DNA, 76 bp, Homo sapiens
gcaatcacagcttttgctccttgactcgatgggatcgcgggacatttgggtttccccggagcggcgcaggctgtta

SEQ ID NO: 102941 - DNA, 73 bp, Homo sapiens
agcttttgctccttgactcgatgggatcgcgggacatttgggtttccccggagcggcgcaggctgttaactgc

SEQ ID NO: 102942 - DNA, 76 bp, Homo sapiens
tccttgactcgatgggatcgcgggacatttgggtttccccggagcggcgcaggctgttaactgcgcagcgcggtgc

SEQ ID NO: 102943 - DNA, 74 bp, Homo sapiens
atgggatcgcgggacatttgggtttccccggagcggcgcaggctgttaactgcgcagcgcggtgccctcttgaa

SEQ ID NO: 102944 - DNA, 72 bp, Homo sapiens
ggacatttgggtttccccggagcggcgcaggctgttaactgcgcagcgcggtgccctcttgaaaagaagaaa

SEQ ID NO: 102945 - DNA, 73 bp, Homo sapiens
ttgggtttccccggagcggcgcaggctgttaactgcgcagcgcggtgccctcttgaaaagaagaaacagacca

SEQ ID NO: 102946 - DNA, 75 bp, Homo sapiens
gcggcgcaggctgttaactgcgcagcgcggtgccctcttgaaaagaagaaacagaccaacctctgcccttcctta

SEQ ID NO: 102947 - DNA, 74 bp, Homo sapiens
ctgttaactgcgcagcgcggtgccctcttgaaaagaagaaacagaccaacctctgcccttccttactgaggatc

SEQ ID NO: 102948 - DNA, 73 bp, Homo sapiens
cgcagcgcggtgccctcttgaaaagaagaaacagaccaacctctgcccttccttactgaggatctaaaatgaa

SEQ ID NO: 102949 - DNA, 71 bp, Homo sapiens
ggtgccctcttgaaaagaagaaacagaccaacctctgcccttccttactgaggatctaaaatgaatggaaa

SEQ ID NO: 102950 - DNA, 68 bp, Homo sapiens
aacctctgcccttccttactgaggatctaaaatgaatggaaagaggcaggggctccggggaaagggaa

SEQ ID NO: 102951 - DNA, 67 bp, Homo sapiens
ttccttactgaggatctaaaatgaatggaaagaggcaggggctccggggaaagggaaccccttagtc

SEQ ID NO: 102952 - DNA, 66 bp, Homo sapiens
gatctaaaatgaatggaaagaggcaggggctccggggaaagggaaccccttagtcggccgggcatt

SEQ ID NO: 102953 - DNA, 64 bp, Homo sapiens
aaaatgaatggaaagaggcaggggctccggggaaagggaaccccttagtcggccgggcatttta

SEQ ID NO: 102954 - DNA, 68 bp, Homo sapiens
tccggggaaagggaaccccttagtcggccgggcattttacggagcctgcactttcaaggacagccaca

SEQ ID NO: 102955 - DNA, 69 bp, Homo sapiens
aaagggaaccccttagtcggccgggcattttacggagcctgcactttcaaggacagccacagcgtgtac

SEQ ID NO: 102956 - DNA, 73 bp, Homo sapiens
ttagtcggccgggcattttacggagcctgcactttcaaggacagccacagcgtgtacgaagtgaggaattcct

SEQ ID NO: 102957 - DNA, 73 bp, Homo sapiens
cgggcattttacggagcctgcactttcaaggacagccacagcgtgtacgaagtgaggaattcctttccaccaa

SEQ ID NO: 102958 - DNA, 76 bp, Homo sapiens
ttacggagcctgcactttcaaggacagccacagcgtgtacgaagtgaggaattcctttccaccaagagcgctcatt

SEQ ID NO: 102959 - DNA, 75 bp, Homo sapiens
actttcaaggacagccacagcgtgtacgaagtgaggaattcctttccaccaagagcgctcattttagcgacaata

SEQ ID NO: 102960 - DNA, 75 bp, Homo sapiens
aaggacagccacagcgtgtacgaagtgaggaattcctttccaccaagagcgctcattttagcgacaatacagaat

SEQ ID NO: 102961 - DNA, 71 bp, Homo sapiens
gtgtacgaagtgaggaattcctttccaccaagagcgctcattttagcgacaatacagaattccccttcctt

SEQ ID NO: 102962 - DNA, 71 bp, Homo sapiens
aagtgaggaattcctttccaccaagagcgctcattttagcgacaatacagaattccccttcctttgcctaa

SEQ ID NO: 102963 - DNA, 70 bp, Homo sapiens
attcctttccaccaagagcgctcattttagcgacaatacagaattccccttcctttgcctaagggagaaa

SEQ ID NO: 102964 - DNA, 69 bp, Homo sapiens
accaagagcgctcattttagcgacaatacagaattccccttcctttgcctaagggagaaaggaaaggaa

SEQ ID NO: 102965 - DNA, 66 bp, Homo sapiens
attttagcgacaatacagaattccccttcctttgcctaagggagaaaggaaaggaaacattaccag

SEQ ID NO: 102966 - DNA, 66 bp, Homo sapiens
acaatacagaattccccttcctttgcctaagggagaaaggaaaggaaacattaccaggttcattcc

SEQ ID NO: 102967 - DNA, 69 bp, Homo sapiens
tttgcctaagggagaaaggaaaggaaacattaccaggttcattcccagtgtttccctggagtaatgcta

SEQ ID NO: 102968 - DNA, 68 bp, Homo sapiens
gagaaaggaaaggaaacattaccaggttcattcccagtgtttccctggagtaatgctagaatttactt

SEQ ID NO: 102969 - DNA, 69 bp, Homo sapiens
aaaggaaacattaccaggttcattcccagtgtttccctggagtaatgctagaatttacttttgtcataa

SEQ ID NO: 102970 - DNA, 72 bp, Homo sapiens
acattaccaggttcattcccagtgtttccctggagtaatgctagaatttacttttgtcataatgcaaaatta

SEQ ID NO: 102971 - DNA, 68 bp, Homo sapiens
aaaaaatacaacgaagcgatacgttgggcggatgctacgtgacagatttttccaaattttgttgcggg

SEQ ID NO: 102972 - DNA, 71 bp, Homo sapiens
tacaacgaagcgatacgttgggcggatgctacgtgacagatttttccaaattttgttgcggggagagggag

SEQ ID NO: 102973 - DNA, 69 bp, Homo sapiens
atacgttgggcggatgctacgtgacagatttttccaaattttgttgcggggagagggagggaggagaat

SEQ ID NO: 102974 - DNA, 73 bp, Homo sapiens
ttttgttgcggggagagggagggaggagaattgaaaacggctcacaacaggaatgaaatgtacatttctgcag

SEQ ID NO: 102975 - DNA, 71 bp, Homo sapiens
agggagggaggagaattgaaaacggctcacaacaggaatgaaatgtacatttctgcagtggatttaaaaag

SEQ ID NO: 102976 - DNA, 74 bp, Homo sapiens
gagaattgaaaacggctcacaacaggaatgaaatgtacatttctgcagtggatttaaaaagtactgcttggtta

SEQ ID NO: 102977 - DNA, 73 bp, Homo sapiens
ttgaaaacggctcacaacaggaatgaaatgtacatttctgcagtggatttaaaaagtactgcttggttagttg

SEQ ID NO: 102978 - DNA, 72 bp, Homo sapiens
ctcacaacaggaatgaaatgtacatttctgcagtggatttaaaaagtactgcttggttagttggaagaaaaa

SEQ ID NO: 102979 - DNA, 71 bp, Homo sapiens
gaaatgtacatttctgcagtggatttaaaaagtactgcttggttagttggaagaaaaataatttcattgga

SEQ ID NO: 102980 - DNA, 69 bp, Homo sapiens
gtggatttaaaaagtactgcttggttagttggaagaaaaataatttcattggaaaacagtaacagtgca

SEQ ID NO: 102981 - DNA, 70 bp, Homo sapiens
gcttggttagttggaagaaaaataatttcattggaaaacagtaacagtgcattgacgtttttcttctaca

SEQ ID NO: 102982 - DNA, 67 bp, Homo sapiens
agaaaaataatttcattggaaaacagtaacagtgcattgacgtttttcttctacaactttaggtaaa

SEQ ID NO: 102983 - DNA, 69 bp, Homo sapiens
tttcattggaaaacagtaacagtgcattgacgtttttcttctacaactttaggtaaagaactataggtg

SEQ ID NO: 102984 - DNA, 70 bp, Homo sapiens
gaaaacagtaacagtgcattgacgtttttcttctacaactttaggtaaagaactataggtggtctcagaa

SEQ ID NO: 102985 - DNA, 71 bp, Homo sapiens
gtaacagtgcattgacgtttttcttctacaactttaggtaaagaactataggtggtctcagaagataacta

SEQ ID NO: 102986 - DNA, 70 bp, Homo sapiens
agtgcattgacgtttttcttctacaactttaggtaaagaactataggtggtctcagaagataactaaatc

SEQ ID NO: 102987 - DNA, 67 bp, Homo sapiens
ttgacgtttttcttctacaactttaggtaaagaactataggtggtctcagaagataactaaatcttt

SEQ ID NO: 102988 - DNA, 66 bp, Homo sapiens
cgtttttcttctacaactttaggtaaagaactataggtggtctcagaagataactaaatcttttac

SEQ ID NO: 102989 - DNA, 67 bp, Homo sapiens
cttctacaactttaggtaaagaactataggtggtctcagaagataactaaatcttttacctttttgc

SEQ ID NO: 102990 - DNA, 67 bp, Homo sapiens
aggtaaagaactataggtggtctcagaagataactaaatcttttacctttttgctctttcaaaagcc

SEQ ID NO: 102991 - DNA, 67 bp, Homo sapiens
aaagaactataggtggtctcagaagataactaaatcttttacctttttgctctttcaaaagcctccc

SEQ ID NO: 102992 - DNA, 68 bp, Homo sapiens
aagaactataggtggtctcagaagataactaaatcttttacctttttgctctttcaaaagcctcccca

SEQ ID NO: 102993 - DNA, 70 bp, Homo sapiens
ggtggtctcagaagataactaaatcttttacctttttgctctttcaaaagcctccccaaaatatgcataa

SEQ ID NO: 102994 - DNA, 70 bp, Homo sapiens
cagaagataactaaatcttttacctttttgctctttcaaaagcctccccaaaatatgcataaagatggga

SEQ ID NO: 102995 - DNA, 71 bp, Homo sapiens
ctaaatcttttacctttttgctctttcaaaagcctccccaaaatatgcataaagatgggattagaatctca

SEQ ID NO: 102996 - DNA, 72 bp, Homo sapiens
cctttttgctctttcaaaagcctccccaaaatatgcataaagatgggattagaatctcaacaattctcttaa

SEQ ID NO: 102997 - DNA, 72 bp, Homo sapiens
gctctttcaaaagcctccccaaaatatgcataaagatgggattagaatctcaacaattctcttaaaattacc

SEQ ID NO: 102998 - DNA, 74 bp, Homo sapiens
cataaagatgggattagaatctcaacaattctcttaaaattaccctttgcgagcaatatatttccaaaatcaca

SEQ ID NO: 102999 - DNA, 72 bp, Homo sapiens
ggattagaatctcaacaattctcttaaaattaccctttgcgagcaatatatttccaaaatcacatttgtaaa

SEQ ID NO: 103000 - DNA, 72 bp, Homo sapiens
caattctcttaaaattaccctttgcgagcaatatatttccaaaatcacatttgtaaaaatgcagtacgtcta

SEQ ID NO: 103001 - DNA, 71 bp, Homo sapiens
tcttaaaattaccctttgcgagcaatatatttccaaaatcacatttgtaaaaatgcagtacgtctaaaaga

SEQ ID NO: 103002 - DNA, 71 bp, Homo sapiens
accctttgcgagcaatatatttccaaaatcacatttgtaaaaatgcagtacgtctaaaagaattatttcta

SEQ ID NO: 103003 - DNA, 70 bp, Homo sapiens
tccaaaatcacatttgtaaaaatgcagtacgtctaaaagaattatttctattttaaatgaccatttacat

SEQ ID NO: 103004 - DNA, 68 bp, Homo sapiens
cacatttgtaaaaatgcagtacgtctaaaagaattatttctattttaaatgaccatttacattttaaa

SEQ ID NO: 103005 - DNA, 75 bp, Homo sapiens
tttacattttaaaaaatagaatgtatcttgctatggtttggaaccaaatagctgcagtttgtattgatgtcacag

SEQ ID NO: 103006 - DNA, 75 bp, Homo sapiens
aaaaaatagaatgtatcttgctatggtttggaaccaaatagctgcagtttgtattgatgtcacagggatggaaaa

SEQ ID NO: 103007 - DNA, 76 bp, Homo sapiens
atagaatgtatcttgctatggtttggaaccaaatagctgcagtttgtattgatgtcacagggatggaaaacaattt

SEQ ID NO: 103008 - DNA, 76 bp, Homo sapiens
ctatggtttggaaccaaatagctgcagtttgtattgatgtcacagggatggaaaacaattttgatgaagagtaaca

SEQ ID NO: 103009 - DNA, 80 bp, Homo sapiens
tttgtattgatgtcacagggatggaaaacaattttgatgaagagtaacatgtatgtacaaatcacctgccatacacacta

SEQ ID NO: 103010 - DNA, 79 bp, Homo sapiens
tcacagggatggaaaacaattttgatgaagagtaacatgtatgtacaaatcacctgccatacacactatccagttttga

SEQ ID NO: 103011 - DNA, 77 bp, Homo sapiens
gaaaacaattttgatgaagagtaacatgtatgtacaaatcacctgccatacacactatccagttttgaacattggaa

SEQ ID NO: 103012 - DNA, 77 bp, Homo sapiens
caattttgatgaagagtaacatgtatgtacaaatcacctgccatacacactatccagttttgaacattggaatttaa

SEQ ID NO: 103013 - DNA, 75 bp, Homo sapiens
gaagagtaacatgtatgtacaaatcacctgccatacacactatccagttttgaacattggaatttaattaaacat

SEQ ID NO: 103014 - DNA, 71 bp, Homo sapiens
cacctgccatacacactatccagttttgaacattggaatttaattaaacatttttttcttctgaagtggct

SEQ ID NO: 103015 - DNA, 71 bp, Homo sapiens
ccatacacactatccagttttgaacattggaatttaattaaacatttttttcttctgaagtggctttgaga

SEQ ID NO: 103016 - DNA, 69 bp, Homo sapiens
tccagttttgaacattggaatttaattaaacatttttttcttctgaagtggctttgagattacttcact

SEQ ID NO: 103017 - DNA, 70 bp, Homo sapiens
tgaacattggaatttaattaaacatttttttcttctgaagtggctttgagattacttcacttttcaaatc

SEQ ID NO: 103018 - DNA, 70 bp, Homo sapiens
aattaaacatttttttcttctgaagtggctttgagattacttcacttttcaaatctaattactatgagag

SEQ ID NO: 103019 - DNA, 71 bp, Homo sapiens
ttttttcttctgaagtggctttgagattacttcacttttcaaatctaattactatgagaggggggaggaga

SEQ ID NO: 103020 - DNA, 72 bp, Homo sapiens
tgaagtggctttgagattacttcacttttcaaatctaattactatgagaggggggaggagagcccttagttc

SEQ ID NO: 103021 - DNA, 71 bp, Homo sapiens
tttgagattacttcacttttcaaatctaattactatgagaggggggaggagagcccttagttcttccatta

SEQ ID NO: 103022 - DNA, 70 bp, Homo sapiens
ttacttcacttttcaaatctaattactatgagaggggggaggagagcccttagttcttccattacatcct

SEQ ID NO: 103023 - DNA, 73 bp, Homo sapiens
tttcaaatctaattactatgagaggggggaggagagcccttagttcttccattacatccttcctccatctgaa

SEQ ID NO: 103024 - DNA, 79 bp, Homo sapiens
attacatccttcctccatctgaatgtttctgtgggatgctatggttaatgtgtgatgatttcactttcacttcataaac

SEQ ID NO: 103025 - DNA, 78 bp, Homo sapiens
atgtttctgtgggatgctatggttaatgtgtgatgatttcactttcacttcataaacccattgtgtacctcacaagta

SEQ ID NO: 103026 - DNA, 81 bp, Homo sapiens
gatgctatggttaatgtgtgatgatttcactttcacttcataaacccattgtgtacctcacaagtagcaagctgaggacat

SEQ ID NO: 103027 - DNA, 77 bp, Homo sapiens
ttaatgtgtgatgatttcactttcacttcataaacccattgtgtacctcacaagtagcaagctgaggacattttaaa

SEQ ID NO: 103028 - DNA, 76 bp, Homo sapiens
gtgtgatgatttcactttcacttcataaacccattgtgtacctcacaagtagcaagctgaggacattttaaaatta

SEQ ID NO: 103029 - DNA, 69 bp, Homo sapiens
cttcataaacccattgtgtacctcacaagtagcaagctgaggacattttaaaattaatctttttaaaat

SEQ ID NO: 103030 - DNA, 70 bp, Homo sapiens
ccattgtgtacctcacaagtagcaagctgaggacattttaaaattaatctttttaaaatttaggaatgct

SEQ ID NO: 103031 - DNA, 69 bp, Homo sapiens
gcaagctgaggacattttaaaattaatctttttaaaatttaggaatgcttagtaaacattttactctca

SEQ ID NO: 103032 - DNA, 65 bp, Homo sapiens
cattttaaaattaatctttttaaaatttaggaatgcttagtaaacattttactctcataaaaatc

SEQ ID NO: 103033 - DNA, 70 bp, Homo sapiens
aatctttttaaaatttaggaatgcttagtaaacattttactctcataaaaatcttgcattaccactgcta

SEQ ID NO: 103034 - DNA, 72 bp, Homo sapiens
aaatttaggaatgcttagtaaacattttactctcataaaaatcttgcattaccactgctataacacaggtaa

SEQ ID NO: 103035 - DNA, 75 bp, Homo sapiens
gtaaacattttactctcataaaaatcttgcattaccactgctataacacaggtaataagctgggctgtgagggaa

SEQ ID NO: 103036 - DNA, 78 bp, Homo sapiens
tctcataaaaatcttgcattaccactgctataacacaggtaataagctgggctgtgagggaagccaagctctgttttg

SEQ ID NO: 103037 - DNA, 75 bp, Homo sapiens
taaaaatcttgcattaccactgctataacacaggtaataagctgggctgtgagggaagccaagctctgttttgtt

SEQ ID NO: 103038 - DNA, 73 bp, Homo sapiens
attaccactgctataacacaggtaataagctgggctgtgagggaagccaagctctgttttgtttttagagagt

SEQ ID NO: 103039 - DNA, 73 bp, Homo sapiens
aggtaataagctgggctgtgagggaagccaagctctgttttgtttttagagagttgtatagaggcatttaata

SEQ ID NO: 103040 - DNA, 79 bp, Homo sapiens
gctgtgagggaagccaagctctgttttgtttttagagagttgtatagaggcatttaatagcatcagaatgcacctatgg

SEQ ID NO: 103041 - DNA, 76 bp, Homo sapiens
aagccaagctctgttttgtttttagagagttgtatagaggcatttaatagcatcagaatgcacctatggtaaacgc

SEQ ID NO: 103042 - DNA, 77 bp, Homo sapiens
ctgttttgtttttagagagttgtatagaggcatttaatagcatcagaatgcacctatggtaaacgctgtagaactga

SEQ ID NO: 103043 - DNA, 79 bp, Homo sapiens
tttagagagttgtatagaggcatttaatagcatcagaatgcacctatggtaaacgctgtagaactgagggtatcattta

SEQ ID NO: 103044 - DNA, 77 bp, Homo sapiens
agttgtatagaggcatttaatagcatcagaatgcacctatggtaaacgctgtagaactgagggtatcatttaagctt

SEQ ID NO: 103045 - DNA, 77 bp, Homo sapiens
catttaatagcatcagaatgcacctatggtaaacgctgtagaactgagggtatcatttaagctttcattgaaatatt

SEQ ID NO: 103046 - DNA, 77 bp, Homo sapiens
aatagcatcagaatgcacctatggtaaacgctgtagaactgagggtatcatttaagctttcattgaaatattttata

SEQ ID NO: 103047 - DNA, 75 bp, Homo sapiens
gaatgcacctatggtaaacgctgtagaactgagggtatcatttaagctttcattgaaatattttatatggtataa

SEQ ID NO: 103048 - DNA, 73 bp, Homo sapiens
atggtaaacgctgtagaactgagggtatcatttaagctttcattgaaatattttatatggtataacatttaca

SEQ ID NO: 103049 - DNA, 76 bp, Homo sapiens
tgtagaactgagggtatcatttaagctttcattgaaatattttatatggtataacatttacaatatggagaactgc

SEQ ID NO: 103050 - DNA, 72 bp, Homo sapiens
gggtatcatttaagctttcattgaaatattttatatggtataacatttacaatatggagaactgcttttaag

SEQ ID NO: 103051 - DNA, 77 bp, Homo sapiens
gctttcattgaaatattttatatggtataacatttacaatatggagaactgcttttaagtatattggaatcagcaga

SEQ ID NO: 103052 - DNA, 75 bp, Homo sapiens
gaaatattttatatggtataacatttacaatatggagaactgcttttaagtatattggaatcagcagaaacagcc

SEQ ID NO: 103053 - DNA, 75 bp, Homo sapiens
tatggtataacatttacaatatggagaactgcttttaagtatattggaatcagcagaaacagccttaattatttg

SEQ ID NO: 103054 - DNA, 72 bp, Homo sapiens
aacatttacaatatggagaactgcttttaagtatattggaatcagcagaaacagccttaattatttggttaa

SEQ ID NO: 103055 - DNA, 75 bp, Homo sapiens
caatatggagaactgcttttaagtatattggaatcagcagaaacagccttaattatttggttaaattatatcaca

SEQ ID NO: 103056 - DNA, 74 bp, Homo sapiens
gcttttaagtatattggaatcagcagaaacagccttaattatttggttaaattatatcacaagttatacataga

SEQ ID NO: 103057 - DNA, 77 bp, Homo sapiens
agtatattggaatcagcagaaacagccttaattatttggttaaattatatcacaagttatacatagagatacataga

SEQ ID NO: 103058 - DNA, 76 bp, Homo sapiens
ggaatcagcagaaacagccttaattatttggttaaattatatcacaagttatacatagagatacatagatataaaa

SEQ ID NO: 103059 - DNA, 79 bp, Homo sapiens
atttggttaaattatatcacaagttatacatagagatacatagatataaaatcatatacacatctatgaaggtgtgtac

SEQ ID NO: 103060 - DNA, 79 bp, Homo sapiens
gttaaattatatcacaagttatacatagagatacatagatataaaatcatatacacatctatgaaggtgtgtactttat

SEQ ID NO: 103061 - DNA, 78 bp, Homo sapiens
atcacaagttatacatagagatacatagatataaaatcatatacacatctatgaaggtgtgtactttatttaaaaata

SEQ ID NO: 103062 - DNA, 77 bp, Homo sapiens
tacatagagatacatagatataaaatcatatacacatctatgaaggtgtgtactttatttaaaaatataacttggaa

SEQ ID NO: 103063 - DNA, 74 bp, Homo sapiens
catagatataaaatcatatacacatctatgaaggtgtgtactttatttaaaaatataacttggaatttaacata

SEQ ID NO: 103064 - DNA, 71 bp, Homo sapiens
atcatatacacatctatgaaggtgtgtactttatttaaaaatataacttggaatttaacataccgtggacg

SEQ ID NO: 103065 - DNA, 71 bp, Homo sapiens
cacatctatgaaggtgtgtactttatttaaaaatataacttggaatttaacataccgtggacgtctctaga

SEQ ID NO: 103066 - DNA, 67 bp, Homo sapiens
gaaggtgtgtactttatttaaaaatataacttggaatttaacataccgtggacgtctctagaaggat

SEQ ID NO: 103067 - DNA, 71 bp, Homo sapiens
ttatttaaaaatataacttggaatttaacataccgtggacgtctctagaaggattcattccaagtatgcat

SEQ ID NO: 103068 - DNA, 75 bp, Homo sapiens
atataacttggaatttaacataccgtggacgtctctagaaggattcattccaagtatgcattctgaaataacaga

SEQ ID NO: 103069 - DNA, 73 bp, Homo sapiens
acttggaatttaacataccgtggacgtctctagaaggattcattccaagtatgcattctgaaataacagaaag

SEQ ID NO: 103070 - DNA, 74 bp, Homo sapiens
taacataccgtggacgtctctagaaggattcattccaagtatgcattctgaaataacagaaagtaggaaaataa

SEQ ID NO: 103071 - DNA, 75 bp, Homo sapiens
tggacgtctctagaaggattcattccaagtatgcattctgaaataacagaaagtaggaaaataaaagtaatgcaa

SEQ ID NO: 103072 - DNA, 72 bp, Homo sapiens
tagaaggattcattccaagtatgcattctgaaataacagaaagtaggaaaataaaagtaatgcaagtttaaa

SEQ ID NO: 103073 - DNA, 69 bp, Homo sapiens
cattccaagtatgcattctgaaataacagaaagtaggaaaataaaagtaatgcaagtttaaaaattaac

SEQ ID NO: 103074 - DNA, 66 bp, Homo sapiens
atgcattctgaaataacagaaagtaggaaaataaaagtaatgcaagtttaaaaattaactttcccc

SEQ ID NO: 103075 - DNA, 61 bp, Homo sapiens
taacagaaagtaggaaaataaaagtaatgcaagtttaaaaattaactttcccccgactttt

SEQ ID NO: 103076 - DNA, 58 bp, Homo sapiens
aagtaggaaaataaaagtaatgcaagtttaaaaattaactttcccccgactttttttt

SEQ ID NO: 103077 - DNA, 72 bp, Homo sapiens
tttttttgctagctcatttcttcttacactttttagcactggagatttttatagctttgacacaaaaatgac

SEQ ID NO: 103078 - DNA, 72 bp, Homo sapiens
cttcttacactttttagcactggagatttttatagctttgacacaaaaatgacttgaaatagtaaatcacca

SEQ ID NO: 103079 - DNA, 72 bp, Homo sapiens
atagctttgacacaaaaatgacttgaaatagtaaatcaccaaataagaaataaactgttccttatgcacgtg

SEQ ID NO: 103080 - DNA, 69 bp, Homo sapiens
gacttgaaatagtaaatcaccaaataagaaataaactgttccttatgcacgtggttttaggtaccttca

SEQ ID NO: 103081 - DNA, 68 bp, Homo sapiens
gtaaatcaccaaataagaaataaactgttccttatgcacgtggttttaggtaccttcaaccaatgttc

SEQ ID NO: 103082 - DNA, 68 bp, Homo sapiens
aaataagaaataaactgttccttatgcacgtggttttaggtaccttcaaccaatgttctccttcacta

SEQ ID NO: 103083 - DNA, 72 bp, Homo sapiens
taaactgttccttatgcacgtggttttaggtaccttcaaccaatgttctccttcactagctaatactgaata

SEQ ID NO: 103084 - DNA, 76 bp, Homo sapiens
tgttccttatgcacgtggttttaggtaccttcaaccaatgttctccttcactagctaatactgaatatctgtcata

SEQ ID NO: 103085 - DNA, 74 bp, Homo sapiens
tggttttaggtaccttcaaccaatgttctccttcactagctaatactgaatatctgtcatagaatcacctcttt

SEQ ID NO: 103086 - DNA, 76 bp, Homo sapiens
ttaggtaccttcaaccaatgttctccttcactagctaatactgaatatctgtcatagaatcacctcttttaagctc

SEQ ID NO: 103087 - DNA, 77 bp, Homo sapiens
ccaatgttctccttcactagctaatactgaatatctgtcatagaatcacctcttttaagctccgtgtgtgattaaaa

SEQ ID NO: 103088 - DNA, 78 bp, Homo sapiens
ttctccttcactagctaatactgaatatctgtcatagaatcacctcttttaagctccgtgtgtgattaaaatgtgatt

SEQ ID NO: 103089 - DNA, 78 bp, Homo sapiens
ctagctaatactgaatatctgtcatagaatcacctcttttaagctccgtgtgtgattaaaatgtgatttatttaatga

SEQ ID NO: 103090 - DNA, 73 bp, Homo sapiens
gtcatagaatcacctcttttaagctccgtgtgtgattaaaatgtgatttatttaatgaagatttaaaatatat

SEQ ID NO: 103091 - DNA, 70 bp, Homo sapiens
cacctcttttaagctccgtgtgtgattaaaatgtgatttatttaatgaagatttaaaatatatttggaag

SEQ ID NO: 103092 - DNA, 68 bp, Homo sapiens
gtgatttatttaatgaagatttaaaatatatttggaaggtgtaggaacattagaattcaagggaaaat

SEQ ID NO: 103093 - DNA, 66 bp, Homo sapiens
tgaagatttaaaatatatttggaaggtgtaggaacattagaattcaagggaaaattaaaaccaaac

SEQ ID NO: 103094 - DNA, 63 bp, Homo sapiens
ggaaggtgtaggaacattagaattcaagggaaaattaaaaccaaaccctaacttaacgcaaaa

SEQ ID NO: 103095 - DNA, 63 bp, Homo sapiens
gtgtaggaacattagaattcaagggaaaattaaaaccaaaccctaacttaacgcaaaaacatt

SEQ ID NO: 103096 - DNA, 65 bp, Homo sapiens
gaattcaagggaaaattaaaaccaaaccctaacttaacgcaaaaacatttatgatcatttacttc

SEQ ID NO: 103097 - DNA, 68 bp, Homo sapiens
gaaaattaaaaccaaaccctaacttaacgcaaaaacatttatgatcatttacttccaatgataggaca

SEQ ID NO: 103098 - DNA, 69 bp, Homo sapiens
accaaaccctaacttaacgcaaaaacatttatgatcatttacttccaatgataggacattttagaaaca

SEQ ID NO: 103099 - DNA, 72 bp, Homo sapiens
cgcaaaaacatttatgatcatttacttccaatgataggacattttagaaacattttcccctgcttactctcc

SEQ ID NO: 103100 - DNA, 71 bp, Homo sapiens
atttatgatcatttacttccaatgataggacattttagaaacattttcccctgcttactctccttcccttc

SEQ ID NO: 103101 - DNA, 71 bp, Homo sapiens
atttacttccaatgataggacattttagaaacattttcccctgcttactctccttcccttctctctgctag

SEQ ID NO: 103102 - DNA, 71 bp, Homo sapiens
ttagaaacattttcccctgcttactctccttcccttctctctgctaggcaggtaaattatttacatcgaaa

SEQ ID NO: 103103 - DNA, 74 bp, Homo sapiens
tactctccttcccttctctctgctaggcaggtaaattatttacatcgaaacctctcacaagttctaatagatta

SEQ ID NO: 103104 - DNA, 74 bp, Homo sapiens
cccttctctctgctaggcaggtaaattatttacatcgaaacctctcacaagttctaatagattatatcaattat

SEQ ID NO: 103105 - DNA, 76 bp, Homo sapiens
ctctctgctaggcaggtaaattatttacatcgaaacctctcacaagttctaatagattatatcaattattattaga

SEQ ID NO: 103106 - DNA, 72 bp, Homo sapiens
ggcaggtaaattatttacatcgaaacctctcacaagttctaatagattatatcaattattattagaaataat

SEQ ID NO: 103107 - DNA, 76 bp, Homo sapiens
tacatcgaaacctctcacaagttctaatagattatatcaattattattagaaataattgttacatgataattccca

SEQ ID NO: 103108 - DNA, 77 bp, Homo sapiens
cctctcacaagttctaatagattatatcaattattattagaaataattgttacatgataattcccaaatatggatca

SEQ ID NO: 103109 - DNA, 76 bp, Homo sapiens
gttctaatagattatatcaattattattagaaataattgttacatgataattcccaaatatggatcacttacagta

SEQ ID NO: 103110 - DNA, 77 bp, Homo sapiens
gattatatcaattattattagaaataattgttacatgataattcccaaatatggatcacttacagtatacatttaca

SEQ ID NO: 103111 - DNA, 74 bp, Homo sapiens
ttattattagaaataattgttacatgataattcccaaatatggatcacttacagtatacatttacaactatagg

SEQ ID NO: 103112 - DNA, 73 bp, Homo sapiens
gaaataattgttacatgataattcccaaatatggatcacttacagtatacatttacaactataggtaaaccca

SEQ ID NO: 103113 - DNA, 75 bp, Homo sapiens
tacatgataattcccaaatatggatcacttacagtatacatttacaactataggtaaacccattaagcaaagtca

SEQ ID NO: 103114 - DNA, 75 bp, Homo sapiens
ttcccaaatatggatcacttacagtatacatttacaactataggtaaacccattaagcaaagtcacatgaagctc

SEQ ID NO: 103115 - DNA, 74 bp, Homo sapiens
atatggatcacttacagtatacatttacaactataggtaaacccattaagcaaagtcacatgaagctctttttc

SEQ ID NO: 103116 - DNA, 71 bp, Homo sapiens
cacttacagtatacatttacaactataggtaaacccattaagcaaagtcacatgaagctctttttctttcc

SEQ ID NO: 103117 - DNA, 75 bp, Homo sapiens
tataggtaaacccattaagcaaagtcacatgaagctctttttctttcctttgaatatctacatataatgttgtga

SEQ ID NO: 103118 - DNA, 74 bp, Homo sapiens
aaacccattaagcaaagtcacatgaagctctttttctttcctttgaatatctacatataatgttgtgaatttga

SEQ ID NO: 103119 - DNA, 78 bp, Homo sapiens
gcaaagtcacatgaagctctttttctttcctttgaatatctacatataatgttgtgaatttgaaattactctatcagc

SEQ ID NO: 103120 - DNA, 77 bp, Homo sapiens
catgaagctctttttctttcctttgaatatctacatataatgttgtgaatttgaaattactctatcagccttgtata

SEQ ID NO: 103121 - DNA, 79 bp, Homo sapiens
ctttcctttgaatatctacatataatgttgtgaatttgaaattactctatcagccttgtatattgataacagcactgag

SEQ ID NO: 103122 - DNA, 82 bp, Homo sapiens
gaatatctacatataatgttgtgaatttgaaattactctatcagccttgtatattgataacagcactgagtcacaaagagga

SEQ ID NO: 103123 - DNA, 80 bp, Homo sapiens
catataatgttgtgaatttgaaattactctatcagccttgtatattgataacagcactgagtcacaaagaggaaatactg

SEQ ID NO: 103124 - DNA, 77 bp, Homo sapiens
gttgtgaatttgaaattactctatcagccttgtatattgataacagcactgagtcacaaagaggaaatactgttctt

SEQ ID NO: 103125 - DNA, 77 bp, Homo sapiens
ttgaaattactctatcagccttgtatattgataacagcactgagtcacaaagaggaaatactgttctttaaagacag

SEQ ID NO: 103126 - DNA, 79 bp, Homo sapiens
tctatcagccttgtatattgataacagcactgagtcacaaagaggaaatactgttctttaaagacaggatttgagcatt

SEQ ID NO: 103127 - DNA, 81 bp, Homo sapiens
ttgtatattgataacagcactgagtcacaaagaggaaatactgttctttaaagacaggatttgagcatttcaaatgctgca

SEQ ID NO: 103128 - DNA, 75 bp, Homo sapiens
agtcacaaagaggaaatactgttctttaaagacaggatttgagcatttcaaatgctgcagacctaaagctttcaa

SEQ ID NO: 103129 - DNA, 77 bp, Homo sapiens
aaatactgttctttaaagacaggatttgagcatttcaaatgctgcagacctaaagctttcaactccatgccacaata

SEQ ID NO: 103130 - DNA, 78 bp, Homo sapiens
tgttctttaaagacaggatttgagcatttcaaatgctgcagacctaaagctttcaactccatgccacaatatttagta

SEQ ID NO: 103131 - DNA, 78 bp, Homo sapiens
agacaggatttgagcatttcaaatgctgcagacctaaagctttcaactccatgccacaatatttagtatgctgttttt

SEQ ID NO: 103132 - DNA, 75 bp, Homo sapiens
ttgagcatttcaaatgctgcagacctaaagctttcaactccatgccacaatatttagtatgctgttttttttttt

SEQ ID NO: 103133 - DNA, 68 bp, Homo sapiens
ttaaaaaaaaacctttaaaataagaggagacaattacttcagatttctagatgctgtttaaataggca

SEQ ID NO: 103134 - DNA, 70 bp, Homo sapiens
aacctttaaaataagaggagacaattacttcagatttctagatgctgtttaaataggcaggaaaacaaga

SEQ ID NO: 103135 - DNA, 75 bp, Homo sapiens
taagaggagacaattacttcagatttctagatgctgtttaaataggcaggaaaacaagatttgcagcttctttag

SEQ ID NO: 103136 - DNA, 75 bp, Homo sapiens
ggagacaattacttcagatttctagatgctgtttaaataggcaggaaaacaagatttgcagcttctttagtctta

SEQ ID NO: 103137 - DNA, 75 bp, Homo sapiens
cttcagatttctagatgctgtttaaataggcaggaaaacaagatttgcagcttctttagtcttatatttttgcca

SEQ ID NO: 103138 - DNA, 72 bp, Homo sapiens
ctagatgctgtttaaataggcaggaaaacaagatttgcagcttctttagtcttatatttttgccaaagtaaa

SEQ ID NO: 103139 - DNA, 69 bp, Homo sapiens
gcaggaaaacaagatttgcagcttctttagtcttatatttttgccaaagtaaaaggaacaactaaaata

SEQ ID NO: 103140 - DNA, 69 bp, Homo sapiens
ttgcagcttctttagtcttatatttttgccaaagtaaaaggaacaactaaaataagaggttctgaagga

SEQ ID NO: 103141 - DNA, 68 bp, Homo sapiens
gcttctttagtcttatatttttgccaaagtaaaaggaacaactaaaataagaggttctgaaggactgc

SEQ ID NO: 103142 - DNA, 71 bp, Homo sapiens
ttgccaaagtaaaaggaacaactaaaataagaggttctgaaggactgctctatgatgaaatattaaaggaa

SEQ ID NO: 103143 - DNA, 73 bp, Homo sapiens
ggaacaactaaaataagaggttctgaaggactgctctatgatgaaatattaaaggaattaaatatgtatagtc

SEQ ID NO: 103144 - DNA, 77 bp, Homo sapiens
aataagaggttctgaaggactgctctatgatgaaatattaaaggaattaaatatgtatagtctcaaaggagcatcca

SEQ ID NO: 103145 - DNA, 76 bp, Homo sapiens
gaggttctgaaggactgctctatgatgaaatattaaaggaattaaatatgtatagtctcaaaggagcatccaaaaa

SEQ ID NO: 103146 - DNA, 74 bp, Homo sapiens
ggactgctctatgatgaaatattaaaggaattaaatatgtatagtctcaaaggagcatccaaaaaaaaacgaga

SEQ ID NO: 103147 - DNA, 72 bp, Homo sapiens
tgaaatattaaaggaattaaatatgtatagtctcaaaggagcatccaaaaaaaaacgagattgtggttcaca

SEQ ID NO: 103148 - DNA, 71 bp, Homo sapiens
aaggaattaaatatgtatagtctcaaaggagcatccaaaaaaaaacgagattgtggttcacaagtagataa

SEQ ID NO: 103149 - DNA, 75 bp, Homo sapiens
aatatgtatagtctcaaaggagcatccaaaaaaaaacgagattgtggttcacaagtagataaaatgactccatga

SEQ ID NO: 103150 - DNA, 74 bp, Homo sapiens
tatagtctcaaaggagcatccaaaaaaaaacgagattgtggttcacaagtagataaaatgactccatgaagact

SEQ ID NO: 103151 - DNA, 71 bp, Homo sapiens
aaaaacgagattgtggttcacaagtagataaaatgactccatgaagacttttctttttaaagagcaaggca

SEQ ID NO: 103152 - DNA, 75 bp, Homo sapiens
gattgtggttcacaagtagataaaatgactccatgaagacttttctttttaaagagcaaggcagagaactaatca

SEQ ID NO: 103153 - DNA, 77 bp, Homo sapiens
gataaaatgactccatgaagacttttctttttaaagagcaaggcagagaactaatcatttgcactaattgtgaatga

SEQ ID NO: 103154 - DNA, 75 bp, Homo sapiens
ccatgaagacttttctttttaaagagcaaggcagagaactaatcatttgcactaattgtgaatgataaggtaaga

SEQ ID NO: 103155 - DNA, 73 bp, Homo sapiens
tttctttttaaagagcaaggcagagaactaatcatttgcactaattgtgaatgataaggtaagaaataataaa

SEQ ID NO: 103156 - DNA, 79 bp, Homo sapiens
gcagagaactaatcatttgcactaattgtgaatgataaggtaagaaataataaatgtatcctgaagttacgtcagctca

SEQ ID NO: 103157 - DNA, 77 bp, Homo sapiens
tcatttgcactaattgtgaatgataaggtaagaaataataaatgtatcctgaagttacgtcagctcagctttaatag

SEQ ID NO: 103158 - DNA, 75 bp, Homo sapiens
gcactaattgtgaatgataaggtaagaaataataaatgtatcctgaagttacgtcagctcagctttaataggtgt

SEQ ID NO: 103159 - DNA, 73 bp, Homo sapiens
aatgataaggtaagaaataataaatgtatcctgaagttacgtcagctcagctttaataggtgttggggcagtg

SEQ ID NO: 103160 - DNA, 71 bp, Homo sapiens
aggtaagaaataataaatgtatcctgaagttacgtcagctcagctttaataggtgttggggcagtggggtg

SEQ ID NO: 103161 - DNA, 72 bp, Homo sapiens
taataaatgtatcctgaagttacgtcagctcagctttaataggtgttggggcagtggggtgggggtgtggaa

SEQ ID NO: 103162 - DNA, 71 bp, Homo sapiens
tgaagttacgtcagctcagctttaataggtgttggggcagtggggtgggggtgtggaatccacaacggtaa

SEQ ID NO: 103163 - DNA, 72 bp, Homo sapiens
tacgtcagctcagctttaataggtgttggggcagtggggtgggggtgtggaatccacaacggtaagactgac

SEQ ID NO: 103164 - DNA, 72 bp, Homo sapiens
agctttaataggtgttggggcagtggggtgggggtgtggaatccacaacggtaagactgaccagacagcaca

SEQ ID NO: 103165 - DNA, 73 bp, Homo sapiens
tgttggggcagtggggtgggggtgtggaatccacaacggtaagactgaccagacagcacacccagcggaacca

SEQ ID NO: 103166 - DNA, 77 bp, Homo sapiens
tgtggaatccacaacggtaagactgaccagacagcacacccagcggaaccacgcaccctggaaattatgtcttgaga

SEQ ID NO: 103167 - DNA, 74 bp, Homo sapiens
aatccacaacggtaagactgaccagacagcacacccagcggaaccacgcaccctggaaattatgtcttgagacc

SEQ ID NO: 103168 - DNA, 77 bp, Homo sapiens
acagcacacccagcggaaccacgcaccctggaaattatgtcttgagacccagagaagcttttccatgtctgagtcta

SEQ ID NO: 103169 - DNA, 75 bp, Homo sapiens
cagcggaaccacgcaccctggaaattatgtcttgagacccagagaagcttttccatgtctgagtctaagaaattg

SEQ ID NO: 103170 - DNA, 74 bp, Homo sapiens
aaccacgcaccctggaaattatgtcttgagacccagagaagcttttccatgtctgagtctaagaaattggagta

SEQ ID NO: 103171 - DNA, 76 bp, Homo sapiens
gaaattatgtcttgagacccagagaagcttttccatgtctgagtctaagaaattggagtaggagagcaagaaaaca

SEQ ID NO: 103172 - DNA, 76 bp, Homo sapiens
tatgtcttgagacccagagaagcttttccatgtctgagtctaagaaattggagtaggagagcaagaaaacacaagt

SEQ ID NO: 103173 - DNA, 76 bp, Homo sapiens
ttttccatgtctgagtctaagaaattggagtaggagagcaagaaaacacaagttcatctacacacctaatagttca

SEQ ID NO: 103174 - DNA, 79 bp, Homo sapiens
tgtctgagtctaagaaattggagtaggagagcaagaaaacacaagttcatctacacacctaatagttcagcaattctga

SEQ ID NO: 103175 - DNA, 75 bp, Homo sapiens
taagaaattggagtaggagagcaagaaaacacaagttcatctacacacctaatagttcagcaattctgaggaaaa

SEQ ID NO: 103176 - DNA, 75 bp, Homo sapiens
taggagagcaagaaaacacaagttcatctacacacctaatagttcagcaattctgaggaaaatgccaggattttt

SEQ ID NO: 103177 - DNA, 71 bp, Homo sapiens
aaaacacaagttcatctacacacctaatagttcagcaattctgaggaaaatgccaggattttttaaaccca

SEQ ID NO: 103178 - DNA, 71 bp, Homo sapiens
caagttcatctacacacctaatagttcagcaattctgaggaaaatgccaggattttttaaacccaaaaaca

SEQ ID NO: 103179 - DNA, 69 bp, Homo sapiens
tacacacctaatagttcagcaattctgaggaaaatgccaggattttttaaacccaaaaacaagggcaaa

SEQ ID NO: 103180 - DNA, 65 bp, Homo sapiens
ctgaggaaaatgccaggattttttaaacccaaaaacaagggcaaaaatgagtggattttgaaaac

SEQ ID NO: 103181 - DNA, 67 bp, Homo sapiens
tgccaggattttttaaacccaaaaacaagggcaaaaatgagtggattttgaaaactgtgattggtaa

SEQ ID NO: 103182 - DNA, 65 bp, Homo sapiens
ttttaaacccaaaaacaagggcaaaaatgagtggattttgaaaactgtgattggtaactattaaa

SEQ ID NO: 103183 - DNA, 65 bp, Homo sapiens
cccaaaaacaagggcaaaaatgagtggattttgaaaactgtgattggtaactattaaaaactttc

SEQ ID NO: 103184 - DNA, 67 bp, Homo sapiens
gggcaaaaatgagtggattttgaaaactgtgattggtaactattaaaaactttcttagtttgttgtg

SEQ ID NO: 103185 - DNA, 72 bp, Homo sapiens
gtggattttgaaaactgtgattggtaactattaaaaactttcttagtttgttgtgtatcagcagccttgaga

SEQ ID NO: 103186 - DNA, 74 bp, Homo sapiens
ttgaaaactgtgattggtaactattaaaaactttcttagtttgttgtgtatcagcagccttgagaacacagcaa

SEQ ID NO: 103187 - DNA, 71 bp, Homo sapiens
aactattaaaaactttcttagtttgttgtgtatcagcagccttgagaacacagcaagtgtggttaaattgg

SEQ ID NO: 103188 - DNA, 70 bp, Homo sapiens
gtttgttgtgtatcagcagccttgagaacacagcaagtgtggttaaattggggagggggaaggggtaggg

SEQ ID NO: 103189 - DNA, 73 bp, Homo sapiens
tatcagcagccttgagaacacagcaagtgtggttaaattggggagggggaaggggtagggggtgagcaactgc

SEQ ID NO: 103190 - DNA, 70 bp, Homo sapiens
gaacacagcaagtgtggttaaattggggagggggaaggggtagggggtgagcaactgctgcccaggtgaa

SEQ ID NO: 103191 - DNA, 69 bp, Homo sapiens
ggttaaattggggagggggaaggggtagggggtgagcaactgctgcccaggtgaagtagcacctgtgga

SEQ ID NO: 103192 - DNA, 72 bp, Homo sapiens
ggggaaggggtagggggtgagcaactgctgcccaggtgaagtagcacctgtggaggtttgaagtgatttgcc

SEQ ID NO: 103193 - DNA, 76 bp, Homo sapiens
tagggggtgagcaactgctgcccaggtgaagtagcacctgtggaggtttgaagtgatttgcccatgaaactgttaa

SEQ ID NO: 103194 - DNA, 78 bp, Homo sapiens
agcaactgctgcccaggtgaagtagcacctgtggaggtttgaagtgatttgcccatgaaactgttaaagatgccagaa

SEQ ID NO: 103195 - DNA, 73 bp, Homo sapiens
cccaggtgaagtagcacctgtggaggtttgaagtgatttgcccatgaaactgttaaagatgccagaacccaaa

SEQ ID NO: 103196 - DNA, 75 bp, Homo sapiens
aagtagcacctgtggaggtttgaagtgatttgcccatgaaactgttaaagatgccagaacccaaactgcaagaga

SEQ ID NO: 103197 - DNA, 73 bp, Homo sapiens
acctgtggaggtttgaagtgatttgcccatgaaactgttaaagatgccagaacccaaactgcaagagagggga

SEQ ID NO: 103198 - DNA, 73 bp, Homo sapiens
aagtgatttgcccatgaaactgttaaagatgccagaacccaaactgcaagagaggggaggttgcgtgtgttta

SEQ ID NO: 103199 - DNA, 73 bp, Homo sapiens
atttgcccatgaaactgttaaagatgccagaacccaaactgcaagagaggggaggttgcgtgtgtttaagaca

SEQ ID NO: 103200 - DNA, 73 bp, Homo sapiens
aaactgttaaagatgccagaacccaaactgcaagagaggggaggttgcgtgtgtttaagacagtgaacaatga

SEQ ID NO: 103201 - DNA, 77 bp, Homo sapiens
aaactgcaagagaggggaggttgcgtgtgtttaagacagtgaacaatgaatctggtagcccatcctccagtgtgcta

SEQ ID NO: 103202 - DNA, 80 bp, Homo sapiens
aagagaggggaggttgcgtgtgtttaagacagtgaacaatgaatctggtagcccatcctccagtgtgctagcttgcatgc

SEQ ID NO: 103203 - DNA, 84 bp, Homo sapiens
ggaggttgcgtgtgtttaagacagtgaacaatgaatctggtagcccatcctccagtgtgctagcttgcatgctctctctctgtc

SEQ ID NO: 103204 - DNA, 78 bp, Homo sapiens
tgtctctctcttccctacatcccccattgaatgtaattatatgccaggcaatgggtgaagtgcttttatatactttgc

SEQ ID NO: 103205 - DNA, 76 bp, Homo sapiens
ttccctacatcccccattgaatgtaattatatgccaggcaatgggtgaagtgcttttatatactttgcctgattta

SEQ ID NO: 103206 - DNA, 78 bp, Homo sapiens
tacatcccccattgaatgtaattatatgccaggcaatgggtgaagtgcttttatatactttgcctgatttaatcctca

SEQ ID NO: 103207 - DNA, 79 bp, Homo sapiens
attgaatgtaattatatgccaggcaatgggtgaagtgcttttatatactttgcctgatttaatcctcacaagaacatca

SEQ ID NO: 103208 - DNA, 80 bp, Homo sapiens
atgtaattatatgccaggcaatgggtgaagtgcttttatatactttgcctgatttaatcctcacaagaacatcattgcta

SEQ ID NO: 103209 - DNA, 78 bp, Homo sapiens
attatatgccaggcaatgggtgaagtgcttttatatactttgcctgatttaatcctcacaagaacatcattgctaccc

SEQ ID NO: 103210 - DNA, 74 bp, Homo sapiens
aggcaatgggtgaagtgcttttatatactttgcctgatttaatcctcacaagaacatcattgctacccccattt

SEQ ID NO: 103211 - DNA, 74 bp, Homo sapiens
aatgggtgaagtgcttttatatactttgcctgatttaatcctcacaagaacatcattgctacccccattttaca

SEQ ID NO: 103212 - DNA, 75 bp, Homo sapiens
atgggtgaagtgcttttatatactttgcctgatttaatcctcacaagaacatcattgctacccccattttacaga

SEQ ID NO: 103213 - DNA, 72 bp, Homo sapiens
attttacagataaggaacctcacccttggagagttcaggtaacttgcccaaattcacatcactcttgaccta

SEQ ID NO: 103214 - DNA, 73 bp, Homo sapiens
agataaggaacctcacccttggagagttcaggtaacttgcccaaattcacatcactcttgacctacatagaaa

SEQ ID NO: 103215 - DNA, 75 bp, Homo sapiens
aacctcacccttggagagttcaggtaacttgcccaaattcacatcactcttgacctacatagaaacacacacaca

SEQ ID NO: 103216 - DNA, 83 bp, Homo sapiens
acacacacatattcatatctacatataggtccacatgcatggtaagctatgttccttttggatcatgattatttttgtggcta

SEQ ID NO: 103217 - DNA, 81 bp, Homo sapiens
atattcatatctacatataggtccacatgcatggtaagctatgttccttttggatcatgattatttttgtggctatccttg

SEQ ID NO: 103218 - DNA, 79 bp, Homo sapiens
tctacatataggtccacatgcatggtaagctatgttccttttggatcatgattatttttgtggctatccttggtagagt

SEQ ID NO: 103219 - DNA, 76 bp, Homo sapiens
gtccacatgcatggtaagctatgttccttttggatcatgattatttttgtggctatccttggtagagttctaaaaa

SEQ ID NO: 103220 - DNA, 73 bp, Homo sapiens
gcatggtaagctatgttccttttggatcatgattatttttgtggctatccttggtagagttctaaaaaattaa

SEQ ID NO: 103221 - DNA, 73 bp, Homo sapiens
gttccttttggatcatgattatttttgtggctatccttggtagagttctaaaaaattaactctgatctcatct

SEQ ID NO: 103222 - DNA, 74 bp, Homo sapiens
tttggatcatgattatttttgtggctatccttggtagagttctaaaaaattaactctgatctcatctttcactt

SEQ ID NO: 103223 - DNA, 71 bp, Homo sapiens
gattatttttgtggctatccttggtagagttctaaaaaattaactctgatctcatctttcacttttatccc

SEQ ID NO: 103224 - DNA, 69 bp, Homo sapiens
ctatccttggtagagttctaaaaaattaactctgatctcatctttcacttttatcccccccgtctcagg

SEQ ID NO: 103225 - DNA, 72 bp, Homo sapiens
tagagttctaaaaaattaactctgatctcatctttcacttttatcccccccgtctcagggtctagatcagaa

SEQ ID NO: 103226 - DNA, 71 bp, Homo sapiens
aaaaattaactctgatctcatctttcacttttatcccccccgtctcagggtctagatcagaaaatatcttg

SEQ ID NO: 103227 - DNA, 73 bp, Homo sapiens
taactctgatctcatctttcacttttatcccccccgtctcagggtctagatcagaaaatatcttggaaattct

SEQ ID NO: 103228 - DNA, 72 bp, Homo sapiens
atctttcacttttatcccccccgtctcagggtctagatcagaaaatatcttggaaattcttcaccatgcaaa

SEQ ID NO: 103229 - DNA, 75 bp, Homo sapiens
tttatcccccccgtctcagggtctagatcagaaaatatcttggaaattcttcaccatgcaaacctcatatcatta

SEQ ID NO: 103230 - DNA, 78 bp, Homo sapiens
ggtctagatcagaaaatatcttggaaattcttcaccatgcaaacctcatatcattaggagtcagattttaatgtcatt

SEQ ID NO: 103231 - DNA, 80 bp, Homo sapiens
aaatatcttggaaattcttcaccatgcaaacctcatatcattaggagtcagattttaatgtcatttctgtcatccacaga

SEQ ID NO: 103232 - DNA, 81 bp, Homo sapiens
tcttggaaattcttcaccatgcaaacctcatatcattaggagtcagattttaatgtcatttctgtcatccacagagtttga

SEQ ID NO: 103233 - DNA, 77 bp, Homo sapiens
acctcatatcattaggagtcagattttaatgtcatttctgtcatccacagagtttgaggagaaagccaaggtccatt

SEQ ID NO: 103234 - DNA, 77 bp, Homo sapiens
attaggagtcagattttaatgtcatttctgtcatccacagagtttgaggagaaagccaaggtccatttggctgagaa

SEQ ID NO: 103235 - DNA, 76 bp, Homo sapiens
gattttaatgtcatttctgtcatccacagagtttgaggagaaagccaaggtccatttggctgagaagcttttatat

SEQ ID NO: 103236 - DNA, 79 bp, Homo sapiens
tcatttctgtcatccacagagtttgaggagaaagccaaggtccatttggctgagaagcttttatattgataataatata

SEQ ID NO: 103237 - DNA, 77 bp, Homo sapiens
tctgtcatccacagagtttgaggagaaagccaaggtccatttggctgagaagcttttatattgataataatataaaa

SEQ ID NO: 103238 - DNA, 72 bp, Homo sapiens
gagtttgaggagaaagccaaggtccatttggctgagaagcttttatattgataataatataaaatggcgttt

SEQ ID NO: 103239 - DNA, 71 bp, Homo sapiens
ggagaaagccaaggtccatttggctgagaagcttttatattgataataatataaaatggcgttttagtctt

SEQ ID NO: 103240 - DNA, 71 bp, Homo sapiens
ggtccatttggctgagaagcttttatattgataataatataaaatggcgttttagtcttttcccacctcca

SEQ ID NO: 103241 - DNA, 70 bp, Homo sapiens
ggctgagaagcttttatattgataataatataaaatggcgttttagtcttttcccacctccactagttta

SEQ ID NO: 103242 - DNA, 66 bp, Homo sapiens
ttagtcttttcccacctccactagtttaaaagggcatctttaggactttcctagatacaaggtatt

SEQ ID NO: 103243 - DNA, 68 bp, Homo sapiens
ttttcccacctccactagtttaaaagggcatctttaggactttcctagatacaaggtatttgattcac

SEQ ID NO: 103244 - DNA, 73 bp, Homo sapiens
tagtttaaaagggcatctttaggactttcctagatacaaggtatttgattcacctgccttcagcattccttga

SEQ ID NO: 103245 - DNA, 78 bp, Homo sapiens
tttcctagatacaaggtatttgattcacctgccttcagcattccttgaatgcttcctctgtcccaggcaaggtgctag

SEQ ID NO: 103246 - DNA, 81 bp, Homo sapiens
aaggtatttgattcacctgccttcagcattccttgaatgcttcctctgtcccaggcaaggtgctaggctcactgatgacaa

SEQ ID NO: 103247 - DNA, 81 bp, Homo sapiens
attcacctgccttcagcattccttgaatgcttcctctgtcccaggcaaggtgctaggctcactgatgacaaacaccaaaca

SEQ ID NO: 103248 - DNA, 82 bp, Homo sapiens
ttcagcattccttgaatgcttcctctgtcccaggcaaggtgctaggctcactgatgacaaacaccaaacagatgagagtaaa

SEQ ID NO: 103249 - DNA, 79 bp, Homo sapiens
ttccttgaatgcttcctctgtcccaggcaaggtgctaggctcactgatgacaaacaccaaacagatgagagtaaagaag

SEQ ID NO: 103250 - DNA, 81 bp, Homo sapiens
ttcctctgtcccaggcaaggtgctaggctcactgatgacaaacaccaaacagatgagagtaaagaagtgtcatggctgttg

SEQ ID NO: 103251 - DNA, 82 bp, Homo sapiens
aggcaaggtgctaggctcactgatgacaaacaccaaacagatgagagtaaagaagtgtcatggctgttggtggacacatgtc

SEQ ID NO: 103252 - DNA, 81 bp, Homo sapiens
taggctcactgatgacaaacaccaaacagatgagagtaaagaagtgtcatggctgttggtggacacatgtccagggtccca

SEQ ID NO: 103253 - DNA, 78 bp, Homo sapiens
actgatgacaaacaccaaacagatgagagtaaagaagtgtcatggctgttggtggacacatgtccagggtcccaggaa

SEQ ID NO: 103254 - DNA, 75 bp, Homo sapiens
atgagagtaaagaagtgtcatggctgttggtggacacatgtccagggtcccaggaactggtgggagggaatataa

SEQ ID NO: 103255 - DNA, 74 bp, Homo sapiens
taaagaagtgtcatggctgttggtggacacatgtccagggtcccaggaactggtgggagggaatataagaggaa

SEQ ID NO: 103256 - DNA, 71 bp, Homo sapiens
ttggtggacacatgtccagggtcccaggaactggtgggagggaatataagaggaagaggggccaacagccc

SEQ ID NO: 103257 - DNA, 72 bp, Homo sapiens
tgggagggaatataagaggaagaggggccaacagcccctggtgggctcaggaaagacttccttcctagcaga

SEQ ID NO: 103258 - DNA, 71 bp, Homo sapiens
aagaggggccaacagcccctggtgggctcaggaaagacttccttcctagcagaggtgatttttgacttgac

SEQ ID NO: 103259 - DNA, 70 bp, Homo sapiens
aacagcccctggtgggctcaggaaagacttccttcctagcagaggtgatttttgacttgacttttggagg

SEQ ID NO: 103260 - DNA, 70 bp, Homo sapiens
tgggctcaggaaagacttccttcctagcagaggtgatttttgacttgacttttggaggttgggtagattt

SEQ ID NO: 103261 - DNA, 67 bp, Homo sapiens
aaagacttccttcctagcagaggtgatttttgacttgacttttggaggttgggtagatttttaggtg

SEQ ID NO: 103262 - DNA, 68 bp, Homo sapiens
ttccttcctagcagaggtgatttttgacttgacttttggaggttgggtagatttttaggtggttcaaa

SEQ ID NO: 103263 - DNA, 68 bp, Homo sapiens
agaggtgatttttgacttgacttttggaggttgggtagatttttaggtggttcaaagagctagaggag

SEQ ID NO: 103264 - DNA, 66 bp, Homo sapiens
ttttgacttgacttttggaggttgggtagatttttaggtggttcaaagagctagaggaggggttta

SEQ ID NO: 103265 - DNA, 65 bp, Homo sapiens
acttttggaggttgggtagatttttaggtggttcaaagagctagaggaggggtttagggaggtga

SEQ ID NO: 103266 - DNA, 64 bp, Homo sapiens
aggttgggtagatttttaggtggttcaaagagctagaggaggggtttagggaggtgacggtggg

SEQ ID NO: 103267 - DNA, 64 bp, Homo sapiens
atttttaggtggttcaaagagctagaggaggggtttagggaggtgacggtggggtggggaaatg

SEQ ID NO: 103268 - DNA, 70 bp, Homo sapiens
ttcaaagagctagaggaggggtttagggaggtgacggtggggtggggaaatggtgctctgggctgaataa

SEQ ID NO: 103269 - DNA, 73 bp, Homo sapiens
tagaggaggggtttagggaggtgacggtggggtggggaaatggtgctctgggctgaataagcatcatgaataa

SEQ ID NO: 103270 - DNA, 74 bp, Homo sapiens
ttagggaggtgacggtggggtggggaaatggtgctctgggctgaataagcatcatgaataagggcgtgagttta

SEQ ID NO: 103271 - DNA, 75 bp, Homo sapiens
aggtgacggtggggtggggaaatggtgctctgggctgaataagcatcatgaataagggcgtgagtttatgaaaca

SEQ ID NO: 103272 - DNA, 81 bp, Homo sapiens
gtggggaaatggtgctctgggctgaataagcatcatgaataagggcgtgagtttatgaaacacatcagtgtgtcagttcca

SEQ ID NO: 103273 - DNA, 81 bp, Homo sapiens
aatggtgctctgggctgaataagcatcatgaataagggcgtgagtttatgaaacacatcagtgtgtcagttccagtacagt

SEQ ID NO: 103274 - DNA, 79 bp, Homo sapiens
ctgaataagcatcatgaataagggcgtgagtttatgaaacacatcagtgtgtcagttccagtacagttggggcataggt

SEQ ID NO: 103275 - DNA, 74 bp, Homo sapiens
aataagggcgtgagtttatgaaacacatcagtgtgtcagttccagtacagttggggcataggtttgagaccagg

SEQ ID NO: 103276 - DNA, 73 bp, Homo sapiens
agtttatgaaacacatcagtgtgtcagttccagtacagttggggcataggtttgagaccaggttggggagtgg

SEQ ID NO: 103277 - DNA, 74 bp, Homo sapiens
tgtcagttccagtacagttggggcataggtttgagaccaggttggggagtgggggagggagtgcagcagttcaa

SEQ ID NO: 103278 - DNA, 73 bp, Homo sapiens
gggcataggtttgagaccaggttggggagtgggggagggagtgcagcagttcaaaaatacatagacgtagata

SEQ ID NO: 103279 - DNA, 74 bp, Homo sapiens
ttgagaccaggttggggagtgggggagggagtgcagcagttcaaaaatacatagacgtagataggtcattggaa

SEQ ID NO: 103280 - DNA, 75 bp, Homo sapiens
ttggggagtgggggagggagtgcagcagttcaaaaatacatagacgtagataggtcattggaagcacaagcaacc

SEQ ID NO: 103281 - DNA, 78 bp, Homo sapiens
ggggagggagtgcagcagttcaaaaatacatagacgtagataggtcattggaagcacaagcaacctgaggaaatgtga

SEQ ID NO: 103282 - DNA, 79 bp, Homo sapiens
agtgcagcagttcaaaaatacatagacgtagataggtcattggaagcacaagcaacctgaggaaatgtgaacttcaaca

SEQ ID NO: 103283 - DNA, 76 bp, Homo sapiens
caaaaatacatagacgtagataggtcattggaagcacaagcaacctgaggaaatgtgaacttcaacatgcgggaaa

SEQ ID NO: 103284 - DNA, 78 bp, Homo sapiens
atacatagacgtagataggtcattggaagcacaagcaacctgaggaaatgtgaacttcaacatgcgggaaaattgatc

SEQ ID NO: 103285 - DNA, 72 bp, Homo sapiens
gaggaaatgtgaacttcaacatgcgggaaaattgatctgtcaaagccaaacagggaaataacaaaattaata

SEQ ID NO: 103286 - DNA, 74 bp, Homo sapiens
tgaacttcaacatgcgggaaaattgatctgtcaaagccaaacagggaaataacaaaattaatatatatattaga

SEQ ID NO: 103287 - DNA, 73 bp, Homo sapiens
gatctgtcaaagccaaacagggaaataacaaaattaatatatatattagaaaaataagtctgtcaacaacagc

SEQ ID NO: 103288 - DNA, 71 bp, Homo sapiens
gccaaacagggaaataacaaaattaatatatatattagaaaaataagtctgtcaacaacagctcggtgagt

SEQ ID NO: 103289 - DNA, 71 bp, Homo sapiens
ggaaataacaaaattaatatatatattagaaaaataagtctgtcaacaacagctcggtgagttggagggag

SEQ ID NO: 103290 - DNA, 76 bp, Homo sapiens
atatattagaaaaataagtctgtcaacaacagctcggtgagttggagggagtagagatgaggagtggggagctata

SEQ ID NO: 103291 - DNA, 77 bp, Homo sapiens
aaaaataagtctgtcaacaacagctcggtgagttggagggagtagagatgaggagtggggagctatagcagttgtca

SEQ ID NO: 103292 - DNA, 78 bp, Homo sapiens
agtctgtcaacaacagctcggtgagttggagggagtagagatgaggagtggggagctatagcagttgtcagacaaggg

SEQ ID NO: 103293 - DNA, 79 bp, Homo sapiens
agttggagggagtagagatgaggagtggggagctatagcagttgtcagacaaggggtcatgaggatctggattaagcaa

SEQ ID NO: 103294 - DNA, 82 bp, Homo sapiens
agtagagatgaggagtggggagctatagcagttgtcagacaaggggtcatgaggatctggattaagcaatggagatggaaga

SEQ ID NO: 103295 - DNA, 78 bp, Homo sapiens
aggagtggggagctatagcagttgtcagacaaggggtcatgaggatctggattaagcaatggagatggaagaggggat

SEQ ID NO: 103296 - DNA, 80 bp, Homo sapiens
agctatagcagttgtcagacaaggggtcatgaggatctggattaagcaatggagatggaagaggggattgaggtgaggga

SEQ ID NO: 103297 - DNA, 74 bp, Homo sapiens
acaaggggtcatgaggatctggattaagcaatggagatggaagaggggattgaggtgagggagggggaggagtc

SEQ ID NO: 103298 - DNA, 77 bp, Homo sapiens
atgaggatctggattaagcaatggagatggaagaggggattgaggtgagggagggggaggagtctccccagcatctg

SEQ ID NO: 103299 - DNA, 73 bp, Homo sapiens
agatggaagaggggattgaggtgagggagggggaggagtctccccagcatctgtcctttaatagtagtagaga

SEQ ID NO: 103300 - DNA, 71 bp, Homo sapiens
aagaggggattgaggtgagggagggggaggagtctccccagcatctgtcctttaatagtagtagagaagac

SEQ ID NO: 103301 - DNA, 73 bp, Homo sapiens
ttgaggtgagggagggggaggagtctccccagcatctgtcctttaatagtagtagagaagaccagaaacagcg

SEQ ID NO: 103302 - DNA, 74 bp, Homo sapiens
gggaggagtctccccagcatctgtcctttaatagtagtagagaagaccagaaacagcgggtttacagagagaca

SEQ ID NO: 103303 - DNA, 78 bp, Homo sapiens
tccccagcatctgtcctttaatagtagtagagaagaccagaaacagcgggtttacagagagacatcgtgatgtctctc

SEQ ID NO: 103304 - DNA, 77 bp, Homo sapiens
atctgtcctttaatagtagtagagaagaccagaaacagcgggtttacagagagacatcgtgatgtctctctgagctt

SEQ ID NO: 103305 - DNA, 79 bp, Homo sapiens
tttaatagtagtagagaagaccagaaacagcgggtttacagagagacatcgtgatgtctctctgagctttggatgccca

SEQ ID NO: 103306 - DNA, 80 bp, Homo sapiens
agtagagaagaccagaaacagcgggtttacagagagacatcgtgatgtctctctgagctttggatgcccagaacagaata

SEQ ID NO: 103307 - DNA, 79 bp, Homo sapiens
ggtttacagagagacatcgtgatgtctctctgagctttggatgcccagaacagaataggaggtgctggtggggaaaaca

SEQ ID NO: 103308 - DNA, 79 bp, Homo sapiens
agagagacatcgtgatgtctctctgagctttggatgcccagaacagaataggaggtgctggtggggaaaacaggaattc

SEQ ID NO: 103309 - DNA, 75 bp, Homo sapiens
tgtctctctgagctttggatgcccagaacagaataggaggtgctggtggggaaaacaggaattctggggagaggt

SEQ ID NO: 103310 - DNA, 73 bp, Homo sapiens
agctttggatgcccagaacagaataggaggtgctggtggggaaaacaggaattctggggagaggtttcatgta

SEQ ID NO: 103311 - DNA, 72 bp, Homo sapiens
atgcccagaacagaataggaggtgctggtggggaaaacaggaattctggggagaggtttcatgtagaaataa

SEQ ID NO: 103312 - DNA, 73 bp, Homo sapiens
aacagaataggaggtgctggtggggaaaacaggaattctggggagaggtttcatgtagaaataatgagctgaa

SEQ ID NO: 103313 - DNA, 76 bp, Homo sapiens
tgctggtggggaaaacaggaattctggggagaggtttcatgtagaaataatgagctgaacatccttagaatatcta

SEQ ID NO: 103314 - DNA, 74 bp, Homo sapiens
gaaaacaggaattctggggagaggtttcatgtagaaataatgagctgaacatccttagaatatctattgtagtt

SEQ ID NO: 103315 - DNA, 78 bp, Homo sapiens
attctggggagaggtttcatgtagaaataatgagctgaacatccttagaatatctattgtagtttcagattgtatcta

SEQ ID NO: 103316 - DNA, 78 bp, Homo sapiens
gagaggtttcatgtagaaataatgagctgaacatccttagaatatctattgtagtttcagattgtatctagggtacaa

SEQ ID NO: 103317 - DNA, 79 bp, Homo sapiens
aatgagctgaacatccttagaatatctattgtagtttcagattgtatctagggtacaatcaaactctatgctagtttca

SEQ ID NO: 103318 - DNA, 79 bp, Homo sapiens
tagaatatctattgtagtttcagattgtatctagggtacaatcaaactctatgctagtttcagagactgtttccagtga

SEQ ID NO: 103319 - DNA, 77 bp, Homo sapiens
attgtagtttcagattgtatctagggtacaatcaaactctatgctagtttcagagactgtttccagtgagaagagac

SEQ ID NO: 103320 - DNA, 77 bp, Homo sapiens
agattgtatctagggtacaatcaaactctatgctagtttcagagactgtttccagtgagaagagaccattctcaggt

SEQ ID NO: 103321 - DNA, 79 bp, Homo sapiens
atcaaactctatgctagtttcagagactgtttccagtgagaagagaccattctcaggttctgggattatcaacattcca

SEQ ID NO: 103322 - DNA, 79 bp, Homo sapiens
tagtttcagagactgtttccagtgagaagagaccattctcaggttctgggattatcaacattccagggtgagcagaaga

SEQ ID NO: 103323 - DNA, 78 bp, Homo sapiens
agtgagaagagaccattctcaggttctgggattatcaacattccagggtgagcagaagagggagcaaccaaggagatg

SEQ ID NO: 103324 - DNA, 78 bp, Homo sapiens
aagagaccattctcaggttctgggattatcaacattccagggtgagcagaagagggagcaaccaaggagatggagcta

SEQ ID NO: 103325 - DNA, 74 bp, Homo sapiens
aggttctgggattatcaacattccagggtgagcagaagagggagcaaccaaggagatggagctaggaaaagaaa

SEQ ID NO: 103326 - DNA, 76 bp, Homo sapiens
attatcaacattccagggtgagcagaagagggagcaaccaaggagatggagctaggaaaagaaagaggagagaata

SEQ ID NO: 103327 - DNA, 74 bp, Homo sapiens
attccagggtgagcagaagagggagcaaccaaggagatggagctaggaaaagaaagaggagagaataagtaata

SEQ ID NO: 103328 - DNA, 72 bp, Homo sapiens
agcagaagagggagcaaccaaggagatggagctaggaaaagaaagaggagagaataagtaataagagtaaag

SEQ ID NO: 103329 - DNA, 69 bp, Homo sapiens
agggagcaaccaaggagatggagctaggaaaagaaagaggagagaataagtaataagagtaaaggaaaa

SEQ ID NO: 103330 - DNA, 70 bp, Homo sapiens
accaaggagatggagctaggaaaagaaagaggagagaataagtaataagagtaaaggaaaatgcagccgg

SEQ ID NO: 103331 - DNA, 65 bp, Homo sapiens
aaaagaaaagaataaaggaaaatgccagctttggaggaaaaccatggcccaaaggccacaaaggg

SEQ ID NO: 103332 - DNA, 68 bp, Homo sapiens
aataaaggaaaatgccagctttggaggaaaaccatggcccaaaggccacaaaggggccatgaaaacaa

SEQ ID NO: 103333 - DNA, 69 bp, Homo sapiens
aaaatgccagctttggaggaaaaccatggcccaaaggccacaaaggggccatgaaaacaaggactgaaa

SEQ ID NO: 103334 - DNA, 68 bp, Homo sapiens
ctttggaggaaaaccatggcccaaaggccacaaaggggccatgaaaacaaggactgaaaatatgaaaa

SEQ ID NO: 103335 - DNA, 69 bp, Homo sapiens
aaaaccatggcccaaaggccacaaaggggccatgaaaacaaggactgaaaatatgaaaatattccactg

SEQ ID NO: 103336 - DNA, 72 bp, Homo sapiens
aaaggccacaaaggggccatgaaaacaaggactgaaaatatgaaaatattccactggatttgtctacagaga

SEQ ID NO: 103337 - DNA, 74 bp, Homo sapiens
aaaggggccatgaaaacaaggactgaaaatatgaaaatattccactggatttgtctacagagagtgccatgtaa

SEQ ID NO: 103338 - DNA, 73 bp, Homo sapiens
aaaacaaggactgaaaatatgaaaatattccactggatttgtctacagagagtgccatgtaacctttgccaaa

SEQ ID NO: 103339 - DNA, 77 bp, Homo sapiens
ctgaaaatatgaaaatattccactggatttgtctacagagagtgccatgtaacctttgccaaaggagcttcagttga

SEQ ID NO: 103340 - DNA, 78 bp, Homo sapiens
aatatgaaaatattccactggatttgtctacagagagtgccatgtaacctttgccaaaggagcttcagttgagtggca

SEQ ID NO: 103341 - DNA, 83 bp, Homo sapiens
atttgtctacagagagtgccatgtaacctttgccaaaggagcttcagttgagtggcagcagcagaaatggagcagagagtaga

SEQ ID NO: 103342 - DNA, 82 bp, Homo sapiens
agagagtgccatgtaacctttgccaaaggagcttcagttgagtggcagcagcagaaatggagcagagagtagaaagcgaatg

SEQ ID NO: 103343 - DNA, 80 bp, Homo sapiens
atgtaacctttgccaaaggagcttcagttgagtggcagcagcagaaatggagcagagagtagaaagcgaatgggatgtag

SEQ ID NO: 103344 - DNA, 81 bp, Homo sapiens
aaaggagcttcagttgagtggcagcagcagaaatggagcagagagtagaaagcgaatgggatgtagggaaggagagaatga

SEQ ID NO: 103345 - DNA, 80 bp, Homo sapiens
ttcagttgagtggcagcagcagaaatggagcagagagtagaaagcgaatgggatgtagggaaggagagaatgaaatttgt

SEQ ID NO: 103346 - DNA, 79 bp, Homo sapiens
agtggcagcagcagaaatggagcagagagtagaaagcgaatgggatgtagggaaggagagaatgaaatttgttggagga

SEQ ID NO: 103347 - DNA, 71 bp, Homo sapiens
tagaaagcgaatgggatgtagggaaggagagaatgaaatttgttggaggagggagggaaactggtgaggta

SEQ ID NO: 103348 - DNA, 71 bp, Homo sapiens
atgtagggaaggagagaatgaaatttgttggaggagggagggaaactggtgaggtagcaggaggagagaaa

SEQ ID NO: 103349 - DNA, 71 bp, Homo sapiens
aggagagaatgaaatttgttggaggagggagggaaactggtgaggtagcaggaggagagaaagaccagtgt

SEQ ID NO: 103350 - DNA, 71 bp, Homo sapiens
aatgaaatttgttggaggagggagggaaactggtgaggtagcaggaggagagaaagaccagtgttgagagg

SEQ ID NO: 103351 - DNA, 74 bp, Homo sapiens
ttggaggagggagggaaactggtgaggtagcaggaggagagaaagaccagtgttgagaggtgtttgtgtatata

SEQ ID NO: 103352 - DNA, 79 bp, Homo sapiens
tgtgcatgtgtgtaagatggaagcaacctgagaaaattagtgtttgccatgtgtattttactgaaaataaaattcatca

SEQ ID NO: 103353 - DNA, 74 bp, Homo sapiens
gtgtgtaagatggaagcaacctgagaaaattagtgtttgccatgtgtattttactgaaaataaaattcatcagt

SEQ ID NO: 103354 - DNA, 73 bp, Homo sapiens
ggaagcaacctgagaaaattagtgtttgccatgtgtattttactgaaaataaaattcatcagtttccacttca

SEQ ID NO: 103355 - DNA, 71 bp, Homo sapiens
gagaaaattagtgtttgccatgtgtattttactgaaaataaaattcatcagtttccacttcaacccaggtc

SEQ ID NO: 103356 - DNA, 71 bp, Homo sapiens
attagtgtttgccatgtgtattttactgaaaataaaattcatcagtttccacttcaacccaggtcttcctc

SEQ ID NO: 103357 - DNA, 69 bp, Homo sapiens
ccatgtgtattttactgaaaataaaattcatcagtttccacttcaacccaggtcttcctcttgttttcc

SEQ ID NO: 103358 - DNA, 69 bp, Homo sapiens
ttttactgaaaataaaattcatcagtttccacttcaacccaggtcttcctcttgttttccccactgcac

SEQ ID NO: 103359 - DNA, 72 bp, Homo sapiens
aataaaattcatcagtttccacttcaacccaggtcttcctcttgttttccccactgcaccatcattctccca

SEQ ID NO: 103360 - DNA, 70 bp, Homo sapiens
agtttccacttcaacccaggtcttcctcttgttttccccactgcaccatcattctcccagtttccagact

SEQ ID NO: 103361 - DNA, 74 bp, Homo sapiens
aacccaggtcttcctcttgttttccccactgcaccatcattctcccagtttccagacttggatccatggattga

SEQ ID NO: 103362 - DNA, 78 bp, Homo sapiens
ttcctcttgttttccccactgcaccatcattctcccagtttccagacttggatccatggattgatctttgccctcatc

SEQ ID NO: 103363 - DNA, 79 bp, Homo sapiens
tgttttccccactgcaccatcattctcccagtttccagacttggatccatggattgatctttgccctcatccagtctgt

SEQ ID NO: 103364 - DNA, 83 bp, Homo sapiens
ccactgcaccatcattctcccagtttccagacttggatccatggattgatctttgccctcatccagtctgttgccaagatctc

SEQ ID NO: 103365 - DNA, 82 bp, Homo sapiens
tgcaccatcattctcccagtttccagacttggatccatggattgatctttgccctcatccagtctgttgccaagatctcttt

SEQ ID NO: 103366 - DNA, 80 bp, Homo sapiens
atcattctcccagtttccagacttggatccatggattgatctttgccctcatccagtctgttgccaagatctctttttga

SEQ ID NO: 103367 - DNA, 78 bp, Homo sapiens
ttctcccagtttccagacttggatccatggattgatctttgccctcatccagtctgttgccaagatctctttttgatt

SEQ ID NO: 103368 - DNA, 77 bp, Homo sapiens
ccagtttccagacttggatccatggattgatctttgccctcatccagtctgttgccaagatctctttttgatttctt

SEQ ID NO: 103369 - DNA, 78 bp, Homo sapiens
agacttggatccatggattgatctttgccctcatccagtctgttgccaagatctctttttgatttctttggttgataa

SEQ ID NO: 103370 - DNA, 78 bp, Homo sapiens
ttggatccatggattgatctttgccctcatccagtctgttgccaagatctctttttgatttctttggttgataacaat

SEQ ID NO: 103371 - DNA, 75 bp, Homo sapiens
ttgatctttgccctcatccagtctgttgccaagatctctttttgatttctttggttgataacaattcggccccca

SEQ ID NO: 103372 - DNA, 71 bp, Homo sapiens
aagatctctttttgatttctttggttgataacaattcggcccccacctttcaattcctattgacatcattc

SEQ ID NO: 103373 - DNA, 71 bp, Homo sapiens
tttgatttctttggttgataacaattcggcccccacctttcaattcctattgacatcattctggttcaagt

SEQ ID NO: 103374 - DNA, 73 bp, Homo sapiens
acaattcggcccccacctttcaattcctattgacatcattctggttcaagttctcattacctctctgaagatt

SEQ ID NO: 103375 - DNA, 77 bp, Homo sapiens
acctttcaattcctattgacatcattctggttcaagttctcattacctctctgaagatttcttacaaagatctctga

SEQ ID NO: 103376 - DNA, 71 bp, Homo sapiens
attacctctctgaagatttcttacaaagatctctgaaaaagggggttcctgctaattgtatacagtacttc

SEQ ID NO: 103377 - DNA, 73 bp, Homo sapiens
tgaagatttcttacaaagatctctgaaaaagggggttcctgctaattgtatacagtacttccagattagtctc

SEQ ID NO: 103378 - DNA, 73 bp, Homo sapiens
atttcttacaaagatctctgaaaaagggggttcctgctaattgtatacagtacttccagattagtctcctgca

SEQ ID NO: 103379 - DNA, 75 bp, Homo sapiens
aagatctctgaaaaagggggttcctgctaattgtatacagtacttccagattagtctcctgcaccatagttctgc

SEQ ID NO: 103380 - DNA, 74 bp, Homo sapiens
aaaaagggggttcctgctaattgtatacagtacttccagattagtctcctgcaccatagttctgctgtgttctc

SEQ ID NO: 103381 - DNA, 84 bp, Homo sapiens
tgctaattgtatacagtacttccagattagtctcctgcaccatagttctgctgtgttctcctgggcatctggaattcaatgcaa

SEQ ID NO: 103382 - DNA, 81 bp, Homo sapiens
tacagtacttccagattagtctcctgcaccatagttctgctgtgttctcctgggcatctggaattcaatgcaaggtcttta

SEQ ID NO: 103383 - DNA, 82 bp, Homo sapiens
ttccagattagtctcctgcaccatagttctgctgtgttctcctgggcatctggaattcaatgcaaggtctttagcacagttc

SEQ ID NO: 103384 - DNA, 84 bp, Homo sapiens
tagtctcctgcaccatagttctgctgtgttctcctgggcatctggaattcaatgcaaggtctttagcacagttctgcaggatta

SEQ ID NO: 103385 - DNA, 81 bp, Homo sapiens
accatagttctgctgtgttctcctgggcatctggaattcaatgcaaggtctttagcacagttctgcaggattaagagctac

SEQ ID NO: 103386 - DNA, 79 bp, Homo sapiens
tgtgttctcctgggcatctggaattcaatgcaaggtctttagcacagttctgcaggattaagagctacccttcctgtcc

SEQ ID NO: 103387 - DNA, 80 bp, Homo sapiens
tgggcatctggaattcaatgcaaggtctttagcacagttctgcaggattaagagctacccttcctgtcctcatcttggag

SEQ ID NO: 103388 - DNA, 77 bp, Homo sapiens
atctggaattcaatgcaaggtctttagcacagttctgcaggattaagagctacccttcctgtcctcatcttggaggg

SEQ ID NO: 103389 - DNA, 76 bp, Homo sapiens
aatgcaaggtctttagcacagttctgcaggattaagagctacccttcctgtcctcatcttggaggggggcagatcc

SEQ ID NO: 103390 - DNA, 82 bp, Homo sapiens
tcaggtgaaattgcctcttaaagaccaatcacatgctttatcatcatttccacatctcctatgtgacttgaattataatata

SEQ ID NO: 103391 - DNA, 79 bp, Homo sapiens
ttgcctcttaaagaccaatcacatgctttatcatcatttccacatctcctatgtgacttgaattataatatattttggg

SEQ ID NO: 103392 - DNA, 79 bp, Homo sapiens
aagaccaatcacatgctttatcatcatttccacatctcctatgtgacttgaattataatatattttgggttatagctat

SEQ ID NO: 103393 - DNA, 78 bp, Homo sapiens
aatcacatgctttatcatcatttccacatctcctatgtgacttgaattataatatattttgggttatagctatttaaa

SEQ ID NO: 103394 - DNA, 76 bp, Homo sapiens
tcatcatttccacatctcctatgtgacttgaattataatatattttgggttatagctatttaaatatattgggtgg

SEQ ID NO: 103395 - DNA, 73 bp, Homo sapiens
ttccacatctcctatgtgacttgaattataatatattttgggttatagctatttaaatatattgggtggtggg

SEQ ID NO: 103396 - DNA, 71 bp, Homo sapiens
cctatgtgacttgaattataatatattttgggttatagctatttaaatatattgggtggtggggcgggtga

SEQ ID NO: 103397 - DNA, 70 bp, Homo sapiens
ttgaattataatatattttgggttatagctatttaaatatattgggtggtggggcgggtgagaggaagtg

SEQ ID NO: 103398 - DNA, 68 bp, Homo sapiens
aatatattttgggttatagctatttaaatatattgggtggtggggcgggtgagaggaagtggtggaac

SEQ ID NO: 103399 - DNA, 67 bp, Homo sapiens
atttaaatatattgggtggtggggcgggtgagaggaagtggtggaaccaccccttccctggcttcag

SEQ ID NO: 103400 - DNA, 68 bp, Homo sapiens
gaagtggtggaaccaccccttccctggcttcaggtttccatgtggaacaacattccttagtgtaaaac

SEQ ID NO: 103401 - DNA, 70 bp, Homo sapiens
ttcaggtttccatgtggaacaacattccttagtgtaaaactcttgacctctttttacaccctcattcctc

SEQ ID NO: 103402 - DNA, 70 bp, Homo sapiens
tgtggaacaacattccttagtgtaaaactcttgacctctttttacaccctcattcctcctccaccataaa

SEQ ID NO: 103403 - DNA, 69 bp, Homo sapiens
aacattccttagtgtaaaactcttgacctctttttacaccctcattcctcctccaccataaaagattga

SEQ ID NO: 103404 - DNA, 69 bp, Homo sapiens
tgtaaaactcttgacctctttttacaccctcattcctcctccaccataaaagattgaattacctagtta

SEQ ID NO: 103405 - DNA, 70 bp, Homo sapiens
ttgacctctttttacaccctcattcctcctccaccataaaagattgaattacctagttagtagcgttgga

SEQ ID NO: 103406 - DNA, 70 bp, Homo sapiens
tttttacaccctcattcctcctccaccataaaagattgaattacctagttagtagcgttggaagcagaaa

SEQ ID NO: 103407 - DNA, 72 bp, Homo sapiens
tcattcctcctccaccataaaagattgaattacctagttagtagcgttggaagcagaaactggttgtagaag

SEQ ID NO: 103408 - DNA, 74 bp, Homo sapiens
tccaccataaaagattgaattacctagttagtagcgttggaagcagaaactggttgtagaaggcagaagcataa

SEQ ID NO: 103409 - DNA, 72 bp, Homo sapiens
aaaagattgaattacctagttagtagcgttggaagcagaaactggttgtagaaggcagaagcataaaatgaa

SEQ ID NO: 103410 - DNA, 71 bp, Homo sapiens
aattacctagttagtagcgttggaagcagaaactggttgtagaaggcagaagcataaaatgaacccctcaa

SEQ ID NO: 103411 - DNA, 71 bp, Homo sapiens
gttagtagcgttggaagcagaaactggttgtagaaggcagaagcataaaatgaacccctcaaactttccac

SEQ ID NO: 103412 - DNA, 69 bp, Homo sapiens
aagcagaaactggttgtagaaggcagaagcataaaatgaacccctcaaactttccaccctaatccctgg

SEQ ID NO: 103413 - DNA, 68 bp, Homo sapiens
aaactggttgtagaaggcagaagcataaaatgaacccctcaaactttccaccctaatccctggggctg

SEQ ID NO: 103414 - DNA, 73 bp, Homo sapiens
taaaatgaacccctcaaactttccaccctaatccctggggctgggaatatgatgagttgtcatgctctggtta

SEQ ID NO: 103415 - DNA, 75 bp, Homo sapiens
ccctcaaactttccaccctaatccctggggctgggaatatgatgagttgtcatgctctggttatgttacatggaa

SEQ ID NO: 103416 - DNA, 73 bp, Homo sapiens
aaactttccaccctaatccctggggctgggaatatgatgagttgtcatgctctggttatgttacatggaaaaa

SEQ ID NO: 103417 - DNA, 73 bp, Homo sapiens
cctaatccctggggctgggaatatgatgagttgtcatgctctggttatgttacatggaaaaaaagagattttt

SEQ ID NO: 103418 - DNA, 76 bp, Homo sapiens
gggctgggaatatgatgagttgtcatgctctggttatgttacatggaaaaaaagagatttttttttgcatatgtaa

SEQ ID NO: 103419 - DNA, 74 bp, Homo sapiens
tgatgagttgtcatgctctggttatgttacatggaaaaaaagagatttttttttgcatatgtaattaaggttac

SEQ ID NO: 103420 - DNA, 69 bp, Homo sapiens
ctggttatgttacatggaaaaaaagagatttttttttgcatatgtaattaaggttactaatcagttggc

SEQ ID NO: 103421 - DNA, 73 bp, Homo sapiens
tggaaaaaaagagatttttttttgcatatgtaattaaggttactaatcagttggctttgactcatgcaacaga

SEQ ID NO: 103422 - DNA, 75 bp, Homo sapiens
gagatttttttttgcatatgtaattaaggttactaatcagttggctttgactcatgcaacagagagattttcctg

SEQ ID NO: 103423 - DNA, 76 bp, Homo sapiens
ttttgcatatgtaattaaggttactaatcagttggctttgactcatgcaacagagagattttcctggtagccctaa

SEQ ID NO: 103424 - DNA, 75 bp, Homo sapiens
atatgtaattaaggttactaatcagttggctttgactcatgcaacagagagattttcctggtagccctaatctaa

SEQ ID NO: 103425 - DNA, 79 bp, Homo sapiens
tactaatcagttggctttgactcatgcaacagagagattttcctggtagccctaatctaatcacaggagaccattacaa

SEQ ID NO: 103426 - DNA, 79 bp, Homo sapiens
atcagttggctttgactcatgcaacagagagattttcctggtagccctaatctaatcacaggagaccattacaaacaca

SEQ ID NO: 103427 - DNA, 77 bp, Homo sapiens
tttgactcatgcaacagagagattttcctggtagccctaatctaatcacaggagaccattacaaacacagtgttttc

SEQ ID NO: 103428 - DNA, 79 bp, Homo sapiens
cctaatctaatcacaggagaccattacaaacacagtgttttctcaggctggggcagaagtgaagtcagcattgtagcta

SEQ ID NO: 103429 - DNA, 81 bp, Homo sapiens
tctaatcacaggagaccattacaaacacagtgttttctcaggctggggcagaagtgaagtcagcattgtagctagaagaca

SEQ ID NO: 103430 - DNA, 80 bp, Homo sapiens
agaccattacaaacacagtgttttctcaggctggggcagaagtgaagtcagcattgtagctagaagacagagcaggcact

SEQ ID NO: 103431 - DNA, 81 bp, Homo sapiens
aaacacagtgttttctcaggctggggcagaagtgaagtcagcattgtagctagaagacagagcaggcacttgcaagaacta

SEQ ID NO: 103432 - DNA, 85 bp, Homo sapiens
ttttctcaggctggggcagaagtgaagtcagcattgtagctagaagacagagcaggcacttgcaagaactagagagcagtctcta

SEQ ID NO: 103433 - DNA, 86 bp, Homo sapiens
gggcagaagtgaagtcagcattgtagctagaagacagagcaggcacttgcaagaactagagagcagtctctagatgccgagggtga

SEQ ID NO: 103434 - DNA, 83 bp, Homo sapiens
aagtgaagtcagcattgtagctagaagacagagcaggcacttgcaagaactagagagcagtctctagatgccgagggtgaccc

SEQ ID NO: 103435 - DNA, 84 bp, Homo sapiens
attgtagctagaagacagagcaggcacttgcaagaactagagagcagtctctagatgccgagggtgacccctgattgacagcca

SEQ ID NO: 103436 - DNA, 81 bp, Homo sapiens
agagcaggcacttgcaagaactagagagcagtctctagatgccgagggtgacccctgattgacagccagcaaggaaacgag

SEQ ID NO: 103437 - DNA, 79 bp, Homo sapiens
aagaactagagagcagtctctagatgccgagggtgacccctgattgacagccagcaaggaaacgagggccactatgcta

SEQ ID NO: 103438 - DNA, 80 bp, Homo sapiens
tctagatgccgagggtgacccctgattgacagccagcaaggaaacgagggccactatgctacagccccatggaattgcat

SEQ ID NO: 103439 - DNA, 79 bp, Homo sapiens
gggtgacccctgattgacagccagcaaggaaacgagggccactatgctacagccccatggaattgcattctgccaacta

SEQ ID NO: 103440 - DNA, 85 bp, Homo sapiens
tgattgacagccagcaaggaaacgagggccactatgctacagccccatggaattgcattctgccaactacctgcatgagcttgga

SEQ ID NO: 103441 - DNA, 81 bp, Homo sapiens
ccagcaaggaaacgagggccactatgctacagccccatggaattgcattctgccaactacctgcatgagcttggaggtgaa

SEQ ID NO: 103442 - DNA, 78 bp, Homo sapiens
aaggaaacgagggccactatgctacagccccatggaattgcattctgccaactacctgcatgagcttggaggtgaatt

SEQ ID NO: 103443 - DNA, 80 bp, Homo sapiens
actatgctacagccccatggaattgcattctgccaactacctgcatgagcttggaggtgaatttctccctaaagccttca

SEQ ID NO: 103444 - DNA, 78 bp, Homo sapiens
tacagccccatggaattgcattctgccaactacctgcatgagcttggaggtgaatttctccctaaagccttcaagtaa

SEQ ID NO: 103445 - DNA, 75 bp, Homo sapiens
aattgcattctgccaactacctgcatgagcttggaggtgaatttctccctaaagccttcaagtaagggctcaggt

SEQ ID NO: 103446 - DNA, 75 bp, Homo sapiens
ttctgccaactacctgcatgagcttggaggtgaatttctccctaaagccttcaagtaagggctcaggttatccaa

SEQ ID NO: 103447 - DNA, 67 bp, Homo sapiens
agcttggaggtgaatttctccctaaagccttcaagtaagggctcaggttatccaacccctggatttt

SEQ ID NO: 103448 - DNA, 67 bp, Homo sapiens
aatttctccctaaagccttcaagtaagggctcaggttatccaacccctggatttttggccttatgaa

SEQ ID NO: 103449 - DNA, 74 bp, Homo sapiens
taaagccttcaagtaagggctcaggttatccaacccctggatttttggccttatgaagctgtgagcagagaatc

SEQ ID NO: 103450 - DNA, 75 bp, Homo sapiens
cttcaagtaagggctcaggttatccaacccctggatttttggccttatgaagctgtgagcagagaatctagtaca

SEQ ID NO: 103451 - DNA, 77 bp, Homo sapiens
ctcaggttatccaacccctggatttttggccttatgaagctgtgagcagagaatctagtacagcaccaccagatttc

SEQ ID NO: 103452 - DNA, 77 bp, Homo sapiens
aacccctggatttttggccttatgaagctgtgagcagagaatctagtacagcaccaccagatttccgacctgcagaa

SEQ ID NO: 103453 - DNA, 79 bp, Homo sapiens
tttttggccttatgaagctgtgagcagagaatctagtacagcaccaccagatttccgacctgcagaactgtgggctaaa

SEQ ID NO: 103454 - DNA, 79 bp, Homo sapiens
ttatgaagctgtgagcagagaatctagtacagcaccaccagatttccgacctgcagaactgtgggctaaatttgtttaa

SEQ ID NO: 103455 - DNA, 74 bp, Homo sapiens
agagaatctagtacagcaccaccagatttccgacctgcagaactgtgggctaaatttgtttaaggtgctaagct

SEQ ID NO: 103456 - DNA, 76 bp, Homo sapiens
tacagcaccaccagatttccgacctgcagaactgtgggctaaatttgtttaaggtgctaagcttggcaatttgctc

SEQ ID NO: 103457 - DNA, 72 bp, Homo sapiens
agatttccgacctgcagaactgtgggctaaatttgtttaaggtgctaagcttggcaatttgctcgttttaca

SEQ ID NO: 103458 - DNA, 73 bp, Homo sapiens
ctgcagaactgtgggctaaatttgtttaaggtgctaagcttggcaatttgctcgttttacagcaataagaaaa

SEQ ID NO: 103459 - DNA, 70 bp, Homo sapiens
aactgtgggctaaatttgtttaaggtgctaagcttggcaatttgctcgttttacagcaataagaaaacaa

SEQ ID NO: 103460 - DNA, 68 bp, Homo sapiens
aaatttgtttaaggtgctaagcttggcaatttgctcgttttacagcaataagaaaacaagtaccctgg

SEQ ID NO: 103461 - DNA, 73 bp, Homo sapiens
taaggtgctaagcttggcaatttgctcgttttacagcaataagaaaacaagtaccctgggcatgctctttccc

SEQ ID NO: 103462 - DNA, 72 bp, Homo sapiens
ttggcaatttgctcgttttacagcaataagaaaacaagtaccctgggcatgctctttccctctccttattct

SEQ ID NO: 103463 - DNA, 70 bp, Homo sapiens
tttgctcgttttacagcaataagaaaacaagtaccctgggcatgctctttccctctccttattcttttgg

SEQ ID NO: 103464 - DNA, 72 bp, Homo sapiens
ttacagcaataagaaaacaagtaccctgggcatgctctttccctctccttattcttttggggagacactgct

SEQ ID NO: 103465 - DNA, 69 bp, Homo sapiens
aagaaaacaagtaccctgggcatgctctttccctctccttattcttttggggagacactgcttgggtat

SEQ ID NO: 103466 - DNA, 74 bp, Homo sapiens
ctgggcatgctctttccctctccttattcttttggggagacactgcttgggtattggtgagtgagtctccctat

SEQ ID NO: 103467 - DNA, 73 bp, Homo sapiens
tctttccctctccttattcttttggggagacactgcttgggtattggtgagtgagtctccctatttctggagc

SEQ ID NO: 103468 - DNA, 76 bp, Homo sapiens
tccttattcttttggggagacactgcttgggtattggtgagtgagtctccctatttctggagctcagtagcaggaa

SEQ ID NO: 103469 - DNA, 79 bp, Homo sapiens
ttgggtattggtgagtgagtctccctatttctggagctcagtagcaggaagccacatacctaagccatgctctccaaaa

SEQ ID NO: 103470 - DNA, 80 bp, Homo sapiens
agtgagtctccctatttctggagctcagtagcaggaagccacatacctaagccatgctctccaaaagttctatcagtgac

SEQ ID NO: 103471 - DNA, 80 bp, Homo sapiens
ctatttctggagctcagtagcaggaagccacatacctaagccatgctctccaaaagttctatcagtgaccaagctggtat

SEQ ID NO: 103472 - DNA, 79 bp, Homo sapiens
agctcagtagcaggaagccacatacctaagccatgctctccaaaagttctatcagtgaccaagctggtatttttatctc

SEQ ID NO: 103473 - DNA, 77 bp, Homo sapiens
acatacctaagccatgctctccaaaagttctatcagtgaccaagctggtatttttatctccatctgcttgactcctt

SEQ ID NO: 103474 - DNA, 81 bp, Homo sapiens
ctaagccatgctctccaaaagttctatcagtgaccaagctggtatttttatctccatctgcttgactcctttgtcatctca

SEQ ID NO: 103475 - DNA, 80 bp, Homo sapiens
caaaagttctatcagtgaccaagctggtatttttatctccatctgcttgactcctttgtcatctcactgttgattgtgga

SEQ ID NO: 103476 - DNA, 82 bp, Homo sapiens
ttctatcagtgaccaagctggtatttttatctccatctgcttgactcctttgtcatctcactgttgattgtggatcaccgga

SEQ ID NO: 103477 - DNA, 79 bp, Homo sapiens
accaagctggtatttttatctccatctgcttgactcctttgtcatctcactgttgattgtggatcaccggagagcaggg

SEQ ID NO: 103478 - DNA, 76 bp, Homo sapiens
atttttatctccatctgcttgactcctttgtcatctcactgttgattgtggatcaccggagagcaggggtgttttt

SEQ ID NO: 103479 - DNA, 78 bp, Homo sapiens
atctgcttgactcctttgtcatctcactgttgattgtggatcaccggagagcaggggtgttttttattgagcctccta

SEQ ID NO: 103480 - DNA, 76 bp, Homo sapiens
cttgactcctttgtcatctcactgttgattgtggatcaccggagagcaggggtgttttttattgagcctcctaaca

SEQ ID NO: 103481 - DNA, 75 bp, Homo sapiens
atcaccggagagcaggggtgttttttattgagcctcctaacagcccaccagataattgtcttcatctctctagat

SEQ ID NO: 103482 - DNA, 77 bp, Homo sapiens
agagcaggggtgttttttattgagcctcctaacagcccaccagataattgtcttcatctctctagattcactctcat

SEQ ID NO: 103483 - DNA, 79 bp, Homo sapiens
tttttattgagcctcctaacagcccaccagataattgtcttcatctctctagattcactctcattcccacacaaacgca

SEQ ID NO: 103484 - DNA, 80 bp, Homo sapiens
attgagcctcctaacagcccaccagataattgtcttcatctctctagattcactctcattcccacacaaacgcaccagtg

SEQ ID NO: 103485 - DNA, 81 bp, Homo sapiens
ctaacagcccaccagataattgtcttcatctctctagattcactctcattcccacacaaacgcaccagtggattgtgaaca

SEQ ID NO: 103486 - DNA, 81 bp, Homo sapiens
agataattgtcttcatctctctagattcactctcattcccacacaaacgcaccagtggattgtgaacaccttgccagcgag

SEQ ID NO: 103487 - DNA, 81 bp, Homo sapiens
ttcatctctctagattcactctcattcccacacaaacgcaccagtggattgtgaacaccttgccagcgaggctgtgtttta

SEQ ID NO: 103488 - DNA, 78 bp, Homo sapiens
tagattcactctcattcccacacaaacgcaccagtggattgtgaacaccttgccagcgaggctgtgttttactcacct

SEQ ID NO: 103489 - DNA, 72 bp, Homo sapiens
acacaaacgcaccagtggattgtgaacaccttgccagcgaggctgtgttttactcacctttaaattccctag

SEQ ID NO: 103490 - DNA, 76 bp, Homo sapiens
accagtggattgtgaacaccttgccagcgaggctgtgttttactcacctttaaattccctaggcagcactgcagaa

SEQ ID NO: 103491 - DNA, 77 bp, Homo sapiens
attgtgaacaccttgccagcgaggctgtgttttactcacctttaaattccctaggcagcactgcagaaagtgaatgc

SEQ ID NO: 103492 - DNA, 76 bp, Homo sapiens
accttgccagcgaggctgtgttttactcacctttaaattccctaggcagcactgcagaaagtgaatgcgtacctga

SEQ ID NO: 103493 - DNA, 76 bp, Homo sapiens
ctgtgttttactcacctttaaattccctaggcagcactgcagaaagtgaatgcgtacctgagcccctgtgagtctg

SEQ ID NO: 103494 - DNA, 75 bp, Homo sapiens
tttactcacctttaaattccctaggcagcactgcagaaagtgaatgcgtacctgagcccctgtgagtctggttaa

SEQ ID NO: 103495 - DNA, 76 bp, Homo sapiens
ctttaaattccctaggcagcactgcagaaagtgaatgcgtacctgagcccctgtgagtctggttaactacagattc

SEQ ID NO: 103496 - DNA, 83 bp, Homo sapiens
gcagcactgcagaaagtgaatgcgtacctgagcccctgtgagtctggttaactacagattctgcctcagcaggtctcggaaga

SEQ ID NO: 103497 - DNA, 77 bp, Homo sapiens
agaaagtgaatgcgtacctgagcccctgtgagtctggttaactacagattctgcctcagcaggtctcggaagaagcc

SEQ ID NO: 103498 - DNA, 78 bp, Homo sapiens
aatgcgtacctgagcccctgtgagtctggttaactacagattctgcctcagcaggtctcggaagaagcctgagattct

SEQ ID NO: 103499 - DNA, 76 bp, Homo sapiens
acctgagcccctgtgagtctggttaactacagattctgcctcagcaggtctcggaagaagcctgagattcttggtt

SEQ ID NO: 103500 - DNA, 76 bp, Homo sapiens
agtctggttaactacagattctgcctcagcaggtctcggaagaagcctgagattcttggtttcccataagctccca

SEQ ID NO: 103501 - DNA, 75 bp, Homo sapiens
ggttaactacagattctgcctcagcaggtctcggaagaagcctgagattcttggtttcccataagctcccagtgt

SEQ ID NO: 103502 - DNA, 80 bp, Homo sapiens
tctgcctcagcaggtctcggaagaagcctgagattcttggtttcccataagctcccagtgttgccactgccgctggttca

SEQ ID NO: 103503 - DNA, 74 bp, Homo sapiens
aggtctcggaagaagcctgagattcttggtttcccataagctcccagtgttgccactgccgctggttcaaggtc

SEQ ID NO: 103504 - DNA, 77 bp, Homo sapiens
aagaagcctgagattcttggtttcccataagctcccagtgttgccactgccgctggttcaaggtctgcactcagagt

SEQ ID NO: 103505 - DNA, 78 bp, Homo sapiens
agattcttggtttcccataagctcccagtgttgccactgccgctggttcaaggtctgcactcagagttggaggatcca

SEQ ID NO: 103506 - DNA, 82 bp, Homo sapiens
ttcccataagctcccagtgttgccactgccgctggttcaaggtctgcactcagagttggaggatccagtatctcagatagaa

SEQ ID NO: 103507 - DNA, 80 bp, Homo sapiens
ataagctcccagtgttgccactgccgctggttcaaggtctgcactcagagttggaggatccagtatctcagatagaactt

SEQ ID NO: 103508 - DNA, 77 bp, Homo sapiens
agtgttgccactgccgctggttcaaggtctgcactcagagttggaggatccagtatctcagatagaactttttattt

SEQ ID NO: 103509 - DNA, 75 bp, Homo sapiens
gtgtgagctaccacgcctggtgcgattggactttttaagctgttgttatggcctgaatgtttgtatccctccaaa

SEQ ID NO: 103510 - DNA, 72 bp, Homo sapiens
agctaccacgcctggtgcgattggactttttaagctgttgttatggcctgaatgtttgtatccctccaaaat

SEQ ID NO: 103511 - DNA, 74 bp, Homo sapiens
gtgcgattggactttttaagctgttgttatggcctgaatgtttgtatccctccaaaattcacattgaagcccta

SEQ ID NO: 103512 - DNA, 72 bp, Homo sapiens
actttttaagctgttgttatggcctgaatgtttgtatccctccaaaattcacattgaagccctaatcctcta

SEQ ID NO: 103513 - DNA, 80 bp, Homo sapiens
tgttgttatggcctgaatgtttgtatccctccaaaattcacattgaagccctaatcctctatgtgctgctatgagtagga

SEQ ID NO: 103514 - DNA, 81 bp, Homo sapiens
ttatggcctgaatgtttgtatccctccaaaattcacattgaagccctaatcctctatgtgctgctatgagtaggatatgtg

SEQ ID NO: 103515 - DNA, 79 bp, Homo sapiens
atgtttgtatccctccaaaattcacattgaagccctaatcctctatgtgctgctatgagtaggatatgtgggaggtgat

SEQ ID NO: 103516 - DNA, 81 bp, Homo sapiens
tccaaaattcacattgaagccctaatcctctatgtgctgctatgagtaggatatgtgggaggtgattagattaagatgagg

SEQ ID NO: 103517 - DNA, 82 bp, Homo sapiens
attcacattgaagccctaatcctctatgtgctgctatgagtaggatatgtgggaggtgattagattaagatgaggttgtgag

SEQ ID NO: 103518 - DNA, 83 bp, Homo sapiens
ctaatcctctatgtgctgctatgagtaggatatgtgggaggtgattagattaagatgaggttgtgaggctggggtcctcatga

SEQ ID NO: 103519 - DNA, 83 bp, Homo sapiens
tatgtgctgctatgagtaggatatgtgggaggtgattagattaagatgaggttgtgaggctggggtcctcatgatgggattaa

SEQ ID NO: 103520 - DNA, 81 bp, Homo sapiens
tatgagtaggatatgtgggaggtgattagattaagatgaggttgtgaggctggggtcctcatgatgggattaatgctctta

SEQ ID NO: 103521 - DNA, 78 bp, Homo sapiens
atatgtgggaggtgattagattaagatgaggttgtgaggctggggtcctcatgatgggattaatgctcttataagaaa

SEQ ID NO: 103522 - DNA, 79 bp, Homo sapiens
gtgattagattaagatgaggttgtgaggctggggtcctcatgatgggattaatgctcttataagaaaagaccagattga

SEQ ID NO: 103523 - DNA, 80 bp, Homo sapiens
tagattaagatgaggttgtgaggctggggtcctcatgatgggattaatgctcttataagaaaagaccagattgatctctc

SEQ ID NO: 103524 - DNA, 74 bp, Homo sapiens
tccctccctccaccgaacccaatcgtgctggtaccctgatctcagacttcccaacctccagagctgtgaggaaa

SEQ ID NO: 103525 - DNA, 76 bp, Homo sapiens
cctccaccgaacccaatcgtgctggtaccctgatctcagacttcccaacctccagagctgtgaggaaatacatgtc

SEQ ID NO: 103526 - DNA, 78 bp, Homo sapiens
acccaatcgtgctggtaccctgatctcagacttcccaacctccagagctgtgaggaaatacatgtctgctgtttaagc

SEQ ID NO: 103527 - DNA, 83 bp, Homo sapiens
tatagcagcctgagctgaccaagacaagtatggtaatagaagtcaccagtacatcttctatcaggcctcacaaggagctgctt

SEQ ID NO: 103528 - DNA, 82 bp, Homo sapiens
ctgagctgaccaagacaagtatggtaatagaagtcaccagtacatcttctatcaggcctcacaaggagctgctttacataca

SEQ ID NO: 103529 - DNA, 82 bp, Homo sapiens
tgagctgaccaagacaagtatggtaatagaagtcaccagtacatcttctatcaggcctcacaaggagctgctttacatacat

SEQ ID NO: 103530 - DNA, 79 bp, Homo sapiens
accaagacaagtatggtaatagaagtcaccagtacatcttctatcaggcctcacaaggagctgctttacatacattatc

SEQ ID NO: 103531 - DNA, 78 bp, Homo sapiens
aagtatggtaatagaagtcaccagtacatcttctatcaggcctcacaaggagctgctttacatacattatcccattta

SEQ ID NO: 103532 - DNA, 80 bp, Homo sapiens
atagaagtcaccagtacatcttctatcaggcctcacaaggagctgctttacatacattatcccatttaattcttgagcag

SEQ ID NO: 103533 - DNA, 83 bp, Homo sapiens
tacatcttctatcaggcctcacaaggagctgctttacatacattatcccatttaattcttgagcagtgagtggtccatcatta

SEQ ID NO: 103534 - DNA, 81 bp, Homo sapiens
ttctatcaggcctcacaaggagctgctttacatacattatcccatttaattcttgagcagtgagtggtccatcattactcc

SEQ ID NO: 103535 - DNA, 77 bp, Homo sapiens
acaaggagctgctttacatacattatcccatttaattcttgagcagtgagtggtccatcattactcccttcacttta

SEQ ID NO: 103536 - DNA, 78 bp, Homo sapiens
agctgctttacatacattatcccatttaattcttgagcagtgagtggtccatcattactcccttcactttacaaatga

SEQ ID NO: 103537 - DNA, 75 bp, Homo sapiens
attatcccatttaattcttgagcagtgagtggtccatcattactcccttcactttacaaatgaggacacttaaga

SEQ ID NO: 103538 - DNA, 74 bp, Homo sapiens
tttaattcttgagcagtgagtggtccatcattactcccttcactttacaaatgaggacacttaagatttagtaa

SEQ ID NO: 103539 - DNA, 76 bp, Homo sapiens
agcagtgagtggtccatcattactcccttcactttacaaatgaggacacttaagatttagtaatcagctcacccat

SEQ ID NO: 103540 - DNA, 75 bp, Homo sapiens
attactcccttcactttacaaatgaggacacttaagatttagtaatcagctcacccattctcagcccatgcagtt

SEQ ID NO: 103541 - DNA, 79 bp, Homo sapiens
actttacaaatgaggacacttaagatttagtaatcagctcacccattctcagcccatgcagtttgcctgcagagtgccc

SEQ ID NO: 103542 - DNA, 81 bp, Homo sapiens
acaaatgaggacacttaagatttagtaatcagctcacccattctcagcccatgcagtttgcctgcagagtgcccggttgca

SEQ ID NO: 103543 - DNA, 84 bp, Homo sapiens
acttaagatttagtaatcagctcacccattctcagcccatgcagtttgcctgcagagtgcccggttgcagccagcagcttgcaa

SEQ ID NO: 103544 - DNA, 86 bp, Homo sapiens
tttagtaatcagctcacccattctcagcccatgcagtttgcctgcagagtgcccggttgcagccagcagcttgcaagatggtcaaa

SEQ ID NO: 103545 - DNA, 85 bp, Homo sapiens
agctcacccattctcagcccatgcagtttgcctgcagagtgcccggttgcagccagcagcttgcaagatggtcaaaacattgtat

SEQ ID NO: 103546 - DNA, 83 bp, Homo sapiens
acccattctcagcccatgcagtttgcctgcagagtgcccggttgcagccagcagcttgcaagatggtcaaaacattgtattac

SEQ ID NO: 103547 - DNA, 85 bp, Homo sapiens
ttctcagcccatgcagtttgcctgcagagtgcccggttgcagccagcagcttgcaagatggtcaaaacattgtattaccagtcaa

SEQ ID NO: 103548 - DNA, 82 bp, Homo sapiens
agcccatgcagtttgcctgcagagtgcccggttgcagccagcagcttgcaagatggtcaaaacattgtattaccagtcaaat

SEQ ID NO: 103549 - DNA, 81 bp, Homo sapiens
atgcagtttgcctgcagagtgcccggttgcagccagcagcttgcaagatggtcaaaacattgtattaccagtcaaatttcc

SEQ ID NO: 103550 - DNA, 79 bp, Homo sapiens
gtttgcctgcagagtgcccggttgcagccagcagcttgcaagatggtcaaaacattgtattaccagtcaaatttcctta

SEQ ID NO: 103551 - DNA, 79 bp, Homo sapiens
tttgcctgcagagtgcccggttgcagccagcagcttgcaagatggtcaaaacattgtattaccagtcaaatttccttat

SEQ ID NO: 103552 - DNA, 78 bp, Homo sapiens
cagagtgcccggttgcagccagcagcttgcaagatggtcaaaacattgtattaccagtcaaatttccttattagatcc

SEQ ID NO: 103553 - DNA, 79 bp, Homo sapiens
tgcccggttgcagccagcagcttgcaagatggtcaaaacattgtattaccagtcaaatttccttattagatcctgacaa

SEQ ID NO: 103554 - DNA, 76 bp, Homo sapiens
agccagcagcttgcaagatggtcaaaacattgtattaccagtcaaatttccttattagatcctgacaagttgcctt

SEQ ID NO: 103555 - DNA, 74 bp, Homo sapiens
cagcttgcaagatggtcaaaacattgtattaccagtcaaatttccttattagatcctgacaagttgcctttaaa

SEQ ID NO: 103556 - DNA, 70 bp, Homo sapiens
ggtcaaaacattgtattaccagtcaaatttccttattagatcctgacaagttgcctttaaaccattagga

SEQ ID NO: 103557 - DNA, 71 bp, Homo sapiens
attgtattaccagtcaaatttccttattagatcctgacaagttgcctttaaaccattaggacaggctgaat

SEQ ID NO: 103558 - DNA, 74 bp, Homo sapiens
gtcaaatttccttattagatcctgacaagttgcctttaaaccattaggacaggctgaattcagaggctcaagct

SEQ ID NO: 103559 - DNA, 74 bp, Homo sapiens
atttccttattagatcctgacaagttgcctttaaaccattaggacaggctgaattcagaggctcaagcttctaa

SEQ ID NO: 103560 - DNA, 77 bp, Homo sapiens
tagatcctgacaagttgcctttaaaccattaggacaggctgaattcagaggctcaagcttctaactccagtgctttg

SEQ ID NO: 103561 - DNA, 74 bp, Homo sapiens
aagttgcctttaaaccattaggacaggctgaattcagaggctcaagcttctaactccagtgctttggaaggcca

SEQ ID NO: 103562 - DNA, 81 bp, Homo sapiens
acaaacaaaagctatgtggacattctttcttattctagagcagcacatccaatagaaatataatgagagtcatatacataa

SEQ ID NO: 103563 - DNA, 81 bp, Homo sapiens
caaaagctatgtggacattctttcttattctagagcagcacatccaatagaaatataatgagagtcatatacataatttaa

SEQ ID NO: 103564 - DNA, 80 bp, Homo sapiens
gtggacattctttcttattctagagcagcacatccaatagaaatataatgagagtcatatacataatttaagattttcta

SEQ ID NO: 103565 - DNA, 80 bp, Homo sapiens
tttcttattctagagcagcacatccaatagaaatataatgagagtcatatacataatttaagattttctagtagccacat

SEQ ID NO: 103566 - DNA, 78 bp, Homo sapiens
tagagcagcacatccaatagaaatataatgagagtcatatacataatttaagattttctagtagccacattaaaaaag

SEQ ID NO: 103567 - DNA, 73 bp, Homo sapiens
aatagaaatataatgagagtcatatacataatttaagattttctagtagccacattaaaaaagtaatgggcaa

SEQ ID NO: 103568 - DNA, 72 bp, Homo sapiens
aaatataatgagagtcatatacataatttaagattttctagtagccacattaaaaaagtaatgggcaaaata

SEQ ID NO: 103569 - DNA, 70 bp, Homo sapiens
atgggcaaaataaattttaatatgttttatttaacccaatctattgaaaacattgtcatttgaacatgta

SEQ ID NO: 103570 - DNA, 72 bp, Homo sapiens
taaattttaatatgttttatttaacccaatctattgaaaacattgtcatttgaacatgtaatcaatatgaaa

SEQ ID NO: 103571 - DNA, 75 bp, Homo sapiens
tatgttttatttaacccaatctattgaaaacattgtcatttgaacatgtaatcaatatgaaaattattaatgagc

SEQ ID NO: 103572 - DNA, 75 bp, Homo sapiens
tttaacccaatctattgaaaacattgtcatttgaacatgtaatcaatatgaaaattattaatgagctattttaca

SEQ ID NO: 103573 - DNA, 75 bp, Homo sapiens
ccaatctattgaaaacattgtcatttgaacatgtaatcaatatgaaaattattaatgagctattttacatttttc

SEQ ID NO: 103574 - DNA, 72 bp, Homo sapiens
gaaaacattgtcatttgaacatgtaatcaatatgaaaattattaatgagctattttacatttttcttttgtt

SEQ ID NO: 103575 - DNA, 73 bp, Homo sapiens
tatgaaaattattaatgagctattttacatttttcttttgtttctgtactatgtcttcaaaagtctgtgtgta

SEQ ID NO: 103576 - DNA, 72 bp, Homo sapiens
ttattaatgagctattttacatttttcttttgtttctgtactatgtcttcaaaagtctgtgtgtattttaca

SEQ ID NO: 103577 - DNA, 73 bp, Homo sapiens
tattttacatttttcttttgtttctgtactatgtcttcaaaagtctgtgtgtattttacatttatagcgcatc

SEQ ID NO: 103578 - DNA, 73 bp, Homo sapiens
ttttcttttgtttctgtactatgtcttcaaaagtctgtgtgtattttacatttatagcgcatctcaatttggt

SEQ ID NO: 103579 - DNA, 78 bp, Homo sapiens
tttctgtactatgtcttcaaaagtctgtgtgtattttacatttatagcgcatctcaatttggtttagccacattgcaa

SEQ ID NO: 103580 - DNA, 79 bp, Homo sapiens
tatgtcttcaaaagtctgtgtgtattttacatttatagcgcatctcaatttggtttagccacattgcaagtggtcaata

SEQ ID NO: 103581 - DNA, 76 bp, Homo sapiens
aaaagtctgtgtgtattttacatttatagcgcatctcaatttggtttagccacattgcaagtggtcaatactcatt

SEQ ID NO: 103582 - DNA, 79 bp, Homo sapiens
gtgtgtattttacatttatagcgcatctcaatttggtttagccacattgcaagtggtcaatactcatttgtggctagtg

SEQ ID NO: 103583 - DNA, 76 bp, Homo sapiens
tagtggctaccatattggacagtacagttctacaggaaccactcaaaacacaattcaccctggatagcaattttgc

SEQ ID NO: 103584 - DNA, 77 bp, Homo sapiens
catattggacagtacagttctacaggaaccactcaaaacacaattcaccctggatagcaattttgctactagtctgc

SEQ ID NO: 103585 - DNA, 77 bp, Homo sapiens
agtacagttctacaggaaccactcaaaacacaattcaccctggatagcaattttgctactagtctgctagtgcttga

SEQ ID NO: 103586 - DNA, 78 bp, Homo sapiens
tacaggaaccactcaaaacacaattcaccctggatagcaattttgctactagtctgctagtgcttgagtgagctgttt

SEQ ID NO: 103587 - DNA, 76 bp, Homo sapiens
aaccactcaaaacacaattcaccctggatagcaattttgctactagtctgctagtgcttgagtgagctgtttttaa

SEQ ID NO: 103588 - DNA, 79 bp, Homo sapiens
tggatagcaattttgctactagtctgctagtgcttgagtgagctgtttttaaactgctgttagtgaggaccactaaata

SEQ ID NO: 103589 - DNA, 79 bp, Homo sapiens
ttttgctactagtctgctagtgcttgagtgagctgtttttaaactgctgttagtgaggaccactaaatagtgcatctta

SEQ ID NO: 103590 - DNA, 79 bp, Homo sapiens
ctactagtctgctagtgcttgagtgagctgtttttaaactgctgttagtgaggaccactaaatagtgcatcttacttga

SEQ ID NO: 103591 - DNA, 76 bp, Homo sapiens
tagtgcttgagtgagctgtttttaaactgctgttagtgaggaccactaaatagtgcatcttacttgactcgtgttt

SEQ ID NO: 103592 - DNA, 73 bp, Homo sapiens
agtgagctgtttttaaactgctgttagtgaggaccactaaatagtgcatcttacttgactcgtgttttccctc

SEQ ID NO: 103593 - DNA, 76 bp, Homo sapiens
tttaaactgctgttagtgaggaccactaaatagtgcatcttacttgactcgtgttttccctctgagctgtcctgaa

SEQ ID NO: 103594 - DNA, 77 bp, Homo sapiens
ttagtgaggaccactaaatagtgcatcttacttgactcgtgttttccctctgagctgtcctgaagcaaagttcagaa

SEQ ID NO: 103595 - DNA, 74 bp, Homo sapiens
accactaaatagtgcatcttacttgactcgtgttttccctctgagctgtcctgaagcaaagttcagaattttta

SEQ ID NO: 103596 - DNA, 78 bp, Homo sapiens
ttgactcgtgttttccctctgagctgtcctgaagcaaagttcagaatttttattacagcatgacttgattgactcaaa

SEQ ID NO: 103597 - DNA, 77 bp, Homo sapiens
ttttccctctgagctgtcctgaagcaaagttcagaatttttattacagcatgacttgattgactcaaaggtggaaga

SEQ ID NO: 103598 - DNA, 81 bp, Homo sapiens
tgagctgtcctgaagcaaagttcagaatttttattacagcatgacttgattgactcaaaggtggaagaacacacatactca

SEQ ID NO: 103599 - DNA, 82 bp, Homo sapiens
tcagaatttttattacagcatgacttgattgactcaaaggtggaagaacacacatactcagcagcaataactgagttgcaaa

SEQ ID NO: 103600 - DNA, 79 bp, Homo sapiens
aatttttattacagcatgacttgattgactcaaaggtggaagaacacacatactcagcagcaataactgagttgcaaag

SEQ ID NO: 103601 - DNA, 81 bp, Homo sapiens
ttttattacagcatgacttgattgactcaaaggtggaagaacacacatactcagcagcaataactgagttgcaaaggccta

SEQ ID NO: 103602 - DNA, 80 bp, Homo sapiens
atgacttgattgactcaaaggtggaagaacacacatactcagcagcaataactgagttgcaaaggcctactaaccactga

SEQ ID NO: 103603 - DNA, 78 bp, Homo sapiens
attgactcaaaggtggaagaacacacatactcagcagcaataactgagttgcaaaggcctactaaccactgacaacac

SEQ ID NO: 103604 - DNA, 76 bp, Homo sapiens
aaaggtggaagaacacacatactcagcagcaataactgagttgcaaaggcctactaaccactgacaacaccactaa

SEQ ID NO: 103605 - DNA, 78 bp, Homo sapiens
aagaacacacatactcagcagcaataactgagttgcaaaggcctactaaccactgacaacaccactaatgcattttta

SEQ ID NO: 103606 - DNA, 77 bp, Homo sapiens
agttgcaaaggcctactaaccactgacaacaccactaatgcatttttacagccatggatagccacaagttaatctca

SEQ ID NO: 103607 - DNA, 78 bp, Homo sapiens
ctactaaccactgacaacaccactaatgcatttttacagccatggatagccacaagttaatctcacacattgttcatt

SEQ ID NO: 103608 - DNA, 78 bp, Homo sapiens
actgacaacaccactaatgcatttttacagccatggatagccacaagttaatctcacacattgttcatttccacttaa

SEQ ID NO: 103609 - DNA, 78 bp, Homo sapiens
aacaccactaatgcatttttacagccatggatagccacaagttaatctcacacattgttcatttccacttaacattca

SEQ ID NO: 103610 - DNA, 82 bp, Homo sapiens
atttttacagccatggatagccacaagttaatctcacacattgttcatttccacttaacattcaccagtcatgcatgcctca

SEQ ID NO: 103611 - DNA, 83 bp, Homo sapiens
catggatagccacaagttaatctcacacattgttcatttccacttaacattcaccagtcatgcatgcctcagcctataaaaca

SEQ ID NO: 103612 - DNA, 80 bp, Homo sapiens
ttaatctcacacattgttcatttccacttaacattcaccagtcatgcatgcctcagcctataaaacagtgctttggtttc

SEQ ID NO: 103613 - DNA, 79 bp, Homo sapiens
acattgttcatttccacttaacattcaccagtcatgcatgcctcagcctataaaacagtgctttggtttccttgagctc

SEQ ID NO: 103614 - DNA, 78 bp, Homo sapiens
cacttaacattcaccagtcatgcatgcctcagcctataaaacagtgctttggtttccttgagctcggaaacaatatta

SEQ ID NO: 103615 - DNA, 77 bp, Homo sapiens
aacattcaccagtcatgcatgcctcagcctataaaacagtgctttggtttccttgagctcggaaacaatattacaaa

SEQ ID NO: 103616 - DNA, 78 bp, Homo sapiens
agtcatgcatgcctcagcctataaaacagtgctttggtttccttgagctcggaaacaatattacaaaagcatctcctg

SEQ ID NO: 103617 - DNA, 71 bp, Homo sapiens
agcctataaaacagtgctttggtttccttgagctcggaaacaatattacaaaagcatctcctgtccctttc

SEQ ID NO: 103618 - DNA, 69 bp, Homo sapiens
ataaaacagtgctttggtttccttgagctcggaaacaatattacaaaagcatctcctgtccctttcttt

SEQ ID NO: 103619 - DNA, 70 bp, Homo sapiens
tttggtttccttgagctcggaaacaatattacaaaagcatctcctgtccctttcttttccagcaaaacca

SEQ ID NO: 103620 - DNA, 69 bp, Homo sapiens
aaacaatattacaaaagcatctcctgtccctttcttttccagcaaaaccagttccctatgaaacacacc

SEQ ID NO: 103621 - DNA, 69 bp, Homo sapiens
aaagcatctcctgtccctttcttttccagcaaaaccagttccctatgaaacacacctgacgtattttta

SEQ ID NO: 103622 - DNA, 68 bp, Homo sapiens
atctcctgtccctttcttttccagcaaaaccagttccctatgaaacacacctgacgtatttttaaata

SEQ ID NO: 103623 - DNA, 72 bp, Homo sapiens
cttttccagcaaaaccagttccctatgaaacacacctgacgtatttttaaatataagcattatggatcagaa

SEQ ID NO: 103624 - DNA, 71 bp, Homo sapiens
caaaaccagttccctatgaaacacacctgacgtatttttaaatataagcattatggatcagaaattggagg

SEQ ID NO: 103625 - DNA, 73 bp, Homo sapiens
acacacctgacgtatttttaaatataagcattatggatcagaaattggaggttctatttttaataggccatga

SEQ ID NO: 103626 - DNA, 72 bp, Homo sapiens
ctgacgtatttttaaatataagcattatggatcagaaattggaggttctatttttaataggccatgatttta

SEQ ID NO: 103627 - DNA, 71 bp, Homo sapiens
agcattatggatcagaaattggaggttctatttttaataggccatgattttaaaatagaatttccaattgg

SEQ ID NO: 103628 - DNA, 67 bp, Homo sapiens
cagaaattggaggttctatttttaataggccatgattttaaaatagaatttccaattggttaaacga

SEQ ID NO: 103629 - DNA, 70 bp, Homo sapiens
gaggttctatttttaataggccatgattttaaaatagaatttccaattggttaaacgatactcactctca

SEQ ID NO: 103630 - DNA, 71 bp, Homo sapiens
taataggccatgattttaaaatagaatttccaattggttaaacgatactcactctcaaataggaattccta

SEQ ID NO: 103631 - DNA, 68 bp, Homo sapiens
gattttaaaatagaatttccaattggttaaacgatactcactctcaaataggaattcctataaacagg

SEQ ID NO: 103632 - DNA, 67 bp, Homo sapiens
aatagaatttccaattggttaaacgatactcactctcaaataggaattcctataaacaggtttattt

SEQ ID NO: 103633 - DNA, 71 bp, Homo sapiens
ttccaattggttaaacgatactcactctcaaataggaattcctataaacaggtttattttgaaatatagca

SEQ ID NO: 103634 - DNA, 70 bp, Homo sapiens
gttaaacgatactcactctcaaataggaattcctataaacaggtttattttgaaatatagcatataaatt

SEQ ID NO: 103635 - DNA, 70 bp, Homo sapiens
ctcactctcaaataggaattcctataaacaggtttattttgaaatatagcatataaatttttcaaaaagc

SEQ ID NO: 103636 - DNA, 70 bp, Homo sapiens
ggaattcctataaacaggtttattttgaaatatagcatataaatttttcaaaaagccatcaatgtttcag

SEQ ID NO: 103637 - DNA, 73 bp, Homo sapiens
taaacaggtttattttgaaatatagcatataaatttttcaaaaagccatcaatgtttcagtttgctggcaatc

SEQ ID NO: 103638 - DNA, 74 bp, Homo sapiens
tattttgaaatatagcatataaatttttcaaaaagccatcaatgtttcagtttgctggcaatctaccagttaaa

SEQ ID NO: 103639 - DNA, 74 bp, Homo sapiens
gaaatatagcatataaatttttcaaaaagccatcaatgtttcagtttgctggcaatctaccagttaaaacacag

SEQ ID NO: 103640 - DNA, 72 bp, Homo sapiens
aaatttttcaaaaagccatcaatgtttcagtttgctggcaatctaccagttaaaacacagtaatagatcaat

SEQ ID NO: 103641 - DNA, 76 bp, Homo sapiens
tttcaaaaagccatcaatgtttcagtttgctggcaatctaccagttaaaacacagtaatagatcaattcagtgagg

SEQ ID NO: 103642 - DNA, 76 bp, Homo sapiens
aatgtttcagtttgctggcaatctaccagttaaaacacagtaatagatcaattcagtgagggagctactggtctaa

SEQ ID NO: 103643 - DNA, 78 bp, Homo sapiens
tttgctggcaatctaccagttaaaacacagtaatagatcaattcagtgagggagctactggtctaatggtctaagcta

SEQ ID NO: 103644 - DNA, 76 bp, Homo sapiens
aatctaccagttaaaacacagtaatagatcaattcagtgagggagctactggtctaatggtctaagctatggaatc

SEQ ID NO: 103645 - DNA, 80 bp, Homo sapiens
ttaaaacacagtaatagatcaattcagtgagggagctactggtctaatggtctaagctatggaatccatcctcatcagaa

SEQ ID NO: 103646 - DNA, 79 bp, Homo sapiens
atcaattcagtgagggagctactggtctaatggtctaagctatggaatccatcctcatcagaagaaataaccaaggagc

SEQ ID NO: 103647 - DNA, 76 bp, Homo sapiens
agggagctactggtctaatggtctaagctatggaatccatcctcatcagaagaaataaccaaggagcgggaatgtg

SEQ ID NO: 103648 - DNA, 76 bp, Homo sapiens
tactggtctaatggtctaagctatggaatccatcctcatcagaagaaataaccaaggagcgggaatgtggggagag

SEQ ID NO: 103649 - DNA, 74 bp, Homo sapiens
ctatggaatccatcctcatcagaagaaataaccaaggagcgggaatgtggggagaggttcacaacagaaaccac

SEQ ID NO: 103650 - DNA, 72 bp, Homo sapiens
tcctcatcagaagaaataaccaaggagcgggaatgtggggagaggttcacaacagaaaccactgcccctact

SEQ ID NO: 103651 - DNA, 70 bp, Homo sapiens
aaataaccaaggagcgggaatgtggggagaggttcacaacagaaaccactgcccctacttgcctgtgttg

SEQ ID NO: 103652 - DNA, 70 bp, Homo sapiens
aaggagcgggaatgtggggagaggttcacaacagaaaccactgcccctacttgcctgtgttggttcttaa

SEQ ID NO: 103653 - DNA, 71 bp, Homo sapiens
aatgtggggagaggttcacaacagaaaccactgcccctacttgcctgtgttggttcttaaggggctgctgg

SEQ ID NO: 103654 - DNA, 70 bp, Homo sapiens
ggagaggttcacaacagaaaccactgcccctacttgcctgtgttggttcttaaggggctgctgggaaccc

SEQ ID NO: 103655 - DNA, 69 bp, Homo sapiens
acagaaaccactgcccctacttgcctgtgttggttcttaaggggctgctgggaacccctgaaggtccaa

SEQ ID NO: 103656 - DNA, 70 bp, Homo sapiens
tgcccctacttgcctgtgttggttcttaaggggctgctgggaacccctgaaggtccaagtgtctcttttg

SEQ ID NO: 103657 - DNA, 72 bp, Homo sapiens
ttgcctgtgttggttcttaaggggctgctgggaacccctgaaggtccaagtgtctcttttgtgcaaagataa

SEQ ID NO: 103658 - DNA, 70 bp, Homo sapiens
tgttggttcttaaggggctgctgggaacccctgaaggtccaagtgtctcttttgtgcaaagataacagtt

SEQ ID NO: 103659 - DNA, 73 bp, Homo sapiens
gggctgctgggaacccctgaaggtccaagtgtctcttttgtgcaaagataacagtttctggctggtcacggtg

SEQ ID NO: 103660 - DNA, 72 bp, Homo sapiens
tgggaacccctgaaggtccaagtgtctcttttgtgcaaagataacagtttctggctggtcacggtgggtcac

SEQ ID NO: 103661 - DNA, 67 bp, Homo sapiens
aataataacaataccagtttctatctgttagtcttacgggttgaagacagaggttaaggggccaacg

SEQ ID NO: 103662 - DNA, 68 bp, Homo sapiens
aacaataccagtttctatctgttagtcttacgggttgaagacagaggttaaggggccaacgtgtggac

SEQ ID NO: 103663 - DNA, 67 bp, Homo sapiens
gtttctatctgttagtcttacgggttgaagacagaggttaaggggccaacgtgtggaccctggaaag

SEQ ID NO: 103664 - DNA, 67 bp, Homo sapiens
gttagtcttacgggttgaagacagaggttaaggggccaacgtgtggaccctggaaagggtgtgagcc

SEQ ID NO: 103665 - DNA, 69 bp, Homo sapiens
acagaggttaaggggccaacgtgtggaccctggaaagggtgtgagcccttctccacattctctttggtg

SEQ ID NO: 103666 - DNA, 73 bp, Homo sapiens
gaccctggaaagggtgtgagcccttctccacattctctttggtgtgggcccttctccacatgctctttggttc

SEQ ID NO: 103667 - DNA, 74 bp, Homo sapiens
aaagggtgtgagcccttctccacattctctttggtgtgggcccttctccacatgctctttggttccgtcagcta

SEQ ID NO: 103668 - DNA, 75 bp, Homo sapiens
cccttctccacattctctttggtgtgggcccttctccacatgctctttggttccgtcagctacagacagaggtta

SEQ ID NO: 103669 - DNA, 74 bp, Homo sapiens
acattctctttggtgtgggcccttctccacatgctctttggttccgtcagctacagacagaggttatgttttaa

SEQ ID NO: 103670 - DNA, 76 bp, Homo sapiens
tctttggtgtgggcccttctccacatgctctttggttccgtcagctacagacagaggttatgttttaagagataga

SEQ ID NO: 103671 - DNA, 79 bp, Homo sapiens
cttctccacatgctctttggttccgtcagctacagacagaggttatgttttaagagatagactgagaagtcactctcca

SEQ ID NO: 103672 - DNA, 79 bp, Homo sapiens
acatgctctttggttccgtcagctacagacagaggttatgttttaagagatagactgagaagtcactctccacatgaaa

SEQ ID NO: 103673 - DNA, 77 bp, Homo sapiens
tttggttccgtcagctacagacagaggttatgttttaagagatagactgagaagtcactctccacatgaaaccagtc

SEQ ID NO: 103674 - DNA, 80 bp, Homo sapiens
tacagacagaggttatgttttaagagatagactgagaagtcactctccacatgaaaccagtcttctcttcgagtgatatc

SEQ ID NO: 103675 - DNA, 82 bp, Homo sapiens
ttttaagagatagactgagaagtcactctccacatgaaaccagtcttctcttcgagtgatatccttcagctaagcattgtga

SEQ ID NO: 103676 - DNA, 81 bp, Homo sapiens
actgagaagtcactctccacatgaaaccagtcttctcttcgagtgatatccttcagctaagcattgtgagaaagtatccaa

SEQ ID NO: 103677 - DNA, 80 bp, Homo sapiens
aagtcactctccacatgaaaccagtcttctcttcgagtgatatccttcagctaagcattgtgagaaagtatccaagtgga

SEQ ID NO: 103678 - DNA, 82 bp, Homo sapiens
accagtcttctcttcgagtgatatccttcagctaagcattgtgagaaagtatccaagtggagcatctgaaaattgcgctcca

SEQ ID NO: 103679 - DNA, 81 bp, Homo sapiens
tcttcgagtgatatccttcagctaagcattgtgagaaagtatccaagtggagcatctgaaaattgcgctccagggagggga

SEQ ID NO: 103680 - DNA, 76 bp, Homo sapiens
taagcattgtgagaaagtatccaagtggagcatctgaaaattgcgctccagggaggggagtttagggacttgtcca

SEQ ID NO: 103681 - DNA, 71 bp, Homo sapiens
atctgaaaattgcgctccagggaggggagtttagggacttgtccatggctttcagttccctaattggcgaa

SEQ ID NO: 103682 - DNA, 73 bp, Homo sapiens
attgcgctccagggaggggagtttagggacttgtccatggctttcagttccctaattggcgaatgtcacacta

SEQ ID NO: 103683 - DNA, 70 bp, Homo sapiens
aggggagtttagggacttgtccatggctttcagttccctaattggcgaatgtcacactagtaagattttc

SEQ ID NO: 103684 - DNA, 75 bp, Homo sapiens
tttagggacttgtccatggctttcagttccctaattggcgaatgtcacactagtaagattttctggtggatgata

SEQ ID NO: 103685 - DNA, 80 bp, Homo sapiens
tccatggctttcagttccctaattggcgaatgtcacactagtaagattttctggtggatgatagatgcagagtctataaa

SEQ ID NO: 103686 - DNA, 79 bp, Homo sapiens
ttcagttccctaattggcgaatgtcacactagtaagattttctggtggatgatagatgcagagtctataaagttgctaa

SEQ ID NO: 103687 - DNA, 80 bp, Homo sapiens
ctaattggcgaatgtcacactagtaagattttctggtggatgatagatgcagagtctataaagttgctaatacttctgga

SEQ ID NO: 103688 - DNA, 80 bp, Homo sapiens
aatgtcacactagtaagattttctggtggatgatagatgcagagtctataaagttgctaatacttctggagtctgctttc

SEQ ID NO: 103689 - DNA, 77 bp, Homo sapiens
actagtaagattttctggtggatgatagatgcagagtctataaagttgctaatacttctggagtctgctttcttttg

SEQ ID NO: 103690 - DNA, 77 bp, Homo sapiens
atagatgcagagtctataaagttgctaatacttctggagtctgctttcttttgtaatctgctttatttgaggcattt

SEQ ID NO: 103691 - DNA, 75 bp, Homo sapiens
gcagagtctataaagttgctaatacttctggagtctgctttcttttgtaatctgctttatttgaggcattttagt

SEQ ID NO: 103692 - DNA, 73 bp, Homo sapiens
taaagttgctaatacttctggagtctgctttcttttgtaatctgctttatttgaggcattttagttaatatat

SEQ ID NO: 103693 - DNA, 73 bp, Homo sapiens
ttctggagtctgctttcttttgtaatctgctttatttgaggcattttagttaatatatttaaagctatttcca

SEQ ID NO: 103694 - DNA, 73 bp, Homo sapiens
gagtctgctttcttttgtaatctgctttatttgaggcattttagttaatatatttaaagctatttccaccaca

SEQ ID NO: 103695 - DNA, 73 bp, Homo sapiens
gaggcattttagttaatatatttaaagctatttccaccacaatgaataggaaatgtgacatgatttttctaag

SEQ ID NO: 103696 - DNA, 72 bp, Homo sapiens
gttaatatatttaaagctatttccaccacaatgaataggaaatgtgacatgatttttctaagttgagtaaaa

SEQ ID NO: 103697 - DNA, 72 bp, Homo sapiens
tttaaagctatttccaccacaatgaataggaaatgtgacatgatttttctaagttgagtaaaaaagaaatga

SEQ ID NO: 103698 - DNA, 76 bp, Homo sapiens
ccaccacaatgaataggaaatgtgacatgatttttctaagttgagtaaaaaagaaatgaatgaatgtatgaattga

SEQ ID NO: 103699 - DNA, 74 bp, Homo sapiens
gaataggaaatgtgacatgatttttctaagttgagtaaaaaagaaatgaatgaatgtatgaattgaaagcaggg

SEQ ID NO: 103700 - DNA, 74 bp, Homo sapiens
tgtgacatgatttttctaagttgagtaaaaaagaaatgaatgaatgtatgaattgaaagcaggggtcctgttcc

SEQ ID NO: 103701 - DNA, 77 bp, Homo sapiens
taagttgagtaaaaaagaaatgaatgaatgtatgaattgaaagcaggggtcctgttcctcatgtcccacatgctatc

SEQ ID NO: 103702 - DNA, 79 bp, Homo sapiens
aaaaagaaatgaatgaatgtatgaattgaaagcaggggtcctgttcctcatgtcccacatgctatcccacagcaaatgc

SEQ ID NO: 103703 - DNA, 80 bp, Homo sapiens
atgaatgtatgaattgaaagcaggggtcctgttcctcatgtcccacatgctatcccacagcaaatgctccttcccaaaca

SEQ ID NO: 103704 - DNA, 77 bp, Homo sapiens
aattgaaagcaggggtcctgttcctcatgtcccacatgctatcccacagcaaatgctccttcccaaacagaatcatt

SEQ ID NO: 103705 - DNA, 78 bp, Homo sapiens
ttcctcatgtcccacatgctatcccacagcaaatgctccttcccaaacagaatcatttatttggattctttgtgttta

SEQ ID NO: 103706 - DNA, 76 bp, Homo sapiens
atgtcccacatgctatcccacagcaaatgctccttcccaaacagaatcatttatttggattctttgtgtttataat

SEQ ID NO: 103707 - DNA, 73 bp, Homo sapiens
gctatcccacagcaaatgctccttcccaaacagaatcatttatttggattctttgtgtttataatttactctt

SEQ ID NO: 103708 - DNA, 73 bp, Homo sapiens
gcaaatgctccttcccaaacagaatcatttatttggattctttgtgtttataatttactctttcactaggaga

SEQ ID NO: 103709 - DNA, 69 bp, Homo sapiens
tttatttggattctttgtgtttataatttactctttcactaggagaattatgagatagaaagtattttt

SEQ ID NO: 103710 - DNA, 69 bp, Homo sapiens
ctttgtgtttataatttactctttcactaggagaattatgagatagaaagtattttttccttaagcaac

SEQ ID NO: 103711 - DNA, 69 bp, Homo sapiens
aatttactctttcactaggagaattatgagatagaaagtattttttccttaagcaacttttgtgttcaa

SEQ ID NO: 103712 - DNA, 72 bp, Homo sapiens
tcactaggagaattatgagatagaaagtattttttccttaagcaacttttgtgttcaaaaataacagagtga

SEQ ID NO: 103713 - DNA, 67 bp, Homo sapiens
gatagaaagtattttttccttaagcaacttttgtgttcaaaaataacagagtgattttaattggttc

SEQ ID NO: 103714 - DNA, 67 bp, Homo sapiens
tttttccttaagcaacttttgtgttcaaaaataacagagtgattttaattggttcttgaagggagga

SEQ ID NO: 103715 - DNA, 67 bp, Homo sapiens
ccttaagcaacttttgtgttcaaaaataacagagtgattttaattggttcttgaagggaggagggta

SEQ ID NO: 103716 - DNA, 66 bp, Homo sapiens
ttttgtgttcaaaaataacagagtgattttaattggttcttgaagggaggagggtaggggattaac

SEQ ID NO: 103717 - DNA, 71 bp, Homo sapiens
aataacagagtgattttaattggttcttgaagggaggagggtaggggattaactgcagaccagcttgataa

SEQ ID NO: 103718 - DNA, 70 bp, Homo sapiens
tgattttaattggttcttgaagggaggagggtaggggattaactgcagaccagcttgataagacgaccct

SEQ ID NO: 103719 - DNA, 72 bp, Homo sapiens
taattggttcttgaagggaggagggtaggggattaactgcagaccagcttgataagacgacccttggtgagc

SEQ ID NO: 103720 - DNA, 74 bp, Homo sapiens
gggaggagggtaggggattaactgcagaccagcttgataagacgacccttggtgagctggtagagcagtaggta

SEQ ID NO: 103721 - DNA, 77 bp, Homo sapiens
taggggattaactgcagaccagcttgataagacgacccttggtgagctggtagagcagtaggtaggtctatgttaga

SEQ ID NO: 103722 - DNA, 76 bp, Homo sapiens
attaactgcagaccagcttgataagacgacccttggtgagctggtagagcagtaggtaggtctatgttagacctta

SEQ ID NO: 103723 - DNA, 75 bp, Homo sapiens
agcttgataagacgacccttggtgagctggtagagcagtaggtaggtctatgttagaccttaaatgtggacaatg

SEQ ID NO: 103724 - DNA, 73 bp, Homo sapiens
ataagacgacccttggtgagctggtagagcagtaggtaggtctatgttagaccttaaatgtggacaatggtgg

SEQ ID NO: 103725 - DNA, 74 bp, Homo sapiens
cccttggtgagctggtagagcagtaggtaggtctatgttagaccttaaatgtggacaatggtgggtacaggaca

SEQ ID NO: 103726 - DNA, 73 bp, Homo sapiens
gtagagcagtaggtaggtctatgttagaccttaaatgtggacaatggtgggtacaggacaggcaaaggaaata

SEQ ID NO: 103727 - DNA, 69 bp, Homo sapiens
agtaggtaggtctatgttagaccttaaatgtggacaatggtgggtacaggacaggcaaaggaaataccc

SEQ ID NO: 103728 - DNA, 72 bp, Homo sapiens
tatgttagaccttaaatgtggacaatggtgggtacaggacaggcaaaggaaataccccaaagctggctgaaa

SEQ ID NO: 103729 - DNA, 73 bp, Homo sapiens
acaatggtgggtacaggacaggcaaaggaaataccccaaagctggctgaaacagcaaatttctacatggacaa

SEQ ID NO: 103730 - DNA, 74 bp, Homo sapiens
tacaggacaggcaaaggaaataccccaaagctggctgaaacagcaaatttctacatggacaactaattcttgga

SEQ ID NO: 103731 - DNA, 72 bp, Homo sapiens
aggcaaaggaaataccccaaagctggctgaaacagcaaatttctacatggacaactaattcttggatacttg

SEQ ID NO: 103732 - DNA, 77 bp, Homo sapiens
caaagctggctgaaacagcaaatttctacatggacaactaattcttggatacttggagtaaagacatcaatatatat

SEQ ID NO: 103733 - DNA, 76 bp, Homo sapiens
gaaacagcaaatttctacatggacaactaattcttggatacttggagtaaagacatcaatatatattataaagaca

SEQ ID NO: 103734 - DNA, 78 bp, Homo sapiens
tggacaactaattcttggatacttggagtaaagacatcaatatatattataaagacataaatacatatatattctata

SEQ ID NO: 103735 - DNA, 84 bp, Homo sapiens
tatatattctatataaaggtatacatgagattcacacacacaaatatattatcttcaaatgatagctaggtaatcattcactca

SEQ ID NO: 103736 - DNA, 84 bp, Homo sapiens
tctatataaaggtatacatgagattcacacacacaaatatattatcttcaaatgatagctaggtaatcattcactcagattcca

SEQ ID NO: 103737 - DNA, 82 bp, Homo sapiens
aaggtatacatgagattcacacacacaaatatattatcttcaaatgatagctaggtaatcattcactcagattccaaattca

SEQ ID NO: 103738 - DNA, 80 bp, Homo sapiens
tgagattcacacacacaaatatattatcttcaaatgatagctaggtaatcattcactcagattccaaattcaaaatttaa

SEQ ID NO: 103739 - DNA, 76 bp, Homo sapiens
cacaaatatattatcttcaaatgatagctaggtaatcattcactcagattccaaattcaaaatttaagatttagag

SEQ ID NO: 103740 - DNA, 77 bp, Homo sapiens
atcttcaaatgatagctaggtaatcattcactcagattccaaattcaaaatttaagatttagagttattgatgactg

SEQ ID NO: 103741 - DNA, 77 bp, Homo sapiens
ctaggtaatcattcactcagattccaaattcaaaatttaagatttagagttattgatgactggattaattcatgcaa

SEQ ID NO: 103742 - DNA, 76 bp, Homo sapiens
cactcagattccaaattcaaaatttaagatttagagttattgatgactggattaattcatgcaattaacatgaacc

SEQ ID NO: 103743 - DNA, 80 bp, Homo sapiens
tttagagttattgatgactggattaattcatgcaattaacatgaaccccaatatatttgagtgcaggagtactcactatc

SEQ ID NO: 103744 - DNA, 82 bp, Homo sapiens
tattgatgactggattaattcatgcaattaacatgaaccccaatatatttgagtgcaggagtactcactatctcataaggta

SEQ ID NO: 103745 - DNA, 77 bp, Homo sapiens
attaattcatgcaattaacatgaaccccaatatatttgagtgcaggagtactcactatctcataaggtagaggaacc

SEQ ID NO: 103746 - DNA, 74 bp, Homo sapiens
aattaacatgaaccccaatatatttgagtgcaggagtactcactatctcataaggtagaggaacctgtaggaag

SEQ ID NO: 103747 - DNA, 74 bp, Homo sapiens
atgaaccccaatatatttgagtgcaggagtactcactatctcataaggtagaggaacctgtaggaagtttgtta

SEQ ID NO: 103748 - DNA, 77 bp, Homo sapiens
aatatatttgagtgcaggagtactcactatctcataaggtagaggaacctgtaggaagtttgttactagccatgtga

SEQ ID NO: 103749 - DNA, 75 bp, Homo sapiens
caggagtactcactatctcataaggtagaggaacctgtaggaagtttgttactagccatgtgagcaagttagtta

SEQ ID NO: 103750 - DNA, 74 bp, Homo sapiens
gtactcactatctcataaggtagaggaacctgtaggaagtttgttactagccatgtgagcaagttagttactta

SEQ ID NO: 103751 - DNA, 72 bp, Homo sapiens
tctcataaggtagaggaacctgtaggaagtttgttactagccatgtgagcaagttagttacttaccttgccc

SEQ ID NO: 103752 - DNA, 73 bp, Homo sapiens
tagaggaacctgtaggaagtttgttactagccatgtgagcaagttagttacttaccttgccccagcctcagcc

SEQ ID NO: 103753 - DNA, 74 bp, Homo sapiens
cctcagcctcctcatccacaaaacaagaggcttggacaaggtgggttttccagctccaggaacatttatgcaaa

SEQ ID NO: 103754 - DNA, 75 bp, Homo sapiens
ctcatccacaaaacaagaggcttggacaaggtgggttttccagctccaggaacatttatgcaaatgccacttgga

SEQ ID NO: 103755 - DNA, 72 bp, Homo sapiens
aaaacaagaggcttggacaaggtgggttttccagctccaggaacatttatgcaaatgccacttggaattgtg

SEQ ID NO: 103756 - DNA, 73 bp, Homo sapiens
agaggcttggacaaggtgggttttccagctccaggaacatttatgcaaatgccacttggaattgtgggaaatc

SEQ ID NO: 103757 - DNA, 70 bp, Homo sapiens
acaaggtgggttttccagctccaggaacatttatgcaaatgccacttggaattgtgggaaatcggcccgg

SEQ ID NO: 103758 - DNA, 73 bp, Homo sapiens
ttttccagctccaggaacatttatgcaaatgccacttggaattgtgggaaatcggcccgggtctggtgcttac

SEQ ID NO: 103759 - DNA, 77 bp, Homo sapiens
aacatttatgcaaatgccacttggaattgtgggaaatcggcccgggtctggtgcttacccatgtcagcatatggcta

SEQ ID NO: 103760 - DNA, 79 bp, Homo sapiens
ttatgcaaatgccacttggaattgtgggaaatcggcccgggtctggtgcttacccatgtcagcatatggctagagtgaa

SEQ ID NO: 103761 - DNA, 74 bp, Homo sapiens
attgtgggaaatcggcccgggtctggtgcttacccatgtcagcatatggctagagtgaacttgggtttcgagtg

SEQ ID NO: 103762 - DNA, 73 bp, Homo sapiens
atcggcccgggtctggtgcttacccatgtcagcatatggctagagtgaacttgggtttcgagtgggaaggggc

SEQ ID NO: 103763 - DNA, 72 bp, Homo sapiens
tacccatgtcagcatatggctagagtgaacttgggtttcgagtgggaaggggccaggaaggaaaaagaggac

SEQ ID NO: 103764 - DNA, 69 bp, Homo sapiens
atatggctagagtgaacttgggtttcgagtgggaaggggccaggaaggaaaaagaggacccagaatcaa

SEQ ID NO: 103765 - DNA, 68 bp, Homo sapiens
agtgaacttgggtttcgagtgggaaggggccaggaaggaaaaagaggacccagaatcaactagagata

SEQ ID NO: 103766 - DNA, 68 bp, Homo sapiens
gtttcgagtgggaaggggccaggaaggaaaaagaggacccagaatcaactagagataggacattttaa

SEQ ID NO: 103767 - DNA, 68 bp, Homo sapiens
gaaggggccaggaaggaaaaagaggacccagaatcaactagagataggacattttaaggactttccca

SEQ ID NO: 103768 - DNA, 69 bp, Homo sapiens
ggaaggaaaaagaggacccagaatcaactagagataggacattttaaggactttcccatttcacatagg

SEQ ID NO: 103769 - DNA, 68 bp, Homo sapiens
aaaaagaggacccagaatcaactagagataggacattttaaggactttcccatttcacataggttttc

SEQ ID NO: 103770 - DNA, 71 bp, Homo sapiens
acccagaatcaactagagataggacattttaaggactttcccatttcacataggttttctctaatttcaca

SEQ ID NO: 103771 - DNA, 72 bp, Homo sapiens
ctagagataggacattttaaggactttcccatttcacataggttttctctaatttcacataagtattgcctg

SEQ ID NO: 103772 - DNA, 69 bp, Homo sapiens
aggacattttaaggactttcccatttcacataggttttctctaatttcacataagtattgcctgtttta

SEQ ID NO: 103773 - DNA, 71 bp, Homo sapiens
aggactttcccatttcacataggttttctctaatttcacataagtattgcctgttttaaaaagcagattca

SEQ ID NO: 103774 - DNA, 72 bp, Homo sapiens
taggttttctctaatttcacataagtattgcctgttttaaaaagcagattcaagaagatatgatttaaaaca

SEQ ID NO: 103775 - DNA, 74 bp, Homo sapiens
ctaatttcacataagtattgcctgttttaaaaagcagattcaagaagatatgatttaaaacaagtatacacata

SEQ ID NO: 103776 - DNA, 73 bp, Homo sapiens
gtattgcctgttttaaaaagcagattcaagaagatatgatttaaaacaagtatacacataaaaataactctga

SEQ ID NO: 103777 - DNA, 76 bp, Homo sapiens
tttaaaaagcagattcaagaagatatgatttaaaacaagtatacacataaaaataactctgagattctgcatcttc

SEQ ID NO: 103778 - DNA, 80 bp, Homo sapiens
gcagattcaagaagatatgatttaaaacaagtatacacataaaaataactctgagattctgcatcttctagaaaatcaca

SEQ ID NO: 103779 - DNA, 80 bp, Homo sapiens
gaagatatgatttaaaacaagtatacacataaaaataactctgagattctgcatcttctagaaaatcacagacatgttgc

SEQ ID NO: 103780 - DNA, 79 bp, Homo sapiens
ttaaaacaagtatacacataaaaataactctgagattctgcatcttctagaaaatcacagacatgttgctatcgtattc

SEQ ID NO: 103781 - DNA, 81 bp, Homo sapiens
atacacataaaaataactctgagattctgcatcttctagaaaatcacagacatgttgctatcgtattctataatttacatg

SEQ ID NO: 103782 - DNA, 82 bp, Homo sapiens
aaataactctgagattctgcatcttctagaaaatcacagacatgttgctatcgtattctataatttacatggtgattgagaa

SEQ ID NO: 103783 - DNA, 83 bp, Homo sapiens
gagattctgcatcttctagaaaatcacagacatgttgctatcgtattctataatttacatggtgattgagaatagacccacag

SEQ ID NO: 103784 - DNA, 80 bp, Homo sapiens
atcttctagaaaatcacagacatgttgctatcgtattctataatttacatggtgattgagaatagacccacagttactca

SEQ ID NO: 103785 - DNA, 79 bp, Homo sapiens
aaaatcacagacatgttgctatcgtattctataatttacatggtgattgagaatagacccacagttactcagtgttatc

SEQ ID NO: 103786 - DNA, 78 bp, Homo sapiens
agacatgttgctatcgtattctataatttacatggtgattgagaatagacccacagttactcagtgttatccaaaata

SEQ ID NO: 103787 - DNA, 75 bp, Homo sapiens
gctatcgtattctataatttacatggtgattgagaatagacccacagttactcagtgttatccaaaataatttat

SEQ ID NO: 103788 - DNA, 76 bp, Homo sapiens
tctataatttacatggtgattgagaatagacccacagttactcagtgttatccaaaataatttattattataatca

SEQ ID NO: 103789 - DNA, 74 bp, Homo sapiens
tacatggtgattgagaatagacccacagttactcagtgttatccaaaataatttattattataatcactaaaaa

SEQ ID NO: 103790 - DNA, 72 bp, Homo sapiens
ttgagaatagacccacagttactcagtgttatccaaaataatttattattataatcactaaaaatattacaa

SEQ ID NO: 103791 - DNA, 73 bp, Homo sapiens
ttattataatcactaaaaatattacaattcagctctttgattaattctgtttactccatgcccaccaaattag

SEQ ID NO: 103792 - DNA, 73 bp, Homo sapiens
aaaatattacaattcagctctttgattaattctgtttactccatgcccaccaaattagtgaagtttcactatg

SEQ ID NO: 103793 - DNA, 74 bp, Homo sapiens
aattcagctctttgattaattctgtttactccatgcccaccaaattagtgaagtttcactatgtatattacaaa

SEQ ID NO: 103794 - DNA, 72 bp, Homo sapiens
tttgattaattctgtttactccatgcccaccaaattagtgaagtttcactatgtatattacaaaataatagt

SEQ ID NO: 103795 - DNA, 70 bp, Homo sapiens
ctgtttactccatgcccaccaaattagtgaagtttcactatgtatattacaaaataatagtttaaaaata

SEQ ID NO: 103796 - DNA, 71 bp, Homo sapiens
caaattagtgaagtttcactatgtatattacaaaataatagtttaaaaataatatggatgtacaatatagt

SEQ ID NO: 103797 - DNA, 73 bp, Homo sapiens
tcactatgtatattacaaaataatagtttaaaaataatatggatgtacaatatagtttaattcctattcaata

SEQ ID NO: 103798 - DNA, 71 bp, Homo sapiens
tattacaaaataatagtttaaaaataatatggatgtacaatatagtttaattcctattcaataaacagata

SEQ ID NO: 103799 - DNA, 72 bp, Homo sapiens
taatagtttaaaaataatatggatgtacaatatagtttaattcctattcaataaacagataagcttcattat

SEQ ID NO: 103800 - DNA, 72 bp, Homo sapiens
gtttaaaaataatatggatgtacaatatagtttaattcctattcaataaacagataagcttcattattatta

SEQ ID NO: 103801 - DNA, 74 bp, Homo sapiens
tggatgtacaatatagtttaattcctattcaataaacagataagcttcattattattattacaactgttactac

SEQ ID NO: 103802 - DNA, 73 bp, Homo sapiens
tacaatatagtttaattcctattcaataaacagataagcttcattattattattacaactgttactacctcaa

SEQ ID NO: 103803 - DNA, 72 bp, Homo sapiens
ttaattcctattcaataaacagataagcttcattattattattacaactgttactacctcaaatttgtgact

SEQ ID NO: 103804 - DNA, 71 bp, Homo sapiens
tcaataaacagataagcttcattattattattacaactgttactacctcaaatttgtgacttttttactaa

SEQ ID NO: 103805 - DNA, 65 bp, Homo sapiens
tattattattacaactgttactacctcaaatttgtgacttttttactaaaataaaatttttccta

SEQ ID NO: 103806 - DNA, 66 bp, Homo sapiens
caactgttactacctcaaatttgtgacttttttactaaaataaaatttttcctatttatgatccca

SEQ ID NO: 103807 - DNA, 69 bp, Homo sapiens
tacctcaaatttgtgacttttttactaaaataaaatttttcctatttatgatcccatatagactataga

SEQ ID NO: 103808 - DNA, 71 bp, Homo sapiens
tttactaaaataaaatttttcctatttatgatcccatatagactatagagaaatttcccacaaacatagca

SEQ ID NO: 103809 - DNA, 73 bp, Homo sapiens
taaaatttttcctatttatgatcccatatagactatagagaaatttcccacaaacatagcagaattccttaga

SEQ ID NO: 103810 - DNA, 74 bp, Homo sapiens
ttcctatttatgatcccatatagactatagagaaatttcccacaaacatagcagaattccttagaaagggaata

SEQ ID NO: 103811 - DNA, 75 bp, Homo sapiens
tatgatcccatatagactatagagaaatttcccacaaacatagcagaattccttagaaagggaatatagaagctt

SEQ ID NO: 103812 - DNA, 70 bp, Homo sapiens
gaaatttcccacaaacatagcagaattccttagaaagggaatatagaagctttagctaaattttgggtgc

SEQ ID NO: 103813 - DNA, 71 bp, Homo sapiens
caaacatagcagaattccttagaaagggaatatagaagctttagctaaattttgggtgccgaatcacctat

SEQ ID NO: 103814 - DNA, 70 bp, Homo sapiens
tagcagaattccttagaaagggaatatagaagctttagctaaattttgggtgccgaatcacctatttgtt

SEQ ID NO: 103815 - DNA, 70 bp, Homo sapiens
tagaaagggaatatagaagctttagctaaattttgggtgccgaatcacctatttgttttgggacatagaa

SEQ ID NO: 103816 - DNA, 71 bp, Homo sapiens
aatatagaagctttagctaaattttgggtgccgaatcacctatttgttttgggacatagaaagtctactca

SEQ ID NO: 103817 - DNA, 70 bp, Homo sapiens
aagctttagctaaattttgggtgccgaatcacctatttgttttgggacatagaaagtctactcaagaatc

SEQ ID NO: 103818 - DNA, 71 bp, Homo sapiens
taaattttgggtgccgaatcacctatttgttttgggacatagaaagtctactcaagaatccagagtaagac

SEQ ID NO: 103819 - DNA, 76 bp, Homo sapiens
gaatcacctatttgttttgggacatagaaagtctactcaagaatccagagtaagaccttgatctcagtcttgctta

SEQ ID NO: 103820 - DNA, 79 bp, Homo sapiens
ttgggacatagaaagtctactcaagaatccagagtaagaccttgatctcagtcttgcttacaaggtcttgatctgtgaa

SEQ ID NO: 103821 - DNA, 80 bp, Homo sapiens
agtaagaccttgatctcagtcttgcttacaaggtcttgatctgtgaaggaagtgctgagatatctacatttgtcaattaa

SEQ ID NO: 103822 - DNA, 80 bp, Homo sapiens
cttgatctcagtcttgcttacaaggtcttgatctgtgaaggaagtgctgagatatctacatttgtcaattaaataataaa

SEQ ID NO: 103823 - DNA, 78 bp, Homo sapiens
agtcttgcttacaaggtcttgatctgtgaaggaagtgctgagatatctacatttgtcaattaaataataaattgccaa

SEQ ID NO: 103824 - DNA, 79 bp, Homo sapiens
aggtcttgatctgtgaaggaagtgctgagatatctacatttgtcaattaaataataaattgccaaatatcagccttaga

SEQ ID NO: 103825 - DNA, 79 bp, Homo sapiens
agtgctgagatatctacatttgtcaattaaataataaattgccaaatatcagccttagagtattctataggcactcgga

SEQ ID NO: 103826 - DNA, 75 bp, Homo sapiens
gtcaattaaataataaattgccaaatatcagccttagagtattctataggcactcggataagatggcaaatactt

SEQ ID NO: 103827 - DNA, 76 bp, Homo sapiens
aataaattgccaaatatcagccttagagtattctataggcactcggataagatggcaaatactttcatattaatcc

SEQ ID NO: 103828 - DNA, 78 bp, Homo sapiens
attgccaaatatcagccttagagtattctataggcactcggataagatggcaaatactttcatattaatcctgttatc

SEQ ID NO: 103829 - DNA, 76 bp, Homo sapiens
cagccttagagtattctataggcactcggataagatggcaaatactttcatattaatcctgttatcttcaaatttg

SEQ ID NO: 103830 - DNA, 75 bp, Homo sapiens
ttctataggcactcggataagatggcaaatactttcatattaatcctgttatcttcaaatttggaaaacagactg

SEQ ID NO: 103831 - DNA, 74 bp, Homo sapiens
aggcactcggataagatggcaaatactttcatattaatcctgttatcttcaaatttggaaaacagactgttata

SEQ ID NO: 103832 - DNA, 73 bp, Homo sapiens
gatggcaaatactttcatattaatcctgttatcttcaaatttggaaaacagactgttataagaaacagttggc

SEQ ID NO: 103833 - DNA, 71 bp, Homo sapiens
actttcatattaatcctgttatcttcaaatttggaaaacagactgttataagaaacagttggctaagacta

SEQ ID NO: 103834 - DNA, 74 bp, Homo sapiens
taatcctgttatcttcaaatttggaaaacagactgttataagaaacagttggctaagactatcaatatcctgct

SEQ ID NO: 103835 - DNA, 73 bp, Homo sapiens
atcttcaaatttggaaaacagactgttataagaaacagttggctaagactatcaatatcctgctttcttgtgg

SEQ ID NO: 103836 - DNA, 74 bp, Homo sapiens
ttggaaaacagactgttataagaaacagttggctaagactatcaatatcctgctttcttgtggggtcatgaaat

SEQ ID NO: 103837 - DNA, 76 bp, Homo sapiens
gactgttataagaaacagttggctaagactatcaatatcctgctttcttgtggggtcatgaaattgccatagttta

SEQ ID NO: 103838 - DNA, 72 bp, Homo sapiens
agttggctaagactatcaatatcctgctttcttgtggggtcatgaaattgccatagtttacaaaaactttaa

SEQ ID NO: 103839 - DNA, 72 bp, Homo sapiens
agactatcaatatcctgctttcttgtggggtcatgaaattgccatagtttacaaaaactttaaaatttcatg

SEQ ID NO: 103840 - DNA, 71 bp, Homo sapiens
cctgctttcttgtggggtcatgaaattgccatagtttacaaaaactttaaaatttcatgttgtagtctgaa

SEQ ID NO: 103841 - DNA, 70 bp, Homo sapiens
catgaaattgccatagtttacaaaaactttaaaatttcatgttgtagtctgaaataaaaaatagctggaa

SEQ ID NO: 103842 - DNA, 68 bp, Homo sapiens
gccatagtttacaaaaactttaaaatttcatgttgtagtctgaaataaaaaatagctggaaaaagcaa

SEQ ID NO: 103843 - DNA, 68 bp, Homo sapiens
aactttaaaatttcatgttgtagtctgaaataaaaaatagctggaaaaagcaacaatagaagtaataa

SEQ ID NO: 103844 - DNA, 72 bp, Homo sapiens
tttcatgttgtagtctgaaataaaaaatagctggaaaaagcaacaatagaagtaataatcctattctctaat

SEQ ID NO: 103845 - DNA, 71 bp, Homo sapiens
tgttgtagtctgaaataaaaaatagctggaaaaagcaacaatagaagtaataatcctattctctaattacg

SEQ ID NO: 103846 - DNA, 69 bp, Homo sapiens
taaaaaatagctggaaaaagcaacaatagaagtaataatcctattctctaattacgtaattatattttc

SEQ ID NO: 103847 - DNA, 69 bp, Homo sapiens
aatagctggaaaaagcaacaatagaagtaataatcctattctctaattacgtaattatattttctaaat

SEQ ID NO: 103848 - DNA, 73 bp, Homo sapiens
gcaacaatagaagtaataatcctattctctaattacgtaattatattttctaaatttcatgaaactgctaaga

SEQ ID NO: 103849 - DNA, 73 bp, Homo sapiens
gaagtaataatcctattctctaattacgtaattatattttctaaatttcatgaaactgctaagatctgtattg

SEQ ID NO: 103850 - DNA, 74 bp, Homo sapiens
tcctattctctaattacgtaattatattttctaaatttcatgaaactgctaagatctgtattgtaatggttaca

SEQ ID NO: 103851 - DNA, 72 bp, Homo sapiens
attacgtaattatattttctaaatttcatgaaactgctaagatctgtattgtaatggttacatattttcagg

SEQ ID NO: 103852 - DNA, 74 bp, Homo sapiens
tatattttctaaatttcatgaaactgctaagatctgtattgtaatggttacatattttcaggttacattattac

SEQ ID NO: 103853 - DNA, 74 bp, Homo sapiens
tttctaaatttcatgaaactgctaagatctgtattgtaatggttacatattttcaggttacattattactatta

SEQ ID NO: 103854 - DNA, 78 bp, Homo sapiens
catgaaactgctaagatctgtattgtaatggttacatattttcaggttacattattactattatacaattgatattca

SEQ ID NO: 103855 - DNA, 77 bp, Homo sapiens
gctaagatctgtattgtaatggttacatattttcaggttacattattactattatacaattgatattcaataaatga

SEQ ID NO: 103856 - DNA, 71 bp, Homo sapiens
ggttacatattttcaggttacattattactattatacaattgatattcaataaatgatacctttttatggg

SEQ ID NO: 103857 - DNA, 74 bp, Homo sapiens
tcaggttacattattactattatacaattgatattcaataaatgatacctttttatgggtaatacattgaaatg

SEQ ID NO: 103858 - DNA, 73 bp, Homo sapiens
ttactattatacaattgatattcaataaatgatacctttttatgggtaatacattgaaatggaatagtaaaca

SEQ ID NO: 103859 - DNA, 71 bp, Homo sapiens
tgatacctttttatgggtaatacattgaaatggaatagtaaacattttttgcggagacttctcataaaaca

SEQ ID NO: 103860 - DNA, 75 bp, Homo sapiens
tacattgaaatggaatagtaaacattttttgcggagacttctcataaaacatcattgtctacctctcaaacaata

SEQ ID NO: 103861 - DNA, 73 bp, Homo sapiens
gtaaacattttttgcggagacttctcataaaacatcattgtctacctctcaaacaatagttaagtgagattta

SEQ ID NO: 103862 - DNA, 71 bp, Homo sapiens
ttttgcggagacttctcataaaacatcattgtctacctctcaaacaatagttaagtgagatttaaactttt

SEQ ID NO: 103863 - DNA, 72 bp, Homo sapiens
acttctcataaaacatcattgtctacctctcaaacaatagttaagtgagatttaaacttttttatatgattg

SEQ ID NO: 103864 - DNA, 72 bp, Homo sapiens
acatcattgtctacctctcaaacaatagttaagtgagatttaaacttttttatatgattgttttggacttgc

SEQ ID NO: 103865 - DNA, 70 bp, Homo sapiens
gtctacctctcaaacaatagttaagtgagatttaaacttttttatatgattgttttggacttgcttagaa

SEQ ID NO: 103866 - DNA, 68 bp, Homo sapiens
acaatagttaagtgagatttaaacttttttatatgattgttttggacttgcttagaaaaatactacca

SEQ ID NO: 103867 - DNA, 67 bp, Homo sapiens
gtgagatttaaacttttttatatgattgttttggacttgcttagaaaaatactaccatttaaaacta

SEQ ID NO: 103868 - DNA, 66 bp, Homo sapiens
aaacttttttatatgattgttttggacttgcttagaaaaatactaccatttaaaactatattctaa

SEQ ID NO: 103869 - DNA, 68 bp, Homo sapiens
ttggacttgcttagaaaaatactaccatttaaaactatattctaaaaggtaaggcaaattttgctaga

SEQ ID NO: 103870 - DNA, 65 bp, Homo sapiens
aaatactaccatttaaaactatattctaaaaggtaaggcaaattttgctagaatttttgaattaa

SEQ ID NO: 103871 - DNA, 66 bp, Homo sapiens
aaactatattctaaaaggtaaggcaaattttgctagaatttttgaattaaaaaatggtgatatttc

SEQ ID NO: 103872 - DNA, 69 bp, Homo sapiens
tctaaaaggtaaggcaaattttgctagaatttttgaattaaaaaatggtgatatttctgtagagttatc

SEQ ID NO: 103873 - DNA, 69 bp, Homo sapiens
ggtaaggcaaattttgctagaatttttgaattaaaaaatggtgatatttctgtagagttatctttttga

SEQ ID NO: 103874 - DNA, 71 bp, Homo sapiens
tgctagaatttttgaattaaaaaatggtgatatttctgtagagttatctttttgaaaggtagagagaaaga

SEQ ID NO: 103875 - DNA, 70 bp, Homo sapiens
tttgaattaaaaaatggtgatatttctgtagagttatctttttgaaaggtagagagaaagagtggaaaga

SEQ ID NO: 103876 - DNA, 67 bp, Homo sapiens
aaaaatggtgatatttctgtagagttatctttttgaaaggtagagagaaagagtggaaagatttttt

SEQ ID NO: 103877 - DNA, 68 bp, Homo sapiens
ggtgatatttctgtagagttatctttttgaaaggtagagagaaagagtggaaagatttttttaataaa

SEQ ID NO: 103878 - DNA, 70 bp, Homo sapiens
tagagagaaagagtggaaagatttttttaataaaattaaactaaaacatctgaaaatagatatgacttga

SEQ ID NO: 103879 - DNA, 70 bp, Homo sapiens
gaaagagtggaaagatttttttaataaaattaaactaaaacatctgaaaatagatatgacttgatagcta

SEQ ID NO: 103880 - DNA, 67 bp, Homo sapiens
aagatttttttaataaaattaaactaaaacatctgaaaatagatatgacttgatagctaatttttaa

SEQ ID NO: 103881 - DNA, 74 bp, Homo sapiens
aatttttaatttatatttatacgtgcaatgaaatctatattcagagatcatccaaaaattattagaaacataca

SEQ ID NO: 103882 - DNA, 77 bp, Homo sapiens
ttatatttatacgtgcaatgaaatctatattcagagatcatccaaaaattattagaaacatacaaacaacacttgaa

SEQ ID NO: 103883 - DNA, 76 bp, Homo sapiens
ttatacgtgcaatgaaatctatattcagagatcatccaaaaattattagaaacatacaaacaacacttgaaaaatg

SEQ ID NO: 103884 - DNA, 76 bp, Homo sapiens
tgaaatctatattcagagatcatccaaaaattattagaaacatacaaacaacacttgaaaaatgttatcacatatt

SEQ ID NO: 103885 - DNA, 72 bp, Homo sapiens
catccaaaaattattagaaacatacaaacaacacttgaaaaatgttatcacatatttttgcagagtaggttg

SEQ ID NO: 103886 - DNA, 72 bp, Homo sapiens
ttagaaacatacaaacaacacttgaaaaatgttatcacatatttttgcagagtaggttgttttgaaaacagc

SEQ ID NO: 103887 - DNA, 74 bp, Homo sapiens
acatacaaacaacacttgaaaaatgttatcacatatttttgcagagtaggttgttttgaaaacagccagagcaa

SEQ ID NO: 103888 - DNA, 76 bp, Homo sapiens
cttgaaaaatgttatcacatatttttgcagagtaggttgttttgaaaacagccagagcaaagaaacagatgatcac

SEQ ID NO: 103889 - DNA, 76 bp, Homo sapiens
gttatcacatatttttgcagagtaggttgttttgaaaacagccagagcaaagaaacagatgatcaccaaaatatta

SEQ ID NO: 103890 - DNA, 75 bp, Homo sapiens
acatatttttgcagagtaggttgttttgaaaacagccagagcaaagaaacagatgatcaccaaaatattaccaca

SEQ ID NO: 103891 - DNA, 73 bp, Homo sapiens
agtaggttgttttgaaaacagccagagcaaagaaacagatgatcaccaaaatattaccacaaatgagcccaaa

SEQ ID NO: 103892 - DNA, 73 bp, Homo sapiens
gttgttttgaaaacagccagagcaaagaaacagatgatcaccaaaatattaccacaaatgagcccaaaaataa

SEQ ID NO: 103893 - DNA, 75 bp, Homo sapiens
cagccagagcaaagaaacagatgatcaccaaaatattaccacaaatgagcccaaaaataaattataggtcatttc

SEQ ID NO: 103894 - DNA, 74 bp, Homo sapiens
gcaaagaaacagatgatcaccaaaatattaccacaaatgagcccaaaaataaattataggtcatttctagttga

SEQ ID NO: 103895 - DNA, 74 bp, Homo sapiens
gatgatcaccaaaatattaccacaaatgagcccaaaaataaattataggtcatttctagttgaaccactgacca

SEQ ID NO: 103896 - DNA, 72 bp, Homo sapiens
gatcaccaaaatattaccacaaatgagcccaaaaataaattataggtcatttctagttgaaccactgaccaa

SEQ ID NO: 103897 - DNA, 73 bp, Homo sapiens
atattaccacaaatgagcccaaaaataaattataggtcatttctagttgaaccactgaccaattagtgcacta

SEQ ID NO: 103898 - DNA, 72 bp, Homo sapiens
accacaaatgagcccaaaaataaattataggtcatttctagttgaaccactgaccaattagtgcactaatct

SEQ ID NO: 103899 - DNA, 71 bp, Homo sapiens
gagcccaaaaataaattataggtcatttctagttgaaccactgaccaattagtgcactaatcttaagtaac

SEQ ID NO: 103900 - DNA, 71 bp, Homo sapiens
gcccaaaaataaattataggtcatttctagttgaaccactgaccaattagtgcactaatcttaagtaacta

SEQ ID NO: 103901 - DNA, 75 bp, Homo sapiens
taaattataggtcatttctagttgaaccactgaccaattagtgcactaatcttaagtaactacatagcacactcc

SEQ ID NO: 103902 - DNA, 75 bp, Homo sapiens
tataggtcatttctagttgaaccactgaccaattagtgcactaatcttaagtaactacatagcacactcccattt

SEQ ID NO: 103903 - DNA, 74 bp, Homo sapiens
taggtcatttctagttgaaccactgaccaattagtgcactaatcttaagtaactacatagcacactcccatttt

SEQ ID NO: 103904 - DNA, 73 bp, Homo sapiens
gtcatttctagttgaaccactgaccaattagtgcactaatcttaagtaactacatagcacactcccatttttt

SEQ ID NO: 103905 - DNA, 71 bp, Homo sapiens
accactgaccaattagtgcactaatcttaagtaactacatagcacactcccatttttttctttcctagtta

SEQ ID NO: 103906 - DNA, 71 bp, Homo sapiens
agtgcactaatcttaagtaactacatagcacactcccatttttttctttcctagttatcttaacaattcaa

SEQ ID NO: 103907 - DNA, 73 bp, Homo sapiens
cttaagtaactacatagcacactcccatttttttctttcctagttatcttaacaattcaaatgcatgtgaaga

SEQ ID NO: 103908 - DNA, 74 bp, Homo sapiens
gtaactacatagcacactcccatttttttctttcctagttatcttaacaattcaaatgcatgtgaagataccca

SEQ ID NO: 103909 - DNA, 71 bp, Homo sapiens
tttttctttcctagttatcttaacaattcaaatgcatgtgaagatacccattttgaggagaatttaaaatg

SEQ ID NO: 103910 - DNA, 73 bp, Homo sapiens
ttcctagttatcttaacaattcaaatgcatgtgaagatacccattttgaggagaatttaaaatgtattattgg

SEQ ID NO: 103911 - DNA, 69 bp, Homo sapiens
cccattttgaggagaatttaaaatgtattattggttgatacagcacttctaggtaagttctcaaggggg

SEQ ID NO: 103912 - DNA, 72 bp, Homo sapiens
atttaaaatgtattattggttgatacagcacttctaggtaagttctcaaggggggcctgcagcaaatattta

SEQ ID NO: 103913 - DNA, 73 bp, Homo sapiens
aaatgtattattggttgatacagcacttctaggtaagttctcaaggggggcctgcagcaaatatttacataaa

SEQ ID NO: 103914 - DNA, 74 bp, Homo sapiens
ttgatacagcacttctaggtaagttctcaaggggggcctgcagcaaatatttacataaatgtggactttaagat

SEQ ID NO: 103915 - DNA, 71 bp, Homo sapiens
acttctaggtaagttctcaaggggggcctgcagcaaatatttacataaatgtggactttaagattgtttca

SEQ ID NO: 103916 - DNA, 73 bp, Homo sapiens
taagttctcaaggggggcctgcagcaaatatttacataaatgtggactttaagattgtttcagaagtattctg

SEQ ID NO: 103917 - DNA, 71 bp, Homo sapiens
gggggcctgcagcaaatatttacataaatgtggactttaagattgtttcagaagtattctgttttaggagg

SEQ ID NO: 103918 - DNA, 73 bp, Homo sapiens
cctgcagcaaatatttacataaatgtggactttaagattgtttcagaagtattctgttttaggaggttctgta

SEQ ID NO: 103919 - DNA, 72 bp, Homo sapiens
tacataaatgtggactttaagattgtttcagaagtattctgttttaggaggttctgtaattgtcaacttctc

SEQ ID NO: 103920 - DNA, 69 bp, Homo sapiens
tggactttaagattgtttcagaagtattctgttttaggaggttctgtaattgtcaacttctcggtttag

SEQ ID NO: 103921 - DNA, 68 bp, Homo sapiens
agattgtttcagaagtattctgttttaggaggttctgtaattgtcaacttctcggtttaggaagaacc

SEQ ID NO: 103922 - DNA, 67 bp, Homo sapiens
gaagtattctgttttaggaggttctgtaattgtcaacttctcggtttaggaagaacctcacgtttta

SEQ ID NO: 103923 - DNA, 67 bp, Homo sapiens
attctgttttaggaggttctgtaattgtcaacttctcggtttaggaagaacctcacgttttagagaa

SEQ ID NO: 103924 - DNA, 70 bp, Homo sapiens
aggttctgtaattgtcaacttctcggtttaggaagaacctcacgttttagagaagaatattctagatcaa

SEQ ID NO: 103925 - DNA, 69 bp, Homo sapiens
ttgtcaacttctcggtttaggaagaacctcacgttttagagaagaatattctagatcaagtctttttcc

SEQ ID NO: 103926 - DNA, 70 bp, Homo sapiens
ggaagaacctcacgttttagagaagaatattctagatcaagtctttttccttaatgcagaaatagtaaag

SEQ ID NO: 103927 - DNA, 70 bp, Homo sapiens
cctcacgttttagagaagaatattctagatcaagtctttttccttaatgcagaaatagtaaagtttctaa

SEQ ID NO: 103928 - DNA, 72 bp, Homo sapiens
tagagaagaatattctagatcaagtctttttccttaatgcagaaatagtaaagtttctaaaatagaaatcat

SEQ ID NO: 103929 - DNA, 67 bp, Homo sapiens
ccttaatgcagaaatagtaaagtttctaaaatagaaatcattttgtttagccttctctttaaccaaa

SEQ ID NO: 103930 - DNA, 65 bp, Homo sapiens
agaaatagtaaagtttctaaaatagaaatcattttgtttagccttctctttaaccaaaaacacca

SEQ ID NO: 103931 - DNA, 68 bp, Homo sapiens
tctaaaatagaaatcattttgtttagccttctctttaaccaaaaacaccaaataatgaagtagacttc

SEQ ID NO: 103932 - DNA, 68 bp, Homo sapiens
gaaatcattttgtttagccttctctttaaccaaaaacaccaaataatgaagtagacttctaaggagga

SEQ ID NO: 103933 - DNA, 67 bp, Homo sapiens
tttgtttagccttctctttaaccaaaaacaccaaataatgaagtagacttctaaggaggaaagaaga

SEQ ID NO: 103934 - DNA, 65 bp, Homo sapiens
gccttctctttaaccaaaaacaccaaataatgaagtagacttctaaggaggaaagaagaaaactt

SEQ ID NO: 103935 - DNA, 67 bp, Homo sapiens
ccaaaaacaccaaataatgaagtagacttctaaggaggaaagaagaaaactttaccaaatatgccag

SEQ ID NO: 103936 - DNA, 66 bp, Homo sapiens
aagtagacttctaaggaggaaagaagaaaactttaccaaatatgccagtgggggctccacttttag

SEQ ID NO: 103937 - DNA, 69 bp, Homo sapiens
taaggaggaaagaagaaaactttaccaaatatgccagtgggggctccacttttagtctgcaaacctcta

SEQ ID NO: 103938 - DNA, 76 bp, Homo sapiens
tttaccaaatatgccagtgggggctccacttttagtctgcaaacctctacacctgggagctgcgctgtcaaattga

SEQ ID NO: 103939 - DNA, 77 bp, Homo sapiens
aatatgccagtgggggctccacttttagtctgcaaacctctacacctgggagctgcgctgtcaaattgagtcaggtc

SEQ ID NO: 103940 - DNA, 83 bp, Homo sapiens
gctccacttttagtctgcaaacctctacacctgggagctgcgctgtcaaattgagtcaggtcctgattgagctgaatgataga

SEQ ID NO: 103941 - DNA, 82 bp, Homo sapiens
acttttagtctgcaaacctctacacctgggagctgcgctgtcaaattgagtcaggtcctgattgagctgaatgatagacaca

SEQ ID NO: 103942 - DNA, 83 bp, Homo sapiens
aaacctctacacctgggagctgcgctgtcaaattgagtcaggtcctgattgagctgaatgatagacacatagtgcccagacac

SEQ ID NO: 103943 - DNA, 86 bp, Homo sapiens
acctgggagctgcgctgtcaaattgagtcaggtcctgattgagctgaatgatagacacatagtgcccagacaccgtgcacagtgaa

SEQ ID NO: 103944 - DNA, 83 bp, Homo sapiens
aaattgagtcaggtcctgattgagctgaatgatagacacatagtgcccagacaccgtgcacagtgaactcactctaggagacc

SEQ ID NO: 103945 - DNA, 82 bp, Homo sapiens
aggtcctgattgagctgaatgatagacacatagtgcccagacaccgtgcacagtgaactcactctaggagacccgcacgccc

SEQ ID NO: 103946 - DNA, 81 bp, Homo sapiens
attgagctgaatgatagacacatagtgcccagacaccgtgcacagtgaactcactctaggagacccgcacgcccccttctc

SEQ ID NO: 103947 - DNA, 79 bp, Homo sapiens
atgatagacacatagtgcccagacaccgtgcacagtgaactcactctaggagacccgcacgcccccttctcccaattca

SEQ ID NO: 103948 - DNA, 76 bp, Homo sapiens
atagtgcccagacaccgtgcacagtgaactcactctaggagacccgcacgcccccttctcccaattcacccactgc

SEQ ID NO: 103949 - DNA, 76 bp, Homo sapiens
ccgtgcacagtgaactcactctaggagacccgcacgcccccttctcccaattcacccactgctctggaggtcatta

SEQ ID NO: 103950 - DNA, 73 bp, Homo sapiens
agtgaactcactctaggagacccgcacgcccccttctcccaattcacccactgctctggaggtcattatttaa

SEQ ID NO: 103951 - DNA, 72 bp, Homo sapiens
tctaggagacccgcacgcccccttctcccaattcacccactgctctggaggtcattatttaacaccggcaaa

SEQ ID NO: 103952 - DNA, 72 bp, Homo sapiens
cgcacgcccccttctcccaattcacccactgctctggaggtcattatttaacaccggcaaattgaacgacaa

SEQ ID NO: 103953 - DNA, 74 bp, Homo sapiens
ccttctcccaattcacccactgctctggaggtcattatttaacaccggcaaattgaacgacaacatgaaatgaa

SEQ ID NO: 103954 - DNA, 77 bp, Homo sapiens
aattcacccactgctctggaggtcattatttaacaccggcaaattgaacgacaacatgaaatgaagtgcaagatgta

SEQ ID NO: 103955 - DNA, 77 bp, Homo sapiens
actgctctggaggtcattatttaacaccggcaaattgaacgacaacatgaaatgaagtgcaagatgtagatatttct

SEQ ID NO: 103956 - DNA, 77 bp, Homo sapiens
aaattgaacgacaacatgaaatgaagtgcaagatgtagatatttcttccccctcactaatctcgctcacaagagaat

SEQ ID NO: 103957 - DNA, 77 bp, Homo sapiens
aacatgaaatgaagtgcaagatgtagatatttcttccccctcactaatctcgctcacaagagaattcattcttttct

SEQ ID NO: 103958 - DNA, 74 bp, Homo sapiens
aaatgaagtgcaagatgtagatatttcttccccctcactaatctcgctcacaagagaattcattcttttctttt

SEQ ID NO: 103959 - DNA, 76 bp, Homo sapiens
atatttcttccccctcactaatctcgctcacaagagaattcattcttttctttttgcctcaggcatatccaggcta

SEQ ID NO: 103960 - DNA, 77 bp, Homo sapiens
tcgctcacaagagaattcattcttttctttttgcctcaggcatatccaggctagcaattttcattttgctacctaaa

SEQ ID NO: 103961 - DNA, 75 bp, Homo sapiens
caagagaattcattcttttctttttgcctcaggcatatccaggctagcaattttcattttgctacctaaatgatt

SEQ ID NO: 103962 - DNA, 72 bp, Homo sapiens
tttttgcctcaggcatatccaggctagcaattttcattttgctacctaaatgatttccccatcccccacctt

SEQ ID NO: 103963 - DNA, 70 bp, Homo sapiens
tagcaattttcattttgctacctaaatgatttccccatcccccacctttcccaattagagtggaaatgga

SEQ ID NO: 103964 - DNA, 68 bp, Homo sapiens
ttttcattttgctacctaaatgatttccccatcccccacctttcccaattagagtggaaatggattaa

SEQ ID NO: 103965 - DNA, 66 bp, Homo sapiens
atgatttccccatcccccacctttcccaattagagtggaaatggattaagacttcaggttaacccc

SEQ ID NO: 103966 - DNA, 65 bp, Homo sapiens
cccacctttcccaattagagtggaaatggattaagacttcaggttaacccctccgttactgggaa

SEQ ID NO: 103967 - DNA, 67 bp, Homo sapiens
ctttcccaattagagtggaaatggattaagacttcaggttaacccctccgttactgggaatgagaag

SEQ ID NO: 103968 - DNA, 67 bp, Homo sapiens
tggaaatggattaagacttcaggttaacccctccgttactgggaatgagaaggaaataacgttatta

SEQ ID NO: 103969 - DNA, 68 bp, Homo sapiens
tggattaagacttcaggttaacccctccgttactgggaatgagaaggaaataacgttattatgtgtaa

SEQ ID NO: 103970 - DNA, 66 bp, Homo sapiens
acttcaggttaacccctccgttactgggaatgagaaggaaataacgttattatgtgtaagctttat

SEQ ID NO: 103971 - DNA, 70 bp, Homo sapiens
cctccgttactgggaatgagaaggaaataacgttattatgtgtaagctttattttcaccgttgtgtatga

SEQ ID NO: 103972 - DNA, 76 bp, Homo sapiens
tgggaatgagaaggaaataacgttattatgtgtaagctttattttcaccgttgtgtatgatgctcttttctgatca

SEQ ID NO: 103973 - DNA, 75 bp, Homo sapiens
gagaaggaaataacgttattatgtgtaagctttattttcaccgttgtgtatgatgctcttttctgatcatggtaa

SEQ ID NO: 103974 - DNA, 75 bp, Homo sapiens
ataacgttattatgtgtaagctttattttcaccgttgtgtatgatgctcttttctgatcatggtaaacacagatt

SEQ ID NO: 103975 - DNA, 76 bp, Homo sapiens
tgtaagctttattttcaccgttgtgtatgatgctcttttctgatcatggtaaacacagatttaattaatcccactc

SEQ ID NO: 103976 - DNA, 74 bp, Homo sapiens
ctttattttcaccgttgtgtatgatgctcttttctgatcatggtaaacacagatttaattaatcccactctccc

SEQ ID NO: 103977 - DNA, 75 bp, Homo sapiens
ttgtgtatgatgctcttttctgatcatggtaaacacagatttaattaatcccactctccccaaaagacattcctt

SEQ ID NO: 103978 - DNA, 72 bp, Homo sapiens
taaacacagatttaattaatcccactctccccaaaagacattcctttagtgaagatatgacactgccttaag

SEQ ID NO: 103979 - DNA, 70 bp, Homo sapiens
atttaattaatcccactctccccaaaagacattcctttagtgaagatatgacactgccttaaggtaaaga

SEQ ID NO: 103980 - DNA, 72 bp, Homo sapiens
aatcccactctccccaaaagacattcctttagtgaagatatgacactgccttaaggtaaagagcaagagaaa

SEQ ID NO: 103981 - DNA, 70 bp, Homo sapiens
cccaaaagacattcctttagtgaagatatgacactgccttaaggtaaagagcaagagaaaaacttcttta

SEQ ID NO: 103982 - DNA, 72 bp, Homo sapiens
attcctttagtgaagatatgacactgccttaaggtaaagagcaagagaaaaacttctttagccagaatgtta

SEQ ID NO: 103983 - DNA, 72 bp, Homo sapiens
gaagatatgacactgccttaaggtaaagagcaagagaaaaacttctttagccagaatgttattctgttaact

SEQ ID NO: 103984 - DNA, 71 bp, Homo sapiens
acactgccttaaggtaaagagcaagagaaaaacttctttagccagaatgttattctgttaacttgtcatct

SEQ ID NO: 103985 - DNA, 72 bp, Homo sapiens
aaaacttctttagccagaatgttattctgttaacttgtcatctttaaagtgttctagaatgcttatgagtaa

SEQ ID NO: 103986 - DNA, 73 bp, Homo sapiens
tagccagaatgttattctgttaacttgtcatctttaaagtgttctagaatgcttatgagtaaaattaggaaat

SEQ ID NO: 103987 - DNA, 72 bp, Homo sapiens
gttattctgttaacttgtcatctttaaagtgttctagaatgcttatgagtaaaattaggaaatttggataca

SEQ ID NO: 103988 - DNA, 73 bp, Homo sapiens
taaagtgttctagaatgcttatgagtaaaattaggaaatttggatacaaagtaggaagttatatggaagcata

SEQ ID NO: 103989 - DNA, 73 bp, Homo sapiens
gttctagaatgcttatgagtaaaattaggaaatttggatacaaagtaggaagttatatggaagcataaaagca

SEQ ID NO: 103990 - DNA, 72 bp, Homo sapiens
tgagtaaaattaggaaatttggatacaaagtaggaagttatatggaagcataaaagcacattggttcttcag

SEQ ID NO: 103991 - DNA, 74 bp, Homo sapiens
taggaaatttggatacaaagtaggaagttatatggaagcataaaagcacattggttcttcagttacagagaatg

SEQ ID NO: 103992 - DNA, 76 bp, Homo sapiens
ttggatacaaagtaggaagttatatggaagcataaaagcacattggttcttcagttacagagaatggatacaacaa

SEQ ID NO: 103993 - DNA, 73 bp, Homo sapiens
caaagtaggaagttatatggaagcataaaagcacattggttcttcagttacagagaatggatacaacaaaagt

SEQ ID NO: 103994 - DNA, 73 bp, Homo sapiens
tatggaagcataaaagcacattggttcttcagttacagagaatggatacaacaaaagttaatacttccttggt

SEQ ID NO: 103995 - DNA, 70 bp, Homo sapiens
aagcataaaagcacattggttcttcagttacagagaatggatacaacaaaagttaatacttccttggttt

SEQ ID NO: 103996 - DNA, 70 bp, Homo sapiens
gcacattggttcttcagttacagagaatggatacaacaaaagttaatacttccttggtttttactaagct

SEQ ID NO: 103997 - DNA, 72 bp, Homo sapiens
tcagttacagagaatggatacaacaaaagttaatacttccttggtttttactaagcttgaaatatctggatc

SEQ ID NO: 103998 - DNA, 70 bp, Homo sapiens
cagagaatggatacaacaaaagttaatacttccttggtttttactaagcttgaaatatctggatctaaaa

SEQ ID NO: 103999 - DNA, 66 bp, Homo sapiens
atacaacaaaagttaatacttccttggtttttactaagcttgaaatatctggatctaaaaaaatta

SEQ ID NO: 104000 - DNA, 67 bp, Homo sapiens
gttaatacttccttggtttttactaagcttgaaatatctggatctaaaaaaattaagtgtgggataa

SEQ ID NO: 104001 - DNA, 75 bp, Homo sapiens
ctaagcttgaaatatctggatctaaaaaaattaagtgtgggataaatatctagaaaatgctggatcatctgaaac

SEQ ID NO: 104002 - DNA, 76 bp, Homo sapiens
tatctggatctaaaaaaattaagtgtgggataaatatctagaaaatgctggatcatctgaaacttatcacgtagct

SEQ ID NO: 104003 - DNA, 72 bp, Homo sapiens
taaaaaaattaagtgtgggataaatatctagaaaatgctggatcatctgaaacttatcacgtagcttttccc

SEQ ID NO: 104004 - DNA, 73 bp, Homo sapiens
aaattaagtgtgggataaatatctagaaaatgctggatcatctgaaacttatcacgtagcttttccccctaca

SEQ ID NO: 104005 - DNA, 73 bp, Homo sapiens
gataaatatctagaaaatgctggatcatctgaaacttatcacgtagcttttccccctacagaacctaaaaata

SEQ ID NO: 104006 - DNA, 70 bp, Homo sapiens
tctagaaaatgctggatcatctgaaacttatcacgtagcttttccccctacagaacctaaaaataaaaac

SEQ ID NO: 104007 - DNA, 69 bp, Homo sapiens
ctggatcatctgaaacttatcacgtagcttttccccctacagaacctaaaaataaaaacttctctagaa

SEQ ID NO: 104008 - DNA, 64 bp, Homo sapiens
ctgaaacttatcacgtagcttttccccctacagaacctaaaaataaaaacttctctagaaaaaa

SEQ ID NO: 104009 - DNA, 65 bp, Homo sapiens
cacgtagcttttccccctacagaacctaaaaataaaaacttctctagaaaaaaagcatcctctct

SEQ ID NO: 104010 - DNA, 66 bp, Homo sapiens
cccctacagaacctaaaaataaaaacttctctagaaaaaaagcatcctctctttactgatctttaa

SEQ ID NO: 104011 - DNA, 65 bp, Homo sapiens
acagaacctaaaaataaaaacttctctagaaaaaaagcatcctctctttactgatctttaaaaat

SEQ ID NO: 104012 - DNA, 71 bp, Homo sapiens
aaaaaagcatcctctctttactgatctttaaaaattttaaatgttgaagccctgagtatgtatacctcaca

SEQ ID NO: 104013 - DNA, 74 bp, Homo sapiens
gcatcctctctttactgatctttaaaaattttaaatgttgaagccctgagtatgtatacctcacataactcctc

SEQ ID NO: 104014 - DNA, 73 bp, Homo sapiens
actgatctttaaaaattttaaatgttgaagccctgagtatgtatacctcacataactcctctatagcaaccta

SEQ ID NO: 104015 - DNA, 74 bp, Homo sapiens
ctgatctttaaaaattttaaatgttgaagccctgagtatgtatacctcacataactcctctatagcaacctata

SEQ ID NO: 104016 - DNA, 74 bp, Homo sapiens
ttttaaatgttgaagccctgagtatgtatacctcacataactcctctatagcaacctataaaacaagaatcctc

SEQ ID NO: 104017 - DNA, 75 bp, Homo sapiens
tttaaatgttgaagccctgagtatgtatacctcacataactcctctatagcaacctataaaacaagaatcctctc

SEQ ID NO: 104018 - DNA, 76 bp, Homo sapiens
atgttgaagccctgagtatgtatacctcacataactcctctatagcaacctataaaacaagaatcctctctcctgg

SEQ ID NO: 104019 - DNA, 75 bp, Homo sapiens
cctgagtatgtatacctcacataactcctctatagcaacctataaaacaagaatcctctctcctggtggtctgtt

SEQ ID NO: 104020 - DNA, 74 bp, Homo sapiens
agtatgtatacctcacataactcctctatagcaacctataaaacaagaatcctctctcctggtggtctgtttat

SEQ ID NO: 104021 - DNA, 74 bp, Homo sapiens
tatgtatacctcacataactcctctatagcaacctataaaacaagaatcctctctcctggtggtctgtttattt

SEQ ID NO: 104022 - DNA, 74 bp, Homo sapiens
acataactcctctatagcaacctataaaacaagaatcctctctcctggtggtctgtttattttgctatgaacaa

SEQ ID NO: 104023 - DNA, 72 bp, Homo sapiens
tatagcaacctataaaacaagaatcctctctcctggtggtctgtttattttgctatgaacaaaagggaagga

SEQ ID NO: 104024 - DNA, 72 bp, Homo sapiens
tataaaacaagaatcctctctcctggtggtctgtttattttgctatgaacaaaagggaaggagcttcagtat

SEQ ID NO: 104025 - DNA, 72 bp, Homo sapiens
aatcctctctcctggtggtctgtttattttgctatgaacaaaagggaaggagcttcagtatttctgaaaata

SEQ ID NO: 104026 - DNA, 71 bp, Homo sapiens
tcctggtggtctgtttattttgctatgaacaaaagggaaggagcttcagtatttctgaaaataacctgaat

SEQ ID NO: 104027 - DNA, 66 bp, Homo sapiens
tctgaaaataacctgaattcccctttgagacaaagttttggattttcgaaagtaaatgtggtactt

SEQ ID NO: 104028 - DNA, 64 bp, Homo sapiens
aacctgaattcccctttgagacaaagttttggattttcgaaagtaaatgtggtacttttctatt

SEQ ID NO: 104029 - DNA, 63 bp, Homo sapiens
tcccctttgagacaaagttttggattttcgaaagtaaatgtggtacttttctattttttaaac

SEQ ID NO: 104030 - DNA, 64 bp, Homo sapiens
gacaaagttttggattttcgaaagtaaatgtggtacttttctattttttaaactaatatataag

SEQ ID NO: 104031 - DNA, 68 bp, Homo sapiens
gattttcgaaagtaaatgtggtacttttctattttttaaactaatatataagtgtacatactattggc

SEQ ID NO: 104032 - DNA, 70 bp, Homo sapiens
taaatgtggtacttttctattttttaaactaatatataagtgtacatactattggctttgttggtcaaga

SEQ ID NO: 104033 - DNA, 69 bp, Homo sapiens
tggtacttttctattttttaaactaatatataagtgtacatactattggctttgttggtcaagaaaaca

SEQ ID NO: 104034 - DNA, 71 bp, Homo sapiens
tttttaaactaatatataagtgtacatactattggctttgttggtcaagaaaacagtttatcataccagga

SEQ ID NO: 104035 - DNA, 73 bp, Homo sapiens
aatatataagtgtacatactattggctttgttggtcaagaaaacagtttatcataccaggaagagactgggta

SEQ ID NO: 104036 - DNA, 74 bp, Homo sapiens
ataagtgtacatactattggctttgttggtcaagaaaacagtttatcataccaggaagagactgggtagcagaa

SEQ ID NO: 104037 - DNA, 75 bp, Homo sapiens
atactattggctttgttggtcaagaaaacagtttatcataccaggaagagactgggtagcagaacagcagcctac

SEQ ID NO: 104038 - DNA, 77 bp, Homo sapiens
ttgttggtcaagaaaacagtttatcataccaggaagagactgggtagcagaacagcagcctacgaatgcattagatt

SEQ ID NO: 104039 - DNA, 75 bp, Homo sapiens
aagaaaacagtttatcataccaggaagagactgggtagcagaacagcagcctacgaatgcattagatttgggtta

SEQ ID NO: 104040 - DNA, 78 bp, Homo sapiens
tttatcataccaggaagagactgggtagcagaacagcagcctacgaatgcattagatttgggttatgctgggttttga

SEQ ID NO: 104041 - DNA, 75 bp, Homo sapiens
aggaagagactgggtagcagaacagcagcctacgaatgcattagatttgggttatgctgggttttgacaggtttg

SEQ ID NO: 104042 - DNA, 70 bp, Homo sapiens
agaacagcagcctacgaatgcattagatttgggttatgctgggttttgacaggtttgggggtttaagaaa

SEQ ID NO: 104043 - DNA, 66 bp, Homo sapiens
cctacgaatgcattagatttgggttatgctgggttttgacaggtttgggggtttaagaaactgggt

SEQ ID NO: 104044 - DNA, 65 bp, Homo sapiens
attagatttgggttatgctgggttttgacaggtttgggggtttaagaaactgggttggttcgtca

SEQ ID NO: 104045 - DNA, 67 bp, Homo sapiens
tatgctgggttttgacaggtttgggggtttaagaaactgggttggttcgtcactaggaatccattaa

SEQ ID NO: 104046 - DNA, 67 bp, Homo sapiens
ttttgacaggtttgggggtttaagaaactgggttggttcgtcactaggaatccattaagtgttgcta

SEQ ID NO: 104047 - DNA, 71 bp, Homo sapiens
gtttaagaaactgggttggttcgtcactaggaatccattaagtgttgctagtccgtgaggacagagaaagc

SEQ ID NO: 104048 - DNA, 76 bp, Homo sapiens
ttggttcgtcactaggaatccattaagtgttgctagtccgtgaggacagagaaagctgtggaattcattcctcaaa

SEQ ID NO: 104049 - DNA, 74 bp, Homo sapiens
aatccattaagtgttgctagtccgtgaggacagagaaagctgtggaattcattcctcaaaagcaaaagccttat

SEQ ID NO: 104050 - DNA, 76 bp, Homo sapiens
agtgttgctagtccgtgaggacagagaaagctgtggaattcattcctcaaaagcaaaagccttatttgtgctaata

SEQ ID NO: 104051 - DNA, 73 bp, Homo sapiens
gaaagctgtggaattcattcctcaaaagcaaaagccttatttgtgctaatagggttataacaactgagcaaat

SEQ ID NO: 104052 - DNA, 71 bp, Homo sapiens
ggaattcattcctcaaaagcaaaagccttatttgtgctaatagggttataacaactgagcaaattttagtg

SEQ ID NO: 104053 - DNA, 70 bp, Homo sapiens
caaaagccttatttgtgctaatagggttataacaactgagcaaattttagtggacaaatagtagaggtcc

SEQ ID NO: 104054 - DNA, 70 bp, Homo sapiens
tttgtgctaatagggttataacaactgagcaaattttagtggacaaatagtagaggtccttaacatttac

SEQ ID NO: 104055 - DNA, 72 bp, Homo sapiens
agggttataacaactgagcaaattttagtggacaaatagtagaggtccttaacatttactgagctattctga

SEQ ID NO: 104056 - DNA, 77 bp, Homo sapiens
tataacaactgagcaaattttagtggacaaatagtagaggtccttaacatttactgagctattctgagcttcagaca

SEQ ID NO: 104057 - DNA, 74 bp, Homo sapiens
aaattttagtggacaaatagtagaggtccttaacatttactgagctattctgagcttcagacattgtggcaagg

SEQ ID NO: 104058 - DNA, 80 bp, Homo sapiens
tggacaaatagtagaggtccttaacatttactgagctattctgagcttcagacattgtggcaagggctttctgtgcatta

SEQ ID NO: 104059 - DNA, 80 bp, Homo sapiens
atagtagaggtccttaacatttactgagctattctgagcttcagacattgtggcaagggctttctgtgcattatgtcatt

SEQ ID NO: 104060 - DNA, 79 bp, Homo sapiens
aacatttactgagctattctgagcttcagacattgtggcaagggctttctgtgcattatgtcatttaatccttttggta

SEQ ID NO: 104061 - DNA, 76 bp, Homo sapiens
attctgagcttcagacattgtggcaagggctttctgtgcattatgtcatttaatccttttggtaatactattaatt

SEQ ID NO: 104062 - DNA, 75 bp, Homo sapiens
tcagacattgtggcaagggctttctgtgcattatgtcatttaatccttttggtaatactattaatttaggaacaa

SEQ ID NO: 104063 - DNA, 65 bp, Homo sapiens
gtcatttaatccttttggtaatactattaatttaggaacaattatcccctaaggcttaaagaagt

SEQ ID NO: 104064 - DNA, 66 bp, Homo sapiens
cttttggtaatactattaatttaggaacaattatcccctaaggcttaaagaagttagacaacttgc

SEQ ID NO: 104065 - DNA, 67 bp, Homo sapiens
gtaatactattaatttaggaacaattatcccctaaggcttaaagaagttagacaacttgcccaaggc

SEQ ID NO: 104066 - DNA, 70 bp, Homo sapiens
ttaatttaggaacaattatcccctaaggcttaaagaagttagacaacttgcccaaggccacatagagatg

SEQ ID NO: 104067 - DNA, 72 bp, Homo sapiens
aattatcccctaaggcttaaagaagttagacaacttgcccaaggccacatagagatggagcagtgaaagtaa

SEQ ID NO: 104068 - DNA, 74 bp, Homo sapiens
taaggcttaaagaagttagacaacttgcccaaggccacatagagatggagcagtgaaagtaagaatttgaccca

SEQ ID NO: 104069 - DNA, 78 bp, Homo sapiens
taaagaagttagacaacttgcccaaggccacatagagatggagcagtgaaagtaagaatttgacccagtcagtgcaca

SEQ ID NO: 104070 - DNA, 80 bp, Homo sapiens
acttgcccaaggccacatagagatggagcagtgaaagtaagaatttgacccagtcagtgcacagagtagacaatctttga

SEQ ID NO: 104071 - DNA, 82 bp, Homo sapiens
aaggccacatagagatggagcagtgaaagtaagaatttgacccagtcagtgcacagagtagacaatctttgaattacatgca

SEQ ID NO: 104072 - DNA, 77 bp, Homo sapiens
gagcagtgaaagtaagaatttgacccagtcagtgcacagagtagacaatctttgaattacatgcatttaaataaaaa

SEQ ID NO: 104073 - DNA, 76 bp, Homo sapiens
gaatttgacccagtcagtgcacagagtagacaatctttgaattacatgcatttaaataaaaaaaggctgttcttca

SEQ ID NO: 104074 - DNA, 77 bp, Homo sapiens
ccagtcagtgcacagagtagacaatctttgaattacatgcatttaaataaaaaaaggctgttcttcatagttctcat

SEQ ID NO: 104075 - DNA, 74 bp, Homo sapiens
gtagacaatctttgaattacatgcatttaaataaaaaaaggctgttcttcatagttctcattgaataagtttca

SEQ ID NO: 104076 - DNA, 74 bp, Homo sapiens
attacatgcatttaaataaaaaaaggctgttcttcatagttctcattgaataagtttcatagacaatgactttc

SEQ ID NO: 104077 - DNA, 70 bp, Homo sapiens
tttaaataaaaaaaggctgttcttcatagttctcattgaataagtttcatagacaatgactttcccaaag

SEQ ID NO: 104078 - DNA, 74 bp, Homo sapiens
atagttctcattgaataagtttcatagacaatgactttcccaaaggactccttttgcttctgaagggcagccac

SEQ ID NO: 104079 - DNA, 72 bp, Homo sapiens
ataagtttcatagacaatgactttcccaaaggactccttttgcttctgaagggcagccactctccagttaaa

SEQ ID NO: 104080 - DNA, 70 bp, Homo sapiens
atagacaatgactttcccaaaggactccttttgcttctgaagggcagccactctccagttaaaggggatt

SEQ ID NO: 104081 - DNA, 71 bp, Homo sapiens
atgactttcccaaaggactccttttgcttctgaagggcagccactctccagttaaaggggatttgcaaaca

SEQ ID NO: 104082 - DNA, 71 bp, Homo sapiens
aaaggactccttttgcttctgaagggcagccactctccagttaaaggggatttgcaaacaggcccactctg

SEQ ID NO: 104083 - DNA, 75 bp, Homo sapiens
ttttgcttctgaagggcagccactctccagttaaaggggatttgcaaacaggcccactctggattgcagtacaag

SEQ ID NO: 104084 - DNA, 72 bp, Homo sapiens
aagggcagccactctccagttaaaggggatttgcaaacaggcccactctggattgcagtacaaggaaaggaa

SEQ ID NO: 104085 - DNA, 72 bp, Homo sapiens
tctccagttaaaggggatttgcaaacaggcccactctggattgcagtacaaggaaaggaactgctttagaaa

SEQ ID NO: 104086 - DNA, 72 bp, Homo sapiens
ttaaaggggatttgcaaacaggcccactctggattgcagtacaaggaaaggaactgctttagaaacacagaa

SEQ ID NO: 104087 - DNA, 75 bp, Homo sapiens
ccactctggattgcagtacaaggaaaggaactgctttagaaacacagaacccagatagatggataaatatttcaa

SEQ ID NO: 104088 - DNA, 74 bp, Homo sapiens
attgcagtacaaggaaaggaactgctttagaaacacagaacccagatagatggataaatatttcaatgcctttc

SEQ ID NO: 104089 - DNA, 74 bp, Homo sapiens
tacaaggaaaggaactgctttagaaacacagaacccagatagatggataaatatttcaatgcctttccagaata

SEQ ID NO: 104090 - DNA, 75 bp, Homo sapiens
actgctttagaaacacagaacccagatagatggataaatatttcaatgcctttccagaatagtacttaagaagca

SEQ ID NO: 104091 - DNA, 75 bp, Homo sapiens
aacccagatagatggataaatatttcaatgcctttccagaatagtacttaagaagcagagcccatctcagtttgg

SEQ ID NO: 104092 - DNA, 75 bp, Homo sapiens
atatttcaatgcctttccagaatagtacttaagaagcagagcccatctcagtttgggtttgagcccatggcctta

SEQ ID NO: 104093 - DNA, 73 bp, Homo sapiens
tttccagaatagtacttaagaagcagagcccatctcagtttgggtttgagcccatggccttatggtttaaata

SEQ ID NO: 104094 - DNA, 71 bp, Homo sapiens
aatagtacttaagaagcagagcccatctcagtttgggtttgagcccatggccttatggtttaaatataaaa

SEQ ID NO: 104095 - DNA, 74 bp, Homo sapiens
agcagagcccatctcagtttgggtttgagcccatggccttatggtttaaatataaaatgcattaaagctcttta

SEQ ID NO: 104096 - DNA, 71 bp, Homo sapiens
cccatctcagtttgggtttgagcccatggccttatggtttaaatataaaatgcattaaagctctttattta

SEQ ID NO: 104097 - DNA, 71 bp, Homo sapiens
tttgggtttgagcccatggccttatggtttaaatataaaatgcattaaagctctttatttagagagtcacg

SEQ ID NO: 104098 - DNA, 72 bp, Homo sapiens
catggccttatggtttaaatataaaatgcattaaagctctttatttagagagtcacgtgcccttttgtggga

SEQ ID NO: 104099 - DNA, 72 bp, Homo sapiens
ttatggtttaaatataaaatgcattaaagctctttatttagagagtcacgtgcccttttgtgggagcagccc

SEQ ID NO: 104100 - DNA, 72 bp, Homo sapiens
aaatataaaatgcattaaagctctttatttagagagtcacgtgcccttttgtgggagcagccccaattctcc

SEQ ID NO: 104101 - DNA, 71 bp, Homo sapiens
attaaagctctttatttagagagtcacgtgcccttttgtgggagcagccccaattctccctctgactttag

SEQ ID NO: 104102 - DNA, 76 bp, Homo sapiens
ttatttagagagtcacgtgcccttttgtgggagcagccccaattctccctctgactttagtgagtgtacaatgcaa

SEQ ID NO: 104103 - DNA, 74 bp, Homo sapiens
ccttttgtgggagcagccccaattctccctctgactttagtgagtgtacaatgcaaataggtgttttgatattg

SEQ ID NO: 104104 - DNA, 78 bp, Homo sapiens
gagcagccccaattctccctctgactttagtgagtgtacaatgcaaataggtgttttgatattgtcattagtattcat

SEQ ID NO: 104105 - DNA, 77 bp, Homo sapiens
cccaattctccctctgactttagtgagtgtacaatgcaaataggtgttttgatattgtcattagtattcattattca

SEQ ID NO: 104106 - DNA, 81 bp, Homo sapiens
tctgactttagtgagtgtacaatgcaaataggtgttttgatattgtcattagtattcattattcatgaggacttgatcgtg

SEQ ID NO: 104107 - DNA, 80 bp, Homo sapiens
gtgagtgtacaatgcaaataggtgttttgatattgtcattagtattcattattcatgaggacttgatcgtgtattcaaag

SEQ ID NO: 104108 - DNA, 77 bp, Homo sapiens
aataggtgttttgatattgtcattagtattcattattcatgaggacttgatcgtgtattcaaagtcagccaggaggg

SEQ ID NO: 104109 - DNA, 80 bp, Homo sapiens
atattgtcattagtattcattattcatgaggacttgatcgtgtattcaaagtcagccaggagggtcatgtgcccccttca

SEQ ID NO: 104110 - DNA, 78 bp, Homo sapiens
ttagtattcattattcatgaggacttgatcgtgtattcaaagtcagccaggagggtcatgtgcccccttcagtgaaaa

SEQ ID NO: 104111 - DNA, 76 bp, Homo sapiens
attattcatgaggacttgatcgtgtattcaaagtcagccaggagggtcatgtgcccccttcagtgaaaaccttgac

SEQ ID NO: 104112 - DNA, 75 bp, Homo sapiens
tcgtgtattcaaagtcagccaggagggtcatgtgcccccttcagtgaaaaccttgactctaaggacagcactttc

SEQ ID NO: 104113 - DNA, 73 bp, Homo sapiens
aaagtcagccaggagggtcatgtgcccccttcagtgaaaaccttgactctaaggacagcactttcctggtgta

SEQ ID NO: 104114 - DNA, 72 bp, Homo sapiens
aggagggtcatgtgcccccttcagtgaaaaccttgactctaaggacagcactttcctggtgtacagtctttg

SEQ ID NO: 104115 - DNA, 73 bp, Homo sapiens
ccccttcagtgaaaaccttgactctaaggacagcactttcctggtgtacagtctttgggggctcttgacagca

SEQ ID NO: 104116 - DNA, 72 bp, Homo sapiens
agtgaaaaccttgactctaaggacagcactttcctggtgtacagtctttgggggctcttgacagcaagaaaa

SEQ ID NO: 104117 - DNA, 72 bp, Homo sapiens
ccttgactctaaggacagcactttcctggtgtacagtctttgggggctcttgacagcaagaaaacctaaaca

SEQ ID NO: 104118 - DNA, 72 bp, Homo sapiens
cagcactttcctggtgtacagtctttgggggctcttgacagcaagaaaacctaaacaggagaatcccactta

SEQ ID NO: 104119 - DNA, 72 bp, Homo sapiens
ctttcctggtgtacagtctttgggggctcttgacagcaagaaaacctaaacaggagaatcccacttagcatc

SEQ ID NO: 104120 - DNA, 74 bp, Homo sapiens
tacagtctttgggggctcttgacagcaagaaaacctaaacaggagaatcccacttagcatctgcccacaggtaa

SEQ ID NO: 104121 - DNA, 75 bp, Homo sapiens
gggctcttgacagcaagaaaacctaaacaggagaatcccacttagcatctgcccacaggtaaggggcacagagaa

SEQ ID NO: 104122 - DNA, 77 bp, Homo sapiens
acttagcatctgcccacaggtaaggggcacagagaaggagatatagacttctaatttagcaaaaagaagtatgctgc

SEQ ID NO: 104123 - DNA, 75 bp, Homo sapiens
cccacaggtaaggggcacagagaaggagatatagacttctaatttagcaaaaagaagtatgctgccatgtgaaaa

SEQ ID NO: 104124 - DNA, 75 bp, Homo sapiens
taaggggcacagagaaggagatatagacttctaatttagcaaaaagaagtatgctgccatgtgaaaagtttctaa

SEQ ID NO: 104125 - DNA, 75 bp, Homo sapiens
gagaaggagatatagacttctaatttagcaaaaagaagtatgctgccatgtgaaaagtttctaaacagtgacttc

SEQ ID NO: 104126 - DNA, 73 bp, Homo sapiens
tagacttctaatttagcaaaaagaagtatgctgccatgtgaaaagtttctaaacagtgacttctaaacaatag

SEQ ID NO: 104127 - DNA, 72 bp, Homo sapiens
atttagcaaaaagaagtatgctgccatgtgaaaagtttctaaacagtgacttctaaacaataggttgtgacc

SEQ ID NO: 104128 - DNA, 73 bp, Homo sapiens
aaaagaagtatgctgccatgtgaaaagtttctaaacagtgacttctaaacaataggttgtgacccatagattg

SEQ ID NO: 104129 - DNA, 72 bp, Homo sapiens
ctgccatgtgaaaagtttctaaacagtgacttctaaacaataggttgtgacccatagattggttgttaataa

SEQ ID NO: 104130 - DNA, 70 bp, Homo sapiens
atgtgaaaagtttctaaacagtgacttctaaacaataggttgtgacccatagattggttgttaataataa

SEQ ID NO: 104131 - DNA, 72 bp, Homo sapiens
aataataataacaaaagcaaggtaagaagaagaaatagaacagaataactggaaaatagagtgcttcatcag

SEQ ID NO: 104132 - DNA, 75 bp, Homo sapiens
agaaatagaacagaataactggaaaatagagtgcttcatcagtagtaagggtgaatactgcttcctgaagctctt

SEQ ID NO: 104133 - DNA, 74 bp, Homo sapiens
tagaacagaataactggaaaatagagtgcttcatcagtagtaagggtgaatactgcttcctgaagctctttttt

SEQ ID NO: 104134 - DNA, 77 bp, Homo sapiens
taactggaaaatagagtgcttcatcagtagtaagggtgaatactgcttcctgaagctctttttttgattgatgtatc

SEQ ID NO: 104135 - DNA, 78 bp, Homo sapiens
atagagtgcttcatcagtagtaagggtgaatactgcttcctgaagctctttttttgattgatgtatctcccctgagcc

SEQ ID NO: 104136 - DNA, 75 bp, Homo sapiens
agtagtaagggtgaatactgcttcctgaagctctttttttgattgatgtatctcccctgagccctggcatactat

SEQ ID NO: 104137 - DNA, 73 bp, Homo sapiens
cttcctgaagctctttttttgattgatgtatctcccctgagccctggcatactatttacttcttactgtttct

SEQ ID NO: 104138 - DNA, 74 bp, Homo sapiens
ctctttttttgattgatgtatctcccctgagccctggcatactatttacttcttactgtttcttgctattcaaa

SEQ ID NO: 104139 - DNA, 73 bp, Homo sapiens
ttttgattgatgtatctcccctgagccctggcatactatttacttcttactgtttcttgctattcaaaaagtt

SEQ ID NO: 104140 - DNA, 75 bp, Homo sapiens
tgtatctcccctgagccctggcatactatttacttcttactgtttcttgctattcaaaaagtttgcaagcctcta

SEQ ID NO: 104141 - DNA, 72 bp, Homo sapiens
agccctggcatactatttacttcttactgtttcttgctattcaaaaagtttgcaagcctctagcctaaaatg

SEQ ID NO: 104142 - DNA, 72 bp, Homo sapiens
ggcatactatttacttcttactgtttcttgctattcaaaaagtttgcaagcctctagcctaaaatgtcttat

SEQ ID NO: 104143 - DNA, 72 bp, Homo sapiens
tcttactgtttcttgctattcaaaaagtttgcaagcctctagcctaaaatgtcttattttcttagtactcaa

SEQ ID NO: 104144 - DNA, 71 bp, Homo sapiens
ctgtttcttgctattcaaaaagtttgcaagcctctagcctaaaatgtcttattttcttagtactcaatttg

SEQ ID NO: 104145 - DNA, 69 bp, Homo sapiens
caaaaagtttgcaagcctctagcctaaaatgtcttattttcttagtactcaatttgttacttgacttgg

SEQ ID NO: 104146 - DNA, 72 bp, Homo sapiens
tctagcctaaaatgtcttattttcttagtactcaatttgttacttgacttggtgtttggctccctgtgactc

SEQ ID NO: 104147 - DNA, 71 bp, Homo sapiens
aaatgtcttattttcttagtactcaatttgttacttgacttggtgtttggctccctgtgactctctgaagt

SEQ ID NO: 104148 - DNA, 71 bp, Homo sapiens
attttcttagtactcaatttgttacttgacttggtgtttggctccctgtgactctctgaagttctcctttc

SEQ ID NO: 104149 - DNA, 75 bp, Homo sapiens
tactcaatttgttacttgacttggtgtttggctccctgtgactctctgaagttctcctttctgtgcctccgcttc

SEQ ID NO: 104150 - DNA, 74 bp, Homo sapiens
gttacttgacttggtgtttggctccctgtgactctctgaagttctcctttctgtgcctccgcttccacctttgc

SEQ ID NO: 104151 - DNA, 75 bp, Homo sapiens
gtgtttggctccctgtgactctctgaagttctcctttctgtgcctccgcttccacctttgccaagtctaaaatca

SEQ ID NO: 104152 - DNA, 76 bp, Homo sapiens
tctgaagttctcctttctgtgcctccgcttccacctttgccaagtctaaaatcatgccatgtaaaagttatcaaga

SEQ ID NO: 104153 - DNA, 72 bp, Homo sapiens
cctttctgtgcctccgcttccacctttgccaagtctaaaatcatgccatgtaaaagttatcaagaaaaccaa

SEQ ID NO: 104154 - DNA, 72 bp, Homo sapiens
cctccgcttccacctttgccaagtctaaaatcatgccatgtaaaagttatcaagaaaaccaattaaatcata

SEQ ID NO: 104155 - DNA, 72 bp, Homo sapiens
cacctttgccaagtctaaaatcatgccatgtaaaagttatcaagaaaaccaattaaatcataactgccgaag

SEQ ID NO: 104156 - DNA, 74 bp, Homo sapiens
ccaagtctaaaatcatgccatgtaaaagttatcaagaaaaccaattaaatcataactgccgaagtgccttgtca

SEQ ID NO: 104157 - DNA, 74 bp, Homo sapiens
aatcatgccatgtaaaagttatcaagaaaaccaattaaatcataactgccgaagtgccttgtcaagctaaacag

SEQ ID NO: 104158 - DNA, 74 bp, Homo sapiens
atgtaaaagttatcaagaaaaccaattaaatcataactgccgaagtgccttgtcaagctaaacagtcatgagag

SEQ ID NO: 104159 - DNA, 76 bp, Homo sapiens
tcaagaaaaccaattaaatcataactgccgaagtgccttgtcaagctaaacagtcatgagaggtgaaggattatta

SEQ ID NO: 104160 - DNA, 76 bp, Homo sapiens
aaccaattaaatcataactgccgaagtgccttgtcaagctaaacagtcatgagaggtgaaggattattatgaaata

SEQ ID NO: 104161 - DNA, 78 bp, Homo sapiens
aatcataactgccgaagtgccttgtcaagctaaacagtcatgagaggtgaaggattattatgaaataaaacagagtga

SEQ ID NO: 104162 - DNA, 76 bp, Homo sapiens
aagtgccttgtcaagctaaacagtcatgagaggtgaaggattattatgaaataaaacagagtgaagctgttttgaa

SEQ ID NO: 104163 - DNA, 77 bp, Homo sapiens
cttgtcaagctaaacagtcatgagaggtgaaggattattatgaaataaaacagagtgaagctgttttgaaggccatc

SEQ ID NO: 104164 - DNA, 77 bp, Homo sapiens
acagtcatgagaggtgaaggattattatgaaataaaacagagtgaagctgttttgaaggccatccttctgtggaata

SEQ ID NO: 104165 - DNA, 75 bp, Homo sapiens
agaggtgaaggattattatgaaataaaacagagtgaagctgttttgaaggccatccttctgtggaatagcattgg

SEQ ID NO: 104166 - DNA, 74 bp, Homo sapiens
attattatgaaataaaacagagtgaagctgttttgaaggccatccttctgtggaatagcattgggtcatttcgt

SEQ ID NO: 104167 - DNA, 75 bp, Homo sapiens
tgttttgaaggccatccttctgtggaatagcattgggtcatttcgttcagaggcgaaaagattcttagcaaacat

SEQ ID NO: 104168 - DNA, 74 bp, Homo sapiens
ctgtggaatagcattgggtcatttcgttcagaggcgaaaagattcttagcaaacattgggtcattttgtttaga

SEQ ID NO: 104169 - DNA, 70 bp, Homo sapiens
attgggtcatttcgttcagaggcgaaaagattcttagcaaacattgggtcattttgtttagaggtgaaaa

SEQ ID NO: 104170 - DNA, 72 bp, Homo sapiens
tttcgttcagaggcgaaaagattcttagcaaacattgggtcattttgtttagaggtgaaaagattcttagca

SEQ ID NO: 104171 - DNA, 70 bp, Homo sapiens
gaggcgaaaagattcttagcaaacattgggtcattttgtttagaggtgaaaagattcttagcaaacattt

SEQ ID NO: 104172 - DNA, 72 bp, Homo sapiens
gattcttagcaaacattgggtcattttgtttagaggtgaaaagattcttagcaaacattttgtccaatccat

SEQ ID NO: 104173 - DNA, 71 bp, Homo sapiens
cattgggtcattttgtttagaggtgaaaagattcttagcaaacattttgtccaatccatttagtttataga

SEQ ID NO: 104174 - DNA, 69 bp, Homo sapiens
ttgtttagaggtgaaaagattcttagcaaacattttgtccaatccatttagtttatagagggaaaagga

SEQ ID NO: 104175 - DNA, 70 bp, Homo sapiens
aggtgaaaagattcttagcaaacattttgtccaatccatttagtttatagagggaaaaggaggctctgaa

SEQ ID NO: 104176 - DNA, 70 bp, Homo sapiens
aagattcttagcaaacattttgtccaatccatttagtttatagagggaaaaggaggctctgaaaagtgag

SEQ ID NO: 104177 - DNA, 70 bp, Homo sapiens
aaacattttgtccaatccatttagtttatagagggaaaaggaggctctgaaaagtgagtggctcttctaa

SEQ ID NO: 104178 - DNA, 70 bp, Homo sapiens
aatccatttagtttatagagggaaaaggaggctctgaaaagtgagtggctcttctaagctcccgaaacag

SEQ ID NO: 104179 - DNA, 72 bp, Homo sapiens
atttagtttatagagggaaaaggaggctctgaaaagtgagtggctcttctaagctcccgaaacagtggctga

SEQ ID NO: 104180 - DNA, 73 bp, Homo sapiens
tagagggaaaaggaggctctgaaaagtgagtggctcttctaagctcccgaaacagtggctgatctgggacccc

SEQ ID NO: 104181 - DNA, 74 bp, Homo sapiens
aggctctgaaaagtgagtggctcttctaagctcccgaaacagtggctgatctgggaccccctgacctgtgaatt

SEQ ID NO: 104182 - DNA, 73 bp, Homo sapiens
aaaagtgagtggctcttctaagctcccgaaacagtggctgatctgggaccccctgacctgtgaatttgtggtc

SEQ ID NO: 104183 - DNA, 74 bp, Homo sapiens
ctcttctaagctcccgaaacagtggctgatctgggaccccctgacctgtgaatttgtggtccacccccatgctc

SEQ ID NO: 104184 - DNA, 75 bp, Homo sapiens
aagctcccgaaacagtggctgatctgggaccccctgacctgtgaatttgtggtccacccccatgctctgccactc

SEQ ID NO: 104185 - DNA, 75 bp, Homo sapiens
tggctgatctgggaccccctgacctgtgaatttgtggtccacccccatgctctgccactcctccaagagccgttt

SEQ ID NO: 104186 - DNA, 74 bp, Homo sapiens
atctgggaccccctgacctgtgaatttgtggtccacccccatgctctgccactcctccaagagccgttttgcta

SEQ ID NO: 104187 - DNA, 73 bp, Homo sapiens
tgacctgtgaatttgtggtccacccccatgctctgccactcctccaagagccgttttgctacttctttaaaaa

SEQ ID NO: 104188 - DNA, 69 bp, Homo sapiens
aatttgtggtccacccccatgctctgccactcctccaagagccgttttgctacttctttaaaaaaggga

SEQ ID NO: 104189 - DNA, 69 bp, Homo sapiens
tctgccactcctccaagagccgttttgctacttctttaaaaaagggagggtcttatgaaattgtattta

SEQ ID NO: 104190 - DNA, 67 bp, Homo sapiens
actcctccaagagccgttttgctacttctttaaaaaagggagggtcttatgaaattgtatttacaga

SEQ ID NO: 104191 - DNA, 66 bp, Homo sapiens
gagccgttttgctacttctttaaaaaagggagggtcttatgaaattgtatttacagaaaatttaca

SEQ ID NO: 104192 - DNA, 69 bp, Homo sapiens
gctacttctttaaaaaagggagggtcttatgaaattgtatttacagaaaatttacaactcatgcaaagc

SEQ ID NO: 104193 - DNA, 70 bp, Homo sapiens
aaagggagggtcttatgaaattgtatttacagaaaatttacaactcatgcaaagctaaatggatttcttc

SEQ ID NO: 104194 - DNA, 71 bp, Homo sapiens
ttgtatttacagaaaatttacaactcatgcaaagctaaatggatttcttccctttcaaagtggtttcctga

SEQ ID NO: 104195 - DNA, 75 bp, Homo sapiens
cagaaaatttacaactcatgcaaagctaaatggatttcttccctttcaaagtggtttcctgattgcaatcacata

SEQ ID NO: 104196 - DNA, 74 bp, Homo sapiens
caactcatgcaaagctaaatggatttcttccctttcaaagtggtttcctgattgcaatcacataaattaaactc

SEQ ID NO: 104197 - DNA, 70 bp, Homo sapiens
aaagctaaatggatttcttccctttcaaagtggtttcctgattgcaatcacataaattaaactccagccc

SEQ ID NO: 104198 - DNA, 70 bp, Homo sapiens
taaatggatttcttccctttcaaagtggtttcctgattgcaatcacataaattaaactccagccccaaaa

SEQ ID NO: 104199 - DNA, 70 bp, Homo sapiens
ttccctttcaaagtggtttcctgattgcaatcacataaattaaactccagccccaaaaaagtcattcgaa

SEQ ID NO: 104200 - DNA, 73 bp, Homo sapiens
aagtggtttcctgattgcaatcacataaattaaactccagccccaaaaaagtcattcgaacagagtaatgata

SEQ ID NO: 104201 - DNA, 76 bp, Homo sapiens
attgcaatcacataaattaaactccagccccaaaaaagtcattcgaacagagtaatgatacatctccaagaagaga

SEQ ID NO: 104202 - DNA, 75 bp, Homo sapiens
aatcacataaattaaactccagccccaaaaaagtcattcgaacagagtaatgatacatctccaagaagagataca

SEQ ID NO: 104203 - DNA, 74 bp, Homo sapiens
attaaactccagccccaaaaaagtcattcgaacagagtaatgatacatctccaagaagagatacagagaattct

SEQ ID NO: 104204 - DNA, 76 bp, Homo sapiens
cccaaaaaagtcattcgaacagagtaatgatacatctccaagaagagatacagagaattctttgaaattctcaaga

SEQ ID NO: 104205 - DNA, 83 bp, Homo sapiens
attcgaacagagtaatgatacatctccaagaagagatacagagaattctttgaaattctcaagaaataatgcaatgagatgca

SEQ ID NO: 104206 - DNA, 79 bp, Homo sapiens
gatacatctccaagaagagatacagagaattctttgaaattctcaagaaataatgcaatgagatgcaaaagggtaacta

SEQ ID NO: 104207 - DNA, 76 bp, Homo sapiens
ccaagaagagatacagagaattctttgaaattctcaagaaataatgcaatgagatgcaaaagggtaactattatta

SEQ ID NO: 104208 - DNA, 78 bp, Homo sapiens
tgaaattctcaagaaataatgcaatgagatgcaaaagggtaactattattaatcttcttcctgaagtgtcaatcagga

SEQ ID NO: 104209 - DNA, 71 bp, Homo sapiens
gagatgcaaaagggtaactattattaatcttcttcctgaagtgtcaatcaggaaggtatttttaaattgta

SEQ ID NO: 104210 - DNA, 69 bp, Homo sapiens
ggtaactattattaatcttcttcctgaagtgtcaatcaggaaggtatttttaaattgtattggaaagga

SEQ ID NO: 104211 - DNA, 71 bp, Homo sapiens
tttaaattgtattggaaaggaagaagagacaatgtttcttcccattaatgatctgaactgaaagtaaggga

SEQ ID NO: 104212 - DNA, 70 bp, Homo sapiens
attggaaaggaagaagagacaatgtttcttcccattaatgatctgaactgaaagtaagggaggaactaaa

SEQ ID NO: 104213 - DNA, 72 bp, Homo sapiens
ggaagaagagacaatgtttcttcccattaatgatctgaactgaaagtaagggaggaactaaaaaatgtgcaa

SEQ ID NO: 104214 - DNA, 70 bp, Homo sapiens
aatgtttcttcccattaatgatctgaactgaaagtaagggaggaactaaaaaatgtgcaaaatgtcctcg

SEQ ID NO: 104215 - DNA, 69 bp, Homo sapiens
tcccattaatgatctgaactgaaagtaagggaggaactaaaaaatgtgcaaaatgtcctcggggaaaaa

SEQ ID NO: 104216 - DNA, 67 bp, Homo sapiens
atgatctgaactgaaagtaagggaggaactaaaaaatgtgcaaaatgtcctcggggaaaaaaagtag

SEQ ID NO: 104217 - DNA, 66 bp, Homo sapiens
gggaggaactaaaaaatgtgcaaaatgtcctcggggaaaaaaagtagtataaaacatagtcttgga

SEQ ID NO: 104218 - DNA, 70 bp, Homo sapiens
aaatgtcctcggggaaaaaaagtagtataaaacatagtcttggatgatacagcaaggtcgttgctcaatt

SEQ ID NO: 104219 - DNA, 72 bp, Homo sapiens
gggaaaaaaagtagtataaaacatagtcttggatgatacagcaaggtcgttgctcaattttatgttgtaaca

SEQ ID NO: 104220 - DNA, 74 bp, Homo sapiens
gtagtataaaacatagtcttggatgatacagcaaggtcgttgctcaattttatgttgtaacactattttaactg

SEQ ID NO: 104221 - DNA, 74 bp, Homo sapiens
aaacatagtcttggatgatacagcaaggtcgttgctcaattttatgttgtaacactattttaactgtcaccaag

SEQ ID NO: 104222 - DNA, 76 bp, Homo sapiens
tcttggatgatacagcaaggtcgttgctcaattttatgttgtaacactattttaactgtcaccaagggctgggata

SEQ ID NO: 104223 - DNA, 74 bp, Homo sapiens
atacagcaaggtcgttgctcaattttatgttgtaacactattttaactgtcaccaagggctgggatagcaaata

SEQ ID NO: 104224 - DNA, 78 bp, Homo sapiens
ttgctcaattttatgttgtaacactattttaactgtcaccaagggctgggatagcaaatattgcatcaactctgcaag

SEQ ID NO: 104225 - DNA, 75 bp, Homo sapiens
ttttatgttgtaacactattttaactgtcaccaagggctgggatagcaaatattgcatcaactctgcaaggtgtt

SEQ ID NO: 104226 - DNA, 74 bp, Homo sapiens
taacactattttaactgtcaccaagggctgggatagcaaatattgcatcaactctgcaaggtgtttcctgggtt

SEQ ID NO: 104227 - DNA, 75 bp, Homo sapiens
ttttaactgtcaccaagggctgggatagcaaatattgcatcaactctgcaaggtgtttcctgggttttgtggaca

SEQ ID NO: 104228 - DNA, 74 bp, Homo sapiens
actgtcaccaagggctgggatagcaaatattgcatcaactctgcaaggtgtttcctgggttttgtggacagggg

SEQ ID NO: 104229 - DNA, 72 bp, Homo sapiens
accaagggctgggatagcaaatattgcatcaactctgcaaggtgtttcctgggttttgtggacaggggggtc

SEQ ID NO: 104230 - DNA, 71 bp, Homo sapiens
agggctgggatagcaaatattgcatcaactctgcaaggtgtttcctgggttttgtggacaggggggtcggg

SEQ ID NO: 104231 - DNA, 72 bp, Homo sapiens
atagcaaatattgcatcaactctgcaaggtgtttcctgggttttgtggacaggggggtcgggggaggtgcaa

SEQ ID NO: 104232 - DNA, 71 bp, Homo sapiens
aaatattgcatcaactctgcaaggtgtttcctgggttttgtggacaggggggtcgggggaggtgcaatctc

SEQ ID NO: 104233 - DNA, 72 bp, Homo sapiens
atattgcatcaactctgcaaggtgtttcctgggttttgtggacaggggggtcgggggaggtgcaatctccat

SEQ ID NO: 104234 - DNA, 68 bp, Homo sapiens
aaggtgtttcctgggttttgtggacaggggggtcgggggaggtgcaatctccattcttgtgaaggcca

SEQ ID NO: 104235 - DNA, 69 bp, Homo sapiens
gtttcctgggttttgtggacaggggggtcgggggaggtgcaatctccattcttgtgaaggccagataaa

SEQ ID NO: 104236 - DNA, 70 bp, Homo sapiens
tttcctgggttttgtggacaggggggtcgggggaggtgcaatctccattcttgtgaaggccagataaaga

SEQ ID NO: 104237 - DNA, 79 bp, Homo sapiens
gtcgggggaggtgcaatctccattcttgtgaaggccagataaagacttctgctgcaagccactatctttttgtgctgaa

SEQ ID NO: 104238 - DNA, 82 bp, Homo sapiens
aggtgcaatctccattcttgtgaaggccagataaagacttctgctgcaagccactatctttttgtgctgaagctgtagataa

SEQ ID NO: 104239 - DNA, 82 bp, Homo sapiens
cattcttgtgaaggccagataaagacttctgctgcaagccactatctttttgtgctgaagctgtagataacacagtttcaca

SEQ ID NO: 104240 - DNA, 80 bp, Homo sapiens
ttgtgaaggccagataaagacttctgctgcaagccactatctttttgtgctgaagctgtagataacacagtttcacaccc

SEQ ID NO: 104241 - DNA, 80 bp, Homo sapiens
agataaagacttctgctgcaagccactatctttttgtgctgaagctgtagataacacagtttcacaccctgctgcccaag

SEQ ID NO: 104242 - DNA, 81 bp, Homo sapiens
cttctgctgcaagccactatctttttgtgctgaagctgtagataacacagtttcacaccctgctgcccaagtcctgctttc

SEQ ID NO: 104243 - DNA, 76 bp, Homo sapiens
actatctttttgtgctgaagctgtagataacacagtttcacaccctgctgcccaagtcctgctttcccaatttgta

SEQ ID NO: 104244 - DNA, 76 bp, Homo sapiens
tttgtgctgaagctgtagataacacagtttcacaccctgctgcccaagtcctgctttcccaatttgtaggtcttta

SEQ ID NO: 104245 - DNA, 74 bp, Homo sapiens
aagctgtagataacacagtttcacaccctgctgcccaagtcctgctttcccaatttgtaggtctttattgcaaa

SEQ ID NO: 104246 - DNA, 71 bp, Homo sapiens
tttcacaccctgctgcccaagtcctgctttcccaatttgtaggtctttattgcaaaagtcttttgtgtttg

SEQ ID NO: 104247 - DNA, 70 bp, Homo sapiens
cccaagtcctgctttcccaatttgtaggtctttattgcaaaagtcttttgtgtttgttttatcagacaca

SEQ ID NO: 104248 - DNA, 70 bp, Homo sapiens
gtcctgctttcccaatttgtaggtctttattgcaaaagtcttttgtgtttgttttatcagacacatttta

SEQ ID NO: 104249 - DNA, 72 bp, Homo sapiens
ccaatttgtaggtctttattgcaaaagtcttttgtgtttgttttatcagacacattttatcatccttctcca

SEQ ID NO: 104250 - DNA, 70 bp, Homo sapiens
aggtctttattgcaaaagtcttttgtgtttgttttatcagacacattttatcatccttctccaaacaccc

SEQ ID NO: 104251 - DNA, 71 bp, Homo sapiens
aaagtcttttgtgtttgttttatcagacacattttatcatccttctccaaacaccctttgtcaaagtcagc

SEQ ID NO: 104252 - DNA, 75 bp, Homo sapiens
tttatcagacacattttatcatccttctccaaacaccctttgtcaaagtcagcctttgaacttcttttgcatata

SEQ ID NO: 104253 - DNA, 74 bp, Homo sapiens
acattttatcatccttctccaaacaccctttgtcaaagtcagcctttgaacttcttttgcatatacatagaatg

SEQ ID NO: 104254 - DNA, 75 bp, Homo sapiens
cttctccaaacaccctttgtcaaagtcagcctttgaacttcttttgcatatacatagaatgggaccaatgattca

SEQ ID NO: 104255 - DNA, 76 bp, Homo sapiens
aacaccctttgtcaaagtcagcctttgaacttcttttgcatatacatagaatgggaccaatgattcaggatatgta

SEQ ID NO: 104256 - DNA, 79 bp, Homo sapiens
tcaaagtcagcctttgaacttcttttgcatatacatagaatgggaccaatgattcaggatatgtaacaggcttatctta

SEQ ID NO: 104257 - DNA, 77 bp, Homo sapiens
cttttgcatatacatagaatgggaccaatgattcaggatatgtaacaggcttatcttataattctaaagaaagagga

SEQ ID NO: 104258 - DNA, 77 bp, Homo sapiens
atatacatagaatgggaccaatgattcaggatatgtaacaggcttatcttataattctaaagaaagaggaacagagc

SEQ ID NO: 104259 - DNA, 76 bp, Homo sapiens
agaatgggaccaatgattcaggatatgtaacaggcttatcttataattctaaagaaagaggaacagagccattgac

SEQ ID NO: 104260 - DNA, 76 bp, Homo sapiens
caatgattcaggatatgtaacaggcttatcttataattctaaagaaagaggaacagagccattgacctttcttcta

SEQ ID NO: 104261 - DNA, 72 bp, Homo sapiens
ttatcttataattctaaagaaagaggaacagagccattgacctttcttctatattttcttggggctggtgtg

SEQ ID NO: 104262 - DNA, 73 bp, Homo sapiens
ttataattctaaagaaagaggaacagagccattgacctttcttctatattttcttggggctggtgtgtctgtg

SEQ ID NO: 104263 - DNA, 79 bp, Homo sapiens
gtgtatgtgtgtgctaggggtaagatgtacaatctcattacctttagaagataatgcaatagattatcctataccaata

SEQ ID NO: 104264 - DNA, 76 bp, Homo sapiens
gtgtgtgctaggggtaagatgtacaatctcattacctttagaagataatgcaatagattatcctataccaataatt

SEQ ID NO: 104265 - DNA, 74 bp, Homo sapiens
gggtaagatgtacaatctcattacctttagaagataatgcaatagattatcctataccaataatttatgccttt

SEQ ID NO: 104266 - DNA, 75 bp, Homo sapiens
gtacaatctcattacctttagaagataatgcaatagattatcctataccaataatttatgccttttagttttgca

SEQ ID NO: 104267 - DNA, 71 bp, Homo sapiens
cctttagaagataatgcaatagattatcctataccaataatttatgccttttagttttgcacaaattaaac

SEQ ID NO: 104268 - DNA, 73 bp, Homo sapiens
gaagataatgcaatagattatcctataccaataatttatgccttttagttttgcacaaattaaacctgaatct

SEQ ID NO: 104269 - DNA, 70 bp, Homo sapiens
gcaatagattatcctataccaataatttatgccttttagttttgcacaaattaaacctgaatcttaaagt

SEQ ID NO: 104270 - DNA, 69 bp, Homo sapiens
tcctataccaataatttatgccttttagttttgcacaaattaaacctgaatcttaaagttcaacttgtc

SEQ ID NO: 104271 - DNA, 69 bp, Homo sapiens
tttatgccttttagttttgcacaaattaaacctgaatcttaaagttcaacttgtctaggattgtactaa

SEQ ID NO: 104272 - DNA, 72 bp, Homo sapiens
tttgcacaaattaaacctgaatcttaaagttcaacttgtctaggattgtactaaaggccgcattgcaggtag

SEQ ID NO: 104273 - DNA, 71 bp, Homo sapiens
ttaaagttcaacttgtctaggattgtactaaaggccgcattgcaggtagggctaatttcggggtctgatcc

SEQ ID NO: 104274 - DNA, 72 bp, Homo sapiens
aacttgtctaggattgtactaaaggccgcattgcaggtagggctaatttcggggtctgatccgtgtggctcc

SEQ ID NO: 104275 - DNA, 76 bp, Homo sapiens
ctaaaggccgcattgcaggtagggctaatttcggggtctgatccgtgtggctccccatgctcctgacagtacacca

SEQ ID NO: 104276 - DNA, 77 bp, Homo sapiens
cattgcaggtagggctaatttcggggtctgatccgtgtggctccccatgctcctgacagtacaccaggaccactctg

SEQ ID NO: 104277 - DNA, 76 bp, Homo sapiens
attgcaggtagggctaatttcggggtctgatccgtgtggctccccatgctcctgacagtacaccaggaccactctg

SEQ ID NO: 104278 - DNA, 74 bp, Homo sapiens
aggtagggctaatttcggggtctgatccgtgtggctccccatgctcctgacagtacaccaggaccactctgtgt

SEQ ID NO: 104279 - DNA, 76 bp, Homo sapiens
agggctaatttcggggtctgatccgtgtggctccccatgctcctgacagtacaccaggaccactctgtgttcactc

SEQ ID NO: 104280 - DNA, 76 bp, Homo sapiens
taatttcggggtctgatccgtgtggctccccatgctcctgacagtacaccaggaccactctgtgttcactcccgtg

SEQ ID NO: 104281 - DNA, 79 bp, Homo sapiens
tcggggtctgatccgtgtggctccccatgctcctgacagtacaccaggaccactctgtgttcactcccgtgtgcagtcc

SEQ ID NO: 104282 - DNA, 82 bp, Homo sapiens
gtctgatccgtgtggctccccatgctcctgacagtacaccaggaccactctgtgttcactcccgtgtgcagtccccatgctc

SEQ ID NO: 104283 - DNA, 83 bp, Homo sapiens
tgtggctccccatgctcctgacagtacaccaggaccactctgtgttcactcccgtgtgcagtccccatgctcctgacagtaca

SEQ ID NO: 104284 - DNA, 80 bp, Homo sapiens
ccatgctcctgacagtacaccaggaccactctgtgttcactcccgtgtgcagtccccatgctcctgacagtacacccgac

SEQ ID NO: 104285 - DNA, 78 bp, Homo sapiens
tcctgacagtacaccaggaccactctgtgttcactcccgtgtgcagtccccatgctcctgacagtacacccgacccta

SEQ ID NO: 104286 - DNA, 76 bp, Homo sapiens
accactctgtgttcactcccgtgtgcagtccccatgctcctgacagtacacccgaccctaagattcttgcttcgct

SEQ ID NO: 104287 - DNA, 78 bp, Homo sapiens
tgttcactcccgtgtgcagtccccatgctcctgacagtacacccgaccctaagattcttgcttcgcttgcctttgata

SEQ ID NO: 104288 - DNA, 81 bp, Homo sapiens
catgctcctgacagtacacccgaccctaagattcttgcttcgcttgcctttgatatggtgatctctggaactgagtatcaa

SEQ ID NO: 104289 - DNA, 75 bp, Homo sapiens
acagtacacccgaccctaagattcttgcttcgcttgcctttgatatggtgatctctggaactgagtatcaaacct

SEQ ID NO: 104290 - DNA, 77 bp, Homo sapiens
ctaagattcttgcttcgcttgcctttgatatggtgatctctggaactgagtatcaaaccttgcttgaggaattaaaa

SEQ ID NO: 104291 - DNA, 80 bp, Homo sapiens
tttgatatggtgatctctggaactgagtatcaaaccttgcttgaggaattaaaatgcttgctcatatcacttatatcttt

SEQ ID NO: 104292 - DNA, 79 bp, Homo sapiens
tggtgatctctggaactgagtatcaaaccttgcttgaggaattaaaatgcttgctcatatcacttatatcttttaaatg

SEQ ID NO: 104293 - DNA, 75 bp, Homo sapiens
ggaactgagtatcaaaccttgcttgaggaattaaaatgcttgctcatatcacttatatcttttaaatgtggaaaa

SEQ ID NO: 104294 - DNA, 75 bp, Homo sapiens
aaccttgcttgaggaattaaaatgcttgctcatatcacttatatcttttaaatgtggaaaacagagagaatccac

SEQ ID NO: 104295 - DNA, 80 bp, Homo sapiens
ttgaggaattaaaatgcttgctcatatcacttatatcttttaaatgtggaaaacagagagaatccacttggagcacatca

SEQ ID NO: 104296 - DNA, 79 bp, Homo sapiens
aatgcttgctcatatcacttatatcttttaaatgtggaaaacagagagaatccacttggagcacatcagataggtttat

SEQ ID NO: 104297 - DNA, 78 bp, Homo sapiens
ttgctcatatcacttatatcttttaaatgtggaaaacagagagaatccacttggagcacatcagataggtttattact

SEQ ID NO: 104298 - DNA, 73 bp, Homo sapiens
atatcttttaaatgtggaaaacagagagaatccacttggagcacatcagataggtttattactttgttcctcc

SEQ ID NO: 104299 - DNA, 73 bp, Homo sapiens
aatgtggaaaacagagagaatccacttggagcacatcagataggtttattactttgttcctcccttgtcattt

SEQ ID NO: 104300 - DNA, 74 bp, Homo sapiens
aaaacagagagaatccacttggagcacatcagataggtttattactttgttcctcccttgtcattttttgcatg

SEQ ID NO: 104301 - DNA, 77 bp, Homo sapiens
agcacatcagataggtttattactttgttcctcccttgtcattttttgcatgtctcacatcaaaccctcctctgcaa

SEQ ID NO: 104302 - DNA, 75 bp, Homo sapiens
ttattactttgttcctcccttgtcattttttgcatgtctcacatcaaaccctcctctgcaacagtgaaaatatag

SEQ ID NO: 104303 - DNA, 79 bp, Homo sapiens
tcccttgtcattttttgcatgtctcacatcaaaccctcctctgcaacagtgaaaatataggatgggatagatgaagaag

SEQ ID NO: 104304 - DNA, 77 bp, Homo sapiens
attttttgcatgtctcacatcaaaccctcctctgcaacagtgaaaatataggatgggatagatgaagaaggtggtac

SEQ ID NO: 104305 - DNA, 78 bp, Homo sapiens
tctgcaacagtgaaaatataggatgggatagatgaagaaggtggtactccttccttctctgggcacagaggcaatttc

SEQ ID NO: 104306 - DNA, 76 bp, Homo sapiens
acagtgaaaatataggatgggatagatgaagaaggtggtactccttccttctctgggcacagaggcaatttctcag

SEQ ID NO: 104307 - DNA, 83 bp, Homo sapiens
tataggatgggatagatgaagaaggtggtactccttccttctctgggcacagaggcaatttctcagtgcagctcacatgtggc

SEQ ID NO: 104308 - DNA, 82 bp, Homo sapiens
atagatgaagaaggtggtactccttccttctctgggcacagaggcaatttctcagtgcagctcacatgtggctacaaacaca

SEQ ID NO: 104309 - DNA, 82 bp, Homo sapiens
tggtactccttccttctctgggcacagaggcaatttctcagtgcagctcacatgtggctacaaacacagagtatcactttct

SEQ ID NO: 104310 - DNA, 84 bp, Homo sapiens
ttccttctctgggcacagaggcaatttctcagtgcagctcacatgtggctacaaacacagagtatcactttcttatacagacca

SEQ ID NO: 104311 - DNA, 84 bp, Homo sapiens
ggcacagaggcaatttctcagtgcagctcacatgtggctacaaacacagagtatcactttcttatacagaccaggtcactgttc

SEQ ID NO: 104312 - DNA, 81 bp, Homo sapiens
caatttctcagtgcagctcacatgtggctacaaacacagagtatcactttcttatacagaccaggtcactgttcctcaaaa

SEQ ID NO: 104313 - DNA, 80 bp, Homo sapiens
tctcagtgcagctcacatgtggctacaaacacagagtatcactttcttatacagaccaggtcactgttcctcaaaaaaaa

SEQ ID NO: 104314 - DNA, 76 bp, Homo sapiens
aaaaaaagatggtgttctatttgataacctgcacttctccagagtgacctcttcagctgagtctggaagactgcct

SEQ ID NO: 104315 - DNA, 79 bp, Homo sapiens
aagatggtgttctatttgataacctgcacttctccagagtgacctcttcagctgagtctggaagactgccttaggcaag

SEQ ID NO: 104316 - DNA, 77 bp, Homo sapiens
tctatttgataacctgcacttctccagagtgacctcttcagctgagtctggaagactgccttaggcaagtcccccgg

SEQ ID NO: 104317 - DNA, 77 bp, Homo sapiens
acctgcacttctccagagtgacctcttcagctgagtctggaagactgccttaggcaagtcccccgggtctctggcta

SEQ ID NO: 104318 - DNA, 76 bp, Homo sapiens
agagtgacctcttcagctgagtctggaagactgccttaggcaagtcccccgggtctctggctacagagggccatcc

SEQ ID NO: 104319 - DNA, 81 bp, Homo sapiens
tcttcagctgagtctggaagactgccttaggcaagtcccccgggtctctggctacagagggccatcctccatgagagatga

SEQ ID NO: 104320 - DNA, 77 bp, Homo sapiens
agtctggaagactgccttaggcaagtcccccgggtctctggctacagagggccatcctccatgagagatgagcttgt

SEQ ID NO: 104321 - DNA, 77 bp, Homo sapiens
aagactgccttaggcaagtcccccgggtctctggctacagagggccatcctccatgagagatgagcttgtttcattg

SEQ ID NO: 104322 - DNA, 82 bp, Homo sapiens
gggtctctggctacagagggccatcctccatgagagatgagcttgtttcattgttgcaaagtatagccaagctgatacattt

SEQ ID NO: 104323 - DNA, 83 bp, Homo sapiens
ctacagagggccatcctccatgagagatgagcttgtttcattgttgcaaagtatagccaagctgatacattttagcaagacta

SEQ ID NO: 104324 - DNA, 80 bp, Homo sapiens
ccatcctccatgagagatgagcttgtttcattgttgcaaagtatagccaagctgatacattttagcaagactaaaactta

SEQ ID NO: 104325 - DNA, 79 bp, Homo sapiens
tccatgagagatgagcttgtttcattgttgcaaagtatagccaagctgatacattttagcaagactaaaacttaatctt

SEQ ID NO: 104326 - DNA, 75 bp, Homo sapiens
gatgagcttgtttcattgttgcaaagtatagccaagctgatacattttagcaagactaaaacttaatctttaggg

SEQ ID NO: 104327 - DNA, 72 bp, Homo sapiens
tttcattgttgcaaagtatagccaagctgatacattttagcaagactaaaacttaatctttagggttctggg

SEQ ID NO: 104328 - DNA, 71 bp, Homo sapiens
aagtatagccaagctgatacattttagcaagactaaaacttaatctttagggttctgggtcctttcatcaa

SEQ ID NO: 104329 - DNA, 70 bp, Homo sapiens
acattttagcaagactaaaacttaatctttagggttctgggtcctttcatcaaatttcctctgctcacac

SEQ ID NO: 104330 - DNA, 72 bp, Homo sapiens
aagactaaaacttaatctttagggttctgggtcctttcatcaaatttcctctgctcacaccatgatctccat

SEQ ID NO: 104331 - DNA, 75 bp, Homo sapiens
acttaatctttagggttctgggtcctttcatcaaatttcctctgctcacaccatgatctccattgtctcctcctc

SEQ ID NO: 104332 - DNA, 75 bp, Homo sapiens
cctccttcttcttcaactattatctaccaagctgtgcctgggctgcccccagtgttttgcagtgtgaggaacttc

SEQ ID NO: 104333 - DNA, 77 bp, Homo sapiens
ttcttcttcaactattatctaccaagctgtgcctgggctgcccccagtgttttgcagtgtgaggaacttctacaggc

SEQ ID NO: 104334 - DNA, 78 bp, Homo sapiens
actattatctaccaagctgtgcctgggctgcccccagtgttttgcagtgtgaggaacttctacaggccagcttggcca

SEQ ID NO: 104335 - DNA, 77 bp, Homo sapiens
accaagctgtgcctgggctgcccccagtgttttgcagtgtgaggaacttctacaggccagcttggccactgaaagaa

SEQ ID NO: 104336 - DNA, 78 bp, Homo sapiens
ggctgcccccagtgttttgcagtgtgaggaacttctacaggccagcttggccactgaaagaagccagtgattaatgta

SEQ ID NO: 104337 - DNA, 75 bp, Homo sapiens
agtgttttgcagtgtgaggaacttctacaggccagcttggccactgaaagaagccagtgattaatgtagttttaa

SEQ ID NO: 104338 - DNA, 74 bp, Homo sapiens
agtgtgaggaacttctacaggccagcttggccactgaaagaagccagtgattaatgtagttttaaacaaatcaa

SEQ ID NO: 104339 - DNA, 75 bp, Homo sapiens
acttctacaggccagcttggccactgaaagaagccagtgattaatgtagttttaaacaaatcaagatttgcataa

SEQ ID NO: 104340 - DNA, 76 bp, Homo sapiens
gaagccagtgattaatgtagttttaaacaaatcaagatttgcataaattggctctgaagtcagcttctacaaacca

SEQ ID NO: 104341 - DNA, 75 bp, Homo sapiens
ttaatgtagttttaaacaaatcaagatttgcataaattggctctgaagtcagcttctacaaaccagctggaacac

SEQ ID NO: 104342 - DNA, 77 bp, Homo sapiens
ttttaaacaaatcaagatttgcataaattggctctgaagtcagcttctacaaaccagctggaacactcgccatattc

SEQ ID NO: 104343 - DNA, 79 bp, Homo sapiens
acaaatcaagatttgcataaattggctctgaagtcagcttctacaaaccagctggaacactcgccatattcctagttca

SEQ ID NO: 104344 - DNA, 80 bp, Homo sapiens
atttgcataaattggctctgaagtcagcttctacaaaccagctggaacactcgccatattcctagttcagtgctgtcttc

SEQ ID NO: 104345 - DNA, 79 bp, Homo sapiens
ctctgaagtcagcttctacaaaccagctggaacactcgccatattcctagttcagtgctgtcttcccagtgggttctca

SEQ ID NO: 104346 - DNA, 77 bp, Homo sapiens
aagtcagcttctacaaaccagctggaacactcgccatattcctagttcagtgctgtcttcccagtgggttctcagac

SEQ ID NO: 104347 - DNA, 79 bp, Homo sapiens
tacaaaccagctggaacactcgccatattcctagttcagtgctgtcttcccagtgggttctcagactttgcagctcacc

SEQ ID NO: 104348 - DNA, 77 bp, Homo sapiens
aacactcgccatattcctagttcagtgctgtcttcccagtgggttctcagactttgcagctcacccttagccttctg

SEQ ID NO: 104349 - DNA, 77 bp, Homo sapiens
atattcctagttcagtgctgtcttcccagtgggttctcagactttgcagctcacccttagccttctgttgcagggaa

SEQ ID NO: 104350 - DNA, 78 bp, Homo sapiens
tgtcttcccagtgggttctcagactttgcagctcacccttagccttctgttgcagggaaaccacatccatgtggctcc

SEQ ID NO: 104351 - DNA, 80 bp, Homo sapiens
agactttgcagctcacccttagccttctgttgcagggaaaccacatccatgtggctcccagtctctggcaagccagcaaa

SEQ ID NO: 104352 - DNA, 78 bp, Homo sapiens
tcacccttagccttctgttgcagggaaaccacatccatgtggctcccagtctctggcaagccagcaaagggctccaac

SEQ ID NO: 104353 - DNA, 78 bp, Homo sapiens
ttagccttctgttgcagggaaaccacatccatgtggctcccagtctctggcaagccagcaaagggctccaacttctct

SEQ ID NO: 104354 - DNA, 80 bp, Homo sapiens
tgttgcagggaaaccacatccatgtggctcccagtctctggcaagccagcaaagggctccaacttctcttgctttctcca

SEQ ID NO: 104355 - DNA, 77 bp, Homo sapiens
aaaccacatccatgtggctcccagtctctggcaagccagcaaagggctccaacttctcttgctttctccaccttctc

SEQ ID NO: 104356 - DNA, 79 bp, Homo sapiens
atgtggctcccagtctctggcaagccagcaaagggctccaacttctcttgctttctccaccttctcctcactggctgga

SEQ ID NO: 104357 - DNA, 79 bp, Homo sapiens
agtctctggcaagccagcaaagggctccaacttctcttgctttctccaccttctcctcactggctggagcactcaggac

SEQ ID NO: 104358 - DNA, 76 bp, Homo sapiens
gctccaacttctcttgctttctccaccttctcctcactggctggagcactcaggactctcccaggtcctatttttc

SEQ ID NO: 104359 - DNA, 74 bp, Homo sapiens
ttctcttgctttctccaccttctcctcactggctggagcactcaggactctcccaggtcctatttttctccttt

SEQ ID NO: 104360 - DNA, 72 bp, Homo sapiens
ttctccaccttctcctcactggctggagcactcaggactctcccaggtcctatttttctccttttggtaatt

SEQ ID NO: 104361 - DNA, 74 bp, Homo sapiens
ttctcctcactggctggagcactcaggactctcccaggtcctatttttctccttttggtaatttcctgatagaa

SEQ ID NO: 104362 - DNA, 74 bp, Homo sapiens
ctggagcactcaggactctcccaggtcctatttttctccttttggtaatttcctgatagaaactccagcaatga

SEQ ID NO: 104363 - DNA, 72 bp, Homo sapiens
tcaggactctcccaggtcctatttttctccttttggtaatttcctgatagaaactccagcaatgaagataat

SEQ ID NO: 104364 - DNA, 70 bp, Homo sapiens
cccaggtcctatttttctccttttggtaatttcctgatagaaactccagcaatgaagataattttcagaa

SEQ ID NO: 104365 - DNA, 69 bp, Homo sapiens
cctatttttctccttttggtaatttcctgatagaaactccagcaatgaagataattttcagaactgttt

SEQ ID NO: 104366 - DNA, 67 bp, Homo sapiens
ctccttttggtaatttcctgatagaaactccagcaatgaagataattttcagaactgtttttttttt

SEQ ID NO: 104367 - DNA, 69 bp, Homo sapiens
tttttttttctggtacagaattcattttggcttctgggaactaagaaacaaatgaactgtctttctgaa

SEQ ID NO: 104368 - DNA, 74 bp, Homo sapiens
tggtacagaattcattttggcttctgggaactaagaaacaaatgaactgtctttctgaagtcaagaactgtata

SEQ ID NO: 104369 - DNA, 73 bp, Homo sapiens
attcattttggcttctgggaactaagaaacaaatgaactgtctttctgaagtcaagaactgtataatgaaagc

SEQ ID NO: 104370 - DNA, 75 bp, Homo sapiens
tttggcttctgggaactaagaaacaaatgaactgtctttctgaagtcaagaactgtataatgaaagctaaatgca

SEQ ID NO: 104371 - DNA, 75 bp, Homo sapiens
aactaagaaacaaatgaactgtctttctgaagtcaagaactgtataatgaaagctaaatgcagaggcaaaagcca

SEQ ID NO: 104372 - DNA, 75 bp, Homo sapiens
aacaaatgaactgtctttctgaagtcaagaactgtataatgaaagctaaatgcagaggcaaaagccactgtcggt

SEQ ID NO: 104373 - DNA, 75 bp, Homo sapiens
actgtctttctgaagtcaagaactgtataatgaaagctaaatgcagaggcaaaagccactgtcggttgccctttg

SEQ ID NO: 104374 - DNA, 76 bp, Homo sapiens
aactgtataatgaaagctaaatgcagaggcaaaagccactgtcggttgccctttgtcctctctgtcaccagccctg

SEQ ID NO: 104375 - DNA, 77 bp, Homo sapiens
aaagctaaatgcagaggcaaaagccactgtcggttgccctttgtcctctctgtcaccagccctggacatgagggtga

SEQ ID NO: 104376 - DNA, 79 bp, Homo sapiens
atgcagaggcaaaagccactgtcggttgccctttgtcctctctgtcaccagccctggacatgagggtgagacagaaagc

SEQ ID NO: 104377 - DNA, 76 bp, Homo sapiens
aaaagccactgtcggttgccctttgtcctctctgtcaccagccctggacatgagggtgagacagaaagcctcgctc

SEQ ID NO: 104378 - DNA, 76 bp, Homo sapiens
ggttgccctttgtcctctctgtcaccagccctggacatgagggtgagacagaaagcctcgctcttccccagtgaaa

SEQ ID NO: 104379 - DNA, 76 bp, Homo sapiens
ttgccctttgtcctctctgtcaccagccctggacatgagggtgagacagaaagcctcgctcttccccagtgaaacc

SEQ ID NO: 104380 - DNA, 77 bp, Homo sapiens
tttgtcctctctgtcaccagccctggacatgagggtgagacagaaagcctcgctcttccccagtgaaaccctgcaat

SEQ ID NO: 104381 - DNA, 80 bp, Homo sapiens
tctgtcaccagccctggacatgagggtgagacagaaagcctcgctcttccccagtgaaaccctgcaattgttctgtgcca

SEQ ID NO: 104382 - DNA, 81 bp, Homo sapiens
tcaccagccctggacatgagggtgagacagaaagcctcgctcttccccagtgaaaccctgcaattgttctgtgccagatga

SEQ ID NO: 104383 - DNA, 79 bp, Homo sapiens
acatgagggtgagacagaaagcctcgctcttccccagtgaaaccctgcaattgttctgtgccagatgaagccctcttca

SEQ ID NO: 104384 - DNA, 82 bp, Homo sapiens
gtgagacagaaagcctcgctcttccccagtgaaaccctgcaattgttctgtgccagatgaagccctcttcagatgctggaca

SEQ ID NO: 104385 - DNA, 80 bp, Homo sapiens
agacagaaagcctcgctcttccccagtgaaaccctgcaattgttctgtgccagatgaagccctcttcagatgctggacag

SEQ ID NO: 104386 - DNA, 79 bp, Homo sapiens
acagaaagcctcgctcttccccagtgaaaccctgcaattgttctgtgccagatgaagccctcttcagatgctggacagg

SEQ ID NO: 104387 - DNA, 83 bp, Homo sapiens
aaaccctgcaattgttctgtgccagatgaagccctcttcagatgctggacagggtccaggtgctgccctgtgagtggatgcca

SEQ ID NO: 104388 - DNA, 84 bp, Homo sapiens
aattgttctgtgccagatgaagccctcttcagatgctggacagggtccaggtgctgccctgtgagtggatgccagcctcagtcc

SEQ ID NO: 104389 - DNA, 85 bp, Homo sapiens
agatgaagccctcttcagatgctggacagggtccaggtgctgccctgtgagtggatgccagcctcagtcctcatccaggccagga

SEQ ID NO: 104390 - DNA, 85 bp, Homo sapiens
tcttcagatgctggacagggtccaggtgctgccctgtgagtggatgccagcctcagtcctcatccaggccaggaccatgtccagg

SEQ ID NO: 104391 - DNA, 83 bp, Homo sapiens
agatgctggacagggtccaggtgctgccctgtgagtggatgccagcctcagtcctcatccaggccaggaccatgtccagggcg

SEQ ID NO: 104392 - DNA, 85 bp, Homo sapiens
tccaggtgctgccctgtgagtggatgccagcctcagtcctcatccaggccaggaccatgtccagggcgggcttgctcctgaatca

SEQ ID NO: 104393 - DNA, 86 bp, Homo sapiens
tgccctgtgagtggatgccagcctcagtcctcatccaggccaggaccatgtccagggcgggcttgctcctgaatcacatgcttcca

SEQ ID NO: 104394 - DNA, 84 bp, Homo sapiens
agtggatgccagcctcagtcctcatccaggccaggaccatgtccagggcgggcttgctcctgaatcacatgcttccagtcagga

SEQ ID NO: 104395 - DNA, 85 bp, Homo sapiens
tcatccaggccaggaccatgtccagggcgggcttgctcctgaatcacatgcttccagtcaggactctgaatgcaaatgctggtgt

SEQ ID NO: 104396 - DNA, 81 bp, Homo sapiens
aggaccatgtccagggcgggcttgctcctgaatcacatgcttccagtcaggactctgaatgcaaatgctggtgttttgtat

SEQ ID NO: 104397 - DNA, 79 bp, Homo sapiens
atgtccagggcgggcttgctcctgaatcacatgcttccagtcaggactctgaatgcaaatgctggtgttttgtattttt

SEQ ID NO: 104398 - DNA, 71 bp, Homo sapiens
caccccactaatttttaaacatttttagacatgaggtctccttatttgccccagctggctgtgaacttctg

SEQ ID NO: 104399 - DNA, 72 bp, Homo sapiens
actaatttttaaacatttttagacatgaggtctccttatttgccccagctggctgtgaacttctggcttcaa

SEQ ID NO: 104400 - DNA, 77 bp, Homo sapiens
taaacatttttagacatgaggtctccttatttgccccagctggctgtgaacttctggcttcaaggtgatcctcctgc

SEQ ID NO: 104401 - DNA, 76 bp, Homo sapiens
tcagccttccaattagctcatactgatgttttatttaaatatcgcataatatttcagtaaaaggcctgcaaagagg

SEQ ID NO: 104402 - DNA, 76 bp, Homo sapiens
ccaattagctcatactgatgttttatttaaatatcgcataatatttcagtaaaaggcctgcaaagagggcacagaa

SEQ ID NO: 104403 - DNA, 74 bp, Homo sapiens
catactgatgttttatttaaatatcgcataatatttcagtaaaaggcctgcaaagagggcacagaaagcatttt

SEQ ID NO: 104404 - DNA, 74 bp, Homo sapiens
tatttaaatatcgcataatatttcagtaaaaggcctgcaaagagggcacagaaagcattttttggagttcactg

SEQ ID NO: 104405 - DNA, 74 bp, Homo sapiens
aatatcgcataatatttcagtaaaaggcctgcaaagagggcacagaaagcattttttggagttcactgggggca

SEQ ID NO: 104406 - DNA, 73 bp, Homo sapiens
atatttcagtaaaaggcctgcaaagagggcacagaaagcattttttggagttcactgggggcaggacgagcta

SEQ ID NO: 104407 - DNA, 73 bp, Homo sapiens
taaaaggcctgcaaagagggcacagaaagcattttttggagttcactgggggcaggacgagctatcccattag

SEQ ID NO: 104408 - DNA, 70 bp, Homo sapiens
aaagagggcacagaaagcattttttggagttcactgggggcaggacgagctatcccattaggtgggaagg

SEQ ID NO: 104409 - DNA, 70 bp, Homo sapiens
aaagcattttttggagttcactgggggcaggacgagctatcccattaggtgggaaggggtctcttcctga

SEQ ID NO: 104410 - DNA, 76 bp, Homo sapiens
tttttggagttcactgggggcaggacgagctatcccattaggtgggaaggggtctcttcctgatatgcatcataca

SEQ ID NO: 104411 - DNA, 79 bp, Homo sapiens
aggacgagctatcccattaggtgggaaggggtctcttcctgatatgcatcatacagctgcttctagtggtggtacagga

SEQ ID NO: 104412 - DNA, 78 bp, Homo sapiens
ctatcccattaggtgggaaggggtctcttcctgatatgcatcatacagctgcttctagtggtggtacaggacccagga

SEQ ID NO: 104413 - DNA, 78 bp, Homo sapiens
gtgggaaggggtctcttcctgatatgcatcatacagctgcttctagtggtggtacaggacccaggagaagaagagtag

SEQ ID NO: 104414 - DNA, 81 bp, Homo sapiens
tctcttcctgatatgcatcatacagctgcttctagtggtggtacaggacccaggagaagaagagtaggtgcttaacaaata

SEQ ID NO: 104415 - DNA, 77 bp, Homo sapiens
atcatacagctgcttctagtggtggtacaggacccaggagaagaagagtaggtgcttaacaaatatttgctgaataa

SEQ ID NO: 104416 - DNA, 74 bp, Homo sapiens
ttctagtggtggtacaggacccaggagaagaagagtaggtgcttaacaaatatttgctgaataaaggttgatga

SEQ ID NO: 104417 - DNA, 75 bp, Homo sapiens
tacaggacccaggagaagaagagtaggtgcttaacaaatatttgctgaataaaggttgatgaaaatcaatgtcga

SEQ ID NO: 104418 - DNA, 75 bp, Homo sapiens
ccaggagaagaagagtaggtgcttaacaaatatttgctgaataaaggttgatgaaaatcaatgtcgacaatacat

SEQ ID NO: 104419 - DNA, 76 bp, Homo sapiens
gagtaggtgcttaacaaatatttgctgaataaaggttgatgaaaatcaatgtcgacaatacatttattgggatcag

SEQ ID NO: 104420 - DNA, 75 bp, Homo sapiens
gcttaacaaatatttgctgaataaaggttgatgaaaatcaatgtcgacaatacatttattgggatcaggtaagga

SEQ ID NO: 104421 - DNA, 75 bp, Homo sapiens
tttgctgaataaaggttgatgaaaatcaatgtcgacaatacatttattgggatcaggtaaggaacaaaggtgata

SEQ ID NO: 104422 - DNA, 72 bp, Homo sapiens
aaaggttgatgaaaatcaatgtcgacaatacatttattgggatcaggtaaggaacaaaggtgatattaacaa

SEQ ID NO: 104423 - DNA, 75 bp, Homo sapiens
atgaaaatcaatgtcgacaatacatttattgggatcaggtaaggaacaaaggtgatattaacaacagctgccacc

SEQ ID NO: 104424 - DNA, 76 bp, Homo sapiens
atgtcgacaatacatttattgggatcaggtaaggaacaaaggtgatattaacaacagctgccacctgcgtctatta

SEQ ID NO: 104425 - DNA, 75 bp, Homo sapiens
aatacatttattgggatcaggtaaggaacaaaggtgatattaacaacagctgccacctgcgtctattaccagaca

SEQ ID NO: 104426 - DNA, 80 bp, Homo sapiens
attgggatcaggtaaggaacaaaggtgatattaacaacagctgccacctgcgtctattaccagacatctcatagatagca

SEQ ID NO: 104427 - DNA, 78 bp, Homo sapiens
gtaaggaacaaaggtgatattaacaacagctgccacctgcgtctattaccagacatctcatagatagcaaccctggga

SEQ ID NO: 104428 - DNA, 84 bp, Homo sapiens
tgatattaacaacagctgccacctgcgtctattaccagacatctcatagatagcaaccctgggagggagatcttacatacatga

SEQ ID NO: 104429 - DNA, 82 bp, Homo sapiens
ttaacaacagctgccacctgcgtctattaccagacatctcatagatagcaaccctgggagggagatcttacatacatgagga

SEQ ID NO: 104430 - DNA, 80 bp, Homo sapiens
acctgcgtctattaccagacatctcatagatagcaaccctgggagggagatcttacatacatgaggacagaggaatggga

SEQ ID NO: 104431 - DNA, 81 bp, Homo sapiens
tattaccagacatctcatagatagcaaccctgggagggagatcttacatacatgaggacagaggaatgggagatccaccaa

SEQ ID NO: 104432 - DNA, 81 bp, Homo sapiens
atctcatagatagcaaccctgggagggagatcttacatacatgaggacagaggaatgggagatccaccaaggtgcctgaca

SEQ ID NO: 104433 - DNA, 80 bp, Homo sapiens
atagcaaccctgggagggagatcttacatacatgaggacagaggaatgggagatccaccaaggtgcctgacagctgcatt

SEQ ID NO: 104434 - DNA, 81 bp, Homo sapiens
tgggagggagatcttacatacatgaggacagaggaatgggagatccaccaaggtgcctgacagctgcatttgaacccatac

SEQ ID NO: 104435 - DNA, 83 bp, Homo sapiens
tcttacatacatgaggacagaggaatgggagatccaccaaggtgcctgacagctgcatttgaacccatactcagatagaggaa

SEQ ID NO: 104436 - DNA, 80 bp, Homo sapiens
atacatgaggacagaggaatgggagatccaccaaggtgcctgacagctgcatttgaacccatactcagatagaggaaccc

SEQ ID NO: 104437 - DNA, 79 bp, Homo sapiens
accaaggtgcctgacagctgcatttgaacccatactcagatagaggaaccctctgcagtctgctcagggttggagtttg

SEQ ID NO: 104438 - DNA, 78 bp, Homo sapiens
agctgcatttgaacccatactcagatagaggaaccctctgcagtctgctcagggttggagtttgtggctgggagaaaa

SEQ ID NO: 104439 - DNA, 75 bp, Homo sapiens
atttgaacccatactcagatagaggaaccctctgcagtctgctcagggttggagtttgtggctgggagaaaagag

SEQ ID NO: 104440 - DNA, 77 bp, Homo sapiens
tagaggaaccctctgcagtctgctcagggttggagtttgtggctgggagaaaagaggaacagcctctgcagccaacc

SEQ ID NO: 104441 - DNA, 74 bp, Homo sapiens
agggttggagtttgtggctgggagaaaagaggaacagcctctgcagccaaccctcctgggcagcgaatgtctcc

SEQ ID NO: 104442 - DNA, 75 bp, Homo sapiens
agtttgtggctgggagaaaagaggaacagcctctgcagccaaccctcctgggcagcgaatgtctcctccccacac

SEQ ID NO: 104443 - DNA, 77 bp, Homo sapiens
tgggagaaaagaggaacagcctctgcagccaaccctcctgggcagcgaatgtctcctccccacactgcagtgaaccc

SEQ ID NO: 104444 - DNA, 77 bp, Homo sapiens
aaagaggaacagcctctgcagccaaccctcctgggcagcgaatgtctcctccccacactgcagtgaacccctggcca

SEQ ID NO: 104445 - DNA, 79 bp, Homo sapiens
agcctctgcagccaaccctcctgggcagcgaatgtctcctccccacactgcagtgaacccctggccatccttccagctc

SEQ ID NO: 104446 - DNA, 76 bp, Homo sapiens
aaccctcctgggcagcgaatgtctcctccccacactgcagtgaacccctggccatccttccagctctgcccttgcc

SEQ ID NO: 104447 - DNA, 77 bp, Homo sapiens
aatgtctcctccccacactgcagtgaacccctggccatccttccagctctgcccttgccccactccagtaaagcagc

SEQ ID NO: 104448 - DNA, 78 bp, Homo sapiens
agtgaacccctggccatccttccagctctgcccttgccccactccagtaaagcagccagagagtgatacacattagat

SEQ ID NO: 104449 - DNA, 79 bp, Homo sapiens
agctctgcccttgccccactccagtaaagcagccagagagtgatacacattagattgtgtctctcctccacccaaactc

SEQ ID NO: 104450 - DNA, 77 bp, Homo sapiens
cttgccccactccagtaaagcagccagagagtgatacacattagattgtgtctctcctccacccaaactccttgacg

SEQ ID NO: 104451 - DNA, 77 bp, Homo sapiens
actccagtaaagcagccagagagtgatacacattagattgtgtctctcctccacccaaactccttgacggctttcca

SEQ ID NO: 104452 - DNA, 77 bp, Homo sapiens
agccagagagtgatacacattagattgtgtctctcctccacccaaactccttgacggctttccagggcactcagaat

SEQ ID NO: 104453 - DNA, 76 bp, Homo sapiens
agagtgatacacattagattgtgtctctcctccacccaaactccttgacggctttccagggcactcagaattccag

SEQ ID NO: 104454 - DNA, 74 bp, Homo sapiens
acattagattgtgtctctcctccacccaaactccttgacggctttccagggcactcagaattccaggccctgga

SEQ ID NO: 104455 - DNA, 72 bp, Homo sapiens
gtgtctctcctccacccaaactccttgacggctttccagggcactcagaattccaggccctggaggaaacca

SEQ ID NO: 104456 - DNA, 72 bp, Homo sapiens
acccaaactccttgacggctttccagggcactcagaattccaggccctggaggaaaccagcccagcccatca

SEQ ID NO: 104457 - DNA, 76 bp, Homo sapiens
tcagaattccaggccctggaggaaaccagcccagcccatcacctagacctgggagcacctgtctccctcggcttgc

SEQ ID NO: 104458 - DNA, 79 bp, Homo sapiens
aggaaaccagcccagcccatcacctagacctgggagcacctgtctccctcggcttgctctgccatagcctctgtctgtc

SEQ ID NO: 104459 - DNA, 83 bp, Homo sapiens
ccagcccatcacctagacctgggagcacctgtctccctcggcttgctctgccatagcctctgtctgtctcacagacgcgccaa

SEQ ID NO: 104460 - DNA, 79 bp, Homo sapiens
acctagacctgggagcacctgtctccctcggcttgctctgccatagcctctgtctgtctcacagacgcgccaagctttt

SEQ ID NO: 104461 - DNA, 82 bp, Homo sapiens
acctgggagcacctgtctccctcggcttgctctgccatagcctctgtctgtctcacagacgcgccaagctttttctgcctca

SEQ ID NO: 104462 - DNA, 79 bp, Homo sapiens
acctgtctccctcggcttgctctgccatagcctctgtctgtctcacagacgcgccaagctttttctgcctcaggacctt

SEQ ID NO: 104463 - DNA, 78 bp, Homo sapiens
cttgctctgccatagcctctgtctgtctcacagacgcgccaagctttttctgcctcaggaccttttcaggggctttcc

SEQ ID NO: 104464 - DNA, 79 bp, Homo sapiens
tctgccatagcctctgtctgtctcacagacgcgccaagctttttctgcctcaggaccttttcaggggctttccttctgc

SEQ ID NO: 104465 - DNA, 75 bp, Homo sapiens
tgtctgtctcacagacgcgccaagctttttctgcctcaggaccttttcaggggctttccttctgcctggaccact

SEQ ID NO: 104466 - DNA, 73 bp, Homo sapiens
tctcacagacgcgccaagctttttctgcctcaggaccttttcaggggctttccttctgcctggaccactttcc

SEQ ID NO: 104467 - DNA, 69 bp, Homo sapiens
aagctttttctgcctcaggaccttttcaggggctttccttctgcctggaccactttcctgtctctaaac

SEQ ID NO: 104468 - DNA, 69 bp, Homo sapiens
ttttctgcctcaggaccttttcaggggctttccttctgcctggaccactttcctgtctctaaactcccc

SEQ ID NO: 104469 - DNA, 70 bp, Homo sapiens
ggctttccttctgcctggaccactttcctgtctctaaactcccccagttttccccatggctgctcaaccg

SEQ ID NO: 104470 - DNA, 70 bp, Homo sapiens
accactttcctgtctctaaactcccccagttttccccatggctgctcaaccgtcatctactaaagtaatg

SEQ ID NO: 104471 - DNA, 70 bp, Homo sapiens
tgtctctaaactcccccagttttccccatggctgctcaaccgtcatctactaaagtaatgggtaaagtaa

SEQ ID NO: 104472 - DNA, 66 bp, Homo sapiens
aaactcccccagttttccccatggctgctcaaccgtcatctactaaagtaatgggtaaagtaaccc

SEQ ID NO: 104473 - DNA, 67 bp, Homo sapiens
agttttccccatggctgctcaaccgtcatctactaaagtaatgggtaaagtaaccccgctccctacc

SEQ ID NO: 104474 - DNA, 70 bp, Homo sapiens
tgctcaaccgtcatctactaaagtaatgggtaaagtaaccccgctccctacccctgaaccatcacaacta

SEQ ID NO: 104475 - DNA, 68 bp, Homo sapiens
aaccgtcatctactaaagtaatgggtaaagtaaccccgctccctacccctgaaccatcacaactatca

SEQ ID NO: 104476 - DNA, 72 bp, Homo sapiens
tactaaagtaatgggtaaagtaaccccgctccctacccctgaaccatcacaactatcatgtcacatgcacgg

SEQ ID NO: 104477 - DNA, 70 bp, Homo sapiens
atgggtaaagtaaccccgctccctacccctgaaccatcacaactatcatgtcacatgcacgggtttcttt

SEQ ID NO: 104478 - DNA, 76 bp, Homo sapiens
ccgctccctacccctgaaccatcacaactatcatgtcacatgcacgggtttcttttcaccattgcatttgtcttat

SEQ ID NO: 104479 - DNA, 76 bp, Homo sapiens
cctacccctgaaccatcacaactatcatgtcacatgcacgggtttcttttcaccattgcatttgtcttatttgatt

SEQ ID NO: 104480 - DNA, 78 bp, Homo sapiens
atcacaactatcatgtcacatgcacgggtttcttttcaccattgcatttgtcttatttgatttctgtgtttatgtatt

SEQ ID NO: 104481 - DNA, 77 bp, Homo sapiens
actatcatgtcacatgcacgggtttcttttcaccattgcatttgtcttatttgatttctgtgtttatgtatttgttg

SEQ ID NO: 104482 - DNA, 76 bp, Homo sapiens
tttcttttcaccattgcatttgtcttatttgatttctgtgtttatgtatttgttgtccatcctccaagtgacagag

SEQ ID NO: 104483 - DNA, 77 bp, Homo sapiens
accattgcatttgtcttatttgatttctgtgtttatgtatttgttgtccatcctccaagtgacagagggagtggatg

SEQ ID NO: 104484 - DNA, 76 bp, Homo sapiens
atttgtcttatttgatttctgtgtttatgtatttgttgtccatcctccaagtgacagagggagtggatggagtgaa

SEQ ID NO: 104485 - DNA, 74 bp, Homo sapiens
atttctgtgtttatgtatttgttgtccatcctccaagtgacagagggagtggatggagtgaaggataagttttg

SEQ ID NO: 104486 - DNA, 75 bp, Homo sapiens
tttatgtatttgttgtccatcctccaagtgacagagggagtggatggagtgaaggataagttttgtcctgttcac

SEQ ID NO: 104487 - DNA, 77 bp, Homo sapiens
atttgttgtccatcctccaagtgacagagggagtggatggagtgaaggataagttttgtcctgttcactgcccagca

SEQ ID NO: 104488 - DNA, 77 bp, Homo sapiens
acagagggagtggatggagtgaaggataagttttgtcctgttcactgcccagcatcaagaaaagtgcttggaactga

SEQ ID NO: 104489 - DNA, 79 bp, Homo sapiens
gatggagtgaaggataagttttgtcctgttcactgcccagcatcaagaaaagtgcttggaactgagtagatagtcaaca

SEQ ID NO: 104490 - DNA, 76 bp, Homo sapiens
aaggataagttttgtcctgttcactgcccagcatcaagaaaagtgcttggaactgagtagatagtcaacagacact

SEQ ID NO: 104491 - DNA, 76 bp, Homo sapiens
aagttttgtcctgttcactgcccagcatcaagaaaagtgcttggaactgagtagatagtcaacagacacttcttaa

SEQ ID NO: 104492 - DNA, 81 bp, Homo sapiens
ctgttcactgcccagcatcaagaaaagtgcttggaactgagtagatagtcaacagacacttcttaagaatgaatgaatcaa

SEQ ID NO: 104493 - DNA, 82 bp, Homo sapiens
agcatcaagaaaagtgcttggaactgagtagatagtcaacagacacttcttaagaatgaatgaatcaatcgatgacaatgaa

SEQ ID NO: 104494 - DNA, 80 bp, Homo sapiens
agaaaagtgcttggaactgagtagatagtcaacagacacttcttaagaatgaatgaatcaatcgatgacaatgaactgta

SEQ ID NO: 104495 - DNA, 82 bp, Homo sapiens
ttggaactgagtagatagtcaacagacacttcttaagaatgaatgaatcaatcgatgacaatgaactgtagctgccacctcc

SEQ ID NO: 104496 - DNA, 81 bp, Homo sapiens
atagtcaacagacacttcttaagaatgaatgaatcaatcgatgacaatgaactgtagctgccacctcctccagcctacgta

SEQ ID NO: 104497 - DNA, 79 bp, Homo sapiens
agacacttcttaagaatgaatgaatcaatcgatgacaatgaactgtagctgccacctcctccagcctacgtaccctgag

SEQ ID NO: 104498 - DNA, 83 bp, Homo sapiens
aatgaatcaatcgatgacaatgaactgtagctgccacctcctccagcctacgtaccctgaggcatcctagatctcagagcaag

SEQ ID NO: 104499 - DNA, 85 bp, Homo sapiens
aactgtagctgccacctcctccagcctacgtaccctgaggcatcctagatctcagagcaaggagatgatgactgccaggcattga

SEQ ID NO: 104500 - DNA, 80 bp, Homo sapiens
agcctacgtaccctgaggcatcctagatctcagagcaaggagatgatgactgccaggcattgagtggtgaaaaaatattt

SEQ ID NO: 104501 - DNA, 79 bp, Homo sapiens
acgtaccctgaggcatcctagatctcagagcaaggagatgatgactgccaggcattgagtggtgaaaaaatattttcct

SEQ ID NO: 104502 - DNA, 79 bp, Homo sapiens
atcctagatctcagagcaaggagatgatgactgccaggcattgagtggtgaaaaaatattttcctttgctacttactct

SEQ ID NO: 104503 - DNA, 75 bp, Homo sapiens
atgactgccaggcattgagtggtgaaaaaatattttcctttgctacttactcttctatcactgggtggcagtaag

SEQ ID NO: 104504 - DNA, 72 bp, Homo sapiens
attgagtggtgaaaaaatattttcctttgctacttactcttctatcactgggtggcagtaaggctagaagcc

SEQ ID NO: 104505 - DNA, 71 bp, Homo sapiens
aaaaatattttcctttgctacttactcttctatcactgggtggcagtaaggctagaagcctgggaaatctc

SEQ ID NO: 104506 - DNA, 74 bp, Homo sapiens
tacttactcttctatcactgggtggcagtaaggctagaagcctgggaaatctccatcacccgtcctctctgttt

SEQ ID NO: 104507 - DNA, 76 bp, Homo sapiens
ttctatcactgggtggcagtaaggctagaagcctgggaaatctccatcacccgtcctctctgttttgcgatactct

SEQ ID NO: 104508 - DNA, 76 bp, Homo sapiens
gtggcagtaaggctagaagcctgggaaatctccatcacccgtcctctctgttttgcgatactcttgggtgccctga

SEQ ID NO: 104509 - DNA, 75 bp, Homo sapiens
gctagaagcctgggaaatctccatcacccgtcctctctgttttgcgatactcttgggtgccctgagggctttaga

SEQ ID NO: 104510 - DNA, 75 bp, Homo sapiens
aatctccatcacccgtcctctctgttttgcgatactcttgggtgccctgagggctttagaggttgctgcggtcaa

SEQ ID NO: 104511 - DNA, 75 bp, Homo sapiens
tcctctctgttttgcgatactcttgggtgccctgagggctttagaggttgctgcggtcaacaacctaagcaacca

SEQ ID NO: 104512 - DNA, 74 bp, Homo sapiens
tctgttttgcgatactcttgggtgccctgagggctttagaggttgctgcggtcaacaacctaagcaaccacttc

SEQ ID NO: 104513 - DNA, 73 bp, Homo sapiens
atactcttgggtgccctgagggctttagaggttgctgcggtcaacaacctaagcaaccacttctgagtttctg

SEQ ID NO: 104514 - DNA, 76 bp, Homo sapiens
cctgagggctttagaggttgctgcggtcaacaacctaagcaaccacttctgagtttctggcatagtggcaaccaca

SEQ ID NO: 104515 - DNA, 76 bp, Homo sapiens
ctttagaggttgctgcggtcaacaacctaagcaaccacttctgagtttctggcatagtggcaaccacaactggcca

SEQ ID NO: 104516 - DNA, 77 bp, Homo sapiens
gttgctgcggtcaacaacctaagcaaccacttctgagtttctggcatagtggcaaccacaactggccagtaggtcga

SEQ ID NO: 104517 - DNA, 78 bp, Homo sapiens
taagcaaccacttctgagtttctggcatagtggcaaccacaactggccagtaggtcgaggaggcctctgcttaacata

SEQ ID NO: 104518 - DNA, 78 bp, Homo sapiens
catagtggcaaccacaactggccagtaggtcgaggaggcctctgcttaacatattgcaccgatgttttggttatgcaa

SEQ ID NO: 104519 - DNA, 76 bp, Homo sapiens
aaccacaactggccagtaggtcgaggaggcctctgcttaacatattgcaccgatgttttggttatgcaaatatatg

SEQ ID NO: 104520 - DNA, 74 bp, Homo sapiens
aactggccagtaggtcgaggaggcctctgcttaacatattgcaccgatgttttggttatgcaaatatatggttt

SEQ ID NO: 104521 - DNA, 75 bp, Homo sapiens
ctctgcttaacatattgcaccgatgttttggttatgcaaatatatggtttttctcattccgatggaaaacatttc

SEQ ID NO: 104522 - DNA, 75 bp, Homo sapiens
ttaacatattgcaccgatgttttggttatgcaaatatatggtttttctcattccgatggaaaacatttctggcca

SEQ ID NO: 104523 - DNA, 71 bp, Homo sapiens
accgatgttttggttatgcaaatatatggtttttctcattccgatggaaaacatttctggccaagtcaaaa

SEQ ID NO: 104524 - DNA, 75 bp, Homo sapiens
ttatgcaaatatatggtttttctcattccgatggaaaacatttctggccaagtcaaaactacagaaacacagcaa

SEQ ID NO: 104525 - DNA, 72 bp, Homo sapiens
aatatatggtttttctcattccgatggaaaacatttctggccaagtcaaaactacagaaacacagcaaggaa

SEQ ID NO: 104526 - DNA, 76 bp, Homo sapiens
ttttctcattccgatggaaaacatttctggccaagtcaaaactacagaaacacagcaaggaagactcatctatata

SEQ ID NO: 104527 - DNA, 75 bp, Homo sapiens
atggaaaacatttctggccaagtcaaaactacagaaacacagcaaggaagactcatctatatagtcccctcagtc

SEQ ID NO: 104528 - DNA, 74 bp, Homo sapiens
aaacatttctggccaagtcaaaactacagaaacacagcaaggaagactcatctatatagtcccctcagtcccat

SEQ ID NO: 104529 - DNA, 74 bp, Homo sapiens
aagtcaaaactacagaaacacagcaaggaagactcatctatatagtcccctcagtcccattgccccagcctggg

SEQ ID NO: 104530 - DNA, 74 bp, Homo sapiens
tacagaaacacagcaaggaagactcatctatatagtcccctcagtcccattgccccagcctgggtccctctttt

SEQ ID NO: 104531 - DNA, 73 bp, Homo sapiens
aacacagcaaggaagactcatctatatagtcccctcagtcccattgccccagcctgggtccctctttttacac

SEQ ID NO: 104532 - DNA, 72 bp, Homo sapiens
actcatctatatagtcccctcagtcccattgccccagcctgggtccctctttttacaccctcagaagactgt

SEQ ID NO: 104533 - DNA, 71 bp, Homo sapiens
tatatagtcccctcagtcccattgccccagcctgggtccctctttttacaccctcagaagactgttcccat

SEQ ID NO: 104534 - DNA, 72 bp, Homo sapiens
tcagtcccattgccccagcctgggtccctctttttacaccctcagaagactgttcccattgccttcctagtc

SEQ ID NO: 104535 - DNA, 71 bp, Homo sapiens
attgccccagcctgggtccctctttttacaccctcagaagactgttcccattgccttcctagtctttgaga

SEQ ID NO: 104536 - DNA, 82 bp, Homo sapiens
attgccttcctagtctttgagatgcaggcatttggaaagcacacatctgatgcatacctgaaactccggatcagtcacgtaa

SEQ ID NO: 104537 - DNA, 84 bp, Homo sapiens
tctttgagatgcaggcatttggaaagcacacatctgatgcatacctgaaactccggatcagtcacgtaattgtttccagatata

SEQ ID NO: 104538 - DNA, 82 bp, Homo sapiens
caggcatttggaaagcacacatctgatgcatacctgaaactccggatcagtcacgtaattgtttccagatatacaggacatg

SEQ ID NO: 104539 - DNA, 82 bp, Homo sapiens
atttggaaagcacacatctgatgcatacctgaaactccggatcagtcacgtaattgtttccagatatacaggacatgtgtga

SEQ ID NO: 104540 - DNA, 85 bp, Homo sapiens
atctgatgcatacctgaaactccggatcagtcacgtaattgtttccagatatacaggacatgtgtgatgacagataggatatgaa

SEQ ID NO: 104541 - DNA, 84 bp, Homo sapiens
atgcatacctgaaactccggatcagtcacgtaattgtttccagatatacaggacatgtgtgatgacagataggatatgaacaga

SEQ ID NO: 104542 - DNA, 83 bp, Homo sapiens
aaactccggatcagtcacgtaattgtttccagatatacaggacatgtgtgatgacagataggatatgaacagatgagtagtga

SEQ ID NO: 104543 - DNA, 88 bp, Homo sapiens
tcacgtaattgtttccagatatacaggacatgtgtgatgacagataggatatgaacagatgagtagtgattggatctgagctcaacat

SEQ ID NO: 104544 - DNA, 88 bp, Homo sapiens
taattgtttccagatatacaggacatgtgtgatgacagataggatatgaacagatgagtagtgattggatctgagctcaacattccaa

SEQ ID NO: 104545 - DNA, 85 bp, Homo sapiens
atgtgtgatgacagataggatatgaacagatgagtagtgattggatctgagctcaacattccaaaccgatgcaaactagggtgtg

SEQ ID NO: 104546 - DNA, 82 bp, Homo sapiens
atgacagataggatatgaacagatgagtagtgattggatctgagctcaacattccaaaccgatgcaaactagggtgtgggga

SEQ ID NO: 104547 - DNA, 79 bp, Homo sapiens
ggatatgaacagatgagtagtgattggatctgagctcaacattccaaaccgatgcaaactagggtgtggggagaagccc

SEQ ID NO: 104548 - DNA, 75 bp, Homo sapiens
atgagtagtgattggatctgagctcaacattccaaaccgatgcaaactagggtgtggggagaagcccctggcctt

SEQ ID NO: 104549 - DNA, 73 bp, Homo sapiens
attggatctgagctcaacattccaaaccgatgcaaactagggtgtggggagaagcccctggcctttcacttgg

SEQ ID NO: 104550 - DNA, 67 bp, Homo sapiens
attccaaaccgatgcaaactagggtgtggggagaagcccctggcctttcacttggggtggggctggg

SEQ ID NO: 104551 - DNA, 67 bp, Homo sapiens
atgcaaactagggtgtggggagaagcccctggcctttcacttggggtggggctggggggccttcacc

SEQ ID NO: 104552 - DNA, 67 bp, Homo sapiens
agaagcccctggcctttcacttggggtggggctggggggccttcacctggtctagtttaatctagaa

SEQ ID NO: 104553 - DNA, 70 bp, Homo sapiens
cctttcacttggggtggggctggggggccttcacctggtctagtttaatctagaagcaggcatagaaatg

SEQ ID NO: 104554 - DNA, 73 bp, Homo sapiens
gggtggggctggggggccttcacctggtctagtttaatctagaagcaggcatagaaatggcaggagaggccag

SEQ ID NO: 104555 - DNA, 76 bp, Homo sapiens
gggctggggggccttcacctggtctagtttaatctagaagcaggcatagaaatggcaggagaggccaggcgtgatg

SEQ ID NO: 104556 - DNA, 75 bp, Homo sapiens
aggagaaggagaagagaaataatggcaggagaaggagggagcagtggctttgcgtagacttttctctgggatgaa

SEQ ID NO: 104557 - DNA, 74 bp, Homo sapiens
aaggagaagagaaataatggcaggagaaggagggagcagtggctttgcgtagacttttctctgggatgaactgg

SEQ ID NO: 104558 - DNA, 74 bp, Homo sapiens
aaataatggcaggagaaggagggagcagtggctttgcgtagacttttctctgggatgaactgggctcaggaaag

SEQ ID NO: 104559 - DNA, 72 bp, Homo sapiens
gaaggagggagcagtggctttgcgtagacttttctctgggatgaactgggctcaggaaaggaagaaacctgt

SEQ ID NO: 104560 - DNA, 73 bp, Homo sapiens
agcagtggctttgcgtagacttttctctgggatgaactgggctcaggaaaggaagaaacctgttgggttctga

SEQ ID NO: 104561 - DNA, 71 bp, Homo sapiens
ctttgcgtagacttttctctgggatgaactgggctcaggaaaggaagaaacctgttgggttctgatgcggg

SEQ ID NO: 104562 - DNA, 72 bp, Homo sapiens
agacttttctctgggatgaactgggctcaggaaaggaagaaacctgttgggttctgatgcggggctgttcac

SEQ ID NO: 104563 - DNA, 72 bp, Homo sapiens
atgaactgggctcaggaaaggaagaaacctgttgggttctgatgcggggctgttcacccacaaaagaatgga

SEQ ID NO: 104564 - DNA, 74 bp, Homo sapiens
ctcaggaaaggaagaaacctgttgggttctgatgcggggctgttcacccacaaaagaatggagaggtgcagatg

SEQ ID NO: 104565 - DNA, 72 bp, Homo sapiens
aaaggaagaaacctgttgggttctgatgcggggctgttcacccacaaaagaatggagaggtgcagatggaag

SEQ ID NO: 104566 - DNA, 78 bp, Homo sapiens
aacctgttgggttctgatgcggggctgttcacccacaaaagaatggagaggtgcagatggaagtggatctcctgcaga

SEQ ID NO: 104567 - DNA, 84 bp, Homo sapiens
ttctgatgcggggctgttcacccacaaaagaatggagaggtgcagatggaagtggatctcctgcagagatggtgtagagacaga

SEQ ID NO: 104568 - DNA, 78 bp, Homo sapiens
acccacaaaagaatggagaggtgcagatggaagtggatctcctgcagagatggtgtagagacagaatggaaaccccag

SEQ ID NO: 104569 - DNA, 82 bp, Homo sapiens
tggagaggtgcagatggaagtggatctcctgcagagatggtgtagagacagaatggaaaccccaggccaggagtgtcagctt

SEQ ID NO: 104570 - DNA, 79 bp, Homo sapiens
agatggaagtggatctcctgcagagatggtgtagagacagaatggaaaccccaggccaggagtgtcagctttgggaaca

SEQ ID NO: 104571 - DNA, 77 bp, Homo sapiens
aagtggatctcctgcagagatggtgtagagacagaatggaaaccccaggccaggagtgtcagctttgggaacagtgg

SEQ ID NO: 104572 - DNA, 79 bp, Homo sapiens
agagatggtgtagagacagaatggaaaccccaggccaggagtgtcagctttgggaacagtggttggtggcatctgcagc

SEQ ID NO: 104573 - DNA, 81 bp, Homo sapiens
caggccaggagtgtcagctttgggaacagtggttggtggcatctgcagccttctgcgtcagctggacaccacacgtcttaa

SEQ ID NO: 104574 - DNA, 81 bp, Homo sapiens
agtgtcagctttgggaacagtggttggtggcatctgcagccttctgcgtcagctggacaccacacgtcttaagcctcgtca

SEQ ID NO: 104575 - DNA, 77 bp, Homo sapiens
agtggttggtggcatctgcagccttctgcgtcagctggacaccacacgtcttaagcctcgtcaccttctctttactt

SEQ ID NO: 104576 - DNA, 77 bp, Homo sapiens
gtggcatctgcagccttctgcgtcagctggacaccacacgtcttaagcctcgtcaccttctctttacttttttgccc

SEQ ID NO: 104577 - DNA, 73 bp, Homo sapiens
ttctgcgtcagctggacaccacacgtcttaagcctcgtcaccttctctttacttttttgccccttcaaactca

SEQ ID NO: 104578 - DNA, 70 bp, Homo sapiens
agctggacaccacacgtcttaagcctcgtcaccttctctttacttttttgccccttcaaactcacactaa

SEQ ID NO: 104579 - DNA, 69 bp, Homo sapiens
acacgtcttaagcctcgtcaccttctctttacttttttgccccttcaaactcacactaatttcagttga

SEQ ID NO: 104580 - DNA, 70 bp, Homo sapiens
tcttaagcctcgtcaccttctctttacttttttgccccttcaaactcacactaatttcagttgagacagg

SEQ ID NO: 104581 - DNA, 71 bp, Homo sapiens
accttctctttacttttttgccccttcaaactcacactaatttcagttgagacagggcagaatgcatactt

SEQ ID NO: 104582 - DNA, 74 bp, Homo sapiens
ttacttttttgccccttcaaactcacactaatttcagttgagacagggcagaatgcatactttgcaccacccta

SEQ ID NO: 104583 - DNA, 77 bp, Homo sapiens
cccttcaaactcacactaatttcagttgagacagggcagaatgcatactttgcaccaccctatgccacaaggtttca

SEQ ID NO: 104584 - DNA, 74 bp, Homo sapiens
acagggcagaatgcatactttgcaccaccctatgccacaaggtttcaatctggggtgggcatggggacccttta

SEQ ID NO: 104585 - DNA, 73 bp, Homo sapiens
aatgcatactttgcaccaccctatgccacaaggtttcaatctggggtgggcatggggaccctttacattgtat

SEQ ID NO: 104586 - DNA, 70 bp, Homo sapiens
accctatgccacaaggtttcaatctggggtgggcatggggaccctttacattgtattctttaataattca

SEQ ID NO: 104587 - DNA, 73 bp, Homo sapiens
aaggtttcaatctggggtgggcatggggaccctttacattgtattctttaataattcacatggcagcatcgta

SEQ ID NO: 104588 - DNA, 73 bp, Homo sapiens
tggggtgggcatggggaccctttacattgtattctttaataattcacatggcagcatcgtagggctactttta

SEQ ID NO: 104589 - DNA, 74 bp, Homo sapiens
aattcacatggcagcatcgtagggctacttttaattgcttcttaaaagtaattaattgattttctgacgtatca

SEQ ID NO: 104590 - DNA, 69 bp, Homo sapiens
atcgtagggctacttttaattgcttcttaaaagtaattaattgattttctgacgtatcagttaacaatg

SEQ ID NO: 104591 - DNA, 72 bp, Homo sapiens
ttaattgcttcttaaaagtaattaattgattttctgacgtatcagttaacaatgtattacactgacacgaag

SEQ ID NO: 104592 - DNA, 72 bp, Homo sapiens
gcttcttaaaagtaattaattgattttctgacgtatcagttaacaatgtattacactgacacgaagttgtgt

SEQ ID NO: 104593 - DNA, 75 bp, Homo sapiens
attaattgattttctgacgtatcagttaacaatgtattacactgacacgaagttgtgttttggctcttgattgaa

SEQ ID NO: 104594 - DNA, 75 bp, Homo sapiens
ttgattttctgacgtatcagttaacaatgtattacactgacacgaagttgtgttttggctcttgattgaaccgag

SEQ ID NO: 104595 - DNA, 76 bp, Homo sapiens
tatcagttaacaatgtattacactgacacgaagttgtgttttggctcttgattgaaccgagggctgtatggattaa

SEQ ID NO: 104596 - DNA, 72 bp, Homo sapiens
actgacacgaagttgtgttttggctcttgattgaaccgagggctgtatggattaaattccacccagagttta

SEQ ID NO: 104597 - DNA, 71 bp, Homo sapiens
aagttgtgttttggctcttgattgaaccgagggctgtatggattaaattccacccagagtttagcttagga

SEQ ID NO: 104598 - DNA, 72 bp, Homo sapiens
cttgattgaaccgagggctgtatggattaaattccacccagagtttagcttaggagactctaaaaatatgcc

SEQ ID NO: 104599 - DNA, 70 bp, Homo sapiens
tatggattaaattccacccagagtttagcttaggagactctaaaaatatgcctctataaaaggaaaggct

SEQ ID NO: 104600 - DNA, 69 bp, Homo sapiens
attccacccagagtttagcttaggagactctaaaaatatgcctctataaaaggaaaggctttttacatg

SEQ ID NO: 104601 - DNA, 70 bp, Homo sapiens
gtttagcttaggagactctaaaaatatgcctctataaaaggaaaggctttttacatggcgtgttgtctaa

SEQ ID NO: 104602 - DNA, 69 bp, Homo sapiens
aggagactctaaaaatatgcctctataaaaggaaaggctttttacatggcgtgttgtctaaaaatctaa

SEQ ID NO: 104603 - DNA, 70 bp, Homo sapiens
atatgcctctataaaaggaaaggctttttacatggcgtgttgtctaaaaatctaaaccatatgtcctttc

SEQ ID NO: 104604 - DNA, 68 bp, Homo sapiens
cctctataaaaggaaaggctttttacatggcgtgttgtctaaaaatctaaaccatatgtcctttccag

SEQ ID NO: 104605 - DNA, 71 bp, Homo sapiens
ttttacatggcgtgttgtctaaaaatctaaaccatatgtcctttccaggctgtcaatggggtaaaatatgg

SEQ ID NO: 104606 - DNA, 72 bp, Homo sapiens
ttgtctaaaaatctaaaccatatgtcctttccaggctgtcaatggggtaaaatatgggttccagtgtgtgta

SEQ ID NO: 104607 - DNA, 74 bp, Homo sapiens
aaaaatctaaaccatatgtcctttccaggctgtcaatggggtaaaatatgggttccagtgtgtgtagctgctca

SEQ ID NO: 104608 - DNA, 77 bp, Homo sapiens
atatgtcctttccaggctgtcaatggggtaaaatatgggttccagtgtgtgtagctgctcagacttcgaacattcag

SEQ ID NO: 104609 - DNA, 78 bp, Homo sapiens
caggctgtcaatggggtaaaatatgggttccagtgtgtgtagctgctcagacttcgaacattcaggaggcataaaata

SEQ ID NO: 104610 - DNA, 74 bp, Homo sapiens
aatggggtaaaatatgggttccagtgtgtgtagctgctcagacttcgaacattcaggaggcataaaataaccta

SEQ ID NO: 104611 - DNA, 77 bp, Homo sapiens
aatatgggttccagtgtgtgtagctgctcagacttcgaacattcaggaggcataaaataacctactgttactcaata

SEQ ID NO: 104612 - DNA, 79 bp, Homo sapiens
ttccagtgtgtgtagctgctcagacttcgaacattcaggaggcataaaataacctactgttactcaatatggccaacac

SEQ ID NO: 104613 - DNA, 78 bp, Homo sapiens
tagctgctcagacttcgaacattcaggaggcataaaataacctactgttactcaatatggccaacactctggattaaa

SEQ ID NO: 104614 - DNA, 77 bp, Homo sapiens
aacattcaggaggcataaaataacctactgttactcaatatggccaacactctggattaaagtcactcaggctatgc

SEQ ID NO: 104615 - DNA, 74 bp, Homo sapiens
ataaaataacctactgttactcaatatggccaacactctggattaaagtcactcaggctatgccgagggaattc

SEQ ID NO: 104616 - DNA, 77 bp, Homo sapiens
ataacctactgttactcaatatggccaacactctggattaaagtcactcaggctatgccgagggaattctctctcag

SEQ ID NO: 104617 - DNA, 82 bp, Homo sapiens
ttactcaatatggccaacactctggattaaagtcactcaggctatgccgagggaattctctctcagtcagtgtgaagcagga

SEQ ID NO: 104618 - DNA, 82 bp, Homo sapiens
caacactctggattaaagtcactcaggctatgccgagggaattctctctcagtcagtgtgaagcaggagccattccatcaaa

SEQ ID NO: 104619 - DNA, 80 bp, Homo sapiens
agtcactcaggctatgccgagggaattctctctcagtcagtgtgaagcaggagccattccatcaaaacgtggtttgctaa

SEQ ID NO: 104620 - DNA, 79 bp, Homo sapiens
tatgccgagggaattctctctcagtcagtgtgaagcaggagccattccatcaaaacgtggtttgctaaggactcttgga

SEQ ID NO: 104621 - DNA, 77 bp, Homo sapiens
aattctctctcagtcagtgtgaagcaggagccattccatcaaaacgtggtttgctaaggactcttggaaggaggcaa

SEQ ID NO: 104622 - DNA, 76 bp, Homo sapiens
agtcagtgtgaagcaggagccattccatcaaaacgtggtttgctaaggactcttggaaggaggcaaatatgagctt

SEQ ID NO: 104623 - DNA, 76 bp, Homo sapiens
aagcaggagccattccatcaaaacgtggtttgctaaggactcttggaaggaggcaaatatgagctttgttctgaga

SEQ ID NO: 104624 - DNA, 77 bp, Homo sapiens
cattccatcaaaacgtggtttgctaaggactcttggaaggaggcaaatatgagctttgttctgagagcggctgtctc

SEQ ID NO: 104625 - DNA, 77 bp, Homo sapiens
atcaaaacgtggtttgctaaggactcttggaaggaggcaaatatgagctttgttctgagagcggctgtctcctggca

SEQ ID NO: 104626 - DNA, 80 bp, Homo sapiens
tttgctaaggactcttggaaggaggcaaatatgagctttgttctgagagcggctgtctcctggcaggagctgagtttgtc

SEQ ID NO: 104627 - DNA, 81 bp, Homo sapiens
ctcttggaaggaggcaaatatgagctttgttctgagagcggctgtctcctggcaggagctgagtttgtctgtagctgagtt

SEQ ID NO: 104628 - DNA, 85 bp, Homo sapiens
aggcaaatatgagctttgttctgagagcggctgtctcctggcaggagctgagtttgtctgtagctgagtttgcaagatccattca

SEQ ID NO: 104629 - DNA, 86 bp, Homo sapiens
atatgagctttgttctgagagcggctgtctcctggcaggagctgagtttgtctgtagctgagtttgcaagatccattcattgacat

SEQ ID NO: 104630 - DNA, 88 bp, Homo sapiens
ttgttctgagagcggctgtctcctggcaggagctgagtttgtctgtagctgagtttgcaagatccattcattgacattccatgataga

SEQ ID NO: 104631 - DNA, 86 bp, Homo sapiens
ctgtctcctggcaggagctgagtttgtctgtagctgagtttgcaagatccattcattgacattccatgatagaagaattatacaca

SEQ ID NO: 104632 - DNA, 84 bp, Homo sapiens
gcaggagctgagtttgtctgtagctgagtttgcaagatccattcattgacattccatgatagaagaattatacacagggaggat

SEQ ID NO: 104633 - DNA, 82 bp, Homo sapiens
agtttgtctgtagctgagtttgcaagatccattcattgacattccatgatagaagaattatacacagggaggattcccatca

SEQ ID NO: 104634 - DNA, 86 bp, Homo sapiens
tctgtagctgagtttgcaagatccattcattgacattccatgatagaagaattatacacagggaggattcccatcaacaatgcaga

SEQ ID NO: 104635 - DNA, 81 bp, Homo sapiens
atccattcattgacattccatgatagaagaattatacacagggaggattcccatcaacaatgcagacactattaatgggga

SEQ ID NO: 104636 - DNA, 78 bp, Homo sapiens
ttgacattccatgatagaagaattatacacagggaggattcccatcaacaatgcagacactattaatggggacgttaa

SEQ ID NO: 104637 - DNA, 75 bp, Homo sapiens
tagaagaattatacacagggaggattcccatcaacaatgcagacactattaatggggacgttaagaccaagatta

SEQ ID NO: 104638 - DNA, 73 bp, Homo sapiens
attatacacagggaggattcccatcaacaatgcagacactattaatggggacgttaagaccaagattagttaa

SEQ ID NO: 104639 - DNA, 77 bp, Homo sapiens
atcaacaatgcagacactattaatggggacgttaagaccaagattagttaagtggcttgccctgggtcatgcactga

SEQ ID NO: 104640 - DNA, 75 bp, Homo sapiens
agacactattaatggggacgttaagaccaagattagttaagtggcttgccctgggtcatgcactgagtcagtgga

SEQ ID NO: 104641 - DNA, 76 bp, Homo sapiens
tattaatggggacgttaagaccaagattagttaagtggcttgccctgggtcatgcactgagtcagtggagcattag

SEQ ID NO: 104642 - DNA, 75 bp, Homo sapiens
acgttaagaccaagattagttaagtggcttgccctgggtcatgcactgagtcagtggagcattaggaacaaggac

SEQ ID NO: 104643 - DNA, 76 bp, Homo sapiens
aagattagttaagtggcttgccctgggtcatgcactgagtcagtggagcattaggaacaaggacctcctgacattt

SEQ ID NO: 104644 - DNA, 78 bp, Homo sapiens
actgagtcagtggagcattaggaacaaggacctcctgacattttggcttctgtagggatttgtgtggcaattctgtga

SEQ ID NO: 104645 - DNA, 80 bp, Homo sapiens
tggagcattaggaacaaggacctcctgacattttggcttctgtagggatttgtgtggcaattctgtgatgaggatgatat

SEQ ID NO: 104646 - DNA, 80 bp, Homo sapiens
acctcctgacattttggcttctgtagggatttgtgtggcaattctgtgatgaggatgatattgtaactgccaggaagtca

SEQ ID NO: 104647 - DNA, 80 bp, Homo sapiens
ttttggcttctgtagggatttgtgtggcaattctgtgatgaggatgatattgtaactgccaggaagtcaccatgtatatt

SEQ ID NO: 104648 - DNA, 80 bp, Homo sapiens
atttgtgtggcaattctgtgatgaggatgatattgtaactgccaggaagtcaccatgtatatttcaacacctactgtacc

SEQ ID NO: 104649 - DNA, 80 bp, Homo sapiens
aattctgtgatgaggatgatattgtaactgccaggaagtcaccatgtatatttcaacacctactgtacccacaatatgaa

SEQ ID NO: 104650 - DNA, 81 bp, Homo sapiens
atgaggatgatattgtaactgccaggaagtcaccatgtatatttcaacacctactgtacccacaatatgaatctcttgaca

SEQ ID NO: 104651 - DNA, 78 bp, Homo sapiens
tattgtaactgccaggaagtcaccatgtatatttcaacacctactgtacccacaatatgaatctcttgacagggtcat

SEQ ID NO: 104652 - DNA, 75 bp, Homo sapiens
ccaggaagtcaccatgtatatttcaacacctactgtacccacaatatgaatctcttgacagggtcatttcacggg

SEQ ID NO: 104653 - DNA, 76 bp, Homo sapiens
catgtatatttcaacacctactgtacccacaatatgaatctcttgacagggtcatttcacggggggcagcatttct

SEQ ID NO: 104654 - DNA, 74 bp, Homo sapiens
atatttcaacacctactgtacccacaatatgaatctcttgacagggtcatttcacggggggcagcatttcttcc

SEQ ID NO: 104655 - DNA, 73 bp, Homo sapiens
acctactgtacccacaatatgaatctcttgacagggtcatttcacggggggcagcatttcttccccacttctg

SEQ ID NO: 104656 - DNA, 77 bp, Homo sapiens
acaatatgaatctcttgacagggtcatttcacggggggcagcatttcttccccacttctgggagctatcactctggc

SEQ ID NO: 104657 - DNA, 74 bp, Homo sapiens
aatctcttgacagggtcatttcacggggggcagcatttcttccccacttctgggagctatcactctggcctttc

SEQ ID NO: 104658 - DNA, 71 bp, Homo sapiens
acagggtcatttcacggggggcagcatttcttccccacttctgggagctatcactctggcctttctcccct

SEQ ID NO: 104659 - DNA, 74 bp, Homo sapiens
ttcacggggggcagcatttcttccccacttctgggagctatcactctggcctttctccccttcatatggtcagt

SEQ ID NO: 104660 - DNA, 74 bp, Homo sapiens
atttcttccccacttctgggagctatcactctggcctttctccccttcatatggtcagttgggcgtatgggaga

SEQ ID NO: 104661 - DNA, 76 bp, Homo sapiens
cacttctgggagctatcactctggcctttctccccttcatatggtcagttgggcgtatgggagaaggaagtggcaa

SEQ ID NO: 104662 - DNA, 75 bp, Homo sapiens
agctatcactctggcctttctccccttcatatggtcagttgggcgtatgggagaaggaagtggcaactcagggaa

SEQ ID NO: 104663 - DNA, 74 bp, Homo sapiens
tctggcctttctccccttcatatggtcagttgggcgtatgggagaaggaagtggcaactcagggaactcagttc

SEQ ID NO: 104664 - DNA, 72 bp, Homo sapiens
tttctccccttcatatggtcagttgggcgtatgggagaaggaagtggcaactcagggaactcagttccctcc

SEQ ID NO: 104665 - DNA, 73 bp, Homo sapiens
ttcatatggtcagttgggcgtatgggagaaggaagtggcaactcagggaactcagttccctcctccctccctc

SEQ ID NO: 104666 - DNA, 72 bp, Homo sapiens
ttgggcgtatgggagaaggaagtggcaactcagggaactcagttccctcctccctccctccacttggagcta

SEQ ID NO: 104667 - DNA, 75 bp, Homo sapiens
tatgggagaaggaagtggcaactcagggaactcagttccctcctccctccctccacttggagctagtgcctgcag

SEQ ID NO: 104668 - DNA, 76 bp, Homo sapiens
aagtggcaactcagggaactcagttccctcctccctccctccacttggagctagtgcctgcaggaagcacacattc

SEQ ID NO: 104669 - DNA, 76 bp, Homo sapiens
agggaactcagttccctcctccctccctccacttggagctagtgcctgcaggaagcacacattctggtcagtgtct

SEQ ID NO: 104670 - DNA, 80 bp, Homo sapiens
ttccctcctccctccctccacttggagctagtgcctgcaggaagcacacattctggtcagtgtcttcatgtggcatgttt

SEQ ID NO: 104671 - DNA, 82 bp, Homo sapiens
cctccctccacttggagctagtgcctgcaggaagcacacattctggtcagtgtcttcatgtggcatgttttacactggttca

SEQ ID NO: 104672 - DNA, 84 bp, Homo sapiens
acttggagctagtgcctgcaggaagcacacattctggtcagtgtcttcatgtggcatgttttacactggttcaactgcgcctga

SEQ ID NO: 104673 - DNA, 86 bp, Homo sapiens
tagtgcctgcaggaagcacacattctggtcagtgtcttcatgtggcatgttttacactggttcaactgcgcctgagacaggtgaga

SEQ ID NO: 104674 - DNA, 82 bp, Homo sapiens
attctggtcagtgtcttcatgtggcatgttttacactggttcaactgcgcctgagacaggtgagagaattcagcattgggaa

SEQ ID NO: 104675 - DNA, 82 bp, Homo sapiens
agtgtcttcatgtggcatgttttacactggttcaactgcgcctgagacaggtgagagaattcagcattgggaagcctgtgtg

SEQ ID NO: 104676 - DNA, 84 bp, Homo sapiens
atgtggcatgttttacactggttcaactgcgcctgagacaggtgagagaattcagcattgggaagcctgtgtggctgcacttca

SEQ ID NO: 104677 - DNA, 82 bp, Homo sapiens
tgttttacactggttcaactgcgcctgagacaggtgagagaattcagcattgggaagcctgtgtggctgcacttcacagccc

SEQ ID NO: 104678 - DNA, 84 bp, Homo sapiens
tggttcaactgcgcctgagacaggtgagagaattcagcattgggaagcctgtgtggctgcacttcacagccccattctgcaact

SEQ ID NO: 104679 - DNA, 86 bp, Homo sapiens
tgagacaggtgagagaattcagcattgggaagcctgtgtggctgcacttcacagccccattctgcaacttggccttgagctggcat

SEQ ID NO: 104680 - DNA, 83 bp, Homo sapiens
aggtgagagaattcagcattgggaagcctgtgtggctgcacttcacagccccattctgcaacttggccttgagctggcatttg

SEQ ID NO: 104681 - DNA, 86 bp, Homo sapiens
aattcagcattgggaagcctgtgtggctgcacttcacagccccattctgcaacttggccttgagctggcatttggatctgcatgtg

SEQ ID NO: 104682 - DNA, 83 bp, Homo sapiens
agcctgtgtggctgcacttcacagccccattctgcaacttggccttgagctggcatttggatctgcatgtgtcccacttcttt

SEQ ID NO: 104683 - DNA, 84 bp, Homo sapiens
tgtggctgcacttcacagccccattctgcaacttggccttgagctggcatttggatctgcatgtgtcccacttctttttgcctg

SEQ ID NO: 104684 - DNA, 81 bp, Homo sapiens
ttcacagccccattctgcaacttggccttgagctggcatttggatctgcatgtgtcccacttctttttgcctgtgtcctaa

SEQ ID NO: 104685 - DNA, 78 bp, Homo sapiens
aacttggccttgagctggcatttggatctgcatgtgtcccacttctttttgcctgtgtcctaattgatttggaactca

SEQ ID NO: 104686 - DNA, 80 bp, Homo sapiens
tggcatttggatctgcatgtgtcccacttctttttgcctgtgtcctaattgatttggaactcaagagggctgccattcat

SEQ ID NO: 104687 - DNA, 78 bp, Homo sapiens
atgtgtcccacttctttttgcctgtgtcctaattgatttggaactcaagagggctgccattcattgcatgtccttcaa

SEQ ID NO: 104688 - DNA, 79 bp, Homo sapiens
ttctttttgcctgtgtcctaattgatttggaactcaagagggctgccattcattgcatgtccttcaatctgagtgtaaa

SEQ ID NO: 104689 - DNA, 85 bp, Homo sapiens
tgtgtcctaattgatttggaactcaagagggctgccattcattgcatgtccttcaatctgagtgtaaagccaggacatgtgatga

SEQ ID NO: 104690 - DNA, 87 bp, Homo sapiens
tgccattcattgcatgtccttcaatctgagtgtaaagccaggacatgtgatgatggcagaacgagcccacttaaacctgatgcacag

SEQ ID NO: 104691 - DNA, 87 bp, Homo sapiens
ttcattgcatgtccttcaatctgagtgtaaagccaggacatgtgatgatggcagaacgagcccacttaaacctgatgcacagtgagc

SEQ ID NO: 104692 - DNA, 85 bp, Homo sapiens
ttcaatctgagtgtaaagccaggacatgtgatgatggcagaacgagcccacttaaacctgatgcacagtgagctgaggccttgct

SEQ ID NO: 104693 - DNA, 86 bp, Homo sapiens
ctgagtgtaaagccaggacatgtgatgatggcagaacgagcccacttaaacctgatgcacagtgagctgaggccttgcttctcagc

SEQ ID NO: 104694 - DNA, 84 bp, Homo sapiens
aggacatgtgatgatggcagaacgagcccacttaaacctgatgcacagtgagctgaggccttgcttctcagctgtgttccttac

SEQ ID NO: 104695 - DNA, 84 bp, Homo sapiens
tgtgatgatggcagaacgagcccacttaaacctgatgcacagtgagctgaggccttgcttctcagctgtgttccttaccttggc

SEQ ID NO: 104696 - DNA, 81 bp, Homo sapiens
ttaaacctgatgcacagtgagctgaggccttgcttctcagctgtgttccttaccttggcctggtcattcgtgctcagtttc

SEQ ID NO: 104697 - DNA, 82 bp, Homo sapiens
atgcacagtgagctgaggccttgcttctcagctgtgttccttaccttggcctggtcattcgtgctcagtttcctgaattata

SEQ ID NO: 104698 - DNA, 78 bp, Homo sapiens
ttgcttctcagctgtgttccttaccttggcctggtcattcgtgctcagtttcctgaattatagaatgaggataacgat

SEQ ID NO: 104699 - DNA, 74 bp, Homo sapiens
ctgtgttccttaccttggcctggtcattcgtgctcagtttcctgaattatagaatgaggataacgattcctcct

SEQ ID NO: 104700 - DNA, 74 bp, Homo sapiens
ttccttaccttggcctggtcattcgtgctcagtttcctgaattatagaatgaggataacgattcctcctttaca

SEQ ID NO: 104701 - DNA, 74 bp, Homo sapiens
attcgtgctcagtttcctgaattatagaatgaggataacgattcctcctttacagcaccgttatgaggactaaa

SEQ ID NO: 104702 - DNA, 75 bp, Homo sapiens
agtttcctgaattatagaatgaggataacgattcctcctttacagcaccgttatgaggactaaatgagatattca

SEQ ID NO: 104703 - DNA, 71 bp, Homo sapiens
attcctcctttacagcaccgttatgaggactaaatgagatattcaacgagaccgcttttagactttgttta

SEQ ID NO: 104704 - DNA, 74 bp, Homo sapiens
tacagcaccgttatgaggactaaatgagatattcaacgagaccgcttttagactttgtttaccctagcagttgc

SEQ ID NO: 104705 - DNA, 70 bp, Homo sapiens
aggactaaatgagatattcaacgagaccgcttttagactttgtttaccctagcagttgcccagttaatag

SEQ ID NO: 104706 - DNA, 71 bp, Homo sapiens
aatgagatattcaacgagaccgcttttagactttgtttaccctagcagttgcccagttaataggacttgaa

SEQ ID NO: 104707 - DNA, 65 bp, Homo sapiens
aacgagaccgcttttagactttgtttaccctagcagttgcccagttaataggacttgaacttttt

SEQ ID NO: 104708 - DNA, 68 bp, Homo sapiens
tgtttaccctagcagttgcccagttaataggacttgaactttttttttaattgcaaagtaccagaaga

SEQ ID NO: 104709 - DNA, 68 bp, Homo sapiens
ccctagcagttgcccagttaataggacttgaactttttttttaattgcaaagtaccagaagaaagatg

SEQ ID NO: 104710 - DNA, 66 bp, Homo sapiens
gcccagttaataggacttgaactttttttttaattgcaaagtaccagaagaaagatgtagaaaaag

SEQ ID NO: 104711 - DNA, 63 bp, Homo sapiens
gaactttttttttaattgcaaagtaccagaagaaagatgtagaaaaagtgtttaaaaacctta

SEQ ID NO: 104712 - DNA, 68 bp, Homo sapiens
ttttaattgcaaagtaccagaagaaagatgtagaaaaagtgtttaaaaaccttaacatattatgctat

SEQ ID NO: 104713 - DNA, 68 bp, Homo sapiens
tttaattgcaaagtaccagaagaaagatgtagaaaaagtgtttaaaaaccttaacatattatgctatt

SEQ ID NO: 104714 - DNA, 68 bp, Homo sapiens
ccagaagaaagatgtagaaaaagtgtttaaaaaccttaacatattatgctatttgatttttcaatatt

SEQ ID NO: 104715 - DNA, 70 bp, Homo sapiens
tgtttaaaaaccttaacatattatgctatttgatttttcaatattttggaaacatcttaaattctgacca

SEQ ID NO: 104716 - DNA, 70 bp, Homo sapiens
atgctatttgatttttcaatattttggaaacatcttaaattctgaccaaaacttacaggaggaaaattga

SEQ ID NO: 104717 - DNA, 67 bp, Homo sapiens
gatttttcaatattttggaaacatcttaaattctgaccaaaacttacaggaggaaaattgaagggaa

SEQ ID NO: 104718 - DNA, 67 bp, Homo sapiens
attttggaaacatcttaaattctgaccaaaacttacaggaggaaaattgaagggaagaattaatgac

SEQ ID NO: 104719 - DNA, 71 bp, Homo sapiens
catcttaaattctgaccaaaacttacaggaggaaaattgaagggaagaattaatgactatgtggagacaag

SEQ ID NO: 104720 - DNA, 70 bp, Homo sapiens
taaattctgaccaaaacttacaggaggaaaattgaagggaagaattaatgactatgtggagacaagggag

SEQ ID NO: 104721 - DNA, 69 bp, Homo sapiens
aaaacttacaggaggaaaattgaagggaagaattaatgactatgtggagacaagggagtgcacccttta

SEQ ID NO: 104722 - DNA, 72 bp, Homo sapiens
aggaggaaaattgaagggaagaattaatgactatgtggagacaagggagtgcaccctttatgaggaagaaga

SEQ ID NO: 104723 - DNA, 73 bp, Homo sapiens
aagggaagaattaatgactatgtggagacaagggagtgcaccctttatgaggaagaagaggtgtgtataggaa

SEQ ID NO: 104724 - DNA, 77 bp, Homo sapiens
agaattaatgactatgtggagacaagggagtgcaccctttatgaggaagaagaggtgtgtataggaagcacttcaca

SEQ ID NO: 104725 - DNA, 76 bp, Homo sapiens
tatgtggagacaagggagtgcaccctttatgaggaagaagaggtgtgtataggaagcacttcacaggtaaagtcaa

SEQ ID NO: 104726 - DNA, 77 bp, Homo sapiens
agacaagggagtgcaccctttatgaggaagaagaggtgtgtataggaagcacttcacaggtaaagtcaagctcatca

SEQ ID NO: 104727 - DNA, 77 bp, Homo sapiens
aagggagtgcaccctttatgaggaagaagaggtgtgtataggaagcacttcacaggtaaagtcaagctcatcactga

SEQ ID NO: 104728 - DNA, 78 bp, Homo sapiens
accctttatgaggaagaagaggtgtgtataggaagcacttcacaggtaaagtcaagctcatcactgatctggtcctgc

SEQ ID NO: 104729 - DNA, 83 bp, Homo sapiens
ctttatgaggaagaagaggtgtgtataggaagcacttcacaggtaaagtcaagctcatcactgatctggtcctgctgagctga

SEQ ID NO: 104730 - DNA, 83 bp, Homo sapiens
aagaggtgtgtataggaagcacttcacaggtaaagtcaagctcatcactgatctggtcctgctgagctgaggacaatacttga

SEQ ID NO: 104731 - DNA, 83 bp, Homo sapiens
aggtgtgtataggaagcacttcacaggtaaagtcaagctcatcactgatctggtcctgctgagctgaggacaatacttgacat

SEQ ID NO: 104732 - DNA, 85 bp, Homo sapiens
tgtataggaagcacttcacaggtaaagtcaagctcatcactgatctggtcctgctgagctgaggacaatacttgacattcctctg

SEQ ID NO: 104733 - DNA, 81 bp, Homo sapiens
acttcacaggtaaagtcaagctcatcactgatctggtcctgctgagctgaggacaatacttgacattcctctggtaactgt

SEQ ID NO: 104734 - DNA, 83 bp, Homo sapiens
taaagtcaagctcatcactgatctggtcctgctgagctgaggacaatacttgacattcctctggtaactgtttacatgaccat

SEQ ID NO: 104735 - DNA, 83 bp, Homo sapiens
aagctcatcactgatctggtcctgctgagctgaggacaatacttgacattcctctggtaactgtttacatgaccattcattct

SEQ ID NO: 104736 - DNA, 78 bp, Homo sapiens
ctgagctgaggacaatacttgacattcctctggtaactgtttacatgaccattcattcttccttgtccagcctaaaca

SEQ ID NO: 104737 - DNA, 78 bp, Homo sapiens
ttacatgaccattcattcttccttgtccagcctaaacacaaataggcaaaaagactcatgttcatggaatctgcttta

SEQ ID NO: 104738 - DNA, 78 bp, Homo sapiens
attcattcttccttgtccagcctaaacacaaataggcaaaaagactcatgttcatggaatctgctttaattgcagaga

SEQ ID NO: 104739 - DNA, 78 bp, Homo sapiens
tccagcctaaacacaaataggcaaaaagactcatgttcatggaatctgctttaattgcagagaatggttgttttatga

SEQ ID NO: 104740 - DNA, 75 bp, Homo sapiens
aaataggcaaaaagactcatgttcatggaatctgctttaattgcagagaatggttgttttatgagcctcaaaggg

SEQ ID NO: 104741 - DNA, 75 bp, Homo sapiens
aaaaagactcatgttcatggaatctgctttaattgcagagaatggttgttttatgagcctcaaaggggaaaagca

SEQ ID NO: 104742 - DNA, 75 bp, Homo sapiens
tcatgttcatggaatctgctttaattgcagagaatggttgttttatgagcctcaaaggggaaaagcattttaaaa

SEQ ID NO: 104743 - DNA, 74 bp, Homo sapiens
aatctgctttaattgcagagaatggttgttttatgagcctcaaaggggaaaagcattttaaaagcatgtgaaga

SEQ ID NO: 104744 - DNA, 75 bp, Homo sapiens
ttaattgcagagaatggttgttttatgagcctcaaaggggaaaagcattttaaaagcatgtgaagaagcattcta

SEQ ID NO: 104745 - DNA, 75 bp, Homo sapiens
agaatggttgttttatgagcctcaaaggggaaaagcattttaaaagcatgtgaagaagcattctatgcaaatgta

SEQ ID NO: 104746 - DNA, 76 bp, Homo sapiens
aggggaaaagcattttaaaagcatgtgaagaagcattctatgcaaatgtaaaatattattaacaatcacatgacta

SEQ ID NO: 104747 - DNA, 80 bp, Homo sapiens
aaagcatgtgaagaagcattctatgcaaatgtaaaatattattaacaatcacatgactactttgatcatgtattttaaca

SEQ ID NO: 104748 - DNA, 79 bp, Homo sapiens
tgaagaagcattctatgcaaatgtaaaatattattaacaatcacatgactactttgatcatgtattttaacatatttgt

SEQ ID NO: 104749 - DNA, 77 bp, Homo sapiens
tgcaaatgtaaaatattattaacaatcacatgactactttgatcatgtattttaacatatttgttgtttcttggcaa

SEQ ID NO: 104750 - DNA, 74 bp, Homo sapiens
aaatattattaacaatcacatgactactttgatcatgtattttaacatatttgttgtttcttggcaaagtggaa

SEQ ID NO: 104751 - DNA, 76 bp, Homo sapiens
aacaatcacatgactactttgatcatgtattttaacatatttgttgtttcttggcaaagtggaaggtgttgtcaga

SEQ ID NO: 104752 - DNA, 77 bp, Homo sapiens
tttgttgtttcttggcaaagtggaaggtgttgtcagaccagaggaataagtgcaagagatcaatgatgtttgggtga

SEQ ID NO: 104753 - DNA, 78 bp, Homo sapiens
ttggcaaagtggaaggtgttgtcagaccagaggaataagtgcaagagatcaatgatgtttgggtgactcattttataa

SEQ ID NO: 104754 - DNA, 78 bp, Homo sapiens
tgttgtcagaccagaggaataagtgcaagagatcaatgatgtttgggtgactcattttataattatcttcaaacttta

SEQ ID NO: 104755 - DNA, 77 bp, Homo sapiens
cagaggaataagtgcaagagatcaatgatgtttgggtgactcattttataattatcttcaaactttaaggcttgcaa

SEQ ID NO: 104756 - DNA, 75 bp, Homo sapiens
aagtgcaagagatcaatgatgtttgggtgactcattttataattatcttcaaactttaaggcttgcaaattccat

SEQ ID NO: 104757 - DNA, 72 bp, Homo sapiens
agatcaatgatgtttgggtgactcattttataattatcttcaaactttaaggcttgcaaattccatttttcc

SEQ ID NO: 104758 - DNA, 69 bp, Homo sapiens
gtttgggtgactcattttataattatcttcaaactttaaggcttgcaaattccatttttcctaggtcag

SEQ ID NO: 104759 - DNA, 71 bp, Homo sapiens
cattttataattatcttcaaactttaaggcttgcaaattccatttttcctaggtcagtgttattttgctga

SEQ ID NO: 104760 - DNA, 70 bp, Homo sapiens
caaactttaaggcttgcaaattccatttttcctaggtcagtgttattttgctgagatagagaacaaaagt

SEQ ID NO: 104761 - DNA, 72 bp, Homo sapiens
ggtcagtgttattttgctgagatagagaacaaaagttaacattatacaaatatgaaaaaagtattctctggg

SEQ ID NO: 104762 - DNA, 76 bp, Homo sapiens
ctgagatagagaacaaaagttaacattatacaaatatgaaaaaagtattctctggggtctgaagtgctgaatatca

SEQ ID NO: 104763 - DNA, 75 bp, Homo sapiens
ttatacaaatatgaaaaaagtattctctggggtctgaagtgctgaatatcaacagcctcttcacattcctcgttt

SEQ ID NO: 104764 - DNA, 74 bp, Homo sapiens
aatatgaaaaaagtattctctggggtctgaagtgctgaatatcaacagcctcttcacattcctcgtttttggaa

SEQ ID NO: 104765 - DNA, 73 bp, Homo sapiens
aaaagtattctctggggtctgaagtgctgaatatcaacagcctcttcacattcctcgtttttggaagtgaaaa

SEQ ID NO: 104766 - DNA, 75 bp, Homo sapiens
ggtctgaagtgctgaatatcaacagcctcttcacattcctcgtttttggaagtgaaaagcttttacccagagata

SEQ ID NO: 104767 - DNA, 73 bp, Homo sapiens
agtgctgaatatcaacagcctcttcacattcctcgtttttggaagtgaaaagcttttacccagagatataggt

SEQ ID NO: 104768 - DNA, 69 bp, Homo sapiens
tcttcacattcctcgtttttggaagtgaaaagcttttacccagagatataggttgtcttcttaactctt

SEQ ID NO: 104769 - DNA, 67 bp, Homo sapiens
ttcctcgtttttggaagtgaaaagcttttacccagagatataggttgtcttcttaactctttgaaag

SEQ ID NO: 104770 - DNA, 73 bp, Homo sapiens
agtgaaaagcttttacccagagatataggttgtcttcttaactctttgaaagtacagtaatgagatccaagca

SEQ ID NO: 104771 - DNA, 75 bp, Homo sapiens
ttttacccagagatataggttgtcttcttaactctttgaaagtacagtaatgagatccaagcagattcagtaatc

SEQ ID NO: 104772 - DNA, 78 bp, Homo sapiens
agagatataggttgtcttcttaactctttgaaagtacagtaatgagatccaagcagattcagtaatccatattctgaa

SEQ ID NO: 104773 - DNA, 75 bp, Homo sapiens
aggttgtcttcttaactctttgaaagtacagtaatgagatccaagcagattcagtaatccatattctgaaagtta

SEQ ID NO: 104774 - DNA, 74 bp, Homo sapiens
actctttgaaagtacagtaatgagatccaagcagattcagtaatccatattctgaaagttatttgggttaagaa

SEQ ID NO: 104775 - DNA, 75 bp, Homo sapiens
gaaagtacagtaatgagatccaagcagattcagtaatccatattctgaaagttatttgggttaagaatagaagag

SEQ ID NO: 104776 - DNA, 74 bp, Homo sapiens
tttttgtgtgtgtggggaaggggagagggggaagagtcatgaattatttaccatgattctagtgatggcagaaa

SEQ ID NO: 104777 - DNA, 74 bp, Homo sapiens
tggggaaggggagagggggaagagtcatgaattatttaccatgattctagtgatggcagaaagcctcaagattt

SEQ ID NO: 104778 - DNA, 80 bp, Homo sapiens
gagagggggaagagtcatgaattatttaccatgattctagtgatggcagaaagcctcaagattttgctgaagtcactgat

SEQ ID NO: 104779 - DNA, 82 bp, Homo sapiens
aagagtcatgaattatttaccatgattctagtgatggcagaaagcctcaagattttgctgaagtcactgattgattttctga

SEQ ID NO: 104780 - DNA, 81 bp, Homo sapiens
ttaccatgattctagtgatggcagaaagcctcaagattttgctgaagtcactgattgattttctgacacaacaagtgaaag

SEQ ID NO: 104781 - DNA, 81 bp, Homo sapiens
tagtgatggcagaaagcctcaagattttgctgaagtcactgattgattttctgacacaacaagtgaaaggcaacgccagtg

SEQ ID NO: 104782 - DNA, 79 bp, Homo sapiens
aagcctcaagattttgctgaagtcactgattgattttctgacacaacaagtgaaaggcaacgccagtggctcattggta

SEQ ID NO: 104783 - DNA, 83 bp, Homo sapiens
attttgctgaagtcactgattgattttctgacacaacaagtgaaaggcaacgccagtggctcattggtattgcatgtcagaca

SEQ ID NO: 104784 - DNA, 82 bp, Homo sapiens
aagtcactgattgattttctgacacaacaagtgaaaggcaacgccagtggctcattggtattgcatgtcagacacacgatcc

SEQ ID NO: 104785 - DNA, 82 bp, Homo sapiens
agtcactgattgattttctgacacaacaagtgaaaggcaacgccagtggctcattggtattgcatgtcagacacacgatccc

SEQ ID NO: 104786 - DNA, 80 bp, Homo sapiens
tgattttctgacacaacaagtgaaaggcaacgccagtggctcattggtattgcatgtcagacacacgatcccctgttaaa

SEQ ID NO: 104787 - DNA, 81 bp, Homo sapiens
ttctgacacaacaagtgaaaggcaacgccagtggctcattggtattgcatgtcagacacacgatcccctgttaaatgcagg

SEQ ID NO: 104788 - DNA, 82 bp, Homo sapiens
acaagtgaaaggcaacgccagtggctcattggtattgcatgtcagacacacgatcccctgttaaatgcagggctgcattaca

SEQ ID NO: 104789 - DNA, 84 bp, Homo sapiens
aaaggcaacgccagtggctcattggtattgcatgtcagacacacgatcccctgttaaatgcagggctgcattacagctgctata

SEQ ID NO: 104790 - DNA, 82 bp, Homo sapiens
aacgccagtggctcattggtattgcatgtcagacacacgatcccctgttaaatgcagggctgcattacagctgctataagtt

SEQ ID NO: 104791 - DNA, 78 bp, Homo sapiens
atgtcagacacacgatcccctgttaaatgcagggctgcattacagctgctataagtttgtgtttcacgggtgggagaa

SEQ ID NO: 104792 - DNA, 75 bp, Homo sapiens
ggctgcattacagctgctataagtttgtgtttcacgggtgggagaaagggataatttctgttacctgatcattaa

SEQ ID NO: 104793 - DNA, 73 bp, Homo sapiens
attacagctgctataagtttgtgtttcacgggtgggagaaagggataatttctgttacctgatcattaatata

SEQ ID NO: 104794 - DNA, 71 bp, Homo sapiens
tttcacgggtgggagaaagggataatttctgttacctgatcattaatatactctaaagagttctggaagaa

SEQ ID NO: 104795 - DNA, 72 bp, Homo sapiens
agggataatttctgttacctgatcattaatatactctaaagagttctggaagaaagcaacaaacatgaaccc

SEQ ID NO: 104796 - DNA, 75 bp, Homo sapiens
ttacctgatcattaatatactctaaagagttctggaagaaagcaacaaacatgaaccccatgttcaacgaacata

SEQ ID NO: 104797 - DNA, 76 bp, Homo sapiens
tgatcattaatatactctaaagagttctggaagaaagcaacaaacatgaaccccatgttcaacgaacataatatgg

SEQ ID NO: 104798 - DNA, 73 bp, Homo sapiens
tatactctaaagagttctggaagaaagcaacaaacatgaaccccatgttcaacgaacataatatgggcccttc

SEQ ID NO: 104799 - DNA, 71 bp, Homo sapiens
ttctggaagaaagcaacaaacatgaaccccatgttcaacgaacataatatgggcccttcccgtgggcaaag

SEQ ID NO: 104800 - DNA, 70 bp, Homo sapiens
aaagcaacaaacatgaaccccatgttcaacgaacataatatgggcccttcccgtgggcaaagtcctgtcc

SEQ ID NO: 104801 - DNA, 70 bp, Homo sapiens
aaacatgaaccccatgttcaacgaacataatatgggcccttcccgtgggcaaagtcctgtcctggagaat

SEQ ID NO: 104802 - DNA, 70 bp, Homo sapiens
atgttcaacgaacataatatgggcccttcccgtgggcaaagtcctgtcctggagaatttgaggggtaaca

SEQ ID NO: 104803 - DNA, 69 bp, Homo sapiens
aacgaacataatatgggcccttcccgtgggcaaagtcctgtcctggagaatttgaggggtaacatttga

SEQ ID NO: 104804 - DNA, 72 bp, Homo sapiens
atatgggcccttcccgtgggcaaagtcctgtcctggagaatttgaggggtaacatttgatgaaggcatggtc

SEQ ID NO: 104805 - DNA, 73 bp, Homo sapiens
gtgggcaaagtcctgtcctggagaatttgaggggtaacatttgatgaaggcatggtccctcactgttaataaa

SEQ ID NO: 104806 - DNA, 76 bp, Homo sapiens
ctggagaatttgaggggtaacatttgatgaaggcatggtccctcactgttaataaatgcacagtctagtggaagtg

SEQ ID NO: 104807 - DNA, 79 bp, Homo sapiens
ttgaggggtaacatttgatgaaggcatggtccctcactgttaataaatgcacagtctagtggaagtggcagtgtgatta

SEQ ID NO: 104808 - DNA, 78 bp, Homo sapiens
aacatttgatgaaggcatggtccctcactgttaataaatgcacagtctagtggaagtggcagtgtgattaccaaatac

SEQ ID NO: 104809 - DNA, 80 bp, Homo sapiens
catggtccctcactgttaataaatgcacagtctagtggaagtggcagtgtgattaccaaatactgagagttcgatgtaga

SEQ ID NO: 104810 - DNA, 83 bp, Homo sapiens
acagtctagtggaagtggcagtgtgattaccaaatactgagagttcgatgtagaatgcaatgaatgagatcacagaggtataa

SEQ ID NO: 104811 - DNA, 83 bp, Homo sapiens
agtgtgattaccaaatactgagagttcgatgtagaatgcaatgaatgagatcacagaggtataaggcaagtgttatgggagca

SEQ ID NO: 104812 - DNA, 80 bp, Homo sapiens
aaatactgagagttcgatgtagaatgcaatgaatgagatcacagaggtataaggcaagtgttatgggagcacaggaaggg

SEQ ID NO: 104813 - DNA, 79 bp, Homo sapiens
agagttcgatgtagaatgcaatgaatgagatcacagaggtataaggcaagtgttatgggagcacaggaagggggagaaa

SEQ ID NO: 104814 - DNA, 80 bp, Homo sapiens
atgcaatgaatgagatcacagaggtataaggcaagtgttatgggagcacaggaagggggagaaatgagttccatctgaaa

SEQ ID NO: 104815 - DNA, 74 bp, Homo sapiens
acagaggtataaggcaagtgttatgggagcacaggaagggggagaaatgagttccatctgaaagggctgaggag

SEQ ID NO: 104816 - DNA, 74 bp, Homo sapiens
ataaggcaagtgttatgggagcacaggaagggggagaaatgagttccatctgaaagggctgaggagggaggctc

SEQ ID NO: 104817 - DNA, 76 bp, Homo sapiens
ttatgggagcacaggaagggggagaaatgagttccatctgaaagggctgaggagggaggctcggaggaggagatga

SEQ ID NO: 104818 - DNA, 76 bp, Homo sapiens
aggaagggggagaaatgagttccatctgaaagggctgaggagggaggctcggaggaggagatgatgactagattga

SEQ ID NO: 104819 - DNA, 78 bp, Homo sapiens
agaaatgagttccatctgaaagggctgaggagggaggctcggaggaggagatgatgactagattgagtctggaaagag

SEQ ID NO: 104820 - DNA, 79 bp, Homo sapiens
tccatctgaaagggctgaggagggaggctcggaggaggagatgatgactagattgagtctggaaagagtgcagggttta

SEQ ID NO: 104821 - DNA, 76 bp, Homo sapiens
aaagggctgaggagggaggctcggaggaggagatgatgactagattgagtctggaaagagtgcagggtttagacag

SEQ ID NO: 104822 - DNA, 76 bp, Homo sapiens
aggagggaggctcggaggaggagatgatgactagattgagtctggaaagagtgcagggtttagacaggcaaaaatg

SEQ ID NO: 104823 - DNA, 78 bp, Homo sapiens
atgatgactagattgagtctggaaagagtgcagggtttagacaggcaaaaatgggaaaggaatttgagctagctcaca

SEQ ID NO: 104824 - DNA, 78 bp, Homo sapiens
tagattgagtctggaaagagtgcagggtttagacaggcaaaaatgggaaaggaatttgagctagctcacatgacataa

SEQ ID NO: 104825 - DNA, 77 bp, Homo sapiens
tggaaagagtgcagggtttagacaggcaaaaatgggaaaggaatttgagctagctcacatgacataagcaaagtcaa

SEQ ID NO: 104826 - DNA, 76 bp, Homo sapiens
agtgcagggtttagacaggcaaaaatgggaaaggaatttgagctagctcacatgacataagcaaagtcaaggaaga

SEQ ID NO: 104827 - DNA, 75 bp, Homo sapiens
ttagacaggcaaaaatgggaaaggaatttgagctagctcacatgacataagcaaagtcaaggaagagggaaagta

SEQ ID NO: 104828 - DNA, 72 bp, Homo sapiens
aaaaatgggaaaggaatttgagctagctcacatgacataagcaaagtcaaggaagagggaaagtacagggga

SEQ ID NO: 104829 - DNA, 78 bp, Homo sapiens
aatttgagctagctcacatgacataagcaaagtcaaggaagagggaaagtacaggggatgtcacggaatggcacatgt

SEQ ID NO: 104830 - DNA, 82 bp, Homo sapiens
agctagctcacatgacataagcaaagtcaaggaagagggaaagtacaggggatgtcacggaatggcacatgttggatgcagc

SEQ ID NO: 104831 - DNA, 80 bp, Homo sapiens
aaagtcaaggaagagggaaagtacaggggatgtcacggaatggcacatgttggatgcagctgcgggacatatcagcatgg

SEQ ID NO: 104832 - DNA, 81 bp, Homo sapiens
ggaagagggaaagtacaggggatgtcacggaatggcacatgttggatgcagctgcgggacatatcagcatgggaagagagg

SEQ ID NO: 104833 - DNA, 83 bp, Homo sapiens
aagtacaggggatgtcacggaatggcacatgttggatgcagctgcgggacatatcagcatgggaagagagggcccaggcagaa

SEQ ID NO: 104834 - DNA, 85 bp, Homo sapiens
atgtcacggaatggcacatgttggatgcagctgcgggacatatcagcatgggaagagagggcccaggcagaacagaaggccagga

SEQ ID NO: 104835 - DNA, 82 bp, Homo sapiens
aatggcacatgttggatgcagctgcgggacatatcagcatgggaagagagggcccaggcagaacagaaggccaggaagggag

SEQ ID NO: 104836 - DNA, 77 bp, Homo sapiens
ctgcgggacatatcagcatgggaagagagggcccaggcagaacagaaggccaggaagggaggccagccctgggtcgc

SEQ ID NO: 104837 - DNA, 76 bp, Homo sapiens
tatcagcatgggaagagagggcccaggcagaacagaaggccaggaagggaggccagccctgggtcgcggcggcatt

SEQ ID NO: 104838 - DNA, 73 bp, Homo sapiens
gggaagagagggcccaggcagaacagaaggccaggaagggaggccagccctgggtcgcggcggcattttctga

SEQ ID NO: 104839 - DNA, 75 bp, Homo sapiens
aggcagaacagaaggccaggaagggaggccagccctgggtcgcggcggcattttctgagctgccaggtctttcta

SEQ ID NO: 104840 - DNA, 75 bp, Homo sapiens
aagggaggccagccctgggtcgcggcggcattttctgagctgccaggtctttctatgtgttatctaacttaatgc

SEQ ID NO: 104841 - DNA, 76 bp, Homo sapiens
agccctgggtcgcggcggcattttctgagctgccaggtctttctatgtgttatctaacttaatgctcacaaaatcc

SEQ ID NO: 104842 - DNA, 76 bp, Homo sapiens
tgggtcgcggcggcattttctgagctgccaggtctttctatgtgttatctaacttaatgctcacaaaatccttttg

SEQ ID NO: 104843 - DNA, 77 bp, Homo sapiens
tgccaggtctttctatgtgttatctaacttaatgctcacaaaatccttttgggaaaggcatcatgattgctctaatt

SEQ ID NO: 104844 - DNA, 75 bp, Homo sapiens
ggtctttctatgtgttatctaacttaatgctcacaaaatccttttgggaaaggcatcatgattgctctaatttta

SEQ ID NO: 104845 - DNA, 77 bp, Homo sapiens
tgttatctaacttaatgctcacaaaatccttttgggaaaggcatcatgattgctctaattttatacataaaatagca

SEQ ID NO: 104846 - DNA, 76 bp, Homo sapiens
aatgctcacaaaatccttttgggaaaggcatcatgattgctctaattttatacataaaatagcagatttatggagg

SEQ ID NO: 104847 - DNA, 76 bp, Homo sapiens
tcacaaaatccttttgggaaaggcatcatgattgctctaattttatacataaaatagcagatttatggagggtcag

SEQ ID NO: 104848 - DNA, 76 bp, Homo sapiens
ttgggaaaggcatcatgattgctctaattttatacataaaatagcagatttatggagggtcagtaatacccaagaa

SEQ ID NO: 104849 - DNA, 78 bp, Homo sapiens
atcatgattgctctaattttatacataaaatagcagatttatggagggtcagtaatacccaagaacacccagccagca

SEQ ID NO: 104850 - DNA, 74 bp, Homo sapiens
attgctctaattttatacataaaatagcagatttatggagggtcagtaatacccaagaacacccagccagcaag

SEQ ID NO: 104851 - DNA, 76 bp, Homo sapiens
ttttatacataaaatagcagatttatggagggtcagtaatacccaagaacacccagccagcaagtggcagagccag

SEQ ID NO: 104852 - DNA, 75 bp, Homo sapiens
aaaatagcagatttatggagggtcagtaatacccaagaacacccagccagcaagtggcagagccaggacctagat

SEQ ID NO: 104853 - DNA, 77 bp, Homo sapiens
tatggagggtcagtaatacccaagaacacccagccagcaagtggcagagccaggacctagattcaggactgaaaata

SEQ ID NO: 104854 - DNA, 76 bp, Homo sapiens
ggtcagtaatacccaagaacacccagccagcaagtggcagagccaggacctagattcaggactgaaaatagcaaag

SEQ ID NO: 104855 - DNA, 79 bp, Homo sapiens
acccaagaacacccagccagcaagtggcagagccaggacctagattcaggactgaaaatagcaaaggccatgctgtgac

SEQ ID NO: 104856 - DNA, 82 bp, Homo sapiens
agccagcaagtggcagagccaggacctagattcaggactgaaaatagcaaaggccatgctgtgaccccatgctgttccgaca

SEQ ID NO: 104857 - DNA, 80 bp, Homo sapiens
ggcagagccaggacctagattcaggactgaaaatagcaaaggccatgctgtgaccccatgctgttccgacacagtagaag

SEQ ID NO: 104858 - DNA, 78 bp, Homo sapiens
aggacctagattcaggactgaaaatagcaaaggccatgctgtgaccccatgctgttccgacacagtagaagtcctata

SEQ ID NO: 104859 - DNA, 75 bp, Homo sapiens
aaaggccatgctgtgaccccatgctgttccgacacagtagaagtcctataactaagtctatggctagggtttgga

SEQ ID NO: 104860 - DNA, 73 bp, Homo sapiens
agaagtcctataactaagtctatggctagggtttggagacttctttcccatgggcaggtgggcatcacagaag

SEQ ID NO: 104861 - DNA, 79 bp, Homo sapiens
taactaagtctatggctagggtttggagacttctttcccatgggcaggtgggcatcacagaaggactctgagcagcaga

SEQ ID NO: 104862 - DNA, 78 bp, Homo sapiens
tatggctagggtttggagacttctttcccatgggcaggtgggcatcacagaaggactctgagcagcagagaaacctaa

SEQ ID NO: 104863 - DNA, 81 bp, Homo sapiens
tttggagacttctttcccatgggcaggtgggcatcacagaaggactctgagcagcagagaaacctaagtgaccatgcttca

SEQ ID NO: 104864 - DNA, 82 bp, Homo sapiens
aggtgggcatcacagaaggactctgagcagcagagaaacctaagtgaccatgcttcaggtagagcctgaggaatcagtgaaa

SEQ ID NO: 104865 - DNA, 83 bp, Homo sapiens
tcacagaaggactctgagcagcagagaaacctaagtgaccatgcttcaggtagagcctgaggaatcagtgaaaagaatgagta

SEQ ID NO: 104866 - DNA, 82 bp, Homo sapiens
actctgagcagcagagaaacctaagtgaccatgcttcaggtagagcctgaggaatcagtgaaaagaatgagtaggcagagat

SEQ ID NO: 104867 - DNA, 81 bp, Homo sapiens
agcagcagagaaacctaagtgaccatgcttcaggtagagcctgaggaatcagtgaaaagaatgagtaggcagagattgaaa

SEQ ID NO: 104868 - DNA, 78 bp, Homo sapiens
aaacctaagtgaccatgcttcaggtagagcctgaggaatcagtgaaaagaatgagtaggcagagattgaaagcccatc

SEQ ID NO: 104869 - DNA, 80 bp, Homo sapiens
atgcttcaggtagagcctgaggaatcagtgaaaagaatgagtaggcagagattgaaagcccatcggccaactgggagata

SEQ ID NO: 104870 - DNA, 81 bp, Homo sapiens
tagagcctgaggaatcagtgaaaagaatgagtaggcagagattgaaagcccatcggccaactgggagatagggcacatgtc

SEQ ID NO: 104871 - DNA, 79 bp, Homo sapiens
ggaatcagtgaaaagaatgagtaggcagagattgaaagcccatcggccaactgggagatagggcacatgtctttgtgaa

SEQ ID NO: 104872 - DNA, 76 bp, Homo sapiens
agtgaaaagaatgagtaggcagagattgaaagcccatcggccaactgggagatagggcacatgtctttgtgaaggg

SEQ ID NO: 104873 - DNA, 77 bp, Homo sapiens
agtaggcagagattgaaagcccatcggccaactgggagatagggcacatgtctttgtgaaggggctgtggaagccaa

SEQ ID NO: 104874 - DNA, 75 bp, Homo sapiens
agagattgaaagcccatcggccaactgggagatagggcacatgtctttgtgaaggggctgtggaagccaaggaaa

SEQ ID NO: 104875 - DNA, 77 bp, Homo sapiens
tgggagatagggcacatgtctttgtgaaggggctgtggaagccaaggaaagagaaagcagatggagacagggtgaaa

SEQ ID NO: 104876 - DNA, 76 bp, Homo sapiens
atagggcacatgtctttgtgaaggggctgtggaagccaaggaaagagaaagcagatggagacagggtgaaagagga

SEQ ID NO: 104877 - DNA, 74 bp, Homo sapiens
tttgtgaaggggctgtggaagccaaggaaagagaaagcagatggagacagggtgaaagaggacactcagaactt

SEQ ID NO: 104878 - DNA, 77 bp, Homo sapiens
ggctgtggaagccaaggaaagagaaagcagatggagacagggtgaaagaggacactcagaactttggagcctagaca

SEQ ID NO: 104879 - DNA, 74 bp, Homo sapiens
aagccaaggaaagagaaagcagatggagacagggtgaaagaggacactcagaactttggagcctagacattggg

SEQ ID NO: 104880 - DNA, 80 bp, Homo sapiens
atggagacagggtgaaagaggacactcagaactttggagcctagacattggggtgaggctagggcacagatgcagatgtc

SEQ ID NO: 104881 - DNA, 78 bp, Homo sapiens
ggtgaaagaggacactcagaactttggagcctagacattggggtgaggctagggcacagatgcagatgtccaggtgtt

SEQ ID NO: 104882 - DNA, 78 bp, Homo sapiens
aagaggacactcagaactttggagcctagacattggggtgaggctagggcacagatgcagatgtccaggtgtttagcc

SEQ ID NO: 104883 - DNA, 77 bp, Homo sapiens
agaactttggagcctagacattggggtgaggctagggcacagatgcagatgtccaggtgtttagcctgggtgactgg

SEQ ID NO: 104884 - DNA, 83 bp, Homo sapiens
gggtgaggctagggcacagatgcagatgtccaggtgtttagcctgggtgactgggatgattgcaaatcatcaggcagttttca

SEQ ID NO: 104885 - DNA, 83 bp, Homo sapiens
tagggcacagatgcagatgtccaggtgtttagcctgggtgactgggatgattgcaaatcatcaggcagttttcagttgaacaa

SEQ ID NO: 104886 - DNA, 79 bp, Homo sapiens
atgcagatgtccaggtgtttagcctgggtgactgggatgattgcaaatcatcaggcagttttcagttgaacaaaaagaa

SEQ ID NO: 104887 - DNA, 75 bp, Homo sapiens
caggtgtttagcctgggtgactgggatgattgcaaatcatcaggcagttttcagttgaacaaaaagaattggaat

SEQ ID NO: 104888 - DNA, 79 bp, Homo sapiens
agcctgggtgactgggatgattgcaaatcatcaggcagttttcagttgaacaaaaagaattggaattctgcattagcat

SEQ ID NO: 104889 - DNA, 78 bp, Homo sapiens
attgcaaatcatcaggcagttttcagttgaacaaaaagaattggaattctgcattagcattctacatcctacacctaa

SEQ ID NO: 104890 - DNA, 75 bp, Homo sapiens
ttcagttgaacaaaaagaattggaattctgcattagcattctacatcctacacctaaaggcgtgactggttatta

SEQ ID NO: 104891 - DNA, 78 bp, Homo sapiens
aattggaattctgcattagcattctacatcctacacctaaaggcgtgactggttattagacagtaagagaaatgctga

SEQ ID NO: 104892 - DNA, 76 bp, Homo sapiens
ctacacctaaaggcgtgactggttattagacagtaagagaaatgctgaccagagttttaatactacatcaatcaga

SEQ ID NO: 104893 - DNA, 78 bp, Homo sapiens
aaggcgtgactggttattagacagtaagagaaatgctgaccagagttttaatactacatcaatcagaggcatttctgc

SEQ ID NO: 104894 - DNA, 77 bp, Homo sapiens
ttattagacagtaagagaaatgctgaccagagttttaatactacatcaatcagaggcatttctgctgggtaacaaat

SEQ ID NO: 104895 - DNA, 76 bp, Homo sapiens
cagtaagagaaatgctgaccagagttttaatactacatcaatcagaggcatttctgctgggtaacaaatttaataa

SEQ ID NO: 104896 - DNA, 77 bp, Homo sapiens
atgctgaccagagttttaatactacatcaatcagaggcatttctgctgggtaacaaatttaataaaatgacaacatc

SEQ ID NO: 104897 - DNA, 75 bp, Homo sapiens
cagagttttaatactacatcaatcagaggcatttctgctgggtaacaaatttaataaaatgacaacatcccttga

SEQ ID NO: 104898 - DNA, 79 bp, Homo sapiens
atactacatcaatcagaggcatttctgctgggtaacaaatttaataaaatgacaacatcccttgatatctctctcattc

SEQ ID NO: 104899 - DNA, 77 bp, Homo sapiens
agaggcatttctgctgggtaacaaatttaataaaatgacaacatcccttgatatctctctcattcttggcagaaata

SEQ ID NO: 104900 - DNA, 81 bp, Homo sapiens
aacatcccttgatatctctctcattcttggcagaaatatctcaaagaagatagacagatggaaaggtggtcagacacataa

SEQ ID NO: 104901 - DNA, 82 bp, Homo sapiens
ttgatatctctctcattcttggcagaaatatctcaaagaagatagacagatggaaaggtggtcagacacataaagaaagcaa

SEQ ID NO: 104902 - DNA, 80 bp, Homo sapiens
tctcattcttggcagaaatatctcaaagaagatagacagatggaaaggtggtcagacacataaagaaagcaagcgagaaa

SEQ ID NO: 104903 - DNA, 76 bp, Homo sapiens
agaaatatctcaaagaagatagacagatggaaaggtggtcagacacataaagaaagcaagcgagaaagcctggaac

SEQ ID NO: 104904 - DNA, 77 bp, Homo sapiens
atctcaaagaagatagacagatggaaaggtggtcagacacataaagaaagcaagcgagaaagcctggaacgttgagc

SEQ ID NO: 104905 - DNA, 76 bp, Homo sapiens
aaaggtggtcagacacataaagaaagcaagcgagaaagcctggaacgttgagccctcatacaagcattgaaatgaa

SEQ ID NO: 104906 - DNA, 77 bp, Homo sapiens
agacacataaagaaagcaagcgagaaagcctggaacgttgagccctcatacaagcattgaaatgaatgtggggcttg

SEQ ID NO: 104907 - DNA, 77 bp, Homo sapiens
taaagaaagcaagcgagaaagcctggaacgttgagccctcatacaagcattgaaatgaatgtggggcttggtcagta

SEQ ID NO: 104908 - DNA, 82 bp, Homo sapiens
agcctggaacgttgagccctcatacaagcattgaaatgaatgtggggcttggtcagtatgaaaggcaagtcaatcatcatca

SEQ ID NO: 104909 - DNA, 84 bp, Homo sapiens
ttgagccctcatacaagcattgaaatgaatgtggggcttggtcagtatgaaaggcaagtcaatcatcatcactggaagtcagaa

SEQ ID NO: 104910 - DNA, 81 bp, Homo sapiens
aagcattgaaatgaatgtggggcttggtcagtatgaaaggcaagtcaatcatcatcactggaagtcagaatcaatttgtaa

SEQ ID NO: 104911 - DNA, 81 bp, Homo sapiens
aaatgaatgtggggcttggtcagtatgaaaggcaagtcaatcatcatcactggaagtcagaatcaatttgtaagatggctc

SEQ ID NO: 104912 - DNA, 81 bp, Homo sapiens
ggcttggtcagtatgaaaggcaagtcaatcatcatcactggaagtcagaatcaatttgtaagatggctcgtcaggacccta

SEQ ID NO: 104913 - DNA, 80 bp, Homo sapiens
gtatgaaaggcaagtcaatcatcatcactggaagtcagaatcaatttgtaagatggctcgtcaggaccctaaacgcataa

SEQ ID NO: 104914 - DNA, 79 bp, Homo sapiens
caagtcaatcatcatcactggaagtcagaatcaatttgtaagatggctcgtcaggaccctaaacgcataaacagaagaa

SEQ ID NO: 104915 - DNA, 79 bp, Homo sapiens
aatcatcatcactggaagtcagaatcaatttgtaagatggctcgtcaggaccctaaacgcataaacagaagaatgagag

SEQ ID NO: 104916 - DNA, 75 bp, Homo sapiens
gaagtcagaatcaatttgtaagatggctcgtcaggaccctaaacgcataaacagaagaatgagaggttgttataa

SEQ ID NO: 104917 - DNA, 72 bp, Homo sapiens
atcaatttgtaagatggctcgtcaggaccctaaacgcataaacagaagaatgagaggttgttataaagtcct

SEQ ID NO: 104918 - DNA, 73 bp, Homo sapiens
ttgtaagatggctcgtcaggaccctaaacgcataaacagaagaatgagaggttgttataaagtccttggcttg

SEQ ID NO: 104919 - DNA, 71 bp, Homo sapiens
tcgtcaggaccctaaacgcataaacagaagaatgagaggttgttataaagtccttggcttggccgggcgta

SEQ ID NO: 104920 - DNA, 73 bp, Homo sapiens
aaaaaaaagtccttggcttttacccaagtgatgatgctgtgtgttaaggtcaagttgatctgataaatcgcta

SEQ ID NO: 104921 - DNA, 78 bp, Homo sapiens
aaagtccttggcttttacccaagtgatgatgctgtgtgttaaggtcaagttgatctgataaatcgctatgcaataatc

SEQ ID NO: 104922 - DNA, 80 bp, Homo sapiens
ttttacccaagtgatgatgctgtgtgttaaggtcaagttgatctgataaatcgctatgcaataatccaagcaccccaatc

SEQ ID NO: 104923 - DNA, 79 bp, Homo sapiens
aagtgatgatgctgtgtgttaaggtcaagttgatctgataaatcgctatgcaataatccaagcaccccaatcccttggg

SEQ ID NO: 104924 - DNA, 81 bp, Homo sapiens
tgtgttaaggtcaagttgatctgataaatcgctatgcaataatccaagcaccccaatcccttgggggtgctcatgagatga

SEQ ID NO: 104925 - DNA, 83 bp, Homo sapiens
aaggtcaagttgatctgataaatcgctatgcaataatccaagcaccccaatcccttgggggtgctcatgagatgagagatgca

SEQ ID NO: 104926 - DNA, 84 bp, Homo sapiens
aatcgctatgcaataatccaagcaccccaatcccttgggggtgctcatgagatgagagatgcaggggcatgacaatattctcac

SEQ ID NO: 104927 - DNA, 80 bp, Homo sapiens
aataatccaagcaccccaatcccttgggggtgctcatgagatgagagatgcaggggcatgacaatattctcaccttgaaa

SEQ ID NO: 104928 - DNA, 77 bp, Homo sapiens
accccaatcccttgggggtgctcatgagatgagagatgcaggggcatgacaatattctcaccttgaaaacctcttgg

SEQ ID NO: 104929 - DNA, 82 bp, Homo sapiens
tgggggtgctcatgagatgagagatgcaggggcatgacaatattctcaccttgaaaacctcttggggagacttctcaacata

SEQ ID NO: 104930 - DNA, 82 bp, Homo sapiens
tcatgagatgagagatgcaggggcatgacaatattctcaccttgaaaacctcttggggagacttctcaacataggtttgtga

SEQ ID NO: 104931 - DNA, 76 bp, Homo sapiens
agagatgcaggggcatgacaatattctcaccttgaaaacctcttggggagacttctcaacataggtttgtgacaat

SEQ ID NO: 104932 - DNA, 73 bp, Homo sapiens
aggggcatgacaatattctcaccttgaaaacctcttggggagacttctcaacataggtttgtgacaattgtcc

SEQ ID NO: 104933 - DNA, 72 bp, Homo sapiens
aatattctcaccttgaaaacctcttggggagacttctcaacataggtttgtgacaattgtcccctggtctga

SEQ ID NO: 104934 - DNA, 70 bp, Homo sapiens
cttgaaaacctcttggggagacttctcaacataggtttgtgacaattgtcccctggtctgagttgaaaaa

SEQ ID NO: 104935 - DNA, 78 bp, Homo sapiens
ggagacttctcaacataggtttgtgacaattgtcccctggtctgagttgaaaaaaatgtagctgatcattatcagcat

SEQ ID NO: 104936 - DNA, 78 bp, Homo sapiens
aacataggtttgtgacaattgtcccctggtctgagttgaaaaaaatgtagctgatcattatcagcattgccagattaa

SEQ ID NO: 104937 - DNA, 79 bp, Homo sapiens
ttgtgacaattgtcccctggtctgagttgaaaaaaatgtagctgatcattatcagcattgccagattaacactggtacc

SEQ ID NO: 104938 - DNA, 80 bp, Homo sapiens
cctggtctgagttgaaaaaaatgtagctgatcattatcagcattgccagattaacactggtacccagtgaaatagtcatc

SEQ ID NO: 104939 - DNA, 79 bp, Homo sapiens
tctgagttgaaaaaaatgtagctgatcattatcagcattgccagattaacactggtacccagtgaaatagtcatccccc

SEQ ID NO: 104940 - DNA, 77 bp, Homo sapiens
aaaaatgtagctgatcattatcagcattgccagattaacactggtacccagtgaaatagtcatccccccttgcaagg

SEQ ID NO: 104941 - DNA, 77 bp, Homo sapiens
tcattatcagcattgccagattaacactggtacccagtgaaatagtcatccccccttgcaagggttatgtggaagga

SEQ ID NO: 104942 - DNA, 74 bp, Homo sapiens
atcagcattgccagattaacactggtacccagtgaaatagtcatccccccttgcaagggttatgtggaaggaag

SEQ ID NO: 104943 - DNA, 71 bp, Homo sapiens
ttaacactggtacccagtgaaatagtcatccccccttgcaagggttatgtggaaggaaggatctatgttta

SEQ ID NO: 104944 - DNA, 68 bp, Homo sapiens
aaatagtcatccccccttgcaagggttatgtggaaggaaggatctatgtttaacagattattttagtt

SEQ ID NO: 104945 - DNA, 65 bp, Homo sapiens
cccccttgcaagggttatgtggaaggaaggatctatgtttaacagattattttagttttaaaatt

SEQ ID NO: 104946 - DNA, 69 bp, Homo sapiens
ttgcaagggttatgtggaaggaaggatctatgtttaacagattattttagttttaaaatttgcttatct

SEQ ID NO: 104947 - DNA, 73 bp, Homo sapiens
ggaaggaaggatctatgtttaacagattattttagttttaaaatttgcttatcttatatattgtgctgccatg

SEQ ID NO: 104948 - DNA, 75 bp, Homo sapiens
gaaggatctatgtttaacagattattttagttttaaaatttgcttatcttatatattgtgctgccatggatgccc

SEQ ID NO: 104949 - DNA, 73 bp, Homo sapiens
aacagattattttagttttaaaatttgcttatcttatatattgtgctgccatggatgcccttgattttattct

SEQ ID NO: 104950 - DNA, 73 bp, Homo sapiens
tttagttttaaaatttgcttatcttatatattgtgctgccatggatgcccttgattttattctttgttaggaa

SEQ ID NO: 104951 - DNA, 77 bp, Homo sapiens
aaatttgcttatcttatatattgtgctgccatggatgcccttgattttattctttgttaggaaggaatatcatggct

SEQ ID NO: 104952 - DNA, 78 bp, Homo sapiens
ttatcttatatattgtgctgccatggatgcccttgattttattctttgttaggaaggaatatcatggctttgaaatcc

SEQ ID NO: 104953 - DNA, 79 bp, Homo sapiens
tattgtgctgccatggatgcccttgattttattctttgttaggaaggaatatcatggctttgaaatcctgaggcctata

SEQ ID NO: 104954 - DNA, 74 bp, Homo sapiens
atggatgcccttgattttattctttgttaggaaggaatatcatggctttgaaatcctgaggcctatactgtaaa

SEQ ID NO: 104955 - DNA, 71 bp, Homo sapiens
cccttgattttattctttgttaggaaggaatatcatggctttgaaatcctgaggcctatactgtaaatctt

SEQ ID NO: 104956 - DNA, 72 bp, Homo sapiens
attctttgttaggaaggaatatcatggctttgaaatcctgaggcctatactgtaaatctttcacaaatttaa

SEQ ID NO: 104957 - DNA, 70 bp, Homo sapiens
gttaggaaggaatatcatggctttgaaatcctgaggcctatactgtaaatctttcacaaatttaaaaaag

SEQ ID NO: 104958 - DNA, 73 bp, Homo sapiens
catggctttgaaatcctgaggcctatactgtaaatctttcacaaatttaaaaaagtacatgaaataagataca

SEQ ID NO: 104959 - DNA, 73 bp, Homo sapiens
tgaaatcctgaggcctatactgtaaatctttcacaaatttaaaaaagtacatgaaataagatacatgaggccg

SEQ ID NO: 104960 - DNA, 72 bp, Homo sapiens
ctgaggcctatactgtaaatctttcacaaatttaaaaaagtacatgaaataagatacatgaggccgggcgtg

SEQ ID NO: 104961 - DNA, 77 bp, Homo sapiens
aaaaataaaatacaataaaaggatacatgaaatgtatgtgtgaaatgacagtagagtgtattttgagatatatcata

SEQ ID NO: 104962 - DNA, 79 bp, Homo sapiens
taaaatacaataaaaggatacatgaaatgtatgtgtgaaatgacagtagagtgtattttgagatatatcataatgttta

SEQ ID NO: 104963 - DNA, 82 bp, Homo sapiens
tacaataaaaggatacatgaaatgtatgtgtgaaatgacagtagagtgtattttgagatatatcataatgtttagtatatgc

SEQ ID NO: 104964 - DNA, 83 bp, Homo sapiens
taaaaggatacatgaaatgtatgtgtgaaatgacagtagagtgtattttgagatatatcataatgtttagtatatgccagaca

SEQ ID NO: 104965 - DNA, 84 bp, Homo sapiens
ggatacatgaaatgtatgtgtgaaatgacagtagagtgtattttgagatatatcataatgtttagtatatgccagacactgttg

SEQ ID NO: 104966 - DNA, 84 bp, Homo sapiens
catgaaatgtatgtgtgaaatgacagtagagtgtattttgagatatatcataatgtttagtatatgccagacactgttgtaata

SEQ ID NO: 104967 - DNA, 84 bp, Homo sapiens
atgtgtgaaatgacagtagagtgtattttgagatatatcataatgtttagtatatgccagacactgttgtaatatatcaattca

SEQ ID NO: 104968 - DNA, 84 bp, Homo sapiens
tgtgtgaaatgacagtagagtgtattttgagatatatcataatgtttagtatatgccagacactgttgtaatatatcaattcat

SEQ ID NO: 104969 - DNA, 84 bp, Homo sapiens
tgaaatgacagtagagtgtattttgagatatatcataatgtttagtatatgccagacactgttgtaatatatcaattcattata

SEQ ID NO: 104970 - DNA, 84 bp, Homo sapiens
tgacagtagagtgtattttgagatatatcataatgtttagtatatgccagacactgttgtaatatatcaattcattataaatga

SEQ ID NO: 104971 - DNA, 82 bp, Homo sapiens
gtagagtgtattttgagatatatcataatgtttagtatatgccagacactgttgtaatatatcaattcattataaatgaaca

SEQ ID NO: 104972 - DNA, 80 bp, Homo sapiens
tgagatatatcataatgtttagtatatgccagacactgttgtaatatatcaattcattataaatgaacacaaaaagggct

SEQ ID NO: 104973 - DNA, 82 bp, Homo sapiens
tatatgccagacactgttgtaatatatcaattcattataaatgaacacaaaaagggctttcactttcgcatcaatgctatga

SEQ ID NO: 104974 - DNA, 78 bp, Homo sapiens
gacactgttgtaatatatcaattcattataaatgaacacaaaaagggctttcactttcgcatcaatgctatgaggtag

SEQ ID NO: 104975 - DNA, 76 bp, Homo sapiens
gttgtaatatatcaattcattataaatgaacacaaaaagggctttcactttcgcatcaatgctatgaggtaggtat

SEQ ID NO: 104976 - DNA, 75 bp, Homo sapiens
ttcattataaatgaacacaaaaagggctttcactttcgcatcaatgctatgaggtaggtattgttcctattacac

SEQ ID NO: 104977 - DNA, 72 bp, Homo sapiens
aatgaacacaaaaagggctttcactttcgcatcaatgctatgaggtaggtattgttcctattacactaattt

SEQ ID NO: 104978 - DNA, 74 bp, Homo sapiens
acaaaaagggctttcactttcgcatcaatgctatgaggtaggtattgttcctattacactaattttacagatga

SEQ ID NO: 104979 - DNA, 78 bp, Homo sapiens
agaaactgaggcacacagttgttgattaacttgcctaagatcacacagctggaggagctgggattgaacctagacaat

SEQ ID NO: 104980 - DNA, 77 bp, Homo sapiens
aggcacacagttgttgattaacttgcctaagatcacacagctggaggagctgggattgaacctagacaatttggttc

SEQ ID NO: 104981 - DNA, 77 bp, Homo sapiens
agttgttgattaacttgcctaagatcacacagctggaggagctgggattgaacctagacaatttggttcctgaggca

SEQ ID NO: 104982 - DNA, 77 bp, Homo sapiens
ttaacttgcctaagatcacacagctggaggagctgggattgaacctagacaatttggttcctgaggcatggtcttaa

SEQ ID NO: 104983 - DNA, 77 bp, Homo sapiens
tcacacagctggaggagctgggattgaacctagacaatttggttcctgaggcatggtcttaactagtcgaagctgtt

SEQ ID NO: 104984 - DNA, 72 bp, Homo sapiens
ggaggagctgggattgaacctagacaatttggttcctgaggcatggtcttaactagtcgaagctgtttccct

SEQ ID NO: 104985 - DNA, 72 bp, Homo sapiens
ggattgaacctagacaatttggttcctgaggcatggtcttaactagtcgaagctgtttcccttggtactcaa

SEQ ID NO: 104986 - DNA, 71 bp, Homo sapiens
tagacaatttggttcctgaggcatggtcttaactagtcgaagctgtttcccttggtactcaaacttaataa

SEQ ID NO: 104987 - DNA, 68 bp, Homo sapiens
aatttggttcctgaggcatggtcttaactagtcgaagctgtttcccttggtactcaaacttaataagg

SEQ ID NO: 104988 - DNA, 71 bp, Homo sapiens
aggcatggtcttaactagtcgaagctgtttcccttggtactcaaacttaataaggtggatttgcaagtata

SEQ ID NO: 104989 - DNA, 70 bp, Homo sapiens
ttaactagtcgaagctgtttcccttggtactcaaacttaataaggtggatttgcaagtatagtctttgaa

SEQ ID NO: 104990 - DNA, 71 bp, Homo sapiens
aagctgtttcccttggtactcaaacttaataaggtggatttgcaagtatagtctttgaaaagtgatgacca

SEQ ID NO: 104991 - DNA, 73 bp, Homo sapiens
tttcccttggtactcaaacttaataaggtggatttgcaagtatagtctttgaaaagtgatgaccatggagaga

SEQ ID NO: 104992 - DNA, 72 bp, Homo sapiens
tactcaaacttaataaggtggatttgcaagtatagtctttgaaaagtgatgaccatggagagaagggacttt

SEQ ID NO: 104993 - DNA, 76 bp, Homo sapiens
atttgcaagtatagtctttgaaaagtgatgaccatggagagaagggacttttgtgagggatccctgatctggtgac

SEQ ID NO: 104994 - DNA, 77 bp, Homo sapiens
tatagtctttgaaaagtgatgaccatggagagaagggacttttgtgagggatccctgatctggtgaccagtgagaac

SEQ ID NO: 104995 - DNA, 77 bp, Homo sapiens
atggagagaagggacttttgtgagggatccctgatctggtgaccagtgagaaccaagacaactacactcattcaaga

SEQ ID NO: 104996 - DNA, 76 bp, Homo sapiens
ggacttttgtgagggatccctgatctggtgaccagtgagaaccaagacaactacactcattcaagaccacatttta

SEQ ID NO: 104997 - DNA, 75 bp, Homo sapiens
tttgtgagggatccctgatctggtgaccagtgagaaccaagacaactacactcattcaagaccacattttacgtt

SEQ ID NO: 104998 - DNA, 77 bp, Homo sapiens
tgatctggtgaccagtgagaaccaagacaactacactcattcaagaccacattttacgtttgagccctgttactgga

SEQ ID NO: 104999 - DNA, 74 bp, Homo sapiens
accagtgagaaccaagacaactacactcattcaagaccacattttacgtttgagccctgttactggagaacaga

SEQ ID NO: 105000 - DNA, 72 bp, Homo sapiens
agaaccaagacaactacactcattcaagaccacattttacgtttgagccctgttactggagaacagataagg

SEQ ID NO: 105001 - DNA, 72 bp, Homo sapiens
acaactacactcattcaagaccacattttacgtttgagccctgttactggagaacagataagggacccatcc

SEQ ID NO: 105002 - DNA, 68 bp, Homo sapiens
attcaagaccacattttacgtttgagccctgttactggagaacagataagggacccatcccgtgtttt

SEQ ID NO: 105003 - DNA, 68 bp, Homo sapiens
accacattttacgtttgagccctgttactggagaacagataagggacccatcccgtgtttttgacttc

SEQ ID NO: 105004 - DNA, 71 bp, Homo sapiens
tttgagccctgttactggagaacagataagggacccatcccgtgtttttgacttcttgacctactgactta

SEQ ID NO: 105005 - DNA, 70 bp, Homo sapiens
acagataagggacccatcccgtgtttttgacttcttgacctactgacttactacataactatatcgattt

SEQ ID NO: 105006 - DNA, 72 bp, Homo sapiens
aagggacccatcccgtgtttttgacttcttgacctactgacttactacataactatatcgattttgcatgga

SEQ ID NO: 105007 - DNA, 77 bp, Homo sapiens
tcccgtgtttttgacttcttgacctactgacttactacataactatatcgattttgcatggaagctcctgctctctg

SEQ ID NO: 105008 - DNA, 79 bp, Homo sapiens
ttgacttcttgacctactgacttactacataactatatcgattttgcatggaagctcctgctctctgtgggtttgacca

SEQ ID NO: 105009 - DNA, 78 bp, Homo sapiens
acctactgacttactacataactatatcgattttgcatggaagctcctgctctctgtgggtttgaccaggcaccattg

SEQ ID NO: 105010 - DNA, 78 bp, Homo sapiens
ttactacataactatatcgattttgcatggaagctcctgctctctgtgggtttgaccaggcaccattggcctgccttt

SEQ ID NO: 105011 - DNA, 80 bp, Homo sapiens
aactatatcgattttgcatggaagctcctgctctctgtgggtttgaccaggcaccattggcctgccttttgctgcaataa

SEQ ID NO: 105012 - DNA, 78 bp, Homo sapiens
attttgcatggaagctcctgctctctgtgggtttgaccaggcaccattggcctgccttttgctgcaataagtctgggg

SEQ ID NO: 105013 - DNA, 78 bp, Homo sapiens
tcctgctctctgtgggtttgaccaggcaccattggcctgccttttgctgcaataagtctgggggcttcactcactcct

SEQ ID NO: 105014 - DNA, 78 bp, Homo sapiens
tttgaccaggcaccattggcctgccttttgctgcaataagtctgggggcttcactcactccttagtggcttattctca

SEQ ID NO: 105015 - DNA, 76 bp, Homo sapiens
accattggcctgccttttgctgcaataagtctgggggcttcactcactccttagtggcttattctcaccacatatt

SEQ ID NO: 105016 - DNA, 79 bp, Homo sapiens
ctgccttttgctgcaataagtctgggggcttcactcactccttagtggcttattctcaccacatatttggctcacacca

SEQ ID NO: 105017 - DNA, 79 bp, Homo sapiens
aataagtctgggggcttcactcactccttagtggcttattctcaccacatatttggctcacaccagcagagcctgactc

SEQ ID NO: 105018 - DNA, 79 bp, Homo sapiens
tctgggggcttcactcactccttagtggcttattctcaccacatatttggctcacaccagcagagcctgactcttccgg

SEQ ID NO: 105019 - DNA, 77 bp, Homo sapiens
ttcactcactccttagtggcttattctcaccacatatttggctcacaccagcagagcctgactcttccggggaaaaa

SEQ ID NO: 105020 - DNA, 76 bp, Homo sapiens
ttattctcaccacatatttggctcacaccagcagagcctgactcttccggggaaaaaatgatttaccaaattagca

SEQ ID NO: 105021 - DNA, 71 bp, Homo sapiens
acaccagcagagcctgactcttccggggaaaaaatgatttaccaaattagcatggagataaaaatactttc

SEQ ID NO: 105022 - DNA, 70 bp, Homo sapiens
tccggggaaaaaatgatttaccaaattagcatggagataaaaatactttcttcttcgattgagtggtctc

SEQ ID NO: 105023 - DNA, 72 bp, Homo sapiens
atttaccaaattagcatggagataaaaatactttcttcttcgattgagtggtctccttatagaattgaaaca

SEQ ID NO: 105024 - DNA, 74 bp, Homo sapiens
gcatggagataaaaatactttcttcttcgattgagtggtctccttatagaattgaaacaaaattagattcagga

SEQ ID NO: 105025 - DNA, 74 bp, Homo sapiens
aaatactttcttcttcgattgagtggtctccttatagaattgaaacaaaattagattcaggaagtggcatgcat

SEQ ID NO: 105026 - DNA, 75 bp, Homo sapiens
tttcttcttcgattgagtggtctccttatagaattgaaacaaaattagattcaggaagtggcatgcattttggta

SEQ ID NO: 105027 - DNA, 78 bp, Homo sapiens
attgagtggtctccttatagaattgaaacaaaattagattcaggaagtggcatgcattttggtaactgatgcttgata

SEQ ID NO: 105028 - DNA, 78 bp, Homo sapiens
gtctccttatagaattgaaacaaaattagattcaggaagtggcatgcattttggtaactgatgcttgataattgagta

SEQ ID NO: 105029 - DNA, 77 bp, Homo sapiens
ttagattcaggaagtggcatgcattttggtaactgatgcttgataattgagtattattagatttaggtttttgccca

SEQ ID NO: 105030 - DNA, 75 bp, Homo sapiens
ttcaggaagtggcatgcattttggtaactgatgcttgataattgagtattattagatttaggtttttgcccaaaa

SEQ ID NO: 105031 - DNA, 74 bp, Homo sapiens
ggcatgcattttggtaactgatgcttgataattgagtattattagatttaggtttttgcccaaaataacgattg

SEQ ID NO: 105032 - DNA, 72 bp, Homo sapiens
ggtaactgatgcttgataattgagtattattagatttaggtttttgcccaaaataacgattgtaggacatta

SEQ ID NO: 105033 - DNA, 71 bp, Homo sapiens
tgcttgataattgagtattattagatttaggtttttgcccaaaataacgattgtaggacattagaacgaac

SEQ ID NO: 105034 - DNA, 71 bp, Homo sapiens
gagtattattagatttaggtttttgcccaaaataacgattgtaggacattagaacgaactatttcagatga

SEQ ID NO: 105035 - DNA, 70 bp, Homo sapiens
ggtttttgcccaaaataacgattgtaggacattagaacgaactatttcagatgaaacttttccaatgtga

SEQ ID NO: 105036 - DNA, 75 bp, Homo sapiens
aacgaactatttcagatgaaacttttccaatgtgaatcaaattgtgaaaggaacaagcacatcctgaattagtgc

SEQ ID NO: 105037 - DNA, 77 bp, Homo sapiens
ttcagatgaaacttttccaatgtgaatcaaattgtgaaaggaacaagcacatcctgaattagtgctgtatttttgaa

SEQ ID NO: 105038 - DNA, 75 bp, Homo sapiens
acttttccaatgtgaatcaaattgtgaaaggaacaagcacatcctgaattagtgctgtatttttgaaacatactg

SEQ ID NO: 105039 - DNA, 76 bp, Homo sapiens
tgtgaatcaaattgtgaaaggaacaagcacatcctgaattagtgctgtatttttgaaacatactggagtaggttta

SEQ ID NO: 105040 - DNA, 74 bp, Homo sapiens
aattgtgaaaggaacaagcacatcctgaattagtgctgtatttttgaaacatactggagtaggtttaagcattc

SEQ ID NO: 105041 - DNA, 72 bp, Homo sapiens
aaaggaacaagcacatcctgaattagtgctgtatttttgaaacatactggagtaggtttaagcattccttcc

SEQ ID NO: 105042 - DNA, 71 bp, Homo sapiens
atcctgaattagtgctgtatttttgaaacatactggagtaggtttaagcattccttccttcctcacggtaa

SEQ ID NO: 105043 - DNA, 73 bp, Homo sapiens
atttttgaaacatactggagtaggtttaagcattccttccttcctcacggtaattgagcagatgttcttgcca

SEQ ID NO: 105044 - DNA, 76 bp, Homo sapiens
ttccttccttcctcacggtaattgagcagatgttcttgccaggctctgcgttaggtacttggacttgggcagtgaa

SEQ ID NO: 105045 - DNA, 80 bp, Homo sapiens
ttcctcacggtaattgagcagatgttcttgccaggctctgcgttaggtacttggacttgggcagtgaatcagacagcaaa

SEQ ID NO: 105046 - DNA, 79 bp, Homo sapiens
ggtaattgagcagatgttcttgccaggctctgcgttaggtacttggacttgggcagtgaatcagacagcaaaagcctct

SEQ ID NO: 105047 - DNA, 77 bp, Homo sapiens
agatgttcttgccaggctctgcgttaggtacttggacttgggcagtgaatcagacagcaaaagcctcttcctttcag

SEQ ID NO: 105048 - DNA, 76 bp, Homo sapiens
aggctctgcgttaggtacttggacttgggcagtgaatcagacagcaaaagcctcttcctttcaggagctgaccttc

SEQ ID NO: 105049 - DNA, 78 bp, Homo sapiens
ttaggtacttggacttgggcagtgaatcagacagcaaaagcctcttcctttcaggagctgaccttccaggtgcagata

SEQ ID NO: 105050 - DNA, 79 bp, Homo sapiens
tacttggacttgggcagtgaatcagacagcaaaagcctcttcctttcaggagctgaccttccaggtgcagatagaaaca

SEQ ID NO: 105051 - DNA, 77 bp, Homo sapiens
aaaagcctcttcctttcaggagctgaccttccaggtgcagatagaaacactgaaatgaattctaattgcatgtgtgg

SEQ ID NO: 105052 - DNA, 83 bp, Homo sapiens
ttcaggagctgaccttccaggtgcagatagaaacactgaaatgaattctaattgcatgtgtggtgtgtggacatagcaaaata

SEQ ID NO: 105053 - DNA, 81 bp, Homo sapiens
gtgcagatagaaacactgaaatgaattctaattgcatgtgtggtgtgtggacatagcaaaataaccatcatcaaggaaaaa

SEQ ID NO: 105054 - DNA, 76 bp, Homo sapiens
aaacactgaaatgaattctaattgcatgtgtggtgtgtggacatagcaaaataaccatcatcaaggaaaaaagtac

SEQ ID NO: 105055 - DNA, 76 bp, Homo sapiens
ctaattgcatgtgtggtgtgtggacatagcaaaataaccatcatcaaggaaaaaagtactcttcatatttagaaac

SEQ ID NO: 105056 - DNA, 76 bp, Homo sapiens
tgtggtgtgtggacatagcaaaataaccatcatcaaggaaaaaagtactcttcatatttagaaacttggctccata

SEQ ID NO: 105057 - DNA, 73 bp, Homo sapiens
gtggacatagcaaaataaccatcatcaaggaaaaaagtactcttcatatttagaaacttggctccatactatt

SEQ ID NO: 105058 - DNA, 70 bp, Homo sapiens
caaaataaccatcatcaaggaaaaaagtactcttcatatttagaaacttggctccatactattttaccaa

SEQ ID NO: 105059 - DNA, 67 bp, Homo sapiens
caaggaaaaaagtactcttcatatttagaaacttggctccatactattttaccaattttgggaatcc

SEQ ID NO: 105060 - DNA, 67 bp, Homo sapiens
aaagtactcttcatatttagaaacttggctccatactattttaccaattttgggaatcccaattatt

SEQ ID NO: 105061 - DNA, 66 bp, Homo sapiens
cttcatatttagaaacttggctccatactattttaccaattttgggaatcccaattatttttttcc

SEQ ID NO: 105062 - DNA, 66 bp, Homo sapiens
agaaacttggctccatactattttaccaattttgggaatcccaattatttttttcccaaagataca

SEQ ID NO: 105063 - DNA, 67 bp, Homo sapiens
gctccatactattttaccaattttgggaatcccaattatttttttcccaaagatacattttagcacg

SEQ ID NO: 105064 - DNA, 67 bp, Homo sapiens
accaattttgggaatcccaattatttttttcccaaagatacattttagcacgtaggcacactttgag

SEQ ID NO: 105065 - DNA, 68 bp, Homo sapiens
tttgggaatcccaattatttttttcccaaagatacattttagcacgtaggcacactttgaggctttac

SEQ ID NO: 105066 - DNA, 68 bp, Homo sapiens
attatttttttcccaaagatacattttagcacgtaggcacactttgaggctttactcccactctcttt

SEQ ID NO: 105067 - DNA, 69 bp, Homo sapiens
acgtaggcacactttgaggctttactcccactctcttttgtttctttcactattttcttattccacaac

SEQ ID NO: 105068 - DNA, 67 bp, Homo sapiens
ctttgaggctttactcccactctcttttgtttctttcactattttcttattccacaaccaaggtctt

SEQ ID NO: 105069 - DNA, 67 bp, Homo sapiens
gctttactcccactctcttttgtttctttcactattttcttattccacaaccaaggtctttcccaaa

SEQ ID NO: 105070 - DNA, 65 bp, Homo sapiens
tttgtttctttcactattttcttattccacaaccaaggtctttcccaaaaccccagccttttctc

SEQ ID NO: 105071 - DNA, 70 bp, Homo sapiens
ttattccacaaccaaggtctttcccaaaaccccagccttttctcctcctgatggcaaattatggccatta

SEQ ID NO: 105072 - DNA, 72 bp, Homo sapiens
ccaaaaccccagccttttctcctcctgatggcaaattatggccattattagagacggtgattgtcccatttc

SEQ ID NO: 105073 - DNA, 78 bp, Homo sapiens
agccttttctcctcctgatggcaaattatggccattattagagacggtgattgtcccatttctgcacaatgaggtgaa

SEQ ID NO: 105074 - DNA, 80 bp, Homo sapiens
ctcctgatggcaaattatggccattattagagacggtgattgtcccatttctgcacaatgaggtgaagcaagaatgaaaa

SEQ ID NO: 105075 - DNA, 80 bp, Homo sapiens
atggcaaattatggccattattagagacggtgattgtcccatttctgcacaatgaggtgaagcaagaatgaaaatgcttg

SEQ ID NO: 105076 - DNA, 78 bp, Homo sapiens
ccattattagagacggtgattgtcccatttctgcacaatgaggtgaagcaagaatgaaaatgcttgtggattttggta

SEQ ID NO: 105077 - DNA, 77 bp, Homo sapiens
attagagacggtgattgtcccatttctgcacaatgaggtgaagcaagaatgaaaatgcttgtggattttggtactac

SEQ ID NO: 105078 - DNA, 76 bp, Homo sapiens
gtgattgtcccatttctgcacaatgaggtgaagcaagaatgaaaatgcttgtggattttggtactacctactgggg

SEQ ID NO: 105079 - DNA, 76 bp, Homo sapiens
atttctgcacaatgaggtgaagcaagaatgaaaatgcttgtggattttggtactacctactgggggcagcttccaa

SEQ ID NO: 105080 - DNA, 72 bp, Homo sapiens
agaatgaaaatgcttgtggattttggtactacctactgggggcagcttccaactggaaacacaccatgaaat

SEQ ID NO: 105081 - DNA, 70 bp, Homo sapiens
aaaatgcttgtggattttggtactacctactgggggcagcttccaactggaaacacaccatgaaatttac

SEQ ID NO: 105082 - DNA, 71 bp, Homo sapiens
gggcagcttccaactggaaacacaccatgaaatttaccagtttcagaccaaattggatagtcacttaaaaa

SEQ ID NO: 105083 - DNA, 70 bp, Homo sapiens
ttccaactggaaacacaccatgaaatttaccagtttcagaccaaattggatagtcacttaaaaaatccca

SEQ ID NO: 105084 - DNA, 72 bp, Homo sapiens
cacaccatgaaatttaccagtttcagaccaaattggatagtcacttaaaaaatcccatgtaagcatttgtac

SEQ ID NO: 105085 - DNA, 69 bp, Homo sapiens
gaaatttaccagtttcagaccaaattggatagtcacttaaaaaatcccatgtaagcatttgtacctttg

SEQ ID NO: 105086 - DNA, 71 bp, Homo sapiens
accaaattggatagtcacttaaaaaatcccatgtaagcatttgtacctttgtttcatatttaagctgtata

SEQ ID NO: 105087 - DNA, 72 bp, Homo sapiens
aatcccatgtaagcatttgtacctttgtttcatatttaagctgtatattttacatacctgggaacacctgga

SEQ ID NO: 105088 - DNA, 71 bp, Homo sapiens
gtaagcatttgtacctttgtttcatatttaagctgtatattttacatacctgggaacacctggaaagatct

SEQ ID NO: 105089 - DNA, 71 bp, Homo sapiens
cctttgtttcatatttaagctgtatattttacatacctgggaacacctggaaagatcttttggtatgactg

SEQ ID NO: 105090 - DNA, 74 bp, Homo sapiens
tttcatatttaagctgtatattttacatacctgggaacacctggaaagatcttttggtatgactgtctggagaa

SEQ ID NO: 105091 - DNA, 71 bp, Homo sapiens
tgtatattttacatacctgggaacacctggaaagatcttttggtatgactgtctggagaaggtcttaaact

SEQ ID NO: 105092 - DNA, 69 bp, Homo sapiens
ggaacacctggaaagatcttttggtatgactgtctggagaaggtcttaaacttttagattgttaaggaa

SEQ ID NO: 105093 - DNA, 67 bp, Homo sapiens
cctggaaagatcttttggtatgactgtctggagaaggtcttaaacttttagattgttaaggaacttt

SEQ ID NO: 105094 - DNA, 67 bp, Homo sapiens
cttttggtatgactgtctggagaaggtcttaaacttttagattgttaaggaacttttcagttcctta

SEQ ID NO: 105095 - DNA, 66 bp, Homo sapiens
gactgtctggagaaggtcttaaacttttagattgttaaggaacttttcagttccttacataaaacc

SEQ ID NO: 105096 - DNA, 67 bp, Homo sapiens
ttaaggaacttttcagttccttacataaaacctagagttaaaaacttgcgttctgaggccatcccta

SEQ ID NO: 105097 - DNA, 67 bp, Homo sapiens
acttttcagttccttacataaaacctagagttaaaaacttgcgttctgaggccatccctatttctct

SEQ ID NO: 105098 - DNA, 75 bp, Homo sapiens
ttacataaaacctagagttaaaaacttgcgttctgaggccatccctatttctcttgtgatgtgatatgttgagaa

SEQ ID NO: 105099 - DNA, 76 bp, Homo sapiens
acctagagttaaaaacttgcgttctgaggccatccctatttctcttgtgatgtgatatgttgagaagttatatata

SEQ ID NO: 105100 - DNA, 78 bp, Homo sapiens
agttaaaaacttgcgttctgaggccatccctatttctcttgtgatgtgatatgttgagaagttatatatacacatcca

SEQ ID NO: 105101 - DNA, 82 bp, Homo sapiens
atccctatttctcttgtgatgtgatatgttgagaagttatatatacacatccacatgggcaagccacatactcactaagaaa

SEQ ID NO: 105102 - DNA, 81 bp, Homo sapiens
ttctcttgtgatgtgatatgttgagaagttatatatacacatccacatgggcaagccacatactcactaagaaagtccttt

SEQ ID NO: 105103 - DNA, 80 bp, Homo sapiens
tgtgatatgttgagaagttatatatacacatccacatgggcaagccacatactcactaagaaagtccttttgtgtaaata

SEQ ID NO: 105104 - DNA, 77 bp, Homo sapiens
atgttgagaagttatatatacacatccacatgggcaagccacatactcactaagaaagtccttttgtgtaaatacca

SEQ ID NO: 105105 - DNA, 76 bp, Homo sapiens
tatatacacatccacatgggcaagccacatactcactaagaaagtccttttgtgtaaataccaggagctaaataaa

SEQ ID NO: 105106 - DNA, 72 bp, Homo sapiens
atccacatgggcaagccacatactcactaagaaagtccttttgtgtaaataccaggagctaaataaacattt

SEQ ID NO: 105107 - DNA, 72 bp, Homo sapiens
tgggcaagccacatactcactaagaaagtccttttgtgtaaataccaggagctaaataaacattttttcatg

SEQ ID NO: 105108 - DNA, 83 bp, Homo sapiens
gcatgagccactgaacccaaccattttaaagtgcatagttatgtggcactaaatatattcacactgttgtgcagccatcacca

SEQ ID NO: 105109 - DNA, 77 bp, Homo sapiens
actgaacccaaccattttaaagtgcatagttatgtggcactaaatatattcacactgttgtgcagccatcaccacct

SEQ ID NO: 105110 - DNA, 80 bp, Homo sapiens
ccaaccattttaaagtgcatagttatgtggcactaaatatattcacactgttgtgcagccatcaccaccttccatctcca

SEQ ID NO: 105111 - DNA, 75 bp, Homo sapiens
acactgttgtgcagccatcaccaccttccatctccagaacatttttgtcttcccaaatgaaaactctttacacat

SEQ ID NO: 105112 - DNA, 76 bp, Homo sapiens
gcagccatcaccaccttccatctccagaacatttttgtcttcccaaatgaaaactctttacacattgaaccagtca

SEQ ID NO: 105113 - DNA, 73 bp, Homo sapiens
atcaccaccttccatctccagaacatttttgtcttcccaaatgaaaactctttacacattgaaccagtcaaca

SEQ ID NO: 105114 - DNA, 71 bp, Homo sapiens
tctccagaacatttttgtcttcccaaatgaaaactctttacacattgaaccagtcaacaccacctccctgt

SEQ ID NO: 105115 - DNA, 69 bp, Homo sapiens
agaacatttttgtcttcccaaatgaaaactctttacacattgaaccagtcaacaccacctccctgtttc

SEQ ID NO: 105116 - DNA, 68 bp, Homo sapiens
tgtcttcccaaatgaaaactctttacacattgaaccagtcaacaccacctccctgtttccccctcccc

SEQ ID NO: 105117 - DNA, 69 bp, Homo sapiens
aatgaaaactctttacacattgaaccagtcaacaccacctccctgtttccccctcccccacagcctctg

SEQ ID NO: 105118 - DNA, 72 bp, Homo sapiens
tttacacattgaaccagtcaacaccacctccctgtttccccctcccccacagcctctggtaatcatcattct

SEQ ID NO: 105119 - DNA, 71 bp, Homo sapiens
aaccagtcaacaccacctccctgtttccccctcccccacagcctctggtaatcatcattcttctttctgtc

SEQ ID NO: 105120 - DNA, 75 bp, Homo sapiens
accacctccctgtttccccctcccccacagcctctggtaatcatcattcttctttctgtctctatcatgtgacta

SEQ ID NO: 105121 - DNA, 77 bp, Homo sapiens
tttccccctcccccacagcctctggtaatcatcattcttctttctgtctctatcatgtgactactctaggaaactca

SEQ ID NO: 105122 - DNA, 78 bp, Homo sapiens
ccctcccccacagcctctggtaatcatcattcttctttctgtctctatcatgtgactactctaggaaactcatctaag

SEQ ID NO: 105123 - DNA, 81 bp, Homo sapiens
acagcctctggtaatcatcattcttctttctgtctctatcatgtgactactctaggaaactcatctaagtgaaattgtaca

SEQ ID NO: 105124 - DNA, 80 bp, Homo sapiens
tctggtaatcatcattcttctttctgtctctatcatgtgactactctaggaaactcatctaagtgaaattgtacagtatt

SEQ ID NO: 105125 - DNA, 78 bp, Homo sapiens
ggtaatcatcattcttctttctgtctctatcatgtgactactctaggaaactcatctaagtgaaattgtacagtattt

SEQ ID NO: 105126 - DNA, 77 bp, Homo sapiens
aatcatcattcttctttctgtctctatcatgtgactactctaggaaactcatctaagtgaaattgtacagtattttt

SEQ ID NO: 105127 - DNA, 78 bp, Homo sapiens
ttcttctttctgtctctatcatgtgactactctaggaaactcatctaagtgaaattgtacagtattttttgtgtctga

SEQ ID NO: 105128 - DNA, 77 bp, Homo sapiens
tttctgtctctatcatgtgactactctaggaaactcatctaagtgaaattgtacagtattttttgtgtctgacttat

SEQ ID NO: 105129 - DNA, 77 bp, Homo sapiens
ttctgtctctatcatgtgactactctaggaaactcatctaagtgaaattgtacagtattttttgtgtctgacttatt

SEQ ID NO: 105130 - DNA, 77 bp, Homo sapiens
gtctctatcatgtgactactctaggaaactcatctaagtgaaattgtacagtattttttgtgtctgacttatttcac

SEQ ID NO: 105131 - DNA, 77 bp, Homo sapiens
atcatgtgactactctaggaaactcatctaagtgaaattgtacagtattttttgtgtctgacttatttcactcatta

SEQ ID NO: 105132 - DNA, 75 bp, Homo sapiens
gactactctaggaaactcatctaagtgaaattgtacagtattttttgtgtctgacttatttcactcattataatg

SEQ ID NO: 105133 - DNA, 76 bp, Homo sapiens
ctctaggaaactcatctaagtgaaattgtacagtattttttgtgtctgacttatttcactcattataatgtcctca

SEQ ID NO: 105134 - DNA, 78 bp, Homo sapiens
actcatctaagtgaaattgtacagtattttttgtgtctgacttatttcactcattataatgtcctcaagcttcatcca

SEQ ID NO: 105135 - DNA, 77 bp, Homo sapiens
aagtgaaattgtacagtattttttgtgtctgacttatttcactcattataatgtcctcaagcttcatccatattgta

SEQ ID NO: 105136 - DNA, 79 bp, Homo sapiens
tacagtattttttgtgtctgacttatttcactcattataatgtcctcaagcttcatccatattgtagcataagtccctc

SEQ ID NO: 105137 - DNA, 78 bp, Homo sapiens
ttttgtgtctgacttatttcactcattataatgtcctcaagcttcatccatattgtagcataagtccctcctttctaa

SEQ ID NO: 105138 - DNA, 76 bp, Homo sapiens
ctcaagcttcatccatattgtagcataagtccctcctttctaaggctaaacaatattccactgtatgtacaaacca

SEQ ID NO: 105139 - DNA, 73 bp, Homo sapiens
atccatattgtagcataagtccctcctttctaaggctaaacaatattccactgtatgtacaaaccacattttg

SEQ ID NO: 105140 - DNA, 71 bp, Homo sapiens
attgtagcataagtccctcctttctaaggctaaacaatattccactgtatgtacaaaccacattttgtttg

SEQ ID NO: 105141 - DNA, 70 bp, Homo sapiens
taagtccctcctttctaaggctaaacaatattccactgtatgtacaaaccacattttgtttgtccatttg

SEQ ID NO: 105142 - DNA, 73 bp, Homo sapiens
tttctaaggctaaacaatattccactgtatgtacaaaccacattttgtttgtccatttgtgtgtcaatgggct

SEQ ID NO: 105143 - DNA, 74 bp, Homo sapiens
taaacaatattccactgtatgtacaaaccacattttgtttgtccatttgtgtgtcaatgggcttgggttgcttc

SEQ ID NO: 105144 - DNA, 72 bp, Homo sapiens
ttccactgtatgtacaaaccacattttgtttgtccatttgtgtgtcaatgggcttgggttgcttccaccttt

SEQ ID NO: 105145 - DNA, 81 bp, Homo sapiens
caccttttggctattgcgacccatgctgctatgaacaagagtgcacaaatataaacattcttattcactctattgacataa

SEQ ID NO: 105146 - DNA, 82 bp, Homo sapiens
tttggctattgcgacccatgctgctatgaacaagagtgcacaaatataaacattcttattcactctattgacataatcattt

SEQ ID NO: 105147 - DNA, 78 bp, Homo sapiens
gcgacccatgctgctatgaacaagagtgcacaaatataaacattcttattcactctattgacataatcattttttttt

SEQ ID NO: 105148 - DNA, 76 bp, Homo sapiens
tgatttttaaaaattgtgacagactcaactatgatcaatcccttttgaaaatctgtggcaggataggataatatta

SEQ ID NO: 105149 - DNA, 75 bp, Homo sapiens
ttaaaaattgtgacagactcaactatgatcaatcccttttgaaaatctgtggcaggataggataatattaattaa

SEQ ID NO: 105150 - DNA, 79 bp, Homo sapiens
gtgacagactcaactatgatcaatcccttttgaaaatctgtggcaggataggataatattaattaattgatcttgaata

SEQ ID NO: 105151 - DNA, 74 bp, Homo sapiens
atgatcaatcccttttgaaaatctgtggcaggataggataatattaattaattgatcttgaatacttccaaccc

SEQ ID NO: 105152 - DNA, 74 bp, Homo sapiens
ccttttgaaaatctgtggcaggataggataatattaattaattgatcttgaatacttccaaccctcctgataga

SEQ ID NO: 105153 - DNA, 78 bp, Homo sapiens
gaaaatctgtggcaggataggataatattaattaattgatcttgaatacttccaaccctcctgatagattcatctatg

SEQ ID NO: 105154 - DNA, 77 bp, Homo sapiens
ggcaggataggataatattaattaattgatcttgaatacttccaaccctcctgatagattcatctatgtctttaata

SEQ ID NO: 105155 - DNA, 77 bp, Homo sapiens
atattaattaattgatcttgaatacttccaaccctcctgatagattcatctatgtctttaatagacacttgatggcc

SEQ ID NO: 105156 - DNA, 77 bp, Homo sapiens
aattaattgatcttgaatacttccaaccctcctgatagattcatctatgtctttaatagacacttgatggccgccca

SEQ ID NO: 105157 - DNA, 83 bp, Homo sapiens
tcttgaatacttccaaccctcctgatagattcatctatgtctttaatagacacttgatggccgcccagcatgtactgagcagc

SEQ ID NO: 105158 - DNA, 85 bp, Homo sapiens
ttccaaccctcctgatagattcatctatgtctttaatagacacttgatggccgcccagcatgtactgagcagcctgctggatctg

SEQ ID NO: 105159 - DNA, 87 bp, Homo sapiens
atagattcatctatgtctttaatagacacttgatggccgcccagcatgtactgagcagcctgctggatctggaggattctgcttcaa

SEQ ID NO: 105160 - DNA, 86 bp, Homo sapiens
tatgtctttaatagacacttgatggccgcccagcatgtactgagcagcctgctggatctggaggattctgcttcaagtgtctctaa

SEQ ID NO: 105161 - DNA, 85 bp, Homo sapiens
tttaatagacacttgatggccgcccagcatgtactgagcagcctgctggatctggaggattctgcttcaagtgtctctaacagag

SEQ ID NO: 105162 - DNA, 87 bp, Homo sapiens
ttgatggccgcccagcatgtactgagcagcctgctggatctggaggattctgcttcaagtgtctctaacagaggagacaggactgta

SEQ ID NO: 105163 - DNA, 83 bp, Homo sapiens
cccagcatgtactgagcagcctgctggatctggaggattctgcttcaagtgtctctaacagaggagacaggactgtaagtggg

SEQ ID NO: 105164 - DNA, 82 bp, Homo sapiens
tactgagcagcctgctggatctggaggattctgcttcaagtgtctctaacagaggagacaggactgtaagtggggggctcga

SEQ ID NO: 105165 - DNA, 80 bp, Homo sapiens
gctggatctggaggattctgcttcaagtgtctctaacagaggagacaggactgtaagtggggggctcgaggctggtgctc

SEQ ID NO: 105166 - DNA, 79 bp, Homo sapiens
atctggaggattctgcttcaagtgtctctaacagaggagacaggactgtaagtggggggctcgaggctggtgctctgtg

SEQ ID NO: 105167 - DNA, 80 bp, Homo sapiens
agtgtctctaacagaggagacaggactgtaagtggggggctcgaggctggtgctctgtgtgccacaagcaaggtgtgtgc

SEQ ID NO: 105168 - DNA, 77 bp, Homo sapiens
aggagacaggactgtaagtggggggctcgaggctggtgctctgtgtgccacaagcaaggtgtgtgccggttctagag

SEQ ID NO: 105169 - DNA, 77 bp, Homo sapiens
aggactgtaagtggggggctcgaggctggtgctctgtgtgccacaagcaaggtgtgtgccggttctagaggagaaga

SEQ ID NO: 105170 - DNA, 81 bp, Homo sapiens
ggggctcgaggctggtgctctgtgtgccacaagcaaggtgtgtgccggttctagaggagaagacagcagttgtgctttgcc

SEQ ID NO: 105171 - DNA, 81 bp, Homo sapiens
gctggtgctctgtgtgccacaagcaaggtgtgtgccggttctagaggagaagacagcagttgtgctttgcccttccaggat

SEQ ID NO: 105172 - DNA, 76 bp, Homo sapiens
ccacaagcaaggtgtgtgccggttctagaggagaagacagcagttgtgctttgcccttccaggattgtcaggaggg

SEQ ID NO: 105173 - DNA, 75 bp, Homo sapiens
ttctagaggagaagacagcagttgtgctttgcccttccaggattgtcaggaggggtttggtagcggtggagagac

SEQ ID NO: 105174 - DNA, 74 bp, Homo sapiens
aagacagcagttgtgctttgcccttccaggattgtcaggaggggtttggtagcggtggagagaccagaactgaa

SEQ ID NO: 105175 - DNA, 77 bp, Homo sapiens
tttgcccttccaggattgtcaggaggggtttggtagcggtggagagaccagaactgaagagaaatgcatgcaatgta

SEQ ID NO: 105176 - DNA, 77 bp, Homo sapiens
attgtcaggaggggtttggtagcggtggagagaccagaactgaagagaaatgcatgcaatgtaccatccctgggcta

SEQ ID NO: 105177 - DNA, 77 bp, Homo sapiens
gggtttggtagcggtggagagaccagaactgaagagaaatgcatgcaatgtaccatccctgggctaggaacttgatc

SEQ ID NO: 105178 - DNA, 78 bp, Homo sapiens
agagaccagaactgaagagaaatgcatgcaatgtaccatccctgggctaggaacttgatctctcttattttatgtaat

SEQ ID NO: 105179 - DNA, 76 bp, Homo sapiens
aactgaagagaaatgcatgcaatgtaccatccctgggctaggaacttgatctctcttattttatgtaattctttta

SEQ ID NO: 105180 - DNA, 74 bp, Homo sapiens
gaaatgcatgcaatgtaccatccctgggctaggaacttgatctctcttattttatgtaattcttttaatagttt

SEQ ID NO: 105181 - DNA, 71 bp, Homo sapiens
caatgtaccatccctgggctaggaacttgatctctcttattttatgtaattcttttaatagttttatgagg

SEQ ID NO: 105182 - DNA, 69 bp, Homo sapiens
tccctgggctaggaacttgatctctcttattttatgtaattcttttaatagttttatgaggtaggtact

SEQ ID NO: 105183 - DNA, 68 bp, Homo sapiens
aggaacttgatctctcttattttatgtaattcttttaatagttttatgaggtaggtactttactgtct

SEQ ID NO: 105184 - DNA, 69 bp, Homo sapiens
ctcttattttatgtaattcttttaatagttttatgaggtaggtactttactgtctttatatcaaagaca

SEQ ID NO: 105185 - DNA, 67 bp, Homo sapiens
gtaattcttttaatagttttatgaggtaggtactttactgtctttatatcaaagacaaggaattaag

SEQ ID NO: 105186 - DNA, 69 bp, Homo sapiens
taatagttttatgaggtaggtactttactgtctttatatcaaagacaaggaattaaggtttggtgagat

SEQ ID NO: 105187 - DNA, 70 bp, Homo sapiens
atgaggtaggtactttactgtctttatatcaaagacaaggaattaaggtttggtgagattagtttggcca

SEQ ID NO: 105188 - DNA, 70 bp, Homo sapiens
taggtactttactgtctttatatcaaagacaaggaattaaggtttggtgagattagtttggccaaggtca

SEQ ID NO: 105189 - DNA, 71 bp, Homo sapiens
tctttatatcaaagacaaggaattaaggtttggtgagattagtttggccaaggtcacatacctagtaagaa

SEQ ID NO: 105190 - DNA, 74 bp, Homo sapiens
atatcaaagacaaggaattaaggtttggtgagattagtttggccaaggtcacatacctagtaagaagcacatca

SEQ ID NO: 105191 - DNA, 73 bp, Homo sapiens
aattaaggtttggtgagattagtttggccaaggtcacatacctagtaagaagcacatcactttatagctctta

SEQ ID NO: 105192 - DNA, 76 bp, Homo sapiens
ttggtgagattagtttggccaaggtcacatacctagtaagaagcacatcactttatagctcttaactactctgtta

SEQ ID NO: 105193 - DNA, 76 bp, Homo sapiens
agattagtttggccaaggtcacatacctagtaagaagcacatcactttatagctcttaactactctgttacattga

SEQ ID NO: 105194 - DNA, 77 bp, Homo sapiens
acatacctagtaagaagcacatcactttatagctcttaactactctgttacattgatgttccaagcaggtattaaca

SEQ ID NO: 105195 - DNA, 75 bp, Homo sapiens
taagaagcacatcactttatagctcttaactactctgttacattgatgttccaagcaggtattaacagggtaagg

SEQ ID NO: 105196 - DNA, 73 bp, Homo sapiens
atcactttatagctcttaactactctgttacattgatgttccaagcaggtattaacagggtaagggagagaag

SEQ ID NO: 105197 - DNA, 71 bp, Homo sapiens
ttaactactctgttacattgatgttccaagcaggtattaacagggtaagggagagaaggggtgaagagtct

SEQ ID NO: 105198 - DNA, 73 bp, Homo sapiens
tactctgttacattgatgttccaagcaggtattaacagggtaagggagagaaggggtgaagagtcttccagaa

SEQ ID NO: 105199 - DNA, 71 bp, Homo sapiens
attgatgttccaagcaggtattaacagggtaagggagagaaggggtgaagagtcttccagaaagagagaaa

SEQ ID NO: 105200 - DNA, 72 bp, Homo sapiens
aagcaggtattaacagggtaagggagagaaggggtgaagagtcttccagaaagagagaaacagtgatctaca

SEQ ID NO: 105201 - DNA, 74 bp, Homo sapiens
attaacagggtaagggagagaaggggtgaagagtcttccagaaagagagaaacagtgatctacatcacatgggc

SEQ ID NO: 105202 - DNA, 80 bp, Homo sapiens
taagggagagaaggggtgaagagtcttccagaaagagagaaacagtgatctacatcacatgggctgatgaaggagcatgg

SEQ ID NO: 105203 - DNA, 80 bp, Homo sapiens
gtgaagagtcttccagaaagagagaaacagtgatctacatcacatgggctgatgaaggagcatgggggaatttggagaac

SEQ ID NO: 105204 - DNA, 81 bp, Homo sapiens
agtcttccagaaagagagaaacagtgatctacatcacatgggctgatgaaggagcatgggggaatttggagaactgcaaga

SEQ ID NO: 105205 - DNA, 81 bp, Homo sapiens
agagaaacagtgatctacatcacatgggctgatgaaggagcatgggggaatttggagaactgcaagatgtccttacaagta

SEQ ID NO: 105206 - DNA, 79 bp, Homo sapiens
aacagtgatctacatcacatgggctgatgaaggagcatgggggaatttggagaactgcaagatgtccttacaagtaggg

SEQ ID NO: 105207 - DNA, 79 bp, Homo sapiens
tgatgaaggagcatgggggaatttggagaactgcaagatgtccttacaagtagggtcaccacaattgcctgctggagtc

SEQ ID NO: 105208 - DNA, 75 bp, Homo sapiens
aggagcatgggggaatttggagaactgcaagatgtccttacaagtagggtcaccacaattgcctgctggagtccc

SEQ ID NO: 105209 - DNA, 74 bp, Homo sapiens
agaactgcaagatgtccttacaagtagggtcaccacaattgcctgctggagtcccccctggtggtgaggcctgg

SEQ ID NO: 105210 - DNA, 71 bp, Homo sapiens
atgtccttacaagtagggtcaccacaattgcctgctggagtcccccctggtggtgaggcctggggaagccc

SEQ ID NO: 105211 - DNA, 69 bp, Homo sapiens
aagtagggtcaccacaattgcctgctggagtcccccctggtggtgaggcctggggaagccccctgttcc

SEQ ID NO: 105212 - DNA, 72 bp, Homo sapiens
acaattgcctgctggagtcccccctggtggtgaggcctggggaagccccctgttccctcatctcttcctcat

SEQ ID NO: 105213 - DNA, 73 bp, Homo sapiens
ccctggtggtgaggcctggggaagccccctgttccctcatctcttcctcattgtccttctggtaggatagcac

SEQ ID NO: 105214 - DNA, 78 bp, Homo sapiens
gaagccccctgttccctcatctcttcctcattgtccttctggtaggatagcaccagtgacacctggagaggctggata

SEQ ID NO: 105215 - DNA, 81 bp, Homo sapiens
tgttccctcatctcttcctcattgtccttctggtaggatagcaccagtgacacctggagaggctggatattttctgctcaa

SEQ ID NO: 105216 - DNA, 78 bp, Homo sapiens
tctcttcctcattgtccttctggtaggatagcaccagtgacacctggagaggctggatattttctgctcaatttgggt

SEQ ID NO: 105217 - DNA, 78 bp, Homo sapiens
ttctggtaggatagcaccagtgacacctggagaggctggatattttctgctcaatttgggtttctgctgcttgggaat

SEQ ID NO: 105218 - DNA, 79 bp, Homo sapiens
atagcaccagtgacacctggagaggctggatattttctgctcaatttgggtttctgctgcttgggaatttctgacataa

SEQ ID NO: 105219 - DNA, 76 bp, Homo sapiens
ttttctgctcaatttgggtttctgctgcttgggaatttctgacataaacagatggaaaacatcagaatcattttta

SEQ ID NO: 105220 - DNA, 76 bp, Homo sapiens
ctcaatttgggtttctgctgcttgggaatttctgacataaacagatggaaaacatcagaatcatttttactgaata

SEQ ID NO: 105221 - DNA, 78 bp, Homo sapiens
tgggaatttctgacataaacagatggaaaacatcagaatcatttttactgaataagtatctaccattgattgagcgct

SEQ ID NO: 105222 - DNA, 78 bp, Homo sapiens
atggaaaacatcagaatcatttttactgaataagtatctaccattgattgagcgcttatactaagccagacactattc

SEQ ID NO: 105223 - DNA, 78 bp, Homo sapiens
acatcagaatcatttttactgaataagtatctaccattgattgagcgcttatactaagccagacactattctaagtac

SEQ ID NO: 105224 - DNA, 76 bp, Homo sapiens
ttttactgaataagtatctaccattgattgagcgcttatactaagccagacactattctaagtacttcaccttcat

SEQ ID NO: 105225 - DNA, 79 bp, Homo sapiens
taccattgattgagcgcttatactaagccagacactattctaagtacttcaccttcattatcattctaaatcttcacaa

SEQ ID NO: 105226 - DNA, 76 bp, Homo sapiens
agcgcttatactaagccagacactattctaagtacttcaccttcattatcattctaaatcttcacaacaatcctta

SEQ ID NO: 105227 - DNA, 75 bp, Homo sapiens
tactaagccagacactattctaagtacttcaccttcattatcattctaaatcttcacaacaatccttagaggtag

SEQ ID NO: 105228 - DNA, 76 bp, Homo sapiens
cagacactattctaagtacttcaccttcattatcattctaaatcttcacaacaatccttagaggtaggttctatga

SEQ ID NO: 105229 - DNA, 73 bp, Homo sapiens
ctaagtacttcaccttcattatcattctaaatcttcacaacaatccttagaggtaggttctatgattacccta

SEQ ID NO: 105230 - DNA, 73 bp, Homo sapiens
caccttcattatcattctaaatcttcacaacaatccttagaggtaggttctatgattaccctattttatagag

SEQ ID NO: 105231 - DNA, 72 bp, Homo sapiens
tatcattctaaatcttcacaacaatccttagaggtaggttctatgattaccctattttatagagggagaaaa

SEQ ID NO: 105232 - DNA, 74 bp, Homo sapiens
aggtaggttctatgattaccctattttatagagggagaaaatagatagcaattggcatggccttgattagaata

SEQ ID NO: 105233 - DNA, 76 bp, Homo sapiens
tgattaccctattttatagagggagaaaatagatagcaattggcatggccttgattagaataatatgtaagcccaa

SEQ ID NO: 105234 - DNA, 77 bp, Homo sapiens
gagaaaatagatagcaattggcatggccttgattagaataatatgtaagcccaaaaaactacagatggtcattacca

SEQ ID NO: 105235 - DNA, 76 bp, Homo sapiens
ttggcatggccttgattagaataatatgtaagcccaaaaaactacagatggtcattaccaatgtcctatttatgta

SEQ ID NO: 105236 - DNA, 74 bp, Homo sapiens
gccttgattagaataatatgtaagcccaaaaaactacagatggtcattaccaatgtcctatttatgtattagac

SEQ ID NO: 105237 - DNA, 72 bp, Homo sapiens
aatatgtaagcccaaaaaactacagatggtcattaccaatgtcctatttatgtattagaccctaacagccaa

SEQ ID NO: 105238 - DNA, 71 bp, Homo sapiens
taagcccaaaaaactacagatggtcattaccaatgtcctatttatgtattagaccctaacagccaactttc

SEQ ID NO: 105239 - DNA, 76 bp, Homo sapiens
aactacagatggtcattaccaatgtcctatttatgtattagaccctaacagccaactttctcaccttagcatgata

SEQ ID NO: 105240 - DNA, 76 bp, Homo sapiens
attaccaatgtcctatttatgtattagaccctaacagccaactttctcaccttagcatgatacagttatgtcttga

SEQ ID NO: 105241 - DNA, 75 bp, Homo sapiens
aatgtcctatttatgtattagaccctaacagccaactttctcaccttagcatgatacagttatgtcttgattacc

SEQ ID NO: 105242 - DNA, 77 bp, Homo sapiens
cctaacagccaactttctcaccttagcatgatacagttatgtcttgattacctctgttatggtatggcttatccttg

SEQ ID NO: 105243 - DNA, 75 bp, Homo sapiens
aactttctcaccttagcatgatacagttatgtcttgattacctctgttatggtatggcttatccttggccgttag

SEQ ID NO: 105244 - DNA, 74 bp, Homo sapiens
accttagcatgatacagttatgtcttgattacctctgttatggtatggcttatccttggccgttaggacgggtg

SEQ ID NO: 105245 - DNA, 76 bp, Homo sapiens
atacagttatgtcttgattacctctgttatggtatggcttatccttggccgttaggacgggtggctgtatagctca

SEQ ID NO: 105246 - DNA, 73 bp, Homo sapiens
attacctctgttatggtatggcttatccttggccgttaggacgggtggctgtatagctcagtgtgccccaaaa

SEQ ID NO: 105247 - DNA, 74 bp, Homo sapiens
cttatccttggccgttaggacgggtggctgtatagctcagtgtgccccaaaagaaaaataatgactatcaagca

SEQ ID NO: 105248 - DNA, 72 bp, Homo sapiens
ggccgttaggacgggtggctgtatagctcagtgtgccccaaaagaaaaataatgactatcaagcacccaggg

SEQ ID NO: 105249 - DNA, 78 bp, Homo sapiens
tggctgtatagctcagtgtgccccaaaagaaaaataatgactatcaagcacccaggggctgctgattccctttcatct

SEQ ID NO: 105250 - DNA, 78 bp, Homo sapiens
aaaataatgactatcaagcacccaggggctgctgattccctttcatcttgtgcaacagtaaagatgaaatatctatat

SEQ ID NO: 105251 - DNA, 78 bp, Homo sapiens
aatgactatcaagcacccaggggctgctgattccctttcatcttgtgcaacagtaaagatgaaatatctatatttaaa

SEQ ID NO: 105252 - DNA, 75 bp, Homo sapiens
cccaggggctgctgattccctttcatcttgtgcaacagtaaagatgaaatatctatatttaaattgggctcctta

SEQ ID NO: 105253 - DNA, 75 bp, Homo sapiens
ctgctgattccctttcatcttgtgcaacagtaaagatgaaatatctatatttaaattgggctccttaagaggtgg

SEQ ID NO: 105254 - DNA, 75 bp, Homo sapiens
ttccctttcatcttgtgcaacagtaaagatgaaatatctatatttaaattgggctccttaagaggtgggctgtca

SEQ ID NO: 105255 - DNA, 76 bp, Homo sapiens
tgtgcaacagtaaagatgaaatatctatatttaaattgggctccttaagaggtgggctgtcactgtcagttagctt

SEQ ID NO: 105256 - DNA, 73 bp, Homo sapiens
taaagatgaaatatctatatttaaattgggctccttaagaggtgggctgtcactgtcagttagctttgtggtt

SEQ ID NO: 105257 - DNA, 71 bp, Homo sapiens
tatttaaattgggctccttaagaggtgggctgtcactgtcagttagctttgtggttttcatttctttccag

SEQ ID NO: 105258 - DNA, 73 bp, Homo sapiens
tccttaagaggtgggctgtcactgtcagttagctttgtggttttcatttctttccagttcagaattggatttg

SEQ ID NO: 105259 - DNA, 75 bp, Homo sapiens
tgggctgtcactgtcagttagctttgtggttttcatttctttccagttcagaattggatttgtgaagaaactgaa

SEQ ID NO: 105260 - DNA, 75 bp, Homo sapiens
actgtcagttagctttgtggttttcatttctttccagttcagaattggatttgtgaagaaactgaatagtgatga

SEQ ID NO: 105261 - DNA, 73 bp, Homo sapiens
agttagctttgtggttttcatttctttccagttcagaattggatttgtgaagaaactgaatagtgatgagacc

SEQ ID NO: 105262 - DNA, 75 bp, Homo sapiens
tttcatttctttccagttcagaattggatttgtgaagaaactgaatagtgatgagaccggccctgttcaccctga

SEQ ID NO: 105263 - DNA, 77 bp, Homo sapiens
tctttccagttcagaattggatttgtgaagaaactgaatagtgatgagaccggccctgttcaccctgatgacagtta

SEQ ID NO: 105264 - DNA, 76 bp, Homo sapiens
gaattggatttgtgaagaaactgaatagtgatgagaccggccctgttcaccctgatgacagttatgcacgttttta

SEQ ID NO: 105265 - DNA, 74 bp, Homo sapiens
atttgtgaagaaactgaatagtgatgagaccggccctgttcaccctgatgacagttatgcacgtttttaagttg

SEQ ID NO: 105266 - DNA, 76 bp, Homo sapiens
actgaatagtgatgagaccggccctgttcaccctgatgacagttatgcacgtttttaagttgtgacgtcatgaaaa

SEQ ID NO: 105267 - DNA, 76 bp, Homo sapiens
tagtgatgagaccggccctgttcaccctgatgacagttatgcacgtttttaagttgtgacgtcatgaaaacttgtg

SEQ ID NO: 105268 - DNA, 75 bp, Homo sapiens
accctgatgacagttatgcacgtttttaagttgtgacgtcatgaaaacttgtggcacctttctgaacagccagaa

SEQ ID NO: 105269 - DNA, 71 bp, Homo sapiens
acgtttttaagttgtgacgtcatgaaaacttgtggcacctttctgaacagccagaacttcatttcaaacaa

SEQ ID NO: 105270 - DNA, 72 bp, Homo sapiens
aagttgtgacgtcatgaaaacttgtggcacctttctgaacagccagaacttcatttcaaacaaaactctaat

SEQ ID NO: 105271 - DNA, 72 bp, Homo sapiens
catgaaaacttgtggcacctttctgaacagccagaacttcatttcaaacaaaactctaattatagttgttac

SEQ ID NO: 105272 - DNA, 66 bp, Homo sapiens
agccagaacttcatttcaaacaaaactctaattatagttgttacttaaaaaaagtccaaactctaa

SEQ ID NO: 105273 - DNA, 64 bp, Homo sapiens
tcaaacaaaactctaattatagttgttacttaaaaaaagtccaaactctaaaaaccataaccta

SEQ ID NO: 105274 - DNA, 64 bp, Homo sapiens
ctctaattatagttgttacttaaaaaaagtccaaactctaaaaaccataacctagttgttgacc

SEQ ID NO: 105275 - DNA, 64 bp, Homo sapiens
tagttgttacttaaaaaaagtccaaactctaaaaaccataacctagttgttgacctagtttata

SEQ ID NO: 105276 - DNA, 65 bp, Homo sapiens
taaaaaaagtccaaactctaaaaaccataacctagttgttgacctagtttataaagtctaggcat

SEQ ID NO: 105277 - DNA, 67 bp, Homo sapiens
tccaaactctaaaaaccataacctagttgttgacctagtttataaagtctaggcattccacgggaat

SEQ ID NO: 105278 - DNA, 70 bp, Homo sapiens
taaaaaccataacctagttgttgacctagtttataaagtctaggcattccacgggaattcaaggtgcaca

SEQ ID NO: 105279 - DNA, 70 bp, Homo sapiens
ataacctagttgttgacctagtttataaagtctaggcattccacgggaattcaaggtgcacaaaggccaa

SEQ ID NO: 105280 - DNA, 71 bp, Homo sapiens
ttgttgacctagtttataaagtctaggcattccacgggaattcaaggtgcacaaaggccaacctgaacttg

SEQ ID NO: 105281 - DNA, 71 bp, Homo sapiens
agtttataaagtctaggcattccacgggaattcaaggtgcacaaaggccaacctgaacttgtggctgaccc

SEQ ID NO: 105282 - DNA, 75 bp, Homo sapiens
tctaggcattccacgggaattcaaggtgcacaaaggccaacctgaacttgtggctgaccccataccttctgctct

SEQ ID NO: 105283 - DNA, 72 bp, Homo sapiens
acgggaattcaaggtgcacaaaggccaacctgaacttgtggctgaccccataccttctgctcttcttatatt

SEQ ID NO: 105284 - DNA, 74 bp, Homo sapiens
aaaggccaacctgaacttgtggctgaccccataccttctgctcttcttatatttcccatttcagtgaacagcaa

SEQ ID NO: 105285 - DNA, 77 bp, Homo sapiens
aacttgtggctgaccccataccttctgctcttcttatatttcccatttcagtgaacagcaattctgtcaaccatcat

SEQ ID NO: 105286 - DNA, 79 bp, Homo sapiens
tgaccccataccttctgctcttcttatatttcccatttcagtgaacagcaattctgtcaaccatcattcaaatgcaaaa

SEQ ID NO: 105287 - DNA, 78 bp, Homo sapiens
tcttcttatatttcccatttcagtgaacagcaattctgtcaaccatcattcaaatgcaaaagctcaagtctttctttc

SEQ ID NO: 105288 - DNA, 77 bp, Homo sapiens
atatttcccatttcagtgaacagcaattctgtcaaccatcattcaaatgcaaaagctcaagtctttctttcccaaca

SEQ ID NO: 105289 - DNA, 79 bp, Homo sapiens
gtgaacagcaattctgtcaaccatcattcaaatgcaaaagctcaagtctttctttcccaacactgcaactctgttgatt

SEQ ID NO: 105290 - DNA, 76 bp, Homo sapiens
aattctgtcaaccatcattcaaatgcaaaagctcaagtctttctttcccaacactgcaactctgttgattttacca

SEQ ID NO: 105291 - DNA, 73 bp, Homo sapiens
aaccatcattcaaatgcaaaagctcaagtctttctttcccaacactgcaactctgttgattttaccacctccc

SEQ ID NO: 105292 - DNA, 73 bp, Homo sapiens
attcaaatgcaaaagctcaagtctttctttcccaacactgcaactctgttgattttaccacctccccatcctc

SEQ ID NO: 105293 - DNA, 71 bp, Homo sapiens
aaaagctcaagtctttctttcccaacactgcaactctgttgattttaccacctccccatcctctggttatg

SEQ ID NO: 105294 - DNA, 72 bp, Homo sapiens
tttctttcccaacactgcaactctgttgattttaccacctccccatcctctggttatgtccctcacctcctc

SEQ ID NO: 105295 - DNA, 73 bp, Homo sapiens
tctgttgattttaccacctccccatcctctggttatgtccctcacctcctccccactgctggtctctggagtt

SEQ ID NO: 105296 - DNA, 71 bp, Homo sapiens
ttttaccacctccccatcctctggttatgtccctcacctcctccccactgctggtctctggagtttactta

SEQ ID NO: 105297 - DNA, 74 bp, Homo sapiens
ccatcctctggttatgtccctcacctcctccccactgctggtctctggagtttacttagtagatctcttcgatt

SEQ ID NO: 105298 - DNA, 75 bp, Homo sapiens
tggttatgtccctcacctcctccccactgctggtctctggagtttacttagtagatctcttcgatttggccttga

SEQ ID NO: 105299 - DNA, 75 bp, Homo sapiens
tcacctcctccccactgctggtctctggagtttacttagtagatctcttcgatttggccttgactcccaccttgc

SEQ ID NO: 105300 - DNA, 79 bp, Homo sapiens
ctggtctctggagtttacttagtagatctcttcgatttggccttgactcccaccttgccatcttccacgctgctgctga

SEQ ID NO: 105301 - DNA, 80 bp, Homo sapiens
agtttacttagtagatctcttcgatttggccttgactcccaccttgccatcttccacgctgctgctgagccatgtctctc

SEQ ID NO: 105302 - DNA, 81 bp, Homo sapiens
tagtagatctcttcgatttggccttgactcccaccttgccatcttccacgctgctgctgagccatgtctctcgcgttaaaa

SEQ ID NO: 105303 - DNA, 81 bp, Homo sapiens
ttcgatttggccttgactcccaccttgccatcttccacgctgctgctgagccatgtctctcgcgttaaaatctgaacacat

SEQ ID NO: 105304 - DNA, 82 bp, Homo sapiens
ttgactcccaccttgccatcttccacgctgctgctgagccatgtctctcgcgttaaaatctgaacacatttccctgcttgaa

SEQ ID NO: 105305 - DNA, 82 bp, Homo sapiens
cttgccatcttccacgctgctgctgagccatgtctctcgcgttaaaatctgaacacatttccctgcttgaaagccttctata

SEQ ID NO: 105306 - DNA, 80 bp, Homo sapiens
atcttccacgctgctgctgagccatgtctctcgcgttaaaatctgaacacatttccctgcttgaaagccttctatagtcc

SEQ ID NO: 105307 - DNA, 79 bp, Homo sapiens
ctgctgagccatgtctctcgcgttaaaatctgaacacatttccctgcttgaaagccttctatagtccccagtgccagga

SEQ ID NO: 105308 - DNA, 74 bp, Homo sapiens
atgtctctcgcgttaaaatctgaacacatttccctgcttgaaagccttctatagtccccagtgccaggaggtcc

SEQ ID NO: 105309 - DNA, 73 bp, Homo sapiens
cgttaaaatctgaacacatttccctgcttgaaagccttctatagtccccagtgccaggaggtcctggccactg

SEQ ID NO: 105310 - DNA, 74 bp, Homo sapiens
aatctgaacacatttccctgcttgaaagccttctatagtccccagtgccaggaggtcctggccactgggcccac

SEQ ID NO: 105311 - DNA, 75 bp, Homo sapiens
atttccctgcttgaaagccttctatagtccccagtgccaggaggtcctggccactgggcccactgtccacatctc

SEQ ID NO: 105312 - DNA, 75 bp, Homo sapiens
cttgaaagccttctatagtccccagtgccaggaggtcctggccactgggcccactgtccacatctcctgtcttcc

SEQ ID NO: 105313 - DNA, 76 bp, Homo sapiens
tatagtccccagtgccaggaggtcctggccactgggcccactgtccacatctcctgtcttccccctcttgaatcta

SEQ ID NO: 105314 - DNA, 77 bp, Homo sapiens
tcctggccactgggcccactgtccacatctcctgtcttccccctcttgaatctaatgctgttgttgtattgacattt

SEQ ID NO: 105315 - DNA, 75 bp, Homo sapiens
tgggcccactgtccacatctcctgtcttccccctcttgaatctaatgctgttgttgtattgacatttttgtgttt

SEQ ID NO: 105316 - DNA, 75 bp, Homo sapiens
actgtccacatctcctgtcttccccctcttgaatctaatgctgttgttgtattgacatttttgtgttttcatacg

SEQ ID NO: 105317 - DNA, 75 bp, Homo sapiens
tcctgtcttccccctcttgaatctaatgctgttgttgtattgacatttttgtgttttcatacgtgacagggcagt

SEQ ID NO: 105318 - DNA, 75 bp, Homo sapiens
ccctcttgaatctaatgctgttgttgtattgacatttttgtgttttcatacgtgacagggcagttcacaagttgg

SEQ ID NO: 105319 - DNA, 75 bp, Homo sapiens
ttgttgtattgacatttttgtgttttcatacgtgacagggcagttcacaagttggggcctttactcactcagtga

SEQ ID NO: 105320 - DNA, 74 bp, Homo sapiens
tattgacatttttgtgttttcatacgtgacagggcagttcacaagttggggcctttactcactcagtgacccac

SEQ ID NO: 105321 - DNA, 70 bp, Homo sapiens
ttttgtgttttcatacgtgacagggcagttcacaagttggggcctttactcactcagtgacccacccccc

SEQ ID NO: 105322 - DNA, 72 bp, Homo sapiens
tcatacgtgacagggcagttcacaagttggggcctttactcactcagtgacccaccccccgccatggtggtt

SEQ ID NO: 105323 - DNA, 69 bp, Homo sapiens
agggcagttcacaagttggggcctttactcactcagtgacccaccccccgccatggtggttttgcctct

SEQ ID NO: 105324 - DNA, 69 bp, Homo sapiens
acaagttggggcctttactcactcagtgacccaccccccgccatggtggttttgcctcttcccctatga

SEQ ID NO: 105325 - DNA, 73 bp, Homo sapiens
tttactcactcagtgacccaccccccgccatggtggttttgcctcttcccctatgatggctaacttctcttca

SEQ ID NO: 105326 - DNA, 72 bp, Homo sapiens
agtgacccaccccccgccatggtggttttgcctcttcccctatgatggctaacttctcttcacaacagctta

SEQ ID NO: 105327 - DNA, 74 bp, Homo sapiens
cccccgccatggtggttttgcctcttcccctatgatggctaacttctcttcacaacagcttacccatcaatcca

SEQ ID NO: 105328 - DNA, 73 bp, Homo sapiens
cctcttcccctatgatggctaacttctcttcacaacagcttacccatcaatccaacttgggatcctgtccctt

SEQ ID NO: 105329 - DNA, 74 bp, Homo sapiens
taacttctcttcacaacagcttacccatcaatccaacttgggatcctgtccctttgctaggcccaacttagctc

SEQ ID NO: 105330 - DNA, 75 bp, Homo sapiens
ttcacaacagcttacccatcaatccaacttgggatcctgtccctttgctaggcccaacttagctcctctcctcat

SEQ ID NO: 105331 - DNA, 72 bp, Homo sapiens
agcttacccatcaatccaacttgggatcctgtccctttgctaggcccaacttagctcctctcctcatttcct

SEQ ID NO: 105332 - DNA, 73 bp, Homo sapiens
atcaatccaacttgggatcctgtccctttgctaggcccaacttagctcctctcctcatttccttcaattcatt

SEQ ID NO: 105333 - DNA, 72 bp, Homo sapiens
ttgggatcctgtccctttgctaggcccaacttagctcctctcctcatttccttcaattcatttcaactaaat

SEQ ID NO: 105334 - DNA, 74 bp, Homo sapiens
ctttgctaggcccaacttagctcctctcctcatttccttcaattcatttcaactaaatttcagttcatctttga

SEQ ID NO: 105335 - DNA, 75 bp, Homo sapiens
ctaggcccaacttagctcctctcctcatttccttcaattcatttcaactaaatttcagttcatctttgatgacca

SEQ ID NO: 105336 - DNA, 80 bp, Homo sapiens
atttcaactaaatttcagttcatctttgatgaccacttgctaagtgctaggctctgtgctctgtgttgggaatatggaga

SEQ ID NO: 105337 - DNA, 83 bp, Homo sapiens
aatttcagttcatctttgatgaccacttgctaagtgctaggctctgtgctctgtgttgggaatatggagatgaatggaacaca

SEQ ID NO: 105338 - DNA, 82 bp, Homo sapiens
tttgatgaccacttgctaagtgctaggctctgtgctctgtgttgggaatatggagatgaatggaacacagtctctttcctta

SEQ ID NO: 105339 - DNA, 78 bp, Homo sapiens
tgctaggctctgtgctctgtgttgggaatatggagatgaatggaacacagtctctttccttaaggtacaacaggttaa

SEQ ID NO: 105340 - DNA, 77 bp, Homo sapiens
tgtgctctgtgttgggaatatggagatgaatggaacacagtctctttccttaaggtacaacaggttaatactcaata

SEQ ID NO: 105341 - DNA, 75 bp, Homo sapiens
tgttgggaatatggagatgaatggaacacagtctctttccttaaggtacaacaggttaatactcaatagctacaa

SEQ ID NO: 105342 - DNA, 73 bp, Homo sapiens
aatggaacacagtctctttccttaaggtacaacaggttaatactcaatagctacaaggtgtagaggtggcaca

SEQ ID NO: 105343 - DNA, 72 bp, Homo sapiens
agtctctttccttaaggtacaacaggttaatactcaatagctacaaggtgtagaggtggcacagggtggctg

SEQ ID NO: 105344 - DNA, 74 bp, Homo sapiens
ttaaggtacaacaggttaatactcaatagctacaaggtgtagaggtggcacagggtggctggtgactaattgtc

SEQ ID NO: 105345 - DNA, 74 bp, Homo sapiens
acaacaggttaatactcaatagctacaaggtgtagaggtggcacagggtggctggtgactaattgtcttggaag

SEQ ID NO: 105346 - DNA, 76 bp, Homo sapiens
aatactcaatagctacaaggtgtagaggtggcacagggtggctggtgactaattgtcttggaaggcacacaattcc

SEQ ID NO: 105347 - DNA, 73 bp, Homo sapiens
aattgtcttggaaggcacacaattcctggagctagtgatatcagggtagagtttgttaaaggacagtaggaaa

SEQ ID NO: 105348 - DNA, 74 bp, Homo sapiens
aaggcacacaattcctggagctagtgatatcagggtagagtttgttaaaggacagtaggaaattgacctgtggc

SEQ ID NO: 105349 - DNA, 74 bp, Homo sapiens
aattcctggagctagtgatatcagggtagagtttgttaaaggacagtaggaaattgacctgtggctgtggtgtg

SEQ ID NO: 105350 - DNA, 77 bp, Homo sapiens
tagtgatatcagggtagagtttgttaaaggacagtaggaaattgacctgtggctgtggtgtgttggtgatgagaaga

SEQ ID NO: 105351 - DNA, 74 bp, Homo sapiens
agggtagagtttgttaaaggacagtaggaaattgacctgtggctgtggtgtgttggtgatgagaagaggagaga

SEQ ID NO: 105352 - DNA, 83 bp, Homo sapiens
aaattgacctgtggctgtggtgtgttggtgatgagaagaggagagacattcgagttggaataagcaacatgtgcacagtcatg

SEQ ID NO: 105353 - DNA, 82 bp, Homo sapiens
tgtggtgtgttggtgatgagaagaggagagacattcgagttggaataagcaacatgtgcacagtcatggtggtacaaacgaa

SEQ ID NO: 105354 - DNA, 80 bp, Homo sapiens
tggtgatgagaagaggagagacattcgagttggaataagcaacatgtgcacagtcatggtggtacaaacgaagaaggtgt

SEQ ID NO: 105355 - DNA, 76 bp, Homo sapiens
aagaggagagacattcgagttggaataagcaacatgtgcacagtcatggtggtacaaacgaagaaggtgtttggga

SEQ ID NO: 105356 - DNA, 76 bp, Homo sapiens
agacattcgagttggaataagcaacatgtgcacagtcatggtggtacaaacgaagaaggtgtttgggagactccta

SEQ ID NO: 105357 - DNA, 76 bp, Homo sapiens
tggaataagcaacatgtgcacagtcatggtggtacaaacgaagaaggtgtttgggagactcctatgcggtttagta

SEQ ID NO: 105358 - DNA, 75 bp, Homo sapiens
aacatgtgcacagtcatggtggtacaaacgaagaaggtgtttgggagactcctatgcggtttagtatcactgaaa

SEQ ID NO: 105359 - DNA, 71 bp, Homo sapiens
acagtcatggtggtacaaacgaagaaggtgtttgggagactcctatgcggtttagtatcactgaaaaagtc

SEQ ID NO: 105360 - DNA, 69 bp, Homo sapiens
atggtggtacaaacgaagaaggtgtttgggagactcctatgcggtttagtatcactgaaaaagtctcct

SEQ ID NO: 105361 - DNA, 71 bp, Homo sapiens
aaacgaagaaggtgtttgggagactcctatgcggtttagtatcactgaaaaagtctccttgggcatgagac

SEQ ID NO: 105362 - DNA, 73 bp, Homo sapiens
tgtttgggagactcctatgcggtttagtatcactgaaaaagtctccttgggcatgagaccaaagaggaacgtg

SEQ ID NO: 105363 - DNA, 74 bp, Homo sapiens
tcctatgcggtttagtatcactgaaaaagtctccttgggcatgagaccaaagaggaacgtgggagccatttgaa

SEQ ID NO: 105364 - DNA, 75 bp, Homo sapiens
ttagtatcactgaaaaagtctccttgggcatgagaccaaagaggaacgtgggagccatttgaaggagtatcatgt

SEQ ID NO: 105365 - DNA, 73 bp, Homo sapiens
actgaaaaagtctccttgggcatgagaccaaagaggaacgtgggagccatttgaaggagtatcatgtttatta

SEQ ID NO: 105366 - DNA, 77 bp, Homo sapiens
tccttgggcatgagaccaaagaggaacgtgggagccatttgaaggagtatcatgtttattatgctgaagagttcaat

SEQ ID NO: 105367 - DNA, 76 bp, Homo sapiens
atgagaccaaagaggaacgtgggagccatttgaaggagtatcatgtttattatgctgaagagttcaattttatctc

SEQ ID NO: 105368 - DNA, 73 bp, Homo sapiens
aaagaggaacgtgggagccatttgaaggagtatcatgtttattatgctgaagagttcaattttatctctttcc

SEQ ID NO: 105369 - DNA, 74 bp, Homo sapiens
acgtgggagccatttgaaggagtatcatgtttattatgctgaagagttcaattttatctctttcctgaaatttc

SEQ ID NO: 105370 - DNA, 76 bp, Homo sapiens
catgtttattatgctgaagagttcaattttatctctttcctgaaatttccatttcttccctgtctcaatcagcttg

SEQ ID NO: 105371 - DNA, 77 bp, Homo sapiens
ttattatgctgaagagttcaattttatctctttcctgaaatttccatttcttccctgtctcaatcagcttgggctgc

SEQ ID NO: 105372 - DNA, 74 bp, Homo sapiens
aagagttcaattttatctctttcctgaaatttccatttcttccctgtctcaatcagcttgggctgctataacaa

SEQ ID NO: 105373 - DNA, 82 bp, Homo sapiens
aggctgggaagtctaagattaagattcagctctggagggagcctgcttcctggtttgcatatggccatgctgtcattgtatc

SEQ ID NO: 105374 - DNA, 84 bp, Homo sapiens
agtctaagattaagattcagctctggagggagcctgcttcctggtttgcatatggccatgctgtcattgtatcctcacattgta

SEQ ID NO: 105375 - DNA, 87 bp, Homo sapiens
attaagattcagctctggagggagcctgcttcctggtttgcatatggccatgctgtcattgtatcctcacattgtatgtgtgagaga

SEQ ID NO: 105376 - DNA, 87 bp, Homo sapiens
agctctggagggagcctgcttcctggtttgcatatggccatgctgtcattgtatcctcacattgtatgtgtgagagagaggaggcaa

SEQ ID NO: 105377 - DNA, 89 bp, Homo sapiens
cctgcttcctggtttgcatatggccatgctgtcattgtatcctcacattgtatgtgtgagagagaggaggcaagctctcatgtctcttg

SEQ ID NO: 105378 - DNA, 89 bp, Homo sapiens
ttcctggtttgcatatggccatgctgtcattgtatcctcacattgtatgtgtgagagagaggaggcaagctctcatgtctcttgttata

SEQ ID NO: 105379 - DNA, 87 bp, Homo sapiens
atatggccatgctgtcattgtatcctcacattgtatgtgtgagagagaggaggcaagctctcatgtctcttgttataagggcactaa

SEQ ID NO: 105380 - DNA, 87 bp, Homo sapiens
tgtcattgtatcctcacattgtatgtgtgagagagaggaggcaagctctcatgtctcttgttataagggcactaattctattcatga

SEQ ID NO: 105381 - DNA, 84 bp, Homo sapiens
tatcctcacattgtatgtgtgagagagaggaggcaagctctcatgtctcttgttataagggcactaattctattcatgaagatt

SEQ ID NO: 105382 - DNA, 87 bp, Homo sapiens
attgtatgtgtgagagagaggaggcaagctctcatgtctcttgttataagggcactaattctattcatgaagatttcatcatcatga

SEQ ID NO: 105383 - DNA, 83 bp, Homo sapiens
agagagaggaggcaagctctcatgtctcttgttataagggcactaattctattcatgaagatttcatcatcatgacctaatta

SEQ ID NO: 105384 - DNA, 81 bp, Homo sapiens
agaggaggcaagctctcatgtctcttgttataagggcactaattctattcatgaagatttcatcatcatgacctaattact

SEQ ID NO: 105385 - DNA, 81 bp, Homo sapiens
ggaggcaagctctcatgtctcttgttataagggcactaattctattcatgaagatttcatcatcatgacctaattacttcc

SEQ ID NO: 105386 - DNA, 74 bp, Homo sapiens
gggcttcaacatatgacttttgggaggatacaaacattgagtccttaacatccccaatctgtgtttcccagtga

SEQ ID NO: 105387 - DNA, 77 bp, Homo sapiens
tttgggaggatacaaacattgagtccttaacatccccaatctgtgtttcccagtgagttctatgcaggtgcaatgaa

SEQ ID NO: 105388 - DNA, 76 bp, Homo sapiens
taacatccccaatctgtgtttcccagtgagttctatgcaggtgcaatgaagtccataaactcttcccaaactatgt

SEQ ID NO: 105389 - DNA, 76 bp, Homo sapiens
agtgagttctatgcaggtgcaatgaagtccataaactcttcccaaactatgttatcctttagaacagttgtatgaa

SEQ ID NO: 105390 - DNA, 77 bp, Homo sapiens
tctatgcaggtgcaatgaagtccataaactcttcccaaactatgttatcctttagaacagttgtatgaatttccata

SEQ ID NO: 105391 - DNA, 74 bp, Homo sapiens
caatgaagtccataaactcttcccaaactatgttatcctttagaacagttgtatgaatttccatagcactggta

SEQ ID NO: 105392 - DNA, 70 bp, Homo sapiens
taaactcttcccaaactatgttatcctttagaacagttgtatgaatttccatagcactggtagtttgggt

SEQ ID NO: 105393 - DNA, 72 bp, Homo sapiens
ccaaactatgttatcctttagaacagttgtatgaatttccatagcactggtagtttgggttacgtatctgaa

SEQ ID NO: 105394 - DNA, 73 bp, Homo sapiens
ctatgttatcctttagaacagttgtatgaatttccatagcactggtagtttgggttacgtatctgaaaacata

SEQ ID NO: 105395 - DNA, 72 bp, Homo sapiens
gaacagttgtatgaatttccatagcactggtagtttgggttacgtatctgaaaacataattatacaggtctt

SEQ ID NO: 105396 - DNA, 73 bp, Homo sapiens
gtatgaatttccatagcactggtagtttgggttacgtatctgaaaacataattatacaggtctttcattactc

SEQ ID NO: 105397 - DNA, 75 bp, Homo sapiens
catagcactggtagtttgggttacgtatctgaaaacataattatacaggtctttcattactcttgaattggatca

SEQ ID NO: 105398 - DNA, 74 bp, Homo sapiens
ctggtagtttgggttacgtatctgaaaacataattatacaggtctttcattactcttgaattggatcatgtgag

SEQ ID NO: 105399 - DNA, 75 bp, Homo sapiens
tgggttacgtatctgaaaacataattatacaggtctttcattactcttgaattggatcatgtgagtttattttca

SEQ ID NO: 105400 - DNA, 75 bp, Homo sapiens
ctgaaaacataattatacaggtctttcattactcttgaattggatcatgtgagtttattttcacttcctcaatgt

SEQ ID NO: 105401 - DNA, 75 bp, Homo sapiens
aattatacaggtctttcattactcttgaattggatcatgtgagtttattttcacttcctcaatgttatgggttga

SEQ ID NO: 105402 - DNA, 75 bp, Homo sapiens
aggtctttcattactcttgaattggatcatgtgagtttattttcacttcctcaatgttatgggttgaattgtgtc

SEQ ID NO: 105403 - DNA, 73 bp, Homo sapiens
gttgaagtcctaatctctggtacttgtgaatgtgaccatttttgaaatagggtctttgcaattataatcaagt

SEQ ID NO: 105404 - DNA, 73 bp, Homo sapiens
agtcctaatctctggtacttgtgaatgtgaccatttttgaaatagggtctttgcaattataatcaagttaaga

SEQ ID NO: 105405 - DNA, 75 bp, Homo sapiens
tggtacttgtgaatgtgaccatttttgaaatagggtctttgcaattataatcaagttaagatgggtcattatgga

SEQ ID NO: 105406 - DNA, 73 bp, Homo sapiens
tgtgaccatttttgaaatagggtctttgcaattataatcaagttaagatgggtcattatggagggttctaatc

SEQ ID NO: 105407 - DNA, 73 bp, Homo sapiens
ttttgaaatagggtctttgcaattataatcaagttaagatgggtcattatggagggttctaatccaagatgac

SEQ ID NO: 105408 - DNA, 74 bp, Homo sapiens
tttgaaatagggtctttgcaattataatcaagttaagatgggtcattatggagggttctaatccaagatgactg

SEQ ID NO: 105409 - DNA, 76 bp, Homo sapiens
ggtctttgcaattataatcaagttaagatgggtcattatggagggttctaatccaagatgactggtgttctcataa

SEQ ID NO: 105410 - DNA, 76 bp, Homo sapiens
atcaagttaagatgggtcattatggagggttctaatccaagatgactggtgttctcataagaagaggaaagccatg

SEQ ID NO: 105411 - DNA, 77 bp, Homo sapiens
agatgggtcattatggagggttctaatccaagatgactggtgttctcataagaagaggaaagccatgggaagacaca

SEQ ID NO: 105412 - DNA, 79 bp, Homo sapiens
agatgactggtgttctcataagaagaggaaagccatgggaagacacagacacaatgggagaaagccttgtgatatcaaa

SEQ ID NO: 105413 - DNA, 80 bp, Homo sapiens
ttctcataagaagaggaaagccatgggaagacacagacacaatgggagaaagccttgtgatatcaaaggcagagactgaa

SEQ ID NO: 105414 - DNA, 81 bp, Homo sapiens
atgggaagacacagacacaatgggagaaagccttgtgatatcaaaggcagagactgaagtgatgcagttacaagccaagga

SEQ ID NO: 105415 - DNA, 82 bp, Homo sapiens
agacacagacacaatgggagaaagccttgtgatatcaaaggcagagactgaagtgatgcagttacaagccaaggagtgtcaa

SEQ ID NO: 105416 - DNA, 81 bp, Homo sapiens
acaatgggagaaagccttgtgatatcaaaggcagagactgaagtgatgcagttacaagccaaggagtgtcaaggattgctg

SEQ ID NO: 105417 - DNA, 81 bp, Homo sapiens
ccttgtgatatcaaaggcagagactgaagtgatgcagttacaagccaaggagtgtcaaggattgctggcaaccatcaaaaa

SEQ ID NO: 105418 - DNA, 80 bp, Homo sapiens
atatcaaaggcagagactgaagtgatgcagttacaagccaaggagtgtcaaggattgctggcaaccatcaaaaactggga

SEQ ID NO: 105419 - DNA, 77 bp, Homo sapiens
agagactgaagtgatgcagttacaagccaaggagtgtcaaggattgctggcaaccatcaaaaactgggaagaggtaa

SEQ ID NO: 105420 - DNA, 74 bp, Homo sapiens
aagtgatgcagttacaagccaaggagtgtcaaggattgctggcaaccatcaaaaactgggaagaggtaaggaag

SEQ ID NO: 105421 - DNA, 70 bp, Homo sapiens
aagccaaggagtgtcaaggattgctggcaaccatcaaaaactgggaagaggtaaggaaggattctcccct

SEQ ID NO: 105422 - DNA, 70 bp, Homo sapiens
aaggattgctggcaaccatcaaaaactgggaagaggtaaggaaggattctccccttcctgtttcagagga

SEQ ID NO: 105423 - DNA, 70 bp, Homo sapiens
aggattgctggcaaccatcaaaaactgggaagaggtaaggaaggattctccccttcctgtttcagaggaa

SEQ ID NO: 105424 - DNA, 70 bp, Homo sapiens
ttgctggcaaccatcaaaaactgggaagaggtaaggaaggattctccccttcctgtttcagaggaagccc

SEQ ID NO: 105425 - DNA, 67 bp, Homo sapiens
accatcaaaaactgggaagaggtaaggaaggattctccccttcctgtttcagaggaagcccggctct

SEQ ID NO: 105426 - DNA, 67 bp, Homo sapiens
aaaaactgggaagaggtaaggaaggattctccccttcctgtttcagaggaagcccggctcttcctga

SEQ ID NO: 105427 - DNA, 70 bp, Homo sapiens
aagaggtaaggaaggattctccccttcctgtttcagaggaagcccggctcttcctgatcttagacttctg

SEQ ID NO: 105428 - DNA, 71 bp, Homo sapiens
gaaggattctccccttcctgtttcagaggaagcccggctcttcctgatcttagacttctggcttctaaagt

SEQ ID NO: 105429 - DNA, 72 bp, Homo sapiens
tcctgtttcagaggaagcccggctcttcctgatcttagacttctggcttctaaagttttgaggcaataaatt

SEQ ID NO: 105430 - DNA, 71 bp, Homo sapiens
aagcccggctcttcctgatcttagacttctggcttctaaagttttgaggcaataaatttctgtttgcttaa

SEQ ID NO: 105431 - DNA, 71 bp, Homo sapiens
ttcctgatcttagacttctggcttctaaagttttgaggcaataaatttctgtttgcttaagtcacccagtt

SEQ ID NO: 105432 - DNA, 73 bp, Homo sapiens
atggcagccctagggaccaaatacagctaattatattgtaagatccttagaggtagaaaaatgatgaaatatt

SEQ ID NO: 105433 - DNA, 73 bp, Homo sapiens
gccctagggaccaaatacagctaattatattgtaagatccttagaggtagaaaaatgatgaaatattttagca

SEQ ID NO: 105434 - DNA, 77 bp, Homo sapiens
ggaccaaatacagctaattatattgtaagatccttagaggtagaaaaatgatgaaatattttagcatgattacagca

SEQ ID NO: 105435 - DNA, 80 bp, Homo sapiens
atacagctaattatattgtaagatccttagaggtagaaaaatgatgaaatattttagcatgattacagcatggctcagaa

SEQ ID NO: 105436 - DNA, 78 bp, Homo sapiens
atattgtaagatccttagaggtagaaaaatgatgaaatattttagcatgattacagcatggctcagaaagaggttcga

SEQ ID NO: 105437 - DNA, 78 bp, Homo sapiens
taagatccttagaggtagaaaaatgatgaaatattttagcatgattacagcatggctcagaaagaggttcgagaaata

SEQ ID NO: 105438 - DNA, 76 bp, Homo sapiens
cttagaggtagaaaaatgatgaaatattttagcatgattacagcatggctcagaaagaggttcgagaaataattgg

SEQ ID NO: 105439 - DNA, 76 bp, Homo sapiens
ggtagaaaaatgatgaaatattttagcatgattacagcatggctcagaaagaggttcgagaaataattggtacgta

SEQ ID NO: 105440 - DNA, 76 bp, Homo sapiens
atgaaatattttagcatgattacagcatggctcagaaagaggttcgagaaataattggtacgtaaatgttgaatgg

SEQ ID NO: 105441 - DNA, 78 bp, Homo sapiens
ttttagcatgattacagcatggctcagaaagaggttcgagaaataattggtacgtaaatgttgaatgggtgcatgaaa

SEQ ID NO: 105442 - DNA, 77 bp, Homo sapiens
attacagcatggctcagaaagaggttcgagaaataattggtacgtaaatgttgaatgggtgcatgaaatggagatgg

SEQ ID NO: 105443 - DNA, 76 bp, Homo sapiens
tcagaaagaggttcgagaaataattggtacgtaaatgttgaatgggtgcatgaaatggagatgggagttcacaata

SEQ ID NO: 105444 - DNA, 75 bp, Homo sapiens
aggttcgagaaataattggtacgtaaatgttgaatgggtgcatgaaatggagatgggagttcacaatagtcagaa

SEQ ID NO: 105445 - DNA, 76 bp, Homo sapiens
tacgtaaatgttgaatgggtgcatgaaatggagatgggagttcacaatagtcagaagggtgtagagtcacctgttt

SEQ ID NO: 105446 - DNA, 75 bp, Homo sapiens
gttgaatgggtgcatgaaatggagatgggagttcacaatagtcagaagggtgtagagtcacctgtttttcccaaa

SEQ ID NO: 105447 - DNA, 72 bp, Homo sapiens
atgggagttcacaatagtcagaagggtgtagagtcacctgtttttcccaaaggctagtactatagagtgctt

SEQ ID NO: 105448 - DNA, 72 bp, Homo sapiens
gttcacaatagtcagaagggtgtagagtcacctgtttttcccaaaggctagtactatagagtgctttccttg

SEQ ID NO: 105449 - DNA, 72 bp, Homo sapiens
agaagggtgtagagtcacctgtttttcccaaaggctagtactatagagtgctttccttgtgcatctcgttgg

SEQ ID NO: 105450 - DNA, 74 bp, Homo sapiens
tagagtcacctgtttttcccaaaggctagtactatagagtgctttccttgtgcatctcgttgggccatggaaaa

SEQ ID NO: 105451 - DNA, 75 bp, Homo sapiens
gtttttcccaaaggctagtactatagagtgctttccttgtgcatctcgttgggccatggaaaagctgtgcttctc

SEQ ID NO: 105452 - DNA, 77 bp, Homo sapiens
aaaggctagtactatagagtgctttccttgtgcatctcgttgggccatggaaaagctgtgcttctctgtcacttaac

SEQ ID NO: 105453 - DNA, 80 bp, Homo sapiens
tactatagagtgctttccttgtgcatctcgttgggccatggaaaagctgtgcttctctgtcacttaacttattcttatca

SEQ ID NO: 105454 - DNA, 79 bp, Homo sapiens
tttccttgtgcatctcgttgggccatggaaaagctgtgcttctctgtcacttaacttattcttatcacagtcattcaaa

SEQ ID NO: 105455 - DNA, 77 bp, Homo sapiens
atctcgttgggccatggaaaagctgtgcttctctgtcacttaacttattcttatcacagtcattcaaagcaaaaata

SEQ ID NO: 105456 - DNA, 75 bp, Homo sapiens
gttgggccatggaaaagctgtgcttctctgtcacttaacttattcttatcacagtcattcaaagcaaaaataagg

SEQ ID NO: 105457 - DNA, 75 bp, Homo sapiens
tcacttaacttattcttatcacagtcattcaaagcaaaaataagggcagaacatatacacaattgttaacagaag

SEQ ID NO: 105458 - DNA, 75 bp, Homo sapiens
cttatcacagtcattcaaagcaaaaataagggcagaacatatacacaattgttaacagaagttatctctaaatgg

SEQ ID NO: 105459 - DNA, 74 bp, Homo sapiens
acagtcattcaaagcaaaaataagggcagaacatatacacaattgttaacagaagttatctctaaatggtaata

SEQ ID NO: 105460 - DNA, 71 bp, Homo sapiens
agcaaaaataagggcagaacatatacacaattgttaacagaagttatctctaaatggtaatattttgggta

SEQ ID NO: 105461 - DNA, 71 bp, Homo sapiens
taagggcagaacatatacacaattgttaacagaagttatctctaaatggtaatattttgggtaattttgat

SEQ ID NO: 105462 - DNA, 68 bp, Homo sapiens
tacacaattgttaacagaagttatctctaaatggtaatattttgggtaattttgattaaccttttgct

SEQ ID NO: 105463 - DNA, 66 bp, Homo sapiens
gaagttatctctaaatggtaatattttgggtaattttgattaaccttttgctttaattatattttc

SEQ ID NO: 105464 - DNA, 65 bp, Homo sapiens
tctaaatggtaatattttgggtaattttgattaaccttttgctttaattatattttctaataaaa

SEQ ID NO: 105465 - DNA, 64 bp, Homo sapiens
tttgggtaattttgattaaccttttgctttaattatattttctaataaaaaaattatgtattcc

SEQ ID NO: 105466 - DNA, 64 bp, Homo sapiens
gtaattttgattaaccttttgctttaattatattttctaataaaaaaattatgtattcctttaa

SEQ ID NO: 105467 - DNA, 65 bp, Homo sapiens
cttttgctttaattatattttctaataaaaaaattatgtattcctttaataattaaaagtatgta

SEQ ID NO: 105468 - DNA, 64 bp, Homo sapiens
taattatattttctaataaaaaaattatgtattcctttaataattaaaagtatgtattttaaaa

SEQ ID NO: 105469 - DNA, 74 bp, Homo sapiens
aaaaaaaaagacagcacatatttattattgactaaatctgtcagcattttgatctacaacaaacacaaattgtg

SEQ ID NO: 105470 - DNA, 80 bp, Homo sapiens
gacagcacatatttattattgactaaatctgtcagcattttgatctacaacaaacacaaattgtgtttttctacagcaca

SEQ ID NO: 105471 - DNA, 77 bp, Homo sapiens
catatttattattgactaaatctgtcagcattttgatctacaacaaacacaaattgtgtttttctacagcacatatt

SEQ ID NO: 105472 - DNA, 78 bp, Homo sapiens
tattgactaaatctgtcagcattttgatctacaacaaacacaaattgtgtttttctacagcacatatttattattgac

SEQ ID NO: 105473 - DNA, 79 bp, Homo sapiens
atctgtcagcattttgatctacaacaaacacaaattgtgtttttctacagcacatatttattattgactaaatctgtca

SEQ ID NO: 105474 - DNA, 80 bp, Homo sapiens
ctgtcagcattttgatctacaacaaacacaaattgtgtttttctacagcacatatttattattgactaaatctgtcagca

SEQ ID NO: 105475 - DNA, 80 bp, Homo sapiens
tgatctacaacaaacacaaattgtgtttttctacagcacatatttattattgactaaatctgtcagcattttgatctaca

SEQ ID NO: 105476 - DNA, 79 bp, Homo sapiens
gatctacaacaaacacaaattgtgtttttctacagcacatatttattattgactaaatctgtcagcattttgatctaca

SEQ ID NO: 105477 - DNA, 77 bp, Homo sapiens
caaacacaaattgtgtttttctacagcacatatttattattgactaaatctgtcagcattttgatctacaacaaaca

SEQ ID NO: 105478 - DNA, 77 bp, Homo sapiens
aacacaaattgtgtttttctacagcacatatttattattgactaaatctgtcagcattttgatctacaacaaacaca

SEQ ID NO: 105479 - DNA, 76 bp, Homo sapiens
ttttctacagcacatatttattattgactaaatctgtcagcattttgatctacaacaaacacaaattgtgtttttc

SEQ ID NO: 105480 - DNA, 77 bp, Homo sapiens
cagcacatatttattattgactaaatctgtcagcattttgatctacaacaaacacaaattgtgtttttctaaagctc

SEQ ID NO: 105481 - DNA, 73 bp, Homo sapiens
ttattattgactaaatctgtcagcattttgatctacaacaaacacaaattgtgtttttctaaagctctttggg

SEQ ID NO: 105482 - DNA, 71 bp, Homo sapiens
gactaaatctgtcagcattttgatctacaacaaacacaaattgtgtttttctaaagctctttggggtttct

SEQ ID NO: 105483 - DNA, 71 bp, Homo sapiens
cagcattttgatctacaacaaacacaaattgtgtttttctaaagctctttggggtttcttataaagcaggc

SEQ ID NO: 105484 - DNA, 69 bp, Homo sapiens
tgatctacaacaaacacaaattgtgtttttctaaagctctttggggtttcttataaagcaggcttttta

SEQ ID NO: 105485 - DNA, 66 bp, Homo sapiens
caaacacaaattgtgtttttctaaagctctttggggtttcttataaagcaggctttttaaccaatg

SEQ ID NO: 105486 - DNA, 70 bp, Homo sapiens
gctctttggggtttcttataaagcaggctttttaaccaatgttttgaacatatcaggttaaggtatgtga

SEQ ID NO: 105487 - DNA, 69 bp, Homo sapiens
gggtttcttataaagcaggctttttaaccaatgttttgaacatatcaggttaaggtatgtgaaatagtc

SEQ ID NO: 105488 - DNA, 76 bp, Homo sapiens
tgttttgaacatatcaggttaaggtatgtgaaatagtctctccaggtgggatttaacataatgcaataagaactga

SEQ ID NO: 105489 - DNA, 75 bp, Homo sapiens
gaacatatcaggttaaggtatgtgaaatagtctctccaggtgggatttaacataatgcaataagaactgaagatt

SEQ ID NO: 105490 - DNA, 73 bp, Homo sapiens
ggttaaggtatgtgaaatagtctctccaggtgggatttaacataatgcaataagaactgaagatttaatagag

SEQ ID NO: 105491 - DNA, 73 bp, Homo sapiens
gtgaaatagtctctccaggtgggatttaacataatgcaataagaactgaagatttaatagaggatttcttttc

SEQ ID NO: 105492 - DNA, 75 bp, Homo sapiens
tctctccaggtgggatttaacataatgcaataagaactgaagatttaatagaggatttcttttctaagcacagga

SEQ ID NO: 105493 - DNA, 74 bp, Homo sapiens
gggatttaacataatgcaataagaactgaagatttaatagaggatttcttttctaagcacaggaagaatggtga

SEQ ID NO: 105494 - DNA, 76 bp, Homo sapiens
cataatgcaataagaactgaagatttaatagaggatttcttttctaagcacaggaagaatggtgaaagcatttagc

SEQ ID NO: 105495 - DNA, 74 bp, Homo sapiens
gaactgaagatttaatagaggatttcttttctaagcacaggaagaatggtgaaagcatttagctttcaccattg

SEQ ID NO: 105496 - DNA, 76 bp, Homo sapiens
ttaatagaggatttcttttctaagcacaggaagaatggtgaaagcatttagctttcaccattggccagacagataa

SEQ ID NO: 105497 - DNA, 76 bp, Homo sapiens
ttctaagcacaggaagaatggtgaaagcatttagctttcaccattggccagacagataaaacagacattccctaaa

SEQ ID NO: 105498 - DNA, 77 bp, Homo sapiens
agaatggtgaaagcatttagctttcaccattggccagacagataaaacagacattccctaaagacatcagcacctta

SEQ ID NO: 105499 - DNA, 76 bp, Homo sapiens
aagcatttagctttcaccattggccagacagataaaacagacattccctaaagacatcagcaccttagagagaaaa

SEQ ID NO: 105500 - DNA, 76 bp, Homo sapiens
tttagctttcaccattggccagacagataaaacagacattccctaaagacatcagcaccttagagagaaaatcaaa

SEQ ID NO: 105501 - DNA, 76 bp, Homo sapiens
attggccagacagataaaacagacattccctaaagacatcagcaccttagagagaaaatcaaaactactcaacaga

SEQ ID NO: 105502 - DNA, 74 bp, Homo sapiens
agataaaacagacattccctaaagacatcagcaccttagagagaaaatcaaaactactcaacagaaaagtgtga

SEQ ID NO: 105503 - DNA, 79 bp, Homo sapiens
taaagacatcagcaccttagagagaaaatcaaaactactcaacagaaaagtgtgaggcaaggaagagctgcagatagtg

SEQ ID NO: 105504 - DNA, 78 bp, Homo sapiens
aaaactactcaacagaaaagtgtgaggcaaggaagagctgcagatagtgtctacaaagggtggctcagcagttctgga

SEQ ID NO: 105505 - DNA, 78 bp, Homo sapiens
aacagaaaagtgtgaggcaaggaagagctgcagatagtgtctacaaagggtggctcagcagttctggagtggtttctc

SEQ ID NO: 105506 - DNA, 81 bp, Homo sapiens
aagtgtgaggcaaggaagagctgcagatagtgtctacaaagggtggctcagcagttctggagtggtttctctcactgcatt

SEQ ID NO: 105507 - DNA, 78 bp, Homo sapiens
aaggaagagctgcagatagtgtctacaaagggtggctcagcagttctggagtggtttctctcactgcatttcctttcc

SEQ ID NO: 105508 - DNA, 75 bp, Homo sapiens
agatagtgtctacaaagggtggctcagcagttctggagtggtttctctcactgcatttcctttccccagaggtcc

SEQ ID NO: 105509 - DNA, 74 bp, Homo sapiens
tgtctacaaagggtggctcagcagttctggagtggtttctctcactgcatttcctttccccagaggtccctttg

SEQ ID NO: 105510 - DNA, 76 bp, Homo sapiens
gctcagcagttctggagtggtttctctcactgcatttcctttccccagaggtccctttggctaaagcactgtccaa

SEQ ID NO: 105511 - DNA, 71 bp, Homo sapiens
agttctggagtggtttctctcactgcatttcctttccccagaggtccctttggctaaagcactgtccaaag

SEQ ID NO: 105512 - DNA, 75 bp, Homo sapiens
tttctctcactgcatttcctttccccagaggtccctttggctaaagcactgtccaaaggtcagttgctggaatga

SEQ ID NO: 105513 - DNA, 74 bp, Homo sapiens
tttccccagaggtccctttggctaaagcactgtccaaaggtcagttgctggaatgagtcgtttagtgctgagga

SEQ ID NO: 105514 - DNA, 73 bp, Homo sapiens
agaggtccctttggctaaagcactgtccaaaggtcagttgctggaatgagtcgtttagtgctgaggaaccagt

SEQ ID NO: 105515 - DNA, 76 bp, Homo sapiens
actgtccaaaggtcagttgctggaatgagtcgtttagtgctgaggaaccagttgcctgcccaaagagttgctccgc

SEQ ID NO: 105516 - DNA, 74 bp, Homo sapiens
ctggaatgagtcgtttagtgctgaggaaccagttgcctgcccaaagagttgctccgccagcagtaggaaaaaaa

SEQ ID NO: 105517 - DNA, 71 bp, Homo sapiens
gtcgtttagtgctgaggaaccagttgcctgcccaaagagttgctccgccagcagtaggaaaaaaaagaaag

SEQ ID NO: 105518 - DNA, 71 bp, Homo sapiens
aggaaccagttgcctgcccaaagagttgctccgccagcagtaggaaaaaaaagaaagtgtgaattcaagta

SEQ ID NO: 105519 - DNA, 72 bp, Homo sapiens
agttgcctgcccaaagagttgctccgccagcagtaggaaaaaaaagaaagtgtgaattcaagtatttcagaa

SEQ ID NO: 105520 - DNA, 70 bp, Homo sapiens
aaagagttgctccgccagcagtaggaaaaaaaagaaagtgtgaattcaagtatttcagaaagtttgactc

SEQ ID NO: 105521 - DNA, 70 bp, Homo sapiens
gcagtaggaaaaaaaagaaagtgtgaattcaagtatttcagaaagtttgactcccactttataagagcag

SEQ ID NO: 105522 - DNA, 70 bp, Homo sapiens
agaaagtgtgaattcaagtatttcagaaagtttgactcccactttataagagcagggggaaaattcataa

SEQ ID NO: 105523 - DNA, 70 bp, Homo sapiens
gtgtgaattcaagtatttcagaaagtttgactcccactttataagagcagggggaaaattcataaagaaa

SEQ ID NO: 105524 - DNA, 69 bp, Homo sapiens
tttcagaaagtttgactcccactttataagagcagggggaaaattcataaagaaagtgaggccattaaa

SEQ ID NO: 105525 - DNA, 69 bp, Homo sapiens
aaagtttgactcccactttataagagcagggggaaaattcataaagaaagtgaggccattaaagagctg

SEQ ID NO: 105526 - DNA, 70 bp, Homo sapiens
actttataagagcagggggaaaattcataaagaaagtgaggccattaaagagctggagtttacaggattg

SEQ ID NO: 105527 - DNA, 73 bp, Homo sapiens
ataagagcagggggaaaattcataaagaaagtgaggccattaaagagctggagtttacaggattgtgaagcag

SEQ ID NO: 105528 - DNA, 72 bp, Homo sapiens
aaaattcataaagaaagtgaggccattaaagagctggagtttacaggattgtgaagcaggaaaagaagtcag

SEQ ID NO: 105529 - DNA, 73 bp, Homo sapiens
taaagaaagtgaggccattaaagagctggagtttacaggattgtgaagcaggaaaagaagtcagtcttgggaa

SEQ ID NO: 105530 - DNA, 73 bp, Homo sapiens
gccattaaagagctggagtttacaggattgtgaagcaggaaaagaagtcagtcttgggaagtaccattaacaa

SEQ ID NO: 105531 - DNA, 71 bp, Homo sapiens
taaagagctggagtttacaggattgtgaagcaggaaaagaagtcagtcttgggaagtaccattaacaaatt

SEQ ID NO: 105532 - DNA, 69 bp, Homo sapiens
agtttacaggattgtgaagcaggaaaagaagtcagtcttgggaagtaccattaacaaatttagtaacag

SEQ ID NO: 105533 - DNA, 72 bp, Homo sapiens
attgtgaagcaggaaaagaagtcagtcttgggaagtaccattaacaaatttagtaacaggctgggcttcagc

SEQ ID NO: 105534 - DNA, 72 bp, Homo sapiens
agtcagtcttgggaagtaccattaacaaatttagtaacaggctgggcttcagcctcctcttcccttgccaca

SEQ ID NO: 105535 - DNA, 75 bp, Homo sapiens
ttaacaaatttagtaacaggctgggcttcagcctcctcttcccttgccacactccacgtaacacagaatgcacaa

SEQ ID NO: 105536 - DNA, 78 bp, Homo sapiens
ttagtaacaggctgggcttcagcctcctcttcccttgccacactccacgtaacacagaatgcacaagacaccaagcca

SEQ ID NO: 105537 - DNA, 82 bp, Homo sapiens
gcttcagcctcctcttcccttgccacactccacgtaacacagaatgcacaagacaccaagccacatgtgtgatttctctgga

SEQ ID NO: 105538 - DNA, 82 bp, Homo sapiens
cttgccacactccacgtaacacagaatgcacaagacaccaagccacatgtgtgatttctctggactcgcacgtgtagggcaa

SEQ ID NO: 105539 - DNA, 82 bp, Homo sapiens
aagacaccaagccacatgtgtgatttctctggactcgcacgtgtagggcaagctgatgttcatttgtgaattggatttctca

SEQ ID NO: 105540 - DNA, 82 bp, Homo sapiens
aagccacatgtgtgatttctctggactcgcacgtgtagggcaagctgatgttcatttgtgaattggatttctcatttgcgga

SEQ ID NO: 105541 - DNA, 83 bp, Homo sapiens
tgatttctctggactcgcacgtgtagggcaagctgatgttcatttgtgaattggatttctcatttgcggactcttatctatga

SEQ ID NO: 105542 - DNA, 82 bp, Homo sapiens
gactcgcacgtgtagggcaagctgatgttcatttgtgaattggatttctcatttgcggactcttatctatgatgcaactagt

SEQ ID NO: 105543 - DNA, 79 bp, Homo sapiens
acgtgtagggcaagctgatgttcatttgtgaattggatttctcatttgcggactcttatctatgatgcaactagtttcc

SEQ ID NO: 105544 - DNA, 81 bp, Homo sapiens
aagctgatgttcatttgtgaattggatttctcatttgcggactcttatctatgatgcaactagtttcccagacattatgct

SEQ ID NO: 105545 - DNA, 79 bp, Homo sapiens
atttgtgaattggatttctcatttgcggactcttatctatgatgcaactagtttcccagacattatgctttgtcttgga

SEQ ID NO: 105546 - DNA, 79 bp, Homo sapiens
aattggatttctcatttgcggactcttatctatgatgcaactagtttcccagacattatgctttgtcttggacagatgt

SEQ ID NO: 105547 - DNA, 83 bp, Homo sapiens
ttctcatttgcggactcttatctatgatgcaactagtttcccagacattatgctttgtcttggacagatgttggtgagtgcca

SEQ ID NO: 105548 - DNA, 83 bp, Homo sapiens
actcttatctatgatgcaactagtttcccagacattatgctttgtcttggacagatgttggtgagtgccatgcaagtgccctg

SEQ ID NO: 105549 - DNA, 82 bp, Homo sapiens
tatgatgcaactagtttcccagacattatgctttgtcttggacagatgttggtgagtgccatgcaagtgccctgggtcaaaa

SEQ ID NO: 105550 - DNA, 76 bp, Homo sapiens
aactagtttcccagacattatgctttgtcttggacagatgttggtgagtgccatgcaagtgccctgggtcaaaaac

SEQ ID NO: 105551 - DNA, 77 bp, Homo sapiens
agacattatgctttgtcttggacagatgttggtgagtgccatgcaagtgccctgggtcaaaaacggtttctcttctc

SEQ ID NO: 105552 - DNA, 76 bp, Homo sapiens
tttgtcttggacagatgttggtgagtgccatgcaagtgccctgggtcaaaaacggtttctcttctcctctgcgcct

SEQ ID NO: 105553 - DNA, 77 bp, Homo sapiens
agatgttggtgagtgccatgcaagtgccctgggtcaaaaacggtttctcttctcctctgcgccttgggtggatgcag

SEQ ID NO: 105554 - DNA, 72 bp, Homo sapiens
ccctgggtcaaaaacggtttctcttctcctctgcgccttgggtggatgcagggggctactcatttctcctga

SEQ ID NO: 105555 - DNA, 71 bp, Homo sapiens
aaaaacggtttctcttctcctctgcgccttgggtggatgcagggggctactcatttctcctgagccttttc

SEQ ID NO: 105556 - DNA, 75 bp, Homo sapiens
gccttgggtggatgcagggggctactcatttctcctgagccttttcctttgactatagatgacttacctgtatat

SEQ ID NO: 105557 - DNA, 78 bp, Homo sapiens
gatgcagggggctactcatttctcctgagccttttcctttgactatagatgacttacctgtatattcagactctgaat

SEQ ID NO: 105558 - DNA, 77 bp, Homo sapiens
ggctactcatttctcctgagccttttcctttgactatagatgacttacctgtatattcagactctgaattcaataag

SEQ ID NO: 105559 - DNA, 74 bp, Homo sapiens
atttctcctgagccttttcctttgactatagatgacttacctgtatattcagactctgaattcaataaggttcc

SEQ ID NO: 105560 - DNA, 73 bp, Homo sapiens
cttttcctttgactatagatgacttacctgtatattcagactctgaattcaataaggttcccttgcctcgaat

SEQ ID NO: 105561 - DNA, 76 bp, Homo sapiens
tttgactatagatgacttacctgtatattcagactctgaattcaataaggttcccttgcctcgaatttgccattta

SEQ ID NO: 105562 - DNA, 75 bp, Homo sapiens
acctgtatattcagactctgaattcaataaggttcccttgcctcgaatttgccatttactttggacatggatgga

SEQ ID NO: 105563 - DNA, 77 bp, Homo sapiens
actctgaattcaataaggttcccttgcctcgaatttgccatttactttggacatggatggaagcttgcaagcgcaga

SEQ ID NO: 105564 - DNA, 78 bp, Homo sapiens
attcaataaggttcccttgcctcgaatttgccatttactttggacatggatggaagcttgcaagcgcagagcaccata

SEQ ID NO: 105565 - DNA, 79 bp, Homo sapiens
ttcccttgcctcgaatttgccatttactttggacatggatggaagcttgcaagcgcagagcaccatacaatgaatattt

SEQ ID NO: 105566 - DNA, 81 bp, Homo sapiens
aatttgccatttactttggacatggatggaagcttgcaagcgcagagcaccatacaatgaatattttagagcacattaatg

SEQ ID NO: 105567 - DNA, 81 bp, Homo sapiens
atggaagcttgcaagcgcagagcaccatacaatgaatattttagagcacattaatggtactgttagtatagacagagggcc

SEQ ID NO: 105568 - DNA, 79 bp, Homo sapiens
catacaatgaatattttagagcacattaatggtactgttagtatagacagagggcctgccacatagtaggctcgtgaag

SEQ ID NO: 105569 - DNA, 77 bp, Homo sapiens
aatattttagagcacattaatggtactgttagtatagacagagggcctgccacatagtaggctcgtgaaggctgttg

SEQ ID NO: 105570 - DNA, 79 bp, Homo sapiens
ttagagcacattaatggtactgttagtatagacagagggcctgccacatagtaggctcgtgaaggctgttgtctgaaaa

SEQ ID NO: 105571 - DNA, 78 bp, Homo sapiens
tagtatagacagagggcctgccacatagtaggctcgtgaaggctgttgtctgaaaagagcttgctttggggacacaaa

SEQ ID NO: 105572 - DNA, 76 bp, Homo sapiens
agggcctgccacatagtaggctcgtgaaggctgttgtctgaaaagagcttgctttggggacacaaatcaaactgta

SEQ ID NO: 105573 - DNA, 74 bp, Homo sapiens
acatagtaggctcgtgaaggctgttgtctgaaaagagcttgctttggggacacaaatcaaactgtatatttggt

SEQ ID NO: 105574 - DNA, 76 bp, Homo sapiens
ctcgtgaaggctgttgtctgaaaagagcttgctttggggacacaaatcaaactgtatatttggttgataagattca

SEQ ID NO: 105575 - DNA, 78 bp, Homo sapiens
ctgttgtctgaaaagagcttgctttggggacacaaatcaaactgtatatttggttgataagattcagagatgtgaatc

SEQ ID NO: 105576 - DNA, 81 bp, Homo sapiens
ttgctttggggacacaaatcaaactgtatatttggttgataagattcagagatgtgaatccatccacagctaatggatgga

SEQ ID NO: 105577 - DNA, 81 bp, Homo sapiens
acacaaatcaaactgtatatttggttgataagattcagagatgtgaatccatccacagctaatggatggaccagcgagtta

SEQ ID NO: 105578 - DNA, 85 bp, Homo sapiens
tatttggttgataagattcagagatgtgaatccatccacagctaatggatggaccagcgagttagctctggcaatgtcttctcta

SEQ ID NO: 105579 - DNA, 84 bp, Homo sapiens
ataagattcagagatgtgaatccatccacagctaatggatggaccagcgagttagctctggcaatgtcttctctagaacagtgg

SEQ ID NO: 105580 - DNA, 83 bp, Homo sapiens
tgtgaatccatccacagctaatggatggaccagcgagttagctctggcaatgtcttctctagaacagtggttctcaaaatata

SEQ ID NO: 105581 - DNA, 83 bp, Homo sapiens
atccatccacagctaatggatggaccagcgagttagctctggcaatgtcttctctagaacagtggttctcaaaatatactgca

SEQ ID NO: 105582 - DNA, 79 bp, Homo sapiens
taatggatggaccagcgagttagctctggcaatgtcttctctagaacagtggttctcaaaatatactgcacgttataat

SEQ ID NO: 105583 - DNA, 79 bp, Homo sapiens
accagcgagttagctctggcaatgtcttctctagaacagtggttctcaaaatatactgcacgttataattgcctggaga

SEQ ID NO: 105584 - DNA, 77 bp, Homo sapiens
ttagctctggcaatgtcttctctagaacagtggttctcaaaatatactgcacgttataattgcctggagagttttaa

SEQ ID NO: 105585 - DNA, 73 bp, Homo sapiens
ggcaatgtcttctctagaacagtggttctcaaaatatactgcacgttataattgcctggagagttttaaaaaa

SEQ ID NO: 105586 - DNA, 74 bp, Homo sapiens
tagaacagtggttctcaaaatatactgcacgttataattgcctggagagttttaaaaaattgtaatgcacaggc

SEQ ID NO: 105587 - DNA, 74 bp, Homo sapiens
ggttctcaaaatatactgcacgttataattgcctggagagttttaaaaaattgtaatgcacaggctatttatca

SEQ ID NO: 105588 - DNA, 74 bp, Homo sapiens
atatactgcacgttataattgcctggagagttttaaaaaattgtaatgcacaggctatttatcataccaaatta

SEQ ID NO: 105589 - DNA, 74 bp, Homo sapiens
gcacgttataattgcctggagagttttaaaaaattgtaatgcacaggctatttatcataccaaattaaatcaga

SEQ ID NO: 105590 - DNA, 72 bp, Homo sapiens
gcctggagagttttaaaaaattgtaatgcacaggctatttatcataccaaattaaatcagaatccttgaggg

SEQ ID NO: 105591 - DNA, 71 bp, Homo sapiens
ttaaaaaattgtaatgcacaggctatttatcataccaaattaaatcagaatccttgaggggtaggacccag

SEQ ID NO: 105592 - DNA, 72 bp, Homo sapiens
aaattgtaatgcacaggctatttatcataccaaattaaatcagaatccttgaggggtaggacccagtctttg

SEQ ID NO: 105593 - DNA, 68 bp, Homo sapiens
aggctatttatcataccaaattaaatcagaatccttgaggggtaggacccagtctttggtgtttaaaa

SEQ ID NO: 105594 - DNA, 66 bp, Homo sapiens
atcataccaaattaaatcagaatccttgaggggtaggacccagtctttggtgtttaaaaaaagttc

SEQ ID NO: 105595 - DNA, 64 bp, Homo sapiens
aatccttgaggggtaggacccagtctttggtgtttaaaaaaagttctccaagtaacttcaataa

SEQ ID NO: 105596 - DNA, 74 bp, Homo sapiens
tttaaaaaaagttctccaagtaacttcaataagcggccagaattagtcatcactatggagtgacaacatccata

SEQ ID NO: 105597 - DNA, 77 bp, Homo sapiens
aagttctccaagtaacttcaataagcggccagaattagtcatcactatggagtgacaacatccataaatagccacta

SEQ ID NO: 105598 - DNA, 78 bp, Homo sapiens
aataagcggccagaattagtcatcactatggagtgacaacatccataaatagccactagtcttatgtgataatttaaa

SEQ ID NO: 105599 - DNA, 79 bp, Homo sapiens
gccagaattagtcatcactatggagtgacaacatccataaatagccactagtcttatgtgataatttaaatttaagcta

SEQ ID NO: 105600 - DNA, 76 bp, Homo sapiens
tggagtgacaacatccataaatagccactagtcttatgtgataatttaaatttaagctaatatcacttacaattag

SEQ ID NO: 105601 - DNA, 73 bp, Homo sapiens
catccataaatagccactagtcttatgtgataatttaaatttaagctaatatcacttacaattagtttcttag

SEQ ID NO: 105602 - DNA, 75 bp, Homo sapiens
tagccactagtcttatgtgataatttaaatttaagctaatatcacttacaattagtttcttagttgcaatagcca

SEQ ID NO: 105603 - DNA, 73 bp, Homo sapiens
atgtgataatttaaatttaagctaatatcacttacaattagtttcttagttgcaatagccaaatttcaagtgc

SEQ ID NO: 105604 - DNA, 72 bp, Homo sapiens
ataatttaaatttaagctaatatcacttacaattagtttcttagttgcaatagccaaatttcaagtgctcag

SEQ ID NO: 105605 - DNA, 79 bp, Homo sapiens
ccacatgtggctagtggccaccacactggagagtgtagagttatggaacgtttacatcattgtggaaatttctgttgca

SEQ ID NO: 105606 - DNA, 76 bp, Homo sapiens
ctagtggccaccacactggagagtgtagagttatggaacgtttacatcattgtggaaatttctgttgcactactta

SEQ ID NO: 105607 - DNA, 75 bp, Homo sapiens
agagtgtagagttatggaacgtttacatcattgtggaaatttctgttgcactacttaagagtctagagctctagg

SEQ ID NO: 105608 - DNA, 73 bp, Homo sapiens
aacgtttacatcattgtggaaatttctgttgcactacttaagagtctagagctctaggtttatactgagttct

SEQ ID NO: 105609 - DNA, 77 bp, Homo sapiens
attgtggaaatttctgttgcactacttaagagtctagagctctaggtttatactgagttcttcaagctgaatgaata

SEQ ID NO: 105610 - DNA, 77 bp, Homo sapiens
aaatttctgttgcactacttaagagtctagagctctaggtttatactgagttcttcaagctgaatgaatactgaatg

SEQ ID NO: 105611 - DNA, 77 bp, Homo sapiens
tacttaagagtctagagctctaggtttatactgagttcttcaagctgaatgaatactgaatggccatactaccaaaa

SEQ ID NO: 105612 - DNA, 77 bp, Homo sapiens
tctagagctctaggtttatactgagttcttcaagctgaatgaatactgaatggccatactaccaaaaagaatttgaa

SEQ ID NO: 105613 - DNA, 75 bp, Homo sapiens
agctctaggtttatactgagttcttcaagctgaatgaatactgaatggccatactaccaaaaagaatttgaagta

SEQ ID NO: 105614 - DNA, 75 bp, Homo sapiens
actgagttcttcaagctgaatgaatactgaatggccatactaccaaaaagaatttgaagtaaaatattcttgcca

SEQ ID NO: 105615 - DNA, 75 bp, Homo sapiens
cttcaagctgaatgaatactgaatggccatactaccaaaaagaatttgaagtaaaatattcttgccatagattct

SEQ ID NO: 105616 - DNA, 74 bp, Homo sapiens
gaatactgaatggccatactaccaaaaagaatttgaagtaaaatattcttgccatagattctttatcttgatac

SEQ ID NO: 105617 - DNA, 75 bp, Homo sapiens
tggccatactaccaaaaagaatttgaagtaaaatattcttgccatagattctttatcttgatacccatctctata

SEQ ID NO: 105618 - DNA, 72 bp, Homo sapiens
accaaaaagaatttgaagtaaaatattcttgccatagattctttatcttgatacccatctctataagggcca

SEQ ID NO: 105619 - DNA, 73 bp, Homo sapiens
atttgaagtaaaatattcttgccatagattctttatcttgatacccatctctataagggccaagttacgaggc

SEQ ID NO: 105620 - DNA, 72 bp, Homo sapiens
aagtaaaatattcttgccatagattctttatcttgatacccatctctataagggccaagttacgaggccagg

SEQ ID NO: 105621 - DNA, 67 bp, Homo sapiens
aaaaaaaggccaagttacaactagaaggctgatttagattttttggccaaagttatatgtttcttga

SEQ ID NO: 105622 - DNA, 76 bp, Homo sapiens
gccaagttacaactagaaggctgatttagattttttggccaaagttatatgtttcttgagataaagatctgatgca

SEQ ID NO: 105623 - DNA, 76 bp, Homo sapiens
acaactagaaggctgatttagattttttggccaaagttatatgtttcttgagataaagatctgatgcacaactcaa

SEQ ID NO: 105624 - DNA, 75 bp, Homo sapiens
agaaggctgatttagattttttggccaaagttatatgtttcttgagataaagatctgatgcacaactcaaaacag

SEQ ID NO: 105625 - DNA, 76 bp, Homo sapiens
ggctgatttagattttttggccaaagttatatgtttcttgagataaagatctgatgcacaactcaaaacagtagtg

SEQ ID NO: 105626 - DNA, 74 bp, Homo sapiens
gatttagattttttggccaaagttatatgtttcttgagataaagatctgatgcacaactcaaaacagtagtgtt

SEQ ID NO: 105627 - DNA, 72 bp, Homo sapiens
agattttttggccaaagttatatgtttcttgagataaagatctgatgcacaactcaaaacagtagtgttttt

SEQ ID NO: 105628 - DNA, 75 bp, Homo sapiens
gccaaagttatatgtttcttgagataaagatctgatgcacaactcaaaacagtagtgttttttgttaagcccaca

SEQ ID NO: 105629 - DNA, 75 bp, Homo sapiens
aagttatatgtttcttgagataaagatctgatgcacaactcaaaacagtagtgttttttgttaagcccacagctg

SEQ ID NO: 105630 - DNA, 76 bp, Homo sapiens
agttatatgtttcttgagataaagatctgatgcacaactcaaaacagtagtgttttttgttaagcccacagctgtg

SEQ ID NO: 105631 - DNA, 79 bp, Homo sapiens
tgagataaagatctgatgcacaactcaaaacagtagtgttttttgttaagcccacagctgtggtcagtgtccatggtta

SEQ ID NO: 105632 - DNA, 77 bp, Homo sapiens
agataaagatctgatgcacaactcaaaacagtagtgttttttgttaagcccacagctgtggtcagtgtccatggtta

SEQ ID NO: 105633 - DNA, 77 bp, Homo sapiens
atctgatgcacaactcaaaacagtagtgttttttgttaagcccacagctgtggtcagtgtccatggttatcccataa

SEQ ID NO: 105634 - DNA, 73 bp, Homo sapiens
aaaacagtagtgttttttgttaagcccacagctgtggtcagtgtccatggttatcccataatgactacttcca

SEQ ID NO: 105635 - DNA, 79 bp, Homo sapiens
ttttgttaagcccacagctgtggtcagtgtccatggttatcccataatgactacttccacctcattgccaagctcatta

SEQ ID NO: 105636 - DNA, 78 bp, Homo sapiens
taagcccacagctgtggtcagtgtccatggttatcccataatgactacttccacctcattgccaagctcattaaaaaa

SEQ ID NO: 105637 - DNA, 77 bp, Homo sapiens
ttatcccataatgactacttccacctcattgccaagctcattaaaaaagaacagtctccacacaatgcagtgttaag

SEQ ID NO: 105638 - DNA, 74 bp, Homo sapiens
acctcattgccaagctcattaaaaaagaacagtctccacacaatgcagtgttaagtttcggggctcagaaaatc

SEQ ID NO: 105639 - DNA, 73 bp, Homo sapiens
agctcattaaaaaagaacagtctccacacaatgcagtgttaagtttcggggctcagaaaatccctgagagtat

SEQ ID NO: 105640 - DNA, 74 bp, Homo sapiens
aaagaacagtctccacacaatgcagtgttaagtttcggggctcagaaaatccctgagagtattgcaagcttatt

SEQ ID NO: 105641 - DNA, 76 bp, Homo sapiens
tctccacacaatgcagtgttaagtttcggggctcagaaaatccctgagagtattgcaagcttatttctacagattt

SEQ ID NO: 105642 - DNA, 72 bp, Homo sapiens
acaatgcagtgttaagtttcggggctcagaaaatccctgagagtattgcaagcttatttctacagatttttt

SEQ ID NO: 105643 - DNA, 69 bp, Homo sapiens
tgttaagtttcggggctcagaaaatccctgagagtattgcaagcttatttctacagattttttttgggg

SEQ ID NO: 105644 - DNA, 65 bp, Homo sapiens
tttttgggggggggggtagatttcactttgtgtacaaatccactttagagctcccccttctctct

SEQ ID NO: 105645 - DNA, 68 bp, Homo sapiens
ggggggtagatttcactttgtgtacaaatccactttagagctcccccttctctcttaaattctcgaac

SEQ ID NO: 105646 - DNA, 71 bp, Homo sapiens
tagatttcactttgtgtacaaatccactttagagctcccccttctctcttaaattctcgaacctgtagaaa

SEQ ID NO: 105647 - DNA, 74 bp, Homo sapiens
tttgtgtacaaatccactttagagctcccccttctctcttaaattctcgaacctgtagaaagcatctaggcatg

SEQ ID NO: 105648 - DNA, 77 bp, Homo sapiens
ctcccccttctctcttaaattctcgaacctgtagaaagcatctaggcatgtcctctttatctcaactctgtacatca

SEQ ID NO: 105649 - DNA, 80 bp, Homo sapiens
tctcttaaattctcgaacctgtagaaagcatctaggcatgtcctctttatctcaactctgtacatcagcctgaagcaact

SEQ ID NO: 105650 - DNA, 81 bp, Homo sapiens
taaattctcgaacctgtagaaagcatctaggcatgtcctctttatctcaactctgtacatcagcctgaagcaacttgtcac

SEQ ID NO: 105651 - DNA, 79 bp, Homo sapiens
aacctgtagaaagcatctaggcatgtcctctttatctcaactctgtacatcagcctgaagcaacttgtcaccagaaaaa

SEQ ID NO: 105652 - DNA, 82 bp, Homo sapiens
aagcatctaggcatgtcctctttatctcaactctgtacatcagcctgaagcaacttgtcaccagaaaaatggaagatgagaa

SEQ ID NO: 105653 - DNA, 79 bp, Homo sapiens
tcctctttatctcaactctgtacatcagcctgaagcaacttgtcaccagaaaaatggaagatgagaagcagattacctt

SEQ ID NO: 105654 - DNA, 79 bp, Homo sapiens
tacatcagcctgaagcaacttgtcaccagaaaaatggaagatgagaagcagattacctttcaaattcagtaatgcaaat

SEQ ID NO: 105655 - DNA, 76 bp, Homo sapiens
cctgaagcaacttgtcaccagaaaaatggaagatgagaagcagattacctttcaaattcagtaatgcaaattatta

SEQ ID NO: 105656 - DNA, 77 bp, Homo sapiens
aacttgtcaccagaaaaatggaagatgagaagcagattacctttcaaattcagtaatgcaaattattagatgcagtc

SEQ ID NO: 105657 - DNA, 75 bp, Homo sapiens
aaaatggaagatgagaagcagattacctttcaaattcagtaatgcaaattattagatgcagtccttccctggaaa

SEQ ID NO: 105658 - DNA, 79 bp, Homo sapiens
tggaagatgagaagcagattacctttcaaattcagtaatgcaaattattagatgcagtccttccctggaaaatcatata

SEQ ID NO: 105659 - DNA, 78 bp, Homo sapiens
aagatgagaagcagattacctttcaaattcagtaatgcaaattattagatgcagtccttccctggaaaatcatataca

SEQ ID NO: 105660 - DNA, 75 bp, Homo sapiens
agcagattacctttcaaattcagtaatgcaaattattagatgcagtccttccctggaaaatcatatacacgttag

SEQ ID NO: 105661 - DNA, 73 bp, Homo sapiens
tacctttcaaattcagtaatgcaaattattagatgcagtccttccctggaaaatcatatacacgttagggttc

SEQ ID NO: 105662 - DNA, 74 bp, Homo sapiens
aaattcagtaatgcaaattattagatgcagtccttccctggaaaatcatatacacgttagggttctcaacaggc

SEQ ID NO: 105663 - DNA, 76 bp, Homo sapiens
aatgcaaattattagatgcagtccttccctggaaaatcatatacacgttagggttctcaacaggctgtctgactta

SEQ ID NO: 105664 - DNA, 75 bp, Homo sapiens
aaattattagatgcagtccttccctggaaaatcatatacacgttagggttctcaacaggctgtctgacttaatca

SEQ ID NO: 105665 - DNA, 76 bp, Homo sapiens
atgcagtccttccctggaaaatcatatacacgttagggttctcaacaggctgtctgacttaatcacagtgtattta

SEQ ID NO: 105666 - DNA, 74 bp, Homo sapiens
atcatatacacgttagggttctcaacaggctgtctgacttaatcacagtgtatttatttagggatttggttata

SEQ ID NO: 105667 - DNA, 75 bp, Homo sapiens
tctcaacaggctgtctgacttaatcacagtgtatttatttagggatttggttataaaacacttctatagcaacac

SEQ ID NO: 105668 - DNA, 75 bp, Homo sapiens
caggctgtctgacttaatcacagtgtatttatttagggatttggttataaaacacttctatagcaacactgtaga

SEQ ID NO: 105669 - DNA, 73 bp, Homo sapiens
aatcacagtgtatttatttagggatttggttataaaacacttctatagcaacactgtagaatggaccactgta

SEQ ID NO: 105670 - DNA, 70 bp, Homo sapiens
atttagggatttggttataaaacacttctatagcaacactgtagaatggaccactgtaaggaaaaacaca

SEQ ID NO: 105671 - DNA, 71 bp, Homo sapiens
ttggttataaaacacttctatagcaacactgtagaatggaccactgtaaggaaaaacacaaaagctggggc

SEQ ID NO: 105672 - DNA, 74 bp, Homo sapiens
aacacttctatagcaacactgtagaatggaccactgtaaggaaaaacacaaaagctggggccagcagtttatca

SEQ ID NO: 105673 - DNA, 74 bp, Homo sapiens
aatggaccactgtaaggaaaaacacaaaagctggggccagcagtttatcacctggaaatagcatggctttgata

SEQ ID NO: 105674 - DNA, 75 bp, Homo sapiens
tgtaaggaaaaacacaaaagctggggccagcagtttatcacctggaaatagcatggctttgataatttgactcat

SEQ ID NO: 105675 - DNA, 77 bp, Homo sapiens
aaaacacaaaagctggggccagcagtttatcacctggaaatagcatggctttgataatttgactcattatgaactca

SEQ ID NO: 105676 - DNA, 81 bp, Homo sapiens
tggggccagcagtttatcacctggaaatagcatggctttgataatttgactcattatgaactcacagaaatagatctattc

SEQ ID NO: 105677 - DNA, 81 bp, Homo sapiens
agcagtttatcacctggaaatagcatggctttgataatttgactcattatgaactcacagaaatagatctattctcagaaa

SEQ ID NO: 105678 - DNA, 80 bp, Homo sapiens
atcacctggaaatagcatggctttgataatttgactcattatgaactcacagaaatagatctattctcagaaatacattt

SEQ ID NO: 105679 - DNA, 78 bp, Homo sapiens
atagcatggctttgataatttgactcattatgaactcacagaaatagatctattctcagaaatacatttttaggggcg

SEQ ID NO: 105680 - DNA, 76 bp, Homo sapiens
tttgataatttgactcattatgaactcacagaaatagatctattctcagaaatacatttttaggggcggtgggtga

SEQ ID NO: 105681 - DNA, 74 bp, Homo sapiens
atgaactcacagaaatagatctattctcagaaatacatttttaggggcggtgggtgagggacaacagagaaaga

SEQ ID NO: 105682 - DNA, 73 bp, Homo sapiens
agaaatagatctattctcagaaatacatttttaggggcggtgggtgagggacaacagagaaagagtacatcca

SEQ ID NO: 105683 - DNA, 71 bp, Homo sapiens
ctattctcagaaatacatttttaggggcggtgggtgagggacaacagagaaagagtacatccagggaggac

SEQ ID NO: 105684 - DNA, 72 bp, Homo sapiens
aaatacatttttaggggcggtgggtgagggacaacagagaaagagtacatccagggaggacgctgatctctc

SEQ ID NO: 105685 - DNA, 83 bp, Homo sapiens
tgagggacaacagagaaagagtacatccagggaggacgctgatctctctgctctttatctaagagagattctcatatgtttga

SEQ ID NO: 105686 - DNA, 81 bp, Homo sapiens
gaggacgctgatctctctgctctttatctaagagagattctcatatgtttgactttttatagattttgccattgagtttca

SEQ ID NO: 105687 - DNA, 83 bp, Homo sapiens
tgatctctctgctctttatctaagagagattctcatatgtttgactttttatagattttgccattgagtttcatgattgccaa

SEQ ID NO: 105688 - DNA, 81 bp, Homo sapiens
tctttatctaagagagattctcatatgtttgactttttatagattttgccattgagtttcatgattgccaagatgcccaga

SEQ ID NO: 105689 - DNA, 82 bp, Homo sapiens
atctaagagagattctcatatgtttgactttttatagattttgccattgagtttcatgattgccaagatgcccagatcaata

SEQ ID NO: 105690 - DNA, 76 bp, Homo sapiens
tgactttttatagattttgccattgagtttcatgattgccaagatgcccagatcaataccttgagggaataccttt

SEQ ID NO: 105691 - DNA, 78 bp, Homo sapiens
tttatagattttgccattgagtttcatgattgccaagatgcccagatcaataccttgagggaataccttttggctgaa

SEQ ID NO: 105692 - DNA, 80 bp, Homo sapiens
attgagtttcatgattgccaagatgcccagatcaataccttgagggaataccttttggctgaacaacatgacactggaga

SEQ ID NO: 105693 - DNA, 81 bp, Homo sapiens
gtttcatgattgccaagatgcccagatcaataccttgagggaataccttttggctgaacaacatgacactggagactggca

SEQ ID NO: 105694 - DNA, 77 bp, Homo sapiens
aagatgcccagatcaataccttgagggaataccttttggctgaacaacatgacactggagactggcactggttttga

SEQ ID NO: 105695 - DNA, 74 bp, Homo sapiens
atcaataccttgagggaataccttttggctgaacaacatgacactggagactggcactggttttgaataaaata

SEQ ID NO: 105696 - DNA, 73 bp, Homo sapiens
tggctgaacaacatgacactggagactggcactggttttgaataaaataccagtgaggaaaatttttaaaata

SEQ ID NO: 105697 - DNA, 72 bp, Homo sapiens
acatgacactggagactggcactggttttgaataaaataccagtgaggaaaatttttaaaatactcaatata

SEQ ID NO: 105698 - DNA, 71 bp, Homo sapiens
ggagactggcactggttttgaataaaataccagtgaggaaaatttttaaaatactcaatatataattcatc

SEQ ID NO: 105699 - DNA, 71 bp, Homo sapiens
ctggttttgaataaaataccagtgaggaaaatttttaaaatactcaatatataattcatctgagaataaca

SEQ ID NO: 105700 - DNA, 74 bp, Homo sapiens
taaaataccagtgaggaaaatttttaaaatactcaatatataattcatctgagaataacaagtgacatgaacaa

SEQ ID NO: 105701 - DNA, 74 bp, Homo sapiens
cagtgaggaaaatttttaaaatactcaatatataattcatctgagaataacaagtgacatgaacaaaaattggc

SEQ ID NO: 105702 - DNA, 76 bp, Homo sapiens
ttaaaatactcaatatataattcatctgagaataacaagtgacatgaacaaaaattggctttttaagagatgaggc

SEQ ID NO: 105703 - DNA, 73 bp, Homo sapiens
aataacaagtgacatgaacaaaaattggctttttaagagatgaggctaagaaccagcttacagcctctcaaaa

SEQ ID NO: 105704 - DNA, 73 bp, Homo sapiens
tgacatgaacaaaaattggctttttaagagatgaggctaagaaccagcttacagcctctcaaaagaccttagt

SEQ ID NO: 105705 - DNA, 70 bp, Homo sapiens
aaaaattggctttttaagagatgaggctaagaaccagcttacagcctctcaaaagaccttagttgaatat

SEQ ID NO: 105706 - DNA, 71 bp, Homo sapiens
ttttaagagatgaggctaagaaccagcttacagcctctcaaaagaccttagttgaatattctttacccaag

SEQ ID NO: 105707 - DNA, 73 bp, Homo sapiens
agagatgaggctaagaaccagcttacagcctctcaaaagaccttagttgaatattctttacccaagtcacttc

SEQ ID NO: 105708 - DNA, 74 bp, Homo sapiens
ctaagaaccagcttacagcctctcaaaagaccttagttgaatattctttacccaagtcacttctgctgtcactg

SEQ ID NO: 105709 - DNA, 74 bp, Homo sapiens
tacagcctctcaaaagaccttagttgaatattctttacccaagtcacttctgctgtcactgtctatccttttta

SEQ ID NO: 105710 - DNA, 74 bp, Homo sapiens
tctcaaaagaccttagttgaatattctttacccaagtcacttctgctgtcactgtctatcctttttaacacaca

SEQ ID NO: 105711 - DNA, 75 bp, Homo sapiens
tagttgaatattctttacccaagtcacttctgctgtcactgtctatcctttttaacacacacatacaactcctta

SEQ ID NO: 105712 - DNA, 75 bp, Homo sapiens
atattctttacccaagtcacttctgctgtcactgtctatcctttttaacacacacatacaactccttatgttaca

SEQ ID NO: 105713 - DNA, 80 bp, Homo sapiens
aagtcacttctgctgtcactgtctatcctttttaacacacacatacaactccttatgttacagtgagctcttcagagctc

SEQ ID NO: 105714 - DNA, 82 bp, Homo sapiens
ctgtcactgtctatcctttttaacacacacatacaactccttatgttacagtgagctcttcagagctcctgaagctgccatc

SEQ ID NO: 105715 - DNA, 80 bp, Homo sapiens
tctatcctttttaacacacacatacaactccttatgttacagtgagctcttcagagctcctgaagctgccatccaggtat

SEQ ID NO: 105716 - DNA, 80 bp, Homo sapiens
ttttaacacacacatacaactccttatgttacagtgagctcttcagagctcctgaagctgccatccaggtattccttgaa

SEQ ID NO: 105717 - DNA, 82 bp, Homo sapiens
acacatacaactccttatgttacagtgagctcttcagagctcctgaagctgccatccaggtattccttgaactgttgtcatc

SEQ ID NO: 105718 - DNA, 79 bp, Homo sapiens
ttacagtgagctcttcagagctcctgaagctgccatccaggtattccttgaactgttgtcatcccggaaaattctgaaa

SEQ ID NO: 105719 - DNA, 70 bp, Homo sapiens
gtattccttgaactgttgtcatcccggaaaattctgaaactttcctagtatttaagtattcatatatccc

SEQ ID NO: 105720 - DNA, 67 bp, Homo sapiens
actgttgtcatcccggaaaattctgaaactttcctagtatttaagtattcatatatccccttttaag

SEQ ID NO: 105721 - DNA, 66 bp, Homo sapiens
tcccggaaaattctgaaactttcctagtatttaagtattcatatatccccttttaagtattagtcc

SEQ ID NO: 105722 - DNA, 70 bp, Homo sapiens
ctgaaactttcctagtatttaagtattcatatatccccttttaagtattagtccctatagtagatgcaaa

SEQ ID NO: 105723 - DNA, 71 bp, Homo sapiens
ttcctagtatttaagtattcatatatccccttttaagtattagtccctatagtagatgcaaaagaataaga

SEQ ID NO: 105724 - DNA, 71 bp, Homo sapiens
agtattcatatatccccttttaagtattagtccctatagtagatgcaaaagaataagatacaactctttat

SEQ ID NO: 105725 - DNA, 71 bp, Homo sapiens
catatatccccttttaagtattagtccctatagtagatgcaaaagaataagatacaactctttattttgta

SEQ ID NO: 105726 - DNA, 73 bp, Homo sapiens
aagtattagtccctatagtagatgcaaaagaataagatacaactctttattttgtaaggacaaatgaatgaca

SEQ ID NO: 105727 - DNA, 76 bp, Homo sapiens
tagtccctatagtagatgcaaaagaataagatacaactctttattttgtaaggacaaatgaatgacatatgtttca

SEQ ID NO: 105728 - DNA, 75 bp, Homo sapiens
tagtagatgcaaaagaataagatacaactctttattttgtaaggacaaatgaatgacatatgtttcaagaataaa

SEQ ID NO: 105729 - DNA, 74 bp, Homo sapiens
gaataagatacaactctttattttgtaaggacaaatgaatgacatatgtttcaagaataaattctttctctctc

SEQ ID NO: 105730 - DNA, 70 bp, Homo sapiens
aaatatatatatttgaatttaaattaatgtcatttaatattaatttcttagctgcaaaaaccaaatttca

SEQ ID NO: 105731 - DNA, 68 bp, Homo sapiens
atatatttgaatttaaattaatgtcatttaatattaatttcttagctgcaaaaaccaaatttcaaaaa

SEQ ID NO: 105732 - DNA, 68 bp, Homo sapiens
aatttaaattaatgtcatttaatattaatttcttagctgcaaaaaccaaatttcaaaaaatacataca

SEQ ID NO: 105733 - DNA, 71 bp, Homo sapiens
aataaataaaattttacaactaacattagccattgaatagtatgaacctagactctggttcttttatctga

SEQ ID NO: 105734 - DNA, 77 bp, Homo sapiens
attttacaactaacattagccattgaatagtatgaacctagactctggttcttttatctgatgacatgactagagga

SEQ ID NO: 105735 - DNA, 78 bp, Homo sapiens
acaactaacattagccattgaatagtatgaacctagactctggttcttttatctgatgacatgactagaggagggatg

SEQ ID NO: 105736 - DNA, 78 bp, Homo sapiens
attagccattgaatagtatgaacctagactctggttcttttatctgatgacatgactagaggagggatggccaaataa

SEQ ID NO: 105737 - DNA, 76 bp, Homo sapiens
cattgaatagtatgaacctagactctggttcttttatctgatgacatgactagaggagggatggccaaataaggtt

SEQ ID NO: 105738 - DNA, 75 bp, Homo sapiens
tatgaacctagactctggttcttttatctgatgacatgactagaggagggatggccaaataaggtttatctgggg

SEQ ID NO: 105739 - DNA, 76 bp, Homo sapiens
tggttcttttatctgatgacatgactagaggagggatggccaaataaggtttatctggggtcccaactctgattga

SEQ ID NO: 105740 - DNA, 76 bp, Homo sapiens
ttcttttatctgatgacatgactagaggagggatggccaaataaggtttatctggggtcccaactctgattgatta

SEQ ID NO: 105741 - DNA, 76 bp, Homo sapiens
ttttatctgatgacatgactagaggagggatggccaaataaggtttatctggggtcccaactctgattgattagaa

SEQ ID NO: 105742 - DNA, 76 bp, Homo sapiens
atgacatgactagaggagggatggccaaataaggtttatctggggtcccaactctgattgattagaactggctgaa

SEQ ID NO: 105743 - DNA, 73 bp, Homo sapiens
tagaggagggatggccaaataaggtttatctggggtcccaactctgattgattagaactggctgaaggaagga

SEQ ID NO: 105744 - DNA, 73 bp, Homo sapiens
ccaaataaggtttatctggggtcccaactctgattgattagaactggctgaaggaaggactctgagaccacaa

SEQ ID NO: 105745 - DNA, 76 bp, Homo sapiens
aaggtttatctggggtcccaactctgattgattagaactggctgaaggaaggactctgagaccacaactgagcaca

SEQ ID NO: 105746 - DNA, 85 bp, Homo sapiens
tcccaactctgattgattagaactggctgaaggaaggactctgagaccacaactgagcacagcaagaatgagtgctgtgatcaat

SEQ ID NO: 105747 - DNA, 86 bp, Homo sapiens
actctgattgattagaactggctgaaggaaggactctgagaccacaactgagcacagcaagaatgagtgctgtgatcaattattga

SEQ ID NO: 105748 - DNA, 87 bp, Homo sapiens
attagaactggctgaaggaaggactctgagaccacaactgagcacagcaagaatgagtgctgtgatcaattattgatgtctgcaaca

SEQ ID NO: 105749 - DNA, 86 bp, Homo sapiens
ctgaaggaaggactctgagaccacaactgagcacagcaagaatgagtgctgtgatcaattattgatgtctgcaacaggcaagaggg

SEQ ID NO: 105750 - DNA, 90 bp, Homo sapiens
actctgagaccacaactgagcacagcaagaatgagtgctgtgatcaattattgatgtctgcaacaggcaagaggggacatgtgctcaatg

SEQ ID NO: 105751 - DNA, 91 bp, Homo sapiens
aactgagcacagcaagaatgagtgctgtgatcaattattgatgtctgcaacaggcaagaggggacatgtgctcaatgggcacatgtggcta

SEQ ID NO: 105752 - DNA, 89 bp, Homo sapiens
acagcaagaatgagtgctgtgatcaattattgatgtctgcaacaggcaagaggggacatgtgctcaatgggcacatgtggctagtggcc

SEQ ID NO: 105753 - DNA, 89 bp, Homo sapiens
atgagtgctgtgatcaattattgatgtctgcaacaggcaagaggggacatgtgctcaatgggcacatgtggctagtggccgccatatta

SEQ ID NO: 105754 - DNA, 86 bp, Homo sapiens
tcaattattgatgtctgcaacaggcaagaggggacatgtgctcaatgggcacatgtggctagtggccgccatattaggcagtgtaa

SEQ ID NO: 105755 - DNA, 84 bp, Homo sapiens
ttgatgtctgcaacaggcaagaggggacatgtgctcaatgggcacatgtggctagtggccgccatattaggcagtgtaaaatta

SEQ ID NO: 105756 - DNA, 80 bp, Homo sapiens
aacaggcaagaggggacatgtgctcaatgggcacatgtggctagtggccgccatattaggcagtgtaaaattatggacta

SEQ ID NO: 105757 - DNA, 80 bp, Homo sapiens
gggacatgtgctcaatgggcacatgtggctagtggccgccatattaggcagtgtaaaattatggactatttacataatcg

SEQ ID NO: 105758 - DNA, 77 bp, Homo sapiens
ctcaatgggcacatgtggctagtggccgccatattaggcagtgtaaaattatggactatttacataatcgtggaaat

SEQ ID NO: 105759 - DNA, 77 bp, Homo sapiens
acatgtggctagtggccgccatattaggcagtgtaaaattatggactatttacataatcgtggaaatttctgttgca

SEQ ID NO: 105760 - DNA, 75 bp, Homo sapiens
tagtggccgccatattaggcagtgtaaaattatggactatttacataatcgtggaaatttctgttgcaccactta

SEQ ID NO: 105761 - DNA, 74 bp, Homo sapiens
atattaggcagtgtaaaattatggactatttacataatcgtggaaatttctgttgcaccacttagagtccagag

SEQ ID NO: 105762 - DNA, 74 bp, Homo sapiens
cagtgtaaaattatggactatttacataatcgtggaaatttctgttgcaccacttagagtccagagttctagat

SEQ ID NO: 105763 - DNA, 76 bp, Homo sapiens
attatggactatttacataatcgtggaaatttctgttgcaccacttagagtccagagttctagatttcatattgag

SEQ ID NO: 105764 - DNA, 76 bp, Homo sapiens
ctatttacataatcgtggaaatttctgttgcaccacttagagtccagagttctagatttcatattgagttcttcaa

SEQ ID NO: 105765 - DNA, 78 bp, Homo sapiens
tggaaatttctgttgcaccacttagagtccagagttctagatttcatattgagttcttcaattggaatgaatactgaa

SEQ ID NO: 105766 - DNA, 79 bp, Homo sapiens
atttctgttgcaccacttagagtccagagttctagatttcatattgagttcttcaattggaatgaatactgaatggcta

SEQ ID NO: 105767 - DNA, 80 bp, Homo sapiens
accacttagagtccagagttctagatttcatattgagttcttcaattggaatgaatactgaatggctacactgccacaca

SEQ ID NO: 105768 - DNA, 70 bp, Homo sapiens
acacacacactccacccaattcctttcagagataaaattttgagatttgagaaaagacaaggaagaaaac

SEQ ID NO: 105769 - DNA, 70 bp, Homo sapiens
ccacccaattcctttcagagataaaattttgagatttgagaaaagacaaggaagaaaactgcaagtgaac

SEQ ID NO: 105770 - DNA, 72 bp, Homo sapiens
cctttcagagataaaattttgagatttgagaaaagacaaggaagaaaactgcaagtgaaccatatatagaag

SEQ ID NO: 105771 - DNA, 73 bp, Homo sapiens
gataaaattttgagatttgagaaaagacaaggaagaaaactgcaagtgaaccatatatagaagtagtttctca

SEQ ID NO: 105772 - DNA, 74 bp, Homo sapiens
gagatttgagaaaagacaaggaagaaaactgcaagtgaaccatatatagaagtagtttctcaattgtaaggtca

SEQ ID NO: 105773 - DNA, 71 bp, Homo sapiens
aaagacaaggaagaaaactgcaagtgaaccatatatagaagtagtttctcaattgtaaggtcacccatttc

SEQ ID NO: 105774 - DNA, 71 bp, Homo sapiens
aagaaaactgcaagtgaaccatatatagaagtagtttctcaattgtaaggtcacccatttcttcctagact

SEQ ID NO: 105775 - DNA, 70 bp, Homo sapiens
aactgcaagtgaaccatatatagaagtagtttctcaattgtaaggtcacccatttcttcctagacttttt

SEQ ID NO: 105776 - DNA, 72 bp, Homo sapiens
ccatatatagaagtagtttctcaattgtaaggtcacccatttcttcctagactttttttgaagaagatgaca

SEQ ID NO: 105777 - DNA, 70 bp, Homo sapiens
aagtagtttctcaattgtaaggtcacccatttcttcctagactttttttgaagaagatgacagttcctca

SEQ ID NO: 105778 - DNA, 69 bp, Homo sapiens
aattgtaaggtcacccatttcttcctagactttttttgaagaagatgacagttcctcatcctaaccttc

SEQ ID NO: 105779 - DNA, 69 bp, Homo sapiens
tcacccatttcttcctagactttttttgaagaagatgacagttcctcatcctaaccttccaaactttct

SEQ ID NO: 105780 - DNA, 69 bp, Homo sapiens
ttcttcctagactttttttgaagaagatgacagttcctcatcctaaccttccaaactttcttggttgaa

SEQ ID NO: 105781 - DNA, 71 bp, Homo sapiens
actttttttgaagaagatgacagttcctcatcctaaccttccaaactttcttggttgaatctgccaggcaa

SEQ ID NO: 105782 - DNA, 76 bp, Homo sapiens
aagaagatgacagttcctcatcctaaccttccaaactttcttggttgaatctgccaggcaactcacatccaatatc

SEQ ID NO: 105783 - DNA, 76 bp, Homo sapiens
agttcctcatcctaaccttccaaactttcttggttgaatctgccaggcaactcacatccaatatcctaagagatca

SEQ ID NO: 105784 - DNA, 78 bp, Homo sapiens
ctaaccttccaaactttcttggttgaatctgccaggcaactcacatccaatatcctaagagatcacaagcagtcacaa

SEQ ID NO: 105785 - DNA, 82 bp, Homo sapiens
aaactttcttggttgaatctgccaggcaactcacatccaatatcctaagagatcacaagcagtcacaatggtagcagacaga

SEQ ID NO: 105786 - DNA, 86 bp, Homo sapiens
ttggttgaatctgccaggcaactcacatccaatatcctaagagatcacaagcagtcacaatggtagcagacagagctggctagaat

SEQ ID NO: 105787 - DNA, 88 bp, Homo sapiens
ttgaatctgccaggcaactcacatccaatatcctaagagatcacaagcagtcacaatggtagcagacagagctggctagaattggcaa

SEQ ID NO: 105788 - DNA, 87 bp, Homo sapiens
aatctgccaggcaactcacatccaatatcctaagagatcacaagcagtcacaatggtagcagacagagctggctagaattggcaaga

SEQ ID NO: 105789 - DNA, 85 bp, Homo sapiens
aggcaactcacatccaatatcctaagagatcacaagcagtcacaatggtagcagacagagctggctagaattggcaagagaggcc

SEQ ID NO: 105790 - DNA, 86 bp, Homo sapiens
acatccaatatcctaagagatcacaagcagtcacaatggtagcagacagagctggctagaattggcaagagaggccccatcactgc

SEQ ID NO: 105791 - DNA, 85 bp, Homo sapiens
tatcctaagagatcacaagcagtcacaatggtagcagacagagctggctagaattggcaagagaggccccatcactgccacccac

SEQ ID NO: 105792 - DNA, 84 bp, Homo sapiens
atcacaagcagtcacaatggtagcagacagagctggctagaattggcaagagaggccccatcactgccacccacttctcatttg

SEQ ID NO: 105793 - DNA, 79 bp, Homo sapiens
acaatggtagcagacagagctggctagaattggcaagagaggccccatcactgccacccacttctcatttgggccggaa

SEQ ID NO: 105794 - DNA, 78 bp, Homo sapiens
agacagagctggctagaattggcaagagaggccccatcactgccacccacttctcatttgggccggaatcagatgggt

SEQ ID NO: 105795 - DNA, 75 bp, Homo sapiens
ctggctagaattggcaagagaggccccatcactgccacccacttctcatttgggccggaatcagatgggttttgt

SEQ ID NO: 105796 - DNA, 75 bp, Homo sapiens
attggcaagagaggccccatcactgccacccacttctcatttgggccggaatcagatgggttttgttgtctagta

SEQ ID NO: 105797 - DNA, 75 bp, Homo sapiens
gccccatcactgccacccacttctcatttgggccggaatcagatgggttttgttgtctagtagaaggattatcta

SEQ ID NO: 105798 - DNA, 72 bp, Homo sapiens
actgccacccacttctcatttgggccggaatcagatgggttttgttgtctagtagaaggattatctaattta

SEQ ID NO: 105799 - DNA, 71 bp, Homo sapiens
acttctcatttgggccggaatcagatgggttttgttgtctagtagaaggattatctaatttacctctgagt

SEQ ID NO: 105800 - DNA, 71 bp, Homo sapiens
atttgggccggaatcagatgggttttgttgtctagtagaaggattatctaatttacctctgagtttctcta

SEQ ID NO: 105801 - DNA, 75 bp, Homo sapiens
aatcagatgggttttgttgtctagtagaaggattatctaatttacctctgagtttctctatgtgattcttggagc

SEQ ID NO: 105802 - DNA, 79 bp, Homo sapiens
tttgttgtctagtagaaggattatctaatttacctctgagtttctctatgtgattcttggagcccagcattctgatgaa

SEQ ID NO: 105803 - DNA, 79 bp, Homo sapiens
tagtagaaggattatctaatttacctctgagtttctctatgtgattcttggagcccagcattctgatgaacgcataaaa

SEQ ID NO: 105804 - DNA, 76 bp, Homo sapiens
attatctaatttacctctgagtttctctatgtgattcttggagcccagcattctgatgaacgcataaaaggaattt

SEQ ID NO: 105805 - DNA, 76 bp, Homo sapiens
atttacctctgagtttctctatgtgattcttggagcccagcattctgatgaacgcataaaaggaattttgacttgg

SEQ ID NO: 105806 - DNA, 77 bp, Homo sapiens
agtttctctatgtgattcttggagcccagcattctgatgaacgcataaaaggaattttgacttgggttgtgctaatc

SEQ ID NO: 105807 - DNA, 77 bp, Homo sapiens
atgtgattcttggagcccagcattctgatgaacgcataaaaggaattttgacttgggttgtgctaatcctccttaca

SEQ ID NO: 105808 - DNA, 79 bp, Homo sapiens
agcccagcattctgatgaacgcataaaaggaattttgacttgggttgtgctaatcctccttacacatctgtgctgccta

SEQ ID NO: 105809 - DNA, 78 bp, Homo sapiens
attctgatgaacgcataaaaggaattttgacttgggttgtgctaatcctccttacacatctgtgctgcctagaggtga

SEQ ID NO: 105810 - DNA, 74 bp, Homo sapiens
ataaaaggaattttgacttgggttgtgctaatcctccttacacatctgtgctgcctagaggtgattcacttctt

SEQ ID NO: 105811 - DNA, 75 bp, Homo sapiens
aattttgacttgggttgtgctaatcctccttacacatctgtgctgcctagaggtgattcacttctttagaatccc

SEQ ID NO: 105812 - DNA, 77 bp, Homo sapiens
ggttgtgctaatcctccttacacatctgtgctgcctagaggtgattcacttctttagaatccctccaataatattat

SEQ ID NO: 105813 - DNA, 75 bp, Homo sapiens
ctaatcctccttacacatctgtgctgcctagaggtgattcacttctttagaatccctccaataatattattattt

SEQ ID NO: 105814 - DNA, 76 bp, Homo sapiens
ttacacatctgtgctgcctagaggtgattcacttctttagaatccctccaataatattattatttttctaagcgtc

SEQ ID NO: 105815 - DNA, 72 bp, Homo sapiens
ctgcctagaggtgattcacttctttagaatccctccaataatattattatttttctaagcgtctggaaggta

SEQ ID NO: 105816 - DNA, 71 bp, Homo sapiens
gaggtgattcacttctttagaatccctccaataatattattatttttctaagcgtctggaaggtagtgtct

SEQ ID NO: 105817 - DNA, 70 bp, Homo sapiens
cacttctttagaatccctccaataatattattatttttctaagcgtctggaaggtagtgtctttgtttgc

SEQ ID NO: 105818 - DNA, 69 bp, Homo sapiens
agaatccctccaataatattattatttttctaagcgtctggaaggtagtgtctttgtttgctagggttg

SEQ ID NO: 105819 - DNA, 71 bp, Homo sapiens
atattattatttttctaagcgtctggaaggtagtgtctttgtttgctagggttgtctgcatttgaaaacaa

SEQ ID NO: 105820 - DNA, 70 bp, Homo sapiens
ttatttttctaagcgtctggaaggtagtgtctttgtttgctagggttgtctgcatttgaaaacaagttaa

SEQ ID NO: 105821 - DNA, 76 bp, Homo sapiens
cgtctggaaggtagtgtctttgtttgctagggttgtctgcatttgaaaacaagttaatcaacatgcattatatata

SEQ ID NO: 105822 - DNA, 78 bp, Homo sapiens
atacacgtatatgtattatattttatatgtatataacgtgatatatgcgcctaaatagactgtggttcttttatctga

SEQ ID NO: 105823 - DNA, 81 bp, Homo sapiens
atgtattatattttatatgtatataacgtgatatatgcgcctaaatagactgtggttcttttatctgatgagatgactaga

SEQ ID NO: 105824 - DNA, 80 bp, Homo sapiens
ttttatatgtatataacgtgatatatgcgcctaaatagactgtggttcttttatctgatgagatgactagaggagggatg

SEQ ID NO: 105825 - DNA, 80 bp, Homo sapiens
tatataacgtgatatatgcgcctaaatagactgtggttcttttatctgatgagatgactagaggagggatggccaaataa

SEQ ID NO: 105826 - DNA, 74 bp, Homo sapiens
cgcctaaatagactgtggttcttttatctgatgagatgactagaggagggatggccaaataaggtttatctggg

SEQ ID NO: 105827 - DNA, 75 bp, Homo sapiens
tgtggttcttttatctgatgagatgactagaggagggatggccaaataaggtttatctggggtcccaactctgat

SEQ ID NO: 105828 - DNA, 76 bp, Homo sapiens
tttatctgatgagatgactagaggagggatggccaaataaggtttatctggggtcccaactctgattgattggaat

SEQ ID NO: 105829 - DNA, 76 bp, Homo sapiens
atgagatgactagaggagggatggccaaataaggtttatctggggtcccaactctgattgattggaattggctgaa

SEQ ID NO: 105830 - DNA, 72 bp, Homo sapiens
actagaggagggatggccaaataaggtttatctggggtcccaactctgattgattggaattggctgaaggaa

SEQ ID NO: 105831 - DNA, 74 bp, Homo sapiens
atggccaaataaggtttatctggggtcccaactctgattgattggaattggctgaaggaaggacactgagacca

SEQ ID NO: 105832 - DNA, 76 bp, Homo sapiens
ataaggtttatctggggtcccaactctgattgattggaattggctgaaggaaggacactgagaccacaactgagca

SEQ ID NO: 105833 - DNA, 85 bp, Homo sapiens
ggtcccaactctgattgattggaattggctgaaggaaggacactgagaccacaactgagcacagcaagaatgagtgctgtgatca

SEQ ID NO: 105834 - DNA, 84 bp, Homo sapiens
aactctgattgattggaattggctgaaggaaggacactgagaccacaactgagcacagcaagaatgagtgctgtgatcaattat

SEQ ID NO: 105835 - DNA, 86 bp, Homo sapiens
ctgaaggaaggacactgagaccacaactgagcacagcaagaatgagtgctgtgatcaattattgatgtctgcaacaggcaagaggg

SEQ ID NO: 105836 - DNA, 86 bp, Homo sapiens
aaggacactgagaccacaactgagcacagcaagaatgagtgctgtgatcaattattgatgtctgcaacaggcaagaggggaagatg

SEQ ID NO: 105837 - DNA, 90 bp, Homo sapiens
acaactgagcacagcaagaatgagtgctgtgatcaattattgatgtctgcaacaggcaagaggggaagatgtggctggctatctgcatac

SEQ ID NO: 105838 - DNA, 89 bp, Homo sapiens
acagcaagaatgagtgctgtgatcaattattgatgtctgcaacaggcaagaggggaagatgtggctggctatctgcataccagatagtc

SEQ ID NO: 105839 - DNA, 86 bp, Homo sapiens
aagaatgagtgctgtgatcaattattgatgtctgcaacaggcaagaggggaagatgtggctggctatctgcataccagatagtccc

SEQ ID NO: 105840 - DNA, 86 bp, Homo sapiens
gctgtgatcaattattgatgtctgcaacaggcaagaggggaagatgtggctggctatctgcataccagatagtccccatcttaata

SEQ ID NO: 105841 - DNA, 84 bp, Homo sapiens
tgatcaattattgatgtctgcaacaggcaagaggggaagatgtggctggctatctgcataccagatagtccccatcttaataaa

SEQ ID NO: 105842 - DNA, 82 bp, Homo sapiens
atcaattattgatgtctgcaacaggcaagaggggaagatgtggctggctatctgcataccagatagtccccatcttaataaa

SEQ ID NO: 105843 - DNA, 81 bp, Homo sapiens
attattgatgtctgcaacaggcaagaggggaagatgtggctggctatctgcataccagatagtccccatcttaataaagaa

SEQ ID NO: 105844 - DNA, 81 bp, Homo sapiens
atgtctgcaacaggcaagaggggaagatgtggctggctatctgcataccagatagtccccatcttaataaagaatgaagct

SEQ ID NO: 105845 - DNA, 79 bp, Homo sapiens
aacaggcaagaggggaagatgtggctggctatctgcataccagatagtccccatcttaataaagaatgaagcttgtgga

SEQ ID NO: 105846 - DNA, 77 bp, Homo sapiens
aagaggggaagatgtggctggctatctgcataccagatagtccccatcttaataaagaatgaagcttgtggagggga

SEQ ID NO: 105847 - DNA, 79 bp, Homo sapiens
aagatgtggctggctatctgcataccagatagtccccatcttaataaagaatgaagcttgtggaggggacagtgggaga

SEQ ID NO: 105848 - DNA, 78 bp, Homo sapiens
gtggctggctatctgcataccagatagtccccatcttaataaagaatgaagcttgtggaggggacagtgggagatagg

SEQ ID NO: 105849 - DNA, 78 bp, Homo sapiens
atctgcataccagatagtccccatcttaataaagaatgaagcttgtggaggggacagtgggagatagggctgcgtaga

SEQ ID NO: 105850 - DNA, 74 bp, Homo sapiens
tagtccccatcttaataaagaatgaagcttgtggaggggacagtgggagatagggctgcgtagagtggttggat

SEQ ID NO: 105851 - DNA, 74 bp, Homo sapiens
ttaataaagaatgaagcttgtggaggggacagtgggagatagggctgcgtagagtggttggatttgtgttcaaa

SEQ ID NO: 105852 - DNA, 74 bp, Homo sapiens
aaagaatgaagcttgtggaggggacagtgggagatagggctgcgtagagtggttggatttgtgttcaaagcgcc

SEQ ID NO: 105853 - DNA, 76 bp, Homo sapiens
ttgtggaggggacagtgggagatagggctgcgtagagtggttggatttgtgttcaaagcgccctgagaagtctgta

SEQ ID NO: 105854 - DNA, 75 bp, Homo sapiens
agtgggagatagggctgcgtagagtggttggatttgtgttcaaagcgccctgagaagtctgtactgaattcctta

SEQ ID NO: 105855 - DNA, 77 bp, Homo sapiens
gatttgtgttcaaagcgccctgagaagtctgtactgaattccttaggcagtggggagtggaagagtcttgagcatta

SEQ ID NO: 105856 - DNA, 79 bp, Homo sapiens
tgttcaaagcgccctgagaagtctgtactgaattccttaggcagtggggagtggaagagtcttgagcattatagcaata

SEQ ID NO: 105857 - DNA, 81 bp, Homo sapiens
tgagaagtctgtactgaattccttaggcagtggggagtggaagagtcttgagcattatagcaatatgacaacatctgaact

SEQ ID NO: 105858 - DNA, 78 bp, Homo sapiens
agtctgtactgaattccttaggcagtggggagtggaagagtcttgagcattatagcaatatgacaacatctgaacttt

SEQ ID NO: 105859 - DNA, 77 bp, Homo sapiens
aattccttaggcagtggggagtggaagagtcttgagcattatagcaatatgacaacatctgaacttttaggaagcaa

SEQ ID NO: 105860 - DNA, 79 bp, Homo sapiens
tggggagtggaagagtcttgagcattatagcaatatgacaacatctgaacttttaggaagcaaacttggccatatgtaa

SEQ ID NO: 105861 - DNA, 80 bp, Homo sapiens
aagagtcttgagcattatagcaatatgacaacatctgaacttttaggaagcaaacttggccatatgtaagatggactgaa

SEQ ID NO: 105862 - DNA, 80 bp, Homo sapiens
tcttgagcattatagcaatatgacaacatctgaacttttaggaagcaaacttggccatatgtaagatggactgaagtggg

SEQ ID NO: 105863 - DNA, 78 bp, Homo sapiens
tatagcaatatgacaacatctgaacttttaggaagcaaacttggccatatgtaagatggactgaagtgggggaggata

SEQ ID NO: 105864 - DNA, 72 bp, Homo sapiens
acatctgaacttttaggaagcaaacttggccatatgtaagatggactgaagtgggggaggataaccaataaa

SEQ ID NO: 105865 - DNA, 69 bp, Homo sapiens
aacttttaggaagcaaacttggccatatgtaagatggactgaagtgggggaggataaccaataaactag

SEQ ID NO: 105866 - DNA, 68 bp, Homo sapiens
gtaagatggactgaagtgggggaggataaccaataaactaggagcttaaataagaaaaggtaaggaca

SEQ ID NO: 105867 - DNA, 69 bp, Homo sapiens
aagtgggggaggataaccaataaactaggagcttaaataagaaaaggtaaggacagtgcagatgtggga

SEQ ID NO: 105868 - DNA, 70 bp, Homo sapiens
aggataaccaataaactaggagcttaaataagaaaaggtaaggacagtgcagatgtgggaacattagaac

SEQ ID NO: 105869 - DNA, 73 bp, Homo sapiens
aataaactaggagcttaaataagaaaaggtaaggacagtgcagatgtgggaacattagaactgccttggagca

SEQ ID NO: 105870 - DNA, 76 bp, Homo sapiens
ttaaataagaaaaggtaaggacagtgcagatgtgggaacattagaactgccttggagcaaatgataaccatgagat

SEQ ID NO: 105871 - DNA, 75 bp, Homo sapiens
aaaaggtaaggacagtgcagatgtgggaacattagaactgccttggagcaaatgataaccatgagattcccattt

SEQ ID NO: 105872 - DNA, 75 bp, Homo sapiens
attagaactgccttggagcaaatgataaccatgagattcccattttggatgattgagagggtgttttaatttata

SEQ ID NO: 105873 - DNA, 74 bp, Homo sapiens
ccttggagcaaatgataaccatgagattcccattttggatgattgagagggtgttttaatttataatgaaggta

SEQ ID NO: 105874 - DNA, 73 bp, Homo sapiens
agcaaatgataaccatgagattcccattttggatgattgagagggtgttttaatttataatgaaggtaattaa

SEQ ID NO: 105875 - DNA, 72 bp, Homo sapiens
ccatgagattcccattttggatgattgagagggtgttttaatttataatgaaggtaattaatttatagagag

SEQ ID NO: 105876 - DNA, 71 bp, Homo sapiens
tcccattttggatgattgagagggtgttttaatttataatgaaggtaattaatttatagagagttgtattc

SEQ ID NO: 105877 - DNA, 70 bp, Homo sapiens
ggatgattgagagggtgttttaatttataatgaaggtaattaatttatagagagttgtattctttttatc

SEQ ID NO: 105878 - DNA, 68 bp, Homo sapiens
gagggtgttttaatttataatgaaggtaattaatttatagagagttgtattctttttatctgttttca

SEQ ID NO: 105879 - DNA, 74 bp, Homo sapiens
tataatgaaggtaattaatttatagagagttgtattctttttatctgttttcatgtagagtgcttattacagta

SEQ ID NO: 105880 - DNA, 74 bp, Homo sapiens
gaaggtaattaatttatagagagttgtattctttttatctgttttcatgtagagtgcttattacagtatagatg

SEQ ID NO: 105881 - DNA, 79 bp, Homo sapiens
tgttttcatgtagagtgcttattacagtatagatgttataaacatgtttattgagtaatatatgataataaattaatga

SEQ ID NO: 105882 - DNA, 71 bp, Homo sapiens
atgaatgaatgaaagagtaagtgaaagttaggaggaggagctggttttgaggaaaagaggacaagttatat

SEQ ID NO: 105883 - DNA, 70 bp, Homo sapiens
tgaatgaaagagtaagtgaaagttaggaggaggagctggttttgaggaaaagaggacaagttatatttta

SEQ ID NO: 105884 - DNA, 69 bp, Homo sapiens
agtaagtgaaagttaggaggaggagctggttttgaggaaaagaggacaagttatattttatacattcta

SEQ ID NO: 105885 - DNA, 69 bp, Homo sapiens
ttaggaggaggagctggttttgaggaaaagaggacaagttatattttatacattctaagtttcaggtgt

SEQ ID NO: 105886 - DNA, 70 bp, Homo sapiens
aggagctggttttgaggaaaagaggacaagttatattttatacattctaagtttcaggtgttggcagggc

SEQ ID NO: 105887 - DNA, 72 bp, Homo sapiens
tttgaggaaaagaggacaagttatattttatacattctaagtttcaggtgttggcagggccctctgtagaga

SEQ ID NO: 105888 - DNA, 74 bp, Homo sapiens
acaagttatattttatacattctaagtttcaggtgttggcagggccctctgtagagatgtccccagttcagaca

SEQ ID NO: 105889 - DNA, 75 bp, Homo sapiens
atattttatacattctaagtttcaggtgttggcagggccctctgtagagatgtccccagttcagacatagctttc

SEQ ID NO: 105890 - DNA, 76 bp, Homo sapiens
tacattctaagtttcaggtgttggcagggccctctgtagagatgtccccagttcagacatagctttccagtcctct

SEQ ID NO: 105891 - DNA, 74 bp, Homo sapiens
aggtgttggcagggccctctgtagagatgtccccagttcagacatagctttccagtcctcttcaaacctaccat

SEQ ID NO: 105892 - DNA, 75 bp, Homo sapiens
agggccctctgtagagatgtccccagttcagacatagctttccagtcctcttcaaacctaccattataccactgc

SEQ ID NO: 105893 - DNA, 77 bp, Homo sapiens
tctgtagagatgtccccagttcagacatagctttccagtcctcttcaaacctaccattataccactgctgggttgtg

SEQ ID NO: 105894 - DNA, 73 bp, Homo sapiens
atgtccccagttcagacatagctttccagtcctcttcaaacctaccattataccactgctgggttgtgggttc

SEQ ID NO: 105895 - DNA, 71 bp, Homo sapiens
agacatagctttccagtcctcttcaaacctaccattataccactgctgggttgtgggttctcccctctaaa

SEQ ID NO: 105896 - DNA, 69 bp, Homo sapiens
ttccagtcctcttcaaacctaccattataccactgctgggttgtgggttctcccctctaaacgactact

SEQ ID NO: 105897 - DNA, 72 bp, Homo sapiens
ttcaaacctaccattataccactgctgggttgtgggttctcccctctaaacgactacttcctgcatatcact

SEQ ID NO: 105898 - DNA, 74 bp, Homo sapiens
ctaccattataccactgctgggttgtgggttctcccctctaaacgactacttcctgcatatcactttccatata

SEQ ID NO: 105899 - DNA, 75 bp, Homo sapiens
actgctgggttgtgggttctcccctctaaacgactacttcctgcatatcactttccatatagctgatttatgatt

SEQ ID NO: 105900 - DNA, 74 bp, Homo sapiens
tgggttgtgggttctcccctctaaacgactacttcctgcatatcactttccatatagctgatttatgattttct

SEQ ID NO: 105901 - DNA, 76 bp, Homo sapiens
cgactacttcctgcatatcactttccatatagctgatttatgattttcttttagaaaaccatgccggtgatcttta

SEQ ID NO: 105902 - DNA, 76 bp, Homo sapiens
cctgcatatcactttccatatagctgatttatgattttcttttagaaaaccatgccggtgatctttacctatgtaa

SEQ ID NO: 105903 - DNA, 72 bp, Homo sapiens
catatagctgatttatgattttcttttagaaaaccatgccggtgatctttacctatgtaaaacagttacaat

SEQ ID NO: 105904 - DNA, 70 bp, Homo sapiens
tgattttcttttagaaaaccatgccggtgatctttacctatgtaaaacagttacaatttattgaggagtc

SEQ ID NO: 105905 - DNA, 75 bp, Homo sapiens
ttagaaaaccatgccggtgatctttacctatgtaaaacagttacaatttattgaggagtccattatgtgatatca

SEQ ID NO: 105906 - DNA, 76 bp, Homo sapiens
aaccatgccggtgatctttacctatgtaaaacagttacaatttattgaggagtccattatgtgatatcatttgtga

SEQ ID NO: 105907 - DNA, 79 bp, Homo sapiens
ggtgatctttacctatgtaaaacagttacaatttattgaggagtccattatgtgatatcatttgtgatacaatgtatca

SEQ ID NO: 105908 - DNA, 81 bp, Homo sapiens
tgtaaaacagttacaatttattgaggagtccattatgtgatatcatttgtgatacaatgtatcattgaatctttatggctc

SEQ ID NO: 105909 - DNA, 82 bp, Homo sapiens
tattgaggagtccattatgtgatatcatttgtgatacaatgtatcattgaatctttatggctccctaatattggggacaata

SEQ ID NO: 105910 - DNA, 79 bp, Homo sapiens
ccattatgtgatatcatttgtgatacaatgtatcattgaatctttatggctccctaatattggggacaatattataccc

SEQ ID NO: 105911 - DNA, 70 bp, Homo sapiens
atctttatggctccctaatattggggacaatattataccccttctactgaggttactaactcaagtagta

SEQ ID NO: 105912 - DNA, 70 bp, Homo sapiens
ctccctaatattggggacaatattataccccttctactgaggttactaactcaagtagtagagttgagat

SEQ ID NO: 105913 - DNA, 72 bp, Homo sapiens
atattggggacaatattataccccttctactgaggttactaactcaagtagtagagttgagattcaaatcca

SEQ ID NO: 105914 - DNA, 71 bp, Homo sapiens
aatattataccccttctactgaggttactaactcaagtagtagagttgagattcaaatccaagttgccttc

SEQ ID NO: 105915 - DNA, 70 bp, Homo sapiens
cttctactgaggttactaactcaagtagtagagttgagattcaaatccaagttgccttccttctaaattt

SEQ ID NO: 105916 - DNA, 68 bp, Homo sapiens
gttactaactcaagtagtagagttgagattcaaatccaagttgccttccttctaaattttacccctgt

SEQ ID NO: 105917 - DNA, 68 bp, Homo sapiens
agttgagattcaaatccaagttgccttccttctaaattttacccctgtttgtttccccacactgtctc

SEQ ID NO: 105918 - DNA, 71 bp, Homo sapiens
ttgccttccttctaaattttacccctgtttgtttccccacactgtctctcactactaagtgatacattcta

SEQ ID NO: 105919 - DNA, 70 bp, Homo sapiens
tccttctaaattttacccctgtttgtttccccacactgtctctcactactaagtgatacattctagaaaa

SEQ ID NO: 105920 - DNA, 77 bp, Homo sapiens
ttttacccctgtttgtttccccacactgtctctcactactaagtgatacattctagaaaatgctcatgccatgcttc

SEQ ID NO: 105921 - DNA, 83 bp, Homo sapiens
ttgtttccccacactgtctctcactactaagtgatacattctagaaaatgctcatgccatgcttctgatctcatgttaaccaa

SEQ ID NO: 105922 - DNA, 83 bp, Homo sapiens
actgtctctcactactaagtgatacattctagaaaatgctcatgccatgcttctgatctcatgttaaccaacggtgcctagtg

SEQ ID NO: 105923 - DNA, 81 bp, Homo sapiens
ctactaagtgatacattctagaaaatgctcatgccatgcttctgatctcatgttaaccaacggtgcctagtggaacctcat

SEQ ID NO: 105924 - DNA, 78 bp, Homo sapiens
tagaaaatgctcatgccatgcttctgatctcatgttaaccaacggtgcctagtggaacctcattacccccggcatttc

SEQ ID NO: 105925 - DNA, 74 bp, Homo sapiens
atgcttctgatctcatgttaaccaacggtgcctagtggaacctcattacccccggcatttcccatactcctctc

SEQ ID NO: 105926 - DNA, 71 bp, Homo sapiens
tctcatgttaaccaacggtgcctagtggaacctcattacccccggcatttcccatactcctctcccattta

SEQ ID NO: 105927 - DNA, 67 bp, Homo sapiens
accaacggtgcctagtggaacctcattacccccggcatttcccatactcctctcccatttacccatt

SEQ ID NO: 105928 - DNA, 72 bp, Homo sapiens
tagtggaacctcattacccccggcatttcccatactcctctcccatttacccatttctctcatccatgattt

SEQ ID NO: 105929 - DNA, 76 bp, Homo sapiens
atactcctctcccatttacccatttctctcatccatgattttctgaccaattagccagtctgtcctacattatacc

SEQ ID NO: 105930 - DNA, 78 bp, Homo sapiens
catttacccatttctctcatccatgattttctgaccaattagccagtctgtcctacattatacccatctctcttctta

SEQ ID NO: 105931 - DNA, 83 bp, Homo sapiens
atttctctcatccatgattttctgaccaattagccagtctgtcctacattatacccatctctcttcttattgcatgtgcatcc

SEQ ID NO: 105932 - DNA, 81 bp, Homo sapiens
atccatgattttctgaccaattagccagtctgtcctacattatacccatctctcttcttattgcatgtgcatcctctttta

SEQ ID NO: 105933 - DNA, 82 bp, Homo sapiens
attttctgaccaattagccagtctgtcctacattatacccatctctcttcttattgcatgtgcatcctcttttatgcattca

SEQ ID NO: 105934 - DNA, 82 bp, Homo sapiens
attagccagtctgtcctacattatacccatctctcttcttattgcatgtgcatcctcttttatgcattcacttctactccta

SEQ ID NO: 105935 - DNA, 81 bp, Homo sapiens
tcctacattatacccatctctcttcttattgcatgtgcatcctcttttatgcattcacttctactcctatttctcacttta

SEQ ID NO: 105936 - DNA, 79 bp, Homo sapiens
attatacccatctctcttcttattgcatgtgcatcctcttttatgcattcacttctactcctatttctcactttagtac

SEQ ID NO: 105937 - DNA, 80 bp, Homo sapiens
atctctcttcttattgcatgtgcatcctcttttatgcattcacttctactcctatttctcactttagtacgtacatgtac

SEQ ID NO: 105938 - DNA, 83 bp, Homo sapiens
ttattgcatgtgcatcctcttttatgcattcacttctactcctatttctcactttagtacgtacatgtacgtgtgcataatga

SEQ ID NO: 105939 - DNA, 80 bp, Homo sapiens
atcctcttttatgcattcacttctactcctatttctcactttagtacgtacatgtacgtgtgcataatgatcacatgctt

SEQ ID NO: 105940 - DNA, 77 bp, Homo sapiens
acttctactcctatttctcactttagtacgtacatgtacgtgtgcataatgatcacatgcttttgaagtggtattaa

SEQ ID NO: 105941 - DNA, 80 bp, Homo sapiens
tatttctcactttagtacgtacatgtacgtgtgcataatgatcacatgcttttgaagtggtattaagagagtttgcacaa

SEQ ID NO: 105942 - DNA, 76 bp, Homo sapiens
actttagtacgtacatgtacgtgtgcataatgatcacatgcttttgaagtggtattaagagagtttgcacaaaaat

SEQ ID NO: 105943 - DNA, 81 bp, Homo sapiens
tacatgtacgtgtgcataatgatcacatgcttttgaagtggtattaagagagtttgcacaaaaattgtgggacagatatgg

SEQ ID NO: 105944 - DNA, 78 bp, Homo sapiens
cataatgatcacatgcttttgaagtggtattaagagagtttgcacaaaaattgtgggacagatatgggtataatgtgg

SEQ ID NO: 105945 - DNA, 75 bp, Homo sapiens
acatgcttttgaagtggtattaagagagtttgcacaaaaattgtgggacagatatgggtataatgtggtgtgtgt

SEQ ID NO: 105946 - DNA, 74 bp, Homo sapiens
cttttgaagtggtattaagagagtttgcacaaaaattgtgggacagatatgggtataatgtggtgtgtgttcac

SEQ ID NO: 105947 - DNA, 75 bp, Homo sapiens
aaaattgtgggacagatatgggtataatgtggtgtgtgttcacccaaagctgttggctttaatcaggattgcaaa

SEQ ID NO: 105948 - DNA, 80 bp, Homo sapiens
gatatgggtataatgtggtgtgtgttcacccaaagctgttggctttaatcaggattgcaaagctatacacacaggacata

SEQ ID NO: 105949 - DNA, 78 bp, Homo sapiens
taatgtggtgtgtgttcacccaaagctgttggctttaatcaggattgcaaagctatacacacaggacataacagttta

SEQ ID NO: 105950 - DNA, 77 bp, Homo sapiens
tgtgttcacccaaagctgttggctttaatcaggattgcaaagctatacacacaggacataacagtttatcttggaaa

SEQ ID NO: 105951 - DNA, 74 bp, Homo sapiens
acccaaagctgttggctttaatcaggattgcaaagctatacacacaggacataacagtttatcttggaaaatta

SEQ ID NO: 105952 - DNA, 74 bp, Homo sapiens
ttggctttaatcaggattgcaaagctatacacacaggacataacagtttatcttggaaaattagtggttgggaa

SEQ ID NO: 105953 - DNA, 77 bp, Homo sapiens
taatcaggattgcaaagctatacacacaggacataacagtttatcttggaaaattagtggttgggaacatctcgatg

SEQ ID NO: 105954 - DNA, 73 bp, Homo sapiens
agctatacacacaggacataacagtttatcttggaaaattagtggttgggaacatctcgatggtggacttgtt

SEQ ID NO: 105955 - DNA, 71 bp, Homo sapiens
acaggacataacagtttatcttggaaaattagtggttgggaacatctcgatggtggacttgtttcaaacta

SEQ ID NO: 105956 - DNA, 70 bp, Homo sapiens
acataacagtttatcttggaaaattagtggttgggaacatctcgatggtggacttgtttcaaactaaaca

SEQ ID NO: 105957 - DNA, 70 bp, Homo sapiens
atcttggaaaattagtggttgggaacatctcgatggtggacttgtttcaaactaaacacctcttcctcaa

SEQ ID NO: 105958 - DNA, 69 bp, Homo sapiens
aaattagtggttgggaacatctcgatggtggacttgtttcaaactaaacacctcttcctcaaccttcag

SEQ ID NO: 105959 - DNA, 75 bp, Homo sapiens
aacatctcgatggtggacttgtttcaaactaaacacctcttcctcaaccttcagtgcccttctgcagagctgtta

SEQ ID NO: 105960 - DNA, 78 bp, Homo sapiens
acttgtttcaaactaaacacctcttcctcaaccttcagtgcccttctgcagagctgttagtgcatgagtactgtgaga

SEQ ID NO: 105961 - DNA, 85 bp, Homo sapiens
tcagtgcccttctgcagagctgttagtgcatgagtactgtgagatgcgtccttgttacatgctacaagtagcccctcaggtagaa

SEQ ID NO: 105962 - DNA, 84 bp, Homo sapiens
tctgcagagctgttagtgcatgagtactgtgagatgcgtccttgttacatgctacaagtagcccctcaggtagaagccagtgtt

SEQ ID NO: 105963 - DNA, 80 bp, Homo sapiens
tgagtactgtgagatgcgtccttgttacatgctacaagtagcccctcaggtagaagccagtgtttccaaatgtctacata

SEQ ID NO: 105964 - DNA, 74 bp, Homo sapiens
cttgttacatgctacaagtagcccctcaggtagaagccagtgtttccaaatgtctacataactaggtcaaatta

SEQ ID NO: 105965 - DNA, 77 bp, Homo sapiens
tacatgctacaagtagcccctcaggtagaagccagtgtttccaaatgtctacataactaggtcaaattacatccaga

SEQ ID NO: 105966 - DNA, 74 bp, Homo sapiens
aagtagcccctcaggtagaagccagtgtttccaaatgtctacataactaggtcaaattacatccagagctaggc

SEQ ID NO: 105967 - DNA, 80 bp, Homo sapiens
tagaagccagtgtttccaaatgtctacataactaggtcaaattacatccagagctaggctgtgttgctctgatgtgttta

SEQ ID NO: 105968 - DNA, 78 bp, Homo sapiens
acataactaggtcaaattacatccagagctaggctgtgttgctctgatgtgtttacacttattttccattgaatctaa

SEQ ID NO: 105969 - DNA, 76 bp, Homo sapiens
aaattacatccagagctaggctgtgttgctctgatgtgtttacacttattttccattgaatctaagtttctaatgt

SEQ ID NO: 105970 - DNA, 76 bp, Homo sapiens
gagctaggctgtgttgctctgatgtgtttacacttattttccattgaatctaagtttctaatgttttaggtcacta

SEQ ID NO: 105971 - DNA, 74 bp, Homo sapiens
gctctgatgtgtttacacttattttccattgaatctaagtttctaatgttttaggtcactaacaatgaatccaa

SEQ ID NO: 105972 - DNA, 73 bp, Homo sapiens
gtttacacttattttccattgaatctaagtttctaatgttttaggtcactaacaatgaatccaacatctgaca

SEQ ID NO: 105973 - DNA, 78 bp, Homo sapiens
tcactaacaatgaatccaacatctgacattttatgagtggtgggatgttatcaatccttcagcaagttttgatgtttt

SEQ ID NO: 105974 - DNA, 76 bp, Homo sapiens
atctgacattttatgagtggtgggatgttatcaatccttcagcaagttttgatgttttttttatgacttctggcaa

SEQ ID NO: 105975 - DNA, 75 bp, Homo sapiens
attttatgagtggtgggatgttatcaatccttcagcaagttttgatgttttttttatgacttctggcaagctgga

SEQ ID NO: 105976 - DNA, 76 bp, Homo sapiens
tgggatgttatcaatccttcagcaagttttgatgttttttttatgacttctggcaagctggagtcattaggattta

SEQ ID NO: 105977 - DNA, 76 bp, Homo sapiens
tatcaatccttcagcaagttttgatgttttttttatgacttctggcaagctggagtcattaggatttattaccaga

SEQ ID NO: 105978 - DNA, 71 bp, Homo sapiens
agcaagttttgatgttttttttatgacttctggcaagctggagtcattaggatttattaccagaaaaggga

SEQ ID NO: 105979 - DNA, 71 bp, Homo sapiens
tttatgacttctggcaagctggagtcattaggatttattaccagaaaagggaacaaatactgttgttttac

SEQ ID NO: 105980 - DNA, 70 bp, Homo sapiens
acttctggcaagctggagtcattaggatttattaccagaaaagggaacaaatactgttgttttactgtgt

SEQ ID NO: 105981 - DNA, 70 bp, Homo sapiens
gagtcattaggatttattaccagaaaagggaacaaatactgttgttttactgtgttcgacgtatagtagc

SEQ ID NO: 105982 - DNA, 69 bp, Homo sapiens
taggatttattaccagaaaagggaacaaatactgttgttttactgtgttcgacgtatagtagctgaaag

SEQ ID NO: 105983 - DNA, 70 bp, Homo sapiens
ccagaaaagggaacaaatactgttgttttactgtgttcgacgtatagtagctgaaagtagagtattttca

SEQ ID NO: 105984 - DNA, 70 bp, Homo sapiens
agggaacaaatactgttgttttactgtgttcgacgtatagtagctgaaagtagagtattttcaagaccta

SEQ ID NO: 105985 - DNA, 71 bp, Homo sapiens
actgttgttttactgtgttcgacgtatagtagctgaaagtagagtattttcaagacctatgttccttttga

SEQ ID NO: 105986 - DNA, 70 bp, Homo sapiens
tttactgtgttcgacgtatagtagctgaaagtagagtattttcaagacctatgttccttttgaaataaaa

SEQ ID NO: 105987 - DNA, 69 bp, Homo sapiens
tcgacgtatagtagctgaaagtagagtattttcaagacctatgttccttttgaaataaaaagttcctag

SEQ ID NO: 105988 - DNA, 68 bp, Homo sapiens
gctgaaagtagagtattttcaagacctatgttccttttgaaataaaaagttcctaggtcttgccttgg

SEQ ID NO: 105989 - DNA, 74 bp, Homo sapiens
aaataaaaagttcctaggtcttgccttggtctttgggttggctgggcatgcagtacactgcactgaactcactg

SEQ ID NO: 105990 - DNA, 80 bp, Homo sapiens
ttgccttggtctttgggttggctgggcatgcagtacactgcactgaactcactggtgtgatggaccccgttcacgcacca

SEQ ID NO: 105991 - DNA, 79 bp, Homo sapiens
tttgggttggctgggcatgcagtacactgcactgaactcactggtgtgatggaccccgttcacgcaccactccagacct

SEQ ID NO: 105992 - DNA, 83 bp, Homo sapiens
tggctgggcatgcagtacactgcactgaactcactggtgtgatggaccccgttcacgcaccactccagaccttcctggctcag

SEQ ID NO: 105993 - DNA, 79 bp, Homo sapiens
agtacactgcactgaactcactggtgtgatggaccccgttcacgcaccactccagaccttcctggctcagtgcctggga

SEQ ID NO: 105994 - DNA, 76 bp, Homo sapiens
actgaactcactggtgtgatggaccccgttcacgcaccactccagaccttcctggctcagtgcctgggagtttgtc

SEQ ID NO: 105995 - DNA, 76 bp, Homo sapiens
actggtgtgatggaccccgttcacgcaccactccagaccttcctggctcagtgcctgggagtttgtcttgcttctg

SEQ ID NO: 105996 - DNA, 74 bp, Homo sapiens
atggaccccgttcacgcaccactccagaccttcctggctcagtgcctgggagtttgtcttgcttctgggtctgg

SEQ ID NO: 105997 - DNA, 76 bp, Homo sapiens
ttcacgcaccactccagaccttcctggctcagtgcctgggagtttgtcttgcttctgggtctgggtggccttggaa

SEQ ID NO: 105998 - DNA, 74 bp, Homo sapiens
tccagaccttcctggctcagtgcctgggagtttgtcttgcttctgggtctgggtggccttggaaatggggcaaa

SEQ ID NO: 105999 - DNA, 76 bp, Homo sapiens
tggctcagtgcctgggagtttgtcttgcttctgggtctgggtggccttggaaatggggcaaaggatactgtcataa

SEQ ID NO: 106000 - DNA, 73 bp, Homo sapiens
cctgggagtttgtcttgcttctgggtctgggtggccttggaaatggggcaaaggatactgtcataaagccaca

SEQ ID NO: 106001 - DNA, 81 bp, Homo sapiens
tctgggtctgggtggccttggaaatggggcaaaggatactgtcataaagccacagctgctgctattgccatcacagaccaa

SEQ ID NO: 106002 - DNA, 80 bp, Homo sapiens
gtggccttggaaatggggcaaaggatactgtcataaagccacagctgctgctattgccatcacagaccaaagaattccca

SEQ ID NO: 106003 - DNA, 84 bp, Homo sapiens
aaatggggcaaaggatactgtcataaagccacagctgctgctattgccatcacagaccaaagaattcccatgtgtgatgctcac

SEQ ID NO: 106004 - DNA, 86 bp, Homo sapiens
aaaggatactgtcataaagccacagctgctgctattgccatcacagaccaaagaattcccatgtgtgatgctcactgacaagagga

SEQ ID NO: 106005 - DNA, 90 bp, Homo sapiens
tactgtcataaagccacagctgctgctattgccatcacagaccaaagaattcccatgtgtgatgctcactgacaagaggagtcagctgta

SEQ ID NO: 106006 - DNA, 88 bp, Homo sapiens
acagctgctgctattgccatcacagaccaaagaattcccatgtgtgatgctcactgacaagaggagtcagctgtacctatgtgctact

SEQ ID NO: 106007 - DNA, 83 bp, Homo sapiens
atcacagaccaaagaattcccatgtgtgatgctcactgacaagaggagtcagctgtacctatgtgctacttggccagaactta

SEQ ID NO: 106008 - DNA, 83 bp, Homo sapiens
aaagaattcccatgtgtgatgctcactgacaagaggagtcagctgtacctatgtgctacttggccagaacttagagatgcttg

SEQ ID NO: 106009 - DNA, 84 bp, Homo sapiens
atgtgtgatgctcactgacaagaggagtcagctgtacctatgtgctacttggccagaacttagagatgcttggatttcccagtg

SEQ ID NO: 106010 - DNA, 82 bp, Homo sapiens
atgctcactgacaagaggagtcagctgtacctatgtgctacttggccagaacttagagatgcttggatttcccagtggctac

SEQ ID NO: 106011 - DNA, 77 bp, Homo sapiens
acaagaggagtcagctgtacctatgtgctacttggccagaacttagagatgcttggatttcccagtggctacctggg

SEQ ID NO: 106012 - DNA, 74 bp, Homo sapiens
ctgtacctatgtgctacttggccagaacttagagatgcttggatttcccagtggctacctgggggttccaggta

SEQ ID NO: 106013 - DNA, 73 bp, Homo sapiens
tatgtgctacttggccagaacttagagatgcttggatttcccagtggctacctgggggttccaggtaacaact

SEQ ID NO: 106014 - DNA, 71 bp, Homo sapiens
acttggccagaacttagagatgcttggatttcccagtggctacctgggggttccaggtaacaacttgcaag

SEQ ID NO: 106015 - DNA, 72 bp, Homo sapiens
ttagagatgcttggatttcccagtggctacctgggggttccaggtaacaacttgcaagtgcagggggaatta

SEQ ID NO: 106016 - DNA, 70 bp, Homo sapiens
ttggatttcccagtggctacctgggggttccaggtaacaacttgcaagtgcagggggaattaatactgta

SEQ ID NO: 106017 - DNA, 69 bp, Homo sapiens
gtggctacctgggggttccaggtaacaacttgcaagtgcagggggaattaatactgtattgggtgaact

SEQ ID NO: 106018 - DNA, 72 bp, Homo sapiens
tgggggttccaggtaacaacttgcaagtgcagggggaattaatactgtattgggtgaacttttgatcaatga

SEQ ID NO: 106019 - DNA, 75 bp, Homo sapiens
agggggaattaatactgtattgggtgaacttttgatcaatgagaggcagtggatagggagaatccagcagataag

SEQ ID NO: 106020 - DNA, 78 bp, Homo sapiens
ttaatactgtattgggtgaacttttgatcaatgagaggcagtggatagggagaatccagcagataagttgcttgcctt

SEQ ID NO: 106021 - DNA, 80 bp, Homo sapiens
aacttttgatcaatgagaggcagtggatagggagaatccagcagataagttgcttgcctttgttctaagacacagcagat

SEQ ID NO: 106022 - DNA, 79 bp, Homo sapiens
agtggatagggagaatccagcagataagttgcttgcctttgttctaagacacagcagattcgtacagcttttctgtgta

SEQ ID NO: 106023 - DNA, 82 bp, Homo sapiens
aatccagcagataagttgcttgcctttgttctaagacacagcagattcgtacagcttttctgtgtatgtcctgagagagcaa

SEQ ID NO: 106024 - DNA, 84 bp, Homo sapiens
taagacacagcagattcgtacagcttttctgtgtatgtcctgagagagcaaaggcttagctaagtttctcatgagctgtgacta

SEQ ID NO: 106025 - DNA, 84 bp, Homo sapiens
acagcagattcgtacagcttttctgtgtatgtcctgagagagcaaaggcttagctaagtttctcatgagctgtgactagctctg

SEQ ID NO: 106026 - DNA, 82 bp, Homo sapiens
tacagcttttctgtgtatgtcctgagagagcaaaggcttagctaagtttctcatgagctgtgactagctctgtgccttttct

SEQ ID NO: 106027 - DNA, 81 bp, Homo sapiens
tttctgtgtatgtcctgagagagcaaaggcttagctaagtttctcatgagctgtgactagctctgtgccttttcttttgct

SEQ ID NO: 106028 - DNA, 78 bp, Homo sapiens
tgagagagcaaaggcttagctaagtttctcatgagctgtgactagctctgtgccttttcttttgctttcacttttact

SEQ ID NO: 106029 - DNA, 73 bp, Homo sapiens
aaaggcttagctaagtttctcatgagctgtgactagctctgtgccttttcttttgctttcacttttacttcct

SEQ ID NO: 106030 - DNA, 76 bp, Homo sapiens
tagctaagtttctcatgagctgtgactagctctgtgccttttcttttgctttcacttttacttccttgggactgta

SEQ ID NO: 106031 - DNA, 75 bp, Homo sapiens
ttctcatgagctgtgactagctctgtgccttttcttttgctttcacttttacttccttgggactgtacaccctgt

SEQ ID NO: 106032 - DNA, 72 bp, Homo sapiens
tgtgactagctctgtgccttttcttttgctttcacttttacttccttgggactgtacaccctgttgccccac

SEQ ID NO: 106033 - DNA, 66 bp, Homo sapiens
tgccttttcttttgctttcacttttacttccttgggactgtacaccctgttgccccaccccaaaaa

SEQ ID NO: 106034 - DNA, 68 bp, Homo sapiens
ttcttttgctttcacttttacttccttgggactgtacaccctgttgccccaccccaaaaagcatataa

SEQ ID NO: 106035 - DNA, 68 bp, Homo sapiens
acttttacttccttgggactgtacaccctgttgccccaccccaaaaagcatataagcttttgagtcaa

SEQ ID NO: 106036 - DNA, 67 bp, Homo sapiens
acttccttgggactgtacaccctgttgccccaccccaaaaagcatataagcttttgagtcaagtttt

SEQ ID NO: 106037 - DNA, 65 bp, Homo sapiens
actgtacaccctgttgccccaccccaaaaagcatataagcttttgagtcaagtttttttttaatt

SEQ ID NO: 106038 - DNA, 70 bp, Homo sapiens
ttttttttaatcatcttaggctaagacactttttgtcccttctgttagatttgaactcttggaggactga

SEQ ID NO: 106039 - DNA, 75 bp, Homo sapiens
ttaatcatcttaggctaagacactttttgtcccttctgttagatttgaactcttggaggactgaggccatgtcat

SEQ ID NO: 106040 - DNA, 74 bp, Homo sapiens
ttaggctaagacactttttgtcccttctgttagatttgaactcttggaggactgaggccatgtcattttcatgt

SEQ ID NO: 106041 - DNA, 74 bp, Homo sapiens
acactttttgtcccttctgttagatttgaactcttggaggactgaggccatgtcattttcatgtttctcttgat

SEQ ID NO: 106042 - DNA, 81 bp, Homo sapiens
ttctgttagatttgaactcttggaggactgaggccatgtcattttcatgtttctcttgattgcatctagatatttattgaa

SEQ ID NO: 106043 - DNA, 79 bp, Homo sapiens
atttgaactcttggaggactgaggccatgtcattttcatgtttctcttgattgcatctagatatttattgaaaccatgt

SEQ ID NO: 106044 - DNA, 83 bp, Homo sapiens
ttggaggactgaggccatgtcattttcatgtttctcttgattgcatctagatatttattgaaaccatgtttgctgaatgacaa

SEQ ID NO: 106045 - DNA, 83 bp, Homo sapiens
aggccatgtcattttcatgtttctcttgattgcatctagatatttattgaaaccatgtttgctgaatgacaatgtctggctta

SEQ ID NO: 106046 - DNA, 80 bp, Homo sapiens
ttttcatgtttctcttgattgcatctagatatttattgaaaccatgtttgctgaatgacaatgtctggcttaccacccaa

SEQ ID NO: 106047 - DNA, 78 bp, Homo sapiens
ttctcttgattgcatctagatatttattgaaaccatgtttgctgaatgacaatgtctggcttaccacccaaaggaagt

SEQ ID NO: 106048 - DNA, 77 bp, Homo sapiens
attgcatctagatatttattgaaaccatgtttgctgaatgacaatgtctggcttaccacccaaaggaagttcaacaa

SEQ ID NO: 106049 - DNA, 74 bp, Homo sapiens
tttgctgaatgacaatgtctggcttaccacccaaaggaagttcaacaaaggggagcagaatccctcaattcagg

SEQ ID NO: 106050 - DNA, 71 bp, Homo sapiens
aatgtctggcttaccacccaaaggaagttcaacaaaggggagcagaatccctcaattcagggtggctttga

SEQ ID NO: 106051 - DNA, 74 bp, Homo sapiens
ttaccacccaaaggaagttcaacaaaggggagcagaatccctcaattcagggtggctttgacattcatgtcaca

SEQ ID NO: 106052 - DNA, 72 bp, Homo sapiens
aaaggaagttcaacaaaggggagcagaatccctcaattcagggtggctttgacattcatgtcacacccaacc

SEQ ID NO: 106053 - DNA, 75 bp, Homo sapiens
aacaaaggggagcagaatccctcaattcagggtggctttgacattcatgtcacacccaacctgccacacaaatat

SEQ ID NO: 106054 - DNA, 80 bp, Homo sapiens
agcagaatccctcaattcagggtggctttgacattcatgtcacacccaacctgccacacaaatattggtccagctcgctg

SEQ ID NO: 106055 - DNA, 79 bp, Homo sapiens
atccctcaattcagggtggctttgacattcatgtcacacccaacctgccacacaaatattggtccagctcgctgtgtct

SEQ ID NO: 106056 - DNA, 81 bp, Homo sapiens
agggtggctttgacattcatgtcacacccaacctgccacacaaatattggtccagctcgctgtgtcttggcaggtgatgga

SEQ ID NO: 106057 - DNA, 82 bp, Homo sapiens
tttgacattcatgtcacacccaacctgccacacaaatattggtccagctcgctgtgtcttggcaggtgatggaagcttggcc

SEQ ID NO: 106058 - DNA, 81 bp, Homo sapiens
atgtcacacccaacctgccacacaaatattggtccagctcgctgtgtcttggcaggtgatggaagcttggccttggaggca

SEQ ID NO: 106059 - DNA, 81 bp, Homo sapiens
tgccacacaaatattggtccagctcgctgtgtcttggcaggtgatggaagcttggccttggaggcaccaaggagctaagag

SEQ ID NO: 106060 - DNA, 78 bp, Homo sapiens
acaaatattggtccagctcgctgtgtcttggcaggtgatggaagcttggccttggaggcaccaaggagctaagaggac

SEQ ID NO: 106061 - DNA, 82 bp, Homo sapiens
agctcgctgtgtcttggcaggtgatggaagcttggccttggaggcaccaaggagctaagaggactccatgatatgaacacaa

SEQ ID NO: 106062 - DNA, 80 bp, Homo sapiens
tgtcttggcaggtgatggaagcttggccttggaggcaccaaggagctaagaggactccatgatatgaacacaaaggtcga

SEQ ID NO: 106063 - DNA, 80 bp, Homo sapiens
aggtgatggaagcttggccttggaggcaccaaggagctaagaggactccatgatatgaacacaaaggtcgattcacatgc

SEQ ID NO: 106064 - DNA, 80 bp, Homo sapiens
agcttggccttggaggcaccaaggagctaagaggactccatgatatgaacacaaaggtcgattcacatgctggtgcttta

SEQ ID NO: 106065 - DNA, 77 bp, Homo sapiens
ccttggaggcaccaaggagctaagaggactccatgatatgaacacaaaggtcgattcacatgctggtgctttagggg

SEQ ID NO: 106066 - DNA, 75 bp, Homo sapiens
atatgaacacaaaggtcgattcacatgctggtgctttagggggcattaaaaccattccagagaagcaggaataaa

SEQ ID NO: 106067 - DNA, 74 bp, Homo sapiens
acaaaggtcgattcacatgctggtgctttagggggcattaaaaccattccagagaagcaggaataaagaatata

SEQ ID NO: 106068 - DNA, 76 bp, Homo sapiens
attcacatgctggtgctttagggggcattaaaaccattccagagaagcaggaataaagaatataggagcatctttg

SEQ ID NO: 106069 - DNA, 77 bp, Homo sapiens
gggcattaaaaccattccagagaagcaggaataaagaatataggagcatctttgtggacactgggtctgcaggtcta

SEQ ID NO: 106070 - DNA, 79 bp, Homo sapiens
agaagcaggaataaagaatataggagcatctttgtggacactgggtctgcaggtctagcagtaacagaggagggcataa

SEQ ID NO: 106071 - DNA, 81 bp, Homo sapiens
aataaagaatataggagcatctttgtggacactgggtctgcaggtctagcagtaacagaggagggcataatggattcatga

SEQ ID NO: 106072 - DNA, 81 bp, Homo sapiens
aatataggagcatctttgtggacactgggtctgcaggtctagcagtaacagaggagggcataatggattcatgaggtcaaa

SEQ ID NO: 106073 - DNA, 81 bp, Homo sapiens
atctttgtggacactgggtctgcaggtctagcagtaacagaggagggcataatggattcatgaggtcaaagctgggatgga

SEQ ID NO: 106074 - DNA, 80 bp, Homo sapiens
ctgggtctgcaggtctagcagtaacagaggagggcataatggattcatgaggtcaaagctgggatggaccttgactgtaa

SEQ ID NO: 106075 - DNA, 78 bp, Homo sapiens
aggtctagcagtaacagaggagggcataatggattcatgaggtcaaagctgggatggaccttgactgtaatgaaaaga

SEQ ID NO: 106076 - DNA, 81 bp, Homo sapiens
tagcagtaacagaggagggcataatggattcatgaggtcaaagctgggatggaccttgactgtaatgaaaagaggccatga

SEQ ID NO: 106077 - DNA, 79 bp, Homo sapiens
agggcataatggattcatgaggtcaaagctgggatggaccttgactgtaatgaaaagaggccatgagggtgtgaatcag

SEQ ID NO: 106078 - DNA, 78 bp, Homo sapiens
taatggattcatgaggtcaaagctgggatggaccttgactgtaatgaaaagaggccatgagggtgtgaatcagggaaa

SEQ ID NO: 106079 - DNA, 77 bp, Homo sapiens
atgaggtcaaagctgggatggaccttgactgtaatgaaaagaggccatgagggtgtgaatcagggaaagaggatgaa

SEQ ID NO: 106080 - DNA, 75 bp, Homo sapiens
aagctgggatggaccttgactgtaatgaaaagaggccatgagggtgtgaatcagggaaagaggatgaaggcaggg

SEQ ID NO: 106081 - DNA, 76 bp, Homo sapiens
ttgactgtaatgaaaagaggccatgagggtgtgaatcagggaaagaggatgaaggcaggggtgggagttgtgttga

SEQ ID NO: 106082 - DNA, 74 bp, Homo sapiens
taatgaaaagaggccatgagggtgtgaatcagggaaagaggatgaaggcaggggtgggagttgtgttgaacaat

SEQ ID NO: 106083 - DNA, 78 bp, Homo sapiens
aggccatgagggtgtgaatcagggaaagaggatgaaggcaggggtgggagttgtgttgaacaattggcagatgatcca

SEQ ID NO: 106084 - DNA, 79 bp, Homo sapiens
tgtgaatcagggaaagaggatgaaggcaggggtgggagttgtgttgaacaattggcagatgatccaggaggcttcatag

SEQ ID NO: 106085 - DNA, 77 bp, Homo sapiens
gaaagaggatgaaggcaggggtgggagttgtgttgaacaattggcagatgatccaggaggcttcataggttgaagac

SEQ ID NO: 106086 - DNA, 78 bp, Homo sapiens
atgaaggcaggggtgggagttgtgttgaacaattggcagatgatccaggaggcttcataggttgaagactttcagcta

SEQ ID NO: 106087 - DNA, 79 bp, Homo sapiens
agttgtgttgaacaattggcagatgatccaggaggcttcataggttgaagactttcagctactcattaggaaacagcag

SEQ ID NO: 106088 - DNA, 70 bp, Homo sapiens
ctcattaggaaacagcaggcatattccttcatttttcccctttttcattttttagacttccccatattca

SEQ ID NO: 106089 - DNA, 65 bp, Homo sapiens
attccttcatttttcccctttttcattttttagacttccccatattcattttccctctctctccc

SEQ ID NO: 106090 - DNA, 67 bp, Homo sapiens
ttcccctttttcattttttagacttccccatattcattttccctctctctcccttactgctattatt

SEQ ID NO: 106091 - DNA, 69 bp, Homo sapiens
ttttcattttttagacttccccatattcattttccctctctctcccttactgctattattttttcatgt

SEQ ID NO: 106092 - DNA, 71 bp, Homo sapiens
agacttccccatattcattttccctctctctcccttactgctattattttttcatgtttttgattctgtct

SEQ ID NO: 106093 - DNA, 72 bp, Homo sapiens
cccatattcattttccctctctctcccttactgctattattttttcatgtttttgattctgtctttattcta

SEQ ID NO: 106094 - DNA, 74 bp, Homo sapiens
ccctctctctcccttactgctattattttttcatgtttttgattctgtctttattctacatttgatgattcaaa

SEQ ID NO: 106095 - DNA, 76 bp, Homo sapiens
ctctcccttactgctattattttttcatgtttttgattctgtctttattctacatttgatgattcaaaatgtgaca

SEQ ID NO: 106096 - DNA, 77 bp, Homo sapiens
tcatgtttttgattctgtctttattctacatttgatgattcaaaatgtgacatctttacatttaatgaattcttaac

SEQ ID NO: 106097 - DNA, 76 bp, Homo sapiens
gattctgtctttattctacatttgatgattcaaaatgtgacatctttacatttaatgaattcttaacccagtggta

SEQ ID NO: 106098 - DNA, 75 bp, Homo sapiens
gtctttattctacatttgatgattcaaaatgtgacatctttacatttaatgaattcttaacccagtggtatatgt

SEQ ID NO: 106099 - DNA, 75 bp, Homo sapiens
ctacatttgatgattcaaaatgtgacatctttacatttaatgaattcttaacccagtggtatatgttttgaagag

SEQ ID NO: 106100 - DNA, 74 bp, Homo sapiens
tgattcaaaatgtgacatctttacatttaatgaattcttaacccagtggtatatgttttgaagagtgaaattaa

SEQ ID NO: 106101 - DNA, 72 bp, Homo sapiens
gtgacatctttacatttaatgaattcttaacccagtggtatatgttttgaagagtgaaattaataaagaggc

SEQ ID NO: 106102 - DNA, 72 bp, Homo sapiens
ttcttaacccagtggtatatgttttgaagagtgaaattaataaagaggcttagagagcaaatagaaatacac

SEQ ID NO: 106103 - DNA, 73 bp, Homo sapiens
acccagtggtatatgttttgaagagtgaaattaataaagaggcttagagagcaaatagaaatacacttctata

SEQ ID NO: 106104 - DNA, 74 bp, Homo sapiens
tgttttgaagagtgaaattaataaagaggcttagagagcaaatagaaatacacttctataatgaaaataatctg

SEQ ID NO: 106105 - DNA, 78 bp, Homo sapiens
tgaaattaataaagaggcttagagagcaaatagaaatacacttctataatgaaaataatctgtcactcatgcgttagc

SEQ ID NO: 106106 - DNA, 81 bp, Homo sapiens
cttagagagcaaatagaaatacacttctataatgaaaataatctgtcactcatgcgttagctgattctagttgatgtgttc

SEQ ID NO: 106107 - DNA, 79 bp, Homo sapiens
aatagaaatacacttctataatgaaaataatctgtcactcatgcgttagctgattctagttgatgtgttctttgggagc

SEQ ID NO: 106108 - DNA, 81 bp, Homo sapiens
atacacttctataatgaaaataatctgtcactcatgcgttagctgattctagttgatgtgttctttgggagcctgaagaca

SEQ ID NO: 106109 - DNA, 79 bp, Homo sapiens
taatctgtcactcatgcgttagctgattctagttgatgtgttctttgggagcctgaagacaaccgagaaatgggtccta

SEQ ID NO: 106110 - DNA, 79 bp, Homo sapiens
atgcgttagctgattctagttgatgtgttctttgggagcctgaagacaaccgagaaatgggtcctacagctgtgagctc

SEQ ID NO: 106111 - DNA, 76 bp, Homo sapiens
attctagttgatgtgttctttgggagcctgaagacaaccgagaaatgggtcctacagctgtgagctctccttccac

SEQ ID NO: 106112 - DNA, 79 bp, Homo sapiens
ttgatgtgttctttgggagcctgaagacaaccgagaaatgggtcctacagctgtgagctctccttccactgccatgatt

SEQ ID NO: 106113 - DNA, 78 bp, Homo sapiens
ttctttgggagcctgaagacaaccgagaaatgggtcctacagctgtgagctctccttccactgccatgatttccttca

SEQ ID NO: 106114 - DNA, 80 bp, Homo sapiens
ctgaagacaaccgagaaatgggtcctacagctgtgagctctccttccactgccatgatttccttcacggagtcatagcat

SEQ ID NO: 106115 - DNA, 81 bp, Homo sapiens
agaaatgggtcctacagctgtgagctctccttccactgccatgatttccttcacggagtcatagcattgctgattcctaac

SEQ ID NO: 106116 - DNA, 83 bp, Homo sapiens
tcctacagctgtgagctctccttccactgccatgatttccttcacggagtcatagcattgctgattcctaactgggatgtggt

SEQ ID NO: 106117 - DNA, 81 bp, Homo sapiens
tgagctctccttccactgccatgatttccttcacggagtcatagcattgctgattcctaactgggatgtggttggacttaa

SEQ ID NO: 106118 - DNA, 73 bp, Homo sapiens
atgatttccttcacggagtcatagcattgctgattcctaactgggatgtggttggacttaaaccttggtttaa

SEQ ID NO: 106119 - DNA, 72 bp, Homo sapiens
ttccttcacggagtcatagcattgctgattcctaactgggatgtggttggacttaaaccttggtttaaatcc

SEQ ID NO: 106120 - DNA, 74 bp, Homo sapiens
atagcattgctgattcctaactgggatgtggttggacttaaaccttggtttaaatcctgactctgatatccaaa

SEQ ID NO: 106121 - DNA, 72 bp, Homo sapiens
tgattcctaactgggatgtggttggacttaaaccttggtttaaatcctgactctgatatccaaacatcctaa

SEQ ID NO: 106122 - DNA, 72 bp, Homo sapiens
taactgggatgtggttggacttaaaccttggtttaaatcctgactctgatatccaaacatcctaagagtcaa

SEQ ID NO: 106123 - DNA, 71 bp, Homo sapiens
tggttggacttaaaccttggtttaaatcctgactctgatatccaaacatcctaagagtcaagtgcctggtt

SEQ ID NO: 106124 - DNA, 70 bp, Homo sapiens
ttaaaccttggtttaaatcctgactctgatatccaaacatcctaagagtcaagtgcctggtttcttagtt

SEQ ID NO: 106125 - DNA, 73 bp, Homo sapiens
ctctgatatccaaacatcctaagagtcaagtgcctggtttcttagtttctgattttttacacagataatacct

SEQ ID NO: 106126 - DNA, 71 bp, Homo sapiens
aagagtcaagtgcctggtttcttagtttctgattttttacacagataataccttcacaaacacatacggta

SEQ ID NO: 106127 - DNA, 71 bp, Homo sapiens
gtgcctggtttcttagtttctgattttttacacagataataccttcacaaacacatacggtatatggaagt

SEQ ID NO: 106128 - DNA, 71 bp, Homo sapiens
ggtttcttagtttctgattttttacacagataataccttcacaaacacatacggtatatggaagttgaaga

SEQ ID NO: 106129 - DNA, 72 bp, Homo sapiens
ccttcacaaacacatacggtatatggaagttgaagaaagaaatgaaataatgtttaaatatgactttgaaca

SEQ ID NO: 106130 - DNA, 71 bp, Homo sapiens
gttgaagaaagaaatgaaataatgtttaaatatgactttgaacatattcaacaaaactctcgggttcagga

SEQ ID NO: 106131 - DNA, 70 bp, Homo sapiens
tgtttaaatatgactttgaacatattcaacaaaactctcgggttcaggaattttagtattgtggtaagaa

SEQ ID NO: 106132 - DNA, 75 bp, Homo sapiens
tgactttgaacatattcaacaaaactctcgggttcaggaattttagtattgtggtaagaatatgattgctgtgaa

SEQ ID NO: 106133 - DNA, 76 bp, Homo sapiens
caaaactctcgggttcaggaattttagtattgtggtaagaatatgattgctgtgaatgacaataatagttgagcta

SEQ ID NO: 106134 - DNA, 78 bp, Homo sapiens
ggttcaggaattttagtattgtggtaagaatatgattgctgtgaatgacaataatagttgagctagcccttcagtgaa

SEQ ID NO: 106135 - DNA, 78 bp, Homo sapiens
aattttagtattgtggtaagaatatgattgctgtgaatgacaataatagttgagctagcccttcagtgaacaagttga

SEQ ID NO: 106136 - DNA, 78 bp, Homo sapiens
ttgtggtaagaatatgattgctgtgaatgacaataatagttgagctagcccttcagtgaacaagttgagacacttttt

SEQ ID NO: 106137 - DNA, 75 bp, Homo sapiens
aagaatatgattgctgtgaatgacaataatagttgagctagcccttcagtgaacaagttgagacacttttttttt

SEQ ID NO: 106138 - DNA, 71 bp, Homo sapiens
tttttttgtaacctggttaacatagggtttctcaacctcagaactcttgacattttgggctggatgaatca

SEQ ID NO: 106139 - DNA, 76 bp, Homo sapiens
ttgtaacctggttaacatagggtttctcaacctcagaactcttgacattttgggctggatgaatcattgctgtgga

SEQ ID NO: 106140 - DNA, 81 bp, Homo sapiens
ttaacatagggtttctcaacctcagaactcttgacattttgggctggatgaatcattgctgtggagagctatgctgtgtat

SEQ ID NO: 106141 - DNA, 82 bp, Homo sapiens
tttctcaacctcagaactcttgacattttgggctggatgaatcattgctgtggagagctatgctgtgtattgtaggatgttt

SEQ ID NO: 106142 - DNA, 83 bp, Homo sapiens
gaactcttgacattttgggctggatgaatcattgctgtggagagctatgctgtgtattgtaggatgttttggctcatccctaa

SEQ ID NO: 106143 - DNA, 81 bp, Homo sapiens
cttgacattttgggctggatgaatcattgctgtggagagctatgctgtgtattgtaggatgttttggctcatccctaaccc

SEQ ID NO: 106144 - DNA, 83 bp, Homo sapiens
tggatgaatcattgctgtggagagctatgctgtgtattgtaggatgttttggctcatccctaacccctacctattagatgcca

SEQ ID NO: 106145 - DNA, 80 bp, Homo sapiens
aatcattgctgtggagagctatgctgtgtattgtaggatgttttggctcatccctaacccctacctattagatgccatta

SEQ ID NO: 106146 - DNA, 78 bp, Homo sapiens
tgtggagagctatgctgtgtattgtaggatgttttggctcatccctaacccctacctattagatgccattagcctccc

SEQ ID NO: 106147 - DNA, 75 bp, Homo sapiens
tgtgtattgtaggatgttttggctcatccctaacccctacctattagatgccattagcctcccctactcctgatg

SEQ ID NO: 106148 - DNA, 75 bp, Homo sapiens
attgtaggatgttttggctcatccctaacccctacctattagatgccattagcctcccctactcctgatgtcaca

SEQ ID NO: 106149 - DNA, 74 bp, Homo sapiens
ttttggctcatccctaacccctacctattagatgccattagcctcccctactcctgatgtcacatccaaaaatg

SEQ ID NO: 106150 - DNA, 75 bp, Homo sapiens
atccctaacccctacctattagatgccattagcctcccctactcctgatgtcacatccaaaaatgtctcctgaca

SEQ ID NO: 106151 - DNA, 78 bp, Homo sapiens
ccctacctattagatgccattagcctcccctactcctgatgtcacatccaaaaatgtctcctgacattgccaaatgtc

SEQ ID NO: 106152 - DNA, 78 bp, Homo sapiens
cctacctattagatgccattagcctcccctactcctgatgtcacatccaaaaatgtctcctgacattgccaaatgtcc

SEQ ID NO: 106153 - DNA, 79 bp, Homo sapiens
tattagatgccattagcctcccctactcctgatgtcacatccaaaaatgtctcctgacattgccaaatgtcccttcctg

SEQ ID NO: 106154 - DNA, 75 bp, Homo sapiens
ccattagcctcccctactcctgatgtcacatccaaaaatgtctcctgacattgccaaatgtcccttcctgggtaa

SEQ ID NO: 106155 - DNA, 74 bp, Homo sapiens
cctactcctgatgtcacatccaaaaatgtctcctgacattgccaaatgtcccttcctgggtaaaatctttccca

SEQ ID NO: 106156 - DNA, 75 bp, Homo sapiens
ctgatgtcacatccaaaaatgtctcctgacattgccaaatgtcccttcctgggtaaaatctttcccaggtgagaa

SEQ ID NO: 106157 - DNA, 71 bp, Homo sapiens
acatccaaaaatgtctcctgacattgccaaatgtcccttcctgggtaaaatctttcccaggtgagaaccac

SEQ ID NO: 106158 - DNA, 71 bp, Homo sapiens
aaaatgtctcctgacattgccaaatgtcccttcctgggtaaaatctttcccaggtgagaaccactgggata

SEQ ID NO: 106159 - DNA, 76 bp, Homo sapiens
tgacattgccaaatgtcccttcctgggtaaaatctttcccaggtgagaaccactgggatacagcatgtccactaga

SEQ ID NO: 106160 - DNA, 73 bp, Homo sapiens
aaatgtcccttcctgggtaaaatctttcccaggtgagaaccactgggatacagcatgtccactagagctatag

SEQ ID NO: 106161 - DNA, 73 bp, Homo sapiens
ttcctgggtaaaatctttcccaggtgagaaccactgggatacagcatgtccactagagctatagttttcctcc

SEQ ID NO: 106162 - DNA, 73 bp, Homo sapiens
aaaatctttcccaggtgagaaccactgggatacagcatgtccactagagctatagttttcctccttatattaa

SEQ ID NO: 106163 - DNA, 69 bp, Homo sapiens
gtccactagagctatagttttcctccttatattaacgtgttgactaaaacttaaaaagcaaacataata

SEQ ID NO: 106164 - DNA, 71 bp, Homo sapiens
aacgtgttgactaaaacttaaaaagcaaacataatagatacctccaaacagcaaatgggctaatgcagttg

SEQ ID NO: 106165 - DNA, 73 bp, Homo sapiens
taaaacttaaaaagcaaacataatagatacctccaaacagcaaatgggctaatgcagttggtatacacaacag

SEQ ID NO: 106166 - DNA, 78 bp, Homo sapiens
aaacataatagatacctccaaacagcaaatgggctaatgcagttggtatacacaacagtacatctgccaatgtttata

SEQ ID NO: 106167 - DNA, 80 bp, Homo sapiens
atacctccaaacagcaaatgggctaatgcagttggtatacacaacagtacatctgccaatgtttatacatagcacacggc

SEQ ID NO: 106168 - DNA, 87 bp, Homo sapiens
taatgcagttggtatacacaacagtacatctgccaatgtttatacatagcacacggctgtactcagctgcagccagtgacaaacaga

SEQ ID NO: 106169 - DNA, 83 bp, Homo sapiens
agttggtatacacaacagtacatctgccaatgtttatacatagcacacggctgtactcagctgcagccagtgacaaacagaat

SEQ ID NO: 106170 - DNA, 81 bp, Homo sapiens
atctgccaatgtttatacatagcacacggctgtactcagctgcagccagtgacaaacagaattcggagtttactttcagtc

SEQ ID NO: 106171 - DNA, 80 bp, Homo sapiens
tttatacatagcacacggctgtactcagctgcagccagtgacaaacagaattcggagtttactttcagtccacactaaga

SEQ ID NO: 106172 - DNA, 77 bp, Homo sapiens
acacggctgtactcagctgcagccagtgacaaacagaattcggagtttactttcagtccacactaagaggtgactaa

SEQ ID NO: 106173 - DNA, 78 bp, Homo sapiens
ctcagctgcagccagtgacaaacagaattcggagtttactttcagtccacactaagaggtgactaacatggcgggata

SEQ ID NO: 106174 - DNA, 72 bp, Homo sapiens
gccagtgacaaacagaattcggagtttactttcagtccacactaagaggtgactaacatggcgggataaaaa

SEQ ID NO: 106175 - DNA, 70 bp, Homo sapiens
acaaacagaattcggagtttactttcagtccacactaagaggtgactaacatggcgggataaaaagccag

SEQ ID NO: 106176 - DNA, 69 bp, Homo sapiens
aattcggagtttactttcagtccacactaagaggtgactaacatggcgggataaaaagccaggagaccc

SEQ ID NO: 106177 - DNA, 70 bp, Homo sapiens
tgactaacatggcgggataaaaagccaggagaccccccttcccagaagcccccctttgaatcacaacaca

SEQ ID NO: 106178 - DNA, 70 bp, Homo sapiens
gcgggataaaaagccaggagaccccccttcccagaagcccccctttgaatcacaacacatatgtgagtaa

SEQ ID NO: 106179 - DNA, 71 bp, Homo sapiens
ataaaaagccaggagaccccccttcccagaagcccccctttgaatcacaacacatatgtgagtaatgactg

SEQ ID NO: 106180 - DNA, 74 bp, Homo sapiens
agaccccccttcccagaagcccccctttgaatcacaacacatatgtgagtaatgactgtgaattgaatttatga

SEQ ID NO: 106181 - DNA, 84 bp, Homo sapiens
ccctttgaatcacaacacatatgtgagtaatgactgtgaattgaatttatgactcaagtgctgtttgtctgcatacatcaaata

SEQ ID NO: 106182 - DNA, 83 bp, Homo sapiens
gaatcacaacacatatgtgagtaatgactgtgaattgaatttatgactcaagtgctgtttgtctgcatacatcaaataaaatt

SEQ ID NO: 106183 - DNA, 83 bp, Homo sapiens
cacatatgtgagtaatgactgtgaattgaatttatgactcaagtgctgtttgtctgcatacatcaaataaaatttgagactta

SEQ ID NO: 106184 - DNA, 80 bp, Homo sapiens
atgactgtgaattgaatttatgactcaagtgctgtttgtctgcatacatcaaataaaatttgagacttaaagacacaagc

SEQ ID NO: 106185 - DNA, 80 bp, Homo sapiens
attgaatttatgactcaagtgctgtttgtctgcatacatcaaataaaatttgagacttaaagacacaagctgccatgttc

SEQ ID NO: 106186 - DNA, 79 bp, Homo sapiens
tttatgactcaagtgctgtttgtctgcatacatcaaataaaatttgagacttaaagacacaagctgccatgttcgtttc

SEQ ID NO: 106187 - DNA, 75 bp, Homo sapiens
ctgtttgtctgcatacatcaaataaaatttgagacttaaagacacaagctgccatgttcgtttcccccctcatat

SEQ ID NO: 106188 - DNA, 78 bp, Homo sapiens
tgcatacatcaaataaaatttgagacttaaagacacaagctgccatgttcgtttcccccctcatattcatttgtgata

SEQ ID NO: 106189 - DNA, 72 bp, Homo sapiens
aataaaatttgagacttaaagacacaagctgccatgttcgtttcccccctcatattcatttgtgataactac

SEQ ID NO: 106190 - DNA, 73 bp, Homo sapiens
atttgagacttaaagacacaagctgccatgttcgtttcccccctcatattcatttgtgataactacttagaat

SEQ ID NO: 106191 - DNA, 73 bp, Homo sapiens
ttaaagacacaagctgccatgttcgtttcccccctcatattcatttgtgataactacttagaattcagccccc

SEQ ID NO: 106192 - DNA, 70 bp, Homo sapiens
aagctgccatgttcgtttcccccctcatattcatttgtgataactacttagaattcagcccccctctttt

SEQ ID NO: 106193 - DNA, 66 bp, Homo sapiens
gttcgtttcccccctcatattcatttgtgataactacttagaattcagcccccctcttttttaaaa

SEQ ID NO: 106194 - DNA, 66 bp, Homo sapiens
ttaaaaaaaaatagcactctgtcatttccagaaaatgttttaaattagtacaaaacttggctaaat

SEQ ID NO: 106195 - DNA, 68 bp, Homo sapiens
ctctgtcatttccagaaaatgttttaaattagtacaaaacttggctaaatttagcttttatagaagaa

SEQ ID NO: 106196 - DNA, 66 bp, Homo sapiens
ttccagaaaatgttttaaattagtacaaaacttggctaaatttagcttttatagaagaaagaataa

SEQ ID NO: 106197 - DNA, 65 bp, Homo sapiens
atgttttaaattagtacaaaacttggctaaatttagcttttatagaagaaagaataaaacataat

SEQ ID NO: 106198 - DNA, 66 bp, Homo sapiens
taaattagtacaaaacttggctaaatttagcttttatagaagaaagaataaaacataattaactgt

SEQ ID NO: 106199 - DNA, 66 bp, Homo sapiens
gtacaaaacttggctaaatttagcttttatagaagaaagaataaaacataattaactgtttaaaga

SEQ ID NO: 106200 - DNA, 66 bp, Homo sapiens
cttggctaaatttagcttttatagaagaaagaataaaacataattaactgtttaaagaagaaaaca

SEQ ID NO: 106201 - DNA, 70 bp, Homo sapiens
tatagaagaaagaataaaacataattaactgtttaaagaagaaaacagaaaccacatgaaggaatgagac

SEQ ID NO: 106202 - DNA, 72 bp, Homo sapiens
gaataaaacataattaactgtttaaagaagaaaacagaaaccacatgaaggaatgagacttgctggcgagaa

SEQ ID NO: 106203 - DNA, 72 bp, Homo sapiens
ataattaactgtttaaagaagaaaacagaaaccacatgaaggaatgagacttgctggcgagaaatctaacag

SEQ ID NO: 106204 - DNA, 73 bp, Homo sapiens
aactgtttaaagaagaaaacagaaaccacatgaaggaatgagacttgctggcgagaaatctaacagtagtgct

SEQ ID NO: 106205 - DNA, 76 bp, Homo sapiens
aaaacagaaaccacatgaaggaatgagacttgctggcgagaaatctaacagtagtgcttggtagctaacccatctc

SEQ ID NO: 106206 - DNA, 77 bp, Homo sapiens
aaaccacatgaaggaatgagacttgctggcgagaaatctaacagtagtgcttggtagctaacccatctcctgtgtaa

SEQ ID NO: 106207 - DNA, 74 bp, Homo sapiens
cgagaaatctaacagtagtgcttggtagctaacccatctcctgtgtaacagatgttcacgaatttaaatggaaa

SEQ ID NO: 106208 - DNA, 75 bp, Homo sapiens
taacagtagtgcttggtagctaacccatctcctgtgtaacagatgttcacgaatttaaatggaaacaggatgggc

SEQ ID NO: 106209 - DNA, 74 bp, Homo sapiens
ttggtagctaacccatctcctgtgtaacagatgttcacgaatttaaatggaaacaggatgggcgtccccataga

SEQ ID NO: 106210 - DNA, 76 bp, Homo sapiens
catctcctgtgtaacagatgttcacgaatttaaatggaaacaggatgggcgtccccatagaaggcatttgtgataa

SEQ ID NO: 106211 - DNA, 73 bp, Homo sapiens
ctgtgtaacagatgttcacgaatttaaatggaaacaggatgggcgtccccatagaaggcatttgtgataaaaa

SEQ ID NO: 106212 - DNA, 74 bp, Homo sapiens
ttcacgaatttaaatggaaacaggatgggcgtccccatagaaggcatttgtgataaaaagctgctaactgtgta

SEQ ID NO: 106213 - DNA, 73 bp, Homo sapiens
atttaaatggaaacaggatgggcgtccccatagaaggcatttgtgataaaaagctgctaactgtgtaaatgta

SEQ ID NO: 106214 - DNA, 76 bp, Homo sapiens
aaacaggatgggcgtccccatagaaggcatttgtgataaaaagctgctaactgtgtaaatgtacgaggctgctaca

SEQ ID NO: 106215 - DNA, 81 bp, Homo sapiens
gtccccatagaaggcatttgtgataaaaagctgctaactgtgtaaatgtacgaggctgctacaggtgtggcatctcatcta

SEQ ID NO: 106216 - DNA, 81 bp, Homo sapiens
atagaaggcatttgtgataaaaagctgctaactgtgtaaatgtacgaggctgctacaggtgtggcatctcatctaattgcc

SEQ ID NO: 106217 - DNA, 80 bp, Homo sapiens
atttgtgataaaaagctgctaactgtgtaaatgtacgaggctgctacaggtgtggcatctcatctaattgcccagggatg

SEQ ID NO: 106218 - DNA, 81 bp, Homo sapiens
aaaagctgctaactgtgtaaatgtacgaggctgctacaggtgtggcatctcatctaattgcccagggatgggactgcaaga

SEQ ID NO: 106219 - DNA, 83 bp, Homo sapiens
tgtaaatgtacgaggctgctacaggtgtggcatctcatctaattgcccagggatgggactgcaagaacactcgaatgcacaaa

SEQ ID NO: 106220 - DNA, 83 bp, Homo sapiens
atgtacgaggctgctacaggtgtggcatctcatctaattgcccagggatgggactgcaagaacactcgaatgcacaaagcaaa

SEQ ID NO: 106221 - DNA, 81 bp, Homo sapiens
ctacaggtgtggcatctcatctaattgcccagggatgggactgcaagaacactcgaatgcacaaagcaaaagaaagtctca

SEQ ID NO: 106222 - DNA, 82 bp, Homo sapiens
catctcatctaattgcccagggatgggactgcaagaacactcgaatgcacaaagcaaaagaaagtctcagcatggcaagaaa

SEQ ID NO: 106223 - DNA, 80 bp, Homo sapiens
atctaattgcccagggatgggactgcaagaacactcgaatgcacaaagcaaaagaaagtctcagcatggcaagaaatatc

SEQ ID NO: 106224 - DNA, 80 bp, Homo sapiens
agggatgggactgcaagaacactcgaatgcacaaagcaaaagaaagtctcagcatggcaagaaatatcgacagatagaac

SEQ ID NO: 106225 - DNA, 82 bp, Homo sapiens
actgcaagaacactcgaatgcacaaagcaaaagaaagtctcagcatggcaagaaatatcgacagatagaacgcttagcagga

SEQ ID NO: 106226 - DNA, 81 bp, Homo sapiens
aacactcgaatgcacaaagcaaaagaaagtctcagcatggcaagaaatatcgacagatagaacgcttagcaggatcctggc

SEQ ID NO: 106227 - DNA, 76 bp, Homo sapiens
aaaagaaagtctcagcatggcaagaaatatcgacagatagaacgcttagcaggatcctggccgggagaccccatgg

SEQ ID NO: 106228 - DNA, 81 bp, Homo sapiens
catggcaagaaatatcgacagatagaacgcttagcaggatcctggccgggagaccccatgggtgcagtctgcttgctgtaa

SEQ ID NO: 106229 - DNA, 79 bp, Homo sapiens
aagaaatatcgacagatagaacgcttagcaggatcctggccgggagaccccatgggtgcagtctgcttgctgtaattgc

SEQ ID NO: 106230 - DNA, 76 bp, Homo sapiens
aacgcttagcaggatcctggccgggagaccccatgggtgcagtctgcttgctgtaattgccggctggagtggaaaa

SEQ ID NO: 106231 - DNA, 74 bp, Homo sapiens
aggatcctggccgggagaccccatgggtgcagtctgcttgctgtaattgccggctggagtggaaaagaaaagac

SEQ ID NO: 106232 - DNA, 74 bp, Homo sapiens
agaccccatgggtgcagtctgcttgctgtaattgccggctggagtggaaaagaaaagactctgttttaaagctc

SEQ ID NO: 106233 - DNA, 76 bp, Homo sapiens
atgggtgcagtctgcttgctgtaattgccggctggagtggaaaagaaaagactctgttttaaagctctcgaagcat

SEQ ID NO: 106234 - DNA, 75 bp, Homo sapiens
tgcttgctgtaattgccggctggagtggaaaagaaaagactctgttttaaagctctcgaagcattcgtctctggt

SEQ ID NO: 106235 - DNA, 72 bp, Homo sapiens
tgtaattgccggctggagtggaaaagaaaagactctgttttaaagctctcgaagcattcgtctctggtttta

SEQ ID NO: 106236 - DNA, 74 bp, Homo sapiens
tggagtggaaaagaaaagactctgttttaaagctctcgaagcattcgtctctggttttagcagaacatataaca

SEQ ID NO: 106237 - DNA, 76 bp, Homo sapiens
actctgttttaaagctctcgaagcattcgtctctggttttagcagaacatataacatcttctgtaatttctatgta

SEQ ID NO: 106238 - DNA, 78 bp, Homo sapiens
taaagctctcgaagcattcgtctctggttttagcagaacatataacatcttctgtaatttctatgtaaatacttgaca

SEQ ID NO: 106239 - DNA, 76 bp, Homo sapiens
cgaagcattcgtctctggttttagcagaacatataacatcttctgtaatttctatgtaaatacttgacagttgaaa

SEQ ID NO: 106240 - DNA, 74 bp, Homo sapiens
gtctctggttttagcagaacatataacatcttctgtaatttctatgtaaatacttgacagttgaaaagaattct

SEQ ID NO: 106241 - DNA, 71 bp, Homo sapiens
ttagcagaacatataacatcttctgtaatttctatgtaaatacttgacagttgaaaagaattctttttttt

SEQ ID NO: 106242 - DNA, 64 bp, Homo sapiens
tttttttcttcctatccagactataatttatggtggtttagtgggaaaaggggttaatttgatt

SEQ ID NO: 106243 - DNA, 64 bp, Homo sapiens
cttcctatccagactataatttatggtggtttagtgggaaaaggggttaatttgatttaaaaac

SEQ ID NO: 106244 - DNA, 65 bp, Homo sapiens
ccagactataatttatggtggtttagtgggaaaaggggttaatttgatttaaaaactgaaaatga

SEQ ID NO: 106245 - DNA, 66 bp, Homo sapiens
ttatggtggtttagtgggaaaaggggttaatttgatttaaaaactgaaaatgattctctatttggc

SEQ ID NO: 106246 - DNA, 64 bp, Homo sapiens
gtttagtgggaaaaggggttaatttgatttaaaaactgaaaatgattctctatttggcttttta

SEQ ID NO: 106247 - DNA, 62 bp, Homo sapiens
aaaaggggttaatttgatttaaaaactgaaaatgattctctatttggctttttaaaaagtat

SEQ ID NO: 106248 - DNA, 69 bp, Homo sapiens
ttttaaaaagtatttatttaaaaaactctgcacagaacagacagaggggagacaaaggattctattgta

SEQ ID NO: 106249 - DNA, 71 bp, Homo sapiens
tttaaaaagtatttatttaaaaaactctgcacagaacagacagaggggagacaaaggattctattgtatga

SEQ ID NO: 106250 - DNA, 73 bp, Homo sapiens
atttatttaaaaaactctgcacagaacagacagaggggagacaaaggattctattgtatgactgacctaggcg

SEQ ID NO: 106251 - DNA, 77 bp, Homo sapiens
aaaaactctgcacagaacagacagaggggagacaaaggattctattgtatgactgacctaggcgtgccatgtctctt

SEQ ID NO: 106252 - DNA, 79 bp, Homo sapiens
acagaacagacagaggggagacaaaggattctattgtatgactgacctaggcgtgccatgtctctttgctccctacaca

SEQ ID NO: 106253 - DNA, 79 bp, Homo sapiens
agacagaggggagacaaaggattctattgtatgactgacctaggcgtgccatgtctctttgctccctacacagacagag

SEQ ID NO: 106254 - DNA, 80 bp, Homo sapiens
agacaaaggattctattgtatgactgacctaggcgtgccatgtctctttgctccctacacagacagaggcctggcctgaa

SEQ ID NO: 106255 - DNA, 83 bp, Homo sapiens
ttctattgtatgactgacctaggcgtgccatgtctctttgctccctacacagacagaggcctggcctgaagcacgcaagatta

SEQ ID NO: 106256 - DNA, 86 bp, Homo sapiens
gtatgactgacctaggcgtgccatgtctctttgctccctacacagacagaggcctggcctgaagcacgcaagattatgcacacatg

SEQ ID NO: 106257 - DNA, 84 bp, Homo sapiens
taggcgtgccatgtctctttgctccctacacagacagaggcctggcctgaagcacgcaagattatgcacacatgggtccaatct

SEQ ID NO: 106258 - DNA, 82 bp, Homo sapiens
atgtctctttgctccctacacagacagaggcctggcctgaagcacgcaagattatgcacacatgggtccaatctttgtcacc

SEQ ID NO: 106259 - DNA, 82 bp, Homo sapiens
tccctacacagacagaggcctggcctgaagcacgcaagattatgcacacatgggtccaatctttgtcacctgtcacctaata

SEQ ID NO: 106260 - DNA, 77 bp, Homo sapiens
acgcaagattatgcacacatgggtccaatctttgtcacctgtcacctaataaagcctcactgaatcaaagactaggt

SEQ ID NO: 106261 - DNA, 78 bp, Homo sapiens
ttatgcacacatgggtccaatctttgtcacctgtcacctaataaagcctcactgaatcaaagactaggttatcattta

SEQ ID NO: 106262 - DNA, 76 bp, Homo sapiens
acatgggtccaatctttgtcacctgtcacctaataaagcctcactgaatcaaagactaggttatcatttattctgc

SEQ ID NO: 106263 - DNA, 77 bp, Homo sapiens
caatctttgtcacctgtcacctaataaagcctcactgaatcaaagactaggttatcatttattctgctggactgact

SEQ ID NO: 106264 - DNA, 77 bp, Homo sapiens
atctttgtcacctgtcacctaataaagcctcactgaatcaaagactaggttatcatttattctgctggactgactta

SEQ ID NO: 106265 - DNA, 79 bp, Homo sapiens
tttgtcacctgtcacctaataaagcctcactgaatcaaagactaggttatcatttattctgctggactgacttatgcaa

SEQ ID NO: 106266 - DNA, 80 bp, Homo sapiens
tgtcacctaataaagcctcactgaatcaaagactaggttatcatttattctgctggactgacttatgcaacattctctgt

SEQ ID NO: 106267 - DNA, 78 bp, Homo sapiens
ctaataaagcctcactgaatcaaagactaggttatcatttattctgctggactgacttatgcaacattctctgtttaa

SEQ ID NO: 106268 - DNA, 79 bp, Homo sapiens
taataaagcctcactgaatcaaagactaggttatcatttattctgctggactgacttatgcaacattctctgtttaatg

SEQ ID NO: 106269 - DNA, 79 bp, Homo sapiens
cctcactgaatcaaagactaggttatcatttattctgctggactgacttatgcaacattctctgtttaatgtcatcttt

SEQ ID NO: 106270 - DNA, 79 bp, Homo sapiens
tgaatcaaagactaggttatcatttattctgctggactgacttatgcaacattctctgtttaatgtcatcttttcttaa

SEQ ID NO: 106271 - DNA, 77 bp, Homo sapiens
caaagactaggttatcatttattctgctggactgacttatgcaacattctctgtttaatgtcatcttttcttaatac

SEQ ID NO: 106272 - DNA, 77 bp, Homo sapiens
actaggttatcatttattctgctggactgacttatgcaacattctctgtttaatgtcatcttttcttaatactcaat

SEQ ID NO: 106273 - DNA, 78 bp, Homo sapiens
catttattctgctggactgacttatgcaacattctctgtttaatgtcatcttttcttaatactcaattattattatta

SEQ ID NO: 106274 - DNA, 76 bp, Homo sapiens
tattgttactgtaatatttaaaaacacagatggacctgggaacatgccattgtaacattgtggccatcagccaaaa

SEQ ID NO: 106275 - DNA, 73 bp, Homo sapiens
ctgtaatatttaaaaacacagatggacctgggaacatgccattgtaacattgtggccatcagccaaaaaaaaa

SEQ ID NO: 106276 - DNA, 76 bp, Homo sapiens
aaaaaaaggtacaataatctattgttgagctggaactcctccagtgactcataggctctggggataatgtctctga

SEQ ID NO: 106277 - DNA, 81 bp, Homo sapiens
acaataatctattgttgagctggaactcctccagtgactcataggctctggggataatgtctctgaaatcatgcctataag

SEQ ID NO: 106278 - DNA, 80 bp, Homo sapiens
aatctattgttgagctggaactcctccagtgactcataggctctggggataatgtctctgaaatcatgcctataagttaa

SEQ ID NO: 106279 - DNA, 79 bp, Homo sapiens
tggaactcctccagtgactcataggctctggggataatgtctctgaaatcatgcctataagttaatcgatgaagttttc

SEQ ID NO: 106280 - DNA, 77 bp, Homo sapiens
ctcctccagtgactcataggctctggggataatgtctctgaaatcatgcctataagttaatcgatgaagttttcttt

SEQ ID NO: 106281 - DNA, 76 bp, Homo sapiens
ataggctctggggataatgtctctgaaatcatgcctataagttaatcgatgaagttttcttttattcctcagtata

SEQ ID NO: 106282 - DNA, 75 bp, Homo sapiens
gggataatgtctctgaaatcatgcctataagttaatcgatgaagttttcttttattcctcagtatatacatttta

SEQ ID NO: 106283 - DNA, 74 bp, Homo sapiens
gtctctgaaatcatgcctataagttaatcgatgaagttttcttttattcctcagtatatacattttatctcctt

SEQ ID NO: 106284 - DNA, 75 bp, Homo sapiens
tcatgcctataagttaatcgatgaagttttcttttattcctcagtatatacattttatctcctttgtaagataca

SEQ ID NO: 106285 - DNA, 70 bp, Homo sapiens
ataagttaatcgatgaagttttcttttattcctcagtatatacattttatctcctttgtaagatacaact

SEQ ID NO: 106286 - DNA, 69 bp, Homo sapiens
ttcttttattcctcagtatatacattttatctcctttgtaagatacaacttaataataaattaaataac

SEQ ID NO: 106287 - DNA, 72 bp, Homo sapiens
cattttatctcctttgtaagatacaacttaataataaattaaataactatcaagcatattgcaagattacct

SEQ ID NO: 106288 - DNA, 73 bp, Homo sapiens
tttgtaagatacaacttaataataaattaaataactatcaagcatattgcaagattaccttattaacagtcac

SEQ ID NO: 106289 - DNA, 71 bp, Homo sapiens
acaacttaataataaattaaataactatcaagcatattgcaagattaccttattaacagtcactttttatg

SEQ ID NO: 106290 - DNA, 74 bp, Homo sapiens
aataaattaaataactatcaagcatattgcaagattaccttattaacagtcactttttatgtgaagtcgctcta

SEQ ID NO: 106291 - DNA, 76 bp, Homo sapiens
ataactatcaagcatattgcaagattaccttattaacagtcactttttatgtgaagtcgctctaaatattcaagga

SEQ ID NO: 106292 - DNA, 75 bp, Homo sapiens
atcaagcatattgcaagattaccttattaacagtcactttttatgtgaagtcgctctaaatattcaaggaatagt

SEQ ID NO: 106293 - DNA, 72 bp, Homo sapiens
gcaagattaccttattaacagtcactttttatgtgaagtcgctctaaatattcaaggaatagtttctttcca

SEQ ID NO: 106294 - DNA, 71 bp, Homo sapiens
taccttattaacagtcactttttatgtgaagtcgctctaaatattcaaggaatagtttctttccattggaa

SEQ ID NO: 106295 - DNA, 71 bp, Homo sapiens
cagtcactttttatgtgaagtcgctctaaatattcaaggaatagtttctttccattggaaaaaatttctga

SEQ ID NO: 106296 - DNA, 72 bp, Homo sapiens
gtgaagtcgctctaaatattcaaggaatagtttctttccattggaaaaaatttctgagaaattggatcagaa

SEQ ID NO: 106297 - DNA, 70 bp, Homo sapiens
gtcgctctaaatattcaaggaatagtttctttccattggaaaaaatttctgagaaattggatcagaaagt

SEQ ID NO: 106298 - DNA, 69 bp, Homo sapiens
caaggaatagtttctttccattggaaaaaatttctgagaaattggatcagaaagttttttgaggctcaa

SEQ ID NO: 106299 - DNA, 69 bp, Homo sapiens
atagtttctttccattggaaaaaatttctgagaaattggatcagaaagttttttgaggctcaatgtggg

SEQ ID NO: 106300 - DNA, 71 bp, Homo sapiens
aaaaatttctgagaaattggatcagaaagttttttgaggctcaatgtggggttctgggctcatcttttata

SEQ ID NO: 106301 - DNA, 74 bp, Homo sapiens
agaaattggatcagaaagttttttgaggctcaatgtggggttctgggctcatcttttatacctgcttctatgag

SEQ ID NO: 106302 - DNA, 71 bp, Homo sapiens
aatgtggggttctgggctcatcttttatacctgcttctatgaggtggtgcagtttcccatgaaaaaaaaaa

SEQ ID NO: 106303 - DNA, 67 bp, Homo sapiens
aaaaaaaaaccagaaagaaaagatacaataccctgttgcctgggtgcaggaagaaagagaacatccc

SEQ ID NO: 106304 - DNA, 70 bp, Homo sapiens
aaaaaccagaaagaaaagatacaataccctgttgcctgggtgcaggaagaaagagaacatccccgctgac

SEQ ID NO: 106305 - DNA, 73 bp, Homo sapiens
aaagaaaagatacaataccctgttgcctgggtgcaggaagaaagagaacatccccgctgacccagtgatccta

SEQ ID NO: 106306 - DNA, 72 bp, Homo sapiens
aaagatacaataccctgttgcctgggtgcaggaagaaagagaacatccccgctgacccagtgatcctagttt

SEQ ID NO: 106307 - DNA, 75 bp, Homo sapiens
tacaataccctgttgcctgggtgcaggaagaaagagaacatccccgctgacccagtgatcctagttttctcctgc

SEQ ID NO: 106308 - DNA, 73 bp, Homo sapiens
taccctgttgcctgggtgcaggaagaaagagaacatccccgctgacccagtgatcctagttttctcctgcctt

SEQ ID NO: 106309 - DNA, 72 bp, Homo sapiens
cctgggtgcaggaagaaagagaacatccccgctgacccagtgatcctagttttctcctgcctttccggagat

SEQ ID NO: 106310 - DNA, 73 bp, Homo sapiens
gtgcaggaagaaagagaacatccccgctgacccagtgatcctagttttctcctgcctttccggagattttcaa

SEQ ID NO: 106311 - DNA, 71 bp, Homo sapiens
aggaagaaagagaacatccccgctgacccagtgatcctagttttctcctgcctttccggagattttcaaca

SEQ ID NO: 106312 - DNA, 71 bp, Homo sapiens
aagaaagagaacatccccgctgacccagtgatcctagttttctcctgcctttccggagattttcaacagaa

SEQ ID NO: 106313 - DNA, 74 bp, Homo sapiens
gctgacccagtgatcctagttttctcctgcctttccggagattttcaacagaaaatgccaggcaaggttgagct

SEQ ID NO: 106314 - DNA, 70 bp, Homo sapiens
tagttttctcctgcctttccggagattttcaacagaaaatgccaggcaaggttgagctttctttttctaa

SEQ ID NO: 106315 - DNA, 67 bp, Homo sapiens
cctttccggagattttcaacagaaaatgccaggcaaggttgagctttctttttctaaaattgttttc

SEQ ID NO: 106316 - DNA, 69 bp, Homo sapiens
cggagattttcaacagaaaatgccaggcaaggttgagctttctttttctaaaattgttttctctttgac

SEQ ID NO: 106317 - DNA, 71 bp, Homo sapiens
gccaggcaaggttgagctttctttttctaaaattgttttctctttgactcatggatttaatggtaacacaa

SEQ ID NO: 106318 - DNA, 68 bp, Homo sapiens
atggtaacacaaaaggtccccttctctagaagaaattggaagttaaatttatcatctcttcttttaca

SEQ ID NO: 106319 - DNA, 66 bp, Homo sapiens
aaaggtccccttctctagaagaaattggaagttaaatttatcatctcttcttttacatattttccc

SEQ ID NO: 106320 - DNA, 71 bp, Homo sapiens
cttctctagaagaaattggaagttaaatttatcatctcttcttttacatattttccccaacatgccaaatc

SEQ ID NO: 106321 - DNA, 72 bp, Homo sapiens
ttggaagttaaatttatcatctcttcttttacatattttccccaacatgccaaatcttagttcattgagggc

SEQ ID NO: 106322 - DNA, 75 bp, Homo sapiens
aatttatcatctcttcttttacatattttccccaacatgccaaatcttagttcattgagggcttcgataatgcag

SEQ ID NO: 106323 - DNA, 77 bp, Homo sapiens
ctcttcttttacatattttccccaacatgccaaatcttagttcattgagggcttcgataatgcaggcagtcctgcat

SEQ ID NO: 106324 - DNA, 79 bp, Homo sapiens
ttttacatattttccccaacatgccaaatcttagttcattgagggcttcgataatgcaggcagtcctgcatttcagata

SEQ ID NO: 106325 - DNA, 84 bp, Homo sapiens
cccaacatgccaaatcttagttcattgagggcttcgataatgcaggcagtcctgcatttcagatatgcatagtgccgtgccatt

SEQ ID NO: 106326 - DNA, 86 bp, Homo sapiens
caaatcttagttcattgagggcttcgataatgcaggcagtcctgcatttcagatatgcatagtgccgtgccatttagtgacatgta

SEQ ID NO: 106327 - DNA, 85 bp, Homo sapiens
ttagttcattgagggcttcgataatgcaggcagtcctgcatttcagatatgcatagtgccgtgccatttagtgacatgtatgggt

SEQ ID NO: 106328 - DNA, 86 bp, Homo sapiens
gcttcgataatgcaggcagtcctgcatttcagatatgcatagtgccgtgccatttagtgacatgtatgggttctgcagtttacatt

SEQ ID NO: 106329 - DNA, 80 bp, Homo sapiens
agatatgcatagtgccgtgccatttagtgacatgtatgggttctgcagtttacattttgattaataggagcaattaataa

SEQ ID NO: 106330 - DNA, 79 bp, Homo sapiens
atagtgccgtgccatttagtgacatgtatgggttctgcagtttacattttgattaataggagcaattaataaatcatga

SEQ ID NO: 106331 - DNA, 79 bp, Homo sapiens
gacatgtatgggttctgcagtttacattttgattaataggagcaattaataaatcatgagttacataatatccacacag

SEQ ID NO: 106332 - DNA, 77 bp, Homo sapiens
ggttctgcagtttacattttgattaataggagcaattaataaatcatgagttacataatatccacacagtgaaaagc

SEQ ID NO: 106333 - DNA, 76 bp, Homo sapiens
tacattttgattaataggagcaattaataaatcatgagttacataatatccacacagtgaaaagcctcaaagttac

SEQ ID NO: 106334 - DNA, 79 bp, Homo sapiens
tgattaataggagcaattaataaatcatgagttacataatatccacacagtgaaaagcctcaaagttaccatgaagtga

SEQ ID NO: 106335 - DNA, 79 bp, Homo sapiens
ggagcaattaataaatcatgagttacataatatccacacagtgaaaagcctcaaagttaccatgaagtgattgagatat

SEQ ID NO: 106336 - DNA, 78 bp, Homo sapiens
aataaatcatgagttacataatatccacacagtgaaaagcctcaaagttaccatgaagtgattgagatattaaatgcc

SEQ ID NO: 106337 - DNA, 80 bp, Homo sapiens
gagttacataatatccacacagtgaaaagcctcaaagttaccatgaagtgattgagatattaaatgcctatatgtattga

SEQ ID NO: 106338 - DNA, 79 bp, Homo sapiens
atatccacacagtgaaaagcctcaaagttaccatgaagtgattgagatattaaatgcctatatgtattgaatatgattt

SEQ ID NO: 106339 - DNA, 76 bp, Homo sapiens
gtgaaaagcctcaaagttaccatgaagtgattgagatattaaatgcctatatgtattgaatatgatttttttgaag

SEQ ID NO: 106340 - DNA, 79 bp, Homo sapiens
caaagttaccatgaagtgattgagatattaaatgcctatatgtattgaatatgatttttttgaagtagtctcatgccag

SEQ ID NO: 106341 - DNA, 79 bp, Homo sapiens
gaagtgattgagatattaaatgcctatatgtattgaatatgatttttttgaagtagtctcatgccagttatcttcccag

SEQ ID NO: 106342 - DNA, 79 bp, Homo sapiens
tgagatattaaatgcctatatgtattgaatatgatttttttgaagtagtctcatgccagttatcttcccaggagaagta

SEQ ID NO: 106343 - DNA, 75 bp, Homo sapiens
gcctatatgtattgaatatgatttttttgaagtagtctcatgccagttatcttcccaggagaagtaaaattgttc

SEQ ID NO: 106344 - DNA, 75 bp, Homo sapiens
gtattgaatatgatttttttgaagtagtctcatgccagttatcttcccaggagaagtaaaattgttctgcttatc

SEQ ID NO: 106345 - DNA, 72 bp, Homo sapiens
atttttttgaagtagtctcatgccagttatcttcccaggagaagtaaaattgttctgcttatcttctttcac

SEQ ID NO: 106346 - DNA, 77 bp, Homo sapiens
tttgaagtagtctcatgccagttatcttcccaggagaagtaaaattgttctgcttatcttctttcactgagtcatcc

SEQ ID NO: 106347 - DNA, 74 bp, Homo sapiens
ttatcttcccaggagaagtaaaattgttctgcttatcttctttcactgagtcatccccatcaaaacaacaagta

SEQ ID NO: 106348 - DNA, 75 bp, Homo sapiens
gaagtaaaattgttctgcttatcttctttcactgagtcatccccatcaaaacaacaagtaagtgactcctcctca

SEQ ID NO: 106349 - DNA, 74 bp, Homo sapiens
tatcttctttcactgagtcatccccatcaaaacaacaagtaagtgactcctcctcagaacttaatatttaacta

SEQ ID NO: 106350 - DNA, 67 bp, Homo sapiens
acaacaagtaagtgactcctcctcagaacttaatatttaactaaactctttcagttactaattaagg

SEQ ID NO: 106351 - DNA, 66 bp, Homo sapiens
cttaatatttaactaaactctttcagttactaattaagggataaattaggttcctattagaatgaa

SEQ ID NO: 106352 - DNA, 67 bp, Homo sapiens
ctaaactctttcagttactaattaagggataaattaggttcctattagaatgaaaaatcggaatggc

SEQ ID NO: 106353 - DNA, 67 bp, Homo sapiens
ctttcagttactaattaagggataaattaggttcctattagaatgaaaaatcggaatggctttattc

SEQ ID NO: 106354 - DNA, 67 bp, Homo sapiens
ctaattaagggataaattaggttcctattagaatgaaaaatcggaatggctttattctctcttaacc

SEQ ID NO: 106355 - DNA, 69 bp, Homo sapiens
gggataaattaggttcctattagaatgaaaaatcggaatggctttattctctcttaaccttagatacat

SEQ ID NO: 106356 - DNA, 75 bp, Homo sapiens
cctattagaatgaaaaatcggaatggctttattctctcttaaccttagatacattctctcagtctaatatcttgc

SEQ ID NO: 106357 - DNA, 78 bp, Homo sapiens
gaatggctttattctctcttaaccttagatacattctctcagtctaatatcttgctcagggtctaatgcagacaagtt

SEQ ID NO: 106358 - DNA, 76 bp, Homo sapiens
ctttattctctcttaaccttagatacattctctcagtctaatatcttgctcagggtctaatgcagacaagttttat

SEQ ID NO: 106359 - DNA, 75 bp, Homo sapiens
ctcttaaccttagatacattctctcagtctaatatcttgctcagggtctaatgcagacaagttttattttatagt

SEQ ID NO: 106360 - DNA, 77 bp, Homo sapiens
agatacattctctcagtctaatatcttgctcagggtctaatgcagacaagttttattttatagttctctcattttct

SEQ ID NO: 106361 - DNA, 78 bp, Homo sapiens
agtctaatatcttgctcagggtctaatgcagacaagttttattttatagttctctcattttctttctgctctgcaatc

SEQ ID NO: 106362 - DNA, 76 bp, Homo sapiens
ctcctcttcctccttcttttattcttggaaattaatgctttgctatatgtggagatcttcctgacctgccaaatga

SEQ ID NO: 106363 - DNA, 79 bp, Homo sapiens
tccttcttttattcttggaaattaatgctttgctatatgtggagatcttcctgacctgccaaatgacacatcgtctgaa

SEQ ID NO: 106364 - DNA, 81 bp, Homo sapiens
tttattcttggaaattaatgctttgctatatgtggagatcttcctgacctgccaaatgacacatcgtctgaaaatgatgaa

SEQ ID NO: 106365 - DNA, 82 bp, Homo sapiens
aattaatgctttgctatatgtggagatcttcctgacctgccaaatgacacatcgtctgaaaatgatgaacacacattgttta

SEQ ID NO: 106366 - DNA, 81 bp, Homo sapiens
tatgtggagatcttcctgacctgccaaatgacacatcgtctgaaaatgatgaacacacattgtttaaaaatgaggctggaa

SEQ ID NO: 106367 - DNA, 78 bp, Homo sapiens
tcttcctgacctgccaaatgacacatcgtctgaaaatgatgaacacacattgtttaaaaatgaggctggaaacttggc

SEQ ID NO: 106368 - DNA, 74 bp, Homo sapiens
aaatgacacatcgtctgaaaatgatgaacacacattgtttaaaaatgaggctggaaacttggcccttcattaaa

SEQ ID NO: 106369 - DNA, 73 bp, Homo sapiens
tcgtctgaaaatgatgaacacacattgtttaaaaatgaggctggaaacttggcccttcattaaaacctctgta

SEQ ID NO: 106370 - DNA, 72 bp, Homo sapiens
aatgatgaacacacattgtttaaaaatgaggctggaaacttggcccttcattaaaacctctgtaacagataa

SEQ ID NO: 106371 - DNA, 70 bp, Homo sapiens
cacattgtttaaaaatgaggctggaaacttggcccttcattaaaacctctgtaacagataacattctgtt

SEQ ID NO: 106372 - DNA, 70 bp, Homo sapiens
tgtttaaaaatgaggctggaaacttggcccttcattaaaacctctgtaacagataacattctgtttcttc

SEQ ID NO: 106373 - DNA, 70 bp, Homo sapiens
aggctggaaacttggcccttcattaaaacctctgtaacagataacattctgtttcttctcagtattttgt

SEQ ID NO: 106374 - DNA, 73 bp, Homo sapiens
aacttggcccttcattaaaacctctgtaacagataacattctgtttcttctcagtattttgttgtgcttgata

SEQ ID NO: 106375 - DNA, 75 bp, Homo sapiens
aacctctgtaacagataacattctgtttcttctcagtattttgttgtgcttgatataatcatttattacaatccc

SEQ ID NO: 106376 - DNA, 76 bp, Homo sapiens
cctctgtaacagataacattctgtttcttctcagtattttgttgtgcttgatataatcatttattacaatccctat

SEQ ID NO: 106377 - DNA, 76 bp, Homo sapiens
gtaacagataacattctgtttcttctcagtattttgttgtgcttgatataatcatttattacaatccctattatgt

SEQ ID NO: 106378 - DNA, 77 bp, Homo sapiens
acattctgtttcttctcagtattttgttgtgcttgatataatcatttattacaatccctattatgtttttgcttgca

SEQ ID NO: 106379 - DNA, 78 bp, Homo sapiens
ctgtttcttctcagtattttgttgtgcttgatataatcatttattacaatccctattatgtttttgcttgcacataga

SEQ ID NO: 106380 - DNA, 81 bp, Homo sapiens
tcttctcagtattttgttgtgcttgatataatcatttattacaatccctattatgtttttgcttgcacatagagtagcaga

SEQ ID NO: 106381 - DNA, 79 bp, Homo sapiens
ctcagtattttgttgtgcttgatataatcatttattacaatccctattatgtttttgcttgcacatagagtagcagaag

SEQ ID NO: 106382 - DNA, 79 bp, Homo sapiens
cagtattttgttgtgcttgatataatcatttattacaatccctattatgtttttgcttgcacatagagtagcagaagga

SEQ ID NO: 106383 - DNA, 77 bp, Homo sapiens
gttgtgcttgatataatcatttattacaatccctattatgtttttgcttgcacatagagtagcagaaggaataacct

SEQ ID NO: 106384 - DNA, 79 bp, Homo sapiens
gtgcttgatataatcatttattacaatccctattatgtttttgcttgcacatagagtagcagaaggaataaccttctga

SEQ ID NO: 106385 - DNA, 75 bp, Homo sapiens
ttattacaatccctattatgtttttgcttgcacatagagtagcagaaggaataaccttctgatagtaacttttca

SEQ ID NO: 106386 - DNA, 79 bp, Homo sapiens
tttttgcttgcacatagagtagcagaaggaataaccttctgatagtaacttttcatcagataggctcctgagaataatc

SEQ ID NO: 106387 - DNA, 79 bp, Homo sapiens
cacatagagtagcagaaggaataaccttctgatagtaacttttcatcagataggctcctgagaataatctgatggtaaa

SEQ ID NO: 106388 - DNA, 78 bp, Homo sapiens
agcagaaggaataaccttctgatagtaacttttcatcagataggctcctgagaataatctgatggtaaaatgtgatct

SEQ ID NO: 106389 - DNA, 76 bp, Homo sapiens
gaataaccttctgatagtaacttttcatcagataggctcctgagaataatctgatggtaaaatgtgatcttggttt

SEQ ID NO: 106390 - DNA, 77 bp, Homo sapiens
ttctgatagtaacttttcatcagataggctcctgagaataatctgatggtaaaatgtgatcttggttttgttaccta

SEQ ID NO: 106391 - DNA, 76 bp, Homo sapiens
aacttttcatcagataggctcctgagaataatctgatggtaaaatgtgatcttggttttgttacctatgtgtcaaa

SEQ ID NO: 106392 - DNA, 78 bp, Homo sapiens
agataggctcctgagaataatctgatggtaaaatgtgatcttggttttgttacctatgtgtcaaagtgttgagatcaa

SEQ ID NO: 106393 - DNA, 74 bp, Homo sapiens
taaaatgtgatcttggttttgttacctatgtgtcaaagtgttgagatcaagggactttattcttccactggcaa

SEQ ID NO: 106394 - DNA, 73 bp, Homo sapiens
gttttgttacctatgtgtcaaagtgttgagatcaagggactttattcttccactggcaaaactcatagttaca

SEQ ID NO: 106395 - DNA, 73 bp, Homo sapiens
ttacctatgtgtcaaagtgttgagatcaagggactttattcttccactggcaaaactcatagttacaacattt

SEQ ID NO: 106396 - DNA, 71 bp, Homo sapiens
aaagtgttgagatcaagggactttattcttccactggcaaaactcatagttacaacatttttctagattcg

SEQ ID NO: 106397 - DNA, 74 bp, Homo sapiens
ttgagatcaagggactttattcttccactggcaaaactcatagttacaacatttttctagattcggctcaaaca

SEQ ID NO: 106398 - DNA, 72 bp, Homo sapiens
tttattcttccactggcaaaactcatagttacaacatttttctagattcggctcaaacagcggcaaatttct

SEQ ID NO: 106399 - DNA, 71 bp, Homo sapiens
cttccactggcaaaactcatagttacaacatttttctagattcggctcaaacagcggcaaatttcttattt

SEQ ID NO: 106400 - DNA, 71 bp, Homo sapiens
gcaaaactcatagttacaacatttttctagattcggctcaaacagcggcaaatttcttattttaaatgttc

SEQ ID NO: 106401 - DNA, 69 bp, Homo sapiens
tacaacatttttctagattcggctcaaacagcggcaaatttcttattttaaatgttcccttcacaaaac

SEQ ID NO: 106402 - DNA, 71 bp, Homo sapiens
ttctagattcggctcaaacagcggcaaatttcttattttaaatgttcccttcacaaaacttttatagatga

SEQ ID NO: 106403 - DNA, 70 bp, Homo sapiens
cagcggcaaatttcttattttaaatgttcccttcacaaaacttttatagatgaaatgtataaataaatca

SEQ ID NO: 106404 - DNA, 73 bp, Homo sapiens
cttattttaaatgttcccttcacaaaacttttatagatgaaatgtataaataaatcagatgactagttcatga

SEQ ID NO: 106405 - DNA, 77 bp, Homo sapiens
atgttcccttcacaaaacttttatagatgaaatgtataaataaatcagatgactagttcatgaacatactctgccag

SEQ ID NO: 106406 - DNA, 79 bp, Homo sapiens
cccttcacaaaacttttatagatgaaatgtataaataaatcagatgactagttcatgaacatactctgccagtatctga

SEQ ID NO: 106407 - DNA, 80 bp, Homo sapiens
ttatagatgaaatgtataaataaatcagatgactagttcatgaacatactctgccagtatctgatactttgtaaaaacaa

SEQ ID NO: 106408 - DNA, 77 bp, Homo sapiens
aatgtataaataaatcagatgactagttcatgaacatactctgccagtatctgatactttgtaaaaacaagtaaatg

SEQ ID NO: 106409 - DNA, 78 bp, Homo sapiens
atgaacatactctgccagtatctgatactttgtaaaaacaagtaaatggttgctgtatctaatagatgccttctacat

SEQ ID NO: 106410 - DNA, 78 bp, Homo sapiens
atactctgccagtatctgatactttgtaaaaacaagtaaatggttgctgtatctaatagatgccttctacattagaga

SEQ ID NO: 106411 - DNA, 77 bp, Homo sapiens
ctgatactttgtaaaaacaagtaaatggttgctgtatctaatagatgccttctacattagagaatcgtaatggatca

SEQ ID NO: 106412 - DNA, 76 bp, Homo sapiens
gtaaaaacaagtaaatggttgctgtatctaatagatgccttctacattagagaatcgtaatggatcaaatgttaga

SEQ ID NO: 106413 - DNA, 78 bp, Homo sapiens
caagtaaatggttgctgtatctaatagatgccttctacattagagaatcgtaatggatcaaatgttagattttccaca

SEQ ID NO: 106414 - DNA, 75 bp, Homo sapiens
ggttgctgtatctaatagatgccttctacattagagaatcgtaatggatcaaatgttagattttccacaaaaaat

SEQ ID NO: 106415 - DNA, 75 bp, Homo sapiens
atagatgccttctacattagagaatcgtaatggatcaaatgttagattttccacaaaaaattatcctctggaaca

SEQ ID NO: 106416 - DNA, 72 bp, Homo sapiens
gccttctacattagagaatcgtaatggatcaaatgttagattttccacaaaaaattatcctctggaacaaaa

SEQ ID NO: 106417 - DNA, 72 bp, Homo sapiens
ttagagaatcgtaatggatcaaatgttagattttccacaaaaaattatcctctggaacaaaacagttcaaga

SEQ ID NO: 106418 - DNA, 70 bp, Homo sapiens
cgtaatggatcaaatgttagattttccacaaaaaattatcctctggaacaaaacagttcaagaaatagaa

SEQ ID NO: 106419 - DNA, 71 bp, Homo sapiens
gttagattttccacaaaaaattatcctctggaacaaaacagttcaagaaatagaatgtgatactttgctag

SEQ ID NO: 106420 - DNA, 76 bp, Homo sapiens
tccacaaaaaattatcctctggaacaaaacagttcaagaaatagaatgtgatactttgctaggctcaacagataca

SEQ ID NO: 106421 - DNA, 73 bp, Homo sapiens
aaaattatcctctggaacaaaacagttcaagaaatagaatgtgatactttgctaggctcaacagatacacttt

SEQ ID NO: 106422 - DNA, 76 bp, Homo sapiens
gaacaaaacagttcaagaaatagaatgtgatactttgctaggctcaacagatacacttttttattctaacagctgc

SEQ ID NO: 106423 - DNA, 78 bp, Homo sapiens
aaacagttcaagaaatagaatgtgatactttgctaggctcaacagatacacttttttattctaacagctgcctctgca

SEQ ID NO: 106424 - DNA, 82 bp, Homo sapiens
atactttgctaggctcaacagatacacttttttattctaacagctgcctctgcagacaacagcatcagatgaacaaatatta

SEQ ID NO: 106425 - DNA, 82 bp, Homo sapiens
ctaggctcaacagatacacttttttattctaacagctgcctctgcagacaacagcatcagatgaacaaatattattttcata

SEQ ID NO: 106426 - DNA, 81 bp, Homo sapiens
aacagatacacttttttattctaacagctgcctctgcagacaacagcatcagatgaacaaatattattttcatagcagaaa

SEQ ID NO: 106427 - DNA, 85 bp, Homo sapiens
tttttattctaacagctgcctctgcagacaacagcatcagatgaacaaatattattttcatagcagaaatggtcatgtctgctgg

SEQ ID NO: 106428 - DNA, 89 bp, Homo sapiens
taacagctgcctctgcagacaacagcatcagatgaacaaatattattttcatagcagaaatggtcatgtctgctgggctgccaattgac

SEQ ID NO: 106429 - DNA, 89 bp, Homo sapiens
tgcagacaacagcatcagatgaacaaatattattttcatagcagaaatggtcatgtctgctgggctgccaattgacgatgcagtcattt

SEQ ID NO: 106430 - DNA, 86 bp, Homo sapiens
aacagcatcagatgaacaaatattattttcatagcagaaatggtcatgtctgctgggctgccaattgacgatgcagtcattttgcc

SEQ ID NO: 106431 - DNA, 83 bp, Homo sapiens
aacaaatattattttcatagcagaaatggtcatgtctgctgggctgccaattgacgatgcagtcattttgcctctgtgtagct

SEQ ID NO: 106432 - DNA, 85 bp, Homo sapiens
atattattttcatagcagaaatggtcatgtctgctgggctgccaattgacgatgcagtcattttgcctctgtgtagctttatcta

SEQ ID NO: 106433 - DNA, 84 bp, Homo sapiens
tagcagaaatggtcatgtctgctgggctgccaattgacgatgcagtcattttgcctctgtgtagctttatctactactaaaata

SEQ ID NO: 106434 - DNA, 81 bp, Homo sapiens
atggtcatgtctgctgggctgccaattgacgatgcagtcattttgcctctgtgtagctttatctactactaaaatagactt

SEQ ID NO: 106435 - DNA, 79 bp, Homo sapiens
tgggctgccaattgacgatgcagtcattttgcctctgtgtagctttatctactactaaaatagactttgattcttccat

SEQ ID NO: 106436 - DNA, 78 bp, Homo sapiens
gatgcagtcattttgcctctgtgtagctttatctactactaaaatagactttgattcttccattggagaagaatataa

SEQ ID NO: 106437 - DNA, 82 bp, Homo sapiens
tgcctctgtgtagctttatctactactaaaatagactttgattcttccattggagaagaatataatgatcatgtgtgatatg

SEQ ID NO: 106438 - DNA, 80 bp, Homo sapiens
gtgtagctttatctactactaaaatagactttgattcttccattggagaagaatataatgatcatgtgtgatatgtagga

SEQ ID NO: 106439 - DNA, 76 bp, Homo sapiens
ctactaaaatagactttgattcttccattggagaagaatataatgatcatgtgtgatatgtaggaaagttacacgt

SEQ ID NO: 106440 - DNA, 78 bp, Homo sapiens
attcttccattggagaagaatataatgatcatgtgtgatatgtaggaaagttacacgttcatagcagaaaacacgtaa

SEQ ID NO: 106441 - DNA, 78 bp, Homo sapiens
ttggagaagaatataatgatcatgtgtgatatgtaggaaagttacacgttcatagcagaaaacacgtaagagagagtt

SEQ ID NO: 106442 - DNA, 79 bp, Homo sapiens
tataatgatcatgtgtgatatgtaggaaagttacacgttcatagcagaaaacacgtaagagagagtttgcccaggcaaa

SEQ ID NO: 106443 - DNA, 76 bp, Homo sapiens
atcatgtgtgatatgtaggaaagttacacgttcatagcagaaaacacgtaagagagagtttgcccaggcaaatccg

SEQ ID NO: 106444 - DNA, 72 bp, Homo sapiens
atatgtaggaaagttacacgttcatagcagaaaacacgtaagagagagtttgcccaggcaaatccgggtcca

SEQ ID NO: 106445 - DNA, 76 bp, Homo sapiens
agagagtttgcccaggcaaatccgggtccacctgccatatcagaatgagagaagaaagaggggccctctagtctca

SEQ ID NO: 106446 - DNA, 76 bp, Homo sapiens
aggcaaatccgggtccacctgccatatcagaatgagagaagaaagaggggccctctagtctcagtcttgagcacct

SEQ ID NO: 106447 - DNA, 76 bp, Homo sapiens
atccgggtccacctgccatatcagaatgagagaagaaagaggggccctctagtctcagtcttgagcaccttaaata

SEQ ID NO: 106448 - DNA, 79 bp, Homo sapiens
ctgccatatcagaatgagagaagaaagaggggccctctagtctcagtcttgagcaccttaaatacacactagcacttag

SEQ ID NO: 106449 - DNA, 76 bp, Homo sapiens
atcagaatgagagaagaaagaggggccctctagtctcagtcttgagcaccttaaatacacactagcacttaggccc

SEQ ID NO: 106450 - DNA, 72 bp, Homo sapiens
agaagaaagaggggccctctagtctcagtcttgagcaccttaaatacacactagcacttaggccccagggag

SEQ ID NO: 106451 - DNA, 74 bp, Homo sapiens
ccctctagtctcagtcttgagcaccttaaatacacactagcacttaggccccagggaggtttggaacataagca

SEQ ID NO: 106452 - DNA, 70 bp, Homo sapiens
cttgagcaccttaaatacacactagcacttaggccccagggaggtttggaacataagcaccaaaaatccc

SEQ ID NO: 106453 - DNA, 69 bp, Homo sapiens
ccagggaggtttggaacataagcaccaaaaatccccccactgcaacaggggctaactagagaggaccta

SEQ ID NO: 106454 - DNA, 67 bp, Homo sapiens
aggtttggaacataagcaccaaaaatccccccactgcaacaggggctaactagagaggacctaaaaa

SEQ ID NO: 106455 - DNA, 66 bp, Homo sapiens
acataagcaccaaaaatccccccactgcaacaggggctaactagagaggacctaaaaaaacctttc

SEQ ID NO: 106456 - DNA, 73 bp, Homo sapiens
agttgaaacatatctgtgaaaacaatagcttgtagaagctgttgttttagggaagatgtgttagggaagatcc

SEQ ID NO: 106457 - DNA, 72 bp, Homo sapiens
aaacatatctgtgaaaacaatagcttgtagaagctgttgttttagggaagatgtgttagggaagatcccaac

SEQ ID NO: 106458 - DNA, 71 bp, Homo sapiens
aaaacaatagcttgtagaagctgttgttttagggaagatgtgttagggaagatcccaaccagcgtctataa

SEQ ID NO: 106459 - DNA, 72 bp, Homo sapiens
tagcttgtagaagctgttgttttagggaagatgtgttagggaagatcccaaccagcgtctataagagtggtt

SEQ ID NO: 106460 - DNA, 69 bp, Homo sapiens
ctgttgttttagggaagatgtgttagggaagatcccaaccagcgtctataagagtggtttggaaagttc

SEQ ID NO: 106461 - DNA, 70 bp, Homo sapiens
tttagggaagatgtgttagggaagatcccaaccagcgtctataagagtggtttggaaagttctggaacat

SEQ ID NO: 106462 - DNA, 73 bp, Homo sapiens
ttagggaagatcccaaccagcgtctataagagtggtttggaaagttctggaacatttcaaatgctgtgatctt

SEQ ID NO: 106463 - DNA, 74 bp, Homo sapiens
atcccaaccagcgtctataagagtggtttggaaagttctggaacatttcaaatgctgtgatctttgtatcactt

SEQ ID NO: 106464 - DNA, 74 bp, Homo sapiens
accagcgtctataagagtggtttggaaagttctggaacatttcaaatgctgtgatctttgtatcactttgtttc

SEQ ID NO: 106465 - DNA, 69 bp, Homo sapiens
tttggaaagttctggaacatttcaaatgctgtgatctttgtatcactttgtttccaggtttttttattt

SEQ ID NO: 106466 - DNA, 69 bp, Homo sapiens
atttttattttttcttcctcccagacaagacctttcaggttagcccaacgattgcgcaacatgtaacca

SEQ ID NO: 106467 - DNA, 74 bp, Homo sapiens
tttttcttcctcccagacaagacctttcaggttagcccaacgattgcgcaacatgtaaccaagcatgcctctcc

SEQ ID NO: 106468 - DNA, 73 bp, Homo sapiens
ccagacaagacctttcaggttagcccaacgattgcgcaacatgtaaccaagcatgcctctccccttcctattt

SEQ ID NO: 106469 - DNA, 71 bp, Homo sapiens
aagacctttcaggttagcccaacgattgcgcaacatgtaaccaagcatgcctctccccttcctattttctt

SEQ ID NO: 106470 - DNA, 70 bp, Homo sapiens
ttagcccaacgattgcgcaacatgtaaccaagcatgcctctccccttcctattttcttttgtttttaatt

SEQ ID NO: 106471 - DNA, 76 bp, Homo sapiens
ttttgtttttaatttaaagggaaatcaacagccgccacccatttcatgattgcaatgatgaggctggagcatttca

SEQ ID NO: 106472 - DNA, 79 bp, Homo sapiens
ttttaatttaaagggaaatcaacagccgccacccatttcatgattgcaatgatgaggctggagcatttcagcctcataa

SEQ ID NO: 106473 - DNA, 81 bp, Homo sapiens
gaaatcaacagccgccacccatttcatgattgcaatgatgaggctggagcatttcagcctcataacttttctggattcttt

SEQ ID NO: 106474 - DNA, 79 bp, Homo sapiens
aacagccgccacccatttcatgattgcaatgatgaggctggagcatttcagcctcataacttttctggattcttttccg

SEQ ID NO: 106475 - DNA, 79 bp, Homo sapiens
atttcatgattgcaatgatgaggctggagcatttcagcctcataacttttctggattcttttccgtgtccaaacagatt

SEQ ID NO: 106476 - DNA, 77 bp, Homo sapiens
attgcaatgatgaggctggagcatttcagcctcataacttttctggattcttttccgtgtccaaacagatttttgta

SEQ ID NO: 106477 - DNA, 72 bp, Homo sapiens
atgaggctggagcatttcagcctcataacttttctggattcttttccgtgtccaaacagatttttgtaaaaa

SEQ ID NO: 106478 - DNA, 71 bp, Homo sapiens
ggagcatttcagcctcataacttttctggattcttttccgtgtccaaacagatttttgtaaaaaaatcatg

SEQ ID NO: 106479 - DNA, 67 bp, Homo sapiens
agcctcataacttttctggattcttttccgtgtccaaacagatttttgtaaaaaaatcatgttagtt

SEQ ID NO: 106480 - DNA, 67 bp, Homo sapiens
ctggattcttttccgtgtccaaacagatttttgtaaaaaaatcatgttagttttttctggtacacag

SEQ ID NO: 106481 - DNA, 67 bp, Homo sapiens
ttccgtgtccaaacagatttttgtaaaaaaatcatgttagttttttctggtacacagtaaattccga

SEQ ID NO: 106482 - DNA, 67 bp, Homo sapiens
tgtccaaacagatttttgtaaaaaaatcatgttagttttttctggtacacagtaaattccgatggtt

SEQ ID NO: 106483 - DNA, 72 bp, Homo sapiens
ttgtaaaaaaatcatgttagttttttctggtacacagtaaattccgatggtttttttgctgtgcatgcctca

SEQ ID NO: 106484 - DNA, 72 bp, Homo sapiens
aaaaatcatgttagttttttctggtacacagtaaattccgatggtttttttgctgtgcatgcctcatgggtg

SEQ ID NO: 106485 - DNA, 74 bp, Homo sapiens
ttttttctggtacacagtaaattccgatggtttttttgctgtgcatgcctcatgggtggtatgagttgagaaaa

SEQ ID NO: 106486 - DNA, 76 bp, Homo sapiens
tacacagtaaattccgatggtttttttgctgtgcatgcctcatgggtggtatgagttgagaaaaaaatgccagaaa

SEQ ID NO: 106487 - DNA, 74 bp, Homo sapiens
agtaaattccgatggtttttttgctgtgcatgcctcatgggtggtatgagttgagaaaaaaatgccagaaagtg

SEQ ID NO: 106488 - DNA, 78 bp, Homo sapiens
gatggtttttttgctgtgcatgcctcatgggtggtatgagttgagaaaaaaatgccagaaagtggctactgagaatct

SEQ ID NO: 106489 - DNA, 79 bp, Homo sapiens
tttttttgctgtgcatgcctcatgggtggtatgagttgagaaaaaaatgccagaaagtggctactgagaatcttgtgga

SEQ ID NO: 106490 - DNA, 80 bp, Homo sapiens
tttttgctgtgcatgcctcatgggtggtatgagttgagaaaaaaatgccagaaagtggctactgagaatcttgtggaatg

SEQ ID NO: 106491 - DNA, 79 bp, Homo sapiens
atgcctcatgggtggtatgagttgagaaaaaaatgccagaaagtggctactgagaatcttgtggaatggaagctgtcaa

SEQ ID NO: 106492 - DNA, 79 bp, Homo sapiens
tcatgggtggtatgagttgagaaaaaaatgccagaaagtggctactgagaatcttgtggaatggaagctgtcaatggga

SEQ ID NO: 106493 - DNA, 77 bp, Homo sapiens
atgggtggtatgagttgagaaaaaaatgccagaaagtggctactgagaatcttgtggaatggaagctgtcaatggga

SEQ ID NO: 106494 - DNA, 77 bp, Homo sapiens
gtggtatgagttgagaaaaaaatgccagaaagtggctactgagaatcttgtggaatggaagctgtcaatgggatggg

SEQ ID NO: 106495 - DNA, 76 bp, Homo sapiens
ttgagaaaaaaatgccagaaagtggctactgagaatcttgtggaatggaagctgtcaatgggatggggaaacatta

SEQ ID NO: 106496 - DNA, 75 bp, Homo sapiens
aaagtggctactgagaatcttgtggaatggaagctgtcaatgggatggggaaacattaatgctttatgaggaaaa

SEQ ID NO: 106497 - DNA, 77 bp, Homo sapiens
ctactgagaatcttgtggaatggaagctgtcaatgggatggggaaacattaatgctttatgaggaaaattaatgatg

SEQ ID NO: 106498 - DNA, 77 bp, Homo sapiens
tcttgtggaatggaagctgtcaatgggatggggaaacattaatgctttatgaggaaaattaatgatggcagtttcca

SEQ ID NO: 106499 - DNA, 78 bp, Homo sapiens
tggaagctgtcaatgggatggggaaacattaatgctttatgaggaaaattaatgatggcagtttccacatgagcccca

SEQ ID NO: 106500 - DNA, 73 bp, Homo sapiens
tttatgaggaaaattaatgatggcagtttccacatgagccccagcctagacttcttggaccctaagtaaagag

SEQ ID NO: 106501 - DNA, 76 bp, Homo sapiens
aatgatggcagtttccacatgagccccagcctagacttcttggaccctaagtaaagagttccatgtgatctcccaa

SEQ ID NO: 106502 - DNA, 75 bp, Homo sapiens
tttccacatgagccccagcctagacttcttggaccctaagtaaagagttccatgtgatctcccaagtggtacaca

SEQ ID NO: 106503 - DNA, 73 bp, Homo sapiens
ccagcctagacttcttggaccctaagtaaagagttccatgtgatctcccaagtggtacacagccattcgttct

SEQ ID NO: 106504 - DNA, 72 bp, Homo sapiens
acttcttggaccctaagtaaagagttccatgtgatctcccaagtggtacacagccattcgttctttaatgtc

SEQ ID NO: 106505 - DNA, 71 bp, Homo sapiens
cctaagtaaagagttccatgtgatctcccaagtggtacacagccattcgttctttaatgtcccagttaaaa

SEQ ID NO: 106506 - DNA, 71 bp, Homo sapiens
taaagagttccatgtgatctcccaagtggtacacagccattcgttctttaatgtcccagttaaaagtgttt

SEQ ID NO: 106507 - DNA, 73 bp, Homo sapiens
tgatctcccaagtggtacacagccattcgttctttaatgtcccagttaaaagtgttttatgttaatcatcaaa

SEQ ID NO: 106508 - DNA, 70 bp, Homo sapiens
cccaagtggtacacagccattcgttctttaatgtcccagttaaaagtgttttatgttaatcatcaaaatc

SEQ ID NO: 106509 - DNA, 72 bp, Homo sapiens
cagccattcgttctttaatgtcccagttaaaagtgttttatgttaatcatcaaaatctagaatttctcaagc

SEQ ID NO: 106510 - DNA, 69 bp, Homo sapiens
cgttctttaatgtcccagttaaaagtgttttatgttaatcatcaaaatctagaatttctcaagcgaagt

SEQ ID NO: 106511 - DNA, 72 bp, Homo sapiens
gtcccagttaaaagtgttttatgttaatcatcaaaatctagaatttctcaagcgaagttctaaacacacaga

SEQ ID NO: 106512 - DNA, 76 bp, Homo sapiens
tgttaatcatcaaaatctagaatttctcaagcgaagttctaaacacacagaaaataataaatggcacccagcagga

SEQ ID NO: 106513 - DNA, 75 bp, Homo sapiens
tcatcaaaatctagaatttctcaagcgaagttctaaacacacagaaaataataaatggcacccagcaggaataat

SEQ ID NO: 106514 - DNA, 74 bp, Homo sapiens
tagaatttctcaagcgaagttctaaacacacagaaaataataaatggcacccagcaggaataattttcctcatg

SEQ ID NO: 106515 - DNA, 71 bp, Homo sapiens
caagcgaagttctaaacacacagaaaataataaatggcacccagcaggaataattttcctcatggttttta

SEQ ID NO: 106516 - DNA, 74 bp, Homo sapiens
aacacacagaaaataataaatggcacccagcaggaataattttcctcatggtttttaacatcagttctctgata

SEQ ID NO: 106517 - DNA, 77 bp, Homo sapiens
aaaataataaatggcacccagcaggaataattttcctcatggtttttaacatcagttctctgatagcgcaatgctca

SEQ ID NO: 106518 - DNA, 79 bp, Homo sapiens
ataaatggcacccagcaggaataattttcctcatggtttttaacatcagttctctgatagcgcaatgctcatgttctta

SEQ ID NO: 106519 - DNA, 83 bp, Homo sapiens
caggaataattttcctcatggtttttaacatcagttctctgatagcgcaatgctcatgttcttacatgtatgagtgcaggtga

SEQ ID NO: 106520 - DNA, 83 bp, Homo sapiens
ataattttcctcatggtttttaacatcagttctctgatagcgcaatgctcatgttcttacatgtatgagtgcaggtgaataca

SEQ ID NO: 106521 - DNA, 76 bp, Homo sapiens
tatatacatatacattctctaacccagagatgaattaaaaaggagaattttcatcctatgtgctttatgccctaag

SEQ ID NO: 106522 - DNA, 76 bp, Homo sapiens
acatatacattctctaacccagagatgaattaaaaaggagaattttcatcctatgtgctttatgccctaagtcaga

SEQ ID NO: 106523 - DNA, 74 bp, Homo sapiens
tctaacccagagatgaattaaaaaggagaattttcatcctatgtgctttatgccctaagtcagagttgagggaa

SEQ ID NO: 106524 - DNA, 75 bp, Homo sapiens
aattttcatcctatgtgctttatgccctaagtcagagttgagggaagaaacaagatcagctacattgagttttat

SEQ ID NO: 106525 - DNA, 77 bp, Homo sapiens
tatgtgctttatgccctaagtcagagttgagggaagaaacaagatcagctacattgagttttattctaggagcaaaa

SEQ ID NO: 106526 - DNA, 73 bp, Homo sapiens
cctaagtcagagttgagggaagaaacaagatcagctacattgagttttattctaggagcaaaaggcttgtaaa

SEQ ID NO: 106527 - DNA, 73 bp, Homo sapiens
agttgagggaagaaacaagatcagctacattgagttttattctaggagcaaaaggcttgtaaactcttcagaa

SEQ ID NO: 106528 - DNA, 73 bp, Homo sapiens
aagaaacaagatcagctacattgagttttattctaggagcaaaaggcttgtaaactcttcagaagtctctccc

SEQ ID NO: 106529 - DNA, 73 bp, Homo sapiens
aagatcagctacattgagttttattctaggagcaaaaggcttgtaaactcttcagaagtctctcccctaacca

SEQ ID NO: 106530 - DNA, 70 bp, Homo sapiens
ttgagttttattctaggagcaaaaggcttgtaaactcttcagaagtctctcccctaaccagttccactta

SEQ ID NO: 106531 - DNA, 71 bp, Homo sapiens
ttattctaggagcaaaaggcttgtaaactcttcagaagtctctcccctaaccagttccacttagccttgaa

SEQ ID NO: 106532 - DNA, 71 bp, Homo sapiens
aaaaggcttgtaaactcttcagaagtctctcccctaaccagttccacttagccttgaactgtgctgctccc

SEQ ID NO: 106533 - DNA, 75 bp, Homo sapiens
taaactcttcagaagtctctcccctaaccagttccacttagccttgaactgtgctgctccccacatgaggtaaga

SEQ ID NO: 106534 - DNA, 75 bp, Homo sapiens
agaagtctctcccctaaccagttccacttagccttgaactgtgctgctccccacatgaggtaagaagacgcttca

SEQ ID NO: 106535 - DNA, 74 bp, Homo sapiens
ccctaaccagttccacttagccttgaactgtgctgctccccacatgaggtaagaagacgcttcatctagaactt

SEQ ID NO: 106536 - DNA, 76 bp, Homo sapiens
accagttccacttagccttgaactgtgctgctccccacatgaggtaagaagacgcttcatctagaactttcagaag

SEQ ID NO: 106537 - DNA, 79 bp, Homo sapiens
tagccttgaactgtgctgctccccacatgaggtaagaagacgcttcatctagaactttcagaagtggtgcaggaattta

SEQ ID NO: 106538 - DNA, 75 bp, Homo sapiens
cccacatgaggtaagaagacgcttcatctagaactttcagaagtggtgcaggaatttagacacacttagggaata

SEQ ID NO: 106539 - DNA, 76 bp, Homo sapiens
aggtaagaagacgcttcatctagaactttcagaagtggtgcaggaatttagacacacttagggaatagcaggcatc

SEQ ID NO: 106540 - DNA, 81 bp, Homo sapiens
ttcatctagaactttcagaagtggtgcaggaatttagacacacttagggaatagcaggcatctcctccattgatctcagaa

SEQ ID NO: 106541 - DNA, 72 bp, Homo sapiens
aggaatttagacacacttagggaatagcaggcatctcctccattgatctcagaaacctttggtttgtgtttt

SEQ ID NO: 106542 - DNA, 72 bp, Homo sapiens
agacacacttagggaatagcaggcatctcctccattgatctcagaaacctttggtttgtgtttttggctttt

SEQ ID NO: 106543 - DNA, 70 bp, Homo sapiens
catctcctccattgatctcagaaacctttggtttgtgtttttggctttttcaaaaatatatttgctccct

SEQ ID NO: 106544 - DNA, 69 bp, Homo sapiens
tgatctcagaaacctttggtttgtgtttttggctttttcaaaaatatatttgctcccttcaagttggac

SEQ ID NO: 106545 - DNA, 69 bp, Homo sapiens
ttgtgtttttggctttttcaaaaatatatttgctcccttcaagttggactgaaataaactcaggtctag

SEQ ID NO: 106546 - DNA, 75 bp, Homo sapiens
aaaaatatatttgctcccttcaagttggactgaaataaactcaggtctaggttgccttctcaatggcagcaatga

SEQ ID NO: 106547 - DNA, 76 bp, Homo sapiens
cttcaagttggactgaaataaactcaggtctaggttgccttctcaatggcagcaatgagccagtactattaaaata

SEQ ID NO: 106548 - DNA, 81 bp, Homo sapiens
tgaaataaactcaggtctaggttgccttctcaatggcagcaatgagccagtactattaaaatatcagcacagagaactaga

SEQ ID NO: 106549 - DNA, 79 bp, Homo sapiens
aaactcaggtctaggttgccttctcaatggcagcaatgagccagtactattaaaatatcagcacagagaactagaaatg

SEQ ID NO: 106550 - DNA, 82 bp, Homo sapiens
taggttgccttctcaatggcagcaatgagccagtactattaaaatatcagcacagagaactagaaatgtcggatcttgtcac

SEQ ID NO: 106551 - DNA, 82 bp, Homo sapiens
aatggcagcaatgagccagtactattaaaatatcagcacagagaactagaaatgtcggatcttgtcactgccatagaagaat

SEQ ID NO: 106552 - DNA, 81 bp, Homo sapiens
aatgagccagtactattaaaatatcagcacagagaactagaaatgtcggatcttgtcactgccatagaagaattgtggcta

SEQ ID NO: 106553 - DNA, 83 bp, Homo sapiens
taaaatatcagcacagagaactagaaatgtcggatcttgtcactgccatagaagaattgtggctaccacttctatgcagagta

SEQ ID NO: 106554 - DNA, 80 bp, Homo sapiens
gagaactagaaatgtcggatcttgtcactgccatagaagaattgtggctaccacttctatgcagagtatggaatggtctt

SEQ ID NO: 106555 - DNA, 81 bp, Homo sapiens
ctagaaatgtcggatcttgtcactgccatagaagaattgtggctaccacttctatgcagagtatggaatggtctttcctca

SEQ ID NO: 106556 - DNA, 81 bp, Homo sapiens
cttgtcactgccatagaagaattgtggctaccacttctatgcagagtatggaatggtctttcctcaggttcctgtatgcta

SEQ ID NO: 106557 - DNA, 78 bp, Homo sapiens
actgccatagaagaattgtggctaccacttctatgcagagtatggaatggtctttcctcaggttcctgtatgctaaag

SEQ ID NO: 106558 - DNA, 75 bp, Homo sapiens
aagaattgtggctaccacttctatgcagagtatggaatggtctttcctcaggttcctgtatgctaaaggtccgga

SEQ ID NO: 106559 - DNA, 75 bp, Homo sapiens
tctatgcagagtatggaatggtctttcctcaggttcctgtatgctaaaggtccggacagaattactctgtccctt

SEQ ID NO: 106560 - DNA, 73 bp, Homo sapiens
gtatggaatggtctttcctcaggttcctgtatgctaaaggtccggacagaattactctgtccctttctctagc

SEQ ID NO: 106561 - DNA, 76 bp, Homo sapiens
tttcctcaggttcctgtatgctaaaggtccggacagaattactctgtccctttctctagcctcagtcatctgacca

SEQ ID NO: 106562 - DNA, 78 bp, Homo sapiens
ttcctgtatgctaaaggtccggacagaattactctgtccctttctctagcctcagtcatctgaccagtgtgtgaacaa

SEQ ID NO: 106563 - DNA, 79 bp, Homo sapiens
attactctgtccctttctctagcctcagtcatctgaccagtgtgtgaacaacaagaatatcctctgataagccttcgtc

SEQ ID NO: 106564 - DNA, 81 bp, Homo sapiens
tttctctagcctcagtcatctgaccagtgtgtgaacaacaagaatatcctctgataagccttcgtccacgattgtgacaac

SEQ ID NO: 106565 - DNA, 80 bp, Homo sapiens
ctcagtcatctgaccagtgtgtgaacaacaagaatatcctctgataagccttcgtccacgattgtgacaaccctgtgttc

SEQ ID NO: 106566 - DNA, 75 bp, Homo sapiens
accagtgtgtgaacaacaagaatatcctctgataagccttcgtccacgattgtgacaaccctgtgttccctctaa

SEQ ID NO: 106567 - DNA, 77 bp, Homo sapiens
tgtgaacaacaagaatatcctctgataagccttcgtccacgattgtgacaaccctgtgttccctctaatgtccagga

SEQ ID NO: 106568 - DNA, 74 bp, Homo sapiens
aagaatatcctctgataagccttcgtccacgattgtgacaaccctgtgttccctctaatgtccaggagtccctc

SEQ ID NO: 106569 - DNA, 74 bp, Homo sapiens
tgataagccttcgtccacgattgtgacaaccctgtgttccctctaatgtccaggagtccctctggctcccttta

SEQ ID NO: 106570 - DNA, 73 bp, Homo sapiens
cttcgtccacgattgtgacaaccctgtgttccctctaatgtccaggagtccctctggctccctttagcctctg

SEQ ID NO: 106571 - DNA, 73 bp, Homo sapiens
aaccctgtgttccctctaatgtccaggagtccctctggctccctttagcctctgtgcctccagggtgcctgtg

SEQ ID NO: 106572 - DNA, 76 bp, Homo sapiens
aggagtccctctggctccctttagcctctgtgcctccagggtgcctgtggtaggagcagagggagctagtgactcc

SEQ ID NO: 106573 - DNA, 80 bp, Homo sapiens
ttagcctctgtgcctccagggtgcctgtggtaggagcagagggagctagtgactccctgctgatgctaaccgtattctaa

SEQ ID NO: 106574 - DNA, 78 bp, Homo sapiens
gtgcctgtggtaggagcagagggagctagtgactccctgctgatgctaaccgtattctaaaccactagtatagtctcc

SEQ ID NO: 106575 - DNA, 75 bp, Homo sapiens
gtaggagcagagggagctagtgactccctgctgatgctaaccgtattctaaaccactagtatagtctccctcctt

SEQ ID NO: 106576 - DNA, 73 bp, Homo sapiens
tagtgactccctgctgatgctaaccgtattctaaaccactagtatagtctccctcctttcctcctggaatttc

SEQ ID NO: 106577 - DNA, 75 bp, Homo sapiens
tgatgctaaccgtattctaaaccactagtatagtctccctcctttcctcctggaatttctctcttcctgcagcaa

SEQ ID NO: 106578 - DNA, 73 bp, Homo sapiens
tctaaaccactagtatagtctccctcctttcctcctggaatttctctcttcctgcagcaactcctggaactcc

SEQ ID NO: 106579 - DNA, 75 bp, Homo sapiens
tagtatagtctccctcctttcctcctggaatttctctcttcctgcagcaactcctggaactcctcctgaatacaa

SEQ ID NO: 106580 - DNA, 75 bp, Homo sapiens
tcctttcctcctggaatttctctcttcctgcagcaactcctggaactcctcctgaatacaatccacctgctgttt

SEQ ID NO: 106581 - DNA, 77 bp, Homo sapiens
tcctggaatttctctcttcctgcagcaactcctggaactcctcctgaatacaatccacctgctgttttgtaagaata

SEQ ID NO: 106582 - DNA, 78 bp, Homo sapiens
tctcttcctgcagcaactcctggaactcctcctgaatacaatccacctgctgttttgtaagaatagctctctgttctt

SEQ ID NO: 106583 - DNA, 76 bp, Homo sapiens
agcaactcctggaactcctcctgaatacaatccacctgctgttttgtaagaatagctctctgttctttcatgtggg

SEQ ID NO: 106584 - DNA, 74 bp, Homo sapiens
ctgaatacaatccacctgctgttttgtaagaatagctctctgttctttcatgtgggttcggatttttgcccaat

SEQ ID NO: 106585 - DNA, 75 bp, Homo sapiens
tacaatccacctgctgttttgtaagaatagctctctgttctttcatgtgggttcggatttttgcccaattcaaca

SEQ ID NO: 106586 - DNA, 75 bp, Homo sapiens
ctgttttgtaagaatagctctctgttctttcatgtgggttcggatttttgcccaattcaacacatcctgagcagg

SEQ ID NO: 106587 - DNA, 77 bp, Homo sapiens
taagaatagctctctgttctttcatgtgggttcggatttttgcccaattcaacacatcctgagcagggcatctaact

SEQ ID NO: 106588 - DNA, 78 bp, Homo sapiens
ctgttctttcatgtgggttcggatttttgcccaattcaacacatcctgagcagggcatctaacttcactacacagaga

SEQ ID NO: 106589 - DNA, 81 bp, Homo sapiens
ttcggatttttgcccaattcaacacatcctgagcagggcatctaacttcactacacagagagcctggctgtgagacacaaa

SEQ ID NO: 106590 - DNA, 83 bp, Homo sapiens
caattcaacacatcctgagcagggcatctaacttcactacacagagagcctggctgtgagacacaaagacctacacaaacatg

SEQ ID NO: 106591 - DNA, 81 bp, Homo sapiens
acatcctgagcagggcatctaacttcactacacagagagcctggctgtgagacacaaagacctacacaaacatgggaccaa

SEQ ID NO: 106592 - DNA, 77 bp, Homo sapiens
agggcatctaacttcactacacagagagcctggctgtgagacacaaagacctacacaaacatgggaccaaagaaaca

SEQ ID NO: 106593 - DNA, 76 bp, Homo sapiens
atctaacttcactacacagagagcctggctgtgagacacaaagacctacacaaacatgggaccaaagaaacatact

SEQ ID NO: 106594 - DNA, 74 bp, Homo sapiens
tggctgtgagacacaaagacctacacaaacatgggaccaaagaaacatactttgctttgtgggtcttaacataa

SEQ ID NO: 106595 - DNA, 71 bp, Homo sapiens
agacacaaagacctacacaaacatgggaccaaagaaacatactttgctttgtgggtcttaacataatctac

SEQ ID NO: 106596 - DNA, 69 bp, Homo sapiens
atgggaccaaagaaacatactttgctttgtgggtcttaacataatctaccaatcggtctttcaaaattc

SEQ ID NO: 106597 - DNA, 72 bp, Homo sapiens
agaaacatactttgctttgtgggtcttaacataatctaccaatcggtctttcaaaattcttgtcttctcatg

SEQ ID NO: 106598 - DNA, 75 bp, Homo sapiens
tactttgctttgtgggtcttaacataatctaccaatcggtctttcaaaattcttgtcttctcatgtatgacatgt

SEQ ID NO: 106599 - DNA, 76 bp, Homo sapiens
tgtgggtcttaacataatctaccaatcggtctttcaaaattcttgtcttctcatgtatgacatgttaagactctta

SEQ ID NO: 106600 - DNA, 76 bp, Homo sapiens
cataatctaccaatcggtctttcaaaattcttgtcttctcatgtatgacatgttaagactcttactaaagaactca

SEQ ID NO: 106601 - DNA, 74 bp, Homo sapiens
ctaccaatcggtctttcaaaattcttgtcttctcatgtatgacatgttaagactcttactaaagaactcactta

SEQ ID NO: 106602 - DNA, 77 bp, Homo sapiens
cttgtcttctcatgtatgacatgttaagactcttactaaagaactcacttaaatgtcagcccatatactctacaaaa

SEQ ID NO: 106603 - DNA, 75 bp, Homo sapiens
ctcatgtatgacatgttaagactcttactaaagaactcacttaaatgtcagcccatatactctacaaaaaaatgt

SEQ ID NO: 106604 - DNA, 72 bp, Homo sapiens
ctcttactaaagaactcacttaaatgtcagcccatatactctacaaaaaaatgttttatctctattcacctc

SEQ ID NO: 106605 - DNA, 73 bp, Homo sapiens
gaactcacttaaatgtcagcccatatactctacaaaaaaatgttttatctctattcacctccattctttttga

SEQ ID NO: 106606 - DNA, 72 bp, Homo sapiens
cttaaatgtcagcccatatactctacaaaaaaatgttttatctctattcacctccattctttttgaaggtga

SEQ ID NO: 106607 - DNA, 70 bp, Homo sapiens
agcccatatactctacaaaaaaatgttttatctctattcacctccattctttttgaaggtgattttacta

SEQ ID NO: 106608 - DNA, 70 bp, Homo sapiens
caaaaaaatgttttatctctattcacctccattctttttgaaggtgattttactaaagccagataactga

SEQ ID NO: 106609 - DNA, 74 bp, Homo sapiens
tctctattcacctccattctttttgaaggtgattttactaaagccagataactgaaatattaatgtatagaatc

SEQ ID NO: 106610 - DNA, 71 bp, Homo sapiens
cctccattctttttgaaggtgattttactaaagccagataactgaaatattaatgtatagaatctaatttc

SEQ ID NO: 106611 - DNA, 72 bp, Homo sapiens
gaaggtgattttactaaagccagataactgaaatattaatgtatagaatctaatttcttaatggtatggaag

SEQ ID NO: 106612 - DNA, 73 bp, Homo sapiens
gattttactaaagccagataactgaaatattaatgtatagaatctaatttcttaatggtatggaaggctgaaa

SEQ ID NO: 106613 - DNA, 72 bp, Homo sapiens
aagccagataactgaaatattaatgtatagaatctaatttcttaatggtatggaaggctgaaaatagtttta

SEQ ID NO: 106614 - DNA, 73 bp, Homo sapiens
aatattaatgtatagaatctaatttcttaatggtatggaaggctgaaaatagttttattgtttgatgttgagc

SEQ ID NO: 106615 - DNA, 78 bp, Homo sapiens
tgtatagaatctaatttcttaatggtatggaaggctgaaaatagttttattgtttgatgttgagctatagatgatgat

SEQ ID NO: 106616 - DNA, 74 bp, Homo sapiens
ctaatttcttaatggtatggaaggctgaaaatagttttattgtttgatgttgagctatagatgatgatttcttt

SEQ ID NO: 106617 - DNA, 73 bp, Homo sapiens
cttaatggtatggaaggctgaaaatagttttattgtttgatgttgagctatagatgatgatttctttttcttt

SEQ ID NO: 106618 - DNA, 74 bp, Homo sapiens
ttttttttgaaggttggaagattctttaatgagagacatatgcagcaagttaaagcttgtaagcttacttcatc

SEQ ID NO: 106619 - DNA, 80 bp, Homo sapiens
tttgaaggttggaagattctttaatgagagacatatgcagcaagttaaagcttgtaagcttacttcatctcagtaatgca

SEQ ID NO: 106620 - DNA, 78 bp, Homo sapiens
attctttaatgagagacatatgcagcaagttaaagcttgtaagcttacttcatctcagtaatgcagaaaactccttaa

SEQ ID NO: 106621 - DNA, 78 bp, Homo sapiens
ttaatgagagacatatgcagcaagttaaagcttgtaagcttacttcatctcagtaatgcagaaaactccttaaactgt

SEQ ID NO: 106622 - DNA, 76 bp, Homo sapiens
acatatgcagcaagttaaagcttgtaagcttacttcatctcagtaatgcagaaaactccttaaactgttgattttc

SEQ ID NO: 106623 - DNA, 73 bp, Homo sapiens
taaagcttgtaagcttacttcatctcagtaatgcagaaaactccttaaactgttgattttcttttggagggca

SEQ ID NO: 106624 - DNA, 74 bp, Homo sapiens
taagcttacttcatctcagtaatgcagaaaactccttaaactgttgattttcttttggagggcactctgaacta

SEQ ID NO: 106625 - DNA, 77 bp, Homo sapiens
ttcatctcagtaatgcagaaaactccttaaactgttgattttcttttggagggcactctgaactatgcaaaatatca

SEQ ID NO: 106626 - DNA, 77 bp, Homo sapiens
tcagtaatgcagaaaactccttaaactgttgattttcttttggagggcactctgaactatgcaaaatatcatctgat

SEQ ID NO: 106627 - DNA, 75 bp, Homo sapiens
agtaatgcagaaaactccttaaactgttgattttcttttggagggcactctgaactatgcaaaatatcatctgat

SEQ ID NO: 106628 - DNA, 74 bp, Homo sapiens
agaaaactccttaaactgttgattttcttttggagggcactctgaactatgcaaaatatcatctgattcctcaa

SEQ ID NO: 106629 - DNA, 74 bp, Homo sapiens
aactccttaaactgttgattttcttttggagggcactctgaactatgcaaaatatcatctgattcctcaaggaa

SEQ ID NO: 106630 - DNA, 74 bp, Homo sapiens
cttaaactgttgattttcttttggagggcactctgaactatgcaaaatatcatctgattcctcaaggaaaacta

SEQ ID NO: 106631 - DNA, 74 bp, Homo sapiens
aaactgttgattttcttttggagggcactctgaactatgcaaaatatcatctgattcctcaaggaaaactagga

SEQ ID NO: 106632 - DNA, 74 bp, Homo sapiens
attttcttttggagggcactctgaactatgcaaaatatcatctgattcctcaaggaaaactaggaaacaatgaa

SEQ ID NO: 106633 - DNA, 74 bp, Homo sapiens
ttttggagggcactctgaactatgcaaaatatcatctgattcctcaaggaaaactaggaaacaatgaagaaaaa

SEQ ID NO: 106634 - DNA, 71 bp, Homo sapiens
gcaaaatatcatctgattcctcaaggaaaactaggaaacaatgaagaaaaagtaccttcaaactttatgaa

SEQ ID NO: 106635 - DNA, 70 bp, Homo sapiens
atctgattcctcaaggaaaactaggaaacaatgaagaaaaagtaccttcaaactttatgaatgtctcggc

SEQ ID NO: 106636 - DNA, 68 bp, Homo sapiens
ttcctcaaggaaaactaggaaacaatgaagaaaaagtaccttcaaactttatgaatgtctcggccacc

SEQ ID NO: 106637 - DNA, 75 bp, Homo sapiens
tgaagaaaaagtaccttcaaactttatgaatgtctcggccaccccctgctgcatccatcaaataccagattgaat

SEQ ID NO: 106638 - DNA, 73 bp, Homo sapiens
aaaaagtaccttcaaactttatgaatgtctcggccaccccctgctgcatccatcaaataccagattgaattag

SEQ ID NO: 106639 - DNA, 79 bp, Homo sapiens
ttcaaactttatgaatgtctcggccaccccctgctgcatccatcaaataccagattgaattagtgagattcaaatacca

SEQ ID NO: 106640 - DNA, 80 bp, Homo sapiens
atgaatgtctcggccaccccctgctgcatccatcaaataccagattgaattagtgagattcaaataccagagattttatg

SEQ ID NO: 106641 - DNA, 77 bp, Homo sapiens
accccctgctgcatccatcaaataccagattgaattagtgagattcaaataccagagattttatggtaatgggatat

SEQ ID NO: 106642 - DNA, 80 bp, Homo sapiens
gctgcatccatcaaataccagattgaattagtgagattcaaataccagagattttatggtaatgggatatttagaaatca

SEQ ID NO: 106643 - DNA, 75 bp, Homo sapiens
tcaaataccagattgaattagtgagattcaaataccagagattttatggtaatgggatatttagaaatcattccc

SEQ ID NO: 106644 - DNA, 72 bp, Homo sapiens
ttgaattagtgagattcaaataccagagattttatggtaatgggatatttagaaatcattccccgaggttcc

SEQ ID NO: 106645 - DNA, 71 bp, Homo sapiens
agattcaaataccagagattttatggtaatgggatatttagaaatcattccccgaggttccgcctatgttg

SEQ ID NO: 106646 - DNA, 71 bp, Homo sapiens
aaataccagagattttatggtaatgggatatttagaaatcattccccgaggttccgcctatgttggagtga

SEQ ID NO: 106647 - DNA, 75 bp, Homo sapiens
attttatggtaatgggatatttagaaatcattccccgaggttccgcctatgttggagtgagcctgtgtgctcaca

SEQ ID NO: 106648 - DNA, 77 bp, Homo sapiens
taatgggatatttagaaatcattccccgaggttccgcctatgttggagtgagcctgtgtgctcacagtgatagaatt

SEQ ID NO: 106649 - DNA, 76 bp, Homo sapiens
atttagaaatcattccccgaggttccgcctatgttggagtgagcctgtgtgctcacagtgatagaatttggggcta

SEQ ID NO: 106650 - DNA, 76 bp, Homo sapiens
cccgaggttccgcctatgttggagtgagcctgtgtgctcacagtgatagaatttggggctagatcccagtgttggt

SEQ ID NO: 106651 - DNA, 79 bp, Homo sapiens
ttccgcctatgttggagtgagcctgtgtgctcacagtgatagaatttggggctagatcccagtgttggttcaattatta

SEQ ID NO: 106652 - DNA, 78 bp, Homo sapiens
atgttggagtgagcctgtgtgctcacagtgatagaatttggggctagatcccagtgttggttcaattattaggctagg

SEQ ID NO: 106653 - DNA, 80 bp, Homo sapiens
tgtgtgctcacagtgatagaatttggggctagatcccagtgttggttcaattattaggctaggtgatcttccacagctta

SEQ ID NO: 106654 - DNA, 75 bp, Homo sapiens
cagtgatagaatttggggctagatcccagtgttggttcaattattaggctaggtgatcttccacagcttatttta

SEQ ID NO: 106655 - DNA, 72 bp, Homo sapiens
atagaatttggggctagatcccagtgttggttcaattattaggctaggtgatcttccacagcttattttaaa

SEQ ID NO: 106656 - DNA, 74 bp, Homo sapiens
tagatcccagtgttggttcaattattaggctaggtgatcttccacagcttattttaaattgcagttttccaaga

SEQ ID NO: 106657 - DNA, 73 bp, Homo sapiens
cttccacagcttattttaaattgcagttttccaagatttataagactgcatttttggactttctctaatgcac

SEQ ID NO: 106658 - DNA, 74 bp, Homo sapiens
gcttattttaaattgcagttttccaagatttataagactgcatttttggactttctctaatgcactcaagcaaa

SEQ ID NO: 106659 - DNA, 71 bp, Homo sapiens
aattgcagttttccaagatttataagactgcatttttggactttctctaatgcactcaagcaaaaaaaaaa

SEQ ID NO: 106660 - DNA, 75 bp, Homo sapiens
tcatttgcctgtacactgatgactatacctggtaaggctatataaatgtgtacaaatttgtaccaatactttaac

SEQ ID NO: 106661 - DNA, 73 bp, Homo sapiens
gcctgtacactgatgactatacctggtaaggctatataaatgtgtacaaatttgtaccaatactttaacttta

SEQ ID NO: 106662 - DNA, 71 bp, Homo sapiens
gatgactatacctggtaaggctatataaatgtgtacaaatttgtaccaatactttaactttattggttcac

SEQ ID NO: 106663 - DNA, 69 bp, Homo sapiens
acctggtaaggctatataaatgtgtacaaatttgtaccaatactttaactttattggttcacttgcagg

SEQ ID NO: 106664 - DNA, 71 bp, Homo sapiens
ataaatgtgtacaaatttgtaccaatactttaactttattggttcacttgcaggtttcatagtcacttgac

SEQ ID NO: 106665 - DNA, 71 bp, Homo sapiens
acaaatttgtaccaatactttaactttattggttcacttgcaggtttcatagtcacttgaccgtcattcac

SEQ ID NO: 106666 - DNA, 72 bp, Homo sapiens
tttgtaccaatactttaactttattggttcacttgcaggtttcatagtcacttgaccgtcattcaccattta

SEQ ID NO: 106667 - DNA, 75 bp, Homo sapiens
ttattggttcacttgcaggtttcatagtcacttgaccgtcattcaccatttacctccagatgcctttcttccctc

SEQ ID NO: 106668 - DNA, 80 bp, Homo sapiens
ttgcaggtttcatagtcacttgaccgtcattcaccatttacctccagatgcctttcttccctctgctctgagctcaggta

SEQ ID NO: 106669 - DNA, 80 bp, Homo sapiens
ttcatagtcacttgaccgtcattcaccatttacctccagatgcctttcttccctctgctctgagctcaggtacaagtgtc

SEQ ID NO: 106670 - DNA, 79 bp, Homo sapiens
accgtcattcaccatttacctccagatgcctttcttccctctgctctgagctcaggtacaagtgtccattattgctcta

SEQ ID NO: 106671 - DNA, 80 bp, Homo sapiens
attcaccatttacctccagatgcctttcttccctctgctctgagctcaggtacaagtgtccattattgctctaagagcta

SEQ ID NO: 106672 - DNA, 82 bp, Homo sapiens
tccagatgcctttcttccctctgctctgagctcaggtacaagtgtccattattgctctaagagctagtcttgactgggctta

SEQ ID NO: 106673 - DNA, 80 bp, Homo sapiens
ttcttccctctgctctgagctcaggtacaagtgtccattattgctctaagagctagtcttgactgggcttaattgatatt

SEQ ID NO: 106674 - DNA, 83 bp, Homo sapiens
tgctctgagctcaggtacaagtgtccattattgctctaagagctagtcttgactgggcttaattgatatttccattagtctga

SEQ ID NO: 106675 - DNA, 81 bp, Homo sapiens
tcaggtacaagtgtccattattgctctaagagctagtcttgactgggcttaattgatatttccattagtctgatgaataca

SEQ ID NO: 106676 - DNA, 80 bp, Homo sapiens
tacaagtgtccattattgctctaagagctagtcttgactgggcttaattgatatttccattagtctgatgaatacaaatg

SEQ ID NO: 106677 - DNA, 80 bp, Homo sapiens
cattattgctctaagagctagtcttgactgggcttaattgatatttccattagtctgatgaatacaaatggcattaaata

SEQ ID NO: 106678 - DNA, 80 bp, Homo sapiens
tgactgggcttaattgatatttccattagtctgatgaatacaaatggcattaaataccaggatcagacacaaagtgaata

SEQ ID NO: 106679 - DNA, 82 bp, Homo sapiens
gcttaattgatatttccattagtctgatgaatacaaatggcattaaataccaggatcagacacaaagtgaatatgagtgatc

SEQ ID NO: 106680 - DNA, 82 bp, Homo sapiens
atatttccattagtctgatgaatacaaatggcattaaataccaggatcagacacaaagtgaatatgagtgatcctttgcagc

SEQ ID NO: 106681 - DNA, 82 bp, Homo sapiens
tagtctgatgaatacaaatggcattaaataccaggatcagacacaaagtgaatatgagtgatcctttgcagccacctgggaa

SEQ ID NO: 106682 - DNA, 78 bp, Homo sapiens
aatacaaatggcattaaataccaggatcagacacaaagtgaatatgagtgatcctttgcagccacctgggaagggtga

SEQ ID NO: 106683 - DNA, 75 bp, Homo sapiens
ttaaataccaggatcagacacaaagtgaatatgagtgatcctttgcagccacctgggaagggtgagtggggattt

SEQ ID NO: 106684 - DNA, 76 bp, Homo sapiens
aggatcagacacaaagtgaatatgagtgatcctttgcagccacctgggaagggtgagtggggatttttaaggcata

SEQ ID NO: 106685 - DNA, 74 bp, Homo sapiens
aatatgagtgatcctttgcagccacctgggaagggtgagtggggatttttaaggcatagtggtgaggacaatta

SEQ ID NO: 106686 - DNA, 74 bp, Homo sapiens
tttgcagccacctgggaagggtgagtggggatttttaaggcatagtggtgaggacaattagcagggctaatgta

SEQ ID NO: 106687 - DNA, 70 bp, Homo sapiens
ctgggaagggtgagtggggatttttaaggcatagtggtgaggacaattagcagggctaatgtaccctttc

SEQ ID NO: 106688 - DNA, 76 bp, Homo sapiens
tgagtggggatttttaaggcatagtggtgaggacaattagcagggctaatgtaccctttccatggttgagatgaca

SEQ ID NO: 106689 - DNA, 77 bp, Homo sapiens
aaggcatagtggtgaggacaattagcagggctaatgtaccctttccatggttgagatgacaccagatgcccctctct

SEQ ID NO: 106690 - DNA, 82 bp, Homo sapiens
aggacaattagcagggctaatgtaccctttccatggttgagatgacaccagatgcccctctcttgctggcattcagtgcaca

SEQ ID NO: 106691 - DNA, 82 bp, Homo sapiens
attagcagggctaatgtaccctttccatggttgagatgacaccagatgcccctctcttgctggcattcagtgcacaatgaag

SEQ ID NO: 106692 - DNA, 87 bp, Homo sapiens
taatgtaccctttccatggttgagatgacaccagatgcccctctcttgctggcattcagtgcacaatgaagtctgcattgatctaga

SEQ ID NO: 106693 - DNA, 89 bp, Homo sapiens
ttccatggttgagatgacaccagatgcccctctcttgctggcattcagtgcacaatgaagtctgcattgatctagatggcaaaccacat

SEQ ID NO: 106694 - DNA, 89 bp, Homo sapiens
ttgagatgacaccagatgcccctctcttgctggcattcagtgcacaatgaagtctgcattgatctagatggcaaaccacattggtttca

SEQ ID NO: 106695 - DNA, 90 bp, Homo sapiens
tcttgctggcattcagtgcacaatgaagtctgcattgatctagatggcaaaccacattggtttcagagccaggaggctccactcagcatg

SEQ ID NO: 106696 - DNA, 87 bp, Homo sapiens
attcagtgcacaatgaagtctgcattgatctagatggcaaaccacattggtttcagagccaggaggctccactcagcatggcacaac

SEQ ID NO: 106697 - DNA, 83 bp, Homo sapiens
aatgaagtctgcattgatctagatggcaaaccacattggtttcagagccaggaggctccactcagcatggcacaactttgtgt

SEQ ID NO: 106698 - DNA, 85 bp, Homo sapiens
agtctgcattgatctagatggcaaaccacattggtttcagagccaggaggctccactcagcatggcacaactttgtgttatgaga

SEQ ID NO: 106699 - DNA, 79 bp, Homo sapiens
aaaccacattggtttcagagccaggaggctccactcagcatggcacaactttgtgttatgagaggaaaagagtgaggca

SEQ ID NO: 106700 - DNA, 83 bp, Homo sapiens
gtttcagagccaggaggctccactcagcatggcacaactttgtgttatgagaggaaaagagtgaggcagcaagtgagcttaga

SEQ ID NO: 106701 - DNA, 80 bp, Homo sapiens
aggaggctccactcagcatggcacaactttgtgttatgagaggaaaagagtgaggcagcaagtgagcttagagccttggg

SEQ ID NO: 106702 - DNA, 75 bp, Homo sapiens
cacaactttgtgttatgagaggaaaagagtgaggcagcaagtgagcttagagccttgggtcaggttgaaggaaag

SEQ ID NO: 106703 - DNA, 74 bp, Homo sapiens
ctttgtgttatgagaggaaaagagtgaggcagcaagtgagcttagagccttgggtcaggttgaaggaaagtttc

SEQ ID NO: 106704 - DNA, 72 bp, Homo sapiens
agaggaaaagagtgaggcagcaagtgagcttagagccttgggtcaggttgaaggaaagtttccctctttctc

SEQ ID NO: 106705 - DNA, 75 bp, Homo sapiens
tgaggcagcaagtgagcttagagccttgggtcaggttgaaggaaagtttccctctttctccccggaccagatgca

SEQ ID NO: 106706 - DNA, 73 bp, Homo sapiens
aagtgagcttagagccttgggtcaggttgaaggaaagtttccctctttctccccggaccagatgcacatatca

SEQ ID NO: 106707 - DNA, 73 bp, Homo sapiens
gtcaggttgaaggaaagtttccctctttctccccggaccagatgcacatatcaactgtgaaccctgaagtcaa

SEQ ID NO: 106708 - DNA, 77 bp, Homo sapiens
ctctttctccccggaccagatgcacatatcaactgtgaaccctgaagtcaagtcaagctcctaggactgcctccctg

SEQ ID NO: 106709 - DNA, 79 bp, Homo sapiens
cccggaccagatgcacatatcaactgtgaaccctgaagtcaagtcaagctcctaggactgcctccctgtgttgggctga

SEQ ID NO: 106710 - DNA, 81 bp, Homo sapiens
atgcacatatcaactgtgaaccctgaagtcaagtcaagctcctaggactgcctccctgtgttgggctgagggcagcgagta

SEQ ID NO: 106711 - DNA, 78 bp, Homo sapiens
atatcaactgtgaaccctgaagtcaagtcaagctcctaggactgcctccctgtgttgggctgagggcagcgagtacgc

SEQ ID NO: 106712 - DNA, 77 bp, Homo sapiens
cctgaagtcaagtcaagctcctaggactgcctccctgtgttgggctgagggcagcgagtacgccttggcagctttta

SEQ ID NO: 106713 - DNA, 75 bp, Homo sapiens
agtcaagtcaagctcctaggactgcctccctgtgttgggctgagggcagcgagtacgccttggcagcttttaacc

SEQ ID NO: 106714 - DNA, 75 bp, Homo sapiens
actgcctccctgtgttgggctgagggcagcgagtacgccttggcagcttttaacccgtgtcccttctgcctgcat

SEQ ID NO: 106715 - DNA, 77 bp, Homo sapiens
ttgggctgagggcagcgagtacgccttggcagcttttaacccgtgtcccttctgcctgcattggcacgcggtcaatc

SEQ ID NO: 106716 - DNA, 79 bp, Homo sapiens
ggcagcgagtacgccttggcagcttttaacccgtgtcccttctgcctgcattggcacgcggtcaatctctgagcagttg

SEQ ID NO: 106717 - DNA, 75 bp, Homo sapiens
agtacgccttggcagcttttaacccgtgtcccttctgcctgcattggcacgcggtcaatctctgagcagttgggg

SEQ ID NO: 106718 - DNA, 77 bp, Homo sapiens
agcttttaacccgtgtcccttctgcctgcattggcacgcggtcaatctctgagcagttgggggatatggaaagcata

SEQ ID NO: 106719 - DNA, 76 bp, Homo sapiens
taacccgtgtcccttctgcctgcattggcacgcggtcaatctctgagcagttgggggatatggaaagcataaaggg

SEQ ID NO: 106720 - DNA, 76 bp, Homo sapiens
attggcacgcggtcaatctctgagcagttgggggatatggaaagcataaaggggaaggatccacagggacaatcaa

SEQ ID NO: 106721 - DNA, 82 bp, Homo sapiens
gtcaatctctgagcagttgggggatatggaaagcataaaggggaaggatccacagggacaatcaatcatgtcatcaagatca

SEQ ID NO: 106722 - DNA, 80 bp, Homo sapiens
agcagttgggggatatggaaagcataaaggggaaggatccacagggacaatcaatcatgtcatcaagatcagcttctgaa

SEQ ID NO: 106723 - DNA, 79 bp, Homo sapiens
gggatatggaaagcataaaggggaaggatccacagggacaatcaatcatgtcatcaagatcagcttctgaaggaaacaa

SEQ ID NO: 106724 - DNA, 80 bp, Homo sapiens
tggaaagcataaaggggaaggatccacagggacaatcaatcatgtcatcaagatcagcttctgaaggaaacaagcacaaa

SEQ ID NO: 106725 - DNA, 82 bp, Homo sapiens
ggaaggatccacagggacaatcaatcatgtcatcaagatcagcttctgaaggaaacaagcacaaatgcttcagtgaaaacaa

SEQ ID NO: 106726 - DNA, 81 bp, Homo sapiens
atccacagggacaatcaatcatgtcatcaagatcagcttctgaaggaaacaagcacaaatgcttcagtgaaaacaaactaa

SEQ ID NO: 106727 - DNA, 82 bp, Homo sapiens
acaatcaatcatgtcatcaagatcagcttctgaaggaaacaagcacaaatgcttcagtgaaaacaaactaatttcattctga

SEQ ID NO: 106728 - DNA, 80 bp, Homo sapiens
atgtcatcaagatcagcttctgaaggaaacaagcacaaatgcttcagtgaaaacaaactaatttcattctgactgttcta

SEQ ID NO: 106729 - DNA, 77 bp, Homo sapiens
agatcagcttctgaaggaaacaagcacaaatgcttcagtgaaaacaaactaatttcattctgactgttctactgttc

SEQ ID NO: 106730 - DNA, 71 bp, Homo sapiens
ggaaacaagcacaaatgcttcagtgaaaacaaactaatttcattctgactgttctactgttcggggtttta

SEQ ID NO: 106731 - DNA, 71 bp, Homo sapiens
acaaatgcttcagtgaaaacaaactaatttcattctgactgttctactgttcggggttttatgactgtgtt

SEQ ID NO: 106732 - DNA, 70 bp, Homo sapiens
ttcagtgaaaacaaactaatttcattctgactgttctactgttcggggttttatgactgtgtttttcacc

SEQ ID NO: 106733 - DNA, 68 bp, Homo sapiens
aaaacaaactaatttcattctgactgttctactgttcggggttttatgactgtgtttttcaccctgtg

SEQ ID NO: 106734 - DNA, 70 bp, Homo sapiens
aatttcattctgactgttctactgttcggggttttatgactgtgtttttcaccctgtgtggaaaaataca

SEQ ID NO: 106735 - DNA, 68 bp, Homo sapiens
actgttctactgttcggggttttatgactgtgtttttcaccctgtgtggaaaaatacaaagaactgcc

SEQ ID NO: 106736 - DNA, 68 bp, Homo sapiens
ttcggggttttatgactgtgtttttcaccctgtgtggaaaaatacaaagaactgcccaggaactgaaa

SEQ ID NO: 106737 - DNA, 70 bp, Homo sapiens
tttttcaccctgtgtggaaaaatacaaagaactgcccaggaactgaaaaacagaaaagaatctgtcttga

SEQ ID NO: 106738 - DNA, 71 bp, Homo sapiens
tgtgtggaaaaatacaaagaactgcccaggaactgaaaaacagaaaagaatctgtcttgaggaacatttcc

SEQ ID NO: 106739 - DNA, 66 bp, Homo sapiens
aactgcccaggaactgaaaaacagaaaagaatctgtcttgaggaacatttccccctttaacttctt

SEQ ID NO: 106740 - DNA, 69 bp, Homo sapiens
aaaacagaaaagaatctgtcttgaggaacatttccccctttaacttctttgctgtctttaccagatgta

SEQ ID NO: 106741 - DNA, 72 bp, Homo sapiens
agaatctgtcttgaggaacatttccccctttaacttctttgctgtctttaccagatgtacccatccaggctc

SEQ ID NO: 106742 - DNA, 72 bp, Homo sapiens
ttgaggaacatttccccctttaacttctttgctgtctttaccagatgtacccatccaggctccaacatgaac

SEQ ID NO: 106743 - DNA, 73 bp, Homo sapiens
ccctttaacttctttgctgtctttaccagatgtacccatccaggctccaacatgaaccacacaatggacctta

SEQ ID NO: 106744 - DNA, 75 bp, Homo sapiens
taacttctttgctgtctttaccagatgtacccatccaggctccaacatgaaccacacaatggaccttaggcccat

SEQ ID NO: 106745 - DNA, 78 bp, Homo sapiens
tgtctttaccagatgtacccatccaggctccaacatgaaccacacaatggaccttaggcccattccagcacacaataa

SEQ ID NO: 106746 - DNA, 77 bp, Homo sapiens
agatgtacccatccaggctccaacatgaaccacacaatggaccttaggcccattccagcacacaataactcaacaaa

SEQ ID NO: 106747 - DNA, 76 bp, Homo sapiens
caggctccaacatgaaccacacaatggaccttaggcccattccagcacacaataactcaacaaaggatgcttaaaa

SEQ ID NO: 106748 - DNA, 74 bp, Homo sapiens
aacatgaaccacacaatggaccttaggcccattccagcacacaataactcaacaaaggatgcttaaaacattaa

SEQ ID NO: 106749 - DNA, 72 bp, Homo sapiens
ttaggcccattccagcacacaataactcaacaaaggatgcttaaaacattaaaaggatctttactatcctct

SEQ ID NO: 106750 - DNA, 72 bp, Homo sapiens
attccagcacacaataactcaacaaaggatgcttaaaacattaaaaggatctttactatcctcttggcaaag

SEQ ID NO: 106751 - DNA, 72 bp, Homo sapiens
cacacaataactcaacaaaggatgcttaaaacattaaaaggatctttactatcctcttggcaaagtacttca

SEQ ID NO: 106752 - DNA, 72 bp, Homo sapiens
caaaggatgcttaaaacattaaaaggatctttactatcctcttggcaaagtacttcacatgaattgccagtt

SEQ ID NO: 106753 - DNA, 71 bp, Homo sapiens
ttaaaacattaaaaggatctttactatcctcttggcaaagtacttcacatgaattgccagttttccagttg

SEQ ID NO: 106754 - DNA, 73 bp, Homo sapiens
atctttactatcctcttggcaaagtacttcacatgaattgccagttttccagttgttacaccaaagaaagata

SEQ ID NO: 106755 - DNA, 72 bp, Homo sapiens
tcttggcaaagtacttcacatgaattgccagttttccagttgttacaccaaagaaagataaggggatcaacg

SEQ ID NO: 106756 - DNA, 72 bp, Homo sapiens
acatgaattgccagttttccagttgttacaccaaagaaagataaggggatcaacggatcaaaatccatctta

SEQ ID NO: 106757 - DNA, 71 bp, Homo sapiens
agttgttacaccaaagaaagataaggggatcaacggatcaaaatccatcttacttcatacaaaagacagaa

SEQ ID NO: 106758 - DNA, 72 bp, Homo sapiens
aacggatcaaaatccatcttacttcatacaaaagacagaagttgttatagaaagccaatatggcttggggag

SEQ ID NO: 106759 - DNA, 72 bp, Homo sapiens
aaaatccatcttacttcatacaaaagacagaagttgttatagaaagccaatatggcttggggagggaacatg

SEQ ID NO: 106760 - DNA, 70 bp, Homo sapiens
aaaagacagaagttgttatagaaagccaatatggcttggggagggaacatggagtcagtcccggtgtggg

SEQ ID NO: 106761 - DNA, 72 bp, Homo sapiens
gttgttatagaaagccaatatggcttggggagggaacatggagtcagtcccggtgtggggtcaatgatttta

SEQ ID NO: 106762 - DNA, 72 bp, Homo sapiens
aagccaatatggcttggggagggaacatggagtcagtcccggtgtggggtcaatgattttaccaggtgatat

SEQ ID NO: 106763 - DNA, 71 bp, Homo sapiens
cttggggagggaacatggagtcagtcccggtgtggggtcaatgattttaccaggtgatattccttcagttg

SEQ ID NO: 106764 - DNA, 70 bp, Homo sapiens
agtcagtcccggtgtggggtcaatgattttaccaggtgatattccttcagttgtttatgttgatgttttt

SEQ ID NO: 106765 - DNA, 69 bp, Homo sapiens
cccggtgtggggtcaatgattttaccaggtgatattccttcagttgtttatgttgatgttttttcaccc

SEQ ID NO: 106766 - DNA, 71 bp, Homo sapiens
aatgattttaccaggtgatattccttcagttgtttatgttgatgttttttcaccccctaaagagactcaga

SEQ ID NO: 106767 - DNA, 71 bp, Homo sapiens
tttaccaggtgatattccttcagttgtttatgttgatgttttttcaccccctaaagagactcagagataaa

SEQ ID NO: 106768 - DNA, 71 bp, Homo sapiens
gatattccttcagttgtttatgttgatgttttttcaccccctaaagagactcagagataaataaaattcag

SEQ ID NO: 106769 - DNA, 69 bp, Homo sapiens
cagttgtttatgttgatgttttttcaccccctaaagagactcagagataaataaaattcagtctttggg

SEQ ID NO: 106770 - DNA, 70 bp, Homo sapiens
tgttgatgttttttcaccccctaaagagactcagagataaataaaattcagtctttggggttgctctaaa

SEQ ID NO: 106771 - DNA, 69 bp, Homo sapiens
accccctaaagagactcagagataaataaaattcagtctttggggttgctctaaagcactcaagtaaaa

SEQ ID NO: 106772 - DNA, 70 bp, Homo sapiens
ctaaagagactcagagataaataaaattcagtctttggggttgctctaaagcactcaagtaaaaattacc

SEQ ID NO: 106773 - DNA, 71 bp, Homo sapiens
gataaataaaattcagtctttggggttgctctaaagcactcaagtaaaaattacctgattattggcaactg

SEQ ID NO: 106774 - DNA, 71 bp, Homo sapiens
gtctttggggttgctctaaagcactcaagtaaaaattacctgattattggcaactggattttgcaaaattg

SEQ ID NO: 106775 - DNA, 71 bp, Homo sapiens
gctctaaagcactcaagtaaaaattacctgattattggcaactggattttgcaaaattgtggggagaaaat

SEQ ID NO: 106776 - DNA, 70 bp, Homo sapiens
gcactcaagtaaaaattacctgattattggcaactggattttgcaaaattgtggggagaaaatttggaac

SEQ ID NO: 106777 - DNA, 68 bp, Homo sapiens
aaaattacctgattattggcaactggattttgcaaaattgtggggagaaaatttggaaccctcgcaaa

SEQ ID NO: 106778 - DNA, 70 bp, Homo sapiens
attattggcaactggattttgcaaaattgtggggagaaaatttggaaccctcgcaaatcctcctacacaa

SEQ ID NO: 106779 - DNA, 70 bp, Homo sapiens
ggattttgcaaaattgtggggagaaaatttggaaccctcgcaaatcctcctacacaaatgttgagctaaa

SEQ ID NO: 106780 - DNA, 70 bp, Homo sapiens
ttgcaaaattgtggggagaaaatttggaaccctcgcaaatcctcctacacaaatgttgagctaaatattt

SEQ ID NO: 106781 - DNA, 74 bp, Homo sapiens
gagaaaatttggaaccctcgcaaatcctcctacacaaatgttgagctaaatattttcactttatgctcgcctga

SEQ ID NO: 106782 - DNA, 76 bp, Homo sapiens
atttggaaccctcgcaaatcctcctacacaaatgttgagctaaatattttcactttatgctcgcctgacagagata

SEQ ID NO: 106783 - DNA, 78 bp, Homo sapiens
tacacaaatgttgagctaaatattttcactttatgctcgcctgacagagatagtagtggtgaaagttacagagagatt

SEQ ID NO: 106784 - DNA, 80 bp, Homo sapiens
ttgagctaaatattttcactttatgctcgcctgacagagatagtagtggtgaaagttacagagagatttgccgatataga

SEQ ID NO: 106785 - DNA, 81 bp, Homo sapiens
tattttcactttatgctcgcctgacagagatagtagtggtgaaagttacagagagatttgccgatatagagcatttgctta

SEQ ID NO: 106786 - DNA, 82 bp, Homo sapiens
actttatgctcgcctgacagagatagtagtggtgaaagttacagagagatttgccgatatagagcatttgcttatatcacac

SEQ ID NO: 106787 - DNA, 79 bp, Homo sapiens
ctgacagagatagtagtggtgaaagttacagagagatttgccgatatagagcatttgcttatatcacaccctttctctt

SEQ ID NO: 106788 - DNA, 77 bp, Homo sapiens
agagatagtagtggtgaaagttacagagagatttgccgatatagagcatttgcttatatcacaccctttctcttttc

SEQ ID NO: 106789 - DNA, 74 bp, Homo sapiens
tgaaagttacagagagatttgccgatatagagcatttgcttatatcacaccctttctcttttccccaaatcttt

SEQ ID NO: 106790 - DNA, 73 bp, Homo sapiens
ttacagagagatttgccgatatagagcatttgcttatatcacaccctttctcttttccccaaatcttttcctt

SEQ ID NO: 106791 - DNA, 70 bp, Homo sapiens
ccgatatagagcatttgcttatatcacaccctttctcttttccccaaatcttttcctttttaatagcgta

SEQ ID NO: 106792 - DNA, 70 bp, Homo sapiens
tagagcatttgcttatatcacaccctttctcttttccccaaatcttttcctttttaatagcgtaggaaga

SEQ ID NO: 106793 - DNA, 66 bp, Homo sapiens
tgcttatatcacaccctttctcttttccccaaatcttttcctttttaatagcgtaggaagaaaaaa

SEQ ID NO: 106794 - DNA, 61 bp, Homo sapiens
caccctttctcttttccccaaatcttttcctttttaatagcgtaggaagaaaaaaaaggag

SEQ ID NO: 106795 - DNA, 60 bp, Homo sapiens
cttttccccaaatcttttcctttttaatagcgtaggaagaaaaaaaaggagtttaaggaa

SEQ ID NO: 106796 - DNA, 62 bp, Homo sapiens
cttttcctttttaatagcgtaggaagaaaaaaaaggagtttaaggaaataatttcttgtgct

SEQ ID NO: 106797 - DNA, 68 bp, Homo sapiens
taatagcgtaggaagaaaaaaaaggagtttaaggaaataatttcttgtgcttactatagccctcaaga

SEQ ID NO: 106798 - DNA, 66 bp, Homo sapiens
gcgtaggaagaaaaaaaaggagtttaaggaaataatttcttgtgcttactatagccctcaagactt

SEQ ID NO: 106799 - DNA, 63 bp, Homo sapiens
aaaaaggagtttaaggaaataatttcttgtgcttactatagccctcaagacttttttttactt

SEQ ID NO: 106800 - DNA, 71 bp, Homo sapiens
tacctgggactacaaatgcatgccaccaggccttactaattatttttgtcttttgtaaaggtggggtctca

SEQ ID NO: 106801 - DNA, 71 bp, Homo sapiens
gccactgtgcctgtccccaacaattttcttattctttgagtttctcactcgtactaaacaaaactagagaa

SEQ ID NO: 106802 - DNA, 67 bp, Homo sapiens
cctgtccccaacaattttcttattctttgagtttctcactcgtactaaacaaaactagagaattccc

SEQ ID NO: 106803 - DNA, 69 bp, Homo sapiens
caattttcttattctttgagtttctcactcgtactaaacaaaactagagaattcccctgaattacacag

SEQ ID NO: 106804 - DNA, 71 bp, Homo sapiens
ttcttattctttgagtttctcactcgtactaaacaaaactagagaattcccctgaattacacaggaatctg

SEQ ID NO: 106805 - DNA, 70 bp, Homo sapiens
tttctcactcgtactaaacaaaactagagaattcccctgaattacacaggaatctgggtaaagttgtata

SEQ ID NO: 106806 - DNA, 70 bp, Homo sapiens
actcgtactaaacaaaactagagaattcccctgaattacacaggaatctgggtaaagttgtatagattca

SEQ ID NO: 106807 - DNA, 73 bp, Homo sapiens
aaactagagaattcccctgaattacacaggaatctgggtaaagttgtatagattcagaccatgtgatacttct

SEQ ID NO: 106808 - DNA, 75 bp, Homo sapiens
aattcccctgaattacacaggaatctgggtaaagttgtatagattcagaccatgtgatacttcttcagccattct

SEQ ID NO: 106809 - DNA, 77 bp, Homo sapiens
aattacacaggaatctgggtaaagttgtatagattcagaccatgtgatacttcttcagccattcttctgagaatttg

SEQ ID NO: 106810 - DNA, 78 bp, Homo sapiens
aatctgggtaaagttgtatagattcagaccatgtgatacttcttcagccattcttctgagaatttggcaaggagacta

SEQ ID NO: 106811 - DNA, 77 bp, Homo sapiens
taaagttgtatagattcagaccatgtgatacttcttcagccattcttctgagaatttggcaaggagactataagttt

SEQ ID NO: 106812 - DNA, 74 bp, Homo sapiens
attcttctgagaatttggcaaggagactataagttttgattggttaatatttgtgtgggtacgaatgccagcac

SEQ ID NO: 106813 - DNA, 74 bp, Homo sapiens
agaatttggcaaggagactataagttttgattggttaatatttgtgtgggtacgaatgccagcactgaaatatg

SEQ ID NO: 106814 - DNA, 72 bp, Homo sapiens
aaggagactataagttttgattggttaatatttgtgtgggtacgaatgccagcactgaaatatgtggttaaa

SEQ ID NO: 106815 - DNA, 74 bp, Homo sapiens
ataagttttgattggttaatatttgtgtgggtacgaatgccagcactgaaatatgtggttaaatattgtattgc

SEQ ID NO: 106816 - DNA, 73 bp, Homo sapiens
attggttaatatttgtgtgggtacgaatgccagcactgaaatatgtggttaaatattgtattgctttgggtgg

SEQ ID NO: 106817 - DNA, 76 bp, Homo sapiens
atatttgtgtgggtacgaatgccagcactgaaatatgtggttaaatattgtattgctttgggtggttggcctcatg

SEQ ID NO: 106818 - DNA, 79 bp, Homo sapiens
gtacgaatgccagcactgaaatatgtggttaaatattgtattgctttgggtggttggcctcatgtgagtgcttcctcta

SEQ ID NO: 106819 - DNA, 79 bp, Homo sapiens
cactgaaatatgtggttaaatattgtattgctttgggtggttggcctcatgtgagtgcttcctctagcacaaatgtcat

SEQ ID NO: 106820 - DNA, 77 bp, Homo sapiens
aaatatgtggttaaatattgtattgctttgggtggttggcctcatgtgagtgcttcctctagcacaaatgtcatttg

SEQ ID NO: 106821 - DNA, 77 bp, Homo sapiens
taaatattgtattgctttgggtggttggcctcatgtgagtgcttcctctagcacaaatgtcatttggcaaacttggt

SEQ ID NO: 106822 - DNA, 77 bp, Homo sapiens
ctttgggtggttggcctcatgtgagtgcttcctctagcacaaatgtcatttggcaaacttggttctcacagttcaaa

SEQ ID NO: 106823 - DNA, 80 bp, Homo sapiens
gtggttggcctcatgtgagtgcttcctctagcacaaatgtcatttggcaaacttggttctcacagttcaaatgaaatcta

SEQ ID NO: 106824 - DNA, 79 bp, Homo sapiens
atgtgagtgcttcctctagcacaaatgtcatttggcaaacttggttctcacagttcaaatgaaatctatggaggaagag

SEQ ID NO: 106825 - DNA, 78 bp, Homo sapiens
ttcctctagcacaaatgtcatttggcaaacttggttctcacagttcaaatgaaatctatggaggaagaggagagcctg

SEQ ID NO: 106826 - DNA, 76 bp, Homo sapiens
aaatgtcatttggcaaacttggttctcacagttcaaatgaaatctatggaggaagaggagagcctgtcgtctcctc

SEQ ID NO: 106827 - DNA, 75 bp, Homo sapiens
atttggcaaacttggttctcacagttcaaatgaaatctatggaggaagaggagagcctgtcgtctcctcttagga

SEQ ID NO: 106828 - DNA, 85 bp, Homo sapiens
gttcaaatgaaatctatggaggaagaggagagcctgtcgtctcctcttaggacagatggcacatgctgcagtgtgaatggcagaa

SEQ ID NO: 106829 - DNA, 84 bp, Homo sapiens
aatgaaatctatggaggaagaggagagcctgtcgtctcctcttaggacagatggcacatgctgcagtgtgaatggcagaattgg

SEQ ID NO: 106830 - DNA, 81 bp, Homo sapiens
aggaagaggagagcctgtcgtctcctcttaggacagatggcacatgctgcagtgtgaatggcagaattggggaggcctagg

SEQ ID NO: 106831 - DNA, 79 bp, Homo sapiens
agcctgtcgtctcctcttaggacagatggcacatgctgcagtgtgaatggcagaattggggaggcctaggtctgggttt

SEQ ID NO: 106832 - DNA, 81 bp, Homo sapiens
tctcctcttaggacagatggcacatgctgcagtgtgaatggcagaattggggaggcctaggtctgggtttttgtggctaga

SEQ ID NO: 106833 - DNA, 79 bp, Homo sapiens
acatgctgcagtgtgaatggcagaattggggaggcctaggtctgggtttttgtggctagagaatatactaaccatcaga

SEQ ID NO: 106834 - DNA, 76 bp, Homo sapiens
gtgtgaatggcagaattggggaggcctaggtctgggtttttgtggctagagaatatactaaccatcagaatcatgt

SEQ ID NO: 106835 - DNA, 75 bp, Homo sapiens
aatggcagaattggggaggcctaggtctgggtttttgtggctagagaatatactaaccatcagaatcatgttgtg

SEQ ID NO: 106836 - DNA, 75 bp, Homo sapiens
gtctgggtttttgtggctagagaatatactaaccatcagaatcatgttgtggccattaataggattatcttattt

SEQ ID NO: 106837 - DNA, 76 bp, Homo sapiens
gtttttgtggctagagaatatactaaccatcagaatcatgttgtggccattaataggattatcttattttcagtaa

SEQ ID NO: 106838 - DNA, 76 bp, Homo sapiens
gagaatatactaaccatcagaatcatgttgtggccattaataggattatcttattttcagtaattactaactatac

SEQ ID NO: 106839 - DNA, 79 bp, Homo sapiens
accatcagaatcatgttgtggccattaataggattatcttattttcagtaattactaactatactatatgagagacaga

SEQ ID NO: 106840 - DNA, 76 bp, Homo sapiens
ttgtggccattaataggattatcttattttcagtaattactaactatactatatgagagacagatagtataataac

SEQ ID NO: 106841 - DNA, 76 bp, Homo sapiens
ggattatcttattttcagtaattactaactatactatatgagagacagatagtataataactaatgactaactata

SEQ ID NO: 106842 - DNA, 76 bp, Homo sapiens
attttcagtaattactaactatactatatgagagacagatagtataataactaatgactaactatatgaaagacag

SEQ ID NO: 106843 - DNA, 76 bp, Homo sapiens
cagtaattactaactatactatatgagagacagatagtataataactaatgactaactatatgaaagacagtttaa

SEQ ID NO: 106844 - DNA, 77 bp, Homo sapiens
gagagacagatagtataataactaatgactaactatatgaaagacagtttaatgttaatacctccactctgaatgaa

SEQ ID NO: 106845 - DNA, 76 bp, Homo sapiens
cagatagtataataactaatgactaactatatgaaagacagtttaatgttaatacctccactctgaatgaattgct

SEQ ID NO: 106846 - DNA, 76 bp, Homo sapiens
ctaatgactaactatatgaaagacagtttaatgttaatacctccactctgaatgaattgcttgtttaacagatggc

SEQ ID NO: 106847 - DNA, 74 bp, Homo sapiens
aagacagtttaatgttaatacctccactctgaatgaattgcttgtttaacagatggcttctgacttattgggaa

SEQ ID NO: 106848 - DNA, 78 bp, Homo sapiens
tctgaatgaattgcttgtttaacagatggcttctgacttattgggaagttgttagaacatcaaagcacagtttatgag

SEQ ID NO: 106849 - DNA, 78 bp, Homo sapiens
taacagatggcttctgacttattgggaagttgttagaacatcaaagcacagtttatgaggcctggcaaattatgtatc

SEQ ID NO: 106850 - DNA, 76 bp, Homo sapiens
cttctgacttattgggaagttgttagaacatcaaagcacagtttatgaggcctggcaaattatgtatctgagttta

SEQ ID NO: 106851 - DNA, 75 bp, Homo sapiens
gaagttgttagaacatcaaagcacagtttatgaggcctggcaaattatgtatctgagtttagccttttgtttcca

SEQ ID NO: 106852 - DNA, 76 bp, Homo sapiens
tgttagaacatcaaagcacagtttatgaggcctggcaaattatgtatctgagtttagccttttgtttccaatgtta

SEQ ID NO: 106853 - DNA, 72 bp, Homo sapiens
aaagcacagtttatgaggcctggcaaattatgtatctgagtttagccttttgtttccaatgttaccttctaa

SEQ ID NO: 106854 - DNA, 76 bp, Homo sapiens
tatgaggcctggcaaattatgtatctgagtttagccttttgtttccaatgttaccttctaaatgatctgtttcata

SEQ ID NO: 106855 - DNA, 73 bp, Homo sapiens
cctggcaaattatgtatctgagtttagccttttgtttccaatgttaccttctaaatgatctgtttcataacta

SEQ ID NO: 106856 - DNA, 72 bp, Homo sapiens
agtttagccttttgtttccaatgttaccttctaaatgatctgtttcataactaagattaatatgagcacagt

SEQ ID NO: 106857 - DNA, 77 bp, Homo sapiens
taccttctaaatgatctgtttcataactaagattaatatgagcacagttaaataagttatttcatggagaacaggca

SEQ ID NO: 106858 - DNA, 82 bp, Homo sapiens
tcataactaagattaatatgagcacagttaaataagttatttcatggagaacaggcatgccaatatagatattatcaagatg

SEQ ID NO: 106859 - DNA, 82 bp, Homo sapiens
gattaatatgagcacagttaaataagttatttcatggagaacaggcatgccaatatagatattatcaagatgtataatttgc

SEQ ID NO: 106860 - DNA, 76 bp, Homo sapiens
aaataagttatttcatggagaacaggcatgccaatatagatattatcaagatgtataatttgccaaaaatatttgt

SEQ ID NO: 106861 - DNA, 84 bp, Homo sapiens
tttcatggagaacaggcatgccaatatagatattatcaagatgtataatttgccaaaaatatttgttgagtatctgtgatgtgc

SEQ ID NO: 106862 - DNA, 84 bp, Homo sapiens
agaacaggcatgccaatatagatattatcaagatgtataatttgccaaaaatatttgttgagtatctgtgatgtgccagccata

SEQ ID NO: 106863 - DNA, 83 bp, Homo sapiens
tgccaatatagatattatcaagatgtataatttgccaaaaatatttgttgagtatctgtgatgtgccagccatacagtggtaa

SEQ ID NO: 106864 - DNA, 79 bp, Homo sapiens
agatattatcaagatgtataatttgccaaaaatatttgttgagtatctgtgatgtgccagccatacagtggtaaacatt

SEQ ID NO: 106865 - DNA, 79 bp, Homo sapiens
aagatgtataatttgccaaaaatatttgttgagtatctgtgatgtgccagccatacagtggtaaacatttattgatcac

SEQ ID NO: 106866 - DNA, 80 bp, Homo sapiens
ccaaaaatatttgttgagtatctgtgatgtgccagccatacagtggtaaacatttattgatcacttacagatatgaacta

SEQ ID NO: 106867 - DNA, 85 bp, Homo sapiens
atatttgttgagtatctgtgatgtgccagccatacagtggtaaacatttattgatcacttacagatatgaactatagtatgcaca

SEQ ID NO: 106868 - DNA, 87 bp, Homo sapiens
tatctgtgatgtgccagccatacagtggtaaacatttattgatcacttacagatatgaactatagtatgcacacatctacagtttca

SEQ ID NO: 106869 - DNA, 85 bp, Homo sapiens
tgccagccatacagtggtaaacatttattgatcacttacagatatgaactatagtatgcacacatctacagtttcagatggacta

SEQ ID NO: 106870 - DNA, 83 bp, Homo sapiens
acagtggtaaacatttattgatcacttacagatatgaactatagtatgcacacatctacagtttcagatggactatagtatca

SEQ ID NO: 106871 - DNA, 84 bp, Homo sapiens
catttattgatcacttacagatatgaactatagtatgcacacatctacagtttcagatggactatagtatcatagttacataaa

SEQ ID NO: 106872 - DNA, 85 bp, Homo sapiens
ttgatcacttacagatatgaactatagtatgcacacatctacagtttcagatggactatagtatcatagttacataaaatacagc

SEQ ID NO: 106873 - DNA, 84 bp, Homo sapiens
tacagatatgaactatagtatgcacacatctacagtttcagatggactatagtatcatagttacataaaatacagccaaaggca

SEQ ID NO: 106874 - DNA, 77 bp, Homo sapiens
cacacatctacagtttcagatggactatagtatcatagttacataaaatacagccaaaggcatcctagaatttttct

SEQ ID NO: 106875 - DNA, 75 bp, Homo sapiens
tacagtttcagatggactatagtatcatagttacataaaatacagccaaaggcatcctagaatttttctttttca

SEQ ID NO: 106876 - DNA, 72 bp, Homo sapiens
gatggactatagtatcatagttacataaaatacagccaaaggcatcctagaatttttctttttcaaaaataa

SEQ ID NO: 106877 - DNA, 71 bp, Homo sapiens
ttctttttcaaaaataaaacaattctacaatctcacaaacatattcgggtccatttctctgtgcttacaaa

SEQ ID NO: 106878 - DNA, 76 bp, Homo sapiens
aaaataaaacaattctacaatctcacaaacatattcgggtccatttctctgtgcttacaaacatgctcaggcttgc

SEQ ID NO: 106879 - DNA, 78 bp, Homo sapiens
aaaacaattctacaatctcacaaacatattcgggtccatttctctgtgcttacaaacatgctcaggcttgcccaatga

SEQ ID NO: 106880 - DNA, 79 bp, Homo sapiens
atctcacaaacatattcgggtccatttctctgtgcttacaaacatgctcaggcttgcccaatgagtggaacccaccatc

SEQ ID NO: 106881 - DNA, 75 bp, Homo sapiens
aaacatattcgggtccatttctctgtgcttacaaacatgctcaggcttgcccaatgagtggaacccaccatcctt

SEQ ID NO: 106882 - DNA, 76 bp, Homo sapiens
ggtccatttctctgtgcttacaaacatgctcaggcttgcccaatgagtggaacccaccatcctttgaccttggcct

SEQ ID NO: 106883 - DNA, 78 bp, Homo sapiens
tgtgcttacaaacatgctcaggcttgcccaatgagtggaacccaccatcctttgaccttggccttgcagcctagtttc

SEQ ID NO: 106884 - DNA, 77 bp, Homo sapiens
tacaaacatgctcaggcttgcccaatgagtggaacccaccatcctttgaccttggccttgcagcctagtttctttga

SEQ ID NO: 106885 - DNA, 73 bp, Homo sapiens
aggcttgcccaatgagtggaacccaccatcctttgaccttggccttgcagcctagtttctttgagagtacatt

SEQ ID NO: 106886 - DNA, 71 bp, Homo sapiens
cccaatgagtggaacccaccatcctttgaccttggccttgcagcctagtttctttgagagtacattttccc

SEQ ID NO: 106887 - DNA, 72 bp, Homo sapiens
tcctttgaccttggccttgcagcctagtttctttgagagtacattttcccctaccaactcctccgccacata

SEQ ID NO: 106888 - DNA, 69 bp, Homo sapiens
ccttgcagcctagtttctttgagagtacattttcccctaccaactcctccgccacataccccacaaaaa

SEQ ID NO: 106889 - DNA, 71 bp, Homo sapiens
tctttgagagtacattttcccctaccaactcctccgccacataccccacaaaaagcagcctcattttccac

SEQ ID NO: 106890 - DNA, 69 bp, Homo sapiens
tacattttcccctaccaactcctccgccacataccccacaaaaagcagcctcattttccacctccaaat

SEQ ID NO: 106891 - DNA, 73 bp, Homo sapiens
ctaccaactcctccgccacataccccacaaaaagcagcctcattttccacctccaaattctcactatcttcca

SEQ ID NO: 106892 - DNA, 73 bp, Homo sapiens
ccacaaaaagcagcctcattttccacctccaaattctcactatcttccactcctcagccccaggaacctgctt

SEQ ID NO: 106893 - DNA, 73 bp, Homo sapiens
aaattctcactatcttccactcctcagccccaggaacctgctttttactcccactgctctcctgaaattgctt

SEQ ID NO: 106894 - DNA, 76 bp, Homo sapiens
tatcttccactcctcagccccaggaacctgctttttactcccactgctctcctgaaattgctttctcaaatgtcaa

SEQ ID NO: 106895 - DNA, 73 bp, Homo sapiens
actcctcagccccaggaacctgctttttactcccactgctctcctgaaattgctttctcaaatgtcaaagtac

SEQ ID NO: 106896 - DNA, 73 bp, Homo sapiens
ctttttactcccactgctctcctgaaattgctttctcaaatgtcaaagtaccaccagttgattcaattcttcc

SEQ ID NO: 106897 - DNA, 76 bp, Homo sapiens
tactcccactgctctcctgaaattgctttctcaaatgtcaaagtaccaccagttgattcaattcttccctcccaga

SEQ ID NO: 106898 - DNA, 77 bp, Homo sapiens
tctcctgaaattgctttctcaaatgtcaaagtaccaccagttgattcaattcttccctcccagacttctctgcaaca

SEQ ID NO: 106899 - DNA, 73 bp, Homo sapiens
ctttctcaaatgtcaaagtaccaccagttgattcaattcttccctcccagacttctctgcaacacccttgaaa

SEQ ID NO: 106900 - DNA, 72 bp, Homo sapiens
aaatgtcaaagtaccaccagttgattcaattcttccctcccagacttctctgcaacacccttgaaaatgccc

SEQ ID NO: 106901 - DNA, 72 bp, Homo sapiens
aagtaccaccagttgattcaattcttccctcccagacttctctgcaacacccttgaaaatgccctccttgaa

SEQ ID NO: 106902 - DNA, 74 bp, Homo sapiens
agttgattcaattcttccctcccagacttctctgcaacacccttgaaaatgccctccttgaaaagctctctatc

SEQ ID NO: 106903 - DNA, 73 bp, Homo sapiens
ttcttccctcccagacttctctgcaacacccttgaaaatgccctccttgaaaagctctctatccttggtatgt

SEQ ID NO: 106904 - DNA, 76 bp, Homo sapiens
acttctctgcaacacccttgaaaatgccctccttgaaaagctctctatccttggtatgttctccacactgtggcaa

SEQ ID NO: 106905 - DNA, 76 bp, Homo sapiens
ttgaaaatgccctccttgaaaagctctctatccttggtatgttctccacactgtggcaactcgagacttttcttca

SEQ ID NO: 106906 - DNA, 77 bp, Homo sapiens
tccttgaaaagctctctatccttggtatgttctccacactgtggcaactcgagacttttcttcacctctctgacagt

SEQ ID NO: 106907 - DNA, 76 bp, Homo sapiens
tatccttggtatgttctccacactgtggcaactcgagacttttcttcacctctctgacagttcctttcatcttctt

SEQ ID NO: 106908 - DNA, 71 bp, Homo sapiens
agacttttcttcacctctctgacagttcctttcatcttctttgttcttgctccctaaagtaagattcttta

SEQ ID NO: 106909 - DNA, 71 bp, Homo sapiens
tcacctctctgacagttcctttcatcttctttgttcttgctccctaaagtaagattctttaaggctttctt

SEQ ID NO: 106910 - DNA, 73 bp, Homo sapiens
tctctgacagttcctttcatcttctttgttcttgctccctaaagtaagattctttaaggctttctttgctctc

SEQ ID NO: 106911 - DNA, 71 bp, Homo sapiens
tttcatcttctttgttcttgctccctaaagtaagattctttaaggctttctttgctctctgtgtacaacct

SEQ ID NO: 106912 - DNA, 71 bp, Homo sapiens
tttgttcttgctccctaaagtaagattctttaaggctttctttgctctctgtgtacaaccttcttgtagaa

SEQ ID NO: 106913 - DNA, 69 bp, Homo sapiens
tccctaaagtaagattctttaaggctttctttgctctctgtgtacaaccttcttgtagaattgggtatt

SEQ ID NO: 106914 - DNA, 69 bp, Homo sapiens
aaagtaagattctttaaggctttctttgctctctgtgtacaaccttcttgtagaattgggtatttcctg

SEQ ID NO: 106915 - DNA, 72 bp, Homo sapiens
ttaaggctttctttgctctctgtgtacaaccttcttgtagaattgggtatttcctgggctttgactattgta

SEQ ID NO: 106916 - DNA, 77 bp, Homo sapiens
ttgctctctgtgtacaaccttcttgtagaattgggtatttcctgggctttgactattgtatctatgaatgtgaacta

SEQ ID NO: 106917 - DNA, 76 bp, Homo sapiens
tctgtgtacaaccttcttgtagaattgggtatttcctgggctttgactattgtatctatgaatgtgaactatcgaa

SEQ ID NO: 106918 - DNA, 73 bp, Homo sapiens
aaccttcttgtagaattgggtatttcctgggctttgactattgtatctatgaatgtgaactatcgaagctctt

SEQ ID NO: 106919 - DNA, 77 bp, Homo sapiens
aattgggtatttcctgggctttgactattgtatctatgaatgtgaactatcgaagctctttctccagatctggcttc

SEQ ID NO: 106920 - DNA, 81 bp, Homo sapiens
tatttcctgggctttgactattgtatctatgaatgtgaactatcgaagctctttctccagatctggcttctcttcagactc

SEQ ID NO: 106921 - DNA, 82 bp, Homo sapiens
tttgactattgtatctatgaatgtgaactatcgaagctctttctccagatctggcttctcttcagactccagtcccatgtct

SEQ ID NO: 106922 - DNA, 84 bp, Homo sapiens
ttgtatctatgaatgtgaactatcgaagctctttctccagatctggcttctcttcagactccagtcccatgtcttcatttgcta

SEQ ID NO: 106923 - DNA, 80 bp, Homo sapiens
aatgtgaactatcgaagctctttctccagatctggcttctcttcagactccagtcccatgtcttcatttgctacctggaa

SEQ ID NO: 106924 - DNA, 83 bp, Homo sapiens
aagctctttctccagatctggcttctcttcagactccagtcccatgtcttcatttgctacctggaagcctcacctcatgatga

SEQ ID NO: 106925 - DNA, 81 bp, Homo sapiens
gcttctcttcagactccagtcccatgtcttcatttgctacctggaagcctcacctcatgatgagtttgggaactcaacata

SEQ ID NO: 106926 - DNA, 78 bp, Homo sapiens
agactccagtcccatgtcttcatttgctacctggaagcctcacctcatgatgagtttgggaactcaacatatcccaaa

SEQ ID NO: 106927 - DNA, 79 bp, Homo sapiens
ctacctggaagcctcacctcatgatgagtttgggaactcaacatatcccaaagcaaactcattgactgcttctcaccaa

SEQ ID NO: 106928 - DNA, 80 bp, Homo sapiens
ctcacctcatgatgagtttgggaactcaacatatcccaaagcaaactcattgactgcttctcaccaaggatcttctcttc

SEQ ID NO: 106929 - DNA, 75 bp, Homo sapiens
atgagtttgggaactcaacatatcccaaagcaaactcattgactgcttctcaccaaggatcttctcttcctggtt

SEQ ID NO: 106930 - DNA, 73 bp, Homo sapiens
aactcaacatatcccaaagcaaactcattgactgcttctcaccaaggatcttctcttcctggttttccaggtt

SEQ ID NO: 106931 - DNA, 75 bp, Homo sapiens
aacatatcccaaagcaaactcattgactgcttctcaccaaggatcttctcttcctggttttccaggtttggatgc

SEQ ID NO: 106932 - DNA, 74 bp, Homo sapiens
aagcaaactcattgactgcttctcaccaaggatcttctcttcctggttttccaggtttggatgcgttctcctgt

SEQ ID NO: 106933 - DNA, 74 bp, Homo sapiens
attgactgcttctcaccaaggatcttctcttcctggttttccaggtttggatgcgttctcctgttctcctagag

SEQ ID NO: 106934 - DNA, 69 bp, Homo sapiens
ttctcttcctggttttccaggtttggatgcgttctcctgttctcctagagggttctccctcttaattag

SEQ ID NO: 106935 - DNA, 69 bp, Homo sapiens
tggttttccaggtttggatgcgttctcctgttctcctagagggttctccctcttaattagttgcccaat

SEQ ID NO: 106936 - DNA, 71 bp, Homo sapiens
aggtttggatgcgttctcctgttctcctagagggttctccctcttaattagttgcccaattctgtccattc

SEQ ID NO: 106937 - DNA, 72 bp, Homo sapiens
gttctcctgttctcctagagggttctccctcttaattagttgcccaattctgtccattctaccttcactata

SEQ ID NO: 106938 - DNA, 71 bp, Homo sapiens
ggttctccctcttaattagttgcccaattctgtccattctaccttcactataacaagtgactgtcccactt

SEQ ID NO: 106939 - DNA, 72 bp, Homo sapiens
tcttaattagttgcccaattctgtccattctaccttcactataacaagtgactgtcccacttttagttagtc

SEQ ID NO: 106940 - DNA, 73 bp, Homo sapiens
ttagttgcccaattctgtccattctaccttcactataacaagtgactgtcccacttttagttagtcctgccac

SEQ ID NO: 106941 - DNA, 72 bp, Homo sapiens
aattctgtccattctaccttcactataacaagtgactgtcccacttttagttagtcctgccacctcctctct

SEQ ID NO: 106942 - DNA, 76 bp, Homo sapiens
attctaccttcactataacaagtgactgtcccacttttagttagtcctgccacctcctctcttcagctcttcatga

SEQ ID NO: 106943 - DNA, 77 bp, Homo sapiens
tataacaagtgactgtcccacttttagttagtcctgccacctcctctcttcagctcttcatgaattccctctctgaa

SEQ ID NO: 106944 - DNA, 78 bp, Homo sapiens
agtgactgtcccacttttagttagtcctgccacctcctctcttcagctcttcatgaattccctctctgaactgctctc

SEQ ID NO: 106945 - DNA, 80 bp, Homo sapiens
ttttagttagtcctgccacctcctctcttcagctcttcatgaattccctctctgaactgctctccctcatgccagtctct

SEQ ID NO: 106946 - DNA, 82 bp, Homo sapiens
ttagtcctgccacctcctctcttcagctcttcatgaattccctctctgaactgctctccctcatgccagtctctttccactc

SEQ ID NO: 106947 - DNA, 84 bp, Homo sapiens
tcctctcttcagctcttcatgaattccctctctgaactgctctccctcatgccagtctctttccactctgttccgtgcctcaca

SEQ ID NO: 106948 - DNA, 79 bp, Homo sapiens
agctcttcatgaattccctctctgaactgctctccctcatgccagtctctttccactctgttccgtgcctcacacgttt

SEQ ID NO: 106949 - DNA, 81 bp, Homo sapiens
atgaattccctctctgaactgctctccctcatgccagtctctttccactctgttccgtgcctcacacgttttgcagatgaa

SEQ ID NO: 106950 - DNA, 81 bp, Homo sapiens
tctgaactgctctccctcatgccagtctctttccactctgttccgtgcctcacacgttttgcagatgaaccttgccaaaga

SEQ ID NO: 106951 - DNA, 81 bp, Homo sapiens
tctccctcatgccagtctctttccactctgttccgtgcctcacacgttttgcagatgaaccttgccaaagaaatgatatca

SEQ ID NO: 106952 - DNA, 79 bp, Homo sapiens
ccagtctctttccactctgttccgtgcctcacacgttttgcagatgaaccttgccaaagaaatgatatcactgtgacat

SEQ ID NO: 106953 - DNA, 81 bp, Homo sapiens
tccgtgcctcacacgttttgcagatgaaccttgccaaagaaatgatatcactgtgacatttctgtcttcacaaatgcctta

SEQ ID NO: 106954 - DNA, 80 bp, Homo sapiens
ttttgcagatgaaccttgccaaagaaatgatatcactgtgacatttctgtcttcacaaatgccttattctatcctgaccc

SEQ ID NO: 106955 - DNA, 78 bp, Homo sapiens
ttgccaaagaaatgatatcactgtgacatttctgtcttcacaaatgccttattctatcctgaccctccaaattaatgt

SEQ ID NO: 106956 - DNA, 71 bp, Homo sapiens
cactgtgacatttctgtcttcacaaatgccttattctatcctgaccctccaaattaatgtttttaaccttt

SEQ ID NO: 106957 - DNA, 70 bp, Homo sapiens
atttctgtcttcacaaatgccttattctatcctgaccctccaaattaatgtttttaaccttttctcctgc

SEQ ID NO: 106958 - DNA, 71 bp, Homo sapiens
ttcacaaatgccttattctatcctgaccctccaaattaatgtttttaaccttttctcctgctctttctcaa

SEQ ID NO: 106959 - DNA, 73 bp, Homo sapiens
ttattctatcctgaccctccaaattaatgtttttaaccttttctcctgctctttctcaagcatgtagccatgg

SEQ ID NO: 106960 - DNA, 72 bp, Homo sapiens
aattaatgtttttaaccttttctcctgctctttctcaagcatgtagccatggtcccacaaataccatgggct

SEQ ID NO: 106961 - DNA, 71 bp, Homo sapiens
gtttttaaccttttctcctgctctttctcaagcatgtagccatggtcccacaaataccatgggcttggggg

SEQ ID NO: 106962 - DNA, 78 bp, Homo sapiens
ttttctcctgctctttctcaagcatgtagccatggtcccacaaataccatgggcttggggggaggttcagatcacata

SEQ ID NO: 106963 - DNA, 78 bp, Homo sapiens
ctctttctcaagcatgtagccatggtcccacaaataccatgggcttggggggaggttcagatcacatagcacattccc

SEQ ID NO: 106964 - DNA, 78 bp, Homo sapiens
aagcatgtagccatggtcccacaaataccatgggcttggggggaggttcagatcacatagcacattcccctctctgtc

SEQ ID NO: 106965 - DNA, 75 bp, Homo sapiens
tggtcccacaaataccatgggcttggggggaggttcagatcacatagcacattcccctctctgtccccttgtata

SEQ ID NO: 106966 - DNA, 74 bp, Homo sapiens
aaataccatgggcttggggggaggttcagatcacatagcacattcccctctctgtccccttgtatatgccccta

SEQ ID NO: 106967 - DNA, 78 bp, Homo sapiens
ttggggggaggttcagatcacatagcacattcccctctctgtccccttgtatatgcccctagagctgtgtggactctc

SEQ ID NO: 106968 - DNA, 80 bp, Homo sapiens
aggttcagatcacatagcacattcccctctctgtccccttgtatatgcccctagagctgtgtggactctcctccttcaca

SEQ ID NO: 106969 - DNA, 81 bp, Homo sapiens
atcacatagcacattcccctctctgtccccttgtatatgcccctagagctgtgtggactctcctccttcacacttctgcac

SEQ ID NO: 106970 - DNA, 80 bp, Homo sapiens
tcccctctctgtccccttgtatatgcccctagagctgtgtggactctcctccttcacacttctgcacttgccatccttca

SEQ ID NO: 106971 - DNA, 80 bp, Homo sapiens
tctctgtccccttgtatatgcccctagagctgtgtggactctcctccttcacacttctgcacttgccatccttcaaggcc

SEQ ID NO: 106972 - DNA, 82 bp, Homo sapiens
tatatgcccctagagctgtgtggactctcctccttcacacttctgcacttgccatccttcaaggcccagttctgttgacata

SEQ ID NO: 106973 - DNA, 79 bp, Homo sapiens
tgtggactctcctccttcacacttctgcacttgccatccttcaaggcccagttctgttgacatagtctccaggaagact

SEQ ID NO: 106974 - DNA, 77 bp, Homo sapiens
tccttcacacttctgcacttgccatccttcaaggcccagttctgttgacatagtctccaggaagacttcctcttttg

SEQ ID NO: 106975 - DNA, 74 bp, Homo sapiens
ccatccttcaaggcccagttctgttgacatagtctccaggaagacttcctcttttggtgatgtttgagaagtta

SEQ ID NO: 106976 - DNA, 74 bp, Homo sapiens
ttcaaggcccagttctgttgacatagtctccaggaagacttcctcttttggtgatgtttgagaagttacaataa

SEQ ID NO: 106977 - DNA, 74 bp, Homo sapiens
ttctgttgacatagtctccaggaagacttcctcttttggtgatgtttgagaagttacaataaggtgctgtactt

SEQ ID NO: 106978 - DNA, 73 bp, Homo sapiens
acatagtctccaggaagacttcctcttttggtgatgtttgagaagttacaataaggtgctgtacttttccata

SEQ ID NO: 106979 - DNA, 74 bp, Homo sapiens
aagacttcctcttttggtgatgtttgagaagttacaataaggtgctgtacttttccatagctcggcttgattca

SEQ ID NO: 106980 - DNA, 77 bp, Homo sapiens
cttttggtgatgtttgagaagttacaataaggtgctgtacttttccatagctcggcttgattcatgtgctatataaa

SEQ ID NO: 106981 - DNA, 76 bp, Homo sapiens
ggtgatgtttgagaagttacaataaggtgctgtacttttccatagctcggcttgattcatgtgctatataaaaaaa

SEQ ID NO: 106982 - DNA, 75 bp, Homo sapiens
gagaagttacaataaggtgctgtacttttccatagctcggcttgattcatgtgctatataaaaaaaaagactgta

SEQ ID NO: 106983 - DNA, 76 bp, Homo sapiens
ataaggtgctgtacttttccatagctcggcttgattcatgtgctatataaaaaaaaagactgtagagggtctcata

SEQ ID NO: 106984 - DNA, 79 bp, Homo sapiens
tacttttccatagctcggcttgattcatgtgctatataaaaaaaaagactgtagagggtctcatagcaatacagcaaca

SEQ ID NO: 106985 - DNA, 79 bp, Homo sapiens
atagctcggcttgattcatgtgctatataaaaaaaaagactgtagagggtctcatagcaatacagcaacaggtggttga

SEQ ID NO: 106986 - DNA, 78 bp, Homo sapiens
attcatgtgctatataaaaaaaaagactgtagagggtctcatagcaatacagcaacaggtggttgatgaatcaattta

SEQ ID NO: 106987 - DNA, 74 bp, Homo sapiens
atataaaaaaaaagactgtagagggtctcatagcaatacagcaacaggtggttgatgaatcaatttaggaagtg

SEQ ID NO: 106988 - DNA, 76 bp, Homo sapiens
atacagcaacaggtggttgatgaatcaatttaggaagtggctgctgggggcagagctttatttatcaaagggtaca

SEQ ID NO: 106989 - DNA, 75 bp, Homo sapiens
aggtggttgatgaatcaatttaggaagtggctgctgggggcagagctttatttatcaaagggtacagctttgcaa

SEQ ID NO: 106990 - DNA, 76 bp, Homo sapiens
aatcaatttaggaagtggctgctgggggcagagctttatttatcaaagggtacagctttgcaagctgagtgtacaa

SEQ ID NO: 106991 - DNA, 77 bp, Homo sapiens
tgggggcagagctttatttatcaaagggtacagctttgcaagctgagtgtacaagagcttcctgggtcagggctgtc

SEQ ID NO: 106992 - DNA, 76 bp, Homo sapiens
ctttatttatcaaagggtacagctttgcaagctgagtgtacaagagcttcctgggtcagggctgtctggtgaccta

SEQ ID NO: 106993 - DNA, 79 bp, Homo sapiens
tttatcaaagggtacagctttgcaagctgagtgtacaagagcttcctgggtcagggctgtctggtgacctacagacatg

SEQ ID NO: 106994 - DNA, 82 bp, Homo sapiens
agctttgcaagctgagtgtacaagagcttcctgggtcagggctgtctggtgacctacagacatggatggggtggcagtcata

SEQ ID NO: 106995 - DNA, 80 bp, Homo sapiens
agctgagtgtacaagagcttcctgggtcagggctgtctggtgacctacagacatggatggggtggcagtcataagtgagt

SEQ ID NO: 106996 - DNA, 78 bp, Homo sapiens
gtgtacaagagcttcctgggtcagggctgtctggtgacctacagacatggatggggtggcagtcataagtgagtttgg

SEQ ID NO: 106997 - DNA, 78 bp, Homo sapiens
ttcctgggtcagggctgtctggtgacctacagacatggatggggtggcagtcataagtgagtttgggctgtgacattt

SEQ ID NO: 106998 - DNA, 78 bp, Homo sapiens
agggctgtctggtgacctacagacatggatggggtggcagtcataagtgagtttgggctgtgacattttggctttctc

SEQ ID NO: 106999 - DNA, 76 bp, Homo sapiens
acagacatggatggggtggcagtcataagtgagtttgggctgtgacattttggctttctctaggttttctcattta

SEQ ID NO: 107000 - DNA, 75 bp, Homo sapiens
gtggcagtcataagtgagtttgggctgtgacattttggctttctctaggttttctcatttatcacaaagggactg

SEQ ID NO: 107001 - DNA, 71 bp, Homo sapiens
ataagtgagtttgggctgtgacattttggctttctctaggttttctcatttatcacaaagggactggtaat

SEQ ID NO: 107002 - DNA, 71 bp, Homo sapiens
agtttgggctgtgacattttggctttctctaggttttctcatttatcacaaagggactggtaattcctatg

SEQ ID NO: 107003 - DNA, 73 bp, Homo sapiens
acattttggctttctctaggttttctcatttatcacaaagggactggtaattcctatgtgactctacatgtag

SEQ ID NO: 107004 - DNA, 80 bp, Homo sapiens
tttctctaggttttctcatttatcacaaagggactggtaattcctatgtgactctacatgtaggcatcacatgtcgctga

SEQ ID NO: 107005 - DNA, 82 bp, Homo sapiens
tttctcatttatcacaaagggactggtaattcctatgtgactctacatgtaggcatcacatgtcgctgagctccagagaaaa

SEQ ID NO: 107006 - DNA, 81 bp, Homo sapiens
atttatcacaaagggactggtaattcctatgtgactctacatgtaggcatcacatgtcgctgagctccagagaaaaggcaa

SEQ ID NO: 107007 - DNA, 81 bp, Homo sapiens
aaagggactggtaattcctatgtgactctacatgtaggcatcacatgtcgctgagctccagagaaaaggcaagctcgtcca

SEQ ID NO: 107008 - DNA, 85 bp, Homo sapiens
atgtaggcatcacatgtcgctgagctccagagaaaaggcaagctcgtccaccttcagactcatgcacttgcatcccactaggtcc

SEQ ID NO: 107009 - DNA, 81 bp, Homo sapiens
acatgtcgctgagctccagagaaaaggcaagctcgtccaccttcagactcatgcacttgcatcccactaggtcctcccttg

SEQ ID NO: 107010 - DNA, 77 bp, Homo sapiens
ctccagagaaaaggcaagctcgtccaccttcagactcatgcacttgcatcccactaggtcctcccttgggtctgtaa

SEQ ID NO: 107011 - DNA, 78 bp, Homo sapiens
agaaaaggcaagctcgtccaccttcagactcatgcacttgcatcccactaggtcctcccttgggtctgtaatgagcta

SEQ ID NO: 107012 - DNA, 79 bp, Homo sapiens
aagctcgtccaccttcagactcatgcacttgcatcccactaggtcctcccttgggtctgtaatgagctacttctcctca

SEQ ID NO: 107013 - DNA, 77 bp, Homo sapiens
cttcagactcatgcacttgcatcccactaggtcctcccttgggtctgtaatgagctacttctcctcaccttagttaa

SEQ ID NO: 107014 - DNA, 74 bp, Homo sapiens
cacttgcatcccactaggtcctcccttgggtctgtaatgagctacttctcctcaccttagttaagcagtttcat

SEQ ID NO: 107015 - DNA, 71 bp, Homo sapiens
atcccactaggtcctcccttgggtctgtaatgagctacttctcctcaccttagttaagcagtttcattctt

SEQ ID NO: 107016 - DNA, 73 bp, Homo sapiens
ctcccttgggtctgtaatgagctacttctcctcaccttagttaagcagtttcattctttacagaccacctcaa

SEQ ID NO: 107017 - DNA, 75 bp, Homo sapiens
tctgtaatgagctacttctcctcaccttagttaagcagtttcattctttacagaccacctcaaaggccaattcta

SEQ ID NO: 107018 - DNA, 73 bp, Homo sapiens
aatgagctacttctcctcaccttagttaagcagtttcattctttacagaccacctcaaaggccaattctacca

SEQ ID NO: 107019 - DNA, 72 bp, Homo sapiens
ctcaccttagttaagcagtttcattctttacagaccacctcaaaggccaattctaccatggtctttcttcaa

SEQ ID NO: 107020 - DNA, 72 bp, Homo sapiens
ttagttaagcagtttcattctttacagaccacctcaaaggccaattctaccatggtctttcttcaacccata

SEQ ID NO: 107021 - DNA, 74 bp, Homo sapiens
tttcattctttacagaccacctcaaaggccaattctaccatggtctttcttcaacccatagtcataacactctc

SEQ ID NO: 107022 - DNA, 80 bp, Homo sapiens
aattctaccatggtctttcttcaacccatagtcataacactctctccctcttctggtcacacatggcactctatctgtgc

SEQ ID NO: 107023 - DNA, 82 bp, Homo sapiens
ttcaacccatagtcataacactctctccctcttctggtcacacatggcactctatctgtgcctcaagtggttcaatgactgt

SEQ ID NO: 107024 - DNA, 82 bp, Homo sapiens
atagtcataacactctctccctcttctggtcacacatggcactctatctgtgcctcaagtggttcaatgactgttctccctg

SEQ ID NO: 107025 - DNA, 85 bp, Homo sapiens
tctccctcttctggtcacacatggcactctatctgtgcctcaagtggttcaatgactgttctccctggctttgcatgtgtcatct

SEQ ID NO: 107026 - DNA, 82 bp, Homo sapiens
atggcactctatctgtgcctcaagtggttcaatgactgttctccctggctttgcatgtgtcatcttaccaaatggattataa

SEQ ID NO: 107027 - DNA, 82 bp, Homo sapiens
tatctgtgcctcaagtggttcaatgactgttctccctggctttgcatgtgtcatcttaccaaatggattataagatgtttga

SEQ ID NO: 107028 - DNA, 81 bp, Homo sapiens
tcaagtggttcaatgactgttctccctggctttgcatgtgtcatcttaccaaatggattataagatgtttgagtctggaga

SEQ ID NO: 107029 - DNA, 77 bp, Homo sapiens
aatgactgttctccctggctttgcatgtgtcatcttaccaaatggattataagatgtttgagtctggagactaaatt

SEQ ID NO: 107030 - DNA, 76 bp, Homo sapiens
ttctccctggctttgcatgtgtcatcttaccaaatggattataagatgtttgagtctggagactaaattttattta

SEQ ID NO: 107031 - DNA, 77 bp, Homo sapiens
tttattattataatgcacaatatagccctgtgttcatagctggaatttaatacatgttagttgaataaacattgaag

SEQ ID NO: 107032 - DNA, 77 bp, Homo sapiens
cacaatatagccctgtgttcatagctggaatttaatacatgttagttgaataaacattgaaggatgaagtttcagat

SEQ ID NO: 107033 - DNA, 72 bp, Homo sapiens
ccctgtgttcatagctggaatttaatacatgttagttgaataaacattgaaggatgaagtttcagatttttt

SEQ ID NO: 107034 - DNA, 72 bp, Homo sapiens
gctggaatttaatacatgttagttgaataaacattgaaggatgaagtttcagatttttttggctaccattac

SEQ ID NO: 107035 - DNA, 77 bp, Homo sapiens
tacatgttagttgaataaacattgaaggatgaagtttcagatttttttggctaccattactctcagctatgttgatg

SEQ ID NO: 107036 - DNA, 77 bp, Homo sapiens
ttgaataaacattgaaggatgaagtttcagatttttttggctaccattactctcagctatgttgatgtaatgaaaca

SEQ ID NO: 107037 - DNA, 76 bp, Homo sapiens
taaacattgaaggatgaagtttcagatttttttggctaccattactctcagctatgttgatgtaatgaaacacgtg

SEQ ID NO: 107038 - DNA, 79 bp, Homo sapiens
tgaagtttcagatttttttggctaccattactctcagctatgttgatgtaatgaaacacgtgtgccatataaacatgta

SEQ ID NO: 107039 - DNA, 78 bp, Homo sapiens
gatttttttggctaccattactctcagctatgttgatgtaatgaaacacgtgtgccatataaacatgtatctatttac

SEQ ID NO: 107040 - DNA, 83 bp, Homo sapiens
ctaccattactctcagctatgttgatgtaatgaaacacgtgtgccatataaacatgtatctatttaccaatctgctgctcaaa

SEQ ID NO: 107041 - DNA, 82 bp, Homo sapiens
gctatgttgatgtaatgaaacacgtgtgccatataaacatgtatctatttaccaatctgctgctcaaattgatgacttttta

SEQ ID NO: 107042 - DNA, 79 bp, Homo sapiens
tgtaatgaaacacgtgtgccatataaacatgtatctatttaccaatctgctgctcaaattgatgactttttacaaggct

SEQ ID NO: 107043 - DNA, 77 bp, Homo sapiens
acgtgtgccatataaacatgtatctatttaccaatctgctgctcaaattgatgactttttacaaggcttctaggtgg

SEQ ID NO: 107044 - DNA, 75 bp, Homo sapiens
aaacatgtatctatttaccaatctgctgctcaaattgatgactttttacaaggcttctaggtggggcagctttta

SEQ ID NO: 107045 - DNA, 74 bp, Homo sapiens
atctatttaccaatctgctgctcaaattgatgactttttacaaggcttctaggtggggcagcttttagaataaa

SEQ ID NO: 107046 - DNA, 75 bp, Homo sapiens
accaatctgctgctcaaattgatgactttttacaaggcttctaggtggggcagcttttagaataaagatgaacac

SEQ ID NO: 107047 - DNA, 73 bp, Homo sapiens
actttttacaaggcttctaggtggggcagcttttagaataaagatgaacacccacacgcacactcttacatga

SEQ ID NO: 107048 - DNA, 76 bp, Homo sapiens
aaggcttctaggtggggcagcttttagaataaagatgaacacccacacgcacactcttacatgagtgactgaacaa

SEQ ID NO: 107049 - DNA, 79 bp, Homo sapiens
tggggcagcttttagaataaagatgaacacccacacgcacactcttacatgagtgactgaacaatctcacattttatta

SEQ ID NO: 107050 - DNA, 81 bp, Homo sapiens
taaagatgaacacccacacgcacactcttacatgagtgactgaacaatctcacattttattatttatagaaatacatgtga

SEQ ID NO: 107051 - DNA, 81 bp, Homo sapiens
ccacacgcacactcttacatgagtgactgaacaatctcacattttattatttatagaaatacatgtgaatatgctacaact

SEQ ID NO: 107052 - DNA, 80 bp, Homo sapiens
cgcacactcttacatgagtgactgaacaatctcacattttattatttatagaaatacatgtgaatatgctacaacttaat

SEQ ID NO: 107053 - DNA, 80 bp, Homo sapiens
catgagtgactgaacaatctcacattttattatttatagaaatacatgtgaatatgctacaacttaatttatttcctgca

SEQ ID NO: 107054 - DNA, 78 bp, Homo sapiens
actgaacaatctcacattttattatttatagaaatacatgtgaatatgctacaacttaatttatttcctgcaagcaga

SEQ ID NO: 107055 - DNA, 76 bp, Homo sapiens
tacatgtgaatatgctacaacttaatttatttcctgcaagcagaaatccttatcattataaggaagcccctgtctt

SEQ ID NO: 107056 - DNA, 73 bp, Homo sapiens
gaatatgctacaacttaatttatttcctgcaagcagaaatccttatcattataaggaagcccctgtcttttgt

SEQ ID NO: 107057 - DNA, 70 bp, Homo sapiens
caacttaatttatttcctgcaagcagaaatccttatcattataaggaagcccctgtcttttgtttttgtc

SEQ ID NO: 107058 - DNA, 70 bp, Homo sapiens
tatttcctgcaagcagaaatccttatcattataaggaagcccctgtcttttgtttttgtccattttttcc

SEQ ID NO: 107059 - DNA, 69 bp, Homo sapiens
agaaatccttatcattataaggaagcccctgtcttttgtttttgtccattttttcccctgatgtgttca

SEQ ID NO: 107060 - DNA, 70 bp, Homo sapiens
tccttatcattataaggaagcccctgtcttttgtttttgtccattttttcccctgatgtgttcataaaca

SEQ ID NO: 107061 - DNA, 71 bp, Homo sapiens
tataaggaagcccctgtcttttgtttttgtccattttttcccctgatgtgttcataaacatgtcccatgga

SEQ ID NO: 107062 - DNA, 76 bp, Homo sapiens
gtcttttgtttttgtccattttttcccctgatgtgttcataaacatgtcccatggatggcaggaatgcacagctat

SEQ ID NO: 107063 - DNA, 78 bp, Homo sapiens
ttttcccctgatgtgttcataaacatgtcccatggatggcaggaatgcacagctatttcactggtggtataaatagtt

SEQ ID NO: 107064 - DNA, 81 bp, Homo sapiens
cctgatgtgttcataaacatgtcccatggatggcaggaatgcacagctatttcactggtggtataaatagttttcacagaa

SEQ ID NO: 107065 - DNA, 79 bp, Homo sapiens
ataaacatgtcccatggatggcaggaatgcacagctatttcactggtggtataaatagttttcacagaagccctgtcta

SEQ ID NO: 107066 - DNA, 77 bp, Homo sapiens
aggaatgcacagctatttcactggtggtataaatagttttcacagaagccctgtctatcatggtaaatggcacaaaa

SEQ ID NO: 107067 - DNA, 72 bp, Homo sapiens
ggtataaatagttttcacagaagccctgtctatcatggtaaatggcacaaaagacttttttcctccacagaa

SEQ ID NO: 107068 - DNA, 71 bp, Homo sapiens
ttttcacagaagccctgtctatcatggtaaatggcacaaaagacttttttcctccacagaagcctttattt

SEQ ID NO: 107069 - DNA, 70 bp, Homo sapiens
ctgtctatcatggtaaatggcacaaaagacttttttcctccacagaagcctttatttttctccctgtatt

SEQ ID NO: 107070 - DNA, 69 bp, Homo sapiens
tatcatggtaaatggcacaaaagacttttttcctccacagaagcctttatttttctccctgtatttccc

SEQ ID NO: 107071 - DNA, 68 bp, Homo sapiens
aatggcacaaaagacttttttcctccacagaagcctttatttttctccctgtatttccctcagaggtc

SEQ ID NO: 107072 - DNA, 73 bp, Homo sapiens
tcctccacagaagcctttatttttctccctgtatttccctcagaggtccgccacagtctgaagggacttcaca

SEQ ID NO: 107073 - DNA, 75 bp, Homo sapiens
tttatttttctccctgtatttccctcagaggtccgccacagtctgaagggacttcacagctgtgctgtctacgaa

SEQ ID NO: 107074 - DNA, 76 bp, Homo sapiens
tccctgtatttccctcagaggtccgccacagtctgaagggacttcacagctgtgctgtctacgaacccactcctaa

SEQ ID NO: 107075 - DNA, 76 bp, Homo sapiens
tatttccctcagaggtccgccacagtctgaagggacttcacagctgtgctgtctacgaacccactcctaacttcca

SEQ ID NO: 107076 - DNA, 73 bp, Homo sapiens
agaggtccgccacagtctgaagggacttcacagctgtgctgtctacgaacccactcctaacttccaaactttc

SEQ ID NO: 107077 - DNA, 71 bp, Homo sapiens
agtctgaagggacttcacagctgtgctgtctacgaacccactcctaacttccaaactttcgccaaagtgtt

SEQ ID NO: 107078 - DNA, 69 bp, Homo sapiens
actcctaacttccaaactttcgccaaagtgtttcctctgaggtccttatagaagcgcttctggacaacg

SEQ ID NO: 107079 - DNA, 73 bp, Homo sapiens
ttccaaactttcgccaaagtgtttcctctgaggtccttatagaagcgcttctggacaacgtgggatgttgcta

SEQ ID NO: 107080 - DNA, 74 bp, Homo sapiens
tttcgccaaagtgtttcctctgaggtccttatagaagcgcttctggacaacgtgggatgttgctaacatttgga

SEQ ID NO: 107081 - DNA, 78 bp, Homo sapiens
tccttatagaagcgcttctggacaacgtgggatgttgctaacatttggaaagtgactgtcatgctgcgaggaagtatt

SEQ ID NO: 107082 - DNA, 80 bp, Homo sapiens
atagaagcgcttctggacaacgtgggatgttgctaacatttggaaagtgactgtcatgctgcgaggaagtatttgcaggc

SEQ ID NO: 107083 - DNA, 81 bp, Homo sapiens
ttctggacaacgtgggatgttgctaacatttggaaagtgactgtcatgctgcgaggaagtatttgcaggcctctgagttca

SEQ ID NO: 107084 - DNA, 81 bp, Homo sapiens
gatgttgctaacatttggaaagtgactgtcatgctgcgaggaagtatttgcaggcctctgagttcagtcctccgaggacat

SEQ ID NO: 107085 - DNA, 78 bp, Homo sapiens
acatttggaaagtgactgtcatgctgcgaggaagtatttgcaggcctctgagttcagtcctccgaggacatttcacct

SEQ ID NO: 107086 - DNA, 79 bp, Homo sapiens
aaagtgactgtcatgctgcgaggaagtatttgcaggcctctgagttcagtcctccgaggacatttcaccttctttgctc

SEQ ID NO: 107087 - DNA, 80 bp, Homo sapiens
ctgtcatgctgcgaggaagtatttgcaggcctctgagttcagtcctccgaggacatttcaccttctttgctctcgtccaa

SEQ ID NO: 107088 - DNA, 75 bp, Homo sapiens
aggaagtatttgcaggcctctgagttcagtcctccgaggacatttcaccttctttgctctcgtccaagccttaga

SEQ ID NO: 107089 - DNA, 76 bp, Homo sapiens
atttgcaggcctctgagttcagtcctccgaggacatttcaccttctttgctctcgtccaagccttagaccccagca

SEQ ID NO: 107090 - DNA, 77 bp, Homo sapiens
tctgagttcagtcctccgaggacatttcaccttctttgctctcgtccaagccttagaccccagcacccagtcagctc

SEQ ID NO: 107091 - DNA, 73 bp, Homo sapiens
agtcctccgaggacatttcaccttctttgctctcgtccaagccttagaccccagcacccagtcagctcccctc

SEQ ID NO: 107092 - DNA, 71 bp, Homo sapiens
atttcaccttctttgctctcgtccaagccttagaccccagcacccagtcagctcccctcctgtgggttttc

SEQ ID NO: 107093 - DNA, 72 bp, Homo sapiens
tttgctctcgtccaagccttagaccccagcacccagtcagctcccctcctgtgggttttccgggctgctgtt

SEQ ID NO: 107094 - DNA, 73 bp, Homo sapiens
cttagaccccagcacccagtcagctcccctcctgtgggttttccgggctgctgtttcatctctctccccatta

SEQ ID NO: 107095 - DNA, 73 bp, Homo sapiens
agctcccctcctgtgggttttccgggctgctgtttcatctctctccccattaccctcatcatccccactccca

SEQ ID NO: 107096 - DNA, 73 bp, Homo sapiens
tttccgggctgctgtttcatctctctccccattaccctcatcatccccactcccaccccgacataaattcaaa

SEQ ID NO: 107097 - DNA, 70 bp, Homo sapiens
tttcatctctctccccattaccctcatcatccccactcccaccccgacataaattcaaaagaaatctttt

SEQ ID NO: 107098 - DNA, 68 bp, Homo sapiens
tctctctccccattaccctcatcatccccactcccaccccgacataaattcaaaagaaatcttttttt

SEQ ID NO: 107099 - DNA, 69 bp, Homo sapiens
ttttgggggggggtttcacttttgaaatgaaggctcatatttcagctctagatttagaataggtaaata

SEQ ID NO: 107100 - DNA, 68 bp, Homo sapiens
gggggggtttcacttttgaaatgaaggctcatatttcagctctagatttagaataggtaaatattttt

SEQ ID NO: 107101 - DNA, 70 bp, Homo sapiens
tttttaaaaaatcatttcttcatataaattaaaaagccaaacatcaataagccaaacatcaatagcaacg

SEQ ID NO: 107102 - DNA, 75 bp, Homo sapiens
ttcttcatataaattaaaaagccaaacatcaataagccaaacatcaatagcaacggcaacacctctccaacaaca

SEQ ID NO: 107103 - DNA, 75 bp, Homo sapiens
aattaaaaagccaaacatcaataagccaaacatcaatagcaacggcaacacctctccaacaacagctgcagaaat

SEQ ID NO: 107104 - DNA, 79 bp, Homo sapiens
aacatcaataagccaaacatcaatagcaacggcaacacctctccaacaacagctgcagaaattgccaacgtgcacctaa

SEQ ID NO: 107105 - DNA, 78 bp, Homo sapiens
aataagccaaacatcaatagcaacggcaacacctctccaacaacagctgcagaaattgccaacgtgcacctaacctga

SEQ ID NO: 107106 - DNA, 77 bp, Homo sapiens
acatcaatagcaacggcaacacctctccaacaacagctgcagaaattgccaacgtgcacctaacctgacctcacggg

SEQ ID NO: 107107 - DNA, 75 bp, Homo sapiens
aacggcaacacctctccaacaacagctgcagaaattgccaacgtgcacctaacctgacctcacggggccatgccg

SEQ ID NO: 107108 - DNA, 75 bp, Homo sapiens
tccaacaacagctgcagaaattgccaacgtgcacctaacctgacctcacggggccatgccgggggccttgtggaa

SEQ ID NO: 107109 - DNA, 75 bp, Homo sapiens
agctgcagaaattgccaacgtgcacctaacctgacctcacggggccatgccgggggccttgtggaagaggatcag

SEQ ID NO: 107110 - DNA, 73 bp, Homo sapiens
agaaattgccaacgtgcacctaacctgacctcacggggccatgccgggggccttgtggaagaggatcagtcca

SEQ ID NO: 107111 - DNA, 74 bp, Homo sapiens
aacgtgcacctaacctgacctcacggggccatgccgggggccttgtggaagaggatcagtccatctctgcccca

SEQ ID NO: 107112 - DNA, 76 bp, Homo sapiens
taacctgacctcacggggccatgccgggggccttgtggaagaggatcagtccatctctgccccacctcaagcaaga

SEQ ID NO: 107113 - DNA, 79 bp, Homo sapiens
gggccatgccgggggccttgtggaagaggatcagtccatctctgccccacctcaagcaagagtgacttgcatttcattc

SEQ ID NO: 107114 - DNA, 80 bp, Homo sapiens
gggggccttgtggaagaggatcagtccatctctgccccacctcaagcaagagtgacttgcatttcattcctctgtattca

SEQ ID NO: 107115 - DNA, 82 bp, Homo sapiens
ccttgtggaagaggatcagtccatctctgccccacctcaagcaagagtgacttgcatttcattcctctgtattcattctctc

SEQ ID NO: 107116 - DNA, 82 bp, Homo sapiens
ttgtggaagaggatcagtccatctctgccccacctcaagcaagagtgacttgcatttcattcctctgtattcattctctcgg

SEQ ID NO: 107117 - DNA, 78 bp, Homo sapiens
aggatcagtccatctctgccccacctcaagcaagagtgacttgcatttcattcctctgtattcattctctcggggttt

SEQ ID NO: 107118 - DNA, 75 bp, Homo sapiens
cccacctcaagcaagagtgacttgcatttcattcctctgtattcattctctcggggttttcagccacaaaagtac

SEQ ID NO: 107119 - DNA, 76 bp, Homo sapiens
ctcaagcaagagtgacttgcatttcattcctctgtattcattctctcggggttttcagccacaaaagtactttata

SEQ ID NO: 107120 - DNA, 74 bp, Homo sapiens
aagcaagagtgacttgcatttcattcctctgtattcattctctcggggttttcagccacaaaagtactttataa

SEQ ID NO: 107121 - DNA, 72 bp, Homo sapiens
aagagtgacttgcatttcattcctctgtattcattctctcggggttttcagccacaaaagtactttataaaa

SEQ ID NO: 107122 - DNA, 71 bp, Homo sapiens
agtgacttgcatttcattcctctgtattcattctctcggggttttcagccacaaaagtactttataaaagt

SEQ ID NO: 107123 - DNA, 73 bp, Homo sapiens
tgtattcattctctcggggttttcagccacaaaagtactttataaaagttctgtataggaacaggctctgaga

SEQ ID NO: 107124 - DNA, 73 bp, Homo sapiens
gttttcagccacaaaagtactttataaaagttctgtataggaacaggctctgagaggagaatttctcagaaga

SEQ ID NO: 107125 - DNA, 71 bp, Homo sapiens
acaaaagtactttataaaagttctgtataggaacaggctctgagaggagaatttctcagaagaggtccaag

SEQ ID NO: 107126 - DNA, 74 bp, Homo sapiens
taaaagttctgtataggaacaggctctgagaggagaatttctcagaagaggtccaaggtgctttgcttaaatta

SEQ ID NO: 107127 - DNA, 76 bp, Homo sapiens
tgtataggaacaggctctgagaggagaatttctcagaagaggtccaaggtgctttgcttaaattactcaaggttca

SEQ ID NO: 107128 - DNA, 76 bp, Homo sapiens
aacaggctctgagaggagaatttctcagaagaggtccaaggtgctttgcttaaattactcaaggttcaggctctca

SEQ ID NO: 107129 - DNA, 73 bp, Homo sapiens
agaggagaatttctcagaagaggtccaaggtgctttgcttaaattactcaaggttcaggctctcagggacagg

SEQ ID NO: 107130 - DNA, 76 bp, Homo sapiens
atttctcagaagaggtccaaggtgctttgcttaaattactcaaggttcaggctctcagggacagggccatggctca

SEQ ID NO: 107131 - DNA, 77 bp, Homo sapiens
agaggtccaaggtgctttgcttaaattactcaaggttcaggctctcagggacagggccatggctcacaggcatttgc

SEQ ID NO: 107132 - DNA, 80 bp, Homo sapiens
tttgcttaaattactcaaggttcaggctctcagggacagggccatggctcacaggcatttgctctggggctgtgagaatg

SEQ ID NO: 107133 - DNA, 80 bp, Homo sapiens
ttaaattactcaaggttcaggctctcagggacagggccatggctcacaggcatttgctctggggctgtgagaatgtggga

SEQ ID NO: 107134 - DNA, 85 bp, Homo sapiens
ttcaggctctcagggacagggccatggctcacaggcatttgctctggggctgtgagaatgtgggatgagaatgaggtggtatcat

SEQ ID NO: 107135 - DNA, 85 bp, Homo sapiens
tcagggacagggccatggctcacaggcatttgctctggggctgtgagaatgtgggatgagaatgaggtggtatcatttgtggatg

SEQ ID NO: 107136 - DNA, 86 bp, Homo sapiens
gccatggctcacaggcatttgctctggggctgtgagaatgtgggatgagaatgaggtggtatcatttgtggatgtgatggtctacc

SEQ ID NO: 107137 - DNA, 81 bp, Homo sapiens
acaggcatttgctctggggctgtgagaatgtgggatgagaatgaggtggtatcatttgtggatgtgatggtctacccttcc

SEQ ID NO: 107138 - DNA, 79 bp, Homo sapiens
atttgctctggggctgtgagaatgtgggatgagaatgaggtggtatcatttgtggatgtgatggtctacccttccctaa

SEQ ID NO: 107139 - DNA, 77 bp, Homo sapiens
tgtgagaatgtgggatgagaatgaggtggtatcatttgtggatgtgatggtctacccttccctaatttcctaatttg

SEQ ID NO: 107140 - DNA, 74 bp, Homo sapiens
atgtgggatgagaatgaggtggtatcatttgtggatgtgatggtctacccttccctaatttcctaatttgggaa

SEQ ID NO: 107141 - DNA, 75 bp, Homo sapiens
atgaggtggtatcatttgtggatgtgatggtctacccttccctaatttcctaatttgggaatgactgattgacaa

SEQ ID NO: 107142 - DNA, 75 bp, Homo sapiens
gtggtatcatttgtggatgtgatggtctacccttccctaatttcctaatttgggaatgactgattgacaaggatg

SEQ ID NO: 107143 - DNA, 73 bp, Homo sapiens
ttgtggatgtgatggtctacccttccctaatttcctaatttgggaatgactgattgacaaggatggggctacc

SEQ ID NO: 107144 - DNA, 74 bp, Homo sapiens
cttccctaatttcctaatttgggaatgactgattgacaaggatggggctacctggagagctaggacagtacaga

SEQ ID NO: 107145 - DNA, 77 bp, Homo sapiens
tttcctaatttgggaatgactgattgacaaggatggggctacctggagagctaggacagtacagagcagaccactta

SEQ ID NO: 107146 - DNA, 79 bp, Homo sapiens
aatgactgattgacaaggatggggctacctggagagctaggacagtacagagcagaccacttacagcccatctccaggg

SEQ ID NO: 107147 - DNA, 78 bp, Homo sapiens
ttgacaaggatggggctacctggagagctaggacagtacagagcagaccacttacagcccatctccagggtgcctaaa

SEQ ID NO: 107148 - DNA, 75 bp, Homo sapiens
atggggctacctggagagctaggacagtacagagcagaccacttacagcccatctccagggtgcctaaacaaggg

SEQ ID NO: 107149 - DNA, 78 bp, Homo sapiens
gagagctaggacagtacagagcagaccacttacagcccatctccagggtgcctaaacaaggggatgtgcagaatttct

SEQ ID NO: 107150 - DNA, 76 bp, Homo sapiens
taggacagtacagagcagaccacttacagcccatctccagggtgcctaaacaaggggatgtgcagaatttctttct

SEQ ID NO: 107151 - DNA, 72 bp, Homo sapiens
actgtgcccggccgggatgtgcagaatttcttgcctggagatgttcatttatttccttccctaccccatccc

SEQ ID NO: 107152 - DNA, 71 bp, Homo sapiens
ggccgggatgtgcagaatttcttgcctggagatgttcatttatttccttccctaccccatccccccaaaca

SEQ ID NO: 107153 - DNA, 74 bp, Homo sapiens
atgtgcagaatttcttgcctggagatgttcatttatttccttccctaccccatccccccaaacagctacactgc

SEQ ID NO: 107154 - DNA, 72 bp, Homo sapiens
ttcttgcctggagatgttcatttatttccttccctaccccatccccccaaacagctacactgcctggagatt

SEQ ID NO: 107155 - DNA, 70 bp, Homo sapiens
agatgttcatttatttccttccctaccccatccccccaaacagctacactgcctggagatttggaagaaa

SEQ ID NO: 107156 - DNA, 70 bp, Homo sapiens
atttatttccttccctaccccatccccccaaacagctacactgcctggagatttggaagaaagagatgaa

SEQ ID NO: 107157 - DNA, 76 bp, Homo sapiens
taccccatccccccaaacagctacactgcctggagatttggaagaaagagatgaacagatgtgtgtgatgttttag

SEQ ID NO: 107158 - DNA, 77 bp, Homo sapiens
ccccaaacagctacactgcctggagatttggaagaaagagatgaacagatgtgtgtgatgttttagttacatttgac

SEQ ID NO: 107159 - DNA, 77 bp, Homo sapiens
aacagctacactgcctggagatttggaagaaagagatgaacagatgtgtgtgatgttttagttacatttgacctaaa

SEQ ID NO: 107160 - DNA, 74 bp, Homo sapiens
ctgcctggagatttggaagaaagagatgaacagatgtgtgtgatgttttagttacatttgacctaaaagtgggg

SEQ ID NO: 107161 - DNA, 75 bp, Homo sapiens
gaagaaagagatgaacagatgtgtgtgatgttttagttacatttgacctaaaagtgggggaaatgagctaaatga

SEQ ID NO: 107162 - DNA, 74 bp, Homo sapiens
atgaacagatgtgtgtgatgttttagttacatttgacctaaaagtgggggaaatgagctaaatgacacaccaaa

SEQ ID NO: 107163 - DNA, 68 bp, Homo sapiens
gttttagttacatttgacctaaaagtgggggaaatgagctaaatgacacaccaaagtccttttcacta

SEQ ID NO: 107164 - DNA, 68 bp, Homo sapiens
atttgacctaaaagtgggggaaatgagctaaatgacacaccaaagtccttttcactaaacaaccagta

SEQ ID NO: 107165 - DNA, 69 bp, Homo sapiens
acctaaaagtgggggaaatgagctaaatgacacaccaaagtccttttcactaaacaaccagtatcagta

SEQ ID NO: 107166 - DNA, 73 bp, Homo sapiens
gaaatgagctaaatgacacaccaaagtccttttcactaaacaaccagtatcagtagagcaagttgtttaaata

SEQ ID NO: 107167 - DNA, 73 bp, Homo sapiens
agctaaatgacacaccaaagtccttttcactaaacaaccagtatcagtagagcaagttgtttaaatattgcca

SEQ ID NO: 107168 - DNA, 73 bp, Homo sapiens
caaagtccttttcactaaacaaccagtatcagtagagcaagttgtttaaatattgccattagcccacttctga

SEQ ID NO: 107169 - DNA, 74 bp, Homo sapiens
ttttcactaaacaaccagtatcagtagagcaagttgtttaaatattgccattagcccacttctgaggcttactg

SEQ ID NO: 107170 - DNA, 74 bp, Homo sapiens
acaaccagtatcagtagagcaagttgtttaaatattgccattagcccacttctgaggcttactggagagtttta

SEQ ID NO: 107171 - DNA, 72 bp, Homo sapiens
gttgtttaaatattgccattagcccacttctgaggcttactggagagttttactaatggcaagattcaaaaa

SEQ ID NO: 107172 - DNA, 73 bp, Homo sapiens
ttaaatattgccattagcccacttctgaggcttactggagagttttactaatggcaagattcaaaaacagtaa

SEQ ID NO: 107173 - DNA, 72 bp, Homo sapiens
attagcccacttctgaggcttactggagagttttactaatggcaagattcaaaaacagtaacctctgtctta

SEQ ID NO: 107174 - DNA, 73 bp, Homo sapiens
acttctgaggcttactggagagttttactaatggcaagattcaaaaacagtaacctctgtcttattgaataga

SEQ ID NO: 107175 - DNA, 72 bp, Homo sapiens
cttactggagagttttactaatggcaagattcaaaaacagtaacctctgtcttattgaatagacgctcccca

SEQ ID NO: 107176 - DNA, 76 bp, Homo sapiens
ttttactaatggcaagattcaaaaacagtaacctctgtcttattgaatagacgctccccagctgctgaactgtgaa

SEQ ID NO: 107177 - DNA, 74 bp, Homo sapiens
aagattcaaaaacagtaacctctgtcttattgaatagacgctccccagctgctgaactgtgaagttaatttctg

SEQ ID NO: 107178 - DNA, 72 bp, Homo sapiens
aaaaacagtaacctctgtcttattgaatagacgctccccagctgctgaactgtgaagttaatttctggaaag

SEQ ID NO: 107179 - DNA, 77 bp, Homo sapiens
tctgtcttattgaatagacgctccccagctgctgaactgtgaagttaatttctggaaagtgaattgtgtttgtcatt

SEQ ID NO: 107180 - DNA, 75 bp, Homo sapiens
ttattgaatagacgctccccagctgctgaactgtgaagttaatttctggaaagtgaattgtgtttgtcattttta

SEQ ID NO: 107181 - DNA, 72 bp, Homo sapiens
agacgctccccagctgctgaactgtgaagttaatttctggaaagtgaattgtgtttgtcatttttaaaaata

SEQ ID NO: 107182 - DNA, 76 bp, Homo sapiens
tgtcatttttaaaaatacaattttctgtaataaaagcagagatgcaaccttcagcagagaaacattccaatgtggc

SEQ ID NO: 107183 - DNA, 76 bp, Homo sapiens
aattttctgtaataaaagcagagatgcaaccttcagcagagaaacattccaatgtggctgggttgaatgctttgtt

SEQ ID NO: 107184 - DNA, 79 bp, Homo sapiens
aataaaagcagagatgcaaccttcagcagagaaacattccaatgtggctgggttgaatgctttgtttggctgaggaatg

SEQ ID NO: 107185 - DNA, 78 bp, Homo sapiens
agatgcaaccttcagcagagaaacattccaatgtggctgggttgaatgctttgtttggctgaggaatggttaaagtga

SEQ ID NO: 107186 - DNA, 75 bp, Homo sapiens
accttcagcagagaaacattccaatgtggctgggttgaatgctttgtttggctgaggaatggttaaagtgatgtt

SEQ ID NO: 107187 - DNA, 75 bp, Homo sapiens
agaaacattccaatgtggctgggttgaatgctttgtttggctgaggaatggttaaagtgatgtttgaggatgtaa

SEQ ID NO: 107188 - DNA, 77 bp, Homo sapiens
ttgaatgctttgtttggctgaggaatggttaaagtgatgtttgaggatgtaacctaccagtggaatgaggcaagaga

SEQ ID NO: 107189 - DNA, 73 bp, Homo sapiens
tttgtttggctgaggaatggttaaagtgatgtttgaggatgtaacctaccagtggaatgaggcaagagaactt

SEQ ID NO: 107190 - DNA, 73 bp, Homo sapiens
aggaatggttaaagtgatgtttgaggatgtaacctaccagtggaatgaggcaagagaactttgcttactacat

SEQ ID NO: 107191 - DNA, 75 bp, Homo sapiens
tggttaaagtgatgtttgaggatgtaacctaccagtggaatgaggcaagagaactttgcttactacattggcctc

SEQ ID NO: 107192 - DNA, 74 bp, Homo sapiens
tgtttgaggatgtaacctaccagtggaatgaggcaagagaactttgcttactacattggcctcccctaggtgta

SEQ ID NO: 107193 - DNA, 71 bp, Homo sapiens
taacctaccagtggaatgaggcaagagaactttgcttactacattggcctcccctaggtgtacttgttaat

SEQ ID NO: 107194 - DNA, 71 bp, Homo sapiens
tggaatgaggcaagagaactttgcttactacattggcctcccctaggtgtacttgttaattaagagtaaaa

SEQ ID NO: 107195 - DNA, 68 bp, Homo sapiens
caagagaactttgcttactacattggcctcccctaggtgtacttgttaattaagagtaaaaccacgaa

SEQ ID NO: 107196 - DNA, 66 bp, Homo sapiens
aactttgcttactacattggcctcccctaggtgtacttgttaattaagagtaaaaccacgaaggta

SEQ ID NO: 107197 - DNA, 67 bp, Homo sapiens
tactacattggcctcccctaggtgtacttgttaattaagagtaaaaccacgaaggtagctccaaccc

SEQ ID NO: 107198 - DNA, 70 bp, Homo sapiens
ccctaggtgtacttgttaattaagagtaaaaccacgaaggtagctccaaccccaatcgctgtggatgcca

SEQ ID NO: 107199 - DNA, 70 bp, Homo sapiens
ggtgtacttgttaattaagagtaaaaccacgaaggtagctccaaccccaatcgctgtggatgccacaccc

SEQ ID NO: 107200 - DNA, 81 bp, Homo sapiens
aaggtagctccaaccccaatcgctgtggatgccacacccgcgccagcgagggcaggctgatagaggctgtgctaagattgc

SEQ ID NO: 107201 - DNA, 84 bp, Homo sapiens
cccaatcgctgtggatgccacacccgcgccagcgagggcaggctgatagaggctgtgctaagattgccgtcctgtcacagcgtg

SEQ ID NO: 107202 - DNA, 78 bp, Homo sapiens
agcgagggcaggctgatagaggctgtgctaagattgccgtcctgtcacagcgtggagtgggagtgggaagggggcctc

SEQ ID NO: 107203 - DNA, 78 bp, Homo sapiens
aggctgatagaggctgtgctaagattgccgtcctgtcacagcgtggagtgggagtgggaagggggcctcctactctca

SEQ ID NO: 107204 - DNA, 76 bp, Homo sapiens
taagattgccgtcctgtcacagcgtggagtgggagtgggaagggggcctcctactctcatcgttagccaacgcaca

SEQ ID NO: 107205 - DNA, 77 bp, Homo sapiens
gtcctgtcacagcgtggagtgggagtgggaagggggcctcctactctcatcgttagccaacgcacaacatatgttca

SEQ ID NO: 107206 - DNA, 76 bp, Homo sapiens
agcgtggagtgggagtgggaagggggcctcctactctcatcgttagccaacgcacaacatatgttcactagtcata

SEQ ID NO: 107207 - DNA, 77 bp, Homo sapiens
gagtgggaagggggcctcctactctcatcgttagccaacgcacaacatatgttcactagtcatatcctttctgtcaa

SEQ ID NO: 107208 - DNA, 78 bp, Homo sapiens
ggggcctcctactctcatcgttagccaacgcacaacatatgttcactagtcatatcctttctgtcaagcaaggaacta

SEQ ID NO: 107209 - DNA, 79 bp, Homo sapiens
tcctactctcatcgttagccaacgcacaacatatgttcactagtcatatcctttctgtcaagcaaggaactaggccctg

SEQ ID NO: 107210 - DNA, 77 bp, Homo sapiens
aacgcacaacatatgttcactagtcatatcctttctgtcaagcaaggaactaggccctgggagtacaaggatgaata

SEQ ID NO: 107211 - DNA, 76 bp, Homo sapiens
atatgttcactagtcatatcctttctgtcaagcaaggaactaggccctgggagtacaaggatgaataatacacgag

SEQ ID NO: 107212 - DNA, 72 bp, Homo sapiens
tttctgtcaagcaaggaactaggccctgggagtacaaggatgaataatacacgaggcccttcttcaaggaat

SEQ ID NO: 107213 - DNA, 70 bp, Homo sapiens
ccctgggagtacaaggatgaataatacacgaggcccttcttcaaggaatttatagatccttcaggtaaac

SEQ ID NO: 107214 - DNA, 74 bp, Homo sapiens
agtacaaggatgaataatacacgaggcccttcttcaaggaatttatagatccttcaggtaaaccatgtgatgtc

SEQ ID NO: 107215 - DNA, 73 bp, Homo sapiens
atgaataatacacgaggcccttcttcaaggaatttatagatccttcaggtaaaccatgtgatgtccctccgaa

SEQ ID NO: 107216 - DNA, 81 bp, Homo sapiens
taaaccatgtgatgtccctccgaactgactggcataaagcggatgatggggctttgacatcttgtgctgagaataacagaa

SEQ ID NO: 107217 - DNA, 81 bp, Homo sapiens
atgtccctccgaactgactggcataaagcggatgatggggctttgacatcttgtgctgagaataacagaatcacggctgaa

SEQ ID NO: 107218 - DNA, 84 bp, Homo sapiens
aactgactggcataaagcggatgatggggctttgacatcttgtgctgagaataacagaatcacggctgaactgacatcatagga

SEQ ID NO: 107219 - DNA, 83 bp, Homo sapiens
atggggctttgacatcttgtgctgagaataacagaatcacggctgaactgacatcataggatcatagaattttataacatgaa

SEQ ID NO: 107220 - DNA, 85 bp, Homo sapiens
tttgacatcttgtgctgagaataacagaatcacggctgaactgacatcataggatcatagaattttataacatgaagcagcctta

SEQ ID NO: 107221 - DNA, 84 bp, Homo sapiens
ttgtgctgagaataacagaatcacggctgaactgacatcataggatcatagaattttataacatgaagcagccttagagatcgt

SEQ ID NO: 107222 - DNA, 81 bp, Homo sapiens
taacagaatcacggctgaactgacatcataggatcatagaattttataacatgaagcagccttagagatcgttcaccaaat

SEQ ID NO: 107223 - DNA, 79 bp, Homo sapiens
ggctgaactgacatcataggatcatagaattttataacatgaagcagccttagagatcgttcaccaaattgagttaaaa

SEQ ID NO: 107224 - DNA, 74 bp, Homo sapiens
aggatcatagaattttataacatgaagcagccttagagatcgttcaccaaattgagttaaaattaaatgattgt

SEQ ID NO: 107225 - DNA, 73 bp, Homo sapiens
tttataacatgaagcagccttagagatcgttcaccaaattgagttaaaattaaatgattgttatagttcctta

SEQ ID NO: 107226 - DNA, 73 bp, Homo sapiens
gaagcagccttagagatcgttcaccaaattgagttaaaattaaatgattgttatagttccttataaactgcca

SEQ ID NO: 107227 - DNA, 72 bp, Homo sapiens
gccttagagatcgttcaccaaattgagttaaaattaaatgattgttatagttccttataaactgccaaatgc

SEQ ID NO: 107228 - DNA, 70 bp, Homo sapiens
atcgttcaccaaattgagttaaaattaaatgattgttatagttccttataaactgccaaatgctaaacaa

SEQ ID NO: 107229 - DNA, 71 bp, Homo sapiens
gagttaaaattaaatgattgttatagttccttataaactgccaaatgctaaacaaacatgattattatttg

SEQ ID NO: 107230 - DNA, 72 bp, Homo sapiens
ttaaatgattgttatagttccttataaactgccaaatgctaaacaaacatgattattatttggtggaagccc

SEQ ID NO: 107231 - DNA, 70 bp, Homo sapiens
gttatagttccttataaactgccaaatgctaaacaaacatgattattatttggtggaagcccctcaggtt

SEQ ID NO: 107232 - DNA, 70 bp, Homo sapiens
gttccttataaactgccaaatgctaaacaaacatgattattatttggtggaagcccctcaggttttggaa

SEQ ID NO: 107233 - DNA, 73 bp, Homo sapiens
ccaaatgctaaacaaacatgattattatttggtggaagcccctcaggttttggaaggagagagactgatacaa

SEQ ID NO: 107234 - DNA, 71 bp, Homo sapiens
taaacaaacatgattattatttggtggaagcccctcaggttttggaaggagagagactgatacaaagttaa

SEQ ID NO: 107235 - DNA, 74 bp, Homo sapiens
atgattattatttggtggaagcccctcaggttttggaaggagagagactgatacaaagttaagtcattgcaaca

SEQ ID NO: 107236 - DNA, 73 bp, Homo sapiens
tatttggtggaagcccctcaggttttggaaggagagagactgatacaaagttaagtcattgcaacaggtcttc

SEQ ID NO: 107237 - DNA, 75 bp, Homo sapiens
cctcaggttttggaaggagagagactgatacaaagttaagtcattgcaacaggtcttctagctacagtgttatag

SEQ ID NO: 107238 - DNA, 77 bp, Homo sapiens
ttttggaaggagagagactgatacaaagttaagtcattgcaacaggtcttctagctacagtgttataggtatagcta

SEQ ID NO: 107239 - DNA, 79 bp, Homo sapiens
agagagactgatacaaagttaagtcattgcaacaggtcttctagctacagtgttataggtatagctacattgttacaca

SEQ ID NO: 107240 - DNA, 77 bp, Homo sapiens
caaagttaagtcattgcaacaggtcttctagctacagtgttataggtatagctacattgttacacagctacattgtt

SEQ ID NO: 107241 - DNA, 78 bp, Homo sapiens
ttaagtcattgcaacaggtcttctagctacagtgttataggtatagctacattgttacacagctacattgtttaacat

SEQ ID NO: 107242 - DNA, 75 bp, Homo sapiens
aacaggtcttctagctacagtgttataggtatagctacattgttacacagctacattgtttaacattcataaccc

SEQ ID NO: 107243 - DNA, 76 bp, Homo sapiens
gctacagtgttataggtatagctacattgttacacagctacattgtttaacattcataacccgcatcttattttgt

SEQ ID NO: 107244 - DNA, 74 bp, Homo sapiens
agtgttataggtatagctacattgttacacagctacattgtttaacattcataacccgcatcttattttgttgt

SEQ ID NO: 107245 - DNA, 74 bp, Homo sapiens
agctacattgttacacagctacattgtttaacattcataacccgcatcttattttgttgtttagtacacataag

SEQ ID NO: 107246 - DNA, 72 bp, Homo sapiens
gttacacagctacattgtttaacattcataacccgcatcttattttgttgtttagtacacataagtaatatt

SEQ ID NO: 107247 - DNA, 70 bp, Homo sapiens
agctacattgtttaacattcataacccgcatcttattttgttgtttagtacacataagtaatattttatt

SEQ ID NO: 107248 - DNA, 70 bp, Homo sapiens
ttatttttcaaattatattataaataacagaaattatgagaaagaaactgtattgaggaaatatgggaaa

SEQ ID NO: 107249 - DNA, 69 bp, Homo sapiens
aattatattataaataacagaaattatgagaaagaaactgtattgaggaaatatgggaaagtaattttg

SEQ ID NO: 107250 - DNA, 74 bp, Homo sapiens
taaataacagaaattatgagaaagaaactgtattgaggaaatatgggaaagtaattttgtactgcagatctaga

SEQ ID NO: 107251 - DNA, 76 bp, Homo sapiens
cagaaattatgagaaagaaactgtattgaggaaatatgggaaagtaattttgtactgcagatctagagtataatga

SEQ ID NO: 107252 - DNA, 74 bp, Homo sapiens
atgagaaagaaactgtattgaggaaatatgggaaagtaattttgtactgcagatctagagtataatgaacaaaa

SEQ ID NO: 107253 - DNA, 76 bp, Homo sapiens
ctgtattgaggaaatatgggaaagtaattttgtactgcagatctagagtataatgaacaaaaagagcctataagca

SEQ ID NO: 107254 - DNA, 73 bp, Homo sapiens
ggaaatatgggaaagtaattttgtactgcagatctagagtataatgaacaaaaagagcctataagcaaaaaga

SEQ ID NO: 107255 - DNA, 74 bp, Homo sapiens
ggaaagtaattttgtactgcagatctagagtataatgaacaaaaagagcctataagcaaaaagattcaagctct

SEQ ID NO: 107256 - DNA, 76 bp, Homo sapiens
tactgcagatctagagtataatgaacaaaaagagcctataagcaaaaagattcaagctcttaacaaggaaatgcct

SEQ ID NO: 107257 - DNA, 75 bp, Homo sapiens
gatctagagtataatgaacaaaaagagcctataagcaaaaagattcaagctcttaacaaggaaatgccttgtaca

SEQ ID NO: 107258 - DNA, 76 bp, Homo sapiens
tgaacaaaaagagcctataagcaaaaagattcaagctcttaacaaggaaatgccttgtacataactgcacatatag

SEQ ID NO: 107259 - DNA, 75 bp, Homo sapiens
aaaaagagcctataagcaaaaagattcaagctcttaacaaggaaatgccttgtacataactgcacatataggctg

SEQ ID NO: 107260 - DNA, 78 bp, Homo sapiens
tcagaaaaaaattgcacacatagttaggtgatgacttagttacatttcagagaggatatgtggtaggcagagtacctg

SEQ ID NO: 107261 - DNA, 78 bp, Homo sapiens
aaaaattgcacacatagttaggtgatgacttagttacatttcagagaggatatgtggtaggcagagtacctgtggatg

SEQ ID NO: 107262 - DNA, 76 bp, Homo sapiens
acatagttaggtgatgacttagttacatttcagagaggatatgtggtaggcagagtacctgtggatggccccccaa

SEQ ID NO: 107263 - DNA, 75 bp, Homo sapiens
aggtgatgacttagttacatttcagagaggatatgtggtaggcagagtacctgtggatggccccccaagatttcc

SEQ ID NO: 107264 - DNA, 75 bp, Homo sapiens
ttagttacatttcagagaggatatgtggtaggcagagtacctgtggatggccccccaagatttcccaccataaga

SEQ ID NO: 107265 - DNA, 75 bp, Homo sapiens
ttcagagaggatatgtggtaggcagagtacctgtggatggccccccaagatttcccaccataagacccacaggtg

SEQ ID NO: 107266 - DNA, 76 bp, Homo sapiens
tggtaggcagagtacctgtggatggccccccaagatttcccaccataagacccacaggtgtccatctctgtgctaa

SEQ ID NO: 107267 - DNA, 74 bp, Homo sapiens
agagtacctgtggatggccccccaagatttcccaccataagacccacaggtgtccatctctgtgctaacttcca

SEQ ID NO: 107268 - DNA, 74 bp, Homo sapiens
tggatggccccccaagatttcccaccataagacccacaggtgtccatctctgtgctaacttccagcgtggttta

SEQ ID NO: 107269 - DNA, 75 bp, Homo sapiens
caagatttcccaccataagacccacaggtgtccatctctgtgctaacttccagcgtggtttaggggaggcactga

SEQ ID NO: 107270 - DNA, 75 bp, Homo sapiens
tttcccaccataagacccacaggtgtccatctctgtgctaacttccagcgtggtttaggggaggcactgacactc

SEQ ID NO: 107271 - DNA, 78 bp, Homo sapiens
gtgtccatctctgtgctaacttccagcgtggtttaggggaggcactgacactctgcagaatcccagaaaatataatta

SEQ ID NO: 107272 - DNA, 74 bp, Homo sapiens
tgctaacttccagcgtggtttaggggaggcactgacactctgcagaatcccagaaaatataattaaagttctgt

SEQ ID NO: 107273 - DNA, 73 bp, Homo sapiens
ttccagcgtggtttaggggaggcactgacactctgcagaatcccagaaaatataattaaagttctgtttataa

SEQ ID NO: 107274 - DNA, 71 bp, Homo sapiens
gtttaggggaggcactgacactctgcagaatcccagaaaatataattaaagttctgtttataaatccttta

SEQ ID NO: 107275 - DNA, 74 bp, Homo sapiens
gaggcactgacactctgcagaatcccagaaaatataattaaagttctgtttataaatcctttattgacatttag

SEQ ID NO: 107276 - DNA, 75 bp, Homo sapiens
tgcagaatcccagaaaatataattaaagttctgtttataaatcctttattgacatttagtgaacgattgcagtgc

SEQ ID NO: 107277 - DNA, 74 bp, Homo sapiens
ccagaaaatataattaaagttctgtttataaatcctttattgacatttagtgaacgattgcagtgctactgatg

SEQ ID NO: 107278 - DNA, 75 bp, Homo sapiens
aattaaagttctgtttataaatcctttattgacatttagtgaacgattgcagtgctactgatgtagtgctcttta

SEQ ID NO: 107279 - DNA, 80 bp, Homo sapiens
ctgtttataaatcctttattgacatttagtgaacgattgcagtgctactgatgtagtgctctttaatagctcattatgaa

SEQ ID NO: 107280 - DNA, 78 bp, Homo sapiens
aaatcctttattgacatttagtgaacgattgcagtgctactgatgtagtgctctttaatagctcattatgaagtttgt

SEQ ID NO: 107281 - DNA, 82 bp, Homo sapiens
tattgacatttagtgaacgattgcagtgctactgatgtagtgctctttaatagctcattatgaagtttgttagaagagacat

SEQ ID NO: 107282 - DNA, 83 bp, Homo sapiens
ttagtgaacgattgcagtgctactgatgtagtgctctttaatagctcattatgaagtttgttagaagagacattagcagcaat

SEQ ID NO: 107283 - DNA, 84 bp, Homo sapiens
attgcagtgctactgatgtagtgctctttaatagctcattatgaagtttgttagaagagacattagcagcaatttgtcaatagc

SEQ ID NO: 107284 - DNA, 82 bp, Homo sapiens
tactgatgtagtgctctttaatagctcattatgaagtttgttagaagagacattagcagcaatttgtcaatagcctctggaa

SEQ ID NO: 107285 - DNA, 80 bp, Homo sapiens
tctttaatagctcattatgaagtttgttagaagagacattagcagcaatttgtcaatagcctctggaagtcaagtgacaa

SEQ ID NO: 107286 - DNA, 81 bp, Homo sapiens
atagctcattatgaagtttgttagaagagacattagcagcaatttgtcaatagcctctggaagtcaagtgacaaggtatgc

SEQ ID NO: 107287 - DNA, 76 bp, Homo sapiens
aagtttgttagaagagacattagcagcaatttgtcaatagcctctggaagtcaagtgacaaggtatgcgtgtttta

SEQ ID NO: 107288 - DNA, 81 bp, Homo sapiens
ttagaagagacattagcagcaatttgtcaatagcctctggaagtcaagtgacaaggtatgcgtgttttacagtgctgccga

SEQ ID NO: 107289 - DNA, 81 bp, Homo sapiens
ttagcagcaatttgtcaatagcctctggaagtcaagtgacaaggtatgcgtgttttacagtgctgccgagtgttagacata

SEQ ID NO: 107290 - DNA, 77 bp, Homo sapiens
aatttgtcaatagcctctggaagtcaagtgacaaggtatgcgtgttttacagtgctgccgagtgttagacatatcct

SEQ ID NO: 107291 - DNA, 77 bp, Homo sapiens
ctctggaagtcaagtgacaaggtatgcgtgttttacagtgctgccgagtgttagacatatccttgcaggtggggaaa

SEQ ID NO: 107292 - DNA, 77 bp, Homo sapiens
tgttttacagtgctgccgagtgttagacatatccttgcaggtggggaaacttcatccacttatctgcccaagggata

SEQ ID NO: 107293 - DNA, 78 bp, Homo sapiens
agtgctgccgagtgttagacatatccttgcaggtggggaaacttcatccacttatctgcccaagggatagttcacatg

SEQ ID NO: 107294 - DNA, 78 bp, Homo sapiens
tagacatatccttgcaggtggggaaacttcatccacttatctgcccaagggatagttcacatggtgactcagatgttt

SEQ ID NO: 107295 - DNA, 77 bp, Homo sapiens
atatccttgcaggtggggaaacttcatccacttatctgcccaagggatagttcacatggtgactcagatgttttgaa

SEQ ID NO: 107296 - DNA, 78 bp, Homo sapiens
gggaaacttcatccacttatctgcccaagggatagttcacatggtgactcagatgttttgaagccacaccataatgtg

SEQ ID NO: 107297 - DNA, 79 bp, Homo sapiens
ttcatccacttatctgcccaagggatagttcacatggtgactcagatgttttgaagccacaccataatgtgttctaaaa

SEQ ID NO: 107298 - DNA, 78 bp, Homo sapiens
ttatctgcccaagggatagttcacatggtgactcagatgttttgaagccacaccataatgtgttctaaaagtcggcga

SEQ ID NO: 107299 - DNA, 76 bp, Homo sapiens
agggatagttcacatggtgactcagatgttttgaagccacaccataatgtgttctaaaagtcggcgagaggtggaa

SEQ ID NO: 107300 - DNA, 80 bp, Homo sapiens
ttcacatggtgactcagatgttttgaagccacaccataatgtgttctaaaagtcggcgagaggtggaatgacagcaatcc

SEQ ID NO: 107301 - DNA, 73 bp, Homo sapiens
ataatgtgttctaaaagtcggcgagaggtggaatgacagcaatcccaccaaagtggcccctgtcactcaaact

SEQ ID NO: 107302 - DNA, 74 bp, Homo sapiens
gtgttctaaaagtcggcgagaggtggaatgacagcaatcccaccaaagtggcccctgtcactcaaacttgagaa

SEQ ID NO: 107303 - DNA, 77 bp, Homo sapiens
gcgagaggtggaatgacagcaatcccaccaaagtggcccctgtcactcaaacttgagaagctgcatggaattccttt

SEQ ID NO: 107304 - DNA, 79 bp, Homo sapiens
gaatgacagcaatcccaccaaagtggcccctgtcactcaaacttgagaagctgcatggaattccttttgtgtcattcta

SEQ ID NO: 107305 - DNA, 73 bp, Homo sapiens
ccctgtcactcaaacttgagaagctgcatggaattccttttgtgtcattctaaaaaactataattcttttgaa

SEQ ID NO: 107306 - DNA, 73 bp, Homo sapiens
ctcaaacttgagaagctgcatggaattccttttgtgtcattctaaaaaactataattcttttgaataggataa

SEQ ID NO: 107307 - DNA, 70 bp, Homo sapiens
agaagctgcatggaattccttttgtgtcattctaaaaaactataattcttttgaataggataatttcttt

SEQ ID NO: 107308 - DNA, 66 bp, Homo sapiens
tggaattccttttgtgtcattctaaaaaactataattcttttgaataggataatttcttttaaaaa

SEQ ID NO: 107309 - DNA, 74 bp, Homo sapiens
cacatggacatagggagaggaacatcatccaccggggcctgtcgggggatgggggtctaggggatgaatagcaa

SEQ ID NO: 107310 - DNA, 71 bp, Homo sapiens
tagggagaggaacatcatccaccggggcctgtcgggggatgggggtctaggggatgaatagcaacccatta

SEQ ID NO: 107311 - DNA, 70 bp, Homo sapiens
aacatcatccaccggggcctgtcgggggatgggggtctaggggatgaatagcaacccattaggagaaata

SEQ ID NO: 107312 - DNA, 69 bp, Homo sapiens
aagaaaatatatacatggctattaaaattggaaaaaaaatagtatggaattggcctgtcattatacggg

SEQ ID NO: 107313 - DNA, 70 bp, Homo sapiens
tatacatggctattaaaattggaaaaaaaatagtatggaattggcctgtcattatacgggggtacctgag

SEQ ID NO: 107314 - DNA, 67 bp, Homo sapiens
ttaaaattggaaaaaaaatagtatggaattggcctgtcattatacgggggtacctgaggtggcaatt

SEQ ID NO: 107315 - DNA, 69 bp, Homo sapiens
aaaaaaaatagtatggaattggcctgtcattatacgggggtacctgaggtggcaatttggcaccacttg

SEQ ID NO: 107316 - DNA, 70 bp, Homo sapiens
atagtatggaattggcctgtcattatacgggggtacctgaggtggcaatttggcaccacttggtactttt

SEQ ID NO: 107317 - DNA, 70 bp, Homo sapiens
aattggcctgtcattatacgggggtacctgaggtggcaatttggcaccacttggtactttttattcatac

SEQ ID NO: 107318 - DNA, 71 bp, Homo sapiens
attatacgggggtacctgaggtggcaatttggcaccacttggtactttttattcatacgtgataatgtctg

SEQ ID NO: 107319 - DNA, 74 bp, Homo sapiens
gggtacctgaggtggcaatttggcaccacttggtactttttattcatacgtgataatgtctggcatggaatggg

SEQ ID NO: 107320 - DNA, 78 bp, Homo sapiens
tggcaatttggcaccacttggtactttttattcatacgtgataatgtctggcatggaatggggtcaatatatatgctt

SEQ ID NO: 107321 - DNA, 77 bp, Homo sapiens
tttggcaccacttggtactttttattcatacgtgataatgtctggcatggaatggggtcaatatatatgctttgaag

SEQ ID NO: 107322 - DNA, 77 bp, Homo sapiens
ggtactttttattcatacgtgataatgtctggcatggaatggggtcaatatatatgctttgaaggagtgaatttata

SEQ ID NO: 107323 - DNA, 77 bp, Homo sapiens
tttattcatacgtgataatgtctggcatggaatggggtcaatatatatgctttgaaggagtgaatttatatttaagt

SEQ ID NO: 107324 - DNA, 78 bp, Homo sapiens
gtgataatgtctggcatggaatggggtcaatatatatgctttgaaggagtgaatttatatttaagtttgcaatagctt

SEQ ID NO: 107325 - DNA, 79 bp, Homo sapiens
gcatggaatggggtcaatatatatgctttgaaggagtgaatttatatttaagtttgcaatagctttatgattctacagc

SEQ ID NO: 107326 - DNA, 77 bp, Homo sapiens
gggtcaatatatatgctttgaaggagtgaatttatatttaagtttgcaatagctttatgattctacagctctcttat

SEQ ID NO: 107327 - DNA, 76 bp, Homo sapiens
atatatatgctttgaaggagtgaatttatatttaagtttgcaatagctttatgattctacagctctcttatttaat

SEQ ID NO: 107328 - DNA, 74 bp, Homo sapiens
tttgaaggagtgaatttatatttaagtttgcaatagctttatgattctacagctctcttatttaattatttcat

SEQ ID NO: 107329 - DNA, 77 bp, Homo sapiens
ttatatttaagtttgcaatagctttatgattctacagctctcttatttaattatttcatttaatcatctcttcaaca

SEQ ID NO: 107330 - DNA, 78 bp, Homo sapiens
gtttgcaatagctttatgattctacagctctcttatttaattatttcatttaatcatctcttcaacacctctctagaa

SEQ ID NO: 107331 - DNA, 73 bp, Homo sapiens
agctctcttatttaattatttcatttaatcatctcttcaacacctctctagaaggtaaaaaataatgttctca

SEQ ID NO: 107332 - DNA, 70 bp, Homo sapiens
catttaatcatctcttcaacacctctctagaaggtaaaaaataatgttctcattttacagaaaaagaaat

SEQ ID NO: 107333 - DNA, 69 bp, Homo sapiens
ctcttcaacacctctctagaaggtaaaaaataatgttctcattttacagaaaaagaaattgatatttgg

SEQ ID NO: 107334 - DNA, 67 bp, Homo sapiens
cacctctctagaaggtaaaaaataatgttctcattttacagaaaaagaaattgatatttgggacgtt

SEQ ID NO: 107335 - DNA, 77 bp, Homo sapiens
tgttctcattttacagaaaaagaaattgatatttgggacgtttaatataaccaagatgcataggtctgtgcagctgc

SEQ ID NO: 107336 - DNA, 75 bp, Homo sapiens
tttacagaaaaagaaattgatatttgggacgtttaatataaccaagatgcataggtctgtgcagctgctctttct

SEQ ID NO: 107337 - DNA, 75 bp, Homo sapiens
aaaagaaattgatatttgggacgtttaatataaccaagatgcataggtctgtgcagctgctctttcttctcactt

SEQ ID NO: 107338 - DNA, 78 bp, Homo sapiens
atatttgggacgtttaatataaccaagatgcataggtctgtgcagctgctctttcttctcactttcaggtcataatta

SEQ ID NO: 107339 - DNA, 80 bp, Homo sapiens
tttaatataaccaagatgcataggtctgtgcagctgctctttcttctcactttcaggtcataattactgtttgctgggaa

SEQ ID NO: 107340 - DNA, 82 bp, Homo sapiens
tataaccaagatgcataggtctgtgcagctgctctttcttctcactttcaggtcataattactgtttgctgggaacatactg

SEQ ID NO: 107341 - DNA, 78 bp, Homo sapiens
ataggtctgtgcagctgctctttcttctcactttcaggtcataattactgtttgctgggaacatactgggtactggtg

SEQ ID NO: 107342 - DNA, 76 bp, Homo sapiens
cagctgctctttcttctcactttcaggtcataattactgtttgctgggaacatactgggtactggtgttaggcagg

SEQ ID NO: 107343 - DNA, 72 bp, Homo sapiens
tttcttctcactttcaggtcataattactgtttgctgggaacatactgggtactggtgttaggcaggtcttt

SEQ ID NO: 107344 - DNA, 72 bp, Homo sapiens
actttcaggtcataattactgtttgctgggaacatactgggtactggtgttaggcaggtcttttgtttctca

SEQ ID NO: 107345 - DNA, 72 bp, Homo sapiens
actgtttgctgggaacatactgggtactggtgttaggcaggtcttttgtttctcattaactacctcctcaca

SEQ ID NO: 107346 - DNA, 70 bp, Homo sapiens
tactggtgttaggcaggtcttttgtttctcattaactacctcctcacaccaggaggtatgtaggtctttt

SEQ ID NO: 107347 - DNA, 74 bp, Homo sapiens
attaactacctcctcacaccaggaggtatgtaggtctttttatcttcagatgaagtctcagtgaggttatgtaa

SEQ ID NO: 107348 - DNA, 80 bp, Homo sapiens
tcctcacaccaggaggtatgtaggtctttttatcttcagatgaagtctcagtgaggttatgtaatttgagctgaatcaca

SEQ ID NO: 107349 - DNA, 79 bp, Homo sapiens
aggaggtatgtaggtctttttatcttcagatgaagtctcagtgaggttatgtaatttgagctgaatcacacaggctatg

SEQ ID NO: 107350 - DNA, 84 bp, Homo sapiens
tatgtaggtctttttatcttcagatgaagtctcagtgaggttatgtaatttgagctgaatcacacaggctatgtctgatcaagc

SEQ ID NO: 107351 - DNA, 86 bp, Homo sapiens
tttttatcttcagatgaagtctcagtgaggttatgtaatttgagctgaatcacacaggctatgtctgatcaagctggcatctaatc

SEQ ID NO: 107352 - DNA, 87 bp, Homo sapiens
atgaagtctcagtgaggttatgtaatttgagctgaatcacacaggctatgtctgatcaagctggcatctaatcgcaaggcttgctac

SEQ ID NO: 107353 - DNA, 86 bp, Homo sapiens
agtgaggttatgtaatttgagctgaatcacacaggctatgtctgatcaagctggcatctaatcgcaaggcttgctactcaagagga

SEQ ID NO: 107354 - DNA, 88 bp, Homo sapiens
agctgaatcacacaggctatgtctgatcaagctggcatctaatcgcaaggcttgctactcaagaggatgtggccttcctgccatcacc

SEQ ID NO: 107355 - DNA, 85 bp, Homo sapiens
aggctatgtctgatcaagctggcatctaatcgcaaggcttgctactcaagaggatgtggccttcctgccatcacccagctgccct

SEQ ID NO: 107356 - DNA, 85 bp, Homo sapiens
atgtctgatcaagctggcatctaatcgcaaggcttgctactcaagaggatgtggccttcctgccatcacccagctgcccttccaa

SEQ ID NO: 107357 - DNA, 82 bp, Homo sapiens
tggcatctaatcgcaaggcttgctactcaagaggatgtggccttcctgccatcacccagctgcccttccaactgaagtataa

SEQ ID NO: 107358 - DNA, 80 bp, Homo sapiens
taatcgcaaggcttgctactcaagaggatgtggccttcctgccatcacccagctgcccttccaactgaagtataaggcta

SEQ ID NO: 107359 - DNA, 80 bp, Homo sapiens
ttgctactcaagaggatgtggccttcctgccatcacccagctgcccttccaactgaagtataaggctattgctatttcca

SEQ ID NO: 107360 - DNA, 75 bp, Homo sapiens
aagaggatgtggccttcctgccatcacccagctgcccttccaactgaagtataaggctattgctatttccatttt

SEQ ID NO: 107361 - DNA, 74 bp, Homo sapiens
atcacccagctgcccttccaactgaagtataaggctattgctatttccatttttaaaaatctgacaggcacaaa

SEQ ID NO: 107362 - DNA, 74 bp, Homo sapiens
agctgcccttccaactgaagtataaggctattgctatttccatttttaaaaatctgacaggcacaaagcacaaa

SEQ ID NO: 107363 - DNA, 74 bp, Homo sapiens
ctgaagtataaggctattgctatttccatttttaaaaatctgacaggcacaaagcacaaaggcacaaagactta

SEQ ID NO: 107364 - DNA, 73 bp, Homo sapiens
tataaggctattgctatttccatttttaaaaatctgacaggcacaaagcacaaaggcacaaagacttaaggga

SEQ ID NO: 107365 - DNA, 74 bp, Homo sapiens
tatttccatttttaaaaatctgacaggcacaaagcacaaaggcacaaagacttaagggatggctacagttatga

SEQ ID NO: 107366 - DNA, 76 bp, Homo sapiens
tttaaaaatctgacaggcacaaagcacaaaggcacaaagacttaagggatggctacagttatgatagttcagtcaa

SEQ ID NO: 107367 - DNA, 77 bp, Homo sapiens
aaatctgacaggcacaaagcacaaaggcacaaagacttaagggatggctacagttatgatagttcagtcaagaagtc

SEQ ID NO: 107368 - DNA, 71 bp, Homo sapiens
aaaggcacaaagacttaagggatggctacagttatgatagttcagtcaagaagtctctgttttggggactt

SEQ ID NO: 107369 - DNA, 68 bp, Homo sapiens
aaagacttaagggatggctacagttatgatagttcagtcaagaagtctctgttttggggacttttttt

SEQ ID NO: 107370 - DNA, 69 bp, Homo sapiens
tttttttttaaatctacgttttacagcattattatgcgtctacgtgaacttaatttaatgcaacaagcg

SEQ ID NO: 107371 - DNA, 74 bp, Homo sapiens
ttaaatctacgttttacagcattattatgcgtctacgtgaacttaatttaatgcaacaagcgttgacaagtgcc

SEQ ID NO: 107372 - DNA, 73 bp, Homo sapiens
acgttttacagcattattatgcgtctacgtgaacttaatttaatgcaacaagcgttgacaagtgcctgttttg

SEQ ID NO: 107373 - DNA, 77 bp, Homo sapiens
attattatgcgtctacgtgaacttaatttaatgcaacaagcgttgacaagtgcctgttttgtgcaaattctgtgtga

SEQ ID NO: 107374 - DNA, 77 bp, Homo sapiens
tctacgtgaacttaatttaatgcaacaagcgttgacaagtgcctgttttgtgcaaattctgtgtgatacccaatgtc

SEQ ID NO: 107375 - DNA, 76 bp, Homo sapiens
ttaatttaatgcaacaagcgttgacaagtgcctgttttgtgcaaattctgtgtgatacccaatgtccatttcctat

SEQ ID NO: 107376 - DNA, 77 bp, Homo sapiens
taatgcaacaagcgttgacaagtgcctgttttgtgcaaattctgtgtgatacccaatgtccatttcctattcttcct

SEQ ID NO: 107377 - DNA, 73 bp, Homo sapiens
ctgttttgtgcaaattctgtgtgatacccaatgtccatttcctattcttcctttcaaaaagtggccataaaca

SEQ ID NO: 107378 - DNA, 73 bp, Homo sapiens
ttgtgcaaattctgtgtgatacccaatgtccatttcctattcttcctttcaaaaagtggccataaacagaacc

SEQ ID NO: 107379 - DNA, 72 bp, Homo sapiens
tgtgatacccaatgtccatttcctattcttcctttcaaaaagtggccataaacagaaccctgattttgttga

SEQ ID NO: 107380 - DNA, 70 bp, Homo sapiens
aatgtccatttcctattcttcctttcaaaaagtggccataaacagaaccctgattttgttgaggataaca

SEQ ID NO: 107381 - DNA, 71 bp, Homo sapiens
tttcctattcttcctttcaaaaagtggccataaacagaaccctgattttgttgaggataacagtgtgctta

SEQ ID NO: 107382 - DNA, 73 bp, Homo sapiens
ctttcaaaaagtggccataaacagaaccctgattttgttgaggataacagtgtgcttaggtaagagatgtcat

SEQ ID NO: 107383 - DNA, 72 bp, Homo sapiens
aaaaagtggccataaacagaaccctgattttgttgaggataacagtgtgcttaggtaagagatgtcatttcc

SEQ ID NO: 107384 - DNA, 77 bp, Homo sapiens
ataaacagaaccctgattttgttgaggataacagtgtgcttaggtaagagatgtcatttcccatcatttcatgtagc

SEQ ID NO: 107385 - DNA, 82 bp, Homo sapiens
tgattttgttgaggataacagtgtgcttaggtaagagatgtcatttcccatcatttcatgtagcttggcacagtcgtgtgaa

SEQ ID NO: 107386 - DNA, 81 bp, Homo sapiens
ttgaggataacagtgtgcttaggtaagagatgtcatttcccatcatttcatgtagcttggcacagtcgtgtgaataacttc

SEQ ID NO: 107387 - DNA, 83 bp, Homo sapiens
aacagtgtgcttaggtaagagatgtcatttcccatcatttcatgtagcttggcacagtcgtgtgaataacttctgcatgcaac

SEQ ID NO: 107388 - DNA, 80 bp, Homo sapiens
ttaggtaagagatgtcatttcccatcatttcatgtagcttggcacagtcgtgtgaataacttctgcatgcaacccccagg

SEQ ID NO: 107389 - DNA, 78 bp, Homo sapiens
catttcccatcatttcatgtagcttggcacagtcgtgtgaataacttctgcatgcaacccccagggaagctttctaaa

SEQ ID NO: 107390 - DNA, 76 bp, Homo sapiens
tcatttcatgtagcttggcacagtcgtgtgaataacttctgcatgcaacccccagggaagctttctaaagggcctt

SEQ ID NO: 107391 - DNA, 73 bp, Homo sapiens
atgtagcttggcacagtcgtgtgaataacttctgcatgcaacccccagggaagctttctaaagggccttttcc

SEQ ID NO: 107392 - DNA, 68 bp, Homo sapiens
acagtcgtgtgaataacttctgcatgcaacccccagggaagctttctaaagggccttttccttccctt

SEQ ID NO: 107393 - DNA, 67 bp, Homo sapiens
aataacttctgcatgcaacccccagggaagctttctaaagggccttttccttccctttccttctgac

SEQ ID NO: 107394 - DNA, 70 bp, Homo sapiens
ttctgcatgcaacccccagggaagctttctaaagggccttttccttccctttccttctgactggaatgtg

SEQ ID NO: 107395 - DNA, 71 bp, Homo sapiens
cccagggaagctttctaaagggccttttccttccctttccttctgactggaatgtggacatgatgtccaga

SEQ ID NO: 107396 - DNA, 83 bp, Homo sapiens
ttccctttccttctgactggaatgtggacatgatgtccagagctcaggcagccatcctgggccacaaaacatcattgtgaatg

SEQ ID NO: 107397 - DNA, 87 bp, Homo sapiens
ttctgactggaatgtggacatgatgtccagagctcaggcagccatcctgggccacaaaacatcattgtgaatggatgccaagtgttg

SEQ ID NO: 107398 - DNA, 85 bp, Homo sapiens
atgatgtccagagctcaggcagccatcctgggccacaaaacatcattgtgaatggatgccaagtgttggggatgatggagaagaa

SEQ ID NO: 107399 - DNA, 79 bp, Homo sapiens
ccatcctgggccacaaaacatcattgtgaatggatgccaagtgttggggatgatggagaagaaagatataaggagtcta

SEQ ID NO: 107400 - DNA, 75 bp, Homo sapiens
ccacaaaacatcattgtgaatggatgccaagtgttggggatgatggagaagaaagatataaggagtctaggtttt

SEQ ID NO: 107401 - DNA, 79 bp, Homo sapiens
aacatcattgtgaatggatgccaagtgttggggatgatggagaagaaagatataaggagtctaggtttttgatgacata

SEQ ID NO: 107402 - DNA, 78 bp, Homo sapiens
aatggatgccaagtgttggggatgatggagaagaaagatataaggagtctaggtttttgatgacatagtggagctgcc

SEQ ID NO: 107403 - DNA, 77 bp, Homo sapiens
aagtgttggggatgatggagaagaaagatataaggagtctaggtttttgatgacatagtggagctgcccagtcagcc

SEQ ID NO: 107404 - DNA, 78 bp, Homo sapiens
atgatggagaagaaagatataaggagtctaggtttttgatgacatagtggagctgcccagtcagccttgggctactta

SEQ ID NO: 107405 - DNA, 75 bp, Homo sapiens
aagaaagatataaggagtctaggtttttgatgacatagtggagctgcccagtcagccttgggctacttacaactg

SEQ ID NO: 107406 - DNA, 75 bp, Homo sapiens
atataaggagtctaggtttttgatgacatagtggagctgcccagtcagccttgggctacttacaactggaattac

SEQ ID NO: 107407 - DNA, 75 bp, Homo sapiens
gtttttgatgacatagtggagctgcccagtcagccttgggctacttacaactggaattaccataagaaagaaata

SEQ ID NO: 107408 - DNA, 73 bp, Homo sapiens
atgacatagtggagctgcccagtcagccttgggctacttacaactggaattaccataagaaagaaataaactt

SEQ ID NO: 107409 - DNA, 67 bp, Homo sapiens
ccagtcagccttgggctacttacaactggaattaccataagaaagaaataaacttttattttgttta

SEQ ID NO: 107410 - DNA, 66 bp, Homo sapiens
ttgggctacttacaactggaattaccataagaaagaaataaacttttattttgtttaaatgactac

SEQ ID NO: 107411 - DNA, 68 bp, Homo sapiens
caactggaattaccataagaaagaaataaacttttattttgtttaaatgactactttcttctgatctc

SEQ ID NO: 107412 - DNA, 70 bp, Homo sapiens
gaaataaacttttattttgtttaaatgactactttcttctgatctctaaatgcaacttctaacttatgga

SEQ ID NO: 107413 - DNA, 72 bp, Homo sapiens
ttattttgtttaaatgactactttcttctgatctctaaatgcaacttctaacttatggagttacaggaaagc

SEQ ID NO: 107414 - DNA, 73 bp, Homo sapiens
ttgtttaaatgactactttcttctgatctctaaatgcaacttctaacttatggagttacaggaaagctggaaa

SEQ ID NO: 107415 - DNA, 74 bp, Homo sapiens
gactactttcttctgatctctaaatgcaacttctaacttatggagttacaggaaagctggaaaagatatattta

SEQ ID NO: 107416 - DNA, 73 bp, Homo sapiens
ctgatctctaaatgcaacttctaacttatggagttacaggaaagctggaaaagatatatttattagtctttag

SEQ ID NO: 107417 - DNA, 71 bp, Homo sapiens
aatgcaacttctaacttatggagttacaggaaagctggaaaagatatatttattagtctttaggaaagaca

SEQ ID NO: 107418 - DNA, 71 bp, Homo sapiens
acttatggagttacaggaaagctggaaaagatatatttattagtctttaggaaagacaaatccacaactca

SEQ ID NO: 107419 - DNA, 71 bp, Homo sapiens
ggagttacaggaaagctggaaaagatatatttattagtctttaggaaagacaaatccacaactcactacag

SEQ ID NO: 107420 - DNA, 78 bp, Homo sapiens
atatatttattagtctttaggaaagacaaatccacaactcactacagtatggtctgaatgtgacttgatccaatgatc

SEQ ID NO: 107421 - DNA, 79 bp, Homo sapiens
acaaatccacaactcactacagtatggtctgaatgtgacttgatccaatgatctaatgaaaacataaactcagtgggga

SEQ ID NO: 107422 - DNA, 81 bp, Homo sapiens
aactcactacagtatggtctgaatgtgacttgatccaatgatctaatgaaaacataaactcagtggggagcattccagaga

SEQ ID NO: 107423 - DNA, 80 bp, Homo sapiens
atggtctgaatgtgacttgatccaatgatctaatgaaaacataaactcagtggggagcattccagagagagaagaaatta

SEQ ID NO: 107424 - DNA, 80 bp, Homo sapiens
atgtgacttgatccaatgatctaatgaaaacataaactcagtggggagcattccagagagagaagaaattaattctgcta

SEQ ID NO: 107425 - DNA, 75 bp, Homo sapiens
atgaaaacataaactcagtggggagcattccagagagagaagaaattaattctgctaagaagaaggtatcaagaa

SEQ ID NO: 107426 - DNA, 74 bp, Homo sapiens
gggagcattccagagagagaagaaattaattctgctaagaagaaggtatcaagaaaagcttgttgtaccttgga

SEQ ID NO: 107427 - DNA, 73 bp, Homo sapiens
attccagagagagaagaaattaattctgctaagaagaaggtatcaagaaaagcttgttgtaccttggatggag

SEQ ID NO: 107428 - DNA, 71 bp, Homo sapiens
agaaattaattctgctaagaagaaggtatcaagaaaagcttgttgtaccttggatggaggaagataagaag

SEQ ID NO: 107429 - DNA, 73 bp, Homo sapiens
ttaattctgctaagaagaaggtatcaagaaaagcttgttgtaccttggatggaggaagataagaagtggaaca

SEQ ID NO: 107430 - DNA, 72 bp, Homo sapiens
taagaagaaggtatcaagaaaagcttgttgtaccttggatggaggaagataagaagtggaacagaaaactca

SEQ ID NO: 107431 - DNA, 71 bp, Homo sapiens
aagcttgttgtaccttggatggaggaagataagaagtggaacagaaaactcagtaagcaaaagaaagcctg

SEQ ID NO: 107432 - DNA, 73 bp, Homo sapiens
ttggatggaggaagataagaagtggaacagaaaactcagtaagcaaaagaaagcctggactccaagaagttga

SEQ ID NO: 107433 - DNA, 72 bp, Homo sapiens
aagataagaagtggaacagaaaactcagtaagcaaaagaaagcctggactccaagaagttgagcttaagtga

SEQ ID NO: 107434 - DNA, 72 bp, Homo sapiens
aagtggaacagaaaactcagtaagcaaaagaaagcctggactccaagaagttgagcttaagtgatggcaagt

SEQ ID NO: 107435 - DNA, 72 bp, Homo sapiens
aaactcagtaagcaaaagaaagcctggactccaagaagttgagcttaagtgatggcaagttggttgcaaaaa

SEQ ID NO: 107436 - DNA, 71 bp, Homo sapiens
aagcaaaagaaagcctggactccaagaagttgagcttaagtgatggcaagttggttgcaaaaaaatggctt

SEQ ID NO: 107437 - DNA, 72 bp, Homo sapiens
actccaagaagttgagcttaagtgatggcaagttggttgcaaaaaaatggctttgatatttccaaaatgatt

SEQ ID NO: 107438 - DNA, 71 bp, Homo sapiens
gttgagcttaagtgatggcaagttggttgcaaaaaaatggctttgatatttccaaaatgattttctttaag

SEQ ID NO: 107439 - DNA, 72 bp, Homo sapiens
gatggcaagttggttgcaaaaaaatggctttgatatttccaaaatgattttctttaagttttcagcaaagca

SEQ ID NO: 107440 - DNA, 73 bp, Homo sapiens
tggttgcaaaaaaatggctttgatatttccaaaatgattttctttaagttttcagcaaagcattgactagtca

SEQ ID NO: 107441 - DNA, 72 bp, Homo sapiens
ggctttgatatttccaaaatgattttctttaagttttcagcaaagcattgactagtcatagacttttagacc

SEQ ID NO: 107442 - DNA, 73 bp, Homo sapiens
tttctttaagttttcagcaaagcattgactagtcatagacttttagaccttgttctgtggacccagatctaaa

SEQ ID NO: 107443 - DNA, 72 bp, Homo sapiens
aagttttcagcaaagcattgactagtcatagacttttagaccttgttctgtggacccagatctaaaccaaac

SEQ ID NO: 107444 - DNA, 73 bp, Homo sapiens
aaagcattgactagtcatagacttttagaccttgttctgtggacccagatctaaaccaaactgcaagtttgtg

SEQ ID NO: 107445 - DNA, 73 bp, Homo sapiens
acttttagaccttgttctgtggacccagatctaaaccaaactgcaagtttgtgtcacttgagatattatctac

SEQ ID NO: 107446 - DNA, 77 bp, Homo sapiens
ttgttctgtggacccagatctaaaccaaactgcaagtttgtgtcacttgagatattatctaccagcacatttaagtc

SEQ ID NO: 107447 - DNA, 75 bp, Homo sapiens
aaccaaactgcaagtttgtgtcacttgagatattatctaccagcacatttaagtctctttctttaaacatatcac

SEQ ID NO: 107448 - DNA, 79 bp, Homo sapiens
cacttgagatattatctaccagcacatttaagtctctttctttaaacatatcacttcagtggtgatatcttaagctaca

SEQ ID NO: 107449 - DNA, 78 bp, Homo sapiens
gagatattatctaccagcacatttaagtctctttctttaaacatatcacttcagtggtgatatcttaagctacagaaa

SEQ ID NO: 107450 - DNA, 76 bp, Homo sapiens
agcacatttaagtctctttctttaaacatatcacttcagtggtgatatcttaagctacagaaagagtcatcttcct

SEQ ID NO: 107451 - DNA, 75 bp, Homo sapiens
agtctctttctttaaacatatcacttcagtggtgatatcttaagctacagaaagagtcatcttcctttacacatt

SEQ ID NO: 107452 - DNA, 76 bp, Homo sapiens
ctttaaacatatcacttcagtggtgatatcttaagctacagaaagagtcatcttcctttacacatttggctataat

SEQ ID NO: 107453 - DNA, 81 bp, Homo sapiens
atatcacttcagtggtgatatcttaagctacagaaagagtcatcttcctttacacatttggctataattgagtagagatga

SEQ ID NO: 107454 - DNA, 77 bp, Homo sapiens
agtggtgatatcttaagctacagaaagagtcatcttcctttacacatttggctataattgagtagagatgactttta

SEQ ID NO: 107455 - DNA, 77 bp, Homo sapiens
taagctacagaaagagtcatcttcctttacacatttggctataattgagtagagatgacttttataagattcagtcc

SEQ ID NO: 107456 - DNA, 78 bp, Homo sapiens
gaaagagtcatcttcctttacacatttggctataattgagtagagatgacttttataagattcagtcctacagtcata

SEQ ID NO: 107457 - DNA, 76 bp, Homo sapiens
atcttcctttacacatttggctataattgagtagagatgacttttataagattcagtcctacagtcataggcctgg

SEQ ID NO: 107458 - DNA, 75 bp, Homo sapiens
tggctataattgagtagagatgacttttataagattcagtcctacagtcataggcctgggttaaaaagctgtctt

SEQ ID NO: 107459 - DNA, 74 bp, Homo sapiens
agtagagatgacttttataagattcagtcctacagtcataggcctgggttaaaaagctgtctttgactgaagtg

SEQ ID NO: 107460 - DNA, 72 bp, Homo sapiens
ttttataagattcagtcctacagtcataggcctgggttaaaaagctgtctttgactgaagtgggaggagaaa

SEQ ID NO: 107461 - DNA, 72 bp, Homo sapiens
aagattcagtcctacagtcataggcctgggttaaaaagctgtctttgactgaagtgggaggagaaaggagaa

SEQ ID NO: 107462 - DNA, 70 bp, Homo sapiens
cctacagtcataggcctgggttaaaaagctgtctttgactgaagtgggaggagaaaggagaaaaggagag

SEQ ID NO: 107463 - DNA, 67 bp, Homo sapiens
ctgggttaaaaagctgtctttgactgaagtgggaggagaaaggagaaaaggagaggggaaatagtta

SEQ ID NO: 107464 - DNA, 69 bp, Homo sapiens
ttgactgaagtgggaggagaaaggagaaaaggagaggggaaatagttatttgggatcccttctgggata

SEQ ID NO: 107465 - DNA, 69 bp, Homo sapiens
tgggaggagaaaggagaaaaggagaggggaaatagttatttgggatcccttctgggatatcccttctga

SEQ ID NO: 107466 - DNA, 67 bp, Homo sapiens
aaaggagaaaaggagaggggaaatagttatttgggatcccttctgggatatcccttctgactccttg

SEQ ID NO: 107467 - DNA, 75 bp, Homo sapiens
gagaggggaaatagttatttgggatcccttctgggatatcccttctgactccttgtggcaggagtgattgtctga

SEQ ID NO: 107468 - DNA, 75 bp, Homo sapiens
aatagttatttgggatcccttctgggatatcccttctgactccttgtggcaggagtgattgtctgattgtttcat

SEQ ID NO: 107469 - DNA, 76 bp, Homo sapiens
atttgggatcccttctgggatatcccttctgactccttgtggcaggagtgattgtctgattgtttcattgcagggg

SEQ ID NO: 107470 - DNA, 81 bp, Homo sapiens
ccttctgggatatcccttctgactccttgtggcaggagtgattgtctgattgtttcattgcaggggtcaggctggagcaga

SEQ ID NO: 107471 - DNA, 81 bp, Homo sapiens
atatcccttctgactccttgtggcaggagtgattgtctgattgtttcattgcaggggtcaggctggagcagagcctcaaag

SEQ ID NO: 107472 - DNA, 77 bp, Homo sapiens
aggagtgattgtctgattgtttcattgcaggggtcaggctggagcagagcctcaaaggcaggagggtaaagaattag

SEQ ID NO: 107473 - DNA, 73 bp, Homo sapiens
ggtcaggctggagcagagcctcaaaggcaggagggtaaagaattagggctccaaccccaggggctaacgatgc

SEQ ID NO: 107474 - DNA, 72 bp, Homo sapiens
tggagcagagcctcaaaggcaggagggtaaagaattagggctccaaccccaggggctaacgatgctagggaa

SEQ ID NO: 107475 - DNA, 69 bp, Homo sapiens
ctcaaaggcaggagggtaaagaattagggctccaaccccaggggctaacgatgctagggaacttcagga

SEQ ID NO: 107476 - DNA, 72 bp, Homo sapiens
gagggtaaagaattagggctccaaccccaggggctaacgatgctagggaacttcaggagcttatgacatatc

SEQ ID NO: 107477 - DNA, 73 bp, Homo sapiens
taaagaattagggctccaaccccaggggctaacgatgctagggaacttcaggagcttatgacatatccctgac

SEQ ID NO: 107478 - DNA, 74 bp, Homo sapiens
tccaaccccaggggctaacgatgctagggaacttcaggagcttatgacatatccctgacttctccctctggtgt

SEQ ID NO: 107479 - DNA, 77 bp, Homo sapiens
gggctaacgatgctagggaacttcaggagcttatgacatatccctgacttctccctctggtgttcaacaaatatcca

SEQ ID NO: 107480 - DNA, 77 bp, Homo sapiens
aacgatgctagggaacttcaggagcttatgacatatccctgacttctccctctggtgttcaacaaatatccatgtaa

SEQ ID NO: 107481 - DNA, 74 bp, Homo sapiens
aacttcaggagcttatgacatatccctgacttctccctctggtgttcaacaaatatccatgtaatcctaacctt

SEQ ID NO: 107482 - DNA, 74 bp, Homo sapiens
agcttatgacatatccctgacttctccctctggtgttcaacaaatatccatgtaatcctaacctttccttggcc

SEQ ID NO: 107483 - DNA, 73 bp, Homo sapiens
atatccctgacttctccctctggtgttcaacaaatatccatgtaatcctaacctttccttggcctctcttaca

SEQ ID NO: 107484 - DNA, 70 bp, Homo sapiens
acttctccctctggtgttcaacaaatatccatgtaatcctaacctttccttggcctctcttacagttagg

SEQ ID NO: 107485 - DNA, 70 bp, Homo sapiens
aaatatccatgtaatcctaacctttccttggcctctcttacagttagggcaggaccaactaattagattg

SEQ ID NO: 107486 - DNA, 69 bp, Homo sapiens
atgtaatcctaacctttccttggcctctcttacagttagggcaggaccaactaattagattgtggttaa

SEQ ID NO: 107487 - DNA, 70 bp, Homo sapiens
taacctttccttggcctctcttacagttagggcaggaccaactaattagattgtggttaatgggatgtaa

SEQ ID NO: 107488 - DNA, 70 bp, Homo sapiens
ttacagttagggcaggaccaactaattagattgtggttaatgggatgtaagtgggaataagctaacctct

SEQ ID NO: 107489 - DNA, 70 bp, Homo sapiens
gttaatgggatgtaagtgggaataagctaacctcttccaggttgagaacttaaaggtgtcctatattata

SEQ ID NO: 107490 - DNA, 69 bp, Homo sapiens
atgtaagtgggaataagctaacctcttccaggttgagaacttaaaggtgtcctatattataatcccacc

SEQ ID NO: 107491 - DNA, 68 bp, Homo sapiens
gtgggaataagctaacctcttccaggttgagaacttaaaggtgtcctatattataatcccacccaccc

SEQ ID NO: 107492 - DNA, 73 bp, Homo sapiens
gttgagaacttaaaggtgtcctatattataatcccacccaccctctctcccctcactgtagtgacattatatc

SEQ ID NO: 107493 - DNA, 74 bp, Homo sapiens
ttaaaggtgtcctatattataatcccacccaccctctctcccctcactgtagtgacattatatcttgaattaca

SEQ ID NO: 107494 - DNA, 79 bp, Homo sapiens
ctatattataatcccacccaccctctctcccctcactgtagtgacattatatcttgaattacagatgccatagctacaa

SEQ ID NO: 107495 - DNA, 78 bp, Homo sapiens
ttataatcccacccaccctctctcccctcactgtagtgacattatatcttgaattacagatgccatagctacaaggtg

SEQ ID NO: 107496 - DNA, 79 bp, Homo sapiens
accctctctcccctcactgtagtgacattatatcttgaattacagatgccatagctacaaggtgggagcagcctgggac

SEQ ID NO: 107497 - DNA, 82 bp, Homo sapiens
cctcactgtagtgacattatatcttgaattacagatgccatagctacaaggtgggagcagcctgggaccctgaatcactgcg

SEQ ID NO: 107498 - DNA, 83 bp, Homo sapiens
tagtgacattatatcttgaattacagatgccatagctacaaggtgggagcagcctgggaccctgaatcactgcgtggaagaga

SEQ ID NO: 107499 - DNA, 81 bp, Homo sapiens
attatatcttgaattacagatgccatagctacaaggtgggagcagcctgggaccctgaatcactgcgtggaagagattctc

SEQ ID NO: 107500 - DNA, 77 bp, Homo sapiens
atagctacaaggtgggagcagcctgggaccctgaatcactgcgtggaagagattctcgcagaggagaagttttcaaa

SEQ ID NO: 107501 - DNA, 80 bp, Homo sapiens
cctgggaccctgaatcactgcgtggaagagattctcgcagaggagaagttttcaaagcatctgtctttgtgtgagcagga

SEQ ID NO: 107502 - DNA, 77 bp, Homo sapiens
cgtggaagagattctcgcagaggagaagttttcaaagcatctgtctttgtgtgagcaggaaataagcgttggtggta

SEQ ID NO: 107503 - DNA, 79 bp, Homo sapiens
attctcgcagaggagaagttttcaaagcatctgtctttgtgtgagcaggaaataagcgttggtggtatgaagacattga

SEQ ID NO: 107504 - DNA, 77 bp, Homo sapiens
agaggagaagttttcaaagcatctgtctttgtgtgagcaggaaataagcgttggtggtatgaagacattgaaacatg

SEQ ID NO: 107505 - DNA, 77 bp, Homo sapiens
ttttcaaagcatctgtctttgtgtgagcaggaaataagcgttggtggtatgaagacattgaaacatgggaatatttg

SEQ ID NO: 107506 - DNA, 82 bp, Homo sapiens
tctgtctttgtgtgagcaggaaataagcgttggtggtatgaagacattgaaacatgggaatatttgtgatggcagctggcat

SEQ ID NO: 107507 - DNA, 81 bp, Homo sapiens
ttgtgtgagcaggaaataagcgttggtggtatgaagacattgaaacatgggaatatttgtgatggcagctggcattaatta

SEQ ID NO: 107508 - DNA, 77 bp, Homo sapiens
aaataagcgttggtggtatgaagacattgaaacatgggaatatttgtgatggcagctggcattaattactctgattt

SEQ ID NO: 107509 - DNA, 80 bp, Homo sapiens
ttggtggtatgaagacattgaaacatgggaatatttgtgatggcagctggcattaattactctgattttgacattacttc

SEQ ID NO: 107510 - DNA, 79 bp, Homo sapiens
agacattgaaacatgggaatatttgtgatggcagctggcattaattactctgattttgacattacttcttggcaaggaa

SEQ ID NO: 107511 - DNA, 76 bp, Homo sapiens
aaacatgggaatatttgtgatggcagctggcattaattactctgattttgacattacttcttggcaaggaaaataa

SEQ ID NO: 107512 - DNA, 77 bp, Homo sapiens
aatatttgtgatggcagctggcattaattactctgattttgacattacttcttggcaaggaaaataagtgagaggtg

SEQ ID NO: 107513 - DNA, 76 bp, Homo sapiens
atggcagctggcattaattactctgattttgacattacttcttggcaaggaaaataagtgagaggtggtgcacctt

SEQ ID NO: 107514 - DNA, 76 bp, Homo sapiens
attaattactctgattttgacattacttcttggcaaggaaaataagtgagaggtggtgcacctttgatgagaagca

SEQ ID NO: 107515 - DNA, 78 bp, Homo sapiens
tactctgattttgacattacttcttggcaaggaaaataagtgagaggtggtgcacctttgatgagaagcatgggattc

SEQ ID NO: 107516 - DNA, 74 bp, Homo sapiens
attacttcttggcaaggaaaataagtgagaggtggtgcacctttgatgagaagcatgggattcggagttggaaa

SEQ ID NO: 107517 - DNA, 76 bp, Homo sapiens
ttcttggcaaggaaaataagtgagaggtggtgcacctttgatgagaagcatgggattcggagttggaaaatacagc

SEQ ID NO: 107518 - DNA, 76 bp, Homo sapiens
aaaataagtgagaggtggtgcacctttgatgagaagcatgggattcggagttggaaaatacagccttcagcttgat

SEQ ID NO: 107519 - DNA, 76 bp, Homo sapiens
aggtggtgcacctttgatgagaagcatgggattcggagttggaaaatacagccttcagcttgattcctgggtgagt

SEQ ID NO: 107520 - DNA, 75 bp, Homo sapiens
acctttgatgagaagcatgggattcggagttggaaaatacagccttcagcttgattcctgggtgagtttgggcaa

SEQ ID NO: 107521 - DNA, 71 bp, Homo sapiens
attcggagttggaaaatacagccttcagcttgattcctgggtgagtttgggcaagtttcttaacttcttca

SEQ ID NO: 107522 - DNA, 71 bp, Homo sapiens
gaaaatacagccttcagcttgattcctgggtgagtttgggcaagtttcttaacttcttcagccccagattt

SEQ ID NO: 107523 - DNA, 71 bp, Homo sapiens
ccttcagcttgattcctgggtgagtttgggcaagtttcttaacttcttcagccccagatttttatctataa

SEQ ID NO: 107524 - DNA, 69 bp, Homo sapiens
agcttgattcctgggtgagtttgggcaagtttcttaacttcttcagccccagatttttatctataaaaa

SEQ ID NO: 107525 - DNA, 70 bp, Homo sapiens
ctgggtgagtttgggcaagtttcttaacttcttcagccccagatttttatctataaaaatgagaataatg

SEQ ID NO: 107526 - DNA, 72 bp, Homo sapiens
caagtttcttaacttcttcagccccagatttttatctataaaaatgagaataatggctgtgcctccttccta

SEQ ID NO: 107527 - DNA, 72 bp, Homo sapiens
taacttcttcagccccagatttttatctataaaaatgagaataatggctgtgcctccttcctagggcagttt

SEQ ID NO: 107528 - DNA, 69 bp, Homo sapiens
agccccagatttttatctataaaaatgagaataatggctgtgcctccttcctagggcagttttttattt

SEQ ID NO: 107529 - DNA, 70 bp, Homo sapiens
tttatctataaaaatgagaataatggctgtgcctccttcctagggcagttttttatttttcaaagtatgg

SEQ ID NO: 107530 - DNA, 71 bp, Homo sapiens
aaaatgagaataatggctgtgcctccttcctagggcagttttttatttttcaaagtatggttgcacagaaa

SEQ ID NO: 107531 - DNA, 73 bp, Homo sapiens
aataatggctgtgcctccttcctagggcagttttttatttttcaaagtatggttgcacagaaaacctgcatca

SEQ ID NO: 107532 - DNA, 72 bp, Homo sapiens
tgtgcctccttcctagggcagttttttatttttcaaagtatggttgcacagaaaacctgcatcagaaatacc

SEQ ID NO: 107533 - DNA, 72 bp, Homo sapiens
tagggcagttttttatttttcaaagtatggttgcacagaaaacctgcatcagaaatacccacaggactatta

SEQ ID NO: 107534 - DNA, 75 bp, Homo sapiens
ttttatttttcaaagtatggttgcacagaaaacctgcatcagaaatacccacaggactattacactgcaaatcac

SEQ ID NO: 107535 - DNA, 78 bp, Homo sapiens
tttttcaaagtatggttgcacagaaaacctgcatcagaaatacccacaggactattacactgcaaatcactgtgtgcc

SEQ ID NO: 107536 - DNA, 82 bp, Homo sapiens
tatggttgcacagaaaacctgcatcagaaatacccacaggactattacactgcaaatcactgtgtgcccatctggaagctac

SEQ ID NO: 107537 - DNA, 79 bp, Homo sapiens
aaaacctgcatcagaaatacccacaggactattacactgcaaatcactgtgtgcccatctggaagctaccgaatccaga

SEQ ID NO: 107538 - DNA, 79 bp, Homo sapiens
atcagaaatacccacaggactattacactgcaaatcactgtgtgcccatctggaagctaccgaatccagatctttgtgg

SEQ ID NO: 107539 - DNA, 78 bp, Homo sapiens
tacccacaggactattacactgcaaatcactgtgtgcccatctggaagctaccgaatccagatctttgtgggtgggag

SEQ ID NO: 107540 - DNA, 77 bp, Homo sapiens
tattacactgcaaatcactgtgtgcccatctggaagctaccgaatccagatctttgtgggtgggaggaagtctattt

SEQ ID NO: 107541 - DNA, 67 bp, Homo sapiens
ttttttttaaagttatccaggggactcttacacttactaaagttggaggatgattgttctaagcagt

SEQ ID NO: 107542 - DNA, 71 bp, Homo sapiens
tttaaagttatccaggggactcttacacttactaaagttggaggatgattgttctaagcagttgtgaggat

SEQ ID NO: 107543 - DNA, 77 bp, Homo sapiens
gggactcttacacttactaaagttggaggatgattgttctaagcagttgtgaggattgcatgagacaatacgaacaa

SEQ ID NO: 107544 - DNA, 77 bp, Homo sapiens
tacacttactaaagttggaggatgattgttctaagcagttgtgaggattgcatgagacaatacgaacaaagacttta

SEQ ID NO: 107545 - DNA, 78 bp, Homo sapiens
taaagttggaggatgattgttctaagcagttgtgaggattgcatgagacaatacgaacaaagactttaggactatatc

SEQ ID NO: 107546 - DNA, 79 bp, Homo sapiens
atgattgttctaagcagttgtgaggattgcatgagacaatacgaacaaagactttaggactatatctggcccatggtaa

SEQ ID NO: 107547 - DNA, 81 bp, Homo sapiens
taagcagttgtgaggattgcatgagacaatacgaacaaagactttaggactatatctggcccatggtaagtgctccatata

SEQ ID NO: 107548 - DNA, 80 bp, Homo sapiens
gaggattgcatgagacaatacgaacaaagactttaggactatatctggcccatggtaagtgctccatatatggaagcaat

SEQ ID NO: 107549 - DNA, 79 bp, Homo sapiens
attgcatgagacaatacgaacaaagactttaggactatatctggcccatggtaagtgctccatatatggaagcaattat

SEQ ID NO: 107550 - DNA, 74 bp, Homo sapiens
agacaatacgaacaaagactttaggactatatctggcccatggtaagtgctccatatatggaagcaattatttt

SEQ ID NO: 107551 - DNA, 75 bp, Homo sapiens
aatacgaacaaagactttaggactatatctggcccatggtaagtgctccatatatggaagcaattatttttatca

SEQ ID NO: 107552 - DNA, 77 bp, Homo sapiens
aaagactttaggactatatctggcccatggtaagtgctccatatatggaagcaattatttttatcattagagcacac

SEQ ID NO: 107553 - DNA, 80 bp, Homo sapiens
tttaggactatatctggcccatggtaagtgctccatatatggaagcaattatttttatcattagagcacactgtggtgta

SEQ ID NO: 107554 - DNA, 80 bp, Homo sapiens
tatatctggcccatggtaagtgctccatatatggaagcaattatttttatcattagagcacactgtggtgtagaataact

SEQ ID NO: 107555 - DNA, 79 bp, Homo sapiens
atatctggcccatggtaagtgctccatatatggaagcaattatttttatcattagagcacactgtggtgtagaataact

SEQ ID NO: 107556 - DNA, 79 bp, Homo sapiens
ccatggtaagtgctccatatatggaagcaattatttttatcattagagcacactgtggtgtagaataacttggtcagaa

SEQ ID NO: 107557 - DNA, 79 bp, Homo sapiens
taagtgctccatatatggaagcaattatttttatcattagagcacactgtggtgtagaataacttggtcagaaaagcta

SEQ ID NO: 107558 - DNA, 76 bp, Homo sapiens
aagcaattatttttatcattagagcacactgtggtgtagaataacttggtcagaaaagctaggcaagtccatgaag

SEQ ID NO: 107559 - DNA, 74 bp, Homo sapiens
tttttatcattagagcacactgtggtgtagaataacttggtcagaaaagctaggcaagtccatgaaggggaaaa

SEQ ID NO: 107560 - DNA, 72 bp, Homo sapiens
tggtgtagaataacttggtcagaaaagctaggcaagtccatgaaggggaaaaagggagatggcattactctt

SEQ ID NO: 107561 - DNA, 72 bp, Homo sapiens
agaataacttggtcagaaaagctaggcaagtccatgaaggggaaaaagggagatggcattactctttctcag

SEQ ID NO: 107562 - DNA, 73 bp, Homo sapiens
agaaaagctaggcaagtccatgaaggggaaaaagggagatggcattactctttctcaggattataactctgaa

SEQ ID NO: 107563 - DNA, 73 bp, Homo sapiens
ctaggcaagtccatgaaggggaaaaagggagatggcattactctttctcaggattataactctgaactcaaag

SEQ ID NO: 107564 - DNA, 72 bp, Homo sapiens
atgaaggggaaaaagggagatggcattactctttctcaggattataactctgaactcaaagggagccaagag

SEQ ID NO: 107565 - DNA, 75 bp, Homo sapiens
ttctcaggattataactctgaactcaaagggagccaagagggcaggcacactgaatgtaacccgatttgacttaa

SEQ ID NO: 107566 - DNA, 73 bp, Homo sapiens
ctctgaactcaaagggagccaagagggcaggcacactgaatgtaacccgatttgacttaaacggaagactgag

SEQ ID NO: 107567 - DNA, 78 bp, Homo sapiens
gagccaagagggcaggcacactgaatgtaacccgatttgacttaaacggaagactgaggcaaatcattgatgtgttga

SEQ ID NO: 107568 - DNA, 77 bp, Homo sapiens
agggcaggcacactgaatgtaacccgatttgacttaaacggaagactgaggcaaatcattgatgtgttgagtattca

SEQ ID NO: 107569 - DNA, 77 bp, Homo sapiens
actgaatgtaacccgatttgacttaaacggaagactgaggcaaatcattgatgtgttgagtattcagcaacagaata

SEQ ID NO: 107570 - DNA, 76 bp, Homo sapiens
tgtaacccgatttgacttaaacggaagactgaggcaaatcattgatgtgttgagtattcagcaacagaataacaac

SEQ ID NO: 107571 - DNA, 77 bp, Homo sapiens
tttgacttaaacggaagactgaggcaaatcattgatgtgttgagtattcagcaacagaataacaacctgaaaacaga

SEQ ID NO: 107572 - DNA, 78 bp, Homo sapiens
aaatcattgatgtgttgagtattcagcaacagaataacaacctgaaaacagatgaaggagaaggttgctgtcctaaca

SEQ ID NO: 107573 - DNA, 78 bp, Homo sapiens
ttgatgtgttgagtattcagcaacagaataacaacctgaaaacagatgaaggagaaggttgctgtcctaacagcaaaa

SEQ ID NO: 107574 - DNA, 71 bp, Homo sapiens
aacagaataacaacctgaaaacagatgaaggagaaggttgctgtcctaacagcaaaatcccttaagactcc

SEQ ID NO: 107575 - DNA, 70 bp, Homo sapiens
aacaacctgaaaacagatgaaggagaaggttgctgtcctaacagcaaaatcccttaagactcccaggctt

SEQ ID NO: 107576 - DNA, 70 bp, Homo sapiens
gatgaaggagaaggttgctgtcctaacagcaaaatcccttaagactcccaggctttccgaaggtgaattt

SEQ ID NO: 107577 - DNA, 68 bp, Homo sapiens
aggagaaggttgctgtcctaacagcaaaatcccttaagactcccaggctttccgaaggtgaattttta

SEQ ID NO: 107578 - DNA, 70 bp, Homo sapiens
ctgtcctaacagcaaaatcccttaagactcccaggctttccgaaggtgaatttttaagcattgatggaaa

SEQ ID NO: 107579 - DNA, 71 bp, Homo sapiens
aaaatcccttaagactcccaggctttccgaaggtgaatttttaagcattgatggaaatgcgttaatgagca

SEQ ID NO: 107580 - DNA, 73 bp, Homo sapiens
aggctttccgaaggtgaatttttaagcattgatggaaatgcgttaatgagcatataaaattgtggttgaatgg

SEQ ID NO: 107581 - DNA, 76 bp, Homo sapiens
aaggtgaatttttaagcattgatggaaatgcgttaatgagcatataaaattgtggttgaatggtgaccaccatgcc

SEQ ID NO: 107582 - DNA, 78 bp, Homo sapiens
aatttttaagcattgatggaaatgcgttaatgagcatataaaattgtggttgaatggtgaccaccatgcctgaagctc

SEQ ID NO: 107583 - DNA, 77 bp, Homo sapiens
atggaaatgcgttaatgagcatataaaattgtggttgaatggtgaccaccatgcctgaagctctgttgaaaaattat

SEQ ID NO: 107584 - DNA, 79 bp, Homo sapiens
gttaatgagcatataaaattgtggttgaatggtgaccaccatgcctgaagctctgttgaaaaattattgacagctatat

SEQ ID NO: 107585 - DNA, 78 bp, Homo sapiens
atataaaattgtggttgaatggtgaccaccatgcctgaagctctgttgaaaaattattgacagctatattgcttattc

SEQ ID NO: 107586 - DNA, 78 bp, Homo sapiens
aaattgtggttgaatggtgaccaccatgcctgaagctctgttgaaaaattattgacagctatattgcttattcctgta

SEQ ID NO: 107587 - DNA, 77 bp, Homo sapiens
aatggtgaccaccatgcctgaagctctgttgaaaaattattgacagctatattgcttattcctgtagtggttaggaa

SEQ ID NO: 107588 - DNA, 76 bp, Homo sapiens
atgcctgaagctctgttgaaaaattattgacagctatattgcttattcctgtagtggttaggaaatgaaatgcctt

SEQ ID NO: 107589 - DNA, 76 bp, Homo sapiens
gaagctctgttgaaaaattattgacagctatattgcttattcctgtagtggttaggaaatgaaatgcctttctcta

SEQ ID NO: 107590 - DNA, 76 bp, Homo sapiens
aaattattgacagctatattgcttattcctgtagtggttaggaaatgaaatgcctttctctaatcaagtaattgca

SEQ ID NO: 107591 - DNA, 77 bp, Homo sapiens
ttgacagctatattgcttattcctgtagtggttaggaaatgaaatgcctttctctaatcaagtaattgcattaagga

SEQ ID NO: 107592 - DNA, 73 bp, Homo sapiens
ttcctgtagtggttaggaaatgaaatgcctttctctaatcaagtaattgcattaaggagctactgggaacatt

SEQ ID NO: 107593 - DNA, 71 bp, Homo sapiens
aaatgcctttctctaatcaagtaattgcattaaggagctactgggaacatttggttgcttttccggaatag

SEQ ID NO: 107594 - DNA, 74 bp, Homo sapiens
tctctaatcaagtaattgcattaaggagctactgggaacatttggttgcttttccggaataggcaagaagtcaa

SEQ ID NO: 107595 - DNA, 72 bp, Homo sapiens
aagtaattgcattaaggagctactgggaacatttggttgcttttccggaataggcaagaagtcaactgcact

SEQ ID NO: 107596 - DNA, 72 bp, Homo sapiens
taaggagctactgggaacatttggttgcttttccggaataggcaagaagtcaactgcacttcaaccaggtta

SEQ ID NO: 107597 - DNA, 72 bp, Homo sapiens
tactgggaacatttggttgcttttccggaataggcaagaagtcaactgcacttcaaccaggttaactgtcaa

SEQ ID NO: 107598 - DNA, 70 bp, Homo sapiens
atttggttgcttttccggaataggcaagaagtcaactgcacttcaaccaggttaactgtcaagaggagtt

SEQ ID NO: 107599 - DNA, 71 bp, Homo sapiens
ttttccggaataggcaagaagtcaactgcacttcaaccaggttaactgtcaagaggagtttggctcaaatt

SEQ ID NO: 107600 - DNA, 70 bp, Homo sapiens
aactgcacttcaaccaggttaactgtcaagaggagtttggctcaaatttcttttagttcaactaacatct

SEQ ID NO: 107601 - DNA, 67 bp, Homo sapiens
cttcaaccaggttaactgtcaagaggagtttggctcaaatttcttttagttcaactaacatcttttt

SEQ ID NO: 107602 - DNA, 75 bp, Homo sapiens
actgtcaagaggagtttggctcaaatttcttttagttcaactaacatcttttttttcctcatgcatatgcaagca

SEQ ID NO: 107603 - DNA, 73 bp, Homo sapiens
gaggagtttggctcaaatttcttttagttcaactaacatcttttttttcctcatgcatatgcaagcaaaagta

SEQ ID NO: 107604 - DNA, 72 bp, Homo sapiens
ggctcaaatttcttttagttcaactaacatcttttttttcctcatgcatatgcaagcaaaagtataaaaata

SEQ ID NO: 107605 - DNA, 75 bp, Homo sapiens
ttagttcaactaacatcttttttttcctcatgcatatgcaagcaaaagtataaaaataaattcagctaatagcca

SEQ ID NO: 107606 - DNA, 75 bp, Homo sapiens
tcaactaacatcttttttttcctcatgcatatgcaagcaaaagtataaaaataaattcagctaatagccaaaaca

SEQ ID NO: 107607 - DNA, 77 bp, Homo sapiens
tgcatatgcaagcaaaagtataaaaataaattcagctaatagccaaaacaaaacagcacatttgtagtaaatcctgc

SEQ ID NO: 107608 - DNA, 73 bp, Homo sapiens
gcaagcaaaagtataaaaataaattcagctaatagccaaaacaaaacagcacatttgtagtaaatcctgcctg

SEQ ID NO: 107609 - DNA, 72 bp, Homo sapiens
taaaaataaattcagctaatagccaaaacaaaacagcacatttgtagtaaatcctgcctgtttctgaaataa

SEQ ID NO: 107610 - DNA, 74 bp, Homo sapiens
aaattcagctaatagccaaaacaaaacagcacatttgtagtaaatcctgcctgtttctgaaataaaattcagca

SEQ ID NO: 107611 - DNA, 72 bp, Homo sapiens
agccaaaacaaaacagcacatttgtagtaaatcctgcctgtttctgaaataaaattcagcaaaagatgtgtt

SEQ ID NO: 107612 - DNA, 71 bp, Homo sapiens
aacaaaacagcacatttgtagtaaatcctgcctgtttctgaaataaaattcagcaaaagatgtgtttttgt

SEQ ID NO: 107613 - DNA, 65 bp, Homo sapiens
tttttgttttttctgtttaagggagagatggtggagatgtgggttttggcacaaaccttaaaccc

SEQ ID NO: 107614 - DNA, 68 bp, Homo sapiens
tttttctgtttaagggagagatggtggagatgtgggttttggcacaaaccttaaaccctaaaatgagc

SEQ ID NO: 107615 - DNA, 71 bp, Homo sapiens
tttaagggagagatggtggagatgtgggttttggcacaaaccttaaaccctaaaatgagctgcaacacagg

SEQ ID NO: 107616 - DNA, 74 bp, Homo sapiens
gtggagatgtgggttttggcacaaaccttaaaccctaaaatgagctgcaacacaggtggagtgagatggatttc

SEQ ID NO: 107617 - DNA, 74 bp, Homo sapiens
tgggttttggcacaaaccttaaaccctaaaatgagctgcaacacaggtggagtgagatggatttccagtgacta

SEQ ID NO: 107618 - DNA, 77 bp, Homo sapiens
ttggcacaaaccttaaaccctaaaatgagctgcaacacaggtggagtgagatggatttccagtgactaaggcagaca

SEQ ID NO: 107619 - DNA, 80 bp, Homo sapiens
aaccctaaaatgagctgcaacacaggtggagtgagatggatttccagtgactaaggcagacagcgtcatgcccagcttta

SEQ ID NO: 107620 - DNA, 81 bp, Homo sapiens
aacacaggtggagtgagatggatttccagtgactaaggcagacagcgtcatgcccagctttaactgtgtgaagattcattg

SEQ ID NO: 107621 - DNA, 80 bp, Homo sapiens
atttccagtgactaaggcagacagcgtcatgcccagctttaactgtgtgaagattcattgtgaattttgccatagcccaa

SEQ ID NO: 107622 - DNA, 80 bp, Homo sapiens
actaaggcagacagcgtcatgcccagctttaactgtgtgaagattcattgtgaattttgccatagcccaagcagaaagaa

SEQ ID NO: 107623 - DNA, 79 bp, Homo sapiens
acagcgtcatgcccagctttaactgtgtgaagattcattgtgaattttgccatagcccaagcagaaagaagatacattt

SEQ ID NO: 107624 - DNA, 76 bp, Homo sapiens
cccagctttaactgtgtgaagattcattgtgaattttgccatagcccaagcagaaagaagatacattttctggtta

SEQ ID NO: 107625 - DNA, 75 bp, Homo sapiens
tgaagattcattgtgaattttgccatagcccaagcagaaagaagatacattttctggttacaatagttttggttg

SEQ ID NO: 107626 - DNA, 74 bp, Homo sapiens
tgtgaattttgccatagcccaagcagaaagaagatacattttctggttacaatagttttggttggcagaattta

SEQ ID NO: 107627 - DNA, 71 bp, Homo sapiens
catagcccaagcagaaagaagatacattttctggttacaatagttttggttggcagaatttacctgaaaat

SEQ ID NO: 107628 - DNA, 72 bp, Homo sapiens
ccaagcagaaagaagatacattttctggttacaatagttttggttggcagaatttacctgaaaattcactca

SEQ ID NO: 107629 - DNA, 71 bp, Homo sapiens
gatacattttctggttacaatagttttggttggcagaatttacctgaaaattcactcaaaaaagtctctca

SEQ ID NO: 107630 - DNA, 70 bp, Homo sapiens
ctggttacaatagttttggttggcagaatttacctgaaaattcactcaaaaaagtctctcatttgaaaga

SEQ ID NO: 107631 - DNA, 71 bp, Homo sapiens
caatagttttggttggcagaatttacctgaaaattcactcaaaaaagtctctcatttgaaagatgaactgg

SEQ ID NO: 107632 - DNA, 75 bp, Homo sapiens
tggttggcagaatttacctgaaaattcactcaaaaaagtctctcatttgaaagatgaactggtagagaattgtga

SEQ ID NO: 107633 - DNA, 75 bp, Homo sapiens
tacctgaaaattcactcaaaaaagtctctcatttgaaagatgaactggtagagaattgtgaacatacagaacaag

SEQ ID NO: 107634 - DNA, 77 bp, Homo sapiens
aaaagtctctcatttgaaagatgaactggtagagaattgtgaacatacagaacaaggatataagtagacagaacaca

SEQ ID NO: 107635 - DNA, 76 bp, Homo sapiens
gatgaactggtagagaattgtgaacatacagaacaaggatataagtagacagaacacagtcatttttttgttgaag

SEQ ID NO: 107636 - DNA, 76 bp, Homo sapiens
gagaattgtgaacatacagaacaaggatataagtagacagaacacagtcatttttttgttgaagttgttactgtga

SEQ ID NO: 107637 - DNA, 73 bp, Homo sapiens
gtgaacatacagaacaaggatataagtagacagaacacagtcatttttttgttgaagttgttactgtgaaatt

SEQ ID NO: 107638 - DNA, 72 bp, Homo sapiens
caaggatataagtagacagaacacagtcatttttttgttgaagttgttactgtgaaatttcaagctccttgg

SEQ ID NO: 107639 - DNA, 71 bp, Homo sapiens
ataagtagacagaacacagtcatttttttgttgaagttgttactgtgaaatttcaagctccttgggtcttc

SEQ ID NO: 107640 - DNA, 69 bp, Homo sapiens
acacagtcatttttttgttgaagttgttactgtgaaatttcaagctccttgggtcttcgaaaggccact

SEQ ID NO: 107641 - DNA, 75 bp, Homo sapiens
aagttgttactgtgaaatttcaagctccttgggtcttcgaaaggccacttttatgtctgcagctccatagagata

SEQ ID NO: 107642 - DNA, 77 bp, Homo sapiens
tgtgaaatttcaagctccttgggtcttcgaaaggccacttttatgtctgcagctccatagagatacaaccactgaaa

SEQ ID NO: 107643 - DNA, 74 bp, Homo sapiens
tccttgggtcttcgaaaggccacttttatgtctgcagctccatagagatacaaccactgaaataaaaaacacag

SEQ ID NO: 107644 - DNA, 74 bp, Homo sapiens
aaaggccacttttatgtctgcagctccatagagatacaaccactgaaataaaaaacacagtgactgggccattt

SEQ ID NO: 107645 - DNA, 75 bp, Homo sapiens
acttttatgtctgcagctccatagagatacaaccactgaaataaaaaacacagtgactgggccattttgtttaca

SEQ ID NO: 107646 - DNA, 75 bp, Homo sapiens
agctccatagagatacaaccactgaaataaaaaacacagtgactgggccattttgtttacacagtgccacattct

SEQ ID NO: 107647 - DNA, 75 bp, Homo sapiens
atagagatacaaccactgaaataaaaaacacagtgactgggccattttgtttacacagtgccacattcttggcca

SEQ ID NO: 107648 - DNA, 74 bp, Homo sapiens
actgaaataaaaaacacagtgactgggccattttgtttacacagtgccacattcttggccagtcttgtttgtca

SEQ ID NO: 107649 - DNA, 74 bp, Homo sapiens
aaaaacacagtgactgggccattttgtttacacagtgccacattcttggccagtcttgtttgtcaccaaatggc

SEQ ID NO: 107650 - DNA, 79 bp, Homo sapiens
tgactgggccattttgtttacacagtgccacattcttggccagtcttgtttgtcaccaaatggcctgatgaatgctgtt

SEQ ID NO: 107651 - DNA, 79 bp, Homo sapiens
attttgtttacacagtgccacattcttggccagtcttgtttgtcaccaaatggcctgatgaatgctgttttgatgtcac

SEQ ID NO: 107652 - DNA, 82 bp, Homo sapiens
ttacacagtgccacattcttggccagtcttgtttgtcaccaaatggcctgatgaatgctgttttgatgtcacgccctagata

SEQ ID NO: 107653 - DNA, 76 bp, Homo sapiens
ggccagtcttgtttgtcaccaaatggcctgatgaatgctgttttgatgtcacgccctagataccactttgtgtttt

SEQ ID NO: 107654 - DNA, 78 bp, Homo sapiens
tgtttgtcaccaaatggcctgatgaatgctgttttgatgtcacgccctagataccactttgtgtttttgtgctcttgg

SEQ ID NO: 107655 - DNA, 80 bp, Homo sapiens
aatgctgttttgatgtcacgccctagataccactttgtgtttttgtgctcttgggcatgaatgggtgactagctcactca

SEQ ID NO: 107656 - DNA, 79 bp, Homo sapiens
acgccctagataccactttgtgtttttgtgctcttgggcatgaatgggtgactagctcactcatgggctgtggctctaa

SEQ ID NO: 107657 - DNA, 77 bp, Homo sapiens
actttgtgtttttgtgctcttgggcatgaatgggtgactagctcactcatgggctgtggctctaaggcccctggtta

SEQ ID NO: 107658 - DNA, 81 bp, Homo sapiens
atgaatgggtgactagctcactcatgggctgtggctctaaggcccctggttactgagcaaagttgatctgaattgctagaa

SEQ ID NO: 107659 - DNA, 77 bp, Homo sapiens
atgggctgtggctctaaggcccctggttactgagcaaagttgatctgaattgctagaacatttgagcccatttgccc

SEQ ID NO: 107660 - DNA, 77 bp, Homo sapiens
tctaaggcccctggttactgagcaaagttgatctgaattgctagaacatttgagcccatttgccccatcctgctcgt

SEQ ID NO: 107661 - DNA, 78 bp, Homo sapiens
ctggttactgagcaaagttgatctgaattgctagaacatttgagcccatttgccccatcctgctcgttctcctcctct

SEQ ID NO: 107662 - DNA, 79 bp, Homo sapiens
tactgagcaaagttgatctgaattgctagaacatttgagcccatttgccccatcctgctcgttctcctcctcttcctct

SEQ ID NO: 107663 - DNA, 82 bp, Homo sapiens
cctcctcttcctctttttctctcccatatatacagtgatatgcagggcataccactacatcatagatctcagtcctcaaagc

SEQ ID NO: 107664 - DNA, 81 bp, Homo sapiens
ctctttttctctcccatatatacagtgatatgcagggcataccactacatcatagatctcagtcctcaaagcttacaaaat

SEQ ID NO: 107665 - DNA, 82 bp, Homo sapiens
tttctctcccatatatacagtgatatgcagggcataccactacatcatagatctcagtcctcaaagcttacaaaattacttc

SEQ ID NO: 107666 - DNA, 82 bp, Homo sapiens
atatatacagtgatatgcagggcataccactacatcatagatctcagtcctcaaagcttacaaaattacttccatttgtgag

SEQ ID NO: 107667 - DNA, 78 bp, Homo sapiens
atatgcagggcataccactacatcatagatctcagtcctcaaagcttacaaaattacttccatttgtgaggtaaacta

SEQ ID NO: 107668 - DNA, 74 bp, Homo sapiens
taccactacatcatagatctcagtcctcaaagcttacaaaattacttccatttgtgaggtaaactaactcttgt

SEQ ID NO: 107669 - DNA, 75 bp, Homo sapiens
tacatcatagatctcagtcctcaaagcttacaaaattacttccatttgtgaggtaaactaactcttgttcctcag

SEQ ID NO: 107670 - DNA, 70 bp, Homo sapiens
cagtcctcaaagcttacaaaattacttccatttgtgaggtaaactaactcttgttcctcagtcttgaatt

SEQ ID NO: 107671 - DNA, 69 bp, Homo sapiens
agcttacaaaattacttccatttgtgaggtaaactaactcttgttcctcagtcttgaatttacccacca

SEQ ID NO: 107672 - DNA, 69 bp, Homo sapiens
aaaattacttccatttgtgaggtaaactaactcttgttcctcagtcttgaatttacccaccaggcttgc

SEQ ID NO: 107673 - DNA, 74 bp, Homo sapiens
atttgtgaggtaaactaactcttgttcctcagtcttgaatttacccaccaggcttgctgcaaagaatgagctta

SEQ ID NO: 107674 - DNA, 72 bp, Homo sapiens
gtaaactaactcttgttcctcagtcttgaatttacccaccaggcttgctgcaaagaatgagcttaaaaataa

SEQ ID NO: 107675 - DNA, 74 bp, Homo sapiens
actcttgttcctcagtcttgaatttacccaccaggcttgctgcaaagaatgagcttaaaaataacctgatgatt

SEQ ID NO: 107676 - DNA, 74 bp, Homo sapiens
agtcttgaatttacccaccaggcttgctgcaaagaatgagcttaaaaataacctgatgatttccacgtggcagg

SEQ ID NO: 107677 - DNA, 73 bp, Homo sapiens
aatttacccaccaggcttgctgcaaagaatgagcttaaaaataacctgatgatttccacgtggcagggccacg

SEQ ID NO: 107678 - DNA, 77 bp, Homo sapiens
aggcttgctgcaaagaatgagcttaaaaataacctgatgatttccacgtggcagggccacgggttacagagcacagc

SEQ ID NO: 107679 - DNA, 74 bp, Homo sapiens
aaagaatgagcttaaaaataacctgatgatttccacgtggcagggccacgggttacagagcacagcctgtgccc

SEQ ID NO: 107680 - DNA, 74 bp, Homo sapiens
agcttaaaaataacctgatgatttccacgtggcagggccacgggttacagagcacagcctgtgcccctaggaca

SEQ ID NO: 107681 - DNA, 76 bp, Homo sapiens
ataacctgatgatttccacgtggcagggccacgggttacagagcacagcctgtgcccctaggacaggcacccacat

SEQ ID NO: 107682 - DNA, 72 bp, Homo sapiens
agggccacgggttacagagcacagcctgtgcccctaggacaggcacccacattgttctttttggaaggagtg

SEQ ID NO: 107683 - DNA, 78 bp, Homo sapiens
ttacagagcacagcctgtgcccctaggacaggcacccacattgttctttttggaaggagtggatctgatgccagggaa

SEQ ID NO: 107684 - DNA, 75 bp, Homo sapiens
acagcctgtgcccctaggacaggcacccacattgttctttttggaaggagtggatctgatgccagggaaaggtga

SEQ ID NO: 107685 - DNA, 73 bp, Homo sapiens
ccctaggacaggcacccacattgttctttttggaaggagtggatctgatgccagggaaaggtgacacaagaaa

SEQ ID NO: 107686 - DNA, 75 bp, Homo sapiens
ggacaggcacccacattgttctttttggaaggagtggatctgatgccagggaaaggtgacacaagaaagaagctg

SEQ ID NO: 107687 - DNA, 76 bp, Homo sapiens
tttttggaaggagtggatctgatgccagggaaaggtgacacaagaaagaagctggccacgaagcctctgagctttg

SEQ ID NO: 107688 - DNA, 81 bp, Homo sapiens
agtggatctgatgccagggaaaggtgacacaagaaagaagctggccacgaagcctctgagctttgtgacctgatgctcacc

SEQ ID NO: 107689 - DNA, 82 bp, Homo sapiens
atgccagggaaaggtgacacaagaaagaagctggccacgaagcctctgagctttgtgacctgatgctcacctgacgcatggc

SEQ ID NO: 107690 - DNA, 82 bp, Homo sapiens
aaaggtgacacaagaaagaagctggccacgaagcctctgagctttgtgacctgatgctcacctgacgcatggccaggctgtc

SEQ ID NO: 107691 - DNA, 84 bp, Homo sapiens
aaagaagctggccacgaagcctctgagctttgtgacctgatgctcacctgacgcatggccaggctgtctcctctctgccaaata

SEQ ID NO: 107692 - DNA, 84 bp, Homo sapiens
gccacgaagcctctgagctttgtgacctgatgctcacctgacgcatggccaggctgtctcctctctgccaaatagggagagaaa

SEQ ID NO: 107693 - DNA, 84 bp, Homo sapiens
aagcctctgagctttgtgacctgatgctcacctgacgcatggccaggctgtctcctctctgccaaatagggagagaaactctga

SEQ ID NO: 107694 - DNA, 83 bp, Homo sapiens
tttgtgacctgatgctcacctgacgcatggccaggctgtctcctctctgccaaatagggagagaaactctgacttggccgaca

SEQ ID NO: 107695 - DNA, 81 bp, Homo sapiens
atgctcacctgacgcatggccaggctgtctcctctctgccaaatagggagagaaactctgacttggccgacatcgtgggtg

SEQ ID NO: 107696 - DNA, 74 bp, Homo sapiens
aggctgtctcctctctgccaaatagggagagaaactctgacttggccgacatcgtgggtgtgttaggtaatatt

SEQ ID NO: 107697 - DNA, 75 bp, Homo sapiens
ctctctgccaaatagggagagaaactctgacttggccgacatcgtgggtgtgttaggtaatatttgccaactgct

SEQ ID NO: 107698 - DNA, 73 bp, Homo sapiens
aaatagggagagaaactctgacttggccgacatcgtgggtgtgttaggtaatatttgccaactgctttgaaga

SEQ ID NO: 107699 - DNA, 74 bp, Homo sapiens
gaaactctgacttggccgacatcgtgggtgtgttaggtaatatttgccaactgctttgaagatgaaaagcgtta

SEQ ID NO: 107700 - DNA, 75 bp, Homo sapiens
gtgtgttaggtaatatttgccaactgctttgaagatgaaaagcgttatggggcactaaatgtgataattatcaat

SEQ ID NO: 107701 - DNA, 75 bp, Homo sapiens
tatttgccaactgctttgaagatgaaaagcgttatggggcactaaatgtgataattatcaattataaaacctcac

SEQ ID NO: 107702 - DNA, 74 bp, Homo sapiens
ttgaagatgaaaagcgttatggggcactaaatgtgataattatcaattataaaacctcactactccctggaaca

SEQ ID NO: 107703 - DNA, 70 bp, Homo sapiens
aaagcgttatggggcactaaatgtgataattatcaattataaaacctcactactccctggaacactaggg

SEQ ID NO: 107704 - DNA, 73 bp, Homo sapiens
actaaatgtgataattatcaattataaaacctcactactccctggaacactaggggcgaatgagcaggaaata

SEQ ID NO: 107705 - DNA, 71 bp, Homo sapiens
ataattatcaattataaaacctcactactccctggaacactaggggcgaatgagcaggaaatataaatgtt

SEQ ID NO: 107706 - DNA, 72 bp, Homo sapiens
aaaacctcactactccctggaacactaggggcgaatgagcaggaaatataaatgtttgtgacaggaagccag

SEQ ID NO: 107707 - DNA, 77 bp, Homo sapiens
actaggggcgaatgagcaggaaatataaatgtttgtgacaggaagccaggagccaggatggctcgtgaaatgtgaaa

SEQ ID NO: 107708 - DNA, 78 bp, Homo sapiens
aatgagcaggaaatataaatgtttgtgacaggaagccaggagccaggatggctcgtgaaatgtgaaaagttcaacaca

SEQ ID NO: 107709 - DNA, 77 bp, Homo sapiens
atataaatgtttgtgacaggaagccaggagccaggatggctcgtgaaatgtgaaaagttcaacacacagtgccctta

SEQ ID NO: 107710 - DNA, 76 bp, Homo sapiens
aatgtttgtgacaggaagccaggagccaggatggctcgtgaaatgtgaaaagttcaacacacagtgcccttacctg

SEQ ID NO: 107711 - DNA, 75 bp, Homo sapiens
aagccaggagccaggatggctcgtgaaatgtgaaaagttcaacacacagtgcccttacctggggcaagccaggaa

SEQ ID NO: 107712 - DNA, 75 bp, Homo sapiens
agccaggatggctcgtgaaatgtgaaaagttcaacacacagtgcccttacctggggcaagccaggaactcatttg

SEQ ID NO: 107713 - DNA, 74 bp, Homo sapiens
atggctcgtgaaatgtgaaaagttcaacacacagtgcccttacctggggcaagccaggaactcatttgtctttg

SEQ ID NO: 107714 - DNA, 71 bp, Homo sapiens
agttcaacacacagtgcccttacctggggcaagccaggaactcatttgtctttggaaggtaaatgcttcct

SEQ ID NO: 107715 - DNA, 72 bp, Homo sapiens
acagtgcccttacctggggcaagccaggaactcatttgtctttggaaggtaaatgcttccttgagctaacga

SEQ ID NO: 107716 - DNA, 71 bp, Homo sapiens
tacctggggcaagccaggaactcatttgtctttggaaggtaaatgcttccttgagctaacgaggtggcccc

SEQ ID NO: 107717 - DNA, 70 bp, Homo sapiens
aggaactcatttgtctttggaaggtaaatgcttccttgagctaacgaggtggccccctgagagactacct

SEQ ID NO: 107718 - DNA, 69 bp, Homo sapiens
aaggtaaatgcttccttgagctaacgaggtggccccctgagagactaccttattaagtactcctggaat

SEQ ID NO: 107719 - DNA, 71 bp, Homo sapiens
ttgagctaacgaggtggccccctgagagactaccttattaagtactcctggaattctgggcaaggggtgcc

SEQ ID NO: 107720 - DNA, 70 bp, Homo sapiens
aggtggccccctgagagactaccttattaagtactcctggaattctgggcaaggggtgcctgtgtacctc

SEQ ID NO: 107721 - DNA, 72 bp, Homo sapiens
agagactaccttattaagtactcctggaattctgggcaaggggtgcctgtgtacctctccagtgccacctgg

SEQ ID NO: 107722 - DNA, 74 bp, Homo sapiens
ttattaagtactcctggaattctgggcaaggggtgcctgtgtacctctccagtgccacctgggtgccatgaaaa

SEQ ID NO: 107723 - DNA, 73 bp, Homo sapiens
agtactcctggaattctgggcaaggggtgcctgtgtacctctccagtgccacctgggtgccatgaaaaaaatg

SEQ ID NO: 107724 - DNA, 73 bp, Homo sapiens
aattctgggcaaggggtgcctgtgtacctctccagtgccacctgggtgccatgaaaaaaatgtcccacttgga

SEQ ID NO: 107725 - DNA, 73 bp, Homo sapiens
ggtgcctgtgtacctctccagtgccacctgggtgccatgaaaaaaatgtcccacttggagtttggcctgggct

SEQ ID NO: 107726 - DNA, 72 bp, Homo sapiens
ctgtgtacctctccagtgccacctgggtgccatgaaaaaaatgtcccacttggagtttggcctgggcttttc

SEQ ID NO: 107727 - DNA, 71 bp, Homo sapiens
tccagtgccacctgggtgccatgaaaaaaatgtcccacttggagtttggcctgggcttttccctcatcctt

SEQ ID NO: 107728 - DNA, 69 bp, Homo sapiens
aaaaaatgtcccacttggagtttggcctgggcttttccctcatcctttctctattatccgaggataaca

SEQ ID NO: 107729 - DNA, 72 bp, Homo sapiens
atgtcccacttggagtttggcctgggcttttccctcatcctttctctattatccgaggataacagggtgata

SEQ ID NO: 107730 - DNA, 75 bp, Homo sapiens
gcttttccctcatcctttctctattatccgaggataacagggtgatagactgaagacctctgggccgttcagata

SEQ ID NO: 107731 - DNA, 76 bp, Homo sapiens
catcctttctctattatccgaggataacagggtgatagactgaagacctctgggccgttcagatattcgtacattc

SEQ ID NO: 107732 - DNA, 83 bp, Homo sapiens
aggataacagggtgatagactgaagacctctgggccgttcagatattcgtacattctagacacacatcatgatgatattcaca

SEQ ID NO: 107733 - DNA, 85 bp, Homo sapiens
aacagggtgatagactgaagacctctgggccgttcagatattcgtacattctagacacacatcatgatgatattcacacatcata

SEQ ID NO: 107734 - DNA, 85 bp, Homo sapiens
actgaagacctctgggccgttcagatattcgtacattctagacacacatcatgatgatattcacacatcataatcattgagcttt

SEQ ID NO: 107735 - DNA, 87 bp, Homo sapiens
cgttcagatattcgtacattctagacacacatcatgatgatattcacacatcataatcattgagcttttgcaaggatcccggaatga

SEQ ID NO: 107736 - DNA, 87 bp, Homo sapiens
ttcgtacattctagacacacatcatgatgatattcacacatcataatcattgagcttttgcaaggatcccggaatgaggcacacacc

SEQ ID NO: 107737 - DNA, 86 bp, Homo sapiens
atcatgatgatattcacacatcataatcattgagcttttgcaaggatcccggaatgaggcacacacctcctctggccatttgattg

SEQ ID NO: 107738 - DNA, 80 bp, Homo sapiens
acacatcataatcattgagcttttgcaaggatcccggaatgaggcacacacctcctctggccatttgattgtgtttataa

SEQ ID NO: 107739 - DNA, 78 bp, Homo sapiens
ataatcattgagcttttgcaaggatcccggaatgaggcacacacctcctctggccatttgattgtgtttataaactga

SEQ ID NO: 107740 - DNA, 75 bp, Homo sapiens
ttttgcaaggatcccggaatgaggcacacacctcctctggccatttgattgtgtttataaactgaagtgttcttg

SEQ ID NO: 107741 - DNA, 74 bp, Homo sapiens
atcccggaatgaggcacacacctcctctggccatttgattgtgtttataaactgaagtgttcttgtcttggaaa

SEQ ID NO: 107742 - DNA, 75 bp, Homo sapiens
ggaatgaggcacacacctcctctggccatttgattgtgtttataaactgaagtgttcttgtcttggaaatcttta

SEQ ID NO: 107743 - DNA, 72 bp, Homo sapiens
acacctcctctggccatttgattgtgtttataaactgaagtgttcttgtcttggaaatctttagccttttca

SEQ ID NO: 107744 - DNA, 72 bp, Homo sapiens
ccatttgattgtgtttataaactgaagtgttcttgtcttggaaatctttagccttttcagggtcatctggaa

SEQ ID NO: 107745 - DNA, 71 bp, Homo sapiens
attgtgtttataaactgaagtgttcttgtcttggaaatctttagccttttcagggtcatctggaatcccga

SEQ ID NO: 107746 - DNA, 76 bp, Homo sapiens
agtgttcttgtcttggaaatctttagccttttcagggtcatctggaatcccgaggctgatgtcatgtccggctatc

SEQ ID NO: 107747 - DNA, 79 bp, Homo sapiens
tttagccttttcagggtcatctggaatcccgaggctgatgtcatgtccggctatcggcacatgtagtgtaggcagttta

SEQ ID NO: 107748 - DNA, 82 bp, Homo sapiens
cgaggctgatgtcatgtccggctatcggcacatgtagtgtaggcagtttactctatggcttcatctgaggggtatggggcag

SEQ ID NO: 107749 - DNA, 81 bp, Homo sapiens
tatcggcacatgtagtgtaggcagtttactctatggcttcatctgaggggtatggggcaggatgtctgtcccagtagccaa

SEQ ID NO: 107750 - DNA, 75 bp, Homo sapiens
tagtgtaggcagtttactctatggcttcatctgaggggtatggggcaggatgtctgtcccagtagccaacccttt

SEQ ID NO: 107751 - DNA, 74 bp, Homo sapiens
agtttactctatggcttcatctgaggggtatggggcaggatgtctgtcccagtagccaacccttttgcccgtca

SEQ ID NO: 107752 - DNA, 76 bp, Homo sapiens
tatggcttcatctgaggggtatggggcaggatgtctgtcccagtagccaacccttttgcccgtcaggccaccaatg

SEQ ID NO: 107753 - DNA, 72 bp, Homo sapiens
atctgaggggtatggggcaggatgtctgtcccagtagccaacccttttgcccgtcaggccaccaatgggaat

SEQ ID NO: 107754 - DNA, 74 bp, Homo sapiens
gtatggggcaggatgtctgtcccagtagccaacccttttgcccgtcaggccaccaatgggaatttctcttgcca

SEQ ID NO: 107755 - DNA, 71 bp, Homo sapiens
atgtctgtcccagtagccaacccttttgcccgtcaggccaccaatgggaatttctcttgccagtggtttgt

SEQ ID NO: 107756 - DNA, 69 bp, Homo sapiens
agtagccaacccttttgcccgtcaggccaccaatgggaatttctcttgccagtggtttgtttgtacaag

SEQ ID NO: 107757 - DNA, 70 bp, Homo sapiens
ccttttgcccgtcaggccaccaatgggaatttctcttgccagtggtttgtttgtacaagtctcccaacaa

SEQ ID NO: 107758 - DNA, 74 bp, Homo sapiens
tcaggccaccaatgggaatttctcttgccagtggtttgtttgtacaagtctcccaacaaatgcatccttgtaaa

SEQ ID NO: 107759 - DNA, 72 bp, Homo sapiens
accaatgggaatttctcttgccagtggtttgtttgtacaagtctcccaacaaatgcatccttgtaaaggatg

SEQ ID NO: 107760 - DNA, 73 bp, Homo sapiens
tctcttgccagtggtttgtttgtacaagtctcccaacaaatgcatccttgtaaaggatggcggtaaaataata

SEQ ID NO: 107761 - DNA, 69 bp, Homo sapiens
agtggtttgtttgtacaagtctcccaacaaatgcatccttgtaaaggatggcggtaaaataataactcc

SEQ ID NO: 107762 - DNA, 70 bp, Homo sapiens
ttgtttgtacaagtctcccaacaaatgcatccttgtaaaggatggcggtaaaataataactccttctagt

SEQ ID NO: 107763 - DNA, 69 bp, Homo sapiens
agtctcccaacaaatgcatccttgtaaaggatggcggtaaaataataactccttctagttcatcttttt

SEQ ID NO: 107764 - DNA, 67 bp, Homo sapiens
gtaaaggatggcggtaaaataataactccttctagttcatcttttttgaaagacagacaaatttggg

SEQ ID NO: 107765 - DNA, 70 bp, Homo sapiens
ctagttcatcttttttgaaagacagacaaatttgggggcactcagaagaattacaattatttacctcctg

SEQ ID NO: 107766 - DNA, 72 bp, Homo sapiens
catcttttttgaaagacagacaaatttgggggcactcagaagaattacaattatttacctcctgtgagataa

SEQ ID NO: 107767 - DNA, 75 bp, Homo sapiens
aagaattacaattatttacctcctgtgagataaagggctgtctaacaggctgatgtgtggccaggacaaaacaga

SEQ ID NO: 107768 - DNA, 78 bp, Homo sapiens
attatttacctcctgtgagataaagggctgtctaacaggctgatgtgtggccaggacaaaacagagcagaaacagtgc

SEQ ID NO: 107769 - DNA, 82 bp, Homo sapiens
tgagataaagggctgtctaacaggctgatgtgtggccaggacaaaacagagcagaaacagtgcccattactgagcaagtaga

SEQ ID NO: 107770 - DNA, 80 bp, Homo sapiens
taaagggctgtctaacaggctgatgtgtggccaggacaaaacagagcagaaacagtgcccattactgagcaagtagacaa

SEQ ID NO: 107771 - DNA, 80 bp, Homo sapiens
taacaggctgatgtgtggccaggacaaaacagagcagaaacagtgcccattactgagcaagtagacaacacgggactcca

SEQ ID NO: 107772 - DNA, 78 bp, Homo sapiens
atgtgtggccaggacaaaacagagcagaaacagtgcccattactgagcaagtagacaacacgggactccaagtctaga

SEQ ID NO: 107773 - DNA, 78 bp, Homo sapiens
aggacaaaacagagcagaaacagtgcccattactgagcaagtagacaacacgggactccaagtctagacactgccagc

SEQ ID NO: 107774 - DNA, 82 bp, Homo sapiens
gcagaaacagtgcccattactgagcaagtagacaacacgggactccaagtctagacactgccagcgcccagctgtgtgctta

SEQ ID NO: 107775 - DNA, 81 bp, Homo sapiens
agtgcccattactgagcaagtagacaacacgggactccaagtctagacactgccagcgcccagctgtgtgcttatggcgaa

SEQ ID NO: 107776 - DNA, 78 bp, Homo sapiens
ttactgagcaagtagacaacacgggactccaagtctagacactgccagcgcccagctgtgtgcttatggcgaacccct

SEQ ID NO: 107777 - DNA, 74 bp, Homo sapiens
aagtagacaacacgggactccaagtctagacactgccagcgcccagctgtgtgcttatggcgaaccccttcccc

SEQ ID NO: 107778 - DNA, 74 bp, Homo sapiens
acgggactccaagtctagacactgccagcgcccagctgtgtgcttatggcgaaccccttcccctcccctacaga

SEQ ID NO: 107779 - DNA, 77 bp, Homo sapiens
aagtctagacactgccagcgcccagctgtgtgcttatggcgaaccccttcccctcccctacagaggctcagtgaaca

SEQ ID NO: 107780 - DNA, 75 bp, Homo sapiens
ccagcgcccagctgtgtgcttatggcgaaccccttcccctcccctacagaggctcagtgaacattcgtaaaatga

SEQ ID NO: 107781 - DNA, 71 bp, Homo sapiens
cttatggcgaaccccttcccctcccctacagaggctcagtgaacattcgtaaaatgaaaccagcccagcta

SEQ ID NO: 107782 - DNA, 71 bp, Homo sapiens
cccttcccctcccctacagaggctcagtgaacattcgtaaaatgaaaccagcccagctaggcaaatgattt

SEQ ID NO: 107783 - DNA, 73 bp, Homo sapiens
ctcccctacagaggctcagtgaacattcgtaaaatgaaaccagcccagctaggcaaatgattttaagtccttc

SEQ ID NO: 107784 - DNA, 73 bp, Homo sapiens
aggctcagtgaacattcgtaaaatgaaaccagcccagctaggcaaatgattttaagtccttccttgctctaaa

SEQ ID NO: 107785 - DNA, 71 bp, Homo sapiens
aacattcgtaaaatgaaaccagcccagctaggcaaatgattttaagtccttccttgctctaaagactcaaa

SEQ ID NO: 107786 - DNA, 70 bp, Homo sapiens
gtaaaatgaaaccagcccagctaggcaaatgattttaagtccttccttgctctaaagactcaaacaaatt

SEQ ID NO: 107787 - DNA, 66 bp, Homo sapiens
aaaaaaaaagactcaatgttttttgagctacaggtctccagtggtattgttaggggaacaaagaag

SEQ ID NO: 107788 - DNA, 72 bp, Homo sapiens
aagactcaatgttttttgagctacaggtctccagtggtattgttaggggaacaaagaagtgcactgtgactt

SEQ ID NO: 107789 - DNA, 74 bp, Homo sapiens
ttttgagctacaggtctccagtggtattgttaggggaacaaagaagtgcactgtgactttcctgggagaagcta

SEQ ID NO: 107790 - DNA, 74 bp, Homo sapiens
agctacaggtctccagtggtattgttaggggaacaaagaagtgcactgtgactttcctgggagaagctaccagc

SEQ ID NO: 107791 - DNA, 73 bp, Homo sapiens
agtggtattgttaggggaacaaagaagtgcactgtgactttcctgggagaagctaccagctgcgtgaccctgg

SEQ ID NO: 107792 - DNA, 74 bp, Homo sapiens
ttgttaggggaacaaagaagtgcactgtgactttcctgggagaagctaccagctgcgtgaccctgggcaaggta

SEQ ID NO: 107793 - DNA, 77 bp, Homo sapiens
aacaaagaagtgcactgtgactttcctgggagaagctaccagctgcgtgaccctgggcaaggtacgcaagctctctg

SEQ ID NO: 107794 - DNA, 76 bp, Homo sapiens
ctgtgactttcctgggagaagctaccagctgcgtgaccctgggcaaggtacgcaagctctctgtccctcagttcct

SEQ ID NO: 107795 - DNA, 75 bp, Homo sapiens
actttcctgggagaagctaccagctgcgtgaccctgggcaaggtacgcaagctctctgtccctcagttccttcac

SEQ ID NO: 107796 - DNA, 75 bp, Homo sapiens
agaagctaccagctgcgtgaccctgggcaaggtacgcaagctctctgtccctcagttccttcacctcaaaatggg

SEQ ID NO: 107797 - DNA, 76 bp, Homo sapiens
tgcgtgaccctgggcaaggtacgcaagctctctgtccctcagttccttcacctcaaaatggggataacaatgtatc

SEQ ID NO: 107798 - DNA, 76 bp, Homo sapiens
ctgggcaaggtacgcaagctctctgtccctcagttccttcacctcaaaatggggataacaatgtatctacctcata

SEQ ID NO: 107799 - DNA, 75 bp, Homo sapiens
aggtacgcaagctctctgtccctcagttccttcacctcaaaatggggataacaatgtatctacctcataggattc

SEQ ID NO: 107800 - DNA, 77 bp, Homo sapiens
tctctgtccctcagttccttcacctcaaaatggggataacaatgtatctacctcataggattctgaggattacacaa

SEQ ID NO: 107801 - DNA, 75 bp, Homo sapiens
agttccttcacctcaaaatggggataacaatgtatctacctcataggattctgaggattacacaagctaatacta

SEQ ID NO: 107802 - DNA, 78 bp, Homo sapiens
ttcacctcaaaatggggataacaatgtatctacctcataggattctgaggattacacaagctaatactaaggcatgga

SEQ ID NO: 107803 - DNA, 81 bp, Homo sapiens
gggataacaatgtatctacctcataggattctgaggattacacaagctaatactaaggcatggagaacagtgcctagcaca

SEQ ID NO: 107804 - DNA, 82 bp, Homo sapiens
acaatgtatctacctcataggattctgaggattacacaagctaatactaaggcatggagaacagtgcctagcacatcataaa

SEQ ID NO: 107805 - DNA, 82 bp, Homo sapiens
attacacaagctaatactaaggcatggagaacagtgcctagcacatcataaatgcagtgtggatgttggtgaataaatagaa

SEQ ID NO: 107806 - DNA, 80 bp, Homo sapiens
taatactaaggcatggagaacagtgcctagcacatcataaatgcagtgtggatgttggtgaataaatagaaagaaaataa

SEQ ID NO: 107807 - DNA, 79 bp, Homo sapiens
atggagaacagtgcctagcacatcataaatgcagtgtggatgttggtgaataaatagaaagaaaataaactacagattc

SEQ ID NO: 107808 - DNA, 78 bp, Homo sapiens
tgcctagcacatcataaatgcagtgtggatgttggtgaataaatagaaagaaaataaactacagattcctttggcagt

SEQ ID NO: 107809 - DNA, 77 bp, Homo sapiens
tcataaatgcagtgtggatgttggtgaataaatagaaagaaaataaactacagattcctttggcagttagagagaga

SEQ ID NO: 107810 - DNA, 76 bp, Homo sapiens
aatgcagtgtggatgttggtgaataaatagaaagaaaataaactacagattcctttggcagttagagagagacaca

SEQ ID NO: 107811 - DNA, 73 bp, Homo sapiens
ggatgttggtgaataaatagaaagaaaataaactacagattcctttggcagttagagagagacacagagttaa

SEQ ID NO: 107812 - DNA, 71 bp, Homo sapiens
aataaatagaaagaaaataaactacagattcctttggcagttagagagagacacagagttaaggccctgaa

SEQ ID NO: 107813 - DNA, 72 bp, Homo sapiens
aaataaactacagattcctttggcagttagagagagacacagagttaaggccctgaagtgcattaaaaataa

SEQ ID NO: 107814 - DNA, 74 bp, Homo sapiens
aactacagattcctttggcagttagagagagacacagagttaaggccctgaagtgcattaaaaataagaccaga

SEQ ID NO: 107815 - DNA, 76 bp, Homo sapiens
tttggcagttagagagagacacagagttaaggccctgaagtgcattaaaaataagaccagaagagagaagataaga

SEQ ID NO: 107816 - DNA, 74 bp, Homo sapiens
agagagacacagagttaaggccctgaagtgcattaaaaataagaccagaagagagaagataagaagacctgaac

SEQ ID NO: 107817 - DNA, 71 bp, Homo sapiens
agagttaaggccctgaagtgcattaaaaataagaccagaagagagaagataagaagacctgaacgtactaa

SEQ ID NO: 107818 - DNA, 72 bp, Homo sapiens
ccctgaagtgcattaaaaataagaccagaagagagaagataagaagacctgaacgtactaaagaagcaaata

SEQ ID NO: 107819 - DNA, 69 bp, Homo sapiens
taagaccagaagagagaagataagaagacctgaacgtactaaagaagcaaatatttagaaaaagttaag

SEQ ID NO: 107820 - DNA, 71 bp, Homo sapiens
agagagaagataagaagacctgaacgtactaaagaagcaaatatttagaaaaagttaaggagctggaagca

SEQ ID NO: 107821 - DNA, 72 bp, Homo sapiens
aagataagaagacctgaacgtactaaagaagcaaatatttagaaaaagttaaggagctggaagcatctcatc

SEQ ID NO: 107822 - DNA, 69 bp, Homo sapiens
acctgaacgtactaaagaagcaaatatttagaaaaagttaaggagctggaagcatctcatccgggttgg

SEQ ID NO: 107823 - DNA, 71 bp, Homo sapiens
atatttagaaaaagttaaggagctggaagcatctcatccgggttgggatgagtggtggtgggtggttcatt

SEQ ID NO: 107824 - DNA, 71 bp, Homo sapiens
agaaaaagttaaggagctggaagcatctcatccgggttgggatgagtggtggtgggtggttcatttcttta

SEQ ID NO: 107825 - DNA, 73 bp, Homo sapiens
aaggagctggaagcatctcatccgggttgggatgagtggtggtgggtggttcatttctttaggaacctgagta

SEQ ID NO: 107826 - DNA, 71 bp, Homo sapiens
gtggtggtgggtggttcatttctttaggaacctgagtacctgagggagaaagctcagctgggaactggagt

SEQ ID NO: 107827 - DNA, 71 bp, Homo sapiens
gtggttcatttctttaggaacctgagtacctgagggagaaagctcagctgggaactggagttagaaggaaa

SEQ ID NO: 107828 - DNA, 69 bp, Homo sapiens
atttctttaggaacctgagtacctgagggagaaagctcagctgggaactggagttagaaggaaaaagta

SEQ ID NO: 107829 - DNA, 74 bp, Homo sapiens
aggaacctgagtacctgagggagaaagctcagctgggaactggagttagaaggaaaaagtatcaagagcactga

SEQ ID NO: 107830 - DNA, 78 bp, Homo sapiens
tgagggagaaagctcagctgggaactggagttagaaggaaaaagtatcaagagcactgagtgcctccagctggtccta

SEQ ID NO: 107831 - DNA, 78 bp, Homo sapiens
aagctcagctgggaactggagttagaaggaaaaagtatcaagagcactgagtgcctccagctggtcctaaagctgata

SEQ ID NO: 107832 - DNA, 76 bp, Homo sapiens
ggaactggagttagaaggaaaaagtatcaagagcactgagtgcctccagctggtcctaaagctgataagcctagtc

SEQ ID NO: 107833 - DNA, 75 bp, Homo sapiens
agttagaaggaaaaagtatcaagagcactgagtgcctccagctggtcctaaagctgataagcctagtcttctggg

SEQ ID NO: 107834 - DNA, 78 bp, Homo sapiens
aaaaagtatcaagagcactgagtgcctccagctggtcctaaagctgataagcctagtcttctggggagaggctgatcc

SEQ ID NO: 107835 - DNA, 81 bp, Homo sapiens
atcaagagcactgagtgcctccagctggtcctaaagctgataagcctagtcttctggggagaggctgatccctgctgggaa

SEQ ID NO: 107836 - DNA, 77 bp, Homo sapiens
tggtcctaaagctgataagcctagtcttctggggagaggctgatccctgctgggaacccatcagtactgaggaagaa

SEQ ID NO: 107837 - DNA, 78 bp, Homo sapiens
taaagctgataagcctagtcttctggggagaggctgatccctgctgggaacccatcagtactgaggaagaacagtgag

SEQ ID NO: 107838 - DNA, 78 bp, Homo sapiens
taagcctagtcttctggggagaggctgatccctgctgggaacccatcagtactgaggaagaacagtgaggactagaga

SEQ ID NO: 107839 - DNA, 78 bp, Homo sapiens
ttctggggagaggctgatccctgctgggaacccatcagtactgaggaagaacagtgaggactagagaaggagcaattg

SEQ ID NO: 107840 - DNA, 79 bp, Homo sapiens
tgatccctgctgggaacccatcagtactgaggaagaacagtgaggactagagaaggagcaattgtgcagggtgggcaac

SEQ ID NO: 107841 - DNA, 76 bp, Homo sapiens
atcagtactgaggaagaacagtgaggactagagaaggagcaattgtgcagggtgggcaacctagtaacagggtcaa

SEQ ID NO: 107842 - DNA, 73 bp, Homo sapiens
actgaggaagaacagtgaggactagagaaggagcaattgtgcagggtgggcaacctagtaacagggtcaaggg

SEQ ID NO: 107843 - DNA, 72 bp, Homo sapiens
aacagtgaggactagagaaggagcaattgtgcagggtgggcaacctagtaacagggtcaagggggctacctg

SEQ ID NO: 107844 - DNA, 72 bp, Homo sapiens
agcaattgtgcagggtgggcaacctagtaacagggtcaagggggctacctggatgaggaggggagcaccagg

SEQ ID NO: 107845 - DNA, 68 bp, Homo sapiens
agggtgggcaacctagtaacagggtcaagggggctacctggatgaggaggggagcaccaggggtgtag

SEQ ID NO: 107846 - DNA, 69 bp, Homo sapiens
aacctagtaacagggtcaagggggctacctggatgaggaggggagcaccaggggtgtaggactgggctg

SEQ ID NO: 107847 - DNA, 74 bp, Homo sapiens
gtcaagggggctacctggatgaggaggggagcaccaggggtgtaggactgggctggcaggtgaggttatgttca

SEQ ID NO: 107848 - DNA, 75 bp, Homo sapiens
ctacctggatgaggaggggagcaccaggggtgtaggactgggctggcaggtgaggttatgttcagagggctccag

SEQ ID NO: 107849 - DNA, 74 bp, Homo sapiens
atgaggaggggagcaccaggggtgtaggactgggctggcaggtgaggttatgttcagagggctccagtgggaaa

SEQ ID NO: 107850 - DNA, 80 bp, Homo sapiens
tgtaggactgggctggcaggtgaggttatgttcagagggctccagtgggaaatctggcatgtggaggtcggcttgcacag

SEQ ID NO: 107851 - DNA, 82 bp, Homo sapiens
tgaggttatgttcagagggctccagtgggaaatctggcatgtggaggtcggcttgcacagggggtcagcgagcagagacaca

SEQ ID NO: 107852 - DNA, 83 bp, Homo sapiens
tccagtgggaaatctggcatgtggaggtcggcttgcacagggggtcagcgagcagagacacagaagagcagaactcagtaaca

SEQ ID NO: 107853 - DNA, 82 bp, Homo sapiens
aaatctggcatgtggaggtcggcttgcacagggggtcagcgagcagagacacagaagagcagaactcagtaacacaggcagg

SEQ ID NO: 107854 - DNA, 82 bp, Homo sapiens
atgtggaggtcggcttgcacagggggtcagcgagcagagacacagaagagcagaactcagtaacacaggcaggggtccagca

SEQ ID NO: 107855 - DNA, 82 bp, Homo sapiens
ggtcggcttgcacagggggtcagcgagcagagacacagaagagcagaactcagtaacacaggcaggggtccagcaccagatc

SEQ ID NO: 107856 - DNA, 82 bp, Homo sapiens
ggggtcagcgagcagagacacagaagagcagaactcagtaacacaggcaggggtccagcaccagatcggggcatcggtcaca

SEQ ID NO: 107857 - DNA, 82 bp, Homo sapiens
agcagagacacagaagagcagaactcagtaacacaggcaggggtccagcaccagatcggggcatcggtcacaagagagaagc

SEQ ID NO: 107858 - DNA, 75 bp, Homo sapiens
taacacaggcaggggtccagcaccagatcggggcatcggtcacaagagagaagcttggggcaaaatctgggaatt

SEQ ID NO: 107859 - DNA, 75 bp, Homo sapiens
gggtccagcaccagatcggggcatcggtcacaagagagaagcttggggcaaaatctgggaatttccaggaacaca

SEQ ID NO: 107860 - DNA, 75 bp, Homo sapiens
accagatcggggcatcggtcacaagagagaagcttggggcaaaatctgggaatttccaggaacacagctgttctg

SEQ ID NO: 107861 - DNA, 78 bp, Homo sapiens
ggcatcggtcacaagagagaagcttggggcaaaatctgggaatttccaggaacacagctgttctgtgtgtggtagaga

SEQ ID NO: 107862 - DNA, 76 bp, Homo sapiens
acaagagagaagcttggggcaaaatctgggaatttccaggaacacagctgttctgtgtgtggtagagactcaacca

SEQ ID NO: 107863 - DNA, 77 bp, Homo sapiens
agaagcttggggcaaaatctgggaatttccaggaacacagctgttctgtgtgtggtagagactcaaccatgtgttca

SEQ ID NO: 107864 - DNA, 75 bp, Homo sapiens
aaaatctgggaatttccaggaacacagctgttctgtgtgtggtagagactcaaccatgtgttcaccaaatccatt

SEQ ID NO: 107865 - DNA, 78 bp, Homo sapiens
aacacagctgttctgtgtgtggtagagactcaaccatgtgttcaccaaatccatttcctgttcttcctgggtccatga

SEQ ID NO: 107866 - DNA, 77 bp, Homo sapiens
ttctgtgtgtggtagagactcaaccatgtgttcaccaaatccatttcctgttcttcctgggtccatgactacagaaa

SEQ ID NO: 107867 - DNA, 77 bp, Homo sapiens
tgtggtagagactcaaccatgtgttcaccaaatccatttcctgttcttcctgggtccatgactacagaaatgtcctg

SEQ ID NO: 107868 - DNA, 74 bp, Homo sapiens
actcaaccatgtgttcaccaaatccatttcctgttcttcctgggtccatgactacagaaatgtcctgggctccc

SEQ ID NO: 107869 - DNA, 75 bp, Homo sapiens
tgtgttcaccaaatccatttcctgttcttcctgggtccatgactacagaaatgtcctgggctccctgctgccccg

SEQ ID NO: 107870 - DNA, 75 bp, Homo sapiens
ttcttcctgggtccatgactacagaaatgtcctgggctccctgctgccccggctcccgataggtggaagctggct

SEQ ID NO: 107871 - DNA, 79 bp, Homo sapiens
tacagaaatgtcctgggctccctgctgccccggctcccgataggtggaagctggcttgtgactgagtctgaccagtgga

SEQ ID NO: 107872 - DNA, 79 bp, Homo sapiens
ctgggctccctgctgccccggctcccgataggtggaagctggcttgtgactgagtctgaccagtggactatgaacagaa

SEQ ID NO: 107873 - DNA, 78 bp, Homo sapiens
cccggctcccgataggtggaagctggcttgtgactgagtctgaccagtggactatgaacagaagtggggagcatccca

SEQ ID NO: 107874 - DNA, 79 bp, Homo sapiens
ataggtggaagctggcttgtgactgagtctgaccagtggactatgaacagaagtggggagcatcccaggcttggtccca

SEQ ID NO: 107875 - DNA, 76 bp, Homo sapiens
cagtggactatgaacagaagtggggagcatcccaggcttggtcccaaaggctcccctgcaagatcctccactctta

SEQ ID NO: 107876 - DNA, 73 bp, Homo sapiens
tatgaacagaagtggggagcatcccaggcttggtcccaaaggctcccctgcaagatcctccactcttaccctt

SEQ ID NO: 107877 - DNA, 73 bp, Homo sapiens
aagtggggagcatcccaggcttggtcccaaaggctcccctgcaagatcctccactcttaccctttcctgctga

SEQ ID NO: 107878 - DNA, 74 bp, Homo sapiens
atcccaggcttggtcccaaaggctcccctgcaagatcctccactcttaccctttcctgctgactgggtgcagac

SEQ ID NO: 107879 - DNA, 76 bp, Homo sapiens
ttggtcccaaaggctcccctgcaagatcctccactcttaccctttcctgctgactgggtgcagaccaacatgacac

SEQ ID NO: 107880 - DNA, 74 bp, Homo sapiens
aaaggctcccctgcaagatcctccactcttaccctttcctgctgactgggtgcagaccaacatgacacgtttgg

SEQ ID NO: 107881 - DNA, 81 bp, Homo sapiens
ttcctgctgactgggtgcagaccaacatgacacgtttgggagatggaagagccatggatggaagaagcttgggtcactgaa

SEQ ID NO: 107882 - DNA, 79 bp, Homo sapiens
actgggtgcagaccaacatgacacgtttgggagatggaagagccatggatggaagaagcttgggtcactgaatctgatt

SEQ ID NO: 107883 - DNA, 78 bp, Homo sapiens
agaccaacatgacacgtttgggagatggaagagccatggatggaagaagcttgggtcactgaatctgatttggaacac

SEQ ID NO: 107884 - DNA, 76 bp, Homo sapiens
atgacacgtttgggagatggaagagccatggatggaagaagcttgggtcactgaatctgatttggaacacctattt

SEQ ID NO: 107885 - DNA, 79 bp, Homo sapiens
agatggaagagccatggatggaagaagcttgggtcactgaatctgatttggaacacctattttggaacatactgcaata

SEQ ID NO: 107886 - DNA, 77 bp, Homo sapiens
gccatggatggaagaagcttgggtcactgaatctgatttggaacacctattttggaacatactgcaataactactta

SEQ ID NO: 107887 - DNA, 74 bp, Homo sapiens
atggaagaagcttgggtcactgaatctgatttggaacacctattttggaacatactgcaataactacttagatt

SEQ ID NO: 107888 - DNA, 73 bp, Homo sapiens
cttgggtcactgaatctgatttggaacacctattttggaacatactgcaataactacttagatttctggattt

SEQ ID NO: 107889 - DNA, 74 bp, Homo sapiens
ctgaatctgatttggaacacctattttggaacatactgcaataactacttagatttctggattttgttgttaca

SEQ ID NO: 107890 - DNA, 75 bp, Homo sapiens
tggaacacctattttggaacatactgcaataactacttagatttctggattttgttgttacatctgtcagtgtta

SEQ ID NO: 107891 - DNA, 74 bp, Homo sapiens
cctattttggaacatactgcaataactacttagatttctggattttgttgttacatctgtcagtgttataaatg

SEQ ID NO: 107892 - DNA, 75 bp, Homo sapiens
catactgcaataactacttagatttctggattttgttgttacatctgtcagtgttataaatgtaaaccagtaagc

SEQ ID NO: 107893 - DNA, 75 bp, Homo sapiens
ctacttagatttctggattttgttgttacatctgtcagtgttataaatgtaaaccagtaagctgaggctttcatg

SEQ ID NO: 107894 - DNA, 77 bp, Homo sapiens
tttctggattttgttgttacatctgtcagtgttataaatgtaaaccagtaagctgaggctttcatggatagaatcaa

SEQ ID NO: 107895 - DNA, 76 bp, Homo sapiens
tttgttgttacatctgtcagtgttataaatgtaaaccagtaagctgaggctttcatggatagaatcaatcaaaggt

SEQ ID NO: 107896 - DNA, 75 bp, Homo sapiens
atctgtcagtgttataaatgtaaaccagtaagctgaggctttcatggatagaatcaatcaaaggttaaggtcaaa

SEQ ID NO: 107897 - DNA, 75 bp, Homo sapiens
gttataaatgtaaaccagtaagctgaggctttcatggatagaatcaatcaaaggttaaggtcaaagacattctga

SEQ ID NO: 107898 - DNA, 76 bp, Homo sapiens
aatgtaaaccagtaagctgaggctttcatggatagaatcaatcaaaggttaaggtcaaagacattctgagacttgc

SEQ ID NO: 107899 - DNA, 76 bp, Homo sapiens
agtaagctgaggctttcatggatagaatcaatcaaaggttaaggtcaaagacattctgagacttgcccagccttaa

SEQ ID NO: 107900 - DNA, 78 bp, Homo sapiens
ctttcatggatagaatcaatcaaaggttaaggtcaaagacattctgagacttgcccagccttaagatgaagcaataga

SEQ ID NO: 107901 - DNA, 73 bp, Homo sapiens
aatcaatcaaaggttaaggtcaaagacattctgagacttgcccagccttaagatgaagcaatagagggccctt

SEQ ID NO: 107902 - DNA, 72 bp, Homo sapiens
aaaggttaaggtcaaagacattctgagacttgcccagccttaagatgaagcaatagagggccctttggtgct

SEQ ID NO: 107903 - DNA, 77 bp, Homo sapiens
aaggtcaaagacattctgagacttgcccagccttaagatgaagcaatagagggccctttggtgcttggtggctgcaa

SEQ ID NO: 107904 - DNA, 77 bp, Homo sapiens
attctgagacttgcccagccttaagatgaagcaatagagggccctttggtgcttggtggctgcaaccgtggctgagt

SEQ ID NO: 107905 - DNA, 73 bp, Homo sapiens
ctttggtgcttggtggctgcaaccgtggctgagttctaggaggcagtttattttttgttgcttgtgtataatt

SEQ ID NO: 107906 - DNA, 71 bp, Homo sapiens
cttggtggctgcaaccgtggctgagttctaggaggcagtttattttttgttgcttgtgtataatttttacc

SEQ ID NO: 107907 - DNA, 68 bp, Homo sapiens
aaccgtggctgagttctaggaggcagtttattttttgttgcttgtgtataatttttaccccaagaatc

SEQ ID NO: 107908 - DNA, 68 bp, Homo sapiens
ctgagttctaggaggcagtttattttttgttgcttgtgtataatttttaccccaagaatcccttatgg

SEQ ID NO: 107909 - DNA, 72 bp, Homo sapiens
taggaggcagtttattttttgttgcttgtgtataatttttaccccaagaatcccttatggtgctggctgtga

SEQ ID NO: 107910 - DNA, 71 bp, Homo sapiens
cttgtgtataatttttaccccaagaatcccttatggtgctggctgtgaccgatgaacaaactcttagtgtt

SEQ ID NO: 107911 - DNA, 72 bp, Homo sapiens
tataatttttaccccaagaatcccttatggtgctggctgtgaccgatgaacaaactcttagtgtttaatgtg

SEQ ID NO: 107912 - DNA, 76 bp, Homo sapiens
cccaagaatcccttatggtgctggctgtgaccgatgaacaaactcttagtgtttaatgtgtgtgtctgtaaacaca

SEQ ID NO: 107913 - DNA, 76 bp, Homo sapiens
atcccttatggtgctggctgtgaccgatgaacaaactcttagtgtttaatgtgtgtgtctgtaaacacagggagaa

SEQ ID NO: 107914 - DNA, 77 bp, Homo sapiens
tggctgtgaccgatgaacaaactcttagtgtttaatgtgtgtgtctgtaaacacagggagaagggaaagctgcctga

SEQ ID NO: 107915 - DNA, 75 bp, Homo sapiens
ttaatgtgtgtgtctgtaaacacagggagaagggaaagctgcctgaagattggacaaagagccttgtaaatgtct

SEQ ID NO: 107916 - DNA, 74 bp, Homo sapiens
gtgtgtgtctgtaaacacagggagaagggaaagctgcctgaagattggacaaagagccttgtaaatgtcttggg

SEQ ID NO: 107917 - DNA, 74 bp, Homo sapiens
taaacacagggagaagggaaagctgcctgaagattggacaaagagccttgtaaatgtcttggggtgaatgacaa

SEQ ID NO: 107918 - DNA, 74 bp, Homo sapiens
agaagggaaagctgcctgaagattggacaaagagccttgtaaatgtcttggggtgaatgacaatgggaagatta

SEQ ID NO: 107919 - DNA, 75 bp, Homo sapiens
aagctgcctgaagattggacaaagagccttgtaaatgtcttggggtgaatgacaatgggaagattaggaggagtc

SEQ ID NO: 107920 - DNA, 74 bp, Homo sapiens
aagattggacaaagagccttgtaaatgtcttggggtgaatgacaatgggaagattaggaggagtctgctgggga

SEQ ID NO: 107921 - DNA, 76 bp, Homo sapiens
aaagagccttgtaaatgtcttggggtgaatgacaatgggaagattaggaggagtctgctggggagctgcctgcaaa

SEQ ID NO: 107922 - DNA, 75 bp, Homo sapiens
atgtcttggggtgaatgacaatgggaagattaggaggagtctgctggggagctgcctgcaaaggtcccctcttat

SEQ ID NO: 107923 - DNA, 79 bp, Homo sapiens
tgaatgacaatgggaagattaggaggagtctgctggggagctgcctgcaaaggtcccctcttattcaggaattgtatca

SEQ ID NO: 107924 - DNA, 79 bp, Homo sapiens
aatgggaagattaggaggagtctgctggggagctgcctgcaaaggtcccctcttattcaggaattgtatcatcagctga

SEQ ID NO: 107925 - DNA, 78 bp, Homo sapiens
agattaggaggagtctgctggggagctgcctgcaaaggtcccctcttattcaggaattgtatcatcagctgagtcctt

SEQ ID NO: 107926 - DNA, 80 bp, Homo sapiens
agtctgctggggagctgcctgcaaaggtcccctcttattcaggaattgtatcatcagctgagtcctttggaattagcaga

SEQ ID NO: 107927 - DNA, 80 bp, Homo sapiens
ctgcctgcaaaggtcccctcttattcaggaattgtatcatcagctgagtcctttggaattagcagacagttgtgaagata

SEQ ID NO: 107928 - DNA, 75 bp, Homo sapiens
aaaggtcccctcttattcaggaattgtatcatcagctgagtcctttggaattagcagacagttgtgaagataaaa

SEQ ID NO: 107929 - DNA, 81 bp, Homo sapiens
ttattcaggaattgtatcatcagctgagtcctttggaattagcagacagttgtgaagataaaatagtcttgtagcataaga

SEQ ID NO: 107930 - DNA, 79 bp, Homo sapiens
aattgtatcatcagctgagtcctttggaattagcagacagttgtgaagataaaatagtcttgtagcataagaagccgta

SEQ ID NO: 107931 - DNA, 78 bp, Homo sapiens
atcatcagctgagtcctttggaattagcagacagttgtgaagataaaatagtcttgtagcataagaagccgtaggtag

SEQ ID NO: 107932 - DNA, 76 bp, Homo sapiens
ctttggaattagcagacagttgtgaagataaaatagtcttgtagcataagaagccgtaggtagtctgggagctata

SEQ ID NO: 107933 - DNA, 75 bp, Homo sapiens
aattagcagacagttgtgaagataaaatagtcttgtagcataagaagccgtaggtagtctgggagctataaaagc

SEQ ID NO: 107934 - DNA, 77 bp, Homo sapiens
tgtgaagataaaatagtcttgtagcataagaagccgtaggtagtctgggagctataaaagctcctcattagtgacaa

SEQ ID NO: 107935 - DNA, 73 bp, Homo sapiens
aaaatagtcttgtagcataagaagccgtaggtagtctgggagctataaaagctcctcattagtgacaagattt

SEQ ID NO: 107936 - DNA, 70 bp, Homo sapiens
ataagaagccgtaggtagtctgggagctataaaagctcctcattagtgacaagattttaacaaaaccaaa

SEQ ID NO: 107937 - DNA, 69 bp, Homo sapiens
gtaggtagtctgggagctataaaagctcctcattagtgacaagattttaacaaaaccaaataaacttta

SEQ ID NO: 107938 - DNA, 67 bp, Homo sapiens
gggagctataaaagctcctcattagtgacaagattttaacaaaaccaaataaactttaagaaacaag

SEQ ID NO: 107939 - DNA, 70 bp, Homo sapiens
ctcctcattagtgacaagattttaacaaaaccaaataaactttaagaaacaaggacattcatggctgggc

SEQ ID NO: 107940 - DNA, 76 bp, Homo sapiens
taataataacaataacagaaacaaggacattcatacgttttctaaatattttgactcactacatgagagagtgaca

SEQ ID NO: 107941 - DNA, 77 bp, Homo sapiens
caataacagaaacaaggacattcatacgttttctaaatattttgactcactacatgagagagtgacaaattgtgata

SEQ ID NO: 107942 - DNA, 79 bp, Homo sapiens
cagaaacaaggacattcatacgttttctaaatattttgactcactacatgagagagtgacaaattgtgatatctgaaga

SEQ ID NO: 107943 - DNA, 78 bp, Homo sapiens
gacattcatacgttttctaaatattttgactcactacatgagagagtgacaaattgtgatatctgaagaaaagtctgg

SEQ ID NO: 107944 - DNA, 77 bp, Homo sapiens
tctaaatattttgactcactacatgagagagtgacaaattgtgatatctgaagaaaagtctgggtaaaatttccaca

SEQ ID NO: 107945 - DNA, 77 bp, Homo sapiens
atattttgactcactacatgagagagtgacaaattgtgatatctgaagaaaagtctgggtaaaatttccacaacaga

SEQ ID NO: 107946 - DNA, 76 bp, Homo sapiens
ctacatgagagagtgacaaattgtgatatctgaagaaaagtctgggtaaaatttccacaacagactttgcaattta

SEQ ID NO: 107947 - DNA, 75 bp, Homo sapiens
gagagtgacaaattgtgatatctgaagaaaagtctgggtaaaatttccacaacagactttgcaatttagtgattc

SEQ ID NO: 107948 - DNA, 77 bp, Homo sapiens
attgtgatatctgaagaaaagtctgggtaaaatttccacaacagactttgcaatttagtgattctgatcatctgaac

SEQ ID NO: 107949 - DNA, 75 bp, Homo sapiens
atctgaagaaaagtctgggtaaaatttccacaacagactttgcaatttagtgattctgatcatctgaacttcagt

SEQ ID NO: 107950 - DNA, 77 bp, Homo sapiens
tgggtaaaatttccacaacagactttgcaatttagtgattctgatcatctgaacttcagttccttgtagcttgtgaa

SEQ ID NO: 107951 - DNA, 78 bp, Homo sapiens
aaatttccacaacagactttgcaatttagtgattctgatcatctgaacttcagttccttgtagcttgtgaagagccta

SEQ ID NO: 107952 - DNA, 78 bp, Homo sapiens
agactttgcaatttagtgattctgatcatctgaacttcagttccttgtagcttgtgaagagcctatcactttctttaa

SEQ ID NO: 107953 - DNA, 78 bp, Homo sapiens
actttgcaatttagtgattctgatcatctgaacttcagttccttgtagcttgtgaagagcctatcactttctttaaca

SEQ ID NO: 107954 - DNA, 77 bp, Homo sapiens
aatttagtgattctgatcatctgaacttcagttccttgtagcttgtgaagagcctatcactttctttaacaatgtat

SEQ ID NO: 107955 - DNA, 80 bp, Homo sapiens
tttagtgattctgatcatctgaacttcagttccttgtagcttgtgaagagcctatcactttctttaacaatgtattagca

SEQ ID NO: 107956 - DNA, 80 bp, Homo sapiens
attctgatcatctgaacttcagttccttgtagcttgtgaagagcctatcactttctttaacaatgtattagcaggacaga

SEQ ID NO: 107957 - DNA, 78 bp, Homo sapiens
atcatctgaacttcagttccttgtagcttgtgaagagcctatcactttctttaacaatgtattagcaggacagaggaa

SEQ ID NO: 107958 - DNA, 76 bp, Homo sapiens
atctgaacttcagttccttgtagcttgtgaagagcctatcactttctttaacaatgtattagcaggacagaggaaa

SEQ ID NO: 107959 - DNA, 76 bp, Homo sapiens
tcagttccttgtagcttgtgaagagcctatcactttctttaacaatgtattagcaggacagaggaaagtgacttta

SEQ ID NO: 107960 - DNA, 74 bp, Homo sapiens
gttccttgtagcttgtgaagagcctatcactttctttaacaatgtattagcaggacagaggaaagtgactttaa

SEQ ID NO: 107961 - DNA, 75 bp, Homo sapiens
cttgtagcttgtgaagagcctatcactttctttaacaatgtattagcaggacagaggaaagtgactttaaggcaa

SEQ ID NO: 107962 - DNA, 77 bp, Homo sapiens
tagcttgtgaagagcctatcactttctttaacaatgtattagcaggacagaggaaagtgactttaaggcaagcagta

SEQ ID NO: 107963 - DNA, 76 bp, Homo sapiens
tcactttctttaacaatgtattagcaggacagaggaaagtgactttaaggcaagcagtagcagctcgtatatttta

SEQ ID NO: 107964 - DNA, 75 bp, Homo sapiens
tttaacaatgtattagcaggacagaggaaagtgactttaaggcaagcagtagcagctcgtatattttactaataa

SEQ ID NO: 107965 - DNA, 76 bp, Homo sapiens
tgtattagcaggacagaggaaagtgactttaaggcaagcagtagcagctcgtatattttactaataacgacacctg

SEQ ID NO: 107966 - DNA, 73 bp, Homo sapiens
agaggaaagtgactttaaggcaagcagtagcagctcgtatattttactaataacgacacctggccgtaagtca

SEQ ID NO: 107967 - DNA, 71 bp, Homo sapiens
aagcagtagcagctcgtatattttactaataacgacacctggccgtaagtcaggcggttacagtccctagg

SEQ ID NO: 107968 - DNA, 71 bp, Homo sapiens
agctcgtatattttactaataacgacacctggccgtaagtcaggcggttacagtccctaggtgagcaacaa

SEQ ID NO: 107969 - DNA, 68 bp, Homo sapiens
attttactaataacgacacctggccgtaagtcaggcggttacagtccctaggtgagcaacaattttag

SEQ ID NO: 107970 - DNA, 74 bp, Homo sapiens
ctaataacgacacctggccgtaagtcaggcggttacagtccctaggtgagcaacaattttagtcatgacacaca

SEQ ID NO: 107971 - DNA, 74 bp, Homo sapiens
acctggccgtaagtcaggcggttacagtccctaggtgagcaacaattttagtcatgacacacagacaatattct

SEQ ID NO: 107972 - DNA, 76 bp, Homo sapiens
taagtcaggcggttacagtccctaggtgagcaacaattttagtcatgacacacagacaatattctttgccaaataa

SEQ ID NO: 107973 - DNA, 75 bp, Homo sapiens
gttacagtccctaggtgagcaacaattttagtcatgacacacagacaatattctttgccaaataaattttccata

SEQ ID NO: 107974 - DNA, 75 bp, Homo sapiens
ctaggtgagcaacaattttagtcatgacacacagacaatattctttgccaaataaattttccataagaagaggga

SEQ ID NO: 107975 - DNA, 74 bp, Homo sapiens
attttagtcatgacacacagacaatattctttgccaaataaattttccataagaagagggaggaccaggcatat

SEQ ID NO: 107976 - DNA, 75 bp, Homo sapiens
tgacacacagacaatattctttgccaaataaattttccataagaagagggaggaccaggcatatttggtgttgaa

SEQ ID NO: 107977 - DNA, 72 bp, Homo sapiens
acaatattctttgccaaataaattttccataagaagagggaggaccaggcatatttggtgttgaaggattga

SEQ ID NO: 107978 - DNA, 71 bp, Homo sapiens
ttgccaaataaattttccataagaagagggaggaccaggcatatttggtgttgaaggattgattcctattt

SEQ ID NO: 107979 - DNA, 70 bp, Homo sapiens
aattttccataagaagagggaggaccaggcatatttggtgttgaaggattgattcctatttttcagtaaa

SEQ ID NO: 107980 - DNA, 74 bp, Homo sapiens
ataagaagagggaggaccaggcatatttggtgttgaaggattgattcctatttttcagtaaattatgtctctga

SEQ ID NO: 107981 - DNA, 75 bp, Homo sapiens
aggaccaggcatatttggtgttgaaggattgattcctatttttcagtaaattatgtctctgaattagtgtgcttc

SEQ ID NO: 107982 - DNA, 80 bp, Homo sapiens
gcatatttggtgttgaaggattgattcctatttttcagtaaattatgtctctgaattagtgtgcttctgtcagtatgcat

SEQ ID NO: 107983 - DNA, 80 bp, Homo sapiens
tgttgaaggattgattcctatttttcagtaaattatgtctctgaattagtgtgcttctgtcagtatgcattctggtacat

SEQ ID NO: 107984 - DNA, 80 bp, Homo sapiens
tgattcctatttttcagtaaattatgtctctgaattagtgtgcttctgtcagtatgcattctggtacattcaacagttct

SEQ ID NO: 107985 - DNA, 78 bp, Homo sapiens
tttcagtaaattatgtctctgaattagtgtgcttctgtcagtatgcattctggtacattcaacagttcttattgtttt

SEQ ID NO: 107986 - DNA, 78 bp, Homo sapiens
aaattatgtctctgaattagtgtgcttctgtcagtatgcattctggtacattcaacagttcttattgtttttagtgga

SEQ ID NO: 107987 - DNA, 75 bp, Homo sapiens
ctctgaattagtgtgcttctgtcagtatgcattctggtacattcaacagttcttattgtttttagtggaattttt

SEQ ID NO: 107988 - DNA, 72 bp, Homo sapiens
agtgtgcttctgtcagtatgcattctggtacattcaacagttcttattgtttttagtggaatttttttttct

SEQ ID NO: 107989 - DNA, 71 bp, Homo sapiens
aattcttttttttccatttatagattgttttgatgtttgagaagttcattgcactgtttgctcccactaaa

SEQ ID NO: 107990 - DNA, 72 bp, Homo sapiens
tttttccatttatagattgttttgatgtttgagaagttcattgcactgtttgctcccactaaatatttttaa

SEQ ID NO: 107991 - DNA, 73 bp, Homo sapiens
tagattgttttgatgtttgagaagttcattgcactgtttgctcccactaaatatttttaaacatttaggaaga

SEQ ID NO: 107992 - DNA, 74 bp, Homo sapiens
ttgatgtttgagaagttcattgcactgtttgctcccactaaatatttttaaacatttaggaagaagaggctgtg

SEQ ID NO: 107993 - DNA, 72 bp, Homo sapiens
tttgagaagttcattgcactgtttgctcccactaaatatttttaaacatttaggaagaagaggctgtgtttc

SEQ ID NO: 107994 - DNA, 72 bp, Homo sapiens
attgcactgtttgctcccactaaatatttttaaacatttaggaagaagaggctgtgtttcgcctgaggcaaa

SEQ ID NO: 107995 - DNA, 72 bp, Homo sapiens
tttgctcccactaaatatttttaaacatttaggaagaagaggctgtgtttcgcctgaggcaaaggactgaga

SEQ ID NO: 107996 - DNA, 71 bp, Homo sapiens
atatttttaaacatttaggaagaagaggctgtgtttcgcctgaggcaaaggactgagaactccacaactaa

SEQ ID NO: 107997 - DNA, 72 bp, Homo sapiens
acatttaggaagaagaggctgtgtttcgcctgaggcaaaggactgagaactccacaactaagagtttgttta

SEQ ID NO: 107998 - DNA, 72 bp, Homo sapiens
agaagaggctgtgtttcgcctgaggcaaaggactgagaactccacaactaagagtttgtttagaactcaaaa

SEQ ID NO: 107999 - DNA, 73 bp, Homo sapiens
tgtgtttcgcctgaggcaaaggactgagaactccacaactaagagtttgtttagaactcaaaacaggatgttc

SEQ ID NO: 108000 - DNA, 72 bp, Homo sapiens
tttcgcctgaggcaaaggactgagaactccacaactaagagtttgtttagaactcaaaacaggatgttctgt

SEQ ID NO: 108001 - DNA, 73 bp, Homo sapiens
tgaggcaaaggactgagaactccacaactaagagtttgtttagaactcaaaacaggatgttctgtttgaccaa

SEQ ID NO: 108002 - DNA, 70 bp, Homo sapiens
caaaggactgagaactccacaactaagagtttgtttagaactcaaaacaggatgttctgtttgaccaaaa

SEQ ID NO: 108003 - DNA, 69 bp, Homo sapiens
aaaggactgagaactccacaactaagagtttgtttagaactcaaaacaggatgttctgtttgaccaaaa

SEQ ID NO: 108004 - DNA, 69 bp, Homo sapiens
actgagaactccacaactaagagtttgtttagaactcaaaacaggatgttctgtttgaccaaaagaaag

SEQ ID NO: 108005 - DNA, 68 bp, Homo sapiens
gaactccacaactaagagtttgtttagaactcaaaacaggatgttctgtttgaccaaaagaaagtttc

SEQ ID NO: 108006 - DNA, 68 bp, Homo sapiens
aactaagagtttgtttagaactcaaaacaggatgttctgtttgaccaaaagaaagtttctttctctgc

SEQ ID NO: 108007 - DNA, 70 bp, Homo sapiens
ttgtttagaactcaaaacaggatgttctgtttgaccaaaagaaagtttctttctctgcttttcattctcc

SEQ ID NO: 108008 - DNA, 70 bp, Homo sapiens
gtttagaactcaaaacaggatgttctgtttgaccaaaagaaagtttctttctctgcttttcattctcctg

SEQ ID NO: 108009 - DNA, 70 bp, Homo sapiens
ctcaaaacaggatgttctgtttgaccaaaagaaagtttctttctctgcttttcattctcctgttaactct

SEQ ID NO: 108010 - DNA, 68 bp, Homo sapiens
aggatgttctgtttgaccaaaagaaagtttctttctctgcttttcattctcctgttaactcttccctt

SEQ ID NO: 108011 - DNA, 71 bp, Homo sapiens
gtttgaccaaaagaaagtttctttctctgcttttcattctcctgttaactcttcccttttgctagcatata

SEQ ID NO: 108012 - DNA, 73 bp, Homo sapiens
gaaagtttctttctctgcttttcattctcctgttaactcttcccttttgctagcatataaaagataatatcac

SEQ ID NO: 108013 - DNA, 76 bp, Homo sapiens
ttctctgcttttcattctcctgttaactcttcccttttgctagcatataaaagataatatcaccaaacagccagta

SEQ ID NO: 108014 - DNA, 73 bp, Homo sapiens
ttcattctcctgttaactcttcccttttgctagcatataaaagataatatcaccaaacagccagtaaaggaac

SEQ ID NO: 108015 - DNA, 72 bp, Homo sapiens
ctgttaactcttcccttttgctagcatataaaagataatatcaccaaacagccagtaaaggaacgacttata

SEQ ID NO: 108016 - DNA, 70 bp, Homo sapiens
ctcttcccttttgctagcatataaaagataatatcaccaaacagccagtaaaggaacgacttataaaaat

SEQ ID NO: 108017 - DNA, 69 bp, Homo sapiens
aaagataatatcaccaaacagccagtaaaggaacgacttataaaaatttgtagtaatctggcaagattt

SEQ ID NO: 108018 - DNA, 69 bp, Homo sapiens
tatcaccaaacagccagtaaaggaacgacttataaaaatttgtagtaatctggcaagatttttcccttc

SEQ ID NO: 108019 - DNA, 67 bp, Homo sapiens
acagccagtaaaggaacgacttataaaaatttgtagtaatctggcaagatttttcccttctattttg

SEQ ID NO: 108020 - DNA, 68 bp, Homo sapiens
aaaaatttgtagtaatctggcaagatttttcccttctattttgttaaatcttaagattgctcaaccat

SEQ ID NO: 108021 - DNA, 74 bp, Homo sapiens
gtagtaatctggcaagatttttcccttctattttgttaaatcttaagattgctcaaccattgatgtgattgttg

SEQ ID NO: 108022 - DNA, 75 bp, Homo sapiens
tctggcaagatttttcccttctattttgttaaatcttaagattgctcaaccattgatgtgattgttgtttgtgtg

SEQ ID NO: 108023 - DNA, 70 bp, Homo sapiens
tttttcccttctattttgttaaatcttaagattgctcaaccattgatgtgattgttgtttgtgtgttttt

SEQ ID NO: 108024 - DNA, 72 bp, Homo sapiens
tttgttaaatcttaagattgctcaaccattgatgtgattgttgtttgtgtgttttttctttaccacgccacc

SEQ ID NO: 108025 - DNA, 73 bp, Homo sapiens
aatcttaagattgctcaaccattgatgtgattgttgtttgtgtgttttttctttaccacgccaccctggcatt

SEQ ID NO: 108026 - DNA, 76 bp, Homo sapiens
attgctcaaccattgatgtgattgttgtttgtgtgttttttctttaccacgccaccctggcattttgaggctgtgc

SEQ ID NO: 108027 - DNA, 69 bp, Homo sapiens
ttgtttgtgtgttttttctttaccacgccaccctggcattttgaggctgtgcttgggtgaaaaagttaa

SEQ ID NO: 108028 - DNA, 69 bp, Homo sapiens
ttttttctttaccacgccaccctggcattttgaggctgtgcttgggtgaaaaagttaagccaaaagatc

SEQ ID NO: 108029 - DNA, 73 bp, Homo sapiens
tttaccacgccaccctggcattttgaggctgtgcttgggtgaaaaagttaagccaaaagatctcggctataca

SEQ ID NO: 108030 - DNA, 75 bp, Homo sapiens
attttgaggctgtgcttgggtgaaaaagttaagccaaaagatctcggctatacagtccaaatccagatttatgca

SEQ ID NO: 108031 - DNA, 72 bp, Homo sapiens
cttgggtgaaaaagttaagccaaaagatctcggctatacagtccaaatccagatttatgcaccacgcaagtt

SEQ ID NO: 108032 - DNA, 72 bp, Homo sapiens
aaaaagttaagccaaaagatctcggctatacagtccaaatccagatttatgcaccacgcaagtttccactcc

SEQ ID NO: 108033 - DNA, 77 bp, Homo sapiens
taagccaaaagatctcggctatacagtccaaatccagatttatgcaccacgcaagtttccactccctcgttcacaga

SEQ ID NO: 108034 - DNA, 78 bp, Homo sapiens
gtccaaatccagatttatgcaccacgcaagtttccactccctcgttcacagacatacgcattcgcgttgcaatcattt

SEQ ID NO: 108035 - DNA, 79 bp, Homo sapiens
aatccagatttatgcaccacgcaagtttccactccctcgttcacagacatacgcattcgcgttgcaatcattttgcaaa

SEQ ID NO: 108036 - DNA, 81 bp, Homo sapiens
tatgcaccacgcaagtttccactccctcgttcacagacatacgcattcgcgttgcaatcattttgcaaagggtgattcaga

SEQ ID NO: 108037 - DNA, 77 bp, Homo sapiens
aagtttccactccctcgttcacagacatacgcattcgcgttgcaatcattttgcaaagggtgattcagagatgggga

SEQ ID NO: 108038 - DNA, 79 bp, Homo sapiens
ctcgttcacagacatacgcattcgcgttgcaatcattttgcaaagggtgattcagagatggggaacatggcgtttcttc

SEQ ID NO: 108039 - DNA, 80 bp, Homo sapiens
agacatacgcattcgcgttgcaatcattttgcaaagggtgattcagagatggggaacatggcgtttcttctgagaagcaa

SEQ ID NO: 108040 - DNA, 78 bp, Homo sapiens
attcgcgttgcaatcattttgcaaagggtgattcagagatggggaacatggcgtttcttctgagaagcaaatgagtag

SEQ ID NO: 108041 - DNA, 76 bp, Homo sapiens
aatcattttgcaaagggtgattcagagatggggaacatggcgtttcttctgagaagcaaatgagtaggttgaccca

SEQ ID NO: 108042 - DNA, 77 bp, Homo sapiens
ttttgcaaagggtgattcagagatggggaacatggcgtttcttctgagaagcaaatgagtaggttgacccacagtgc

SEQ ID NO: 108043 - DNA, 79 bp, Homo sapiens
attcagagatggggaacatggcgtttcttctgagaagcaaatgagtaggttgacccacagtgctcactttcctgcctca

SEQ ID NO: 108044 - DNA, 78 bp, Homo sapiens
cgtttcttctgagaagcaaatgagtaggttgacccacagtgctcactttcctgcctcaccgttgtcactgtcctgaca

SEQ ID NO: 108045 - DNA, 78 bp, Homo sapiens
gagaagcaaatgagtaggttgacccacagtgctcactttcctgcctcaccgttgtcactgtcctgacaaccttggtga

SEQ ID NO: 108046 - DNA, 74 bp, Homo sapiens
aaatgagtaggttgacccacagtgctcactttcctgcctcaccgttgtcactgtcctgacaaccttggtgagtt

SEQ ID NO: 108047 - DNA, 77 bp, Homo sapiens
ttgacccacagtgctcactttcctgcctcaccgttgtcactgtcctgacaaccttggtgagtttggctatgggaata

SEQ ID NO: 108048 - DNA, 77 bp, Homo sapiens
tgctcactttcctgcctcaccgttgtcactgtcctgacaaccttggtgagtttggctatgggaataaaatctgaata

SEQ ID NO: 108049 - DNA, 75 bp, Homo sapiens
tttcctgcctcaccgttgtcactgtcctgacaaccttggtgagtttggctatgggaataaaatctgaatatgtat

SEQ ID NO: 108050 - DNA, 73 bp, Homo sapiens
accgttgtcactgtcctgacaaccttggtgagtttggctatgggaataaaatctgaatatgtattcttgaact

SEQ ID NO: 108051 - DNA, 75 bp, Homo sapiens
acaaccttggtgagtttggctatgggaataaaatctgaatatgtattcttgaactttgccaccacatcacaggcc

SEQ ID NO: 108052 - DNA, 80 bp, Homo sapiens
tatgggaataaaatctgaatatgtattcttgaactttgccaccacatcacaggcctgccctattatcatctaagagagcc

SEQ ID NO: 108053 - DNA, 79 bp, Homo sapiens
aaatctgaatatgtattcttgaactttgccaccacatcacaggcctgccctattatcatctaagagagcccccagcaaa

SEQ ID NO: 108054 - DNA, 77 bp, Homo sapiens
tgtattcttgaactttgccaccacatcacaggcctgccctattatcatctaagagagcccccagcaaacggagggaa

SEQ ID NO: 108055 - DNA, 74 bp, Homo sapiens
aactttgccaccacatcacaggcctgccctattatcatctaagagagcccccagcaaacggagggaaggaggaa

SEQ ID NO: 108056 - DNA, 74 bp, Homo sapiens
tgccctattatcatctaagagagcccccagcaaacggagggaaggaggaaacacccttgcccaacatcagcact

SEQ ID NO: 108057 - DNA, 73 bp, Homo sapiens
tattatcatctaagagagcccccagcaaacggagggaaggaggaaacacccttgcccaacatcagcactttgt

SEQ ID NO: 108058 - DNA, 71 bp, Homo sapiens
gagcccccagcaaacggagggaaggaggaaacacccttgcccaacatcagcactttgttctcaatgagttt

SEQ ID NO: 108059 - DNA, 70 bp, Homo sapiens
ccagcaaacggagggaaggaggaaacacccttgcccaacatcagcactttgttctcaatgagttttaaaa

SEQ ID NO: 108060 - DNA, 70 bp, Homo sapiens
aaacacccttgcccaacatcagcactttgttctcaatgagttttaaaagctccgaaggcggttctaagga

SEQ ID NO: 108061 - DNA, 76 bp, Homo sapiens
ttctcaatgagttttaaaagctccgaaggcggttctaaggagcagtcaaggctgagaactctgttaacagagcaca

SEQ ID NO: 108062 - DNA, 72 bp, Homo sapiens
agttttaaaagctccgaaggcggttctaaggagcagtcaaggctgagaactctgttaacagagcacaggtta

SEQ ID NO: 108063 - DNA, 77 bp, Homo sapiens
agctccgaaggcggttctaaggagcagtcaaggctgagaactctgttaacagagcacaggttagactgcagtcctcc

SEQ ID NO: 108064 - DNA, 77 bp, Homo sapiens
cggttctaaggagcagtcaaggctgagaactctgttaacagagcacaggttagactgcagtcctcctgggacagggc

SEQ ID NO: 108065 - DNA, 77 bp, Homo sapiens
agtcaaggctgagaactctgttaacagagcacaggttagactgcagtcctcctgggacagggctgggactctggtgt

SEQ ID NO: 108066 - DNA, 77 bp, Homo sapiens
tgagaactctgttaacagagcacaggttagactgcagtcctcctgggacagggctgggactctggtgtttgtatctt

SEQ ID NO: 108067 - DNA, 76 bp, Homo sapiens
ctctgttaacagagcacaggttagactgcagtcctcctgggacagggctgggactctggtgtttgtatctttaagc

SEQ ID NO: 108068 - DNA, 79 bp, Homo sapiens
agagcacaggttagactgcagtcctcctgggacagggctgggactctggtgtttgtatctttaagcgctcagcccagca

SEQ ID NO: 108069 - DNA, 81 bp, Homo sapiens
ttagactgcagtcctcctgggacagggctgggactctggtgtttgtatctttaagcgctcagcccagcaggcagcacagaa

SEQ ID NO: 108070 - DNA, 78 bp, Homo sapiens
tcctgggacagggctgggactctggtgtttgtatctttaagcgctcagcccagcaggcagcacagaagaaacgcccac

SEQ ID NO: 108071 - DNA, 77 bp, Homo sapiens
ggctgggactctggtgtttgtatctttaagcgctcagcccagcaggcagcacagaagaaacgcccacgaagaaccta

SEQ ID NO: 108072 - DNA, 77 bp, Homo sapiens
tctggtgtttgtatctttaagcgctcagcccagcaggcagcacagaagaaacgcccacgaagaacctagggtgcgaa

SEQ ID NO: 108073 - DNA, 78 bp, Homo sapiens
tttgtatctttaagcgctcagcccagcaggcagcacagaagaaacgcccacgaagaacctagggtgcgaaggagcaca

SEQ ID NO: 108074 - DNA, 77 bp, Homo sapiens
ttaagcgctcagcccagcaggcagcacagaagaaacgcccacgaagaacctagggtgcgaaggagcacactctttgg

SEQ ID NO: 108075 - DNA, 73 bp, Homo sapiens
agcaggcagcacagaagaaacgcccacgaagaacctagggtgcgaaggagcacactctttggtttccaaagac

SEQ ID NO: 108076 - DNA, 69 bp, Homo sapiens
acagaagaaacgcccacgaagaacctagggtgcgaaggagcacactctttggtttccaaagaccagtcc

SEQ ID NO: 108077 - DNA, 69 bp, Homo sapiens
agaaacgcccacgaagaacctagggtgcgaaggagcacactctttggtttccaaagaccagtcctggct

SEQ ID NO: 108078 - DNA, 69 bp, Homo sapiens
acgaagaacctagggtgcgaaggagcacactctttggtttccaaagaccagtcctggcttccctgaacc

SEQ ID NO: 108079 - DNA, 74 bp, Homo sapiens
tgcgaaggagcacactctttggtttccaaagaccagtcctggcttccctgaaccctgaaccactgctctgtgtt

SEQ ID NO: 108080 - DNA, 73 bp, Homo sapiens
aggagcacactctttggtttccaaagaccagtcctggcttccctgaaccctgaaccactgctctgtgtttatg

SEQ ID NO: 108081 - DNA, 72 bp, Homo sapiens
tttggtttccaaagaccagtcctggcttccctgaaccctgaaccactgctctgtgtttatggccaactggga

SEQ ID NO: 108082 - DNA, 73 bp, Homo sapiens
aaagaccagtcctggcttccctgaaccctgaaccactgctctgtgtttatggccaactgggacgaaggtgctg

SEQ ID NO: 108083 - DNA, 74 bp, Homo sapiens
aaccctgaaccactgctctgtgtttatggccaactgggacgaaggtgctgggtccacgtggaagatgacactcc

SEQ ID NO: 108084 - DNA, 73 bp, Homo sapiens
aaccactgctctgtgtttatggccaactgggacgaaggtgctgggtccacgtggaagatgacactcctccccc

SEQ ID NO: 108085 - DNA, 77 bp, Homo sapiens
tgtgtttatggccaactgggacgaaggtgctgggtccacgtggaagatgacactcctccccccggcacatctgcaga

SEQ ID NO: 108086 - DNA, 77 bp, Homo sapiens
atggccaactgggacgaaggtgctgggtccacgtggaagatgacactcctccccccggcacatctgcagagaggctg

SEQ ID NO: 108087 - DNA, 77 bp, Homo sapiens
acgaaggtgctgggtccacgtggaagatgacactcctccccccggcacatctgcagagaggctgtccaggacagtag

SEQ ID NO: 108088 - DNA, 76 bp, Homo sapiens
ggtccacgtggaagatgacactcctccccccggcacatctgcagagaggctgtccaggacagtagtggccttttaa

SEQ ID NO: 108089 - DNA, 76 bp, Homo sapiens
acgtggaagatgacactcctccccccggcacatctgcagagaggctgtccaggacagtagtggccttttaaagctc

SEQ ID NO: 108090 - DNA, 77 bp, Homo sapiens
acactcctccccccggcacatctgcagagaggctgtccaggacagtagtggccttttaaagctcctgcagagaggag

SEQ ID NO: 108091 - DNA, 79 bp, Homo sapiens
ccggcacatctgcagagaggctgtccaggacagtagtggccttttaaagctcctgcagagaggagtccttgtaagacca

SEQ ID NO: 108092 - DNA, 77 bp, Homo sapiens
tgtccaggacagtagtggccttttaaagctcctgcagagaggagtccttgtaagaccaggttgctgctacgtgagga

SEQ ID NO: 108093 - DNA, 74 bp, Homo sapiens
agtagtggccttttaaagctcctgcagagaggagtccttgtaagaccaggttgctgctacgtgaggatgaaaaa

SEQ ID NO: 108094 - DNA, 76 bp, Homo sapiens
ttttaaagctcctgcagagaggagtccttgtaagaccaggttgctgctacgtgaggatgaaaaagcccagaactga

SEQ ID NO: 108095 - DNA, 75 bp, Homo sapiens
aggagtccttgtaagaccaggttgctgctacgtgaggatgaaaaagcccagaactgagagtcgtctctcgtccta

SEQ ID NO: 108096 - DNA, 74 bp, Homo sapiens
ccttgtaagaccaggttgctgctacgtgaggatgaaaaagcccagaactgagagtcgtctctcgtcctagtttg

SEQ ID NO: 108097 - DNA, 82 bp, Homo sapiens
ttgctgctacgtgaggatgaaaaagcccagaactgagagtcgtctctcgtcctagtttggccactgactgagcagctcagta

SEQ ID NO: 108098 - DNA, 77 bp, Homo sapiens
aaaaagcccagaactgagagtcgtctctcgtcctagtttggccactgactgagcagctcagtattggtcactgaacc

SEQ ID NO: 108099 - DNA, 79 bp, Homo sapiens
aactgagagtcgtctctcgtcctagtttggccactgactgagcagctcagtattggtcactgaacctcaatgttttcaa

SEQ ID NO: 108100 - DNA, 85 bp, Homo sapiens
tcctagtttggccactgactgagcagctcagtattggtcactgaacctcaatgttttcaaatatgatgtgagctggttgcactca

SEQ ID NO: 108101 - DNA, 83 bp, Homo sapiens
agcagctcagtattggtcactgaacctcaatgttttcaaatatgatgtgagctggttgcactcagaggttcaacatccatcct

SEQ ID NO: 108102 - DNA, 80 bp, Homo sapiens
agtattggtcactgaacctcaatgttttcaaatatgatgtgagctggttgcactcagaggttcaacatccatccttctat

SEQ ID NO: 108103 - DNA, 81 bp, Homo sapiens
atgttttcaaatatgatgtgagctggttgcactcagaggttcaacatccatccttctatttgcccagcaaccatgggagaa

SEQ ID NO: 108104 - DNA, 81 bp, Homo sapiens
aaatatgatgtgagctggttgcactcagaggttcaacatccatccttctatttgcccagcaaccatgggagaaggagaaga

SEQ ID NO: 108105 - DNA, 79 bp, Homo sapiens
tgtgagctggttgcactcagaggttcaacatccatccttctatttgcccagcaaccatgggagaaggagaagaaaagac

SEQ ID NO: 108106 - DNA, 74 bp, Homo sapiens
actcagaggttcaacatccatccttctatttgcccagcaaccatgggagaaggagaagaaaagacctgaaataa

SEQ ID NO: 108107 - DNA, 72 bp, Homo sapiens
tcaacatccatccttctatttgcccagcaaccatgggagaaggagaagaaaagacctgaaataagggaactt

SEQ ID NO: 108108 - DNA, 72 bp, Homo sapiens
tccttctatttgcccagcaaccatgggagaaggagaagaaaagacctgaaataagggaactttgacagccaa

SEQ ID NO: 108109 - DNA, 71 bp, Homo sapiens
tatttgcccagcaaccatgggagaaggagaagaaaagacctgaaataagggaactttgacagccaagggtg

SEQ ID NO: 108110 - DNA, 68 bp, Homo sapiens
aaccatgggagaaggagaagaaaagacctgaaataagggaactttgacagccaagggtggcctttgat

SEQ ID NO: 108111 - DNA, 67 bp, Homo sapiens
aggagaagaaaagacctgaaataagggaactttgacagccaagggtggcctttgattctccctccct

SEQ ID NO: 108112 - DNA, 69 bp, Homo sapiens
aaaagacctgaaataagggaactttgacagccaagggtggcctttgattctccctcccttgatctgtaa

SEQ ID NO: 108113 - DNA, 72 bp, Homo sapiens
ataagggaactttgacagccaagggtggcctttgattctccctcccttgatctgtaagttgttcaagctata

SEQ ID NO: 108114 - DNA, 70 bp, Homo sapiens
aagggtggcctttgattctccctcccttgatctgtaagttgttcaagctatagtccacccccaagaagta

SEQ ID NO: 108115 - DNA, 73 bp, Homo sapiens
tccctcccttgatctgtaagttgttcaagctatagtccacccccaagaagtatcacaactgggcaggtccgga

SEQ ID NO: 108116 - DNA, 74 bp, Homo sapiens
ttgttcaagctatagtccacccccaagaagtatcacaactgggcaggtccggaggcgagacaagatgtggattt

SEQ ID NO: 108117 - DNA, 74 bp, Homo sapiens
tatagtccacccccaagaagtatcacaactgggcaggtccggaggcgagacaagatgtggattttgacggtgaa

SEQ ID NO: 108118 - DNA, 76 bp, Homo sapiens
caagaagtatcacaactgggcaggtccggaggcgagacaagatgtggattttgacggtgaatcaatggggcattat

SEQ ID NO: 108119 - DNA, 79 bp, Homo sapiens
agtatcacaactgggcaggtccggaggcgagacaagatgtggattttgacggtgaatcaatggggcattattcagcaca

SEQ ID NO: 108120 - DNA, 80 bp, Homo sapiens
ctgggcaggtccggaggcgagacaagatgtggattttgacggtgaatcaatggggcattattcagcacagctgtctctac

SEQ ID NO: 108121 - DNA, 79 bp, Homo sapiens
aggcgagacaagatgtggattttgacggtgaatcaatggggcattattcagcacagctgtctctaccccgacgctgaaa

SEQ ID NO: 108122 - DNA, 78 bp, Homo sapiens
aagatgtggattttgacggtgaatcaatggggcattattcagcacagctgtctctaccccgacgctgaaacagggaga

SEQ ID NO: 108123 - DNA, 80 bp, Homo sapiens
attttgacggtgaatcaatggggcattattcagcacagctgtctctaccccgacgctgaaacagggagatccagagcaca

SEQ ID NO: 108124 - DNA, 83 bp, Homo sapiens
gtgaatcaatggggcattattcagcacagctgtctctaccccgacgctgaaacagggagatccagagcacagttaatgtgaga

SEQ ID NO: 108125 - DNA, 84 bp, Homo sapiens
cattattcagcacagctgtctctaccccgacgctgaaacagggagatccagagcacagttaatgtgagagcagattcctccaga

SEQ ID NO: 108126 - DNA, 82 bp, Homo sapiens
ttcagcacagctgtctctaccccgacgctgaaacagggagatccagagcacagttaatgtgagagcagattcctccagaagg

SEQ ID NO: 108127 - DNA, 77 bp, Homo sapiens
aaacagggagatccagagcacagttaatgtgagagcagattcctccagaagggaggctttcgagagacccactgggc

SEQ ID NO: 108128 - DNA, 79 bp, Homo sapiens
gagcacagttaatgtgagagcagattcctccagaagggaggctttcgagagacccactgggcctgactgtcaggtacaa

SEQ ID NO: 108129 - DNA, 76 bp, Homo sapiens
agttaatgtgagagcagattcctccagaagggaggctttcgagagacccactgggcctgactgtcaggtacaagga

SEQ ID NO: 108130 - DNA, 75 bp, Homo sapiens
agagcagattcctccagaagggaggctttcgagagacccactgggcctgactgtcaggtacaaggaaccctgagc

SEQ ID NO: 108131 - DNA, 76 bp, Homo sapiens
tccagaagggaggctttcgagagacccactgggcctgactgtcaggtacaaggaaccctgagcctggcacaagcaa

SEQ ID NO: 108132 - DNA, 82 bp, Homo sapiens
gacccactgggcctgactgtcaggtacaaggaaccctgagcctggcacaagcaagcagcacacctgatctctgtatattcta

SEQ ID NO: 108133 - DNA, 85 bp, Homo sapiens
gaaccctgagcctggcacaagcaagcagcacacctgatctctgtatattctaagagcctgcatgcctcaatttcaaatagataaa

SEQ ID NO: 108134 - DNA, 85 bp, Homo sapiens
agcctggcacaagcaagcagcacacctgatctctgtatattctaagagcctgcatgcctcaatttcaaatagataaagtttatca

SEQ ID NO: 108135 - DNA, 85 bp, Homo sapiens
agcaagcagcacacctgatctctgtatattctaagagcctgcatgcctcaatttcaaatagataaagtttatcatgtagatggaa

SEQ ID NO: 108136 - DNA, 81 bp, Homo sapiens
acacctgatctctgtatattctaagagcctgcatgcctcaatttcaaatagataaagtttatcatgtagatggaagattgg

SEQ ID NO: 108137 - DNA, 83 bp, Homo sapiens
tctgtatattctaagagcctgcatgcctcaatttcaaatagataaagtttatcatgtagatggaagattgggatggcattcat

SEQ ID NO: 108138 - DNA, 84 bp, Homo sapiens
tattctaagagcctgcatgcctcaatttcaaatagataaagtttatcatgtagatggaagattgggatggcattcattcattca

SEQ ID NO: 108139 - DNA, 76 bp, Homo sapiens
attcattcattccaggttttacccctgtactcacagaactgatgagggagaggaagtatcagccactgcgataagg

SEQ ID NO: 108140 - DNA, 75 bp, Homo sapiens
attccaggttttacccctgtactcacagaactgatgagggagaggaagtatcagccactgcgataagggtctagc

SEQ ID NO: 108141 - DNA, 75 bp, Homo sapiens
tttacccctgtactcacagaactgatgagggagaggaagtatcagccactgcgataagggtctagcccagttggg

SEQ ID NO: 108142 - DNA, 79 bp, Homo sapiens
tactcacagaactgatgagggagaggaagtatcagccactgcgataagggtctagcccagttgggggatacgtgctgac

SEQ ID NO: 108143 - DNA, 77 bp, Homo sapiens
tgagggagaggaagtatcagccactgcgataagggtctagcccagttgggggatacgtgctgaccactggaggaaca

SEQ ID NO: 108144 - DNA, 76 bp, Homo sapiens
agaggaagtatcagccactgcgataagggtctagcccagttgggggatacgtgctgaccactggaggaacagagaa

SEQ ID NO: 108145 - DNA, 73 bp, Homo sapiens
ccactgcgataagggtctagcccagttgggggatacgtgctgaccactggaggaacagagaacaaccaacaaa

SEQ ID NO: 108146 - DNA, 71 bp, Homo sapiens
ataagggtctagcccagttgggggatacgtgctgaccactggaggaacagagaacaaccaacaaactcaac

SEQ ID NO: 108147 - DNA, 73 bp, Homo sapiens
tagcccagttgggggatacgtgctgaccactggaggaacagagaacaaccaacaaactcaaccaagtgacctg

SEQ ID NO: 108148 - DNA, 76 bp, Homo sapiens
ggatacgtgctgaccactggaggaacagagaacaaccaacaaactcaaccaagtgacctggaacaagtgatgccaa

SEQ ID NO: 108149 - DNA, 79 bp, Homo sapiens
tgaccactggaggaacagagaacaaccaacaaactcaaccaagtgacctggaacaagtgatgccaacagcagcaccatg

SEQ ID NO: 108150 - DNA, 78 bp, Homo sapiens
aggaacagagaacaaccaacaaactcaaccaagtgacctggaacaagtgatgccaacagcagcaccatggaagctgaa

SEQ ID NO: 108151 - DNA, 78 bp, Homo sapiens
agaacaaccaacaaactcaaccaagtgacctggaacaagtgatgccaacagcagcaccatggaagctgaactcaagaa

SEQ ID NO: 108152 - DNA, 79 bp, Homo sapiens
aacaaactcaaccaagtgacctggaacaagtgatgccaacagcagcaccatggaagctgaactcaagaagttcagatgg

SEQ ID NO: 108153 - DNA, 79 bp, Homo sapiens
aaccaagtgacctggaacaagtgatgccaacagcagcaccatggaagctgaactcaagaagttcagatgggacgggcac

SEQ ID NO: 108154 - DNA, 70 bp, Homo sapiens
aaagaaaagaagttcagatgacaaaggaaggttgtgtgctttttggcatgaaaggacattttggtactaa

SEQ ID NO: 108155 - DNA, 72 bp, Homo sapiens
aagaagttcagatgacaaaggaaggttgtgtgctttttggcatgaaaggacattttggtactaatctagaat

SEQ ID NO: 108156 - DNA, 73 bp, Homo sapiens
aagttcagatgacaaaggaaggttgtgtgctttttggcatgaaaggacattttggtactaatctagaattaca

SEQ ID NO: 108157 - DNA, 75 bp, Homo sapiens
gttcagatgacaaaggaaggttgtgtgctttttggcatgaaaggacattttggtactaatctagaattacagaca

SEQ ID NO: 108158 - DNA, 72 bp, Homo sapiens
caaaggaaggttgtgtgctttttggcatgaaaggacattttggtactaatctagaattacagacacgcccta

SEQ ID NO: 108159 - DNA, 71 bp, Homo sapiens
aaaggaaggttgtgtgctttttggcatgaaaggacattttggtactaatctagaattacagacacgcccta

SEQ ID NO: 108160 - DNA, 77 bp, Homo sapiens
ttgtgtgctttttggcatgaaaggacattttggtactaatctagaattacagacacgccctatgccttcatgttgaa

SEQ ID NO: 108161 - DNA, 77 bp, Homo sapiens
tgtgctttttggcatgaaaggacattttggtactaatctagaattacagacacgccctatgccttcatgttgaagaa

SEQ ID NO: 108162 - DNA, 75 bp, Homo sapiens
tttttggcatgaaaggacattttggtactaatctagaattacagacacgccctatgccttcatgttgaagaagta

SEQ ID NO: 108163 - DNA, 74 bp, Homo sapiens
catgaaaggacattttggtactaatctagaattacagacacgccctatgccttcatgttgaagaagtacaaagt

SEQ ID NO: 108164 - DNA, 73 bp, Homo sapiens
aaggacattttggtactaatctagaattacagacacgccctatgccttcatgttgaagaagtacaaagttgag

SEQ ID NO: 108165 - DNA, 77 bp, Homo sapiens
tggtactaatctagaattacagacacgccctatgccttcatgttgaagaagtacaaagttgagggaggcagaggtga

SEQ ID NO: 108166 - DNA, 76 bp, Homo sapiens
agacacgccctatgccttcatgttgaagaagtacaaagttgagggaggcagaggtgaggaatcagccttgtaggtg

SEQ ID NO: 108167 - DNA, 81 bp, Homo sapiens
tatgccttcatgttgaagaagtacaaagttgagggaggcagaggtgaggaatcagccttgtaggtggtgatgtctcagaga

SEQ ID NO: 108168 - DNA, 79 bp, Homo sapiens
tgttgaagaagtacaaagttgagggaggcagaggtgaggaatcagccttgtaggtggtgatgtctcagagaggagcaaa

SEQ ID NO: 108169 - DNA, 76 bp, Homo sapiens
aaagttgagggaggcagaggtgaggaatcagccttgtaggtggtgatgtctcagagaggagcaaagagtaaggaaa

SEQ ID NO: 108170 - DNA, 78 bp, Homo sapiens
aggcagaggtgaggaatcagccttgtaggtggtgatgtctcagagaggagcaaagagtaaggaaaagtagtatgatgg

SEQ ID NO: 108171 - DNA, 80 bp, Homo sapiens
tgaggaatcagccttgtaggtggtgatgtctcagagaggagcaaagagtaaggaaaagtagtatgatggtttctgatcca

SEQ ID NO: 108172 - DNA, 79 bp, Homo sapiens
atcagccttgtaggtggtgatgtctcagagaggagcaaagagtaaggaaaagtagtatgatggtttctgatccagtgtc

SEQ ID NO: 108173 - DNA, 79 bp, Homo sapiens
taggtggtgatgtctcagagaggagcaaagagtaaggaaaagtagtatgatggtttctgatccagtgtctgccacaaac

SEQ ID NO: 108174 - DNA, 80 bp, Homo sapiens
tgtctcagagaggagcaaagagtaaggaaaagtagtatgatggtttctgatccagtgtctgccacaaaccagctttgtga

SEQ ID NO: 108175 - DNA, 75 bp, Homo sapiens
caaagagtaaggaaaagtagtatgatggtttctgatccagtgtctgccacaaaccagctttgtgaccaggtgaat

SEQ ID NO: 108176 - DNA, 76 bp, Homo sapiens
agtaaggaaaagtagtatgatggtttctgatccagtgtctgccacaaaccagctttgtgaccaggtgaattatgtc

SEQ ID NO: 108177 - DNA, 80 bp, Homo sapiens
agtagtatgatggtttctgatccagtgtctgccacaaaccagctttgtgaccaggtgaattatgtcctctgggcctcagc

SEQ ID NO: 108178 - DNA, 79 bp, Homo sapiens
tggtttctgatccagtgtctgccacaaaccagctttgtgaccaggtgaattatgtcctctgggcctcagcttcctcacc

SEQ ID NO: 108179 - DNA, 82 bp, Homo sapiens
tgtctgccacaaaccagctttgtgaccaggtgaattatgtcctctgggcctcagcttcctcacctgcgcattgaatgcaaaa

SEQ ID NO: 108180 - DNA, 78 bp, Homo sapiens
aaaccagctttgtgaccaggtgaattatgtcctctgggcctcagcttcctcacctgcgcattgaatgcaaaataccta

SEQ ID NO: 108181 - DNA, 83 bp, Homo sapiens
tttgtgaccaggtgaattatgtcctctgggcctcagcttcctcacctgcgcattgaatgcaaaatacctatgatctcttctga

SEQ ID NO: 108182 - DNA, 81 bp, Homo sapiens
aggtgaattatgtcctctgggcctcagcttcctcacctgcgcattgaatgcaaaatacctatgatctcttctgacttgccc

SEQ ID NO: 108183 - DNA, 86 bp, Homo sapiens
tatgtcctctgggcctcagcttcctcacctgcgcattgaatgcaaaatacctatgatctcttctgacttgccctgagggcatgatg

SEQ ID NO: 108184 - DNA, 86 bp, Homo sapiens
ttcctcacctgcgcattgaatgcaaaatacctatgatctcttctgacttgccctgagggcatgatggctggctagacaagcaccaa

SEQ ID NO: 108185 - DNA, 84 bp, Homo sapiens
attgaatgcaaaatacctatgatctcttctgacttgccctgagggcatgatggctggctagacaagcaccaacacccacaatgc

SEQ ID NO: 108186 - DNA, 88 bp, Homo sapiens
ttctgacttgccctgagggcatgatggctggctagacaagcaccaacacccacaatgctctcagcacacacgtacacacaggctcaca

SEQ ID NO: 108187 - DNA, 92 bp, Homo sapiens
ctgagggcatgatggctggctagacaagcaccaacacccacaatgctctcagcacacacgtacacacaggctcacactcacacgcatgcaca

SEQ ID NO: 108188 - DNA, 89 bp, Homo sapiens
atggctggctagacaagcaccaacacccacaatgctctcagcacacacgtacacacaggctcacactcacacgcatgcacacttatgct

SEQ ID NO: 108189 - DNA, 90 bp, Homo sapiens
tagacaagcaccaacacccacaatgctctcagcacacacgtacacacaggctcacactcacacgcatgcacacttatgcttgcacctatg

SEQ ID NO: 108190 - DNA, 90 bp, Homo sapiens
aacacccacaatgctctcagcacacacgtacacacaggctcacactcacacgcatgcacacttatgcttgcacctatgtgcttgtacaca

SEQ ID NO: 108191 - DNA, 94 bp, Homo sapiens
aatgctctcagcacacacgtacacacaggctcacactcacacgcatgcacacttatgcttgcacctatgtgcttgtacacatgcatgtactcat

SEQ ID NO: 108192 - DNA, 91 bp, Homo sapiens
acacaggctcacactcacacgcatgcacacttatgcttgcacctatgtgcttgtacacatgcatgtactcattcacacacgcaccctacca

SEQ ID NO: 108193 - DNA, 91 bp, Homo sapiens
acactcacacgcatgcacacttatgcttgcacctatgtgcttgtacacatgcatgtactcattcacacacgcaccctaccacacacaagca

SEQ ID NO: 108194 - DNA, 92 bp, Homo sapiens
cgcatgcacacttatgcttgcacctatgtgcttgtacacatgcatgtactcattcacacacgcaccctaccacacacaagcacactcacata

SEQ ID NO: 108195 - DNA, 87 bp, Homo sapiens
acacttatgcttgcacctatgtgcttgtacacatgcatgtactcattcacacacgcaccctaccacacacaagcacactcacatacg

SEQ ID NO: 108196 - DNA, 87 bp, Homo sapiens
acctatgtgcttgtacacatgcatgtactcattcacacacgcaccctaccacacacaagcacactcacatacgtgcacacaccaatg

SEQ ID NO: 108197 - DNA, 87 bp, Homo sapiens
ttgtacacatgcatgtactcattcacacacgcaccctaccacacacaagcacactcacatacgtgcacacaccaatgtaggcaggga

SEQ ID NO: 108198 - DNA, 87 bp, Homo sapiens
atgcatgtactcattcacacacgcaccctaccacacacaagcacactcacatacgtgcacacaccaatgtaggcagggatgtgaata

SEQ ID NO: 108199 - DNA, 86 bp, Homo sapiens
tactcattcacacacgcaccctaccacacacaagcacactcacatacgtgcacacaccaatgtaggcagggatgtgaatacacaca

SEQ ID NO: 108200 - DNA, 87 bp, Homo sapiens
acacgcaccctaccacacacaagcacactcacatacgtgcacacaccaatgtaggcagggatgtgaatacacacacatgctcacaca

SEQ ID NO: 108201 - DNA, 92 bp, Homo sapiens
acacacaagcacactcacatacgtgcacacaccaatgtaggcagggatgtgaatacacacacatgctcacacacagccttccatgcacatgc

SEQ ID NO: 108202 - DNA, 92 bp, Homo sapiens
acactcacatacgtgcacacaccaatgtaggcagggatgtgaatacacacacatgctcacacacagccttccatgcacatgctacatccaca

SEQ ID NO: 108203 - DNA, 95 bp, Homo sapiens
acacaccaatgtaggcagggatgtgaatacacacacatgctcacacacagccttccatgcacatgctacatccacacatacatgctcatgcacac

SEQ ID NO: 108204 - DNA, 96 bp, Homo sapiens
gcagggatgtgaatacacacacatgctcacacacagccttccatgcacatgctacatccacacatacatgctcatgcacacgcacatacactcctt

SEQ ID NO: 108205 - DNA, 98 bp, Homo sapiens
atgtgaatacacacacatgctcacacacagccttccatgcacatgctacatccacacatacatgctcatgcacacgcacatacactcctttccatgca

SEQ ID NO: 108206 - DNA, 95 bp, Homo sapiens
acatgctcacacacagccttccatgcacatgctacatccacacatacatgctcatgcacacgcacatacactcctttccatgcactttcacacaa

SEQ ID NO: 108207 - DNA, 94 bp, Homo sapiens
acacacagccttccatgcacatgctacatccacacatacatgctcatgcacacgcacatacactcctttccatgcactttcacacaagtgcaca

SEQ ID NO: 108208 - DNA, 91 bp, Homo sapiens
cacatacatgctcatgcacacgcacatacactcctttccatgcactttcacacaagtgcacagtcccccacaacatgcacactctcacata

SEQ ID NO: 108209 - DNA, 92 bp, Homo sapiens
acatgctcatgcacacgcacatacactcctttccatgcactttcacacaagtgcacagtcccccacaacatgcacactctcacatatgcaca

SEQ ID NO: 108210 - DNA, 88 bp, Homo sapiens
acgcacatacactcctttccatgcactttcacacaagtgcacagtcccccacaacatgcacactctcacatatgcacacatactcata

SEQ ID NO: 108211 - DNA, 88 bp, Homo sapiens
atacactcctttccatgcactttcacacaagtgcacagtcccccacaacatgcacactctcacatatgcacacatactcatatgctcc

SEQ ID NO: 108212 - DNA, 92 bp, Homo sapiens
ttccatgcactttcacacaagtgcacagtcccccacaacatgcacactctcacatatgcacacatactcatatgctcccgcacgtgcacaca

SEQ ID NO: 108213 - DNA, 92 bp, Homo sapiens
tttcacacaagtgcacagtcccccacaacatgcacactctcacatatgcacacatactcatatgctcccgcacgtgcacacacacagcctca

SEQ ID NO: 108214 - DNA, 92 bp, Homo sapiens
acagtcccccacaacatgcacactctcacatatgcacacatactcatatgctcccgcacgtgcacacacacagcctcacacacatgccaaca

SEQ ID NO: 108215 - DNA, 98 bp, Homo sapiens
acaacatgcacactctcacatatgcacacatactcatatgctcccgcacgtgcacacacacagcctcacacacatgccaacacactgccatgcacatc

SEQ ID NO: 108216 - DNA, 96 bp, Homo sapiens
acatactcatatgctcccgcacgtgcacacacacagcctcacacacatgccaacacactgccatgcacatccacacatctacacacacagatctga

SEQ ID NO: 108217 - DNA, 93 bp, Homo sapiens
tcccgcacgtgcacacacacagcctcacacacatgccaacacactgccatgcacatccacacatctacacacacagatctgagtgccctataa

SEQ ID NO: 108218 - DNA, 93 bp, Homo sapiens
tgcacacacacagcctcacacacatgccaacacactgccatgcacatccacacatctacacacacagatctgagtgccctataatccacactt

SEQ ID NO: 108219 - DNA, 88 bp, Homo sapiens
agcctcacacacatgccaacacactgccatgcacatccacacatctacacacacagatctgagtgccctataatccacactttatttc

SEQ ID NO: 108220 - DNA, 81 bp, Homo sapiens
atgcacatccacacatctacacacacagatctgagtgccctataatccacactttatttccaaattttcagaaagcagtaa

SEQ ID NO: 108221 - DNA, 77 bp, Homo sapiens
acatctacacacacagatctgagtgccctataatccacactttatttccaaattttcagaaagcagtaacagaccag

SEQ ID NO: 108222 - DNA, 75 bp, Homo sapiens
acacagatctgagtgccctataatccacactttatttccaaattttcagaaagcagtaacagaccagtcaggaaa

SEQ ID NO: 108223 - DNA, 69 bp, Homo sapiens
ccctataatccacactttatttccaaattttcagaaagcagtaacagaccagtcaggaaaggaaaataa

SEQ ID NO: 108224 - DNA, 70 bp, Homo sapiens
ctttatttccaaattttcagaaagcagtaacagaccagtcaggaaaggaaaataaaaatcatctggagcg

SEQ ID NO: 108225 - DNA, 72 bp, Homo sapiens
aattttcagaaagcagtaacagaccagtcaggaaaggaaaataaaaatcatctggagcgtttttatgcaatc

SEQ ID NO: 108226 - DNA, 76 bp, Homo sapiens
agaaagcagtaacagaccagtcaggaaaggaaaataaaaatcatctggagcgtttttatgcaatcctgatgatctc

SEQ ID NO: 108227 - DNA, 77 bp, Homo sapiens
taacagaccagtcaggaaaggaaaataaaaatcatctggagcgtttttatgcaatcctgatgatctcgcagcctcgg

SEQ ID NO: 108228 - DNA, 74 bp, Homo sapiens
ggaaaggaaaataaaaatcatctggagcgtttttatgcaatcctgatgatctcgcagcctcgggtttagtctct

SEQ ID NO: 108229 - DNA, 74 bp, Homo sapiens
aaataaaaatcatctggagcgtttttatgcaatcctgatgatctcgcagcctcgggtttagtctctttttccac

SEQ ID NO: 108230 - DNA, 77 bp, Homo sapiens
aatcatctggagcgtttttatgcaatcctgatgatctcgcagcctcgggtttagtctctttttccactgcgtagggc

SEQ ID NO: 108231 - DNA, 75 bp, Homo sapiens
ttttatgcaatcctgatgatctcgcagcctcgggtttagtctctttttccactgcgtagggccagatacttccgt

SEQ ID NO: 108232 - DNA, 72 bp, Homo sapiens
aatcctgatgatctcgcagcctcgggtttagtctctttttccactgcgtagggccagatacttccgttttta

SEQ ID NO: 108233 - DNA, 66 bp, Homo sapiens
tcgggtttagtctctttttccactgcgtagggccagatacttccgtttttacataggtacctcttt

SEQ ID NO: 108234 - DNA, 67 bp, Homo sapiens
ctctttttccactgcgtagggccagatacttccgtttttacataggtacctcttttagggagacaaa

SEQ ID NO: 108235 - DNA, 72 bp, Homo sapiens
tagggccagatacttccgtttttacataggtacctcttttagggagacaaagcattaagagcaatgagccaa

SEQ ID NO: 108236 - DNA, 71 bp, Homo sapiens
atacttccgtttttacataggtacctcttttagggagacaaagcattaagagcaatgagccaagagaagaa

SEQ ID NO: 108237 - DNA, 72 bp, Homo sapiens
ttttacataggtacctcttttagggagacaaagcattaagagcaatgagccaagagaagaatttgaaacaaa

SEQ ID NO: 108238 - DNA, 70 bp, Homo sapiens
gtacctcttttagggagacaaagcattaagagcaatgagccaagagaagaatttgaaacaaaagaaaaaa

SEQ ID NO: 108239 - DNA, 69 bp, Homo sapiens
aaagagaaaaaaagcttttcccattcatggcaaaaaaataaaaaggatgtttggagtgttcatgcagga

SEQ ID NO: 108240 - DNA, 71 bp, Homo sapiens
aaaaagcttttcccattcatggcaaaaaaataaaaaggatgtttggagtgttcatgcaggatatttgtata

SEQ ID NO: 108241 - DNA, 76 bp, Homo sapiens
ttcccattcatggcaaaaaaataaaaaggatgtttggagtgttcatgcaggatatttgtataaagaactgcatgtc

SEQ ID NO: 108242 - DNA, 72 bp, Homo sapiens
caaaaaaataaaaaggatgtttggagtgttcatgcaggatatttgtataaagaactgcatgtccttgtttac

SEQ ID NO: 108243 - DNA, 75 bp, Homo sapiens
ataaaaaggatgtttggagtgttcatgcaggatatttgtataaagaactgcatgtccttgtttactttctgtgga

SEQ ID NO: 108244 - DNA, 76 bp, Homo sapiens
atgtttggagtgttcatgcaggatatttgtataaagaactgcatgtccttgtttactttctgtggagccccatttc

SEQ ID NO: 108245 - DNA, 75 bp, Homo sapiens
ttcatgcaggatatttgtataaagaactgcatgtccttgtttactttctgtggagccccatttcctccctagaat

SEQ ID NO: 108246 - DNA, 71 bp, Homo sapiens
atatttgtataaagaactgcatgtccttgtttactttctgtggagccccatttcctccctagaattcctgg

SEQ ID NO: 108247 - DNA, 73 bp, Homo sapiens
tataaagaactgcatgtccttgtttactttctgtggagccccatttcctccctagaattcctggtggtcatac

SEQ ID NO: 108248 - DNA, 72 bp, Homo sapiens
atgtccttgtttactttctgtggagccccatttcctccctagaattcctggtggtcatactcaccagttatg

SEQ ID NO: 108249 - DNA, 73 bp, Homo sapiens
tttactttctgtggagccccatttcctccctagaattcctggtggtcatactcaccagttatgggactctcga

SEQ ID NO: 108250 - DNA, 76 bp, Homo sapiens
tgtggagccccatttcctccctagaattcctggtggtcatactcaccagttatgggactctcgagatgaaaatctg

SEQ ID NO: 108251 - DNA, 79 bp, Homo sapiens
atttcctccctagaattcctggtggtcatactcaccagttatgggactctcgagatgaaaatctgtgacacagagcaca

SEQ ID NO: 108252 - DNA, 79 bp, Homo sapiens
acacacacacacccaggcaggggagtcctgtgaagctggatgctctgaaatctagggcatttccgaatcaagtatctac

SEQ ID NO: 108253 - DNA, 76 bp, Homo sapiens
acccaggcaggggagtcctgtgaagctggatgctctgaaatctagggcatttccgaatcaagtatctacctccttg

SEQ ID NO: 108254 - DNA, 79 bp, Homo sapiens
gggagtcctgtgaagctggatgctctgaaatctagggcatttccgaatcaagtatctacctccttgtgccttgccattc

SEQ ID NO: 108255 - DNA, 81 bp, Homo sapiens
tcctgtgaagctggatgctctgaaatctagggcatttccgaatcaagtatctacctccttgtgccttgccattctctgacc

SEQ ID NO: 108256 - DNA, 77 bp, Homo sapiens
aaatctagggcatttccgaatcaagtatctacctccttgtgccttgccattctctgacctggccccagagctgcaaa

SEQ ID NO: 108257 - DNA, 79 bp, Homo sapiens
atttccgaatcaagtatctacctccttgtgccttgccattctctgacctggccccagagctgcaaagagaagctgagga

SEQ ID NO: 108258 - DNA, 80 bp, Homo sapiens
aagtatctacctccttgtgccttgccattctctgacctggccccagagctgcaaagagaagctgaggaggacattgctaa

SEQ ID NO: 108259 - DNA, 81 bp, Homo sapiens
tacctccttgtgccttgccattctctgacctggccccagagctgcaaagagaagctgaggaggacattgctaagggtcaca

SEQ ID NO: 108260 - DNA, 81 bp, Homo sapiens
ttgccattctctgacctggccccagagctgcaaagagaagctgaggaggacattgctaagggtcacacctggtgacacctg

SEQ ID NO: 108261 - DNA, 80 bp, Homo sapiens
attctctgacctggccccagagctgcaaagagaagctgaggaggacattgctaagggtcacacctggtgacacctgtgtg

SEQ ID NO: 108262 - DNA, 79 bp, Homo sapiens
cccagagctgcaaagagaagctgaggaggacattgctaagggtcacacctggtgacacctgtgtggcctgtggttaaca

SEQ ID NO: 108263 - DNA, 75 bp, Homo sapiens
caaagagaagctgaggaggacattgctaagggtcacacctggtgacacctgtgtggcctgtggttaacagtttgg

SEQ ID NO: 108264 - DNA, 79 bp, Homo sapiens
taagggtcacacctggtgacacctgtgtggcctgtggttaacagtttgggaaagtaagcatcctcactgctgcatgcca

SEQ ID NO: 108265 - DNA, 78 bp, Homo sapiens
acctggtgacacctgtgtggcctgtggttaacagtttgggaaagtaagcatcctcactgctgcatgccaggacaggga

SEQ ID NO: 108266 - DNA, 81 bp, Homo sapiens
acctgtgtggcctgtggttaacagtttgggaaagtaagcatcctcactgctgcatgccaggacagggatggctatgtgcca

SEQ ID NO: 108267 - DNA, 82 bp, Homo sapiens
cctgtggttaacagtttgggaaagtaagcatcctcactgctgcatgccaggacagggatggctatgtgccagccacatccca

SEQ ID NO: 108268 - DNA, 82 bp, Homo sapiens
tggttaacagtttgggaaagtaagcatcctcactgctgcatgccaggacagggatggctatgtgccagccacatcccagggc

SEQ ID NO: 108269 - DNA, 81 bp, Homo sapiens
aacagtttgggaaagtaagcatcctcactgctgcatgccaggacagggatggctatgtgccagccacatcccagggcggtc

SEQ ID NO: 108270 - DNA, 86 bp, Homo sapiens
taagcatcctcactgctgcatgccaggacagggatggctatgtgccagccacatcccagggcggtctcgatggagcagtcccctcc

SEQ ID NO: 108271 - DNA, 82 bp, Homo sapiens
atgccaggacagggatggctatgtgccagccacatcccagggcggtctcgatggagcagtcccctcctgtgggtctctgatg

SEQ ID NO: 108272 - DNA, 80 bp, Homo sapiens
aggacagggatggctatgtgccagccacatcccagggcggtctcgatggagcagtcccctcctgtgggtctctgatgtcc

SEQ ID NO: 108273 - DNA, 80 bp, Homo sapiens
atggctatgtgccagccacatcccagggcggtctcgatggagcagtcccctcctgtgggtctctgatgtccccaggagaa

SEQ ID NO: 108274 - DNA, 78 bp, Homo sapiens
cagccacatcccagggcggtctcgatggagcagtcccctcctgtgggtctctgatgtccccaggagaaaggcacattg

SEQ ID NO: 108275 - DNA, 77 bp, Homo sapiens
acatcccagggcggtctcgatggagcagtcccctcctgtgggtctctgatgtccccaggagaaaggcacattggtga

SEQ ID NO: 108276 - DNA, 79 bp, Homo sapiens
cagtcccctcctgtgggtctctgatgtccccaggagaaaggcacattggtgaggtctcacattcagttacatagtgctc

SEQ ID NO: 108277 - DNA, 81 bp, Homo sapiens
ctgtgggtctctgatgtccccaggagaaaggcacattggtgaggtctcacattcagttacatagtgctcttgcatttctta

SEQ ID NO: 108278 - DNA, 81 bp, Homo sapiens
caggagaaaggcacattggtgaggtctcacattcagttacatagtgctcttgcatttcttaccccacttcatctgcacact

SEQ ID NO: 108279 - DNA, 81 bp, Homo sapiens
aaaggcacattggtgaggtctcacattcagttacatagtgctcttgcatttcttaccccacttcatctgcacacttctata

SEQ ID NO: 108280 - DNA, 83 bp, Homo sapiens
ttggtgaggtctcacattcagttacatagtgctcttgcatttcttaccccacttcatctgcacacttctatacattagataga

SEQ ID NO: 108281 - DNA, 79 bp, Homo sapiens
attcagttacatagtgctcttgcatttcttaccccacttcatctgcacacttctatacattagatagagccctgtttta

SEQ ID NO: 108282 - DNA, 82 bp, Homo sapiens
ttacatagtgctcttgcatttcttaccccacttcatctgcacacttctatacattagatagagccctgttttacagatcaga

SEQ ID NO: 108283 - DNA, 79 bp, Homo sapiens
ctcttgcatttcttaccccacttcatctgcacacttctatacattagatagagccctgttttacagatcagaaaactga

SEQ ID NO: 108284 - DNA, 79 bp, Homo sapiens
ttcttaccccacttcatctgcacacttctatacattagatagagccctgttttacagatcagaaaactgaggctgagag

SEQ ID NO: 108285 - DNA, 78 bp, Homo sapiens
acttcatctgcacacttctatacattagatagagccctgttttacagatcagaaaactgaggctgagagtggttaatt

SEQ ID NO: 108286 - DNA, 76 bp, Homo sapiens
acacttctatacattagatagagccctgttttacagatcagaaaactgaggctgagagtggttaatttgcccaaga

SEQ ID NO: 108287 - DNA, 78 bp, Homo sapiens
tacattagatagagccctgttttacagatcagaaaactgaggctgagagtggttaatttgcccaagatcacaaggcaa

SEQ ID NO: 108288 - DNA, 75 bp, Homo sapiens
cctgttttacagatcagaaaactgaggctgagagtggttaatttgcccaagatcacaaggcaagaaagtagtgga

SEQ ID NO: 108289 - DNA, 74 bp, Homo sapiens
agatcagaaaactgaggctgagagtggttaatttgcccaagatcacaaggcaagaaagtagtggagcttaaatt

SEQ ID NO: 108290 - DNA, 72 bp, Homo sapiens
aactgaggctgagagtggttaatttgcccaagatcacaaggcaagaaagtagtggagcttaaatttggattt

SEQ ID NO: 108291 - DNA, 74 bp, Homo sapiens
tgagagtggttaatttgcccaagatcacaaggcaagaaagtagtggagcttaaatttggattttcattatctaa

SEQ ID NO: 108292 - DNA, 71 bp, Homo sapiens
aatttgcccaagatcacaaggcaagaaagtagtggagcttaaatttggattttcattatctaagtccaaac

SEQ ID NO: 108293 - DNA, 71 bp, Homo sapiens
gatcacaaggcaagaaagtagtggagcttaaatttggattttcattatctaagtccaaacgttgttcttta

SEQ ID NO: 108294 - DNA, 70 bp, Homo sapiens
ggcaagaaagtagtggagcttaaatttggattttcattatctaagtccaaacgttgttctttaccttgca

SEQ ID NO: 108295 - DNA, 71 bp, Homo sapiens
ggattttcattatctaagtccaaacgttgttctttaccttgcatcatgaataataattaaaataataataa

SEQ ID NO: 108296 - DNA, 71 bp, Homo sapiens
aataataataaatgataagcaaacatttttcaagggtttactaagtgcctcacgccactttaagtgcattc

SEQ ID NO: 108297 - DNA, 73 bp, Homo sapiens
aatgataagcaaacatttttcaagggtttactaagtgcctcacgccactttaagtgcattctatggatcaatt

SEQ ID NO: 108298 - DNA, 72 bp, Homo sapiens
gcaaacatttttcaagggtttactaagtgcctcacgccactttaagtgcattctatggatcaatttatttaa

SEQ ID NO: 108299 - DNA, 71 bp, Homo sapiens
ttttcaagggtttactaagtgcctcacgccactttaagtgcattctatggatcaatttatttaaccttaca

SEQ ID NO: 108300 - DNA, 72 bp, Homo sapiens
aagggtttactaagtgcctcacgccactttaagtgcattctatggatcaatttatttaaccttacaatgcta

SEQ ID NO: 108301 - DNA, 77 bp, Homo sapiens
ttactaagtgcctcacgccactttaagtgcattctatggatcaatttatttaaccttacaatgctatgaggtggata

SEQ ID NO: 108302 - DNA, 76 bp, Homo sapiens
tgcctcacgccactttaagtgcattctatggatcaatttatttaaccttacaatgctatgaggtggatacttttat

SEQ ID NO: 108303 - DNA, 74 bp, Homo sapiens
cctcacgccactttaagtgcattctatggatcaatttatttaaccttacaatgctatgaggtggatacttttat

SEQ ID NO: 108304 - DNA, 75 bp, Homo sapiens
cacgccactttaagtgcattctatggatcaatttatttaaccttacaatgctatgaggtggatacttttattatc

SEQ ID NO: 108305 - DNA, 76 bp, Homo sapiens
agtgcattctatggatcaatttatttaaccttacaatgctatgaggtggatacttttattatccccagttagcaga

SEQ ID NO: 108306 - DNA, 76 bp, Homo sapiens
ttctatggatcaatttatttaaccttacaatgctatgaggtggatacttttattatccccagttagcagatgtgga

SEQ ID NO: 108307 - DNA, 76 bp, Homo sapiens
tggatcaatttatttaaccttacaatgctatgaggtggatacttttattatccccagttagcagatgtggaaatca

SEQ ID NO: 108308 - DNA, 73 bp, Homo sapiens
aatttatttaaccttacaatgctatgaggtggatacttttattatccccagttagcagatgtggaaatcaagc

SEQ ID NO: 108309 - DNA, 75 bp, Homo sapiens
ccttacaatgctatgaggtggatacttttattatccccagttagcagatgtggaaatcaagctccaaatggttaa

SEQ ID NO: 108310 - DNA, 73 bp, Homo sapiens
aggtggatacttttattatccccagttagcagatgtggaaatcaagctccaaatggttaagccacttgcctaa

SEQ ID NO: 108311 - DNA, 74 bp, Homo sapiens
atacttttattatccccagttagcagatgtggaaatcaagctccaaatggttaagccacttgcctaaagccaca

SEQ ID NO: 108312 - DNA, 77 bp, Homo sapiens
cccagttagcagatgtggaaatcaagctccaaatggttaagccacttgcctaaagccacatggccaatgaagggaga

SEQ ID NO: 108313 - DNA, 75 bp, Homo sapiens
atcaagctccaaatggttaagccacttgcctaaagccacatggccaatgaagggagaagaagatgctttggttta

SEQ ID NO: 108314 - DNA, 77 bp, Homo sapiens
ttaagccacttgcctaaagccacatggccaatgaagggagaagaagatgctttggtttactgccctgctgtccagag

SEQ ID NO: 108315 - DNA, 77 bp, Homo sapiens
taaagccacatggccaatgaagggagaagaagatgctttggtttactgccctgctgtccagaggaaggcgtgaggta

SEQ ID NO: 108316 - DNA, 76 bp, Homo sapiens
ccacatggccaatgaagggagaagaagatgctttggtttactgccctgctgtccagaggaaggcgtgaggtagccc

SEQ ID NO: 108317 - DNA, 72 bp, Homo sapiens
aagggagaagaagatgctttggtttactgccctgctgtccagaggaaggcgtgaggtagcccccaacccaca

SEQ ID NO: 108318 - DNA, 71 bp, Homo sapiens
aagatgctttggtttactgccctgctgtccagaggaaggcgtgaggtagcccccaacccacaccccctcat

SEQ ID NO: 108319 - DNA, 73 bp, Homo sapiens
gtttactgccctgctgtccagaggaaggcgtgaggtagcccccaacccacaccccctcattgactgctttcaa

SEQ ID NO: 108320 - DNA, 75 bp, Homo sapiens
ctgctgtccagaggaaggcgtgaggtagcccccaacccacaccccctcattgactgctttcaatgtacaacacca

SEQ ID NO: 108321 - DNA, 72 bp, Homo sapiens
agaggaaggcgtgaggtagcccccaacccacaccccctcattgactgctttcaatgtacaacaccataagta

SEQ ID NO: 108322 - DNA, 74 bp, Homo sapiens
aggcgtgaggtagcccccaacccacaccccctcattgactgctttcaatgtacaacaccataagtatctcactc

SEQ ID NO: 108323 - DNA, 79 bp, Homo sapiens
cccaacccacaccccctcattgactgctttcaatgtacaacaccataagtatctcactctgtcatggacattcagagaa

SEQ ID NO: 108324 - DNA, 80 bp, Homo sapiens
acaccccctcattgactgctttcaatgtacaacaccataagtatctcactctgtcatggacattcagagaaggcttcacc

SEQ ID NO: 108325 - DNA, 81 bp, Homo sapiens
attgactgctttcaatgtacaacaccataagtatctcactctgtcatggacattcagagaaggcttcaccccaccaatcaa

SEQ ID NO: 108326 - DNA, 81 bp, Homo sapiens
ttcaatgtacaacaccataagtatctcactctgtcatggacattcagagaaggcttcaccccaccaatcaatgacaactta

SEQ ID NO: 108327 - DNA, 76 bp, Homo sapiens
aacaccataagtatctcactctgtcatggacattcagagaaggcttcaccccaccaatcaatgacaacttactttt

SEQ ID NO: 108328 - DNA, 76 bp, Homo sapiens
taagtatctcactctgtcatggacattcagagaaggcttcaccccaccaatcaatgacaacttactttttccccaa

SEQ ID NO: 108329 - DNA, 73 bp, Homo sapiens
aaggcttcaccccaccaatcaatgacaacttactttttccccaaggatcagataattgatctgattatgcgtt

SEQ ID NO: 108330 - DNA, 76 bp, Homo sapiens
accaatcaatgacaacttactttttccccaaggatcagataattgatctgattatgcgtttgctgcaaatggaaat

SEQ ID NO: 108331 - DNA, 76 bp, Homo sapiens
gacaacttactttttccccaaggatcagataattgatctgattatgcgtttgctgcaaatggaaattaacatcatt

SEQ ID NO: 108332 - DNA, 77 bp, Homo sapiens
tttttccccaaggatcagataattgatctgattatgcgtttgctgcaaatggaaattaacatcatttgcccttctat

SEQ ID NO: 108333 - DNA, 77 bp, Homo sapiens
cccaaggatcagataattgatctgattatgcgtttgctgcaaatggaaattaacatcatttgcccttctatttattt

SEQ ID NO: 108334 - DNA, 77 bp, Homo sapiens
cagataattgatctgattatgcgtttgctgcaaatggaaattaacatcatttgcccttctatttatttttgcttttc

SEQ ID NO: 108335 - DNA, 75 bp, Homo sapiens
atctgattatgcgtttgctgcaaatggaaattaacatcatttgcccttctatttatttttgcttttcccactgaa

SEQ ID NO: 108336 - DNA, 73 bp, Homo sapiens
gcgtttgctgcaaatggaaattaacatcatttgcccttctatttatttttgcttttcccactgaaaatgctat

SEQ ID NO: 108337 - DNA, 71 bp, Homo sapiens
ggaaattaacatcatttgcccttctatttatttttgcttttcccactgaaaatgctattatggttatatac

SEQ ID NO: 108338 - DNA, 73 bp, Homo sapiens
catcatttgcccttctatttatttttgcttttcccactgaaaatgctattatggttatatacgccataaaaga

SEQ ID NO: 108339 - DNA, 71 bp, Homo sapiens
ttgcccttctatttatttttgcttttcccactgaaaatgctattatggttatatacgccataaaagaattg

SEQ ID NO: 108340 - DNA, 73 bp, Homo sapiens
tttttgcttttcccactgaaaatgctattatggttatatacgccataaaagaattgtagtaatgttgtatcta

SEQ ID NO: 108341 - DNA, 75 bp, Homo sapiens
tcccactgaaaatgctattatggttatatacgccataaaagaattgtagtaatgttgtatctacattaatttcca

SEQ ID NO: 108342 - DNA, 73 bp, Homo sapiens
aatgctattatggttatatacgccataaaagaattgtagtaatgttgtatctacattaatttccacccaagag

SEQ ID NO: 108343 - DNA, 71 bp, Homo sapiens
atggttatatacgccataaaagaattgtagtaatgttgtatctacattaatttccacccaagagttttcga

SEQ ID NO: 108344 - DNA, 71 bp, Homo sapiens
tatacgccataaaagaattgtagtaatgttgtatctacattaatttccacccaagagttttcgattttcac

SEQ ID NO: 108345 - DNA, 71 bp, Homo sapiens
gaattgtagtaatgttgtatctacattaatttccacccaagagttttcgattttcactttttatggtgatg

SEQ ID NO: 108346 - DNA, 71 bp, Homo sapiens
gtagtaatgttgtatctacattaatttccacccaagagttttcgattttcactttttatggtgatggaggc

SEQ ID NO: 108347 - DNA, 71 bp, Homo sapiens
tctacattaatttccacccaagagttttcgattttcactttttatggtgatggaggctacaaacgagagaa

SEQ ID NO: 108348 - DNA, 71 bp, Homo sapiens
ttaatttccacccaagagttttcgattttcactttttatggtgatggaggctacaaacgagagaactgcag

SEQ ID NO: 108349 - DNA, 72 bp, Homo sapiens
aagagttttcgattttcactttttatggtgatggaggctacaaacgagagaactgcagtggctgtaaatcgt

SEQ ID NO: 108350 - DNA, 76 bp, Homo sapiens
ttttcactttttatggtgatggaggctacaaacgagagaactgcagtggctgtaaatcgttctcttcatgaaaatg

SEQ ID NO: 108351 - DNA, 79 bp, Homo sapiens
atggaggctacaaacgagagaactgcagtggctgtaaatcgttctcttcatgaaaatgtgccagatgaggtgaaggaag

SEQ ID NO: 108352 - DNA, 81 bp, Homo sapiens
ctacaaacgagagaactgcagtggctgtaaatcgttctcttcatgaaaatgtgccagatgaggtgaaggaaggagagcgca

SEQ ID NO: 108353 - DNA, 78 bp, Homo sapiens
aactgcagtggctgtaaatcgttctcttcatgaaaatgtgccagatgaggtgaaggaaggagagcgcaggggtcctaa

SEQ ID NO: 108354 - DNA, 75 bp, Homo sapiens
ctgtaaatcgttctcttcatgaaaatgtgccagatgaggtgaaggaaggagagcgcaggggtcctaagagtaagg

SEQ ID NO: 108355 - DNA, 76 bp, Homo sapiens
tctcttcatgaaaatgtgccagatgaggtgaaggaaggagagcgcaggggtcctaagagtaagggcatatttaaaa

SEQ ID NO: 108356 - DNA, 73 bp, Homo sapiens
atgaaaatgtgccagatgaggtgaaggaaggagagcgcaggggtcctaagagtaagggcatatttaaaaaata

SEQ ID NO: 108357 - DNA, 66 bp, Homo sapiens
ttaaaaaataaaaaggttattcatgcaattatccaatttcttcagtaagtggaaaaaaatcttagg

SEQ ID NO: 108358 - DNA, 69 bp, Homo sapiens
aaaaggttattcatgcaattatccaatttcttcagtaagtggaaaaaaatcttagggatgtaatgaaaa

SEQ ID NO: 108359 - DNA, 73 bp, Homo sapiens
tcatgcaattatccaatttcttcagtaagtggaaaaaaatcttagggatgtaatgaaaacacattcacaaacg

SEQ ID NO: 108360 - DNA, 70 bp, Homo sapiens
caattatccaatttcttcagtaagtggaaaaaaatcttagggatgtaatgaaaacacattcacaaacgtg

SEQ ID NO: 108361 - DNA, 69 bp, Homo sapiens
tcttcagtaagtggaaaaaaatcttagggatgtaatgaaaacacattcacaaacgtgtttttaagaata

SEQ ID NO: 108362 - DNA, 66 bp, Homo sapiens
ggaaaaaaatcttagggatgtaatgaaaacacattcacaaacgtgtttttaagaatagtattttcc

SEQ ID NO: 108363 - DNA, 67 bp, Homo sapiens
aatcttagggatgtaatgaaaacacattcacaaacgtgtttttaagaatagtattttcccaggccgg

SEQ ID NO: 108364 - DNA, 69 bp, Homo sapiens
tgtaatgaaaacacattcacaaacgtgtttttaagaatagtattttcccaggccgggcgcggcggccaa

SEQ ID NO: 108365 - DNA, 67 bp, Homo sapiens
aaaacacattcacaaacgtgtttttaagaatagtattttcccaggccgggcgcggcggccaaggcga

SEQ ID NO: 108366 - DNA, 73 bp, Homo sapiens
aaaaaagaagaatagcgttttcccattgagctttcgtctggactgatggaatcatggatggacccctcaccag

SEQ ID NO: 108367 - DNA, 76 bp, Homo sapiens
aagaatagcgttttcccattgagctttcgtctggactgatggaatcatggatggacccctcaccaggccaccgaga

SEQ ID NO: 108368 - DNA, 79 bp, Homo sapiens
ttttcccattgagctttcgtctggactgatggaatcatggatggacccctcaccaggccaccgagactcaactgtgcca

SEQ ID NO: 108369 - DNA, 82 bp, Homo sapiens
ttgagctttcgtctggactgatggaatcatggatggacccctcaccaggccaccgagactcaactgtgccacgtcagtgtca

SEQ ID NO: 108370 - DNA, 79 bp, Homo sapiens
gtctggactgatggaatcatggatggacccctcaccaggccaccgagactcaactgtgccacgtcagtgtcacggggga

SEQ ID NO: 108371 - DNA, 76 bp, Homo sapiens
aatcatggatggacccctcaccaggccaccgagactcaactgtgccacgtcagtgtcacgggggaggctgaacttc

SEQ ID NO: 108372 - DNA, 76 bp, Homo sapiens
atggacccctcaccaggccaccgagactcaactgtgccacgtcagtgtcacgggggaggctgaacttcgccatcca

SEQ ID NO: 108373 - DNA, 78 bp, Homo sapiens
ctcaccaggccaccgagactcaactgtgccacgtcagtgtcacgggggaggctgaacttcgccatccagccctgaaca

SEQ ID NO: 108374 - DNA, 79 bp, Homo sapiens
agactcaactgtgccacgtcagtgtcacgggggaggctgaacttcgccatccagccctgaacacaggatctcagtgttg

SEQ ID NO: 108375 - DNA, 79 bp, Homo sapiens
aactgtgccacgtcagtgtcacgggggaggctgaacttcgccatccagccctgaacacaggatctcagtgttgtctcaa

SEQ ID NO: 108376 - DNA, 76 bp, Homo sapiens
agtgtcacgggggaggctgaacttcgccatccagccctgaacacaggatctcagtgttgtctcaaatcagcccttt

SEQ ID NO: 108377 - DNA, 81 bp, Homo sapiens
aacttcgccatccagccctgaacacaggatctcagtgttgtctcaaatcagcccttttgcaggcatgcacagggtgtctaa

SEQ ID NO: 108378 - DNA, 82 bp, Homo sapiens
tccagccctgaacacaggatctcagtgttgtctcaaatcagcccttttgcaggcatgcacagggtgtctaagagtctggtgt

SEQ ID NO: 108379 - DNA, 80 bp, Homo sapiens
acacaggatctcagtgttgtctcaaatcagcccttttgcaggcatgcacagggtgtctaagagtctggtgttaagttgaa

SEQ ID NO: 108380 - DNA, 78 bp, Homo sapiens
tcagtgttgtctcaaatcagcccttttgcaggcatgcacagggtgtctaagagtctggtgttaagttgaaaaggtcta

SEQ ID NO: 108381 - DNA, 77 bp, Homo sapiens
ttgtctcaaatcagcccttttgcaggcatgcacagggtgtctaagagtctggtgttaagttgaaaaggtctaatgta

SEQ ID NO: 108382 - DNA, 74 bp, Homo sapiens
aatcagcccttttgcaggcatgcacagggtgtctaagagtctggtgttaagttgaaaaggtctaatgtagtgtt

SEQ ID NO: 108383 - DNA, 72 bp, Homo sapiens
cccttttgcaggcatgcacagggtgtctaagagtctggtgttaagttgaaaaggtctaatgtagtgttttaa

SEQ ID NO: 108384 - DNA, 73 bp, Homo sapiens
cttttgcaggcatgcacagggtgtctaagagtctggtgttaagttgaaaaggtctaatgtagtgttttaaaga

SEQ ID NO: 108385 - DNA, 71 bp, Homo sapiens
aggcatgcacagggtgtctaagagtctggtgttaagttgaaaaggtctaatgtagtgttttaaagagaaaa

SEQ ID NO: 108386 - DNA, 70 bp, Homo sapiens
atgcacagggtgtctaagagtctggtgttaagttgaaaaggtctaatgtagtgttttaaagagaaaagga

SEQ ID NO: 108387 - DNA, 68 bp, Homo sapiens
cacagggtgtctaagagtctggtgttaagttgaaaaggtctaatgtagtgttttaaagagaaaaggat

SEQ ID NO: 108388 - DNA, 68 bp, Homo sapiens
gggtgtctaagagtctggtgttaagttgaaaaggtctaatgtagtgttttaaagagaaaaggattctc

SEQ ID NO: 108389 - DNA, 69 bp, Homo sapiens
tctaagagtctggtgttaagttgaaaaggtctaatgtagtgttttaaagagaaaaggattctccagccc

SEQ ID NO: 108390 - DNA, 68 bp, Homo sapiens
agtctggtgttaagttgaaaaggtctaatgtagtgttttaaagagaaaaggattctccagccccatag

SEQ ID NO: 108391 - DNA, 70 bp, Homo sapiens
tgttaagttgaaaaggtctaatgtagtgttttaaagagaaaaggattctccagccccatagtggtgagaa

SEQ ID NO: 108392 - DNA, 77 bp, Homo sapiens
aaagagaaaaggattctccagccccatagtggtgagaagtgacacagagtcacattacataaaatgacgaggcctga

SEQ ID NO: 108393 - DNA, 82 bp, Homo sapiens
attctccagccccatagtggtgagaagtgacacagagtcacattacataaaatgacgaggcctgaggtgattgtgacagtga

SEQ ID NO: 108394 - DNA, 82 bp, Homo sapiens
atagtggtgagaagtgacacagagtcacattacataaaatgacgaggcctgaggtgattgtgacagtgagggtgactcatta

SEQ ID NO: 108395 - DNA, 80 bp, Homo sapiens
agaagtgacacagagtcacattacataaaatgacgaggcctgaggtgattgtgacagtgagggtgactcattaatcccaa

SEQ ID NO: 108396 - DNA, 79 bp, Homo sapiens
acacagagtcacattacataaaatgacgaggcctgaggtgattgtgacagtgagggtgactcattaatcccaacactgg

SEQ ID NO: 108397 - DNA, 79 bp, Homo sapiens
acattacataaaatgacgaggcctgaggtgattgtgacagtgagggtgactcattaatcccaacactgggatcctctga

SEQ ID NO: 108398 - DNA, 79 bp, Homo sapiens
aaatgacgaggcctgaggtgattgtgacagtgagggtgactcattaatcccaacactgggatcctctgagctctcccta

SEQ ID NO: 108399 - DNA, 81 bp, Homo sapiens
tgaggtgattgtgacagtgagggtgactcattaatcccaacactgggatcctctgagctctccctagcagggtctcaaatg

SEQ ID NO: 108400 - DNA, 79 bp, Homo sapiens
attgtgacagtgagggtgactcattaatcccaacactgggatcctctgagctctccctagcagggtctcaaatgtttga

SEQ ID NO: 108401 - DNA, 76 bp, Homo sapiens
agggtgactcattaatcccaacactgggatcctctgagctctccctagcagggtctcaaatgtttgagtgaaagac

SEQ ID NO: 108402 - DNA, 79 bp, Homo sapiens
attaatcccaacactgggatcctctgagctctccctagcagggtctcaaatgtttgagtgaaagactgcagctagaaga

SEQ ID NO: 108403 - DNA, 79 bp, Homo sapiens
aacactgggatcctctgagctctccctagcagggtctcaaatgtttgagtgaaagactgcagctagaagactgacaaaa

SEQ ID NO: 108404 - DNA, 81 bp, Homo sapiens
tctgagctctccctagcagggtctcaaatgtttgagtgaaagactgcagctagaagactgacaaaaccacactgaactcac

SEQ ID NO: 108405 - DNA, 78 bp, Homo sapiens
tctccctagcagggtctcaaatgtttgagtgaaagactgcagctagaagactgacaaaaccacactgaactcactagg

SEQ ID NO: 108406 - DNA, 78 bp, Homo sapiens
gtctcaaatgtttgagtgaaagactgcagctagaagactgacaaaaccacactgaactcactagggcaactgccttta

SEQ ID NO: 108407 - DNA, 75 bp, Homo sapiens
aaatgtttgagtgaaagactgcagctagaagactgacaaaaccacactgaactcactagggcaactgcctttatt

SEQ ID NO: 108408 - DNA, 76 bp, Homo sapiens
aaagactgcagctagaagactgacaaaaccacactgaactcactagggcaactgcctttatttccaaggcagcttc

SEQ ID NO: 108409 - DNA, 75 bp, Homo sapiens
tagaagactgacaaaaccacactgaactcactagggcaactgcctttatttccaaggcagcttccatcgaaggga

SEQ ID NO: 108410 - DNA, 73 bp, Homo sapiens
acaaaaccacactgaactcactagggcaactgcctttatttccaaggcagcttccatcgaagggagtggcaat

SEQ ID NO: 108411 - DNA, 76 bp, Homo sapiens
accacactgaactcactagggcaactgcctttatttccaaggcagcttccatcgaagggagtggcaattcatataa

SEQ ID NO: 108412 - DNA, 77 bp, Homo sapiens
actagggcaactgcctttatttccaaggcagcttccatcgaagggagtggcaattcatataatcaccaattgctgaa

SEQ ID NO: 108413 - DNA, 77 bp, Homo sapiens
actgcctttatttccaaggcagcttccatcgaagggagtggcaattcatataatcaccaattgctgaaagacatctt

SEQ ID NO: 108414 - DNA, 78 bp, Homo sapiens
agcttccatcgaagggagtggcaattcatataatcaccaattgctgaaagacatcttttccacgtcagattgaaacca

SEQ ID NO: 108415 - DNA, 75 bp, Homo sapiens
atcgaagggagtggcaattcatataatcaccaattgctgaaagacatcttttccacgtcagattgaaaccagttt

SEQ ID NO: 108416 - DNA, 76 bp, Homo sapiens
aattcatataatcaccaattgctgaaagacatcttttccacgtcagattgaaaccagttttgcagcctccttaatg

SEQ ID NO: 108417 - DNA, 77 bp, Homo sapiens
aattgctgaaagacatcttttccacgtcagattgaaaccagttttgcagcctccttaatgtaggtgctgtggctgag

SEQ ID NO: 108418 - DNA, 78 bp, Homo sapiens
ttccacgtcagattgaaaccagttttgcagcctccttaatgtaggtgctgtggctgaggcaactagagaaacagtgga

SEQ ID NO: 108419 - DNA, 75 bp, Homo sapiens
attgaaaccagttttgcagcctccttaatgtaggtgctgtggctgaggcaactagagaaacagtggacgcctccc

SEQ ID NO: 108420 - DNA, 76 bp, Homo sapiens
ttttgcagcctccttaatgtaggtgctgtggctgaggcaactagagaaacagtggacgcctccctggccccacttc

SEQ ID NO: 108421 - DNA, 75 bp, Homo sapiens
ttaatgtaggtgctgtggctgaggcaactagagaaacagtggacgcctccctggccccacttcccagtgccttaa

SEQ ID NO: 108422 - DNA, 76 bp, Homo sapiens
tgctgtggctgaggcaactagagaaacagtggacgcctccctggccccacttcccagtgccttaaagtctgagaaa

SEQ ID NO: 108423 - DNA, 72 bp, Homo sapiens
tgaggcaactagagaaacagtggacgcctccctggccccacttcccagtgccttaaagtctgagaaaaacac

SEQ ID NO: 108424 - DNA, 70 bp, Homo sapiens
aactagagaaacagtggacgcctccctggccccacttcccagtgccttaaagtctgagaaaaacactgat

SEQ ID NO: 108425 - DNA, 72 bp, Homo sapiens
acagtggacgcctccctggccccacttcccagtgccttaaagtctgagaaaaacactgattgacatttccag

SEQ ID NO: 108426 - DNA, 75 bp, Homo sapiens
ctggccccacttcccagtgccttaaagtctgagaaaaacactgattgacatttccaggctgctgtatttccctca

SEQ ID NO: 108427 - DNA, 74 bp, Homo sapiens
acttcccagtgccttaaagtctgagaaaaacactgattgacatttccaggctgctgtatttccctcaccagccc

SEQ ID NO: 108428 - DNA, 74 bp, Homo sapiens
agtgccttaaagtctgagaaaaacactgattgacatttccaggctgctgtatttccctcaccagccccaaacgc

SEQ ID NO: 108429 - DNA, 76 bp, Homo sapiens
aaacactgattgacatttccaggctgctgtatttccctcaccagccccaaacgcccgatccagcttcctgcaactg

SEQ ID NO: 108430 - DNA, 76 bp, Homo sapiens
tttccaggctgctgtatttccctcaccagccccaaacgcccgatccagcttcctgcaactgtggcaagggcgtgaa

SEQ ID NO: 108431 - DNA, 76 bp, Homo sapiens
aggctgctgtatttccctcaccagccccaaacgcccgatccagcttcctgcaactgtggcaagggcgtgaatgtcc

SEQ ID NO: 108432 - DNA, 73 bp, Homo sapiens
atttccctcaccagccccaaacgcccgatccagcttcctgcaactgtggcaagggcgtgaatgtccccaggag

SEQ ID NO: 108433 - DNA, 75 bp, Homo sapiens
cccaaacgcccgatccagcttcctgcaactgtggcaagggcgtgaatgtccccaggaggcaggttgcagagttgt

SEQ ID NO: 108434 - DNA, 78 bp, Homo sapiens
ccgatccagcttcctgcaactgtggcaagggcgtgaatgtccccaggaggcaggttgcagagttgtttagatccagga

SEQ ID NO: 108435 - DNA, 79 bp, Homo sapiens
agcttcctgcaactgtggcaagggcgtgaatgtccccaggaggcaggttgcagagttgtttagatccaggactgcatcc

SEQ ID NO: 108436 - DNA, 81 bp, Homo sapiens
cccaggaggcaggttgcagagttgtttagatccaggactgcatcccagtttgtccatctgtgtgtctatgtctgagtgggc

SEQ ID NO: 108437 - DNA, 81 bp, Homo sapiens
aggttgcagagttgtttagatccaggactgcatcccagtttgtccatctgtgtgtctatgtctgagtgggcgagttgcttc

SEQ ID NO: 108438 - DNA, 83 bp, Homo sapiens
agagttgtttagatccaggactgcatcccagtttgtccatctgtgtgtctatgtctgagtgggcgagttgcttctcagctctc

SEQ ID NO: 108439 - DNA, 85 bp, Homo sapiens
ttagatccaggactgcatcccagtttgtccatctgtgtgtctatgtctgagtgggcgagttgcttctcagctctccgcaggactc

SEQ ID NO: 108440 - DNA, 83 bp, Homo sapiens
catcccagtttgtccatctgtgtgtctatgtctgagtgggcgagttgcttctcagctctccgcaggactctggtgttgcttgt

SEQ ID NO: 108441 - DNA, 82 bp, Homo sapiens
agtttgtccatctgtgtgtctatgtctgagtgggcgagttgcttctcagctctccgcaggactctggtgttgcttgttgctt

SEQ ID NO: 108442 - DNA, 82 bp, Homo sapiens
atctgtgtgtctatgtctgagtgggcgagttgcttctcagctctccgcaggactctggtgttgcttgttgctttggcctggg

SEQ ID NO: 108443 - DNA, 80 bp, Homo sapiens
cgagttgcttctcagctctccgcaggactctggtgttgcttgttgctttggcctggggctgattcctccaaagcaatgtg

SEQ ID NO: 108444 - DNA, 80 bp, Homo sapiens
cgcaggactctggtgttgcttgttgctttggcctggggctgattcctccaaagcaatgtgtctcttcgcagagtctctta

SEQ ID NO: 108445 - DNA, 82 bp, Homo sapiens
tctggtgttgcttgttgctttggcctggggctgattcctccaaagcaatgtgtctcttcgcagagtctcttagagctgcaag

SEQ ID NO: 108446 - DNA, 83 bp, Homo sapiens
ttgcttgttgctttggcctggggctgattcctccaaagcaatgtgtctcttcgcagagtctcttagagctgcaaggcagtatg

SEQ ID NO: 108447 - DNA, 87 bp, Homo sapiens
tgattcctccaaagcaatgtgtctcttcgcagagtctcttagagctgcaaggcagtatgggatcatcagagaggatgctaggaagct

SEQ ID NO: 108448 - DNA, 82 bp, Homo sapiens
agagtctcttagagctgcaaggcagtatgggatcatcagagaggatgctaggaagcttcagaaatggaggtcctggtagaaa

SEQ ID NO: 108449 - DNA, 81 bp, Homo sapiens
tcttagagctgcaaggcagtatgggatcatcagagaggatgctaggaagcttcagaaatggaggtcctggtagaaagggtc

SEQ ID NO: 108450 - DNA, 76 bp, Homo sapiens
aaggcagtatgggatcatcagagaggatgctaggaagcttcagaaatggaggtcctggtagaaagggtcctttggc

SEQ ID NO: 108451 - DNA, 77 bp, Homo sapiens
atcatcagagaggatgctaggaagcttcagaaatggaggtcctggtagaaagggtcctttggcgtggcctctgaaga

SEQ ID NO: 108452 - DNA, 72 bp, Homo sapiens
taggaagcttcagaaatggaggtcctggtagaaagggtcctttggcgtggcctctgaagagtccaaatgtgg

SEQ ID NO: 108453 - DNA, 72 bp, Homo sapiens
ttcagaaatggaggtcctggtagaaagggtcctttggcgtggcctctgaagagtccaaatgtgggacaagac

SEQ ID NO: 108454 - DNA, 69 bp, Homo sapiens
ggtcctggtagaaagggtcctttggcgtggcctctgaagagtccaaatgtgggacaagaccctccgaaa

SEQ ID NO: 108455 - DNA, 70 bp, Homo sapiens
tagaaagggtcctttggcgtggcctctgaagagtccaaatgtgggacaagaccctccgaaagcggtggcc

SEQ ID NO: 108456 - DNA, 72 bp, Homo sapiens
cctttggcgtggcctctgaagagtccaaatgtgggacaagaccctccgaaagcggtggcctggggagccaca

SEQ ID NO: 108457 - DNA, 72 bp, Homo sapiens
agtccaaatgtgggacaagaccctccgaaagcggtggcctggggagccacaggtggggcagccagcacggaa

SEQ ID NO: 108458 - DNA, 74 bp, Homo sapiens
tccgaaagcggtggcctggggagccacaggtggggcagccagcacggaagagggtggctttgctaccattggga

SEQ ID NO: 108459 - DNA, 73 bp, Homo sapiens
tggcctggggagccacaggtggggcagccagcacggaagagggtggctttgctaccattgggaaaacttatcc

SEQ ID NO: 108460 - DNA, 74 bp, Homo sapiens
ggagccacaggtggggcagccagcacggaagagggtggctttgctaccattgggaaaacttatcctccacatcc

SEQ ID NO: 108461 - DNA, 77 bp, Homo sapiens
tggggcagccagcacggaagagggtggctttgctaccattgggaaaacttatcctccacatcctcatgaggcaaaca

SEQ ID NO: 108462 - DNA, 71 bp, Homo sapiens
agggtggctttgctaccattgggaaaacttatcctccacatcctcatgaggcaaacacctttcctacctta

SEQ ID NO: 108463 - DNA, 72 bp, Homo sapiens
attgggaaaacttatcctccacatcctcatgaggcaaacacctttcctaccttaccgctcctcagtggcctc

SEQ ID NO: 108464 - DNA, 75 bp, Homo sapiens
tatcctccacatcctcatgaggcaaacacctttcctaccttaccgctcctcagtggcctccctgttgccttctta

SEQ ID NO: 108465 - DNA, 74 bp, Homo sapiens
acatcctcatgaggcaaacacctttcctaccttaccgctcctcagtggcctccctgttgccttcttattcaaga

SEQ ID NO: 108466 - DNA, 70 bp, Homo sapiens
aggcaaacacctttcctaccttaccgctcctcagtggcctccctgttgccttcttattcaagactaagac

SEQ ID NO: 108467 - DNA, 71 bp, Homo sapiens
tttcctaccttaccgctcctcagtggcctccctgttgccttcttattcaagactaagaccctctagaatgt

SEQ ID NO: 108468 - DNA, 74 bp, Homo sapiens
ttaccgctcctcagtggcctccctgttgccttcttattcaagactaagaccctctagaatgttctttatcctga

SEQ ID NO: 108469 - DNA, 75 bp, Homo sapiens
agtggcctccctgttgccttcttattcaagactaagaccctctagaatgttctttatcctgagtccagctgattg

SEQ ID NO: 108470 - DNA, 79 bp, Homo sapiens
tgttgccttcttattcaagactaagaccctctagaatgttctttatcctgagtccagctgattgtctatactaatatca

SEQ ID NO: 108471 - DNA, 77 bp, Homo sapiens
ttcttattcaagactaagaccctctagaatgttctttatcctgagtccagctgattgtctatactaatatcagtacg

SEQ ID NO: 108472 - DNA, 75 bp, Homo sapiens
aagactaagaccctctagaatgttctttatcctgagtccagctgattgtctatactaatatcagtacggggtgta

SEQ ID NO: 108473 - DNA, 78 bp, Homo sapiens
ctagaatgttctttatcctgagtccagctgattgtctatactaatatcagtacggggtgtagatgaggacaaccagtg

SEQ ID NO: 108474 - DNA, 78 bp, Homo sapiens
agctgattgtctatactaatatcagtacggggtgtagatgaggacaaccagtgtgcctggctgccaggcaccccctcc

SEQ ID NO: 108475 - DNA, 74 bp, Homo sapiens
tatactaatatcagtacggggtgtagatgaggacaaccagtgtgcctggctgccaggcaccccctccccaaacc

SEQ ID NO: 108476 - DNA, 71 bp, Homo sapiens
tacggggtgtagatgaggacaaccagtgtgcctggctgccaggcaccccctccccaaaccccaggagtttc

SEQ ID NO: 108477 - DNA, 74 bp, Homo sapiens
tgtagatgaggacaaccagtgtgcctggctgccaggcaccccctccccaaaccccaggagtttctggaacattc

SEQ ID NO: 108478 - DNA, 71 bp, Homo sapiens
aaccagtgtgcctggctgccaggcaccccctccccaaaccccaggagtttctggaacattccaactctgct

SEQ ID NO: 108479 - DNA, 71 bp, Homo sapiens
cctggctgccaggcaccccctccccaaaccccaggagtttctggaacattccaactctgcttgagggtatc

SEQ ID NO: 108480 - DNA, 74 bp, Homo sapiens
aggcaccccctccccaaaccccaggagtttctggaacattccaactctgcttgagggtatccatgcagcatcta

SEQ ID NO: 108481 - DNA, 78 bp, Homo sapiens
tccccaaaccccaggagtttctggaacattccaactctgcttgagggtatccatgcagcatctactactgtgagcagg

SEQ ID NO: 108482 - DNA, 84 bp, Homo sapiens
ccaggagtttctggaacattccaactctgcttgagggtatccatgcagcatctactactgtgagcaggtggtctgatctgtgga

SEQ ID NO: 108483 - DNA, 84 bp, Homo sapiens
tctggaacattccaactctgcttgagggtatccatgcagcatctactactgtgagcaggtggtctgatctgtggaaaacttcta

SEQ ID NO: 108484 - DNA, 84 bp, Homo sapiens
attccaactctgcttgagggtatccatgcagcatctactactgtgagcaggtggtctgatctgtggaaaacttctatgattcac

SEQ ID NO: 108485 - DNA, 82 bp, Homo sapiens
cttgagggtatccatgcagcatctactactgtgagcaggtggtctgatctgtggaaaacttctatgattcacctgagggtaa

SEQ ID NO: 108486 - DNA, 82 bp, Homo sapiens
tatccatgcagcatctactactgtgagcaggtggtctgatctgtggaaaacttctatgattcacctgagggtaactgccctt

SEQ ID NO: 108487 - DNA, 77 bp, Homo sapiens
atctactactgtgagcaggtggtctgatctgtggaaaacttctatgattcacctgagggtaactgccctttgtgatt

SEQ ID NO: 108488 - DNA, 79 bp, Homo sapiens
tgtgagcaggtggtctgatctgtggaaaacttctatgattcacctgagggtaactgccctttgtgatttgaaagaatga

SEQ ID NO: 108489 - DNA, 78 bp, Homo sapiens
gtctgatctgtggaaaacttctatgattcacctgagggtaactgccctttgtgatttgaaagaatgatgctaacagaa

SEQ ID NO: 108490 - DNA, 75 bp, Homo sapiens
tgtggaaaacttctatgattcacctgagggtaactgccctttgtgatttgaaagaatgatgctaacagaaagtgt

SEQ ID NO: 108491 - DNA, 74 bp, Homo sapiens
attcacctgagggtaactgccctttgtgatttgaaagaatgatgctaacagaaagtgttgtcatttctgaactt

SEQ ID NO: 108492 - DNA, 79 bp, Homo sapiens
tttgtgatttgaaagaatgatgctaacagaaagtgttgtcatttctgaacttttctgaactctgcagcgagtgccaaat

SEQ ID NO: 108493 - DNA, 78 bp, Homo sapiens
aaagaatgatgctaacagaaagtgttgtcatttctgaacttttctgaactctgcagcgagtgccaaattcatgtattt

SEQ ID NO: 108494 - DNA, 77 bp, Homo sapiens
taacagaaagtgttgtcatttctgaacttttctgaactctgcagcgagtgccaaattcatgtattttaggagaccta

SEQ ID NO: 108495 - DNA, 77 bp, Homo sapiens
tgttgtcatttctgaacttttctgaactctgcagcgagtgccaaattcatgtattttaggagacctacgtggttcta

SEQ ID NO: 108496 - DNA, 76 bp, Homo sapiens
atttctgaacttttctgaactctgcagcgagtgccaaattcatgtattttaggagacctacgtggttctacatgta

SEQ ID NO: 108497 - DNA, 76 bp, Homo sapiens
tttctgaactctgcagcgagtgccaaattcatgtattttaggagacctacgtggttctacatgtagctaaaacaat

SEQ ID NO: 108498 - DNA, 76 bp, Homo sapiens
actctgcagcgagtgccaaattcatgtattttaggagacctacgtggttctacatgtagctaaaacaattcagtaa

SEQ ID NO: 108499 - DNA, 71 bp, Homo sapiens
agtgccaaattcatgtattttaggagacctacgtggttctacatgtagctaaaacaattcagtaaccccgc

SEQ ID NO: 108500 - DNA, 72 bp, Homo sapiens
ttaggagacctacgtggttctacatgtagctaaaacaattcagtaaccccgccggcaattctgcaatagttc

SEQ ID NO: 108501 - DNA, 76 bp, Homo sapiens
tggttctacatgtagctaaaacaattcagtaaccccgccggcaattctgcaatagttcttggagtgatgaaatcaa

SEQ ID NO: 108502 - DNA, 76 bp, Homo sapiens
tacatgtagctaaaacaattcagtaaccccgccggcaattctgcaatagttcttggagtgatgaaatcaagaagga

SEQ ID NO: 108503 - DNA, 73 bp, Homo sapiens
taaaacaattcagtaaccccgccggcaattctgcaatagttcttggagtgatgaaatcaagaaggaagagttc

SEQ ID NO: 108504 - DNA, 74 bp, Homo sapiens
taaccccgccggcaattctgcaatagttcttggagtgatgaaatcaagaaggaagagttctgcctccccattta

SEQ ID NO: 108505 - DNA, 78 bp, Homo sapiens
caattctgcaatagttcttggagtgatgaaatcaagaaggaagagttctgcctccccatttagaaactgttgagcaga

SEQ ID NO: 108506 - DNA, 74 bp, Homo sapiens
atagttcttggagtgatgaaatcaagaaggaagagttctgcctccccatttagaaactgttgagcagaaaggta

SEQ ID NO: 108507 - DNA, 75 bp, Homo sapiens
ttggagtgatgaaatcaagaaggaagagttctgcctccccatttagaaactgttgagcagaaaggtataagtcag

SEQ ID NO: 108508 - DNA, 71 bp, Homo sapiens
aaggaagagttctgcctccccatttagaaactgttgagcagaaaggtataagtcaggcttttcctattaca

SEQ ID NO: 108509 - DNA, 73 bp, Homo sapiens
atttagaaactgttgagcagaaaggtataagtcaggcttttcctattacaggtctccttcagtgtgaagagga

SEQ ID NO: 108510 - DNA, 73 bp, Homo sapiens
tgttgagcagaaaggtataagtcaggcttttcctattacaggtctccttcagtgtgaagaggaagttcagttt

SEQ ID NO: 108511 - DNA, 70 bp, Homo sapiens
aaaggtataagtcaggcttttcctattacaggtctccttcagtgtgaagaggaagttcagttttcattta

SEQ ID NO: 108512 - DNA, 71 bp, Homo sapiens
aggcttttcctattacaggtctccttcagtgtgaagaggaagttcagttttcatttatctcttgcgccctt

SEQ ID NO: 108513 - DNA, 73 bp, Homo sapiens
tttcctattacaggtctccttcagtgtgaagaggaagttcagttttcatttatctcttgcgccctttgaagta

SEQ ID NO: 108514 - DNA, 77 bp, Homo sapiens
tctccttcagtgtgaagaggaagttcagttttcatttatctcttgcgccctttgaagtacaggcctctgtctgctta

SEQ ID NO: 108515 - DNA, 71 bp, Homo sapiens
aagttcagttttcatttatctcttgcgccctttgaagtacaggcctctgtctgcttaatggcccaaaccgg

SEQ ID NO: 108516 - DNA, 75 bp, Homo sapiens
tcatttatctcttgcgccctttgaagtacaggcctctgtctgcttaatggcccaaaccggggcgactacgatgaa

SEQ ID NO: 108517 - DNA, 72 bp, Homo sapiens
tcttgcgccctttgaagtacaggcctctgtctgcttaatggcccaaaccggggcgactacgatgaattcctt

SEQ ID NO: 108518 - DNA, 72 bp, Homo sapiens
tttgaagtacaggcctctgtctgcttaatggcccaaaccggggcgactacgatgaattccttttacatcaaa

SEQ ID NO: 108519 - DNA, 71 bp, Homo sapiens
tctgcttaatggcccaaaccggggcgactacgatgaattccttttacatcaaacacaaccctgtctgaaaa

SEQ ID NO: 108520 - DNA, 69 bp, Homo sapiens
cccaaaccggggcgactacgatgaattccttttacatcaaacacaaccctgtctgaaaaggcagtaata

SEQ ID NO: 108521 - DNA, 74 bp, Homo sapiens
ggcgactacgatgaattccttttacatcaaacacaaccctgtctgaaaaggcagtaatatttctcaacatgtaa

SEQ ID NO: 108522 - DNA, 72 bp, Homo sapiens
ctacgatgaattccttttacatcaaacacaaccctgtctgaaaaggcagtaatatttctcaacatgtaaacc

SEQ ID NO: 108523 - DNA, 72 bp, Homo sapiens
ttttacatcaaacacaaccctgtctgaaaaggcagtaatatttctcaacatgtaaacctgccacgactttgg

SEQ ID NO: 108524 - DNA, 76 bp, Homo sapiens
tgtctgaaaaggcagtaatatttctcaacatgtaaacctgccacgactttggtgtttgcaagctgaagatggttac

SEQ ID NO: 108525 - DNA, 73 bp, Homo sapiens
aaaaggcagtaatatttctcaacatgtaaacctgccacgactttggtgtttgcaagctgaagatggttaccca

SEQ ID NO: 108526 - DNA, 75 bp, Homo sapiens
atatttctcaacatgtaaacctgccacgactttggtgtttgcaagctgaagatggttacccagtgtggttgctaa

SEQ ID NO: 108527 - DNA, 74 bp, Homo sapiens
atgtaaacctgccacgactttggtgtttgcaagctgaagatggttacccagtgtggttgctaatggagcaaaaa

SEQ ID NO: 108528 - DNA, 79 bp, Homo sapiens
cacgactttggtgtttgcaagctgaagatggttacccagtgtggttgctaatggagcaaaaatgcgcatagagcaggga

SEQ ID NO: 108529 - DNA, 77 bp, Homo sapiens
agatggttacccagtgtggttgctaatggagcaaaaatgcgcatagagcagggagcaggtggaggtgactggggacc

SEQ ID NO: 108530 - DNA, 76 bp, Homo sapiens
aaaaatgcgcatagagcagggagcaggtggaggtgactggggaccctctgacaggttgtctagccacaaacccatc

SEQ ID NO: 108531 - DNA, 76 bp, Homo sapiens
atagagcagggagcaggtggaggtgactggggaccctctgacaggttgtctagccacaaacccatctcttctaatc

SEQ ID NO: 108532 - DNA, 76 bp, Homo sapiens
caggtggaggtgactggggaccctctgacaggttgtctagccacaaacccatctcttctaatccattctactcaca

SEQ ID NO: 108533 - DNA, 75 bp, Homo sapiens
aggtgactggggaccctctgacaggttgtctagccacaaacccatctcttctaatccattctactcacagggcag

SEQ ID NO: 108534 - DNA, 78 bp, Homo sapiens
acaggttgtctagccacaaacccatctcttctaatccattctactcacagggcaggctgtctcctgcaggggccaaca

SEQ ID NO: 108535 - DNA, 78 bp, Homo sapiens
tctagccacaaacccatctcttctaatccattctactcacagggcaggctgtctcctgcaggggccaacagagaaaaa

SEQ ID NO: 108536 - DNA, 73 bp, Homo sapiens
aacccatctcttctaatccattctactcacagggcaggctgtctcctgcaggggccaacagagaaaaaaaaaa

SEQ ID NO: 108537 - DNA, 69 bp, Homo sapiens
aaacacagaaaatggggatgggagaaagagaggacaagaaaggaagaaaagatgaaacgtggagaaata

SEQ ID NO: 108538 - DNA, 69 bp, Homo sapiens
agaaaatggggatgggagaaagagaggacaagaaaggaagaaaagatgaaacgtggagaaatagcaaaa

SEQ ID NO: 108539 - DNA, 69 bp, Homo sapiens
atgggagaaagagaggacaagaaaggaagaaaagatgaaacgtggagaaatagcaaaaggaaatgaaaa

SEQ ID NO: 108540 - DNA, 69 bp, Homo sapiens
caagaaaggaagaaaagatgaaacgtggagaaatagcaaaaggaaatgaaaagaactttattgctcagt

SEQ ID NO: 108541 - DNA, 71 bp, Homo sapiens
gaagaaaagatgaaacgtggagaaatagcaaaaggaaatgaaaagaactttattgctcagtttcttctgcc

SEQ ID NO: 108542 - DNA, 70 bp, Homo sapiens
aaacgtggagaaatagcaaaaggaaatgaaaagaactttattgctcagtttcttctgcctgacccaatta

SEQ ID NO: 108543 - DNA, 75 bp, Homo sapiens
gagaaatagcaaaaggaaatgaaaagaactttattgctcagtttcttctgcctgacccaattatcagattttgca

SEQ ID NO: 108544 - DNA, 72 bp, Homo sapiens
ggaaatgaaaagaactttattgctcagtttcttctgcctgacccaattatcagattttgcatttaagtttaa

SEQ ID NO: 108545 - DNA, 75 bp, Homo sapiens
agaactttattgctcagtttcttctgcctgacccaattatcagattttgcatttaagtttaagacagtagatcaa

SEQ ID NO: 108546 - DNA, 77 bp, Homo sapiens
tttattgctcagtttcttctgcctgacccaattatcagattttgcatttaagtttaagacagtagatcaaacagcga

SEQ ID NO: 108547 - DNA, 77 bp, Homo sapiens
ttcttctgcctgacccaattatcagattttgcatttaagtttaagacagtagatcaaacagcgagaggcactttgta

SEQ ID NO: 108548 - DNA, 75 bp, Homo sapiens
acccaattatcagattttgcatttaagtttaagacagtagatcaaacagcgagaggcactttgtacttctgccag

SEQ ID NO: 108549 - DNA, 79 bp, Homo sapiens
cagattttgcatttaagtttaagacagtagatcaaacagcgagaggcactttgtacttctgccaggagaccatatgata

SEQ ID NO: 108550 - DNA, 80 bp, Homo sapiens
atttaagtttaagacagtagatcaaacagcgagaggcactttgtacttctgccaggagaccatatgatatctctcagtga

SEQ ID NO: 108551 - DNA, 81 bp, Homo sapiens
agtttaagacagtagatcaaacagcgagaggcactttgtacttctgccaggagaccatatgatatctctcagtgactctcc

SEQ ID NO: 108552 - DNA, 86 bp, Homo sapiens
agtagatcaaacagcgagaggcactttgtacttctgccaggagaccatatgatatctctcagtgactctcctgcatgccaggaaca

SEQ ID NO: 108553 - DNA, 84 bp, Homo sapiens
acagcgagaggcactttgtacttctgccaggagaccatatgatatctctcagtgactctcctgcatgccaggaacacggaccca

SEQ ID NO: 108554 - DNA, 88 bp, Homo sapiens
ttctgccaggagaccatatgatatctctcagtgactctcctgcatgccaggaacacggacccatgcctcttagctgggtctgcatatg

SEQ ID NO: 108555 - DNA, 89 bp, Homo sapiens
catatgatatctctcagtgactctcctgcatgccaggaacacggacccatgcctcttagctgggtctgcatatggtgcaatgcataaaa

SEQ ID NO: 108556 - DNA, 85 bp, Homo sapiens
atatctctcagtgactctcctgcatgccaggaacacggacccatgcctcttagctgggtctgcatatggtgcaatgcataaaaaa

SEQ ID NO: 108557 - DNA, 80 bp, Homo sapiens
agtgactctcctgcatgccaggaacacggacccatgcctcttagctgggtctgcatatggtgcaatgcataaaaaaaaaa

SEQ ID NO: 108558 - DNA, 77 bp, Homo sapiens
aacacggacccatgcctcttagctgggtctgcatatggtgcaatgcataaaaaaaaaacagcaaaattcataaatga

SEQ ID NO: 108559 - DNA, 79 bp, Homo sapiens
atgcctcttagctgggtctgcatatggtgcaatgcataaaaaaaaaacagcaaaattcataaatgactgcactcgtggg

SEQ ID NO: 108560 - DNA, 78 bp, Homo sapiens
atatggtgcaatgcataaaaaaaaaacagcaaaattcataaatgactgcactcgtgggtgatgtccaggatttacagc

SEQ ID NO: 108561 - DNA, 75 bp, Homo sapiens
aatgcataaaaaaaaaacagcaaaattcataaatgactgcactcgtgggtgatgtccaggatttacagcgcttta

SEQ ID NO: 108562 - DNA, 76 bp, Homo sapiens
aaaaacagcaaaattcataaatgactgcactcgtgggtgatgtccaggatttacagcgctttatcagttaaagcaa

SEQ ID NO: 108563 - DNA, 75 bp, Homo sapiens
agcaaaattcataaatgactgcactcgtgggtgatgtccaggatttacagcgctttatcagttaaagcaaaaaaa

SEQ ID NO: 108564 - DNA, 68 bp, Homo sapiens
aaaaaaaaacaaaggccaggcagaatctaattataactttccacaaataagtcaaaagtggaatgaga

SEQ ID NO: 108565 - DNA, 72 bp, Homo sapiens
caaaggccaggcagaatctaattataactttccacaaataagtcaaaagtggaatgagaactgaaagaaaga

SEQ ID NO: 108566 - DNA, 71 bp, Homo sapiens
ccaggcagaatctaattataactttccacaaataagtcaaaagtggaatgagaactgaaagaaagacaaaa

SEQ ID NO: 108567 - DNA, 73 bp, Homo sapiens
tccacaaataagtcaaaagtggaatgagaactgaaagaaagacaaaagactggtgtcacgcttactttgcaaa

SEQ ID NO: 108568 - DNA, 74 bp, Homo sapiens
ataagtcaaaagtggaatgagaactgaaagaaagacaaaagactggtgtcacgcttactttgcaaaattgatca

SEQ ID NO: 108569 - DNA, 75 bp, Homo sapiens
gaatgagaactgaaagaaagacaaaagactggtgtcacgcttactttgcaaaattgatcatcttgaggattgttt

SEQ ID NO: 108570 - DNA, 74 bp, Homo sapiens
agaactgaaagaaagacaaaagactggtgtcacgcttactttgcaaaattgatcatcttgaggattgttttatg

SEQ ID NO: 108571 - DNA, 75 bp, Homo sapiens
acaaaagactggtgtcacgcttactttgcaaaattgatcatcttgaggattgttttatgtgggatacagaacatt

SEQ ID NO: 108572 - DNA, 76 bp, Homo sapiens
agactggtgtcacgcttactttgcaaaattgatcatcttgaggattgttttatgtgggatacagaacattttacaa

SEQ ID NO: 108573 - DNA, 76 bp, Homo sapiens
acgcttactttgcaaaattgatcatcttgaggattgttttatgtgggatacagaacattttacaaggtatggatca

SEQ ID NO: 108574 - DNA, 77 bp, Homo sapiens
atcatcttgaggattgttttatgtgggatacagaacattttacaaggtatggatcatatctgttctggggattttga

SEQ ID NO: 108575 - DNA, 74 bp, Homo sapiens
ggattgttttatgtgggatacagaacattttacaaggtatggatcatatctgttctggggattttgacatttct

SEQ ID NO: 108576 - DNA, 82 bp, Homo sapiens
tatgtgggatacagaacattttacaaggtatggatcatatctgttctggggattttgacatttcttgcagtgaccatgtgca

SEQ ID NO: 108577 - DNA, 81 bp, Homo sapiens
acagaacattttacaaggtatggatcatatctgttctggggattttgacatttcttgcagtgaccatgtgcagcctccata

SEQ ID NO: 108578 - DNA, 81 bp, Homo sapiens
aacattttacaaggtatggatcatatctgttctggggattttgacatttcttgcagtgaccatgtgcagcctccatagatg

SEQ ID NO: 108579 - DNA, 82 bp, Homo sapiens
attttacaaggtatggatcatatctgttctggggattttgacatttcttgcagtgaccatgtgcagcctccatagatgtgaa

SEQ ID NO: 108580 - DNA, 83 bp, Homo sapiens
ttacaaggtatggatcatatctgttctggggattttgacatttcttgcagtgaccatgtgcagcctccatagatgtgaagggc

SEQ ID NO: 108581 - DNA, 84 bp, Homo sapiens
aggtatggatcatatctgttctggggattttgacatttcttgcagtgaccatgtgcagcctccatagatgtgaagggctggatg

SEQ ID NO: 108582 - DNA, 84 bp, Homo sapiens
atatctgttctggggattttgacatttcttgcagtgaccatgtgcagcctccatagatgtgaagggctggatggcagacgttca

SEQ ID NO: 108583 - DNA, 84 bp, Homo sapiens
ttctggggattttgacatttcttgcagtgaccatgtgcagcctccatagatgtgaagggctggatggcagacgttcatgtcttc

SEQ ID NO: 108584 - DNA, 83 bp, Homo sapiens
gggattttgacatttcttgcagtgaccatgtgcagcctccatagatgtgaagggctggatggcagacgttcatgtcttccttc

SEQ ID NO: 108585 - DNA, 84 bp, Homo sapiens
ttttgacatttcttgcagtgaccatgtgcagcctccatagatgtgaagggctggatggcagacgttcatgtcttccttctccaa

SEQ ID NO: 108586 - DNA, 85 bp, Homo sapiens
agtgaccatgtgcagcctccatagatgtgaagggctggatggcagacgttcatgtcttccttctccaagctatggcttgcctcca

SEQ ID NO: 108587 - DNA, 83 bp, Homo sapiens
cagcctccatagatgtgaagggctggatggcagacgttcatgtcttccttctccaagctatggcttgcctccagagataatta

SEQ ID NO: 108588 - DNA, 80 bp, Homo sapiens
atagatgtgaagggctggatggcagacgttcatgtcttccttctccaagctatggcttgcctccagagataattacttta

SEQ ID NO: 108589 - DNA, 79 bp, Homo sapiens
aagggctggatggcagacgttcatgtcttccttctccaagctatggcttgcctccagagataattactttatgaacaca

SEQ ID NO: 108590 - DNA, 81 bp, Homo sapiens
cagacgttcatgtcttccttctccaagctatggcttgcctccagagataattactttatgaacacacttgttatgcattga

SEQ ID NO: 108591 - DNA, 78 bp, Homo sapiens
tggcttgcctccagagataattactttatgaacacacttgttatgcattgagataatttatgtgggctacggtattta

SEQ ID NO: 108592 - DNA, 74 bp, Homo sapiens
attactttatgaacacacttgttatgcattgagataatttatgtgggctacggtatttaacactttttcatgcc

SEQ ID NO: 108593 - DNA, 78 bp, Homo sapiens
tatgaacacacttgttatgcattgagataatttatgtgggctacggtatttaacactttttcatgccttcagataaga

SEQ ID NO: 108594 - DNA, 78 bp, Homo sapiens
ttatgcattgagataatttatgtgggctacggtatttaacactttttcatgccttcagataagactttgtgcagctaa

SEQ ID NO: 108595 - DNA, 76 bp, Homo sapiens
atttatgtgggctacggtatttaacactttttcatgccttcagataagactttgtgcagctaaatgaaatagatgc

SEQ ID NO: 108596 - DNA, 75 bp, Homo sapiens
gctacggtatttaacactttttcatgccttcagataagactttgtgcagctaaatgaaatagatgctttagaaag

SEQ ID NO: 108597 - DNA, 76 bp, Homo sapiens
taacactttttcatgccttcagataagactttgtgcagctaaatgaaatagatgctttagaaaggtctcttttcac

SEQ ID NO: 108598 - DNA, 79 bp, Homo sapiens
agataagactttgtgcagctaaatgaaatagatgctttagaaaggtctcttttcacttcccagaatcatggcaacatca

SEQ ID NO: 108599 - DNA, 77 bp, Homo sapiens
tttgtgcagctaaatgaaatagatgctttagaaaggtctcttttcacttcccagaatcatggcaacatcaggaaaag

SEQ ID NO: 108600 - DNA, 73 bp, Homo sapiens
taaatgaaatagatgctttagaaaggtctcttttcacttcccagaatcatggcaacatcaggaaaaggaacct

SEQ ID NO: 108601 - DNA, 73 bp, Homo sapiens
agatgctttagaaaggtctcttttcacttcccagaatcatggcaacatcaggaaaaggaacctttcacttcaa

SEQ ID NO: 108602 - DNA, 74 bp, Homo sapiens
ttttcacttcccagaatcatggcaacatcaggaaaaggaacctttcacttcaaggctgggggtatgtcaggaga

SEQ ID NO: 108603 - DNA, 77 bp, Homo sapiens
tttcacttcaaggctgggggtatgtcaggagacgtggtggagagatattctactcatcacagcagttagttttggaa

SEQ ID NO: 108604 - DNA, 78 bp, Homo sapiens
aaggctgggggtatgtcaggagacgtggtggagagatattctactcatcacagcagttagttttggaagcaccacaga

SEQ ID NO: 108605 - DNA, 82 bp, Homo sapiens
tatgtcaggagacgtggtggagagatattctactcatcacagcagttagttttggaagcaccacagatgactccaacaccat

SEQ ID NO: 108606 - DNA, 78 bp, Homo sapiens
agacgtggtggagagatattctactcatcacagcagttagttttggaagcaccacagatgactccaacaccattaagg

SEQ ID NO: 108607 - DNA, 78 bp, Homo sapiens
tactcatcacagcagttagttttggaagcaccacagatgactccaacaccattaagggtggcgaaatcaggttggcaa

SEQ ID NO: 108608 - DNA, 75 bp, Homo sapiens
agttagttttggaagcaccacagatgactccaacaccattaagggtggcgaaatcaggttggcaatagcagcact

SEQ ID NO: 108609 - DNA, 75 bp, Homo sapiens
ttttggaagcaccacagatgactccaacaccattaagggtggcgaaatcaggttggcaatagcagcacttacttt

SEQ ID NO: 108610 - DNA, 73 bp, Homo sapiens
acagatgactccaacaccattaagggtggcgaaatcaggttggcaatagcagcacttacttttccaaattaaa

SEQ ID NO: 108611 - DNA, 74 bp, Homo sapiens
tccaacaccattaagggtggcgaaatcaggttggcaatagcagcacttacttttccaaattaaatcagttcata

SEQ ID NO: 108612 - DNA, 76 bp, Homo sapiens
attaagggtggcgaaatcaggttggcaatagcagcacttacttttccaaattaaatcagttcatatgctttgcaga

SEQ ID NO: 108613 - DNA, 78 bp, Homo sapiens
cgaaatcaggttggcaatagcagcacttacttttccaaattaaatcagttcatatgctttgcagattgttcaaattca

SEQ ID NO: 108614 - DNA, 77 bp, Homo sapiens
ttggcaatagcagcacttacttttccaaattaaatcagttcatatgctttgcagattgttcaaattcagcccttttc

SEQ ID NO: 108615 - DNA, 74 bp, Homo sapiens
acttttccaaattaaatcagttcatatgctttgcagattgttcaaattcagcccttttcctgggagaagacaga

SEQ ID NO: 108616 - DNA, 78 bp, Homo sapiens
aattaaatcagttcatatgctttgcagattgttcaaattcagcccttttcctgggagaagacagatgtggcagaagaa

SEQ ID NO: 108617 - DNA, 79 bp, Homo sapiens
tatgctttgcagattgttcaaattcagcccttttcctgggagaagacagatgtggcagaagaacaggggcactgctgtt

SEQ ID NO: 108618 - DNA, 75 bp, Homo sapiens
agattgttcaaattcagcccttttcctgggagaagacagatgtggcagaagaacaggggcactgctgttttattc

SEQ ID NO: 108619 - DNA, 77 bp, Homo sapiens
ttcaaattcagcccttttcctgggagaagacagatgtggcagaagaacaggggcactgctgttttattctgatcctg

SEQ ID NO: 108620 - DNA, 77 bp, Homo sapiens
agcccttttcctgggagaagacagatgtggcagaagaacaggggcactgctgttttattctgatcctggatggctgg

SEQ ID NO: 108621 - DNA, 77 bp, Homo sapiens
agaagacagatgtggcagaagaacaggggcactgctgttttattctgatcctggatggctggggttttaagattggc

SEQ ID NO: 108622 - DNA, 72 bp, Homo sapiens
aagaacaggggcactgctgttttattctgatcctggatggctggggttttaagattggcctttgccctcaaa

SEQ ID NO: 108623 - DNA, 70 bp, Homo sapiens
atcctggatggctggggttttaagattggcctttgccctcaaaagtcaccttcagccttcagaaaaatcc

SEQ ID NO: 108624 - DNA, 70 bp, Homo sapiens
tttaagattggcctttgccctcaaaagtcaccttcagccttcagaaaaatccttcagtgttttttcagcc

SEQ ID NO: 108625 - DNA, 69 bp, Homo sapiens
tttgccctcaaaagtcaccttcagccttcagaaaaatccttcagtgttttttcagccctccacttccct

SEQ ID NO: 108626 - DNA, 68 bp, Homo sapiens
aagtcaccttcagccttcagaaaaatccttcagtgttttttcagccctccacttcccttcacccttta

SEQ ID NO: 108627 - DNA, 68 bp, Homo sapiens
ttcagccttcagaaaaatccttcagtgttttttcagccctccacttcccttcaccctttacattttac

SEQ ID NO: 108628 - DNA, 66 bp, Homo sapiens
agtgttttttcagccctccacttcccttcaccctttacattttacctcactgggctcctacgttgg

SEQ ID NO: 108629 - DNA, 68 bp, Homo sapiens
tttttcagccctccacttcccttcaccctttacattttacctcactgggctcctacgttggtcagagg

SEQ ID NO: 108630 - DNA, 67 bp, Homo sapiens
acttcccttcaccctttacattttacctcactgggctcctacgttggtcagaggtcgtgttccactt

SEQ ID NO: 108631 - DNA, 70 bp, Homo sapiens
ccctttacattttacctcactgggctcctacgttggtcagaggtcgtgttccactttggtgcactcttaa

SEQ ID NO: 108632 - DNA, 75 bp, Homo sapiens
attttacctcactgggctcctacgttggtcagaggtcgtgttccactttggtgcactcttaatgtgtgcatatta

SEQ ID NO: 108633 - DNA, 78 bp, Homo sapiens
tacgttggtcagaggtcgtgttccactttggtgcactcttaatgtgtgcatattattctttacatctgcaaactcatt

SEQ ID NO: 108634 - DNA, 79 bp, Homo sapiens
ttggtgcactcttaatgtgtgcatattattctttacatctgcaaactcatttaatccccacactaaccttgtgaggcag

SEQ ID NO: 108635 - DNA, 78 bp, Homo sapiens
ttaatgtgtgcatattattctttacatctgcaaactcatttaatccccacactaaccttgtgaggcaggcaccatggt

SEQ ID NO: 108636 - DNA, 75 bp, Homo sapiens
atattattctttacatctgcaaactcatttaatccccacactaaccttgtgaggcaggcaccatggttgtgttct

SEQ ID NO: 108637 - DNA, 77 bp, Homo sapiens
tttacatctgcaaactcatttaatccccacactaaccttgtgaggcaggcaccatggttgtgttcttgtatggacta

SEQ ID NO: 108638 - DNA, 75 bp, Homo sapiens
aaactcatttaatccccacactaaccttgtgaggcaggcaccatggttgtgttcttgtatggactatgatggacc

SEQ ID NO: 108639 - DNA, 80 bp, Homo sapiens
ttaatccccacactaaccttgtgaggcaggcaccatggttgtgttcttgtatggactatgatggacccactgcacactga

SEQ ID NO: 108640 - DNA, 80 bp, Homo sapiens
actaaccttgtgaggcaggcaccatggttgtgttcttgtatggactatgatggacccactgcacactgatgaaaaccatg

SEQ ID NO: 108641 - DNA, 82 bp, Homo sapiens
aggcaggcaccatggttgtgttcttgtatggactatgatggacccactgcacactgatgaaaaccatggccttatgtagcaa

SEQ ID NO: 108642 - DNA, 79 bp, Homo sapiens
atggttgtgttcttgtatggactatgatggacccactgcacactgatgaaaaccatggccttatgtagcaagaggttaa

SEQ ID NO: 108643 - DNA, 80 bp, Homo sapiens
ttcttgtatggactatgatggacccactgcacactgatgaaaaccatggccttatgtagcaagaggttaacagttggtca

SEQ ID NO: 108644 - DNA, 79 bp, Homo sapiens
atggactatgatggacccactgcacactgatgaaaaccatggccttatgtagcaagaggttaacagttggtcaatctgg

SEQ ID NO: 108645 - DNA, 77 bp, Homo sapiens
acccactgcacactgatgaaaaccatggccttatgtagcaagaggttaacagttggtcaatctgggtgaagagtata

SEQ ID NO: 108646 - DNA, 76 bp, Homo sapiens
actgatgaaaaccatggccttatgtagcaagaggttaacagttggtcaatctgggtgaagagtatacagccattct

SEQ ID NO: 108647 - DNA, 74 bp, Homo sapiens
aaaaccatggccttatgtagcaagaggttaacagttggtcaatctgggtgaagagtatacagccattctttgta

SEQ ID NO: 108648 - DNA, 76 bp, Homo sapiens
tatgtagcaagaggttaacagttggtcaatctgggtgaagagtatacagccattctttgtattactctcgcaactt

SEQ ID NO: 108649 - DNA, 74 bp, Homo sapiens
gttggtcaatctgggtgaagagtatacagccattctttgtattactctcgcaactttcctgtacgttcaaatta

SEQ ID NO: 108650 - DNA, 73 bp, Homo sapiens
aatctgggtgaagagtatacagccattctttgtattactctcgcaactttcctgtacgttcaaattatttcaa

SEQ ID NO: 108651 - DNA, 71 bp, Homo sapiens
gaagagtatacagccattctttgtattactctcgcaactttcctgtacgttcaaattatttcaaaattaaa

SEQ ID NO: 108652 - DNA, 71 bp, Homo sapiens
aaagaaaaaaaaaggtctccagagctagataagtttggattgcagtaatggctcaactacttactagctgt

SEQ ID NO: 108653 - DNA, 73 bp, Homo sapiens
aaaaggtctccagagctagataagtttggattgcagtaatggctcaactacttactagctgtttgtaaactaa

SEQ ID NO: 108654 - DNA, 72 bp, Homo sapiens
agagctagataagtttggattgcagtaatggctcaactacttactagctgtttgtaaactaagggttttata

SEQ ID NO: 108655 - DNA, 72 bp, Homo sapiens
ataagtttggattgcagtaatggctcaactacttactagctgtttgtaaactaagggttttatatctatcgc

SEQ ID NO: 108656 - DNA, 72 bp, Homo sapiens
tttggattgcagtaatggctcaactacttactagctgtttgtaaactaagggttttatatctatcgcccatt

SEQ ID NO: 108657 - DNA, 73 bp, Homo sapiens
attgcagtaatggctcaactacttactagctgtttgtaaactaagggttttatatctatcgcccatttgatcc

SEQ ID NO: 108658 - DNA, 73 bp, Homo sapiens
agtaatggctcaactacttactagctgtttgtaaactaagggttttatatctatcgcccatttgatcctcata

SEQ ID NO: 108659 - DNA, 72 bp, Homo sapiens
aatggctcaactacttactagctgtttgtaaactaagggttttatatctatcgcccatttgatcctcataaa

SEQ ID NO: 108660 - DNA, 72 bp, Homo sapiens
gctcaactacttactagctgtttgtaaactaagggttttatatctatcgcccatttgatcctcataaactta

SEQ ID NO: 108661 - DNA, 70 bp, Homo sapiens
gctgtttgtaaactaagggttttatatctatcgcccatttgatcctcataaacttataaggttatgttgg

SEQ ID NO: 108662 - DNA, 71 bp, Homo sapiens
gggttttatatctatcgcccatttgatcctcataaacttataaggttatgttggtatatagtttatgtagg

SEQ ID NO: 108663 - DNA, 73 bp, Homo sapiens
atctatcgcccatttgatcctcataaacttataaggttatgttggtatatagtttatgtaggtattatacatt

SEQ ID NO: 108664 - DNA, 76 bp, Homo sapiens
tgatcctcataaacttataaggttatgttggtatatagtttatgtaggtattatacatttatttcagctgtgtcca

SEQ ID NO: 108665 - DNA, 75 bp, Homo sapiens
ctcataaacttataaggttatgttggtatatagtttatgtaggtattatacatttatttcagctgtgtccatgag

SEQ ID NO: 108666 - DNA, 80 bp, Homo sapiens
tgaggctcagggaggtcgaagaatgtgtccaaaatgcctgggattatgtatactatgctgtgcttatctacagtttgaat

SEQ ID NO: 108667 - DNA, 78 bp, Homo sapiens
ggaggtcgaagaatgtgtccaaaatgcctgggattatgtatactatgctgtgcttatctacagtttgaattgacttat

SEQ ID NO: 108668 - DNA, 78 bp, Homo sapiens
agaatgtgtccaaaatgcctgggattatgtatactatgctgtgcttatctacagtttgaattgacttattagtattag

SEQ ID NO: 108669 - DNA, 79 bp, Homo sapiens
aaatgcctgggattatgtatactatgctgtgcttatctacagtttgaattgacttattagtattaggctcctagagcta

SEQ ID NO: 108670 - DNA, 80 bp, Homo sapiens
tgggattatgtatactatgctgtgcttatctacagtttgaattgacttattagtattaggctcctagagctatgaagaaa

SEQ ID NO: 108671 - DNA, 80 bp, Homo sapiens
ggattatgtatactatgctgtgcttatctacagtttgaattgacttattagtattaggctcctagagctatgaagaaata

SEQ ID NO: 108672 - DNA, 74 bp, Homo sapiens
cagtttgaattgacttattagtattaggctcctagagctatgaagaaatacagtgttagatcagttctttttta

SEQ ID NO: 108673 - DNA, 75 bp, Homo sapiens
tgacttattagtattaggctcctagagctatgaagaaatacagtgttagatcagttcttttttatcaaagaagat

SEQ ID NO: 108674 - DNA, 76 bp, Homo sapiens
aggctcctagagctatgaagaaatacagtgttagatcagttcttttttatcaaagaagattttatgaggacacaca

SEQ ID NO: 108675 - DNA, 76 bp, Homo sapiens
aaatacagtgttagatcagttcttttttatcaaagaagattttatgaggacacacagtagctgccaatgaagactc

SEQ ID NO: 108676 - DNA, 78 bp, Homo sapiens
tgttagatcagttcttttttatcaaagaagattttatgaggacacacagtagctgccaatgaagactctgatcttaaa

SEQ ID NO: 108677 - DNA, 78 bp, Homo sapiens
gttcttttttatcaaagaagattttatgaggacacacagtagctgccaatgaagactctgatcttaaaagatatagca

SEQ ID NO: 108678 - DNA, 75 bp, Homo sapiens
aggacacacagtagctgccaatgaagactctgatcttaaaagatatagcatgtaacttaaaatttcttaacttcc

SEQ ID NO: 108679 - DNA, 74 bp, Homo sapiens
gtagctgccaatgaagactctgatcttaaaagatatagcatgtaacttaaaatttcttaacttcccttaattga

SEQ ID NO: 108680 - DNA, 71 bp, Homo sapiens
aatgaagactctgatcttaaaagatatagcatgtaacttaaaatttcttaacttcccttaattgatttcta

SEQ ID NO: 108681 - DNA, 70 bp, Homo sapiens
ctgatcttaaaagatatagcatgtaacttaaaatttcttaacttcccttaattgatttctaaataataga

SEQ ID NO: 108682 - DNA, 71 bp, Homo sapiens
agatatagcatgtaacttaaaatttcttaacttcccttaattgatttctaaataatagattgataaggaga

SEQ ID NO: 108683 - DNA, 67 bp, Homo sapiens
acttaaaatttcttaacttcccttaattgatttctaaataatagattgataaggagaatcctgggaa

SEQ ID NO: 108684 - DNA, 71 bp, Homo sapiens
tcttaacttcccttaattgatttctaaataatagattgataaggagaatcctgggaaaggccaaacattga

SEQ ID NO: 108685 - DNA, 70 bp, Homo sapiens
acttcccttaattgatttctaaataatagattgataaggagaatcctgggaaaggccaaacattgagaat

SEQ ID NO: 108686 - DNA, 71 bp, Homo sapiens
attgatttctaaataatagattgataaggagaatcctgggaaaggccaaacattgagaattttgttaatat

SEQ ID NO: 108687 - DNA, 70 bp, Homo sapiens
aaataatagattgataaggagaatcctgggaaaggccaaacattgagaattttgttaatattaattcttc

SEQ ID NO: 108688 - DNA, 72 bp, Homo sapiens
tgataaggagaatcctgggaaaggccaaacattgagaattttgttaatattaattcttccttataatcactc

SEQ ID NO: 108689 - DNA, 71 bp, Homo sapiens
cctgggaaaggccaaacattgagaattttgttaatattaattcttccttataatcactctaaagaatgata

SEQ ID NO: 108690 - DNA, 72 bp, Homo sapiens
ggccaaacattgagaattttgttaatattaattcttccttataatcactctaaagaatgataattcttttgc

SEQ ID NO: 108691 - DNA, 72 bp, Homo sapiens
cattgagaattttgttaatattaattcttccttataatcactctaaagaatgataattcttttgctttatct

SEQ ID NO: 108692 - DNA, 71 bp, Homo sapiens
tgttaatattaattcttccttataatcactctaaagaatgataattcttttgctttatcttaagaaggtac

SEQ ID NO: 108693 - DNA, 74 bp, Homo sapiens
tcttccttataatcactctaaagaatgataattcttttgctttatcttaagaaggtactttactatctggatca

SEQ ID NO: 108694 - DNA, 72 bp, Homo sapiens
cttataatcactctaaagaatgataattcttttgctttatcttaagaaggtactttactatctggatcattt

SEQ ID NO: 108695 - DNA, 73 bp, Homo sapiens
tgataattcttttgctttatcttaagaaggtactttactatctggatcatttttatcaccttccagatacatt

SEQ ID NO: 108696 - DNA, 74 bp, Homo sapiens
gaaggtactttactatctggatcatttttatcaccttccagatacatttaaaatttttatcagccatccatcca

SEQ ID NO: 108697 - DNA, 78 bp, Homo sapiens
ccatccatccaaccaccatctatcttatccacccacccttccatcatttattatgtatggcgtacatactatgaacaa

SEQ ID NO: 108698 - DNA, 74 bp, Homo sapiens
aaccaccatctatcttatccacccacccttccatcatttattatgtatggcgtacatactatgaacaaagtctt

SEQ ID NO: 108699 - DNA, 76 bp, Homo sapiens
atctatcttatccacccacccttccatcatttattatgtatggcgtacatactatgaacaaagtctttgtcaaaga

SEQ ID NO: 108700 - DNA, 77 bp, Homo sapiens
ttccatcatttattatgtatggcgtacatactatgaacaaagtctttgtcaaagaaggaaaggtgcatatctagcct

SEQ ID NO: 108701 - DNA, 77 bp, Homo sapiens
tttattatgtatggcgtacatactatgaacaaagtctttgtcaaagaaggaaaggtgcatatctagccttcactgaa

SEQ ID NO: 108702 - DNA, 77 bp, Homo sapiens
tatggcgtacatactatgaacaaagtctttgtcaaagaaggaaaggtgcatatctagccttcactgaagtgaaggag

SEQ ID NO: 108703 - DNA, 73 bp, Homo sapiens
aagtctttgtcaaagaaggaaaggtgcatatctagccttcactgaagtgaaggagggaatacaggcctaacta

SEQ ID NO: 108704 - DNA, 73 bp, Homo sapiens
aagaaggaaaggtgcatatctagccttcactgaagtgaaggagggaatacaggcctaactacaccagaaggta

SEQ ID NO: 108705 - DNA, 74 bp, Homo sapiens
tatctagccttcactgaagtgaaggagggaatacaggcctaactacaccagaaggtagggcacaggttcccatg

SEQ ID NO: 108706 - DNA, 75 bp, Homo sapiens
tgaagtgaaggagggaatacaggcctaactacaccagaaggtagggcacaggttcccatgtgagggcaagagata

SEQ ID NO: 108707 - DNA, 72 bp, Homo sapiens
aaggagggaatacaggcctaactacaccagaaggtagggcacaggttcccatgtgagggcaagagataggga

SEQ ID NO: 108708 - DNA, 72 bp, Homo sapiens
atacaggcctaactacaccagaaggtagggcacaggttcccatgtgagggcaagagatagggaggtaaactc

SEQ ID NO: 108709 - DNA, 74 bp, Homo sapiens
aactacaccagaaggtagggcacaggttcccatgtgagggcaagagatagggaggtaaactccggcagctcaga

SEQ ID NO: 108710 - DNA, 73 bp, Homo sapiens
aaggtagggcacaggttcccatgtgagggcaagagatagggaggtaaactccggcagctcagaggggacagaa

SEQ ID NO: 108711 - DNA, 72 bp, Homo sapiens
acaggttcccatgtgagggcaagagatagggaggtaaactccggcagctcagaggggacagaaaggcttctt

SEQ ID NO: 108712 - DNA, 76 bp, Homo sapiens
catgtgagggcaagagatagggaggtaaactccggcagctcagaggggacagaaaggcttctttggagcccatgaa

SEQ ID NO: 108713 - DNA, 77 bp, Homo sapiens
tgagggcaagagatagggaggtaaactccggcagctcagaggggacagaaaggcttctttggagcccatgaattgca

SEQ ID NO: 108714 - DNA, 75 bp, Homo sapiens
caagagatagggaggtaaactccggcagctcagaggggacagaaaggcttctttggagcccatgaattgcaacaa

SEQ ID NO: 108715 - DNA, 74 bp, Homo sapiens
atagggaggtaaactccggcagctcagaggggacagaaaggcttctttggagcccatgaattgcaacaatcaaa

SEQ ID NO: 108716 - DNA, 74 bp, Homo sapiens
aggtaaactccggcagctcagaggggacagaaaggcttctttggagcccatgaattgcaacaatcaaacctcaa

SEQ ID NO: 108717 - DNA, 77 bp, Homo sapiens
taaactccggcagctcagaggggacagaaaggcttctttggagcccatgaattgcaacaatcaaacctcaagcacca

SEQ ID NO: 108718 - DNA, 78 bp, Homo sapiens
cagctcagaggggacagaaaggcttctttggagcccatgaattgcaacaatcaaacctcaagcaccacatattttaca

SEQ ID NO: 108719 - DNA, 77 bp, Homo sapiens
tcagaggggacagaaaggcttctttggagcccatgaattgcaacaatcaaacctcaagcaccacatattttacagaa

SEQ ID NO: 108720 - DNA, 75 bp, Homo sapiens
aggggacagaaaggcttctttggagcccatgaattgcaacaatcaaacctcaagcaccacatattttacagaaca

SEQ ID NO: 108721 - DNA, 77 bp, Homo sapiens
agaaaggcttctttggagcccatgaattgcaacaatcaaacctcaagcaccacatattttacagaacaagcataaca

SEQ ID NO: 108722 - DNA, 79 bp, Homo sapiens
ttctttggagcccatgaattgcaacaatcaaacctcaagcaccacatattttacagaacaagcataacaacatgttgtg

SEQ ID NO: 108723 - DNA, 79 bp, Homo sapiens
ccatgaattgcaacaatcaaacctcaagcaccacatattttacagaacaagcataacaacatgttgtgtggttcaccag

SEQ ID NO: 108724 - DNA, 77 bp, Homo sapiens
aacaatcaaacctcaagcaccacatattttacagaacaagcataacaacatgttgtgtggttcaccagtgcctaata

SEQ ID NO: 108725 - DNA, 73 bp, Homo sapiens
attttacagaacaagcataacaacatgttgtgtggttcaccagtgcctaataaaggatttctgtggcctaccc

SEQ ID NO: 108726 - DNA, 83 bp, Homo sapiens
ttcaccagtgcctaataaaggatttctgtggcctaccctgatgaagcagtggattgcactgatgtcttcactgaggaatgatc

SEQ ID NO: 108727 - DNA, 84 bp, Homo sapiens
cctaataaaggatttctgtggcctaccctgatgaagcagtggattgcactgatgtcttcactgaggaatgatctcaggcatgat

SEQ ID NO: 108728 - DNA, 84 bp, Homo sapiens
taaaggatttctgtggcctaccctgatgaagcagtggattgcactgatgtcttcactgaggaatgatctcaggcatgattttaa

SEQ ID NO: 108729 - DNA, 84 bp, Homo sapiens
atgaagcagtggattgcactgatgtcttcactgaggaatgatctcaggcatgattttaatgaccctttgcagggttataactga

SEQ ID NO: 108730 - DNA, 84 bp, Homo sapiens
tggattgcactgatgtcttcactgaggaatgatctcaggcatgattttaatgaccctttgcagggttataactgatctcttaga

SEQ ID NO: 108731 - DNA, 82 bp, Homo sapiens
tgatgtcttcactgaggaatgatctcaggcatgattttaatgaccctttgcagggttataactgatctcttagagaccataa

SEQ ID NO: 108732 - DNA, 77 bp, Homo sapiens
actgaggaatgatctcaggcatgattttaatgaccctttgcagggttataactgatctcttagagaccataatttta

SEQ ID NO: 108733 - DNA, 75 bp, Homo sapiens
gaatgatctcaggcatgattttaatgaccctttgcagggttataactgatctcttagagaccataattttaaaaa

SEQ ID NO: 108734 - DNA, 71 bp, Homo sapiens
aggcatgattttaatgaccctttgcagggttataactgatctcttagagaccataattttaaaaatatagt

SEQ ID NO: 108735 - DNA, 69 bp, Homo sapiens
gaccctttgcagggttataactgatctcttagagaccataattttaaaaatatagtttagaacactttc

SEQ ID NO: 108736 - DNA, 72 bp, Homo sapiens
gcagggttataactgatctcttagagaccataattttaaaaatatagtttagaacactttctcctgaacaca

SEQ ID NO: 108737 - DNA, 72 bp, Homo sapiens
ctgatctcttagagaccataattttaaaaatatagtttagaacactttctcctgaacacattaacaggccaa

SEQ ID NO: 108738 - DNA, 73 bp, Homo sapiens
tatagtttagaacactttctcctgaacacattaacaggccaactttcaagtttacatggcatttttatatcca

SEQ ID NO: 108739 - DNA, 72 bp, Homo sapiens
tttagaacactttctcctgaacacattaacaggccaactttcaagtttacatggcatttttatatccactac

SEQ ID NO: 108740 - DNA, 71 bp, Homo sapiens
tttctcctgaacacattaacaggccaactttcaagtttacatggcatttttatatccactacccaaatctt

SEQ ID NO: 108741 - DNA, 72 bp, Homo sapiens
acacattaacaggccaactttcaagtttacatggcatttttatatccactacccaaatctttctgtagttca

SEQ ID NO: 108742 - DNA, 75 bp, Homo sapiens
tggcatttttatatccactacccaaatctttctgtagttcattccatttatatggcacctggataagctcatttt

SEQ ID NO: 108743 - DNA, 72 bp, Homo sapiens
acccaaatctttctgtagttcattccatttatatggcacctggataagctcatttttaccagaaaaactgga

SEQ ID NO: 108744 - DNA, 74 bp, Homo sapiens
ttctgtagttcattccatttatatggcacctggataagctcatttttaccagaaaaactggaaatttcactgcc

SEQ ID NO: 108745 - DNA, 76 bp, Homo sapiens
attccatttatatggcacctggataagctcatttttaccagaaaaactggaaatttcactgcctgtcctgctctga

SEQ ID NO: 108746 - DNA, 78 bp, Homo sapiens
atatggcacctggataagctcatttttaccagaaaaactggaaatttcactgcctgtcctgctctgactttcagatga

SEQ ID NO: 108747 - DNA, 75 bp, Homo sapiens
taagctcatttttaccagaaaaactggaaatttcactgcctgtcctgctctgactttcagatgactcctaaaata

SEQ ID NO: 108748 - DNA, 73 bp, Homo sapiens
atttttaccagaaaaactggaaatttcactgcctgtcctgctctgactttcagatgactcctaaaatattgaa

SEQ ID NO: 108749 - DNA, 75 bp, Homo sapiens
aactggaaatttcactgcctgtcctgctctgactttcagatgactcctaaaatattgaactaaggagcccaacat

SEQ ID NO: 108750 - DNA, 74 bp, Homo sapiens
tgactttcagatgactcctaaaatattgaactaaggagcccaacattgaccactgggggccttgaattcatact

SEQ ID NO: 108751 - DNA, 73 bp, Homo sapiens
atgactcctaaaatattgaactaaggagcccaacattgaccactgggggccttgaattcatacttttcatcta

SEQ ID NO: 108752 - DNA, 70 bp, Homo sapiens
aaaatattgaactaaggagcccaacattgaccactgggggccttgaattcatacttttcatctagggaaa

SEQ ID NO: 108753 - DNA, 71 bp, Homo sapiens
aactaaggagcccaacattgaccactgggggccttgaattcatacttttcatctagggaaatgtccatttg

SEQ ID NO: 108754 - DNA, 73 bp, Homo sapiens
aacattgaccactgggggccttgaattcatacttttcatctagggaaatgtccatttggtttctgccttcata

SEQ ID NO: 108755 - DNA, 74 bp, Homo sapiens
actgggggccttgaattcatacttttcatctagggaaatgtccatttggtttctgccttcatatcaatattcta

SEQ ID NO: 108756 - DNA, 76 bp, Homo sapiens
ccttgaattcatacttttcatctagggaaatgtccatttggtttctgccttcatatcaatattctatggcaaaaca

SEQ ID NO: 108757 - DNA, 76 bp, Homo sapiens
catctagggaaatgtccatttggtttctgccttcatatcaatattctatggcaaaacattttccaattctatggta

SEQ ID NO: 108758 - DNA, 73 bp, Homo sapiens
aaatgtccatttggtttctgccttcatatcaatattctatggcaaaacattttccaattctatggtaattaaa

SEQ ID NO: 108759 - DNA, 71 bp, Homo sapiens
tcatatcaatattctatggcaaaacattttccaattctatggtaattaaataaatagaagttttactaggt

SEQ ID NO: 108760 - DNA, 70 bp, Homo sapiens
tctatggcaaaacattttccaattctatggtaattaaataaatagaagttttactaggttccatgacaaa

SEQ ID NO: 108761 - DNA, 67 bp, Homo sapiens
aacattttccaattctatggtaattaaataaatagaagttttactaggttccatgacaaataacctc

SEQ ID NO: 108762 - DNA, 69 bp, Homo sapiens
tccaattctatggtaattaaataaatagaagttttactaggttccatgacaaataacctctggaagtaa

SEQ ID NO: 108763 - DNA, 65 bp, Homo sapiens
ggtaattaaataaatagaagttttactaggttccatgacaaataacctctggaagtaaaaattat

SEQ ID NO: 108764 - DNA, 70 bp, Homo sapiens
aatagaagttttactaggttccatgacaaataacctctggaagtaaaaattatttatatctctggcctca

SEQ ID NO: 108765 - DNA, 72 bp, Homo sapiens
agttttactaggttccatgacaaataacctctggaagtaaaaattatttatatctctggcctcatgtgtcca

SEQ ID NO: 108766 - DNA, 79 bp, Homo sapiens
tccatgacaaataacctctggaagtaaaaattatttatatctctggcctcatgtgtccacttgctcattatctactcaa

SEQ ID NO: 108767 - DNA, 76 bp, Homo sapiens
acaaataacctctggaagtaaaaattatttatatctctggcctcatgtgtccacttgctcattatctactcaaaga

SEQ ID NO: 108768 - DNA, 82 bp, Homo sapiens
atatctctggcctcatgtgtccacttgctcattatctactcaaagaaatgtacaatatacattgccctatacagcaaacaaa

SEQ ID NO: 108769 - DNA, 76 bp, Homo sapiens
ccacttgctcattatctactcaaagaaatgtacaatatacattgccctatacagcaaacaaatgaaaataaccaaa

SEQ ID NO: 108770 - DNA, 73 bp, Homo sapiens
ctactcaaagaaatgtacaatatacattgccctatacagcaaacaaatgaaaataaccaaaagcaaactcctg

SEQ ID NO: 108771 - DNA, 72 bp, Homo sapiens
caaagaaatgtacaatatacattgccctatacagcaaacaaatgaaaataaccaaaagcaaactcctgttcc

SEQ ID NO: 108772 - DNA, 72 bp, Homo sapiens
tatacattgccctatacagcaaacaaatgaaaataaccaaaagcaaactcctgttcctaaaaagtatggata

SEQ ID NO: 108773 - DNA, 71 bp, Homo sapiens
gccctatacagcaaacaaatgaaaataaccaaaagcaaactcctgttcctaaaaagtatggataaatgcaa

SEQ ID NO: 108774 - DNA, 70 bp, Homo sapiens
cagcaaacaaatgaaaataaccaaaagcaaactcctgttcctaaaaagtatggataaatgcaatttttgc

SEQ ID NO: 108775 - DNA, 69 bp, Homo sapiens
gaaaataaccaaaagcaaactcctgttcctaaaaagtatggataaatgcaatttttgctttgtgctttg

SEQ ID NO: 108776 - DNA, 73 bp, Homo sapiens
ccaaaagcaaactcctgttcctaaaaagtatggataaatgcaatttttgctttgtgctttgtcaaatgaatca

SEQ ID NO: 108777 - DNA, 77 bp, Homo sapiens
aaaagtatggataaatgcaatttttgctttgtgctttgtcaaatgaatcatatgttaccatcactaaagacatttgc

SEQ ID NO: 108778 - DNA, 80 bp, Homo sapiens
ggataaatgcaatttttgctttgtgctttgtcaaatgaatcatatgttaccatcactaaagacatttgctatttgataga

SEQ ID NO: 108779 - DNA, 80 bp, Homo sapiens
tttttgctttgtgctttgtcaaatgaatcatatgttaccatcactaaagacatttgctatttgatagaattctgttgtga

SEQ ID NO: 108780 - DNA, 82 bp, Homo sapiens
gtgctttgtcaaatgaatcatatgttaccatcactaaagacatttgctatttgatagaattctgttgtgaatcttatcataa

SEQ ID NO: 108781 - DNA, 80 bp, Homo sapiens
gtcaaatgaatcatatgttaccatcactaaagacatttgctatttgatagaattctgttgtgaatcttatcataaaataa

SEQ ID NO: 108782 - DNA, 77 bp, Homo sapiens
atcatatgttaccatcactaaagacatttgctatttgatagaattctgttgtgaatcttatcataaaataaaacatt

SEQ ID NO: 108783 - DNA, 79 bp, Homo sapiens
catcactaaagacatttgctatttgatagaattctgttgtgaatcttatcataaaataaaacatttctcttgattgatc

SEQ ID NO: 108784 - DNA, 80 bp, Homo sapiens
catttgctatttgatagaattctgttgtgaatcttatcataaaataaaacatttctcttgattgatcttctgtataagca

SEQ ID NO: 108785 - DNA, 76 bp, Homo sapiens
ctgttgtgaatcttatcataaaataaaacatttctcttgattgatcttctgtataagcaaggtgttgaaatgttag

SEQ ID NO: 108786 - DNA, 75 bp, Homo sapiens
tcttatcataaaataaaacatttctcttgattgatcttctgtataagcaaggtgttgaaatgttaggtttagaga

SEQ ID NO: 108787 - DNA, 75 bp, Homo sapiens
catttctcttgattgatcttctgtataagcaaggtgttgaaatgttaggtttagagagacaagactttctactta

SEQ ID NO: 108788 - DNA, 70 bp, Homo sapiens
ctgtataagcaaggtgttgaaatgttaggtttagagagacaagactttctacttaaatgaccaagtggtt

SEQ ID NO: 108789 - DNA, 71 bp, Homo sapiens
gtttagagagacaagactttctacttaaatgaccaagtggtttgggactttgcattgattaactctacaaa

SEQ ID NO: 108790 - DNA, 72 bp, Homo sapiens
acaagactttctacttaaatgaccaagtggtttgggactttgcattgattaactctacaaagaatgagattg

SEQ ID NO: 108791 - DNA, 75 bp, Homo sapiens
tacttaaatgaccaagtggtttgggactttgcattgattaactctacaaagaatgagattggtggtgtgcagcct

SEQ ID NO: 108792 - DNA, 77 bp, Homo sapiens
accaagtggtttgggactttgcattgattaactctacaaagaatgagattggtggtgtgcagccttccatacagcag

SEQ ID NO: 108793 - DNA, 84 bp, Homo sapiens
ggactttgcattgattaactctacaaagaatgagattggtggtgtgcagccttccatacagcaggcatcatttggcaggcatct

SEQ ID NO: 108794 - DNA, 83 bp, Homo sapiens
ttgattaactctacaaagaatgagattggtggtgtgcagccttccatacagcaggcatcatttggcaggcatcttcttttata

SEQ ID NO: 108795 - DNA, 82 bp, Homo sapiens
aagaatgagattggtggtgtgcagccttccatacagcaggcatcatttggcaggcatcttcttttataataatcccattgtc

SEQ ID NO: 108796 - DNA, 85 bp, Homo sapiens
ttggtggtgtgcagccttccatacagcaggcatcatttggcaggcatcttcttttataataatcccattgtccagttgcatgcaa

SEQ ID NO: 108797 - DNA, 82 bp, Homo sapiens
agccttccatacagcaggcatcatttggcaggcatcttcttttataataatcccattgtccagttgcatgcaactggaccca

SEQ ID NO: 108798 - DNA, 76 bp, Homo sapiens
atcttcttttataataatcccattgtccagttgcatgcaactggacccacgggttggagagagcctgatgctccct

SEQ ID NO: 108799 - DNA, 75 bp, Homo sapiens
aatcccattgtccagttgcatgcaactggacccacgggttggagagagcctgatgctccctttgacttttctccc

SEQ ID NO: 108800 - DNA, 78 bp, Homo sapiens
agttgcatgcaactggacccacgggttggagagagcctgatgctccctttgacttttctccctcaacatcttgctctg

SEQ ID NO: 108801 - DNA, 75 bp, Homo sapiens
aactggacccacgggttggagagagcctgatgctccctttgacttttctccctcaacatcttgctctgggtgaga

SEQ ID NO: 108802 - DNA, 78 bp, Homo sapiens
gggttggagagagcctgatgctccctttgacttttctccctcaacatcttgctctgggtgagatcattaatctattat

SEQ ID NO: 108803 - DNA, 77 bp, Homo sapiens
agagcctgatgctccctttgacttttctccctcaacatcttgctctgggtgagatcattaatctattatttttacat

SEQ ID NO: 108804 - DNA, 76 bp, Homo sapiens
atgctccctttgacttttctccctcaacatcttgctctgggtgagatcattaatctattatttttacattagtgac

SEQ ID NO: 108805 - DNA, 75 bp, Homo sapiens
acttttctccctcaacatcttgctctgggtgagatcattaatctattatttttacattagtgactcccaaattca

SEQ ID NO: 108806 - DNA, 80 bp, Homo sapiens
tcaacatcttgctctgggtgagatcattaatctattatttttacattagtgactcccaaattcatgtctccagcccagaa

SEQ ID NO: 108807 - DNA, 77 bp, Homo sapiens
ttgctctgggtgagatcattaatctattatttttacattagtgactcccaaattcatgtctccagcccagaactatt

SEQ ID NO: 108808 - DNA, 76 bp, Homo sapiens
tgagatcattaatctattatttttacattagtgactcccaaattcatgtctccagcccagaactatttccttggaa

SEQ ID NO: 108809 - DNA, 73 bp, Homo sapiens
atctattatttttacattagtgactcccaaattcatgtctccagcccagaactatttccttggaattctagac

SEQ ID NO: 108810 - DNA, 73 bp, Homo sapiens
atttttacattagtgactcccaaattcatgtctccagcccagaactatttccttggaattctagactgacatt

SEQ ID NO: 108811 - DNA, 75 bp, Homo sapiens
ttagtgactcccaaattcatgtctccagcccagaactatttccttggaattctagactgacatttctggagaacc

SEQ ID NO: 108812 - DNA, 76 bp, Homo sapiens
aattcatgtctccagcccagaactatttccttggaattctagactgacatttctggagaaccttgagagctcttgt

SEQ ID NO: 108813 - DNA, 77 bp, Homo sapiens
tccagcccagaactatttccttggaattctagactgacatttctggagaaccttgagagctcttgttgtgtacttca

SEQ ID NO: 108814 - DNA, 76 bp, Homo sapiens
agaactatttccttggaattctagactgacatttctggagaaccttgagagctcttgttgtgtacttcatggaatc

SEQ ID NO: 108815 - DNA, 76 bp, Homo sapiens
ctggagaaccttgagagctcttgttgtgtacttcatggaatcctcaaaaccaatatatcccaaactaatcacttga

SEQ ID NO: 108816 - DNA, 76 bp, Homo sapiens
ttgttgtgtacttcatggaatcctcaaaaccaatatatcccaaactaatcacttgaatggattccccagctcacta

SEQ ID NO: 108817 - DNA, 77 bp, Homo sapiens
tgtacttcatggaatcctcaaaaccaatatatcccaaactaatcacttgaatggattccccagctcactagagatag

SEQ ID NO: 108818 - DNA, 75 bp, Homo sapiens
aatcctcaaaaccaatatatcccaaactaatcacttgaatggattccccagctcactagagataggcagtaaggc

SEQ ID NO: 108819 - DNA, 74 bp, Homo sapiens
aaaaccaatatatcccaaactaatcacttgaatggattccccagctcactagagataggcagtaaggctctttc

SEQ ID NO: 108820 - DNA, 78 bp, Homo sapiens
caaactaatcacttgaatggattccccagctcactagagataggcagtaaggctctttctccctccatctgtctctta

SEQ ID NO: 108821 - DNA, 79 bp, Homo sapiens
attccccagctcactagagataggcagtaaggctctttctccctccatctgtctcttagagactatctcatagttttca

SEQ ID NO: 108822 - DNA, 83 bp, Homo sapiens
tcactagagataggcagtaaggctctttctccctccatctgtctcttagagactatctcatagttttcagtcctgcatgctta

SEQ ID NO: 108823 - DNA, 82 bp, Homo sapiens
agataggcagtaaggctctttctccctccatctgtctcttagagactatctcatagttttcagtcctgcatgcttatatgga

SEQ ID NO: 108824 - DNA, 79 bp, Homo sapiens
agtaaggctctttctccctccatctgtctcttagagactatctcatagttttcagtcctgcatgcttatatggacaaag

SEQ ID NO: 108825 - DNA, 81 bp, Homo sapiens
tttctccctccatctgtctcttagagactatctcatagttttcagtcctgcatgcttatatggacaaagggaggaggcaga

SEQ ID NO: 108826 - DNA, 80 bp, Homo sapiens
tgtctcttagagactatctcatagttttcagtcctgcatgcttatatggacaaagggaggaggcagatgtaggaatcttt

SEQ ID NO: 108827 - DNA, 80 bp, Homo sapiens
ttagagactatctcatagttttcagtcctgcatgcttatatggacaaagggaggaggcagatgtaggaatcttttattca

SEQ ID NO: 108828 - DNA, 77 bp, Homo sapiens
atagttttcagtcctgcatgcttatatggacaaagggaggaggcagatgtaggaatcttttattcaggcccctcaca

SEQ ID NO: 108829 - DNA, 79 bp, Homo sapiens
tcctgcatgcttatatggacaaagggaggaggcagatgtaggaatcttttattcaggcccctcacatctctaaaagata

SEQ ID NO: 108830 - DNA, 76 bp, Homo sapiens
atgcttatatggacaaagggaggaggcagatgtaggaatcttttattcaggcccctcacatctctaaaagatagtc

SEQ ID NO: 108831 - DNA, 71 bp, Homo sapiens
aaagggaggaggcagatgtaggaatcttttattcaggcccctcacatctctaaaagatagtcccactttgg

SEQ ID NO: 108832 - DNA, 77 bp, Homo sapiens
ggcagatgtaggaatcttttattcaggcccctcacatctctaaaagatagtcccactttggtgcctgtgatgttata

SEQ ID NO: 108833 - DNA, 76 bp, Homo sapiens
tgtaggaatcttttattcaggcccctcacatctctaaaagatagtcccactttggtgcctgtgatgttatattgta

SEQ ID NO: 108834 - DNA, 74 bp, Homo sapiens
ttttattcaggcccctcacatctctaaaagatagtcccactttggtgcctgtgatgttatattgtagtggttgg

SEQ ID NO: 108835 - DNA, 77 bp, Homo sapiens
cctcacatctctaaaagatagtcccactttggtgcctgtgatgttatattgtagtggttggtgtatttgattgtctc

SEQ ID NO: 108836 - DNA, 74 bp, Homo sapiens
atctctaaaagatagtcccactttggtgcctgtgatgttatattgtagtggttggtgtatttgattgtctccct

SEQ ID NO: 108837 - DNA, 79 bp, Homo sapiens
gtgcctgtgatgttatattgtagtggttggtgtatttgattgtctcccttgctacatagttatcatgccaaggacaaat

SEQ ID NO: 108838 - DNA, 77 bp, Homo sapiens
tattgtagtggttggtgtatttgattgtctcccttgctacatagttatcatgccaaggacaaatttttgtctgtgaa

SEQ ID NO: 108839 - DNA, 77 bp, Homo sapiens
gttggtgtatttgattgtctcccttgctacatagttatcatgccaaggacaaatttttgtctgtgaatggagaagaa

SEQ ID NO: 108840 - DNA, 77 bp, Homo sapiens
tgtctcccttgctacatagttatcatgccaaggacaaatttttgtctgtgaatggagaagaacgagggaagctcaaa

SEQ ID NO: 108841 - DNA, 75 bp, Homo sapiens
atagttatcatgccaaggacaaatttttgtctgtgaatggagaagaacgagggaagctcaaatccctgcaacgta

SEQ ID NO: 108842 - DNA, 73 bp, Homo sapiens
aaggacaaatttttgtctgtgaatggagaagaacgagggaagctcaaatccctgcaacgtactggcttcctga

SEQ ID NO: 108843 - DNA, 73 bp, Homo sapiens
aatttttgtctgtgaatggagaagaacgagggaagctcaaatccctgcaacgtactggcttcctgacctggat

SEQ ID NO: 108844 - DNA, 75 bp, Homo sapiens
aatggagaagaacgagggaagctcaaatccctgcaacgtactggcttcctgacctggattggacaagtcacataa

SEQ ID NO: 108845 - DNA, 74 bp, Homo sapiens
agaagaacgagggaagctcaaatccctgcaacgtactggcttcctgacctggattggacaagtcacataatctt

SEQ ID NO: 108846 - DNA, 76 bp, Homo sapiens
aagctcaaatccctgcaacgtactggcttcctgacctggattggacaagtcacataatctttccaggactaatcca

SEQ ID NO: 108847 - DNA, 78 bp, Homo sapiens
tactggcttcctgacctggattggacaagtcacataatctttccaggactaatccagtgtcatcatgtgtgggaaatt

SEQ ID NO: 108848 - DNA, 77 bp, Homo sapiens
ttcctgacctggattggacaagtcacataatctttccaggactaatccagtgtcatcatgtgtgggaaatttttgta

SEQ ID NO: 108849 - DNA, 77 bp, Homo sapiens
ctttccaggactaatccagtgtcatcatgtgtgggaaatttttgtatgtgaattttatgatactatacatatataag

SEQ ID NO: 108850 - DNA, 77 bp, Homo sapiens
tgtcatcatgtgtgggaaatttttgtatgtgaattttatgatactatacatatataagtgatttttaagaggccatt

SEQ ID NO: 108851 - DNA, 71 bp, Homo sapiens
gtgggaaatttttgtatgtgaattttatgatactatacatatataagtgatttttaagaggccatttattt

SEQ ID NO: 108852 - DNA, 74 bp, Homo sapiens
tatgtgaattttatgatactatacatatataagtgatttttaagaggccatttattttctcttacagttttcca

SEQ ID NO: 108853 - DNA, 70 bp, Homo sapiens
aagtgatttttaagaggccatttattttctcttacagttttccaaactttgcatgtattgatataataaa

SEQ ID NO: 108854 - DNA, 74 bp, Homo sapiens
taagaggccatttattttctcttacagttttccaaactttgcatgtattgatataataaatgttttatcactga

SEQ ID NO: 108855 - DNA, 75 bp, Homo sapiens
gccatttattttctcttacagttttccaaactttgcatgtattgatataataaatgttttatcactgatccaatc

SEQ ID NO: 108856 - DNA, 80 bp, Homo sapiens
ctcttacagttttccaaactttgcatgtattgatataataaatgttttatcactgatccaatccattcttcatgcattca

SEQ ID NO: 108857 - DNA, 83 bp, Homo sapiens
tccaaactttgcatgtattgatataataaatgttttatcactgatccaatccattcttcatgcattcatcattacaatcctcc

SEQ ID NO: 108858 - DNA, 85 bp, Homo sapiens
gcatgtattgatataataaatgttttatcactgatccaatccattcttcatgcattcatcattacaatcctcctataaatctgct

SEQ ID NO: 108859 - DNA, 82 bp, Homo sapiens
gatataataaatgttttatcactgatccaatccattcttcatgcattcatcattacaatcctcctataaatctgcttgtaaa

SEQ ID NO: 108860 - DNA, 81 bp, Homo sapiens
atgttttatcactgatccaatccattcttcatgcattcatcattacaatcctcctataaatctgcttgtaaatcccaagta

SEQ ID NO: 108861 - DNA, 76 bp, Homo sapiens
catgcattcatcattacaatcctcctataaatctgcttgtaaatcccaagtactagtttaatttaccaagagaaca

SEQ ID NO: 108862 - DNA, 73 bp, Homo sapiens
catcattacaatcctcctataaatctgcttgtaaatcccaagtactagtttaatttaccaagagaacaacaca

SEQ ID NO: 108863 - DNA, 71 bp, Homo sapiens
aatctgcttgtaaatcccaagtactagtttaatttaccaagagaacaacacaaacctccctccatgtcata

SEQ ID NO: 108864 - DNA, 70 bp, Homo sapiens
taaatcccaagtactagtttaatttaccaagagaacaacacaaacctccctccatgtcatagaaaactca

SEQ ID NO: 108865 - DNA, 71 bp, Homo sapiens
atttaccaagagaacaacacaaacctccctccatgtcatagaaaactcagtttggagacactttatattaa

SEQ ID NO: 108866 - DNA, 73 bp, Homo sapiens
atgtcatagaaaactcagtttggagacactttatattaaaccttattcccaaatgtcatcaccacccagggca

SEQ ID NO: 108867 - DNA, 70 bp, Homo sapiens
atagaaaactcagtttggagacactttatattaaaccttattcccaaatgtcatcaccacccagggcaaa

SEQ ID NO: 108868 - DNA, 76 bp, Homo sapiens
ttggagacactttatattaaaccttattcccaaatgtcatcaccacccagggcaaatggctcatctgacactgtta

SEQ ID NO: 108869 - DNA, 75 bp, Homo sapiens
ttaaaccttattcccaaatgtcatcaccacccagggcaaatggctcatctgacactgttagcttctaaggaacat

SEQ ID NO: 108870 - DNA, 75 bp, Homo sapiens
ttcccaaatgtcatcaccacccagggcaaatggctcatctgacactgttagcttctaaggaacattttaatcctt

SEQ ID NO: 108871 - DNA, 76 bp, Homo sapiens
atcaccacccagggcaaatggctcatctgacactgttagcttctaaggaacattttaatcctttctactattgcca

SEQ ID NO: 108872 - DNA, 80 bp, Homo sapiens
agggcaaatggctcatctgacactgttagcttctaaggaacattttaatcctttctactattgccagcatagcacatgaa

SEQ ID NO: 108873 - DNA, 82 bp, Homo sapiens
tcatctgacactgttagcttctaaggaacattttaatcctttctactattgccagcatagcacatgaatgacaccaaatcca

SEQ ID NO: 108874 - DNA, 78 bp, Homo sapiens
tgttagcttctaaggaacattttaatcctttctactattgccagcatagcacatgaatgacaccaaatccactacaag

SEQ ID NO: 108875 - DNA, 78 bp, Homo sapiens
ttctaaggaacattttaatcctttctactattgccagcatagcacatgaatgacaccaaatccactacaagtctccag

SEQ ID NO: 108876 - DNA, 77 bp, Homo sapiens
aacattttaatcctttctactattgccagcatagcacatgaatgacaccaaatccactacaagtctccagggagaaa

SEQ ID NO: 108877 - DNA, 87 bp, Homo sapiens
ttctactattgccagcatagcacatgaatgacaccaaatccactacaagtctccagggagaaatgcatcgctgatatgatggcttta

SEQ ID NO: 108878 - DNA, 88 bp, Homo sapiens
tattgccagcatagcacatgaatgacaccaaatccactacaagtctccagggagaaatgcatcgctgatatgatggctttatctacat

SEQ ID NO: 108879 - DNA, 84 bp, Homo sapiens
acatgaatgacaccaaatccactacaagtctccagggagaaatgcatcgctgatatgatggctttatctacatttacacattga

SEQ ID NO: 108880 - DNA, 78 bp, Homo sapiens
aatccactacaagtctccagggagaaatgcatcgctgatatgatggctttatctacatttacacattgaggggaaaat

SEQ ID NO: 108881 - DNA, 78 bp, Homo sapiens
aagtctccagggagaaatgcatcgctgatatgatggctttatctacatttacacattgaggggaaaattgagcttgtt

SEQ ID NO: 108882 - DNA, 74 bp, Homo sapiens
atctacatttacacattgaggggaaaattgagcttgttttcatacttccacaagtgcactcttctagcccactt

SEQ ID NO: 108883 - DNA, 73 bp, Homo sapiens
acattgaggggaaaattgagcttgttttcatacttccacaagtgcactcttctagcccactttgcctttatta

SEQ ID NO: 108884 - DNA, 74 bp, Homo sapiens
aaaattgagcttgttttcatacttccacaagtgcactcttctagcccactttgcctttattatctcaatatttc

SEQ ID NO: 108885 - DNA, 76 bp, Homo sapiens
atacttccacaagtgcactcttctagcccactttgcctttattatctcaatatttctgatgaatcggaattttggc

SEQ ID NO: 108886 - DNA, 77 bp, Homo sapiens
tgcactcttctagcccactttgcctttattatctcaatatttctgatgaatcggaattttggcctggattatccaaa

SEQ ID NO: 108887 - DNA, 74 bp, Homo sapiens
ttctagcccactttgcctttattatctcaatatttctgatgaatcggaattttggcctggattatccaaagaat

SEQ ID NO: 108888 - DNA, 75 bp, Homo sapiens
gcctttattatctcaatatttctgatgaatcggaattttggcctggattatccaaagaattgtttcagatctctt

SEQ ID NO: 108889 - DNA, 78 bp, Homo sapiens
tattatctcaatatttctgatgaatcggaattttggcctggattatccaaagaattgtttcagatctctttgcctcca

SEQ ID NO: 108890 - DNA, 76 bp, Homo sapiens
atatttctgatgaatcggaattttggcctggattatccaaagaattgtttcagatctctttgcctccacacgtaga

SEQ ID NO: 108891 - DNA, 75 bp, Homo sapiens
attatccaaagaattgtttcagatctctttgcctccacacgtagatggagctttaggctatgctcctcccacccc

SEQ ID NO: 108892 - DNA, 76 bp, Homo sapiens
aattgtttcagatctctttgcctccacacgtagatggagctttaggctatgctcctcccaccccttcataaattca

SEQ ID NO: 108893 - DNA, 76 bp, Homo sapiens
atctctttgcctccacacgtagatggagctttaggctatgctcctcccaccccttcataaattcatggcttttcaa

SEQ ID NO: 108894 - DNA, 71 bp, Homo sapiens
atggagctttaggctatgctcctcccaccccttcataaattcatggcttttcaaaaattttcttctctgtt

SEQ ID NO: 108895 - DNA, 70 bp, Homo sapiens
taggctatgctcctcccaccccttcataaattcatggcttttcaaaaattttcttctctgttttcgtaaa

SEQ ID NO: 108896 - DNA, 67 bp, Homo sapiens
tcctcccaccccttcataaattcatggcttttcaaaaattttcttctctgttttcgtaaaagccaag

SEQ ID NO: 108897 - DNA, 70 bp, Homo sapiens
cccttcataaattcatggcttttcaaaaattttcttctctgttttcgtaaaagccaagtgcaaagagaga

SEQ ID NO: 108898 - DNA, 71 bp, Homo sapiens
tcatggcttttcaaaaattttcttctctgttttcgtaaaagccaagtgcaaagagagaaactaactgattg

SEQ ID NO: 108899 - DNA, 70 bp, Homo sapiens
tcaaaaattttcttctctgttttcgtaaaagccaagtgcaaagagagaaactaactgattgtacttcttc

SEQ ID NO: 108900 - DNA, 76 bp, Homo sapiens
tcttctctgttttcgtaaaagccaagtgcaaagagagaaactaactgattgtacttcttcttgatatgcctgatag

SEQ ID NO: 108901 - DNA, 74 bp, Homo sapiens
tctgttttcgtaaaagccaagtgcaaagagagaaactaactgattgtacttcttcttgatatgcctgatagttt

SEQ ID NO: 108902 - DNA, 76 bp, Homo sapiens
aaaagccaagtgcaaagagagaaactaactgattgtacttcttcttgatatgcctgatagttttctgtcatcttaa

SEQ ID NO: 108903 - DNA, 80 bp, Homo sapiens
aaagagagaaactaactgattgtacttcttcttgatatgcctgatagttttctgtcatcttaatcatcacacgagcaaga

SEQ ID NO: 108904 - DNA, 80 bp, Homo sapiens
aaactaactgattgtacttcttcttgatatgcctgatagttttctgtcatcttaatcatcacacgagcaagactactcaa

SEQ ID NO: 108905 - DNA, 80 bp, Homo sapiens
ttgtacttcttcttgatatgcctgatagttttctgtcatcttaatcatcacacgagcaagactactcaacacccaggcct

SEQ ID NO: 108906 - DNA, 83 bp, Homo sapiens
ttgatatgcctgatagttttctgtcatcttaatcatcacacgagcaagactactcaacacccaggccttctgagatccgaaca

SEQ ID NO: 108907 - DNA, 80 bp, Homo sapiens
tgatagttttctgtcatcttaatcatcacacgagcaagactactcaacacccaggccttctgagatccgaacaataagta

SEQ ID NO: 108908 - DNA, 75 bp, Homo sapiens
acacgagcaagactactcaacacccaggccttctgagatccgaacaataagtaaccaccagtcacctccacacag

SEQ ID NO: 108909 - DNA, 75 bp, Homo sapiens
aagactactcaacacccaggccttctgagatccgaacaataagtaaccaccagtcacctccacacaggctggcca

SEQ ID NO: 108910 - DNA, 75 bp, Homo sapiens
aacacccaggccttctgagatccgaacaataagtaaccaccagtcacctccacacaggctggccaggggtgctca

SEQ ID NO: 108911 - DNA, 79 bp, Homo sapiens
tgagatccgaacaataagtaaccaccagtcacctccacacaggctggccaggggtgctcatggggcagagtccatatta

SEQ ID NO: 108912 - DNA, 79 bp, Homo sapiens
aggctggccaggggtgctcatggggcagagtccatattagctgaagacttgcctgtcctctgccagggaactctacgga

SEQ ID NO: 108913 - DNA, 76 bp, Homo sapiens
aggggtgctcatggggcagagtccatattagctgaagacttgcctgtcctctgccagggaactctacggaaacgag

SEQ ID NO: 108914 - DNA, 75 bp, Homo sapiens
atggggcagagtccatattagctgaagacttgcctgtcctctgccagggaactctacggaaacgagggcaagctt

SEQ ID NO: 108915 - DNA, 77 bp, Homo sapiens
agagtccatattagctgaagacttgcctgtcctctgccagggaactctacggaaacgagggcaagctttgcatgaaa

SEQ ID NO: 108916 - DNA, 73 bp, Homo sapiens
tgcctgtcctctgccagggaactctacggaaacgagggcaagctttgcatgaaaccccatttgcaaaccgaaa

SEQ ID NO: 108917 - DNA, 70 bp, Homo sapiens
tgccagggaactctacggaaacgagggcaagctttgcatgaaaccccatttgcaaaccgaaaccgtgaaa

SEQ ID NO: 108918 - DNA, 67 bp, Homo sapiens
gggaactctacggaaacgagggcaagctttgcatgaaaccccatttgcaaaccgaaaccgtgaaaaa

SEQ ID NO: 108919 - DNA, 64 bp, Homo sapiens
cggaaacgagggcaagctttgcatgaaaccccatttgcaaaccgaaaccgtgaaaaaaaaaaaa

SEQ ID NO: 108920 - DNA, 65 bp, Homo sapiens
aaaaaaaaaaggtggttcagtgtggtttttactcaaaaccaggtgaagctttgtggttcagccaa

SEQ ID NO: 108921 - DNA, 67 bp, Homo sapiens
aaaaaggtggttcagtgtggtttttactcaaaaccaggtgaagctttgtggttcagccaagttttga

SEQ ID NO: 108922 - DNA, 70 bp, Homo sapiens
agtgtggtttttactcaaaaccaggtgaagctttgtggttcagccaagttttgacttgaagccggagaga

SEQ ID NO: 108923 - DNA, 73 bp, Homo sapiens
tttttactcaaaaccaggtgaagctttgtggttcagccaagttttgacttgaagccggagagagctcactgtg

SEQ ID NO: 108924 - DNA, 74 bp, Homo sapiens
aggtgaagctttgtggttcagccaagttttgacttgaagccggagagagctcactgtgtttggctggaccttgt

SEQ ID NO: 108925 - DNA, 74 bp, Homo sapiens
agccaagttttgacttgaagccggagagagctcactgtgtttggctggaccttgttttacatttcatgttccat

SEQ ID NO: 108926 - DNA, 74 bp, Homo sapiens
ttttgacttgaagccggagagagctcactgtgtttggctggaccttgttttacatttcatgttccatttggttc

SEQ ID NO: 108927 - DNA, 72 bp, Homo sapiens
ccggagagagctcactgtgtttggctggaccttgttttacatttcatgttccatttggttctgtttcccaaa

SEQ ID NO: 108928 - DNA, 68 bp, Homo sapiens
tttggctggaccttgttttacatttcatgttccatttggttctgtttcccaaacctgaaactgagggt

SEQ ID NO: 108929 - DNA, 69 bp, Homo sapiens
accttgttttacatttcatgttccatttggttctgtttcccaaacctgaaactgagggttcagatgagg

SEQ ID NO: 108930 - DNA, 72 bp, Homo sapiens
tttcatgttccatttggttctgtttcccaaacctgaaactgagggttcagatgaggggcacaaaatgaataa

SEQ ID NO: 108931 - DNA, 71 bp, Homo sapiens
ttccatttggttctgtttcccaaacctgaaactgagggttcagatgaggggcacaaaatgaataaaatgaa

SEQ ID NO: 108932 - DNA, 73 bp, Homo sapiens
ttctgtttcccaaacctgaaactgagggttcagatgaggggcacaaaatgaataaaatgaagttgacatgaaa

SEQ ID NO: 108933 - DNA, 76 bp, Homo sapiens
aacctgaaactgagggttcagatgaggggcacaaaatgaataaaatgaagttgacatgaaatgtggtgtagatgaa

SEQ ID NO: 108934 - DNA, 78 bp, Homo sapiens
aaactgagggttcagatgaggggcacaaaatgaataaaatgaagttgacatgaaatgtggtgtagatgaagacagcac

SEQ ID NO: 108935 - DNA, 82 bp, Homo sapiens
agatgaggggcacaaaatgaataaaatgaagttgacatgaaatgtggtgtagatgaagacagcaccagctttgtgatgccaa

SEQ ID NO: 108936 - DNA, 84 bp, Homo sapiens
aataaaatgaagttgacatgaaatgtggtgtagatgaagacagcaccagctttgtgatgccaactcctgctcctgctctctgcc

SEQ ID NO: 108937 - DNA, 82 bp, Homo sapiens
tgtagatgaagacagcaccagctttgtgatgccaactcctgctcctgctctctgccggcactccttctagaaacggccttcc

SEQ ID NO: 108938 - DNA, 76 bp, Homo sapiens
tttgtgatgccaactcctgctcctgctctctgccggcactccttctagaaacggccttccccacactaagtagttc

SEQ ID NO: 108939 - DNA, 72 bp, Homo sapiens
aactcctgctcctgctctctgccggcactccttctagaaacggccttccccacactaagtagttccctggga

SEQ ID NO: 108940 - DNA, 70 bp, Homo sapiens
tgctctctgccggcactccttctagaaacggccttccccacactaagtagttccctgggacttttcttta

SEQ ID NO: 108941 - DNA, 67 bp, Homo sapiens
tctgccggcactccttctagaaacggccttccccacactaagtagttccctgggacttttctttaag

SEQ ID NO: 108942 - DNA, 67 bp, Homo sapiens
ttctagaaacggccttccccacactaagtagttccctgggacttttctttaaggaacagaatgatta

SEQ ID NO: 108943 - DNA, 68 bp, Homo sapiens
gccttccccacactaagtagttccctgggacttttctttaaggaacagaatgattaacactatacaaa

SEQ ID NO: 108944 - DNA, 69 bp, Homo sapiens
cccacactaagtagttccctgggacttttctttaaggaacagaatgattaacactatacaaaaatagca

SEQ ID NO: 108945 - DNA, 69 bp, Homo sapiens
gttccctgggacttttctttaaggaacagaatgattaacactatacaaaaatagcaaaggctattttgc

SEQ ID NO: 108946 - DNA, 69 bp, Homo sapiens
gggacttttctttaaggaacagaatgattaacactatacaaaaatagcaaaggctattttgctcttgtt

SEQ ID NO: 108947 - DNA, 72 bp, Homo sapiens
aggaacagaatgattaacactatacaaaaatagcaaaggctattttgctcttgtttattttaacagatccat

SEQ ID NO: 108948 - DNA, 73 bp, Homo sapiens
cagaatgattaacactatacaaaaatagcaaaggctattttgctcttgtttattttaacagatccattaacaa

SEQ ID NO: 108949 - DNA, 70 bp, Homo sapiens
cactatacaaaaatagcaaaggctattttgctcttgtttattttaacagatccattaacaaatctgtttt

SEQ ID NO: 108950 - DNA, 76 bp, Homo sapiens
tagcaaaggctattttgctcttgtttattttaacagatccattaacaaatctgtttttgtgagtcagccattgaga

SEQ ID NO: 108951 - DNA, 73 bp, Homo sapiens
ggctattttgctcttgtttattttaacagatccattaacaaatctgtttttgtgagtcagccattgagacttt

SEQ ID NO: 108952 - DNA, 73 bp, Homo sapiens
gctcttgtttattttaacagatccattaacaaatctgtttttgtgagtcagccattgagacttttgaggaaaa

SEQ ID NO: 108953 - DNA, 71 bp, Homo sapiens
ttttaacagatccattaacaaatctgtttttgtgagtcagccattgagacttttgaggaaaacattttaag

SEQ ID NO: 108954 - DNA, 73 bp, Homo sapiens
cattaacaaatctgtttttgtgagtcagccattgagacttttgaggaaaacattttaagtaacagactgtgac

SEQ ID NO: 108955 - DNA, 76 bp, Homo sapiens
ttgtgagtcagccattgagacttttgaggaaaacattttaagtaacagactgtgacgttataatggcatgaattta

SEQ ID NO: 108956 - DNA, 72 bp, Homo sapiens
agccattgagacttttgaggaaaacattttaagtaacagactgtgacgttataatggcatgaatttatttaa

SEQ ID NO: 108957 - DNA, 69 bp, Homo sapiens
acttttgaggaaaacattttaagtaacagactgtgacgttataatggcatgaatttatttaatatgttt

SEQ ID NO: 108958 - DNA, 74 bp, Homo sapiens
aagtaacagactgtgacgttataatggcatgaatttatttaatatgttttaaatatctactatgtgctagaaat

SEQ ID NO: 108959 - DNA, 69 bp, Homo sapiens
tatttaatatgttttaaatatctactatgtgctagaaattttaacttattaagttctcaccgtatttta

SEQ ID NO: 108960 - DNA, 70 bp, Homo sapiens
gttttaaatatctactatgtgctagaaattttaacttattaagttctcaccgtattttatagatgtggaa

SEQ ID NO: 108961 - DNA, 73 bp, Homo sapiens
tctactatgtgctagaaattttaacttattaagttctcaccgtattttatagatgtggaaactaggctcagag

SEQ ID NO: 108962 - DNA, 73 bp, Homo sapiens
gtgctagaaattttaacttattaagttctcaccgtattttatagatgtggaaactaggctcagagtgattgga

SEQ ID NO: 108963 - DNA, 70 bp, Homo sapiens
aattttaacttattaagttctcaccgtattttatagatgtggaaactaggctcagagtgattggataaat

SEQ ID NO: 108964 - DNA, 76 bp, Homo sapiens
tattaagttctcaccgtattttatagatgtggaaactaggctcagagtgattggataaattgcccatatgctaaaa

SEQ ID NO: 108965 - DNA, 77 bp, Homo sapiens
ctcaccgtattttatagatgtggaaactaggctcagagtgattggataaattgcccatatgctaaaagagaaggcaa

SEQ ID NO: 108966 - DNA, 79 bp, Homo sapiens
atagatgtggaaactaggctcagagtgattggataaattgcccatatgctaaaagagaaggcaagcaagtgtaatacta

SEQ ID NO: 108967 - DNA, 79 bp, Homo sapiens
aaactaggctcagagtgattggataaattgcccatatgctaaaagagaaggcaagcaagtgtaatactaggcagagcca

SEQ ID NO: 108968 - DNA, 83 bp, Homo sapiens
catatgctaaaagagaaggcaagcaagtgtaatactaggcagagccagctagatgtggaaactaggctcagagtgattggata

SEQ ID NO: 108969 - DNA, 79 bp, Homo sapiens
taaaagagaaggcaagcaagtgtaatactaggcagagccagctagatgtggaaactaggctcagagtgattggataaat

SEQ ID NO: 108970 - DNA, 81 bp, Homo sapiens
aagcaagtgtaatactaggcagagccagctagatgtggaaactaggctcagagtgattggataaattgcccatatgctaaa

SEQ ID NO: 108971 - DNA, 81 bp, Homo sapiens
agagccagctagatgtggaaactaggctcagagtgattggataaattgcccatatgctaaaagagaaggcaagcaagtgta

SEQ ID NO: 108972 - DNA, 79 bp, Homo sapiens
tagatgtggaaactaggctcagagtgattggataaattgcccatatgctaaaagagaaggcaagcaagtgtaatactag

SEQ ID NO: 108973 - DNA, 79 bp, Homo sapiens; identical to SEQ ID NO: 108967

SEQ ID NO: 108974 - DNA, 78 bp, Homo sapiens
attggataaattgcccatatgctaaaagagaaggcaagcaagtgtaatactaggcagagccagctagtaagtggtgga

SEQ ID NO: 108975 - DNA, 76 bp, Homo sapiens
ccatatgctaaaagagaaggcaagcaagtgtaatactaggcagagccagctagtaagtggtggaggaaaagacttc

SEQ ID NO: 108976 - DNA, 72 bp, Homo sapiens
ctaaaagagaaggcaagcaagtgtaatactaggcagagccagctagtaagtggtggaggaaaagacttcccc

SEQ ID NO: 108977 - DNA, 71 bp, Homo sapiens
aagcaagtgtaatactaggcagagccagctagtaagtggtggaggaaaagacttccccctggatcttttcc

SEQ ID NO: 108978 - DNA, 71 bp, Homo sapiens
taatactaggcagagccagctagtaagtggtggaggaaaagacttccccctggatcttttccctagctatt

SEQ ID NO: 108979 - DNA, 70 bp, Homo sapiens
agagccagctagtaagtggtggaggaaaagacttccccctggatcttttccctagctattttcattagac

SEQ ID NO: 108980 - DNA, 71 bp, Homo sapiens
tggaggaaaagacttccccctggatcttttccctagctattttcattagacctcaatacctacaaatcaga

SEQ ID NO: 108981 - DNA, 69 bp, Homo sapiens
aaagacttccccctggatcttttccctagctattttcattagacctcaatacctacaaatcagaccgaa

SEQ ID NO: 108982 - DNA, 72 bp, Homo sapiens
tggatcttttccctagctattttcattagacctcaatacctacaaatcagaccgaagttctgccctccggga

SEQ ID NO: 108983 - DNA, 73 bp, Homo sapiens
ttccctagctattttcattagacctcaatacctacaaatcagaccgaagttctgccctccgggatattatgaa

SEQ ID NO: 108984 - DNA, 74 bp, Homo sapiens
tattttcattagacctcaatacctacaaatcagaccgaagttctgccctccgggatattatgaagatacatatt

SEQ ID NO: 108985 - DNA, 74 bp, Homo sapiens
acctcaatacctacaaatcagaccgaagttctgccctccgggatattatgaagatacatatttggcttcataaa

SEQ ID NO: 108986 - DNA, 77 bp, Homo sapiens
tacctacaaatcagaccgaagttctgccctccgggatattatgaagatacatatttggcttcataaagaagctctgc

SEQ ID NO: 108987 - DNA, 78 bp, Homo sapiens
accgaagttctgccctccgggatattatgaagatacatatttggcttcataaagaagctctgctctgcttctatggat

SEQ ID NO: 108988 - DNA, 79 bp, Homo sapiens
ttctgccctccgggatattatgaagatacatatttggcttcataaagaagctctgctctgcttctatggatttaaccaa

SEQ ID NO: 108989 - DNA, 81 bp, Homo sapiens
atattatgaagatacatatttggcttcataaagaagctctgctctgcttctatggatttaaccaactgtggatctctctac

SEQ ID NO: 108990 - DNA, 82 bp, Homo sapiens
tatttggcttcataaagaagctctgctctgcttctatggatttaaccaactgtggatctctctacgtatagatctgtatata

SEQ ID NO: 108991 - DNA, 81 bp, Homo sapiens
ataaagaagctctgctctgcttctatggatttaaccaactgtggatctctctacgtatagatctgtatatatggatggttg

SEQ ID NO: 108992 - DNA, 84 bp, Homo sapiens
tctgctctgcttctatggatttaaccaactgtggatctctctacgtatagatctgtatatatggatggttgtctgtattgaaca

SEQ ID NO: 108993 - DNA, 82 bp, Homo sapiens
tatggatttaaccaactgtggatctctctacgtatagatctgtatatatggatggttgtctgtattgaacatgcgcagactt

SEQ ID NO: 108994 - DNA, 79 bp, Homo sapiens
tttaaccaactgtggatctctctacgtatagatctgtatatatggatggttgtctgtattgaacatgcgcagacttttt

SEQ ID NO: 108995 - DNA, 82 bp, Homo sapiens
ctgtggatctctctacgtatagatctgtatatatggatggttgtctgtattgaacatgcgcagacttttttcctgtcattct

SEQ ID NO: 108996 - DNA, 79 bp, Homo sapiens
tctacgtatagatctgtatatatggatggttgtctgtattgaacatgcgcagacttttttcctgtcattcttccctaaa

SEQ ID NO: 108997 - DNA, 78 bp, Homo sapiens
agatctgtatatatggatggttgtctgtattgaacatgcgcagacttttttcctgtcattcttccctaaacaatacag

SEQ ID NO: 108998 - DNA, 74 bp, Homo sapiens
caaatactacaccattttagaaaagagacttgagcatctgaagatgttgttattccagaggggtcctgaaacca

SEQ ID NO: 108999 - DNA, 73 bp, Homo sapiens
actacaccattttagaaaagagacttgagcatctgaagatgttgttattccagaggggtcctgaaaccaatac

SEQ ID NO: 109000 - DNA, 74 bp, Homo sapiens
tttagaaaagagacttgagcatctgaagatgttgttattccagaggggtcctgaaaccaatacccccatggata

SEQ ID NO: 109001 - DNA, 75 bp, Homo sapiens
tgagcatctgaagatgttgttattccagaggggtcctgaaaccaatacccccatggatactggggggtgactgta

SEQ ID NO: 109002 - DNA, 68 bp, Homo sapiens
ttattccagaggggtcctgaaaccaatacccccatggatactggggggtgactgtacttaaaacaata

SEQ ID NO: 109003 - DNA, 69 bp, Homo sapiens
gggtcctgaaaccaatacccccatggatactggggggtgactgtacttaaaacaatagtgtgtggtgga

SEQ ID NO: 109004 - DNA, 69 bp, Homo sapiens
aaccaatacccccatggatactggggggtgactgtacttaaaacaatagtgtgtggtggaaagtgctaa

SEQ ID NO: 109005 - DNA, 69 bp, Homo sapiens
ccatggatactggggggtgactgtacttaaaacaatagtgtgtggtggaaagtgctaaacttcctaaaa

SEQ ID NO: 109006 - DNA, 67 bp, Homo sapiens
atactggggggtgactgtacttaaaacaatagtgtgtggtggaaagtgctaaacttcctaaaagttg

SEQ ID NO: 109007 - DNA, 71 bp, Homo sapiens
tagtgtgtggtggaaagtgctaaacttcctaaaagttgtccaaatggtgagctgtgtgggtttagaagagg

SEQ ID NO: 109008 - DNA, 70 bp, Homo sapiens
tggaaagtgctaaacttcctaaaagttgtccaaatggtgagctgtgtgggtttagaagaggggagagaag

SEQ ID NO: 109009 - DNA, 70 bp, Homo sapiens
aaatggtgagctgtgtgggtttagaagaggggagagaaggcttctagctagggaaggaggggtggagagg

SEQ ID NO: 109010 - DNA, 71 bp, Homo sapiens
tgtgggtttagaagaggggagagaaggcttctagctagggaaggaggggtggagagggtagcaattgcaaa

SEQ ID NO: 109011 - DNA, 70 bp, Homo sapiens
aagaggggagagaaggcttctagctagggaaggaggggtggagagggtagcaattgcaaaaatctttgta

SEQ ID NO: 109012 - DNA, 70 bp, Homo sapiens
agaaggcttctagctagggaaggaggggtggagagggtagcaattgcaaaaatctttgtaaaaacagtga

SEQ ID NO: 109013 - DNA, 73 bp, Homo sapiens
aggaggggtggagagggtagcaattgcaaaaatctttgtaaaaacagtgacatttgtgacacagaagagcagt

SEQ ID NO: 109014 - DNA, 76 bp, Homo sapiens
gtggagagggtagcaattgcaaaaatctttgtaaaaacagtgacatttgtgacacagaagagcagttgggtgtgta

SEQ ID NO: 109015 - DNA, 76 bp, Homo sapiens
ggtagcaattgcaaaaatctttgtaaaaacagtgacatttgtgacacagaagagcagttgggtgtgtagctcttgg

SEQ ID NO: 109016 - DNA, 73 bp, Homo sapiens
aatctttgtaaaaacagtgacatttgtgacacagaagagcagttgggtgtgtagctcttggggggcggaaata

SEQ ID NO: 109017 - DNA, 72 bp, Homo sapiens
ttgtaaaaacagtgacatttgtgacacagaagagcagttgggtgtgtagctcttggggggcggaaatagttt

SEQ ID NO: 109018 - DNA, 71 bp, Homo sapiens
acagaagagcagttgggtgtgtagctcttggggggcggaaatagttttggaggggagacagggtggctgaa

SEQ ID NO: 109019 - DNA, 69 bp, Homo sapiens
agttgggtgtgtagctcttggggggcggaaatagttttggaggggagacagggtggctgaaaacagaga

SEQ ID NO: 109020 - DNA, 71 bp, Homo sapiens
ggtgtgtagctcttggggggcggaaatagttttggaggggagacagggtggctgaaaacagagaagagaga

SEQ ID NO: 109021 - DNA, 70 bp, Homo sapiens
gggggcggaaatagttttggaggggagacagggtggctgaaaacagagaagagagaggattatttgttga

SEQ ID NO: 109022 - DNA, 71 bp, Homo sapiens
atagttttggaggggagacagggtggctgaaaacagagaagagagaggattatttgttgaagtgaagagtt

SEQ ID NO: 109023 - DNA, 72 bp, Homo sapiens
tttggaggggagacagggtggctgaaaacagagaagagagaggattatttgttgaagtgaagagtttataaa

SEQ ID NO: 109024 - DNA, 72 bp, Homo sapiens
agacagggtggctgaaaacagagaagagagaggattatttgttgaagtgaagagtttataaaggagagttaa

SEQ ID NO: 109025 - DNA, 71 bp, Homo sapiens
gctgaaaacagagaagagagaggattatttgttgaagtgaagagtttataaaggagagttaaggaaagtaa

SEQ ID NO: 109026 - DNA, 69 bp, Homo sapiens
gagaagagagaggattatttgttgaagtgaagagtttataaaggagagttaaggaaagtaattttggaa

SEQ ID NO: 109027 - DNA, 68 bp, Homo sapiens
ttataaaggagagttaaggaaagtaattttggaaagatggattgagactaaattatggaaggtcttgg

SEQ ID NO: 109028 - DNA, 68 bp, Homo sapiens
agagttaaggaaagtaattttggaaagatggattgagactaaattatggaaggtcttggtttcacggc

SEQ ID NO: 109029 - DNA, 69 bp, Homo sapiens
aaagtaattttggaaagatggattgagactaaattatggaaggtcttggtttcacggccagttgagttg

SEQ ID NO: 109030 - DNA, 70 bp, Homo sapiens
attttggaaagatggattgagactaaattatggaaggtcttggtttcacggccagttgagttgtgtttta

SEQ ID NO: 109031 - DNA, 75 bp, Homo sapiens
attgagactaaattatggaaggtcttggtttcacggccagttgagttgtgttttatctgcagaagaaagctatca

SEQ ID NO: 109032 - DNA, 73 bp, Homo sapiens
taaattatggaaggtcttggtttcacggccagttgagttgtgttttatctgcagaagaaagctatcaaatatt

SEQ ID NO: 109033 - DNA, 74 bp, Homo sapiens
aggtcttggtttcacggccagttgagttgtgttttatctgcagaagaaagctatcaaatatttttgagtcagta

SEQ ID NO: 109034 - DNA, 77 bp, Homo sapiens
tttcacggccagttgagttgtgttttatctgcagaagaaagctatcaaatatttttgagtcagtattcacaaaatca

SEQ ID NO: 109035 - DNA, 77 bp, Homo sapiens
gccagttgagttgtgttttatctgcagaagaaagctatcaaatatttttgagtcagtattcacaaaatcaggacaaa

SEQ ID NO: 109036 - DNA, 77 bp, Homo sapiens
tgtgttttatctgcagaagaaagctatcaaatatttttgagtcagtattcacaaaatcaggacaaaatgtaggtgaa

SEQ ID NO: 109037 - DNA, 75 bp, Homo sapiens
gctatcaaatatttttgagtcagtattcacaaaatcaggacaaaatgtaggtgaaagccagagtttaactctgaa

SEQ ID NO: 109038 - DNA, 72 bp, Homo sapiens
ttttgagtcagtattcacaaaatcaggacaaaatgtaggtgaaagccagagtttaactctgaaaattacttg

SEQ ID NO: 109039 - DNA, 71 bp, Homo sapiens
cacaaaatcaggacaaaatgtaggtgaaagccagagtttaactctgaaaattacttgtgtcttattggaaa

SEQ ID NO: 109040 - DNA, 69 bp, Homo sapiens
aggtgaaagccagagtttaactctgaaaattacttgtgtcttattggaaatttggagggagattgaaaa

SEQ ID NO: 109041 - DNA, 71 bp, Homo sapiens
tctgaaaattacttgtgtcttattggaaatttggagggagattgaaaaaaatacatcaattggtctttcca

SEQ ID NO: 109042 - DNA, 68 bp, Homo sapiens
ttacttgtgtcttattggaaatttggagggagattgaaaaaaatacatcaattggtctttccaaaaaa

SEQ ID NO: 109043 - DNA, 76 bp, Homo sapiens
aaaaaaattacagaagaaaagctaatcattttcacactgttcaagctcaatgagatctagttgagattacagatta

SEQ ID NO: 109044 - DNA, 79 bp, Homo sapiens
acagaagaaaagctaatcattttcacactgttcaagctcaatgagatctagttgagattacagattaatacaaagctct

SEQ ID NO: 109045 - DNA, 82 bp, Homo sapiens
gctaatcattttcacactgttcaagctcaatgagatctagttgagattacagattaatacaaagctcttgcttacattttga

SEQ ID NO: 109046 - DNA, 79 bp, Homo sapiens
tttcacactgttcaagctcaatgagatctagttgagattacagattaatacaaagctcttgcttacattttgaagttag

SEQ ID NO: 109047 - DNA, 77 bp, Homo sapiens
actgttcaagctcaatgagatctagttgagattacagattaatacaaagctcttgcttacattttgaagttagtatt

SEQ ID NO: 109048 - DNA, 81 bp, Homo sapiens
tgagatctagttgagattacagattaatacaaagctcttgcttacattttgaagttagtatttattagcacatatcttgca

SEQ ID NO: 109049 - DNA, 78 bp, Homo sapiens
gttgagattacagattaatacaaagctcttgcttacattttgaagttagtatttattagcacatatcttgcaagagta

SEQ ID NO: 109050 - DNA, 81 bp, Homo sapiens
cagattaatacaaagctcttgcttacattttgaagttagtatttattagcacatatcttgcaagagtatatcatcaactgc

SEQ ID NO: 109051 - DNA, 78 bp, Homo sapiens
aaagctcttgcttacattttgaagttagtatttattagcacatatcttgcaagagtatatcatcaactgcctttccca

SEQ ID NO: 109052 - DNA, 78 bp, Homo sapiens
cttgcttacattttgaagttagtatttattagcacatatcttgcaagagtatatcatcaactgcctttcccaaattga

SEQ ID NO: 109053 - DNA, 77 bp, Homo sapiens
tgaagttagtatttattagcacatatcttgcaagagtatatcatcaactgcctttcccaaattgaaaaatttcctca

SEQ ID NO: 109054 - DNA, 77 bp, Homo sapiens
tttattagcacatatcttgcaagagtatatcatcaactgcctttcccaaattgaaaaatttcctcaaatatatgggc

SEQ ID NO: 109055 - DNA, 75 bp, Homo sapiens
cacatatcttgcaagagtatatcatcaactgcctttcccaaattgaaaaatttcctcaaatatatgggctccttt

SEQ ID NO: 109056 - DNA, 76 bp, Homo sapiens
gcaagagtatatcatcaactgcctttcccaaattgaaaaatttcctcaaatatatgggctccttttttcatgatca

SEQ ID NO: 109057 - DNA, 74 bp, Homo sapiens
tcatcaactgcctttcccaaattgaaaaatttcctcaaatatatgggctccttttttcatgatcactatccttc

SEQ ID NO: 109058 - DNA, 71 bp, Homo sapiens
ctttcccaaattgaaaaatttcctcaaatatatgggctccttttttcatgatcactatccttccaggagaa

SEQ ID NO: 109059 - DNA, 71 bp, Homo sapiens
ccaaattgaaaaatttcctcaaatatatgggctccttttttcatgatcactatccttccaggagaaaaata

SEQ ID NO: 109060 - DNA, 63 bp, Homo sapiens
aaaattaaatttaaattctccctaatgagggaagtaaaacactaaggaataagttttatccag

SEQ ID NO: 109061 - DNA, 68 bp, Homo sapiens
ttaaattctccctaatgagggaagtaaaacactaaggaataagttttatccagtaggattgagctttg

SEQ ID NO: 109062 - DNA, 69 bp, Homo sapiens
cctaatgagggaagtaaaacactaaggaataagttttatccagtaggattgagctttggaggtccacaa

SEQ ID NO: 109063 - DNA, 70 bp, Homo sapiens
ggaagtaaaacactaaggaataagttttatccagtaggattgagctttggaggtccacaagtcattataa

SEQ ID NO: 109064 - DNA, 74 bp, Homo sapiens
tatccagtaggattgagctttggaggtccacaagtcattataattgtaagactttttctatccctgaatactaa

SEQ ID NO: 109065 - DNA, 72 bp, Homo sapiens
ttgagctttggaggtccacaagtcattataattgtaagactttttctatccctgaatactaattttcatccc

SEQ ID NO: 109066 - DNA, 73 bp, Homo sapiens
tcattataattgtaagactttttctatccctgaatactaattttcatccccctgggtgcaatattgctcccat

SEQ ID NO: 109067 - DNA, 71 bp, Homo sapiens
ataattgtaagactttttctatccctgaatactaattttcatccccctgggtgcaatattgctcccattgg

SEQ ID NO: 109068 - DNA, 74 bp, Homo sapiens
actttttctatccctgaatactaattttcatccccctgggtgcaatattgctcccattgggactgcatggtgta

SEQ ID NO: 109069 - DNA, 76 bp, Homo sapiens
ctgaatactaattttcatccccctgggtgcaatattgctcccattgggactgcatggtgtaggcccaagcttgctt

SEQ ID NO: 109070 - DNA, 79 bp, Homo sapiens
taattttcatccccctgggtgcaatattgctcccattgggactgcatggtgtaggcccaagcttgctttgccatgacat

SEQ ID NO: 109071 - DNA, 79 bp, Homo sapiens
cctgggtgcaatattgctcccattgggactgcatggtgtaggcccaagcttgctttgccatgacattttgacgaacacc

SEQ ID NO: 109072 - DNA, 78 bp, Homo sapiens
aatattgctcccattgggactgcatggtgtaggcccaagcttgctttgccatgacattttgacgaacaccgtggaagc

SEQ ID NO: 109073 - DNA, 80 bp, Homo sapiens
ctcccattgggactgcatggtgtaggcccaagcttgctttgccatgacattttgacgaacaccgtggaagctctctgatg

SEQ ID NO: 109074 - DNA, 81 bp, Homo sapiens
actgcatggtgtaggcccaagcttgctttgccatgacattttgacgaacaccgtggaagctctctgatgtctggtgaagtc

SEQ ID NO: 109075 - DNA, 82 bp, Homo sapiens
taggcccaagcttgctttgccatgacattttgacgaacaccgtggaagctctctgatgtctggtgaagtctgcgtcacagaa

SEQ ID NO: 109076 - DNA, 80 bp, Homo sapiens
aagcttgctttgccatgacattttgacgaacaccgtggaagctctctgatgtctggtgaagtctgcgtcacagaagggag

SEQ ID NO: 109077 - DNA, 79 bp, Homo sapiens
atgacattttgacgaacaccgtggaagctctctgatgtctggtgaagtctgcgtcacagaagggaggacggatacaatc

SEQ ID NO: 109078 - DNA, 78 bp, Homo sapiens
ttttgacgaacaccgtggaagctctctgatgtctggtgaagtctgcgtcacagaagggaggacggatacaatctccta

SEQ ID NO: 109079 - DNA, 79 bp, Homo sapiens
ctctgatgtctggtgaagtctgcgtcacagaagggaggacggatacaatctcctagccaaataggttgacaattgatag

SEQ ID NO: 109080 - DNA, 78 bp, Homo sapiens
gtgaagtctgcgtcacagaagggaggacggatacaatctcctagccaaataggttgacaattgataggctatgtgaaa

SEQ ID NO: 109081 - DNA, 76 bp, Homo sapiens
cgtcacagaagggaggacggatacaatctcctagccaaataggttgacaattgataggctatgtgaaagatttgat

SEQ ID NO: 109082 - DNA, 74 bp, Homo sapiens
ataggttgacaattgataggctatgtgaaagatttgattcaaaaatcaaacagagaacctagagaactactggg

SEQ ID NO: 109083 - DNA, 75 bp, Homo sapiens
aggctatgtgaaagatttgattcaaaaatcaaacagagaacctagagaactactggggaagacaatattgctaga

SEQ ID NO: 109084 - DNA, 77 bp, Homo sapiens
atttgattcaaaaatcaaacagagaacctagagaactactggggaagacaatattgctagagcaccatgatcagtta

SEQ ID NO: 109085 - DNA, 77 bp, Homo sapiens
aaatcaaacagagaacctagagaactactggggaagacaatattgctagagcaccatgatcagttacatgttggtta

SEQ ID NO: 109086 - DNA, 77 bp, Homo sapiens
aaacagagaacctagagaactactggggaagacaatattgctagagcaccatgatcagttacatgttggttattata

SEQ ID NO: 109087 - DNA, 76 bp, Homo sapiens
agaactactggggaagacaatattgctagagcaccatgatcagttacatgttggttattatacgtcccttaggcta

SEQ ID NO: 109088 - DNA, 76 bp, Homo sapiens
gggaagacaatattgctagagcaccatgatcagttacatgttggttattatacgtcccttaggctaccagtgtttc

SEQ ID NO: 109089 - DNA, 75 bp, Homo sapiens
aatattgctagagcaccatgatcagttacatgttggttattatacgtcccttaggctaccagtgtttcctgtaaa

SEQ ID NO: 109090 - DNA, 74 bp, Homo sapiens
ctagagcaccatgatcagttacatgttggttattatacgtcccttaggctaccagtgtttcctgtaaaataatc

SEQ ID NO: 109091 - DNA, 70 bp, Homo sapiens
atcagttacatgttggttattatacgtcccttaggctaccagtgtttcctgtaaaataatctgcctttat

SEQ ID NO: 109092 - DNA, 67 bp, Homo sapiens
acatgttggttattatacgtcccttaggctaccagtgtttcctgtaaaataatctgcctttattttt

SEQ ID NO: 109093 - DNA, 74 bp, Homo sapiens
ttaggctaccagtgtttcctgtaaaataatctgcctttattttttgctacgcattctgctaggtgatatcggta

SEQ ID NO: 109094 - DNA, 70 bp, Homo sapiens
cctgtaaaataatctgcctttattttttgctacgcattctgctaggtgatatcggtagaaaagttaaaaa

SEQ ID NO: 109095 - DNA, 78 bp, Homo sapiens
aaaaaaaaaaatgctagaggtggatctcacaaaacatagcagtgtgagggtgagcatcaacatagtatgcctctgaag

SEQ ID NO: 109096 - DNA, 82 bp, Homo sapiens
aaaatgctagaggtggatctcacaaaacatagcagtgtgagggtgagcatcaacatagtatgcctctgaagtcttgaattta

SEQ ID NO: 109097 - DNA, 84 bp, Homo sapiens
tggatctcacaaaacatagcagtgtgagggtgagcatcaacatagtatgcctctgaagtcttgaatttactcttgctatccaaa

SEQ ID NO: 109098 - DNA, 80 bp, Homo sapiens
acaaaacatagcagtgtgagggtgagcatcaacatagtatgcctctgaagtcttgaatttactcttgctatccaaattac

SEQ ID NO: 109099 - DNA, 79 bp, Homo sapiens
agtgtgagggtgagcatcaacatagtatgcctctgaagtcttgaatttactcttgctatccaaattacctcactcaaac

SEQ ID NO: 109100 - DNA, 76 bp, Homo sapiens
agggtgagcatcaacatagtatgcctctgaagtcttgaatttactcttgctatccaaattacctcactcaaacggg

SEQ ID NO: 109101 - DNA, 74 bp, Homo sapiens
atcaacatagtatgcctctgaagtcttgaatttactcttgctatccaaattacctcactcaaacggggaaatgt

SEQ ID NO: 109102 - DNA, 70 bp, Homo sapiens
gtcttgaatttactcttgctatccaaattacctcactcaaacggggaaatgttccttccattaagtaata

SEQ ID NO: 109103 - DNA, 71 bp, Homo sapiens
tttactcttgctatccaaattacctcactcaaacggggaaatgttccttccattaagtaatagctgtgaaa

SEQ ID NO: 109104 - DNA, 73 bp, Homo sapiens
gggaaatgttccttccattaagtaatagctgtgaaaatatttatcttcaccaattcaatggatattctttgga

SEQ ID NO: 109105 - DNA, 75 bp, Homo sapiens
ccttccattaagtaatagctgtgaaaatatttatcttcaccaattcaatggatattctttggagaaatctctgtc

SEQ ID NO: 109106 - DNA, 75 bp, Homo sapiens
cattaagtaatagctgtgaaaatatttatcttcaccaattcaatggatattctttggagaaatctctgtctaatt

SEQ ID NO: 109107 - DNA, 76 bp, Homo sapiens
tttatcttcaccaattcaatggatattctttggagaaatctctgtctaatttaataaattagagtggttgagcata

SEQ ID NO: 109108 - DNA, 77 bp, Homo sapiens
tcaccaattcaatggatattctttggagaaatctctgtctaatttaataaattagagtggttgagcatataatgttg

SEQ ID NO: 109109 - DNA, 75 bp, Homo sapiens
caatggatattctttggagaaatctctgtctaatttaataaattagagtggttgagcatataatgttgtgttttg

SEQ ID NO: 109110 - DNA, 75 bp, Homo sapiens
tggagaaatctctgtctaatttaataaattagagtggttgagcatataatgttgtgttttgttgttgctgccgtt

SEQ ID NO: 109111 - DNA, 76 bp, Homo sapiens
ttaataaattagagtggttgagcatataatgttgtgttttgttgttgctgccgttttactgactatggctattgtg

SEQ ID NO: 109112 - DNA, 76 bp, Homo sapiens
aattagagtggttgagcatataatgttgtgttttgttgttgctgccgttttactgactatggctattgtgtgaatt

SEQ ID NO: 109113 - DNA, 78 bp, Homo sapiens
ttgagcatataatgttgtgttttgttgttgctgccgttttactgactatggctattgtgtgaatttctgtttaatcaa

SEQ ID NO: 109114 - DNA, 74 bp, Homo sapiens
gttgtgttttgttgttgctgccgttttactgactatggctattgtgtgaatttctgtttaatcaatcaaaatta

SEQ ID NO: 109115 - DNA, 75 bp, Homo sapiens
gttgttgctgccgttttactgactatggctattgtgtgaatttctgtttaatcaatcaaaattatccattttgtc

SEQ ID NO: 109116 - DNA, 74 bp, Homo sapiens
gctgccgttttactgactatggctattgtgtgaatttctgtttaatcaatcaaaattatccattttgtctttaa

SEQ ID NO: 109117 - DNA, 65 bp, Homo sapiens
aagaaaagaaaaatttgaaaaataagagtagtctacacggtgttgaattccccactgtacccaaa

SEQ ID NO: 109118 - DNA, 71 bp, Homo sapiens
aaatttgaaaaataagagtagtctacacggtgttgaattccccactgtacccaaagatcgatggctcatcc

SEQ ID NO: 109119 - DNA, 73 bp, Homo sapiens
aaaataagagtagtctacacggtgttgaattccccactgtacccaaagatcgatggctcatccttctgaagaa

SEQ ID NO: 109120 - DNA, 72 bp, Homo sapiens
agtagtctacacggtgttgaattccccactgtacccaaagatcgatggctcatccttctgaagaagggaatt

SEQ ID NO: 109121 - DNA, 75 bp, Homo sapiens
tgttgaattccccactgtacccaaagatcgatggctcatccttctgaagaagggaattttgagccaatataataa

SEQ ID NO: 109122 - DNA, 75 bp, Homo sapiens
cccactgtacccaaagatcgatggctcatccttctgaagaagggaattttgagccaatataataataattggtga

SEQ ID NO: 109123 - DNA, 77 bp, Homo sapiens
ccaaagatcgatggctcatccttctgaagaagggaattttgagccaatataataataattggtgaactgctattatc

SEQ ID NO: 109124 - DNA, 77 bp, Homo sapiens
atcgatggctcatccttctgaagaagggaattttgagccaatataataataattggtgaactgctattatctttcaa

SEQ ID NO: 109125 - DNA, 77 bp, Homo sapiens
catccttctgaagaagggaattttgagccaatataataataattggtgaactgctattatctttcaatgatcttcca

SEQ ID NO: 109126 - DNA, 75 bp, Homo sapiens
agaagggaattttgagccaatataataataattggtgaactgctattatctttcaatgatcttccatttagagga

SEQ ID NO: 109127 - DNA, 75 bp, Homo sapiens
gagccaatataataataattggtgaactgctattatctttcaatgatcttccatttagaggaaaaaacttactgc

SEQ ID NO: 109128 - DNA, 72 bp, Homo sapiens
aataataattggtgaactgctattatctttcaatgatcttccatttagaggaaaaaacttactgcttttaca

SEQ ID NO: 109129 - DNA, 74 bp, Homo sapiens
attggtgaactgctattatctttcaatgatcttccatttagaggaaaaaacttactgcttttacaagctctgga

SEQ ID NO: 109130 - DNA, 71 bp, Homo sapiens
gctattatctttcaatgatcttccatttagaggaaaaaacttactgcttttacaagctctggaaaactacc

SEQ ID NO: 109131 - DNA, 66 bp, Homo sapiens
ttccatttagaggaaaaaacttactgcttttacaagctctggaaaactaccccaggagggttatct

SEQ ID NO: 109132 - DNA, 66 bp, Homo sapiens
agaggaaaaaacttactgcttttacaagctctggaaaactaccccaggagggttatcttggttcac

SEQ ID NO: 109133 - DNA, 71 bp, Homo sapiens
tttacaagctctggaaaactaccccaggagggttatcttggttcactgagcttgggctatggatttaggta

SEQ ID NO: 109134 - DNA, 70 bp, Homo sapiens
aaaactaccccaggagggttatcttggttcactgagcttgggctatggatttaggtaccaagcagtttga

SEQ ID NO: 109135 - DNA, 74 bp, Homo sapiens
caggagggttatcttggttcactgagcttgggctatggatttaggtaccaagcagtttgacaatcttatacaat

SEQ ID NO: 109136 - DNA, 73 bp, Homo sapiens
ttatcttggttcactgagcttgggctatggatttaggtaccaagcagtttgacaatcttatacaatttttctt

SEQ ID NO: 109137 - DNA, 73 bp, Homo sapiens
ttgggctatggatttaggtaccaagcagtttgacaatcttatacaatttttctttggtcaagtcactccaaga

SEQ ID NO: 109138 - DNA, 74 bp, Homo sapiens
caagcagtttgacaatcttatacaatttttctttggtcaagtcactccaagactcctatcagccaaaactataa

SEQ ID NO: 109139 - DNA, 72 bp, Homo sapiens
acaatttttctttggtcaagtcactccaagactcctatcagccaaaactataatttgatggttcatcatttt

SEQ ID NO: 109140 - DNA, 73 bp, Homo sapiens
tttctttggtcaagtcactccaagactcctatcagccaaaactataatttgatggttcatcatttttaaccta

SEQ ID NO: 109141 - DNA, 72 bp, Homo sapiens
cactccaagactcctatcagccaaaactataatttgatggttcatcatttttaacctattactacctgcttt

SEQ ID NO: 109142 - DNA, 72 bp, Homo sapiens
aagactcctatcagccaaaactataatttgatggttcatcatttttaacctattactacctgcttttgcgga

SEQ ID NO: 109143 - DNA, 70 bp, Homo sapiens
agccaaaactataatttgatggttcatcatttttaacctattactacctgcttttgcggagagaggggta

SEQ ID NO: 109144 - DNA, 71 bp, Homo sapiens
actataatttgatggttcatcatttttaacctattactacctgcttttgcggagagaggggtaggatttca

SEQ ID NO: 109145 - DNA, 70 bp, Homo sapiens
ttcatcatttttaacctattactacctgcttttgcggagagaggggtaggatttcaatcccaaaacatac

SEQ ID NO: 109146 - DNA, 67 bp, Homo sapiens
tttttaacctattactacctgcttttgcggagagaggggtaggatttcaatcccaaaacatacttta

SEQ ID NO: 109147 - DNA, 71 bp, Homo sapiens
tattactacctgcttttgcggagagaggggtaggatttcaatcccaaaacatactttaaactgtcattaca

SEQ ID NO: 109148 - DNA, 72 bp, Homo sapiens
cttttgcggagagaggggtaggatttcaatcccaaaacatactttaaactgtcattacaacatatacacatg

SEQ ID NO: 109149 - DNA, 71 bp, Homo sapiens
agagaggggtaggatttcaatcccaaaacatactttaaactgtcattacaacatatacacatggaagtggg

SEQ ID NO: 109150 - DNA, 72 bp, Homo sapiens
atttcaatcccaaaacatactttaaactgtcattacaacatatacacatggaagtggggacagtcaggtatt

SEQ ID NO: 109151 - DNA, 74 bp, Homo sapiens
aatcccaaaacatactttaaactgtcattacaacatatacacatggaagtggggacagtcaggtatttgatcca

SEQ ID NO: 109152 - DNA, 77 bp, Homo sapiens
atactttaaactgtcattacaacatatacacatggaagtggggacagtcaggtatttgatccagactggattatgtg

SEQ ID NO: 109153 - DNA, 81 bp, Homo sapiens
tcattacaacatatacacatggaagtggggacagtcaggtatttgatccagactggattatgtgtgacttcacacatactt

SEQ ID NO: 109154 - DNA, 78 bp, Homo sapiens
tatacacatggaagtggggacagtcaggtatttgatccagactggattatgtgtgacttcacacatacttttagaagt

SEQ ID NO: 109155 - DNA, 76 bp, Homo sapiens
gaagtggggacagtcaggtatttgatccagactggattatgtgtgacttcacacatacttttagaagttacttcta

SEQ ID NO: 109156 - DNA, 76 bp, Homo sapiens
gtatttgatccagactggattatgtgtgacttcacacatacttttagaagttacttctacaaagatatttggagct

SEQ ID NO: 109157 - DNA, 76 bp, Homo sapiens
ttatgtgtgacttcacacatacttttagaagttacttctacaaagatatttggagcttggaaacacactggaatga

SEQ ID NO: 109158 - DNA, 73 bp, Homo sapiens
acacatacttttagaagttacttctacaaagatatttggagcttggaaacacactggaatgacttggctgtaa

SEQ ID NO: 109159 - DNA, 72 bp, Homo sapiens
ttttagaagttacttctacaaagatatttggagcttggaaacacactggaatgacttggctgtaaacctgaa

SEQ ID NO: 109160 - DNA, 74 bp, Homo sapiens
agttacttctacaaagatatttggagcttggaaacacactggaatgacttggctgtaaacctgaatggagaatg

SEQ ID NO: 109161 - DNA, 77 bp, Homo sapiens
aagatatttggagcttggaaacacactggaatgacttggctgtaaacctgaatggagaatgtcgctggagaggccaa

SEQ ID NO: 109162 - DNA, 77 bp, Homo sapiens
agcttggaaacacactggaatgacttggctgtaaacctgaatggagaatgtcgctggagaggccaaaaagctgtctc

SEQ ID NO: 109163 - DNA, 76 bp, Homo sapiens
aaacacactggaatgacttggctgtaaacctgaatggagaatgtcgctggagaggccaaaaagctgtctccatctt

SEQ ID NO: 109164 - DNA, 77 bp, Homo sapiens
aatgacttggctgtaaacctgaatggagaatgtcgctggagaggccaaaaagctgtctccatctttcttccaacatc

SEQ ID NO: 109165 - DNA, 78 bp, Homo sapiens
tgtaaacctgaatggagaatgtcgctggagaggccaaaaagctgtctccatctttcttccaacatccttctagtgtga

SEQ ID NO: 109166 - DNA, 78 bp, Homo sapiens
aatggagaatgtcgctggagaggccaaaaagctgtctccatctttcttccaacatccttctagtgtgacctattgcta

SEQ ID NO: 109167 - DNA, 77 bp, Homo sapiens
aatgtcgctggagaggccaaaaagctgtctccatctttcttccaacatccttctagtgtgacctattgctatgtaag

SEQ ID NO: 109168 - DNA, 74 bp, Homo sapiens
agaggccaaaaagctgtctccatctttcttccaacatccttctagtgtgacctattgctatgtaaggaaggtaa

SEQ ID NO: 109169 - DNA, 76 bp, Homo sapiens
tgtctccatctttcttccaacatccttctagtgtgacctattgctatgtaaggaaggtaactgttattccatctac

SEQ ID NO: 109170 - DNA, 76 bp, Homo sapiens
aacatccttctagtgtgacctattgctatgtaaggaaggtaactgttattccatctacttcatagttttcatcatg

SEQ ID NO: 109171 - DNA, 79 bp, Homo sapiens
ttctagtgtgacctattgctatgtaaggaaggtaactgttattccatctacttcatagttttcatcatggattcatgag

SEQ ID NO: 109172 - DNA, 78 bp, Homo sapiens
attgctatgtaaggaaggtaactgttattccatctacttcatagttttcatcatggattcatgaggcaatgtgtaaaa

SEQ ID NO: 109173 - DNA, 78 bp, Homo sapiens
tgtaaggaaggtaactgttattccatctacttcatagttttcatcatggattcatgaggcaatgtgtaaaatgtccaa

SEQ ID NO: 109174 - DNA, 80 bp, Homo sapiens
ttccatctacttcatagttttcatcatggattcatgaggcaatgtgtaaaatgtccaatgtctttagagtaaacagcatt

SEQ ID NO: 109175 - DNA, 76 bp, Homo sapiens
cttcatagttttcatcatggattcatgaggcaatgtgtaaaatgtccaatgtctttagagtaaacagcattttttt

SEQ ID NO: 109176 - DNA, 73 bp, Homo sapiens
gccaccgcgccccgcccataaacagtattttttgaccaatgagaaatctgtaaaaaattctgccatgatgact

SEQ ID NO: 109177 - DNA, 72 bp, Homo sapiens
cccgcccataaacagtattttttgaccaatgagaaatctgtaaaaaattctgccatgatgacttactttcta

SEQ ID NO: 109178 - DNA, 75 bp, Homo sapiens
aacagtattttttgaccaatgagaaatctgtaaaaaattctgccatgatgacttactttctattgataagtatga

SEQ ID NO: 109179 - DNA, 79 bp, Homo sapiens
tttgaccaatgagaaatctgtaaaaaattctgccatgatgacttactttctattgataagtatgagggtgctcattcta

SEQ ID NO: 109180 - DNA, 76 bp, Homo sapiens
gagaaatctgtaaaaaattctgccatgatgacttactttctattgataagtatgagggtgctcattctacgttagt

SEQ ID NO: 109181 - DNA, 75 bp, Homo sapiens
gtaaaaaattctgccatgatgacttactttctattgataagtatgagggtgctcattctacgttagttttctaca

SEQ ID NO: 109182 - DNA, 77 bp, Homo sapiens
aattctgccatgatgacttactttctattgataagtatgagggtgctcattctacgttagttttctacagaactcaa

SEQ ID NO: 109183 - DNA, 73 bp, Homo sapiens
gatgacttactttctattgataagtatgagggtgctcattctacgttagttttctacagaactcaaaaataag

SEQ ID NO: 109184 - DNA, 71 bp, Homo sapiens
ctttctattgataagtatgagggtgctcattctacgttagttttctacagaactcaaaaataagtggtcct

SEQ ID NO: 109185 - DNA, 71 bp, Homo sapiens
ataagtatgagggtgctcattctacgttagttttctacagaactcaaaaataagtggtccttgtggaataa

SEQ ID NO: 109186 - DNA, 71 bp, Homo sapiens
ggtgctcattctacgttagttttctacagaactcaaaaataagtggtccttgtggaataaatgaatggaaa

SEQ ID NO: 109187 - DNA, 69 bp, Homo sapiens
tctacgttagttttctacagaactcaaaaataagtggtccttgtggaataaatgaatggaaatgttgtt

SEQ ID NO: 109188 - DNA, 69 bp, Homo sapiens
ttttctacagaactcaaaaataagtggtccttgtggaataaatgaatggaaatgttgttttacaaataa

SEQ ID NO: 109189 - DNA, 66 bp, Homo sapiens
aactcaaaaataagtggtccttgtggaataaatgaatggaaatgttgttttacaaataaaaaataa

SEQ ID NO: 109190 - DNA, 69 bp, Homo sapiens
ataaaaaataaactttcctttcatttttactgtcctcaggaatgtgacaaaaagcataattttgatgtg

SEQ ID NO: 109191 - DNA, 73 bp, Homo sapiens
tcatttttactgtcctcaggaatgtgacaaaaagcataattttgatgtgttattatttgtagtttcccagaag

SEQ ID NO: 109192 - DNA, 72 bp, Homo sapiens
tttactgtcctcaggaatgtgacaaaaagcataattttgatgtgttattatttgtagtttcccagaaggaaa

SEQ ID NO: 109193 - DNA, 69 bp, Homo sapiens
aaagcataattttgatgtgttattatttgtagtttcccagaaggaaaaatatactgtcaaagttaggga

SEQ ID NO: 109194 - DNA, 69 bp, Homo sapiens
tttgatgtgttattatttgtagtttcccagaaggaaaaatatactgtcaaagttagggatctattttta

SEQ ID NO: 109195 - DNA, 67 bp, Homo sapiens
gtgttattatttgtagtttcccagaaggaaaaatatactgtcaaagttagggatctatttttaccag

SEQ ID NO: 109196 - DNA, 69 bp, Homo sapiens
agtttcccagaaggaaaaatatactgtcaaagttagggatctatttttaccagtataacaagatgtcac

SEQ ID NO: 109197 - DNA, 71 bp, Homo sapiens
gaaggaaaaatatactgtcaaagttagggatctatttttaccagtataacaagatgtcactgggagaccat

SEQ ID NO: 109198 - DNA, 70 bp, Homo sapiens
gtcaaagttagggatctatttttaccagtataacaagatgtcactgggagaccattactttattggaaag

SEQ ID NO: 109199 - DNA, 68 bp, Homo sapiens
gggatctatttttaccagtataacaagatgtcactgggagaccattactttattggaaagtttttgtt

SEQ ID NO: 109200 - DNA, 71 bp, Homo sapiens
gtttttttaaaacttgtctactgcagcttcacatatttcatagttgtgtgtttcctggttaaaaagcacga

SEQ ID NO: 109201 - DNA, 72 bp, Homo sapiens
aaacttgtctactgcagcttcacatatttcatagttgtgtgtttcctggttaaaaagcacgaaacttttcaa

SEQ ID NO: 109202 - DNA, 76 bp, Homo sapiens
gtctactgcagcttcacatatttcatagttgtgtgtttcctggttaaaaagcacgaaacttttcaacatttgctgc

SEQ ID NO: 109203 - DNA, 74 bp, Homo sapiens
acatatttcatagttgtgtgtttcctggttaaaaagcacgaaacttttcaacatttgctgctcattttgtgagc

SEQ ID NO: 109204 - DNA, 76 bp, Homo sapiens
ttcatagttgtgtgtttcctggttaaaaagcacgaaacttttcaacatttgctgctcattttgtgagccagatcaa

SEQ ID NO: 109205 - DNA, 73 bp, Homo sapiens
tttcctggttaaaaagcacgaaacttttcaacatttgctgctcattttgtgagccagatcaaggcaaggaaat

SEQ ID NO: 109206 - DNA, 74 bp, Homo sapiens
ttaaaaagcacgaaacttttcaacatttgctgctcattttgtgagccagatcaaggcaaggaaattccaatatt

SEQ ID NO: 109207 - DNA, 76 bp, Homo sapiens
aaacttttcaacatttgctgctcattttgtgagccagatcaaggcaaggaaattccaatatttatgaacaactgta

SEQ ID NO: 109208 - DNA, 78 bp, Homo sapiens
acatttgctgctcattttgtgagccagatcaaggcaaggaaattccaatatttatgaacaactgtagagggtaattga

SEQ ID NO: 109209 - DNA, 75 bp, Homo sapiens
ctcattttgtgagccagatcaaggcaaggaaattccaatatttatgaacaactgtagagggtaattgaaggatag

SEQ ID NO: 109210 - DNA, 77 bp, Homo sapiens
tgtgagccagatcaaggcaaggaaattccaatatttatgaacaactgtagagggtaattgaaggatagtctgctgtt

SEQ ID NO: 109211 - DNA, 73 bp, Homo sapiens
aaggcaaggaaattccaatatttatgaacaactgtagagggtaattgaaggatagtctgctgtttctgccagt

SEQ ID NO: 109212 - DNA, 75 bp, Homo sapiens
aattccaatatttatgaacaactgtagagggtaattgaaggatagtctgctgtttctgccagttctactgataaa

SEQ ID NO: 109213 - DNA, 75 bp, Homo sapiens
aatatttatgaacaactgtagagggtaattgaaggatagtctgctgtttctgccagttctactgataaactgtgg

SEQ ID NO: 109214 - DNA, 75 bp, Homo sapiens
actgtagagggtaattgaaggatagtctgctgtttctgccagttctactgataaactgtgggctgttgtattgtt

SEQ ID NO: 109215 - DNA, 74 bp, Homo sapiens
agagggtaattgaaggatagtctgctgtttctgccagttctactgataaactgtgggctgttgtattgtttaaa

SEQ ID NO: 109216 - DNA, 77 bp, Homo sapiens
aaggatagtctgctgtttctgccagttctactgataaactgtgggctgttgtattgtttaaacctctgtctgctgga

SEQ ID NO: 109217 - DNA, 74 bp, Homo sapiens
tgtttctgccagttctactgataaactgtgggctgttgtattgtttaaacctctgtctgctggaaggcttcttt

SEQ ID NO: 109218 - DNA, 73 bp, Homo sapiens
agttctactgataaactgtgggctgttgtattgtttaaacctctgtctgctggaaggcttctttttctgatac

SEQ ID NO: 109219 - DNA, 74 bp, Homo sapiens
ataaactgtgggctgttgtattgtttaaacctctgtctgctggaaggcttctttttctgatactgaagcatgtt

SEQ ID NO: 109220 - DNA, 75 bp, Homo sapiens
tgtgggctgttgtattgtttaaacctctgtctgctggaaggcttctttttctgatactgaagcatgttttcctaa

SEQ ID NO: 109221 - DNA, 74 bp, Homo sapiens
ttgtattgtttaaacctctgtctgctggaaggcttctttttctgatactgaagcatgttttcctaagccacctg

SEQ ID NO: 109222 - DNA, 76 bp, Homo sapiens
tggaaggcttctttttctgatactgaagcatgttttcctaagccacctggatgcaaagaggagattttcaggtgac

SEQ ID NO: 109223 - DNA, 73 bp, Homo sapiens
atactgaagcatgttttcctaagccacctggatgcaaagaggagattttcaggtgaccttggggtctctccct

SEQ ID NO: 109224 - DNA, 72 bp, Homo sapiens
atgttttcctaagccacctggatgcaaagaggagattttcaggtgaccttggggtctctcccttgccagact

SEQ ID NO: 109225 - DNA, 75 bp, Homo sapiens
taagccacctggatgcaaagaggagattttcaggtgaccttggggtctctcccttgccagacttctcagacaaaa

SEQ ID NO: 109226 - DNA, 76 bp, Homo sapiens
cctggatgcaaagaggagattttcaggtgaccttggggtctctcccttgccagacttctcagacaaaacacacaca

SEQ ID NO: 109227 - DNA, 76 bp, Homo sapiens
acagcatctttgtccatcctgggccaggtaggttcttatgagacagaccattatcccttgagtttgagagagtaaa

SEQ ID NO: 109228 - DNA, 75 bp, Homo sapiens
catcctgggccaggtaggttcttatgagacagaccattatcccttgagtttgagagagtaaagatctctcgtaat

SEQ ID NO: 109229 - DNA, 75 bp, Homo sapiens
ccaggtaggttcttatgagacagaccattatcccttgagtttgagagagtaaagatctctcgtaatttccatctc

SEQ ID NO: 109230 - DNA, 80 bp, Homo sapiens
ttcttatgagacagaccattatcccttgagtttgagagagtaaagatctctcgtaatttccatctcgcctgcaactctga

SEQ ID NO: 109231 - DNA, 78 bp, Homo sapiens
acagaccattatcccttgagtttgagagagtaaagatctctcgtaatttccatctcgcctgcaactctgagccctgaa

SEQ ID NO: 109232 - DNA, 78 bp, Homo sapiens
attatcccttgagtttgagagagtaaagatctctcgtaatttccatctcgcctgcaactctgagccctgaaggctcca

SEQ ID NO: 109233 - DNA, 82 bp, Homo sapiens
agtttgagagagtaaagatctctcgtaatttccatctcgcctgcaactctgagccctgaaggctccagtcaagcacagctga

SEQ ID NO: 109234 - DNA, 80 bp, Homo sapiens
agtaaagatctctcgtaatttccatctcgcctgcaactctgagccctgaaggctccagtcaagcacagctgactgggaac

SEQ ID NO: 109235 - DNA, 83 bp, Homo sapiens
tctcgtaatttccatctcgcctgcaactctgagccctgaaggctccagtcaagcacagctgactgggaactgtcaagtctgga

SEQ ID NO: 109236 - DNA, 87 bp, Homo sapiens
atctcgcctgcaactctgagccctgaaggctccagtcaagcacagctgactgggaactgtcaagtctggaggatgctgcatatattc

SEQ ID NO: 109237 - DNA, 85 bp, Homo sapiens
aactctgagccctgaaggctccagtcaagcacagctgactgggaactgtcaagtctggaggatgctgcatatattcccatgcctg

SEQ ID NO: 109238 - DNA, 84 bp, Homo sapiens
cctgaaggctccagtcaagcacagctgactgggaactgtcaagtctggaggatgctgcatatattcccatgcctgggttctgga

SEQ ID NO: 109239 - DNA, 88 bp, Homo sapiens
tccagtcaagcacagctgactgggaactgtcaagtctggaggatgctgcatatattcccatgcctgggttctggaatagcatctgtga

SEQ ID NO: 109240 - DNA, 85 bp, Homo sapiens
aagcacagctgactgggaactgtcaagtctggaggatgctgcatatattcccatgcctgggttctggaatagcatctgtgaccca

SEQ ID NO: 109241 - DNA, 81 bp, Homo sapiens
actgggaactgtcaagtctggaggatgctgcatatattcccatgcctgggttctggaatagcatctgtgacccacagcccc

SEQ ID NO: 109242 - DNA, 80 bp, Homo sapiens
aagtctggaggatgctgcatatattcccatgcctgggttctggaatagcatctgtgacccacagcccccggaataagaga

SEQ ID NO: 109243 - DNA, 79 bp, Homo sapiens
gatgctgcatatattcccatgcctgggttctggaatagcatctgtgacccacagcccccggaataagagaaagagtctt

SEQ ID NO: 109244 - DNA, 73 bp, Homo sapiens
atatattcccatgcctgggttctggaatagcatctgtgacccacagcccccggaataagagaaagagtctttt

SEQ ID NO: 109245 - DNA, 73 bp, Homo sapiens
atgcctgggttctggaatagcatctgtgacccacagcccccggaataagagaaagagtctttttggatttgat

SEQ ID NO: 109246 - DNA, 75 bp, Homo sapiens
tctgtgacccacagcccccggaataagagaaagagtctttttggatttgattttgttcatagatatatgctccaa

SEQ ID NO: 109247 - DNA, 80 bp, Homo sapiens
gaataagagaaagagtctttttggatttgattttgttcatagatatatgctccaagatatgcctcaagcgttatatgcta

SEQ ID NO: 109248 - DNA, 82 bp, Homo sapiens
aagagtctttttggatttgattttgttcatagatatatgctccaagatatgcctcaagcgttatatgctatacatcctcata

SEQ ID NO: 109249 - DNA, 83 bp, Homo sapiens
ttggatttgattttgttcatagatatatgctccaagatatgcctcaagcgttatatgctatacatcctcataagtctttctta

SEQ ID NO: 109250 - DNA, 84 bp, Homo sapiens
catagatatatgctccaagatatgcctcaagcgttatatgctatacatcctcataagtctttcttataagtcatagtctttata

SEQ ID NO: 109251 - DNA, 80 bp, Homo sapiens
tccaagatatgcctcaagcgttatatgctatacatcctcataagtctttcttataagtcatagtctttataaccaatgct

SEQ ID NO: 109252 - DNA, 72 bp, Homo sapiens
aagcgttatatgctatacatcctcataagtctttcttataagtcatagtctttataaccaatgctttttttt

SEQ ID NO: 109253 - DNA, 72 bp, Homo sapiens
ttttttttttgtttgcataggttggcaactcaaaggtcagtaccaaggattctctataactgccattgaaca

SEQ ID NO: 109254 - DNA, 75 bp, Homo sapiens
ttttgtttgcataggttggcaactcaaaggtcagtaccaaggattctctataactgccattgaacaatattacaa

SEQ ID NO: 109255 - DNA, 75 bp, Homo sapiens
cataggttggcaactcaaaggtcagtaccaaggattctctataactgccattgaacaatattacaatatttatta

SEQ ID NO: 109256 - DNA, 71 bp, Homo sapiens
caactcaaaggtcagtaccaaggattctctataactgccattgaacaatattacaatatttattaaaaaaa

SEQ ID NO: 109257 - DNA, 72 bp, Homo sapiens
gtcagtaccaaggattctctataactgccattgaacaatattacaatatttattaaaaaaatctttccatag

SEQ ID NO: 109258 - DNA, 73 bp, Homo sapiens
tctctataactgccattgaacaatattacaatatttattaaaaaaatctttccataggtattttatcaggtgc

SEQ ID NO: 109259 - DNA, 74 bp, Homo sapiens
tgccattgaacaatattacaatatttattaaaaaaatctttccataggtattttatcaggtgctctacaagaga

SEQ ID NO: 109260 - DNA, 72 bp, Homo sapiens
caatattacaatatttattaaaaaaatctttccataggtattttatcaggtgctctacaagagaactacata

SEQ ID NO: 109261 - DNA, 74 bp, Homo sapiens
atatttattaaaaaaatctttccataggtattttatcaggtgctctacaagagaactacataggcacatatgtg

SEQ ID NO: 109262 - DNA, 73 bp, Homo sapiens
aaaaaatctttccataggtattttatcaggtgctctacaagagaactacataggcacatatgtggtttggagg

SEQ ID NO: 109263 - DNA, 76 bp, Homo sapiens
atctttccataggtattttatcaggtgctctacaagagaactacataggcacatatgtggtttggagggacttaca

SEQ ID NO: 109264 - DNA, 79 bp, Homo sapiens
tgctctacaagagaactacataggcacatatgtggtttggagggacttacagtctcattcaggaagaccttgacaaaca

SEQ ID NO: 109265 - DNA, 76 bp, Homo sapiens
tacaagagaactacataggcacatatgtggtttggagggacttacagtctcattcaggaagaccttgacaaacaaa

SEQ ID NO: 109266 - DNA, 75 bp, Homo sapiens
ataggcacatatgtggtttggagggacttacagtctcattcaggaagaccttgacaaacaaatgctaacataaaa

SEQ ID NO: 109267 - DNA, 73 bp, Homo sapiens
acatatgtggtttggagggacttacagtctcattcaggaagaccttgacaaacaaatgctaacataaaaacca

SEQ ID NO: 109268 - DNA, 73 bp, Homo sapiens
agggacttacagtctcattcaggaagaccttgacaaacaaatgctaacataaaaaccaccagactgctattta

SEQ ID NO: 109269 - DNA, 76 bp, Homo sapiens
ttacagtctcattcaggaagaccttgacaaacaaatgctaacataaaaaccaccagactgctatttagccattctg

SEQ ID NO: 109270 - DNA, 76 bp, Homo sapiens
attcaggaagaccttgacaaacaaatgctaacataaaaaccaccagactgctatttagccattctgtctgggatga

SEQ ID NO: 109271 - DNA, 76 bp, Homo sapiens
cttgacaaacaaatgctaacataaaaaccaccagactgctatttagccattctgtctgggatgactatattaatta

SEQ ID NO: 109272 - DNA, 77 bp, Homo sapiens
aatgctaacataaaaaccaccagactgctatttagccattctgtctgggatgactatattaattattttatgacagc

SEQ ID NO: 109273 - DNA, 75 bp, Homo sapiens
cataaaaaccaccagactgctatttagccattctgtctgggatgactatattaattattttatgacagcgtttct

SEQ ID NO: 109274 - DNA, 76 bp, Homo sapiens
accagactgctatttagccattctgtctgggatgactatattaattattttatgacagcgtttctttccttctgaa

SEQ ID NO: 109275 - DNA, 75 bp, Homo sapiens
ttagccattctgtctgggatgactatattaattattttatgacagcgtttctttccttctgaatggttgttacca

SEQ ID NO: 109276 - DNA, 71 bp, Homo sapiens
gatgactatattaattattttatgacagcgtttctttccttctgaatggttgttaccagcgaggtaccttt

SEQ ID NO: 109277 - DNA, 70 bp, Homo sapiens
aattattttatgacagcgtttctttccttctgaatggttgttaccagcgaggtaccttttgctcaatgtt

SEQ ID NO: 109278 - DNA, 72 bp, Homo sapiens
tttatgacagcgtttctttccttctgaatggttgttaccagcgaggtaccttttgctcaatgtttgcttaaa

SEQ ID NO: 109279 - DNA, 74 bp, Homo sapiens
ctttccttctgaatggttgttaccagcgaggtaccttttgctcaatgtttgcttaaagacatgtctatatatta

SEQ ID NO: 109280 - DNA, 78 bp, Homo sapiens
tgaatggttgttaccagcgaggtaccttttgctcaatgtttgcttaaagacatgtctatatattatctggcaagtcta

SEQ ID NO: 109281 - DNA, 76 bp, Homo sapiens
gaggtaccttttgctcaatgtttgcttaaagacatgtctatatattatctggcaagtctatttcacgtctgtttta

SEQ ID NO: 109282 - DNA, 76 bp, Homo sapiens
ctcaatgtttgcttaaagacatgtctatatattatctggcaagtctatttcacgtctgttttaaagtcatgtcggt

SEQ ID NO: 109283 - DNA, 76 bp, Homo sapiens
gcttaaagacatgtctatatattatctggcaagtctatttcacgtctgttttaaagtcatgtcggttttaagtgca

SEQ ID NO: 109284 - DNA, 80 bp, Homo sapiens
tatatattatctggcaagtctatttcacgtctgttttaaagtcatgtcggttttaagtgcattagatagcactctgatga

SEQ ID NO: 109285 - DNA, 78 bp, Homo sapiens
tatttcacgtctgttttaaagtcatgtcggttttaagtgcattagatagcactctgatgatgttcacagtagtataaa

SEQ ID NO: 109286 - DNA, 77 bp, Homo sapiens
gttttaaagtcatgtcggttttaagtgcattagatagcactctgatgatgttcacagtagtataaaaacatcagctt

SEQ ID NO: 109287 - DNA, 80 bp, Homo sapiens
gtcatgtcggttttaagtgcattagatagcactctgatgatgttcacagtagtataaaaacatcagctttgaaatgttgg

SEQ ID NO: 109288 - DNA, 79 bp, Homo sapiens
ttttaagtgcattagatagcactctgatgatgttcacagtagtataaaaacatcagctttgaaatgttgggctccattt

SEQ ID NO: 109289 - DNA, 74 bp, Homo sapiens
actctgatgatgttcacagtagtataaaaacatcagctttgaaatgttgggctccattttcattaacaagtttt

SEQ ID NO: 109290 - DNA, 68 bp, Homo sapiens
taaaaacatcagctttgaaatgttgggctccattttcattaacaagtttttttctccccttggtccca

SEQ ID NO: 109291 - DNA, 66 bp, Homo sapiens
aaatgttgggctccattttcattaacaagtttttttctccccttggtcccaaagcaacctaacaga

SEQ ID NO: 109292 - DNA, 65 bp, Homo sapiens
attttcattaacaagtttttttctccccttggtcccaaagcaacctaacagagaacagagggtag

SEQ ID NO: 109293 - DNA, 65 bp, Homo sapiens
attaacaagtttttttctccccttggtcccaaagcaacctaacagagaacagagggtaggaccaa

SEQ ID NO: 109294 - DNA, 74 bp, Homo sapiens
ttggtcccaaagcaacctaacagagaacagagggtaggaccaagagtgaggagtgctgggtctgccaggtggag

SEQ ID NO: 109295 - DNA, 76 bp, Homo sapiens
taacagagaacagagggtaggaccaagagtgaggagtgctgggtctgccaggtggagggtgctgggttcgtctcag

SEQ ID NO: 109296 - DNA, 76 bp, Homo sapiens
agagggtaggaccaagagtgaggagtgctgggtctgccaggtggagggtgctgggttcgtctcagtgggctccaga

SEQ ID NO: 109297 - DNA, 77 bp, Homo sapiens
accaagagtgaggagtgctgggtctgccaggtggagggtgctgggttcgtctcagtgggctccagagccaggtcgcc

SEQ ID NO: 109298 - DNA, 78 bp, Homo sapiens
agtgctgggtctgccaggtggagggtgctgggttcgtctcagtgggctccagagccaggtcgcctgccccagaacaca

SEQ ID NO: 109299 - DNA, 79 bp, Homo sapiens
gggtctgccaggtggagggtgctgggttcgtctcagtgggctccagagccaggtcgcctgccccagaacacagctctgc

SEQ ID NO: 109300 - DNA, 82 bp, Homo sapiens
tggagggtgctgggttcgtctcagtgggctccagagccaggtcgcctgccccagaacacagctctgcccctgctagcgcatg

SEQ ID NO: 109301 - DNA, 80 bp, Homo sapiens
ctgggttcgtctcagtgggctccagagccaggtcgcctgccccagaacacagctctgcccctgctagcgcatggccgaaa

SEQ ID NO: 109302 - DNA, 83 bp, Homo sapiens
gtgggctccagagccaggtcgcctgccccagaacacagctctgcccctgctagcgcatggccgaaagcgagctacttgctgta

SEQ ID NO: 109303 - DNA, 82 bp, Homo sapiens
tccagagccaggtcgcctgccccagaacacagctctgcccctgctagcgcatggccgaaagcgagctacttgctgtaaaatg

SEQ ID NO: 109304 - DNA, 79 bp, Homo sapiens
gcctgccccagaacacagctctgcccctgctagcgcatggccgaaagcgagctacttgctgtaaaatgggattaaacaa

SEQ ID NO: 109305 - DNA, 78 bp, Homo sapiens
agaacacagctctgcccctgctagcgcatggccgaaagcgagctacttgctgtaaaatgggattaaacaacacgaatc

SEQ ID NO: 109306 - DNA, 76 bp, Homo sapiens
tagcgcatggccgaaagcgagctacttgctgtaaaatgggattaaacaacacgaatcctgcaggttggtggaagga

SEQ ID NO: 109307 - DNA, 71 bp, Homo sapiens
ccgaaagcgagctacttgctgtaaaatgggattaaacaacacgaatcctgcaggttggtggaaggattaaa

SEQ ID NO: 109308 - DNA, 74 bp, Homo sapiens
agctacttgctgtaaaatgggattaaacaacacgaatcctgcaggttggtggaaggattaaatgagtcaatata

SEQ ID NO: 109309 - DNA, 74 bp, Homo sapiens
ttgctgtaaaatgggattaaacaacacgaatcctgcaggttggtggaaggattaaatgagtcaatatacataaa

SEQ ID NO: 109310 - DNA, 74 bp, Homo sapiens
attaaacaacacgaatcctgcaggttggtggaaggattaaatgagtcaatatacataaagcgcttatgtataag

SEQ ID NO: 109311 - DNA, 78 bp, Homo sapiens
tcctgcaggttggtggaaggattaaatgagtcaatatacataaagcgcttatgtataagtacctggcttgacagcaaa

SEQ ID NO: 109312 - DNA, 78 bp, Homo sapiens
gaaggattaaatgagtcaatatacataaagcgcttatgtataagtacctggcttgacagcaaaggctatataaagatc

SEQ ID NO: 109313 - DNA, 77 bp, Homo sapiens
atatacataaagcgcttatgtataagtacctggcttgacagcaaaggctatataaagatctgctattattactttgg

SEQ ID NO: 109314 - DNA, 78 bp, Homo sapiens
atgtataagtacctggcttgacagcaaaggctatataaagatctgctattattactttggtcttggctttgtcactga

SEQ ID NO: 109315 - DNA, 79 bp, Homo sapiens
acctggcttgacagcaaaggctatataaagatctgctattattactttggtcttggctttgtcactgaagagcaggctg

SEQ ID NO: 109316 - DNA, 78 bp, Homo sapiens
aaaggctatataaagatctgctattattactttggtcttggctttgtcactgaagagcaggctgtggagccccactga

SEQ ID NO: 109317 - DNA, 81 bp, Homo sapiens
tatataaagatctgctattattactttggtcttggctttgtcactgaagagcaggctgtggagccccactgagtctcagtc

SEQ ID NO: 109318 - DNA, 79 bp, Homo sapiens
ctattattactttggtcttggctttgtcactgaagagcaggctgtggagccccactgagtctcagtctcttcatataaa

SEQ ID NO: 109319 - DNA, 79 bp, Homo sapiens
attactttggtcttggctttgtcactgaagagcaggctgtggagccccactgagtctcagtctcttcatataaacagtg

SEQ ID NO: 109320 - DNA, 81 bp, Homo sapiens
gctttgtcactgaagagcaggctgtggagccccactgagtctcagtctcttcatataaacagtggacgaagttctctggaa

SEQ ID NO: 109321 - DNA, 79 bp, Homo sapiens
actgaagagcaggctgtggagccccactgagtctcagtctcttcatataaacagtggacgaagttctctggaaccatta

SEQ ID NO: 109322 - DNA, 77 bp, Homo sapiens
gctgtggagccccactgagtctcagtctcttcatataaacagtggacgaagttctctggaaccattagccttgtcgt

SEQ ID NO: 109323 - DNA, 73 bp, Homo sapiens
cccactgagtctcagtctcttcatataaacagtggacgaagttctctggaaccattagccttgtcgttttctt

SEQ ID NO: 109324 - DNA, 72 bp, Homo sapiens
agtctcagtctcttcatataaacagtggacgaagttctctggaaccattagccttgtcgttttctttctaaa

SEQ ID NO: 109325 - DNA, 72 bp, Homo sapiens
tcttcatataaacagtggacgaagttctctggaaccattagccttgtcgttttctttctaaataaggcatct

SEQ ID NO: 109326 - DNA, 69 bp, Homo sapiens
aagttctctggaaccattagccttgtcgttttctttctaaataaggcatcttgcaagtacccagggaaa

SEQ ID NO: 109327 - DNA, 69 bp, Homo sapiens
aaccattagccttgtcgttttctttctaaataaggcatcttgcaagtacccagggaaaaatcacaccaa

SEQ ID NO: 109328 - DNA, 71 bp, Homo sapiens
tagccttgtcgttttctttctaaataaggcatcttgcaagtacccagggaaaaatcacaccaaggaagaga

SEQ ID NO: 109329 - DNA, 71 bp, Homo sapiens
ttctttctaaataaggcatcttgcaagtacccagggaaaaatcacaccaaggaagagaccacacaatttat

SEQ ID NO: 109330 - DNA, 72 bp, Homo sapiens
taaataaggcatcttgcaagtacccagggaaaaatcacaccaaggaagagaccacacaatttattcaccaac

SEQ ID NO: 109331 - DNA, 73 bp, Homo sapiens
atcttgcaagtacccagggaaaaatcacaccaaggaagagaccacacaatttattcaccaacgcaggccagtg

SEQ ID NO: 109332 - DNA, 75 bp, Homo sapiens
aaaatcacaccaaggaagagaccacacaatttattcaccaacgcaggccagtgggcataagccaggccagtatgg

SEQ ID NO: 109333 - DNA, 75 bp, Homo sapiens
aagagaccacacaatttattcaccaacgcaggccagtgggcataagccaggccagtatgggtcaccccacattta

SEQ ID NO: 109334 - DNA, 75 bp, Homo sapiens
acaatttattcaccaacgcaggccagtgggcataagccaggccagtatgggtcaccccacatttatcaggtccta

SEQ ID NO: 109335 - DNA, 76 bp, Homo sapiens
ttattcaccaacgcaggccagtgggcataagccaggccagtatgggtcaccccacatttatcaggtcctacgtagc

SEQ ID NO: 109336 - DNA, 73 bp, Homo sapiens
aggccagtgggcataagccaggccagtatgggtcaccccacatttatcaggtcctacgtagcctggggatggg

SEQ ID NO: 109337 - DNA, 74 bp, Homo sapiens
cataagccaggccagtatgggtcaccccacatttatcaggtcctacgtagcctggggatggggtattctgcctg

SEQ ID NO: 109338 - DNA, 74 bp, Homo sapiens
aggccagtatgggtcaccccacatttatcaggtcctacgtagcctggggatggggtattctgcctgtgaagata

SEQ ID NO: 109339 - DNA, 75 bp, Homo sapiens
tatgggtcaccccacatttatcaggtcctacgtagcctggggatggggtattctgcctgtgaagataggaggagc

SEQ ID NO: 109340 - DNA, 72 bp, Homo sapiens
aggtcctacgtagcctggggatggggtattctgcctgtgaagataggaggagctgggtcttgtttcaaatta

SEQ ID NO: 109341 - DNA, 72 bp, Homo sapiens
cctggggatggggtattctgcctgtgaagataggaggagctgggtcttgtttcaaattatgagggtggtatt

SEQ ID NO: 109342 - DNA, 73 bp, Homo sapiens
gggtattctgcctgtgaagataggaggagctgggtcttgtttcaaattatgagggtggtatttaaatagcacc

SEQ ID NO: 109343 - DNA, 74 bp, Homo sapiens
ttctgcctgtgaagataggaggagctgggtcttgtttcaaattatgagggtggtatttaaatagcacccatgtt

SEQ ID NO: 109344 - DNA, 70 bp, Homo sapiens
attatgagggtggtatttaaatagcacccatgtttggcttcacacttttcccgaaatctctctttattcc

SEQ ID NO: 109345 - DNA, 73 bp, Homo sapiens
tatttaaatagcacccatgtttggcttcacacttttcccgaaatctctctttattcccgtctcataggcagaa

SEQ ID NO: 109346 - DNA, 73 bp, Homo sapiens
acccatgtttggcttcacacttttcccgaaatctctctttattcccgtctcataggcagaatcaggaccaaca

SEQ ID NO: 109347 - DNA, 75 bp, Homo sapiens
acacttttcccgaaatctctctttattcccgtctcataggcagaatcaggaccaacatcactgaacaaagagaca

SEQ ID NO: 109348 - DNA, 74 bp, Homo sapiens
aaatctctctttattcccgtctcataggcagaatcaggaccaacatcactgaacaaagagacacgaattaaaaa

SEQ ID NO: 109349 - DNA, 74 bp, Homo sapiens
tttattcccgtctcataggcagaatcaggaccaacatcactgaacaaagagacacgaattaaaaatcagttgtt

SEQ ID NO: 109350 - DNA, 76 bp, Homo sapiens
tctcataggcagaatcaggaccaacatcactgaacaaagagacacgaattaaaaatcagttgtttggattttcatt

SEQ ID NO: 109351 - DNA, 75 bp, Homo sapiens
agaatcaggaccaacatcactgaacaaagagacacgaattaaaaatcagttgtttggattttcatttctgctgag

SEQ ID NO: 109352 - DNA, 74 bp, Homo sapiens
ccaacatcactgaacaaagagacacgaattaaaaatcagttgtttggattttcatttctgctgagtgttctctt

SEQ ID NO: 109353 - DNA, 71 bp, Homo sapiens
actgaacaaagagacacgaattaaaaatcagttgtttggattttcatttctgctgagtgttctcttttaaa

SEQ ID NO: 109354 - DNA, 72 bp, Homo sapiens
ttaaaaatcagttgtttggattttcatttctgctgagtgttctcttttaaaatgacctctgctatcccgagg

SEQ ID NO: 109355 - DNA, 71 bp, Homo sapiens
ttgtttggattttcatttctgctgagtgttctcttttaaaatgacctctgctatcccgagggaaacagttt

SEQ ID NO: 109356 - DNA, 71 bp, Homo sapiens
ttttcatttctgctgagtgttctcttttaaaatgacctctgctatcccgagggaaacagttttccccatta

SEQ ID NO: 109357 - DNA, 67 bp, Homo sapiens
agtgttctcttttaaaatgacctctgctatcccgagggaaacagttttccccattactgacggaaag

SEQ ID NO: 109358 - DNA, 68 bp, Homo sapiens
ttttaaaatgacctctgctatcccgagggaaacagttttccccattactgacggaaagtgaagtctcc

SEQ ID NO: 109359 - DNA, 71 bp, Homo sapiens
aatgacctctgctatcccgagggaaacagttttccccattactgacggaaagtgaagtctcctcagaagga

SEQ ID NO: 109360 - DNA, 71 bp, Homo sapiens
aagtctcctcagaaggaggatttcccttccagaaattcaaaaccagaaaaactatcaagacactgtgattg

SEQ ID NO: 109361 - DNA, 73 bp, Homo sapiens
agaaggaggatttcccttccagaaattcaaaaccagaaaaactatcaagacactgtgattgtgtgccagtgaa

SEQ ID NO: 109362 - DNA, 72 bp, Homo sapiens
atttcccttccagaaattcaaaaccagaaaaactatcaagacactgtgattgtgtgccagtgaacagccgtt

SEQ ID NO: 109363 - DNA, 74 bp, Homo sapiens
aaaccagaaaaactatcaagacactgtgattgtgtgccagtgaacagccgtttccaaagatttgaatggaataa

SEQ ID NO: 109364 - DNA, 73 bp, Homo sapiens
aaaaactatcaagacactgtgattgtgtgccagtgaacagccgtttccaaagatttgaatggaataatttgtt

SEQ ID NO: 109365 - DNA, 73 bp, Homo sapiens
aagacactgtgattgtgtgccagtgaacagccgtttccaaagatttgaatggaataatttgtttttcatggtt

SEQ ID NO: 109366 - DNA, 70 bp, Homo sapiens
gtgaacagccgtttccaaagatttgaatggaataatttgtttttcatggtttgtaggtagcagataaaac

SEQ ID NO: 109367 - DNA, 69 bp, Homo sapiens
ccgtttccaaagatttgaatggaataatttgtttttcatggtttgtaggtagcagataaaacttacatg

SEQ ID NO: 109368 - DNA, 69 bp, Homo sapiens
aatttgtttttcatggtttgtaggtagcagataaaacttacatggaaaaatggacaagaagaaatggaa

SEQ ID NO: 109369 - DNA, 75 bp, Homo sapiens
gcagataaaacttacatggaaaaatggacaagaagaaatggaaaataagacacagaacctggaatcatcagctta

SEQ ID NO: 109370 - DNA, 74 bp, Homo sapiens
catggaaaaatggacaagaagaaatggaaaataagacacagaacctggaatcatcagcttaaaaagcaatttgc

SEQ ID NO: 109371 - DNA, 76 bp, Homo sapiens
gaaatggaaaataagacacagaacctggaatcatcagcttaaaaagcaatttgctttatttcagctgtgcccagaa

SEQ ID NO: 109372 - DNA, 75 bp, Homo sapiens
aaaataagacacagaacctggaatcatcagcttaaaaagcaatttgctttatttcagctgtgcccagaaatagct

SEQ ID NO: 109373 - DNA, 75 bp, Homo sapiens
aatcatcagcttaaaaagcaatttgctttatttcagctgtgcccagaaatagcttgaggttaccaagtgagtatt

SEQ ID NO: 109374 - DNA, 74 bp, Homo sapiens
taaaaagcaatttgctttatttcagctgtgcccagaaatagcttgaggttaccaagtgagtatttctactggaa

SEQ ID NO: 109375 - DNA, 79 bp, Homo sapiens
ttgctttatttcagctgtgcccagaaatagcttgaggttaccaagtgagtatttctactggaagcatcagctacaatta

SEQ ID NO: 109376 - DNA, 79 bp, Homo sapiens
ttatttcagctgtgcccagaaatagcttgaggttaccaagtgagtatttctactggaagcatcagctacaattaggtca

SEQ ID NO: 109377 - DNA, 76 bp, Homo sapiens
ccagaaatagcttgaggttaccaagtgagtatttctactggaagcatcagctacaattaggtcaccaacttagaga

SEQ ID NO: 109378 - DNA, 75 bp, Homo sapiens
aatagcttgaggttaccaagtgagtatttctactggaagcatcagctacaattaggtcaccaacttagagaagac

SEQ ID NO: 109379 - DNA, 74 bp, Homo sapiens
taccaagtgagtatttctactggaagcatcagctacaattaggtcaccaacttagagaagacgtaggcggaaat

SEQ ID NO: 109380 - DNA, 72 bp, Homo sapiens
agtatttctactggaagcatcagctacaattaggtcaccaacttagagaagacgtaggcggaaatttaaaca

SEQ ID NO: 109381 - DNA, 70 bp, Homo sapiens
agctacaattaggtcaccaacttagagaagacgtaggcggaaatttaaacaccaagtctatcattataaa

SEQ ID NO: 109382 - DNA, 68 bp, Homo sapiens
attaggtcaccaacttagagaagacgtaggcggaaatttaaacaccaagtctatcattataaaggtac

SEQ ID NO: 109383 - DNA, 70 bp, Homo sapiens
caacttagagaagacgtaggcggaaatttaaacaccaagtctatcattataaaggtactttatcagcaaa

SEQ ID NO: 109384 - DNA, 71 bp, Homo sapiens
aagacgtaggcggaaatttaaacaccaagtctatcattataaaggtactttatcagcaaaactgtcagcta

SEQ ID NO: 109385 - DNA, 73 bp, Homo sapiens
ggaaatttaaacaccaagtctatcattataaaggtactttatcagcaaaactgtcagctatggatggttgact

SEQ ID NO: 109386 - DNA, 75 bp, Homo sapiens
tcagcaaaactgtcagctatggatggttgacttaaaattattaagaggctaaaatatcaaaggagaagacaagtc

SEQ ID NO: 109387 - DNA, 70 bp, Homo sapiens
atggatggttgacttaaaattattaagaggctaaaatatcaaaggagaagacaagtctgtggaagggtcc

SEQ ID NO: 109388 - DNA, 74 bp, Homo sapiens
tattaagaggctaaaatatcaaaggagaagacaagtctgtggaagggtccctcctaagatcaacaacagctgag

SEQ ID NO: 109389 - DNA, 72 bp, Homo sapiens
aaaatatcaaaggagaagacaagtctgtggaagggtccctcctaagatcaacaacagctgagggtctaaaca

SEQ ID NO: 109390 - DNA, 73 bp, Homo sapiens
agaagacaagtctgtggaagggtccctcctaagatcaacaacagctgagggtctaaacatgaggaagcggctt

SEQ ID NO: 109391 - DNA, 73 bp, Homo sapiens
acaagtctgtggaagggtccctcctaagatcaacaacagctgagggtctaaacatgaggaagcggctttaata

SEQ ID NO: 109392 - DNA, 75 bp, Homo sapiens
aagggtccctcctaagatcaacaacagctgagggtctaaacatgaggaagcggctttaatagcattgcttgtgga

SEQ ID NO: 109393 - DNA, 76 bp, Homo sapiens
taagatcaacaacagctgagggtctaaacatgaggaagcggctttaatagcattgcttgtggagttcgttttgaag

SEQ ID NO: 109394 - DNA, 71 bp, Homo sapiens
agggtctaaacatgaggaagcggctttaatagcattgcttgtggagttcgttttgaagtccttaacttcca

SEQ ID NO: 109395 - DNA, 74 bp, Homo sapiens
aacatgaggaagcggctttaatagcattgcttgtggagttcgttttgaagtccttaacttccacgccaatctga

SEQ ID NO: 109396 - DNA, 73 bp, Homo sapiens
ttgtggagttcgttttgaagtccttaacttccacgccaatctgatgtgagaaaaatagatgcttccctttgga

SEQ ID NO: 109397 - DNA, 73 bp, Homo sapiens
tttgaagtccttaacttccacgccaatctgatgtgagaaaaatagatgcttccctttggagtccttgttccaa

SEQ ID NO: 109398 - DNA, 74 bp, Homo sapiens
acgccaatctgatgtgagaaaaatagatgcttccctttggagtccttgttccaaccatggaaacctgggacaca

SEQ ID NO: 109399 - DNA, 71 bp, Homo sapiens
aaaaatagatgcttccctttggagtccttgttccaaccatggaaacctgggacacacacttaattctgctg

SEQ ID NO: 109400 - DNA, 74 bp, Homo sapiens
ttccctttggagtccttgttccaaccatggaaacctgggacacacacttaattctgctggtgacagaatgacaa

SEQ ID NO: 109401 - DNA, 75 bp, Homo sapiens
tccttgttccaaccatggaaacctgggacacacacttaattctgctggtgacagaatgacaaatctgttattgtt

SEQ ID NO: 109402 - DNA, 74 bp, Homo sapiens
aaccatggaaacctgggacacacacttaattctgctggtgacagaatgacaaatctgttattgtttaggataag

SEQ ID NO: 109403 - DNA, 79 bp, Homo sapiens
acctgggacacacacttaattctgctggtgacagaatgacaaatctgttattgtttaggataagtgaggcatggcaata

SEQ ID NO: 109404 - DNA, 79 bp, Homo sapiens
acacttaattctgctggtgacagaatgacaaatctgttattgtttaggataagtgaggcatggcaatactcttctgaat

SEQ ID NO: 109405 - DNA, 76 bp, Homo sapiens
acagaatgacaaatctgttattgtttaggataagtgaggcatggcaatactcttctgaatttcggtgaaaattaga

SEQ ID NO: 109406 - DNA, 76 bp, Homo sapiens
gacaaatctgttattgtttaggataagtgaggcatggcaatactcttctgaatttcggtgaaaattagatgtgaaa

SEQ ID NO: 109407 - DNA, 76 bp, Homo sapiens
tattgtttaggataagtgaggcatggcaatactcttctgaatttcggtgaaaattagatgtgaaaatctgtaatgg

SEQ ID NO: 109408 - DNA, 77 bp, Homo sapiens
taagtgaggcatggcaatactcttctgaatttcggtgaaaattagatgtgaaaatctgtaatggtactattcaagct

SEQ ID NO: 109409 - DNA, 75 bp, Homo sapiens
aggcatggcaatactcttctgaatttcggtgaaaattagatgtgaaaatctgtaatggtactattcaagcttccc

SEQ ID NO: 109410 - DNA, 71 bp, Homo sapiens
ctcttctgaatttcggtgaaaattagatgtgaaaatctgtaatggtactattcaagcttccccttaaacaa

SEQ ID NO: 109411 - DNA, 73 bp, Homo sapiens
ttcggtgaaaattagatgtgaaaatctgtaatggtactattcaagcttccccttaaacaagaaacattgagca

SEQ ID NO: 109412 - DNA, 71 bp, Homo sapiens
tgtaatggtactattcaagcttccccttaaacaagaaacattgagcaaataaaaatatggagtccctggac

SEQ ID NO: 109413 - DNA, 70 bp, Homo sapiens
attcaagcttccccttaaacaagaaacattgagcaaataaaaatatggagtccctggacctattctagaa

SEQ ID NO: 109414 - DNA, 72 bp, Homo sapiens
cttaaacaagaaacattgagcaaataaaaatatggagtccctggacctattctagaagcctggtgccaagga

SEQ ID NO: 109415 - DNA, 72 bp, Homo sapiens
agaaacattgagcaaataaaaatatggagtccctggacctattctagaagcctggtgccaaggaatagattt

SEQ ID NO: 109416 - DNA, 78 bp, Homo sapiens
ctggacctattctagaagcctggtgccaaggaatagattttgcatggatcagcttaagctcacccaggaatggattta

SEQ ID NO: 109417 - DNA, 75 bp, Homo sapiens
tggtgccaaggaatagattttgcatggatcagcttaagctcacccaggaatggatttaactttctcctggaaaat

SEQ ID NO: 109418 - DNA, 72 bp, Homo sapiens
aaggaatagattttgcatggatcagcttaagctcacccaggaatggatttaactttctcctggaaaatttat

SEQ ID NO: 109419 - DNA, 72 bp, Homo sapiens
attttgcatggatcagcttaagctcacccaggaatggatttaactttctcctggaaaatttatttgaaagtc

SEQ ID NO: 109420 - DNA, 69 bp, Homo sapiens
ggatcagcttaagctcacccaggaatggatttaactttctcctggaaaatttatttgaaagtccaaaaa

SEQ ID NO: 109421 - DNA, 65 bp, Homo sapiens
aagctcacccaggaatggatttaactttctcctggaaaatttatttgaaagtccaaaaaaaagag

SEQ ID NO: 109422 - DNA, 65 bp, Homo sapiens
aggaatggatttaactttctcctggaaaatttatttgaaagtccaaaaaaaagagtattcattat

SEQ ID NO: 109423 - DNA, 68 bp, Homo sapiens
tttctcctggaaaatttatttgaaagtccaaaaaaaagagtattcattatttatggatttagtaatga

SEQ ID NO: 109424 - DNA, 68 bp, Homo sapiens
cctggaaaatttatttgaaagtccaaaaaaaagagtattcattatttatggatttagtaatgactaga

SEQ ID NO: 109425 - DNA, 70 bp, Homo sapiens
tgaaagtccaaaaaaaagagtattcattatttatggatttagtaatgactagattttacaaatatttgga

SEQ ID NO: 109426 - DNA, 73 bp, Homo sapiens
aaaaaaagagtattcattatttatggatttagtaatgactagattttacaaatatttggatccacatgagcca

SEQ ID NO: 109427 - DNA, 78 bp, Homo sapiens
gagtattcattatttatggatttagtaatgactagattttacaaatatttggatccacatgagccatggaattcagaa

SEQ ID NO: 109428 - DNA, 77 bp, Homo sapiens
ttatggatttagtaatgactagattttacaaatatttggatccacatgagccatggaattcagaataatattatttc

SEQ ID NO: 109429 - DNA, 77 bp, Homo sapiens
gactagattttacaaatatttggatccacatgagccatggaattcagaataatattatttcctgccatattggtaac

SEQ ID NO: 109430 - DNA, 77 bp, Homo sapiens
acaaatatttggatccacatgagccatggaattcagaataatattatttcctgccatattggtaactgatttttcaa

SEQ ID NO: 109431 - DNA, 74 bp, Homo sapiens
gccatggaattcagaataatattatttcctgccatattggtaactgatttttcaaagaagattttacttgatag

SEQ ID NO: 109432 - DNA, 72 bp, Homo sapiens
gaattcagaataatattatttcctgccatattggtaactgatttttcaaagaagattttacttgatagttaa

SEQ ID NO: 109433 - DNA, 70 bp, Homo sapiens
atattatttcctgccatattggtaactgatttttcaaagaagattttacttgatagttaatttaatccat

SEQ ID NO: 109434 - DNA, 72 bp, Homo sapiens
tcctgccatattggtaactgatttttcaaagaagattttacttgatagttaatttaatccattttgcttgat

SEQ ID NO: 109435 - DNA, 71 bp, Homo sapiens
tcaaagaagattttacttgatagttaatttaatccattttgcttgattattcaaatgttccaaaacaccca

SEQ ID NO: 109436 - DNA, 69 bp, Homo sapiens
tttaatccattttgcttgattattcaaatgttccaaaacacccagtggtggcctatttttttttgtctc

SEQ ID NO: 109437 - DNA, 69 bp, Homo sapiens
ttttgcttgattattcaaatgttccaaaacacccagtggtggcctatttttttttgtctcttttcacta

SEQ ID NO: 109438 - DNA, 71 bp, Homo sapiens
tcaaatgttccaaaacacccagtggtggcctatttttttttgtctcttttcactataataatatggcttga

SEQ ID NO: 109439 - DNA, 71 bp, Homo sapiens
ccaaaacacccagtggtggcctatttttttttgtctcttttcactataataatatggcttgatgtttcaca

SEQ ID NO: 109440 - DNA, 75 bp, Homo sapiens
cagtggtggcctatttttttttgtctcttttcactataataatatggcttgatgtttcacaatggctgtatctgt

SEQ ID NO: 109441 - DNA, 73 bp, Homo sapiens
ggcctatttttttttgtctcttttcactataataatatggcttgatgtttcacaatggctgtatctgtttcct

SEQ ID NO: 109442 - DNA, 77 bp, Homo sapiens
ttgtctcttttcactataataatatggcttgatgtttcacaatggctgtatctgtttccttagctacaaaatggttc

SEQ ID NO: 109443 - DNA, 77 bp, Homo sapiens
ttttcactataataatatggcttgatgtttcacaatggctgtatctgtttccttagctacaaaatggttctgagacc

SEQ ID NO: 109444 - DNA, 76 bp, Homo sapiens
taataatatggcttgatgtttcacaatggctgtatctgtttccttagctacaaaatggttctgagaccggtctttc

SEQ ID NO: 109445 - DNA, 76 bp, Homo sapiens
cttgatgtttcacaatggctgtatctgtttccttagctacaaaatggttctgagaccggtctttctgtatctgtag

SEQ ID NO: 109446 - DNA, 80 bp, Homo sapiens
tatctgtttccttagctacaaaatggttctgagaccggtctttctgtatctgtaggtcattgccatcagtgcagcaagga

SEQ ID NO: 109447 - DNA, 78 bp, Homo sapiens
tccttagctacaaaatggttctgagaccggtctttctgtatctgtaggtcattgccatcagtgcagcaaggagccccc

SEQ ID NO: 109448 - DNA, 77 bp, Homo sapiens
agaccggtctttctgtatctgtaggtcattgccatcagtgcagcaaggagcccccctcaacaaatctctcttcttta

SEQ ID NO: 109449 - DNA, 82 bp, Homo sapiens
ttctgtatctgtaggtcattgccatcagtgcagcaaggagcccccctcaacaaatctctcttctttatatggggctgatgct

SEQ ID NO: 109450 - DNA, 80 bp, Homo sapiens
taggtcattgccatcagtgcagcaaggagcccccctcaacaaatctctcttctttatatggggctgatgcttggccaaaa

SEQ ID NO: 109451 - DNA, 81 bp, Homo sapiens
attgccatcagtgcagcaaggagcccccctcaacaaatctctcttctttatatggggctgatgcttggccaaaagcctgca

SEQ ID NO: 109452 - DNA, 75 bp, Homo sapiens
agcaaggagcccccctcaacaaatctctcttctttatatggggctgatgcttggccaaaagcctgcaagggtgag

SEQ ID NO: 109453 - DNA, 79 bp, Homo sapiens
cccctcaacaaatctctcttctttatatggggctgatgcttggccaaaagcctgcaagggtgagtctcagaacagctgc

SEQ ID NO: 109454 - DNA, 78 bp, Homo sapiens
acaaatctctcttctttatatggggctgatgcttggccaaaagcctgcaagggtgagtctcagaacagctgctaaaaa

SEQ ID NO: 109455 - DNA, 83 bp, Homo sapiens
ttctttatatggggctgatgcttggccaaaagcctgcaagggtgagtctcagaacagctgctaaaaatgcagctggatagtga

SEQ ID NO: 109456 - DNA, 86 bp, Homo sapiens
ggctgatgcttggccaaaagcctgcaagggtgagtctcagaacagctgctaaaaatgcagctggatagtgagacagaagtgctcaa

SEQ ID NO: 109457 - DNA, 84 bp, Homo sapiens
ttggccaaaagcctgcaagggtgagtctcagaacagctgctaaaaatgcagctggatagtgagacagaagtgctcaatgccagt

SEQ ID NO: 109458 - DNA, 84 bp, Homo sapiens
aaaagcctgcaagggtgagtctcagaacagctgctaaaaatgcagctggatagtgagacagaagtgctcaatgccagttcgctg

SEQ ID NO: 109459 - DNA, 87 bp, Homo sapiens
tgagtctcagaacagctgctaaaaatgcagctggatagtgagacagaagtgctcaatgccagttcgctgggcacattcgttagtaca

SEQ ID NO: 109460 - DNA, 85 bp, Homo sapiens
agaacagctgctaaaaatgcagctggatagtgagacagaagtgctcaatgccagttcgctgggcacattcgttagtacatgccaa

SEQ ID NO: 109461 - DNA, 85 bp, Homo sapiens
ctaaaaatgcagctggatagtgagacagaagtgctcaatgccagttcgctgggcacattcgttagtacatgccaatgctggagga

SEQ ID NO: 109462 - DNA, 85 bp, Homo sapiens
ctggatagtgagacagaagtgctcaatgccagttcgctgggcacattcgttagtacatgccaatgctggaggagccgtacagaca

SEQ ID NO: 109463 - DNA, 82 bp, Homo sapiens
aagtgctcaatgccagttcgctgggcacattcgttagtacatgccaatgctggaggagccgtacagacagaaggcacttcat

SEQ ID NO: 109464 - DNA, 83 bp, Homo sapiens
atgccagttcgctgggcacattcgttagtacatgccaatgctggaggagccgtacagacagaaggcacttcatttcatccgca

SEQ ID NO: 109465 - DNA, 81 bp, Homo sapiens
tgggcacattcgttagtacatgccaatgctggaggagccgtacagacagaaggcacttcatttcatccgcaggtcactaaa

SEQ ID NO: 109466 - DNA, 79 bp, Homo sapiens
ttcgttagtacatgccaatgctggaggagccgtacagacagaaggcacttcatttcatccgcaggtcactaaatgcctt

SEQ ID NO: 109467 - DNA, 79 bp, Homo sapiens
atgccaatgctggaggagccgtacagacagaaggcacttcatttcatccgcaggtcactaaatgcctttgtccatttcc

SEQ ID NO: 109468 - DNA, 77 bp, Homo sapiens
gtacagacagaaggcacttcatttcatccgcaggtcactaaatgcctttgtccatttcctgcctttcctttatcaca

SEQ ID NO: 109469 - DNA, 76 bp, Homo sapiens
aaggcacttcatttcatccgcaggtcactaaatgcctttgtccatttcctgcctttcctttatcacatggatatta

SEQ ID NO: 109470 - DNA, 77 bp, Homo sapiens
atttcatccgcaggtcactaaatgcctttgtccatttcctgcctttcctttatcacatggatattagcgcttatcta

SEQ ID NO: 109471 - DNA, 78 bp, Homo sapiens
tcactaaatgcctttgtccatttcctgcctttcctttatcacatggatattagcgcttatctactcaagtcattataa

SEQ ID NO: 109472 - DNA, 75 bp, Homo sapiens
cctttgtccatttcctgcctttcctttatcacatggatattagcgcttatctactcaagtcattataactataaa

SEQ ID NO: 109473 - DNA, 77 bp, Homo sapiens
tttcctgcctttcctttatcacatggatattagcgcttatctactcaagtcattataactataaatcgctaccatct

SEQ ID NO: 109474 - DNA, 77 bp, Homo sapiens
gcctttcctttatcacatggatattagcgcttatctactcaagtcattataactataaatcgctaccatctttctta

SEQ ID NO: 109475 - DNA, 76 bp, Homo sapiens
cacatggatattagcgcttatctactcaagtcattataactataaatcgctaccatctttcttaccaaggatttag

SEQ ID NO: 109476 - DNA, 75 bp, Homo sapiens
tagcgcttatctactcaagtcattataactataaatcgctaccatctttcttaccaaggatttagtcttttgtgc

SEQ ID NO: 109477 - DNA, 75 bp, Homo sapiens
tcattataactataaatcgctaccatctttcttaccaaggatttagtcttttgtgccacatacaaggtgtagaga

SEQ ID NO: 109478 - DNA, 73 bp, Homo sapiens
taactataaatcgctaccatctttcttaccaaggatttagtcttttgtgccacatacaaggtgtagagaattc

SEQ ID NO: 109479 - DNA, 73 bp, Homo sapiens
aaggatttagtcttttgtgccacatacaaggtgtagagaattcttctagggatagacttctaagtccaagcta

SEQ ID NO: 109480 - DNA, 71 bp, Homo sapiens
acatacaaggtgtagagaattcttctagggatagacttctaagtccaagctacccagggaactaccattta

SEQ ID NO: 109481 - DNA, 74 bp, Homo sapiens
tgtagagaattcttctagggatagacttctaagtccaagctacccagggaactaccatttacatcattcattaa

SEQ ID NO: 109482 - DNA, 71 bp, Homo sapiens
ttcttctagggatagacttctaagtccaagctacccagggaactaccatttacatcattcattaagtaaaa

SEQ ID NO: 109483 - DNA, 71 bp, Homo sapiens
gatagacttctaagtccaagctacccagggaactaccatttacatcattcattaagtaaaataaagattgt

SEQ ID NO: 109484 - DNA, 70 bp, Homo sapiens
acccagggaactaccatttacatcattcattaagtaaaataaagattgttgttgatgaaggggtagctct

SEQ ID NO: 109485 - DNA, 71 bp, Homo sapiens
accatttacatcattcattaagtaaaataaagattgttgttgatgaaggggtagctcttactagggtccca

SEQ ID NO: 109486 - DNA, 71 bp, Homo sapiens
tacatcattcattaagtaaaataaagattgttgttgatgaaggggtagctcttactagggtcccagggtta

SEQ ID NO: 109487 - DNA, 69 bp, Homo sapiens
gtaaaataaagattgttgttgatgaaggggtagctcttactagggtcccagggttagtccaaggctcaa

SEQ ID NO: 109488 - DNA, 71 bp, Homo sapiens
ataaagattgttgttgatgaaggggtagctcttactagggtcccagggttagtccaaggctcaattatgaa

SEQ ID NO: 109489 - DNA, 70 bp, Homo sapiens
ttgttgatgaaggggtagctcttactagggtcccagggttagtccaaggctcaattatgaagtcaaaagg

SEQ ID NO: 109490 - DNA, 70 bp, Homo sapiens
gggtagctcttactagggtcccagggttagtccaaggctcaattatgaagtcaaaaggggtgtgtgtgtg

SEQ ID NO: 109491 - DNA, 70 bp, Homo sapiens
aaagagaaagaaagggaaggaggagagagtttggattgggaaagttaccatccactctcctcttagcata

SEQ ID NO: 109492 - DNA, 71 bp, Homo sapiens
aaagggaaggaggagagagtttggattgggaaagttaccatccactctcctcttagcatacctagttgtca

SEQ ID NO: 109493 - DNA, 71 bp, Homo sapiens
aggagagagtttggattgggaaagttaccatccactctcctcttagcatacctagttgtcaattttctgtt

SEQ ID NO: 109494 - DNA, 71 bp, Homo sapiens
agagtttggattgggaaagttaccatccactctcctcttagcatacctagttgtcaattttctgtttatgt

SEQ ID NO: 109495 - DNA, 73 bp, Homo sapiens
ggaaagttaccatccactctcctcttagcatacctagttgtcaattttctgtttatgttttatatagcctcat

SEQ ID NO: 109496 - DNA, 78 bp, Homo sapiens
tccactctcctcttagcatacctagttgtcaattttctgtttatgttttatatagcctcattaatgattgcgatacta

SEQ ID NO: 109497 - DNA, 77 bp, Homo sapiens
tctcctcttagcatacctagttgtcaattttctgtttatgttttatatagcctcattaatgattgcgatactattac

SEQ ID NO: 109498 - DNA, 76 bp, Homo sapiens
gcatacctagttgtcaattttctgtttatgttttatatagcctcattaatgattgcgatactattactatgtttac

SEQ ID NO: 109499 - DNA, 72 bp, Homo sapiens
ttgtcaattttctgtttatgttttatatagcctcattaatgattgcgatactattactatgtttactttttt

SEQ ID NO: 109500 - DNA, 70 bp, Homo sapiens
aattttctgtttatgttttatatagcctcattaatgattgcgatactattactatgtttactttttttat

SEQ ID NO: 109501 - DNA, 74 bp, Homo sapiens
tgtgaaccactgcatgtggcctatctttacttttgaaataggaaatgaactcagaagttaaaccatctttcaag

SEQ ID NO: 109502 - DNA, 72 bp, Homo sapiens
actgcatgtggcctatctttacttttgaaataggaaatgaactcagaagttaaaccatctttcaaggtctta

SEQ ID NO: 109503 - DNA, 69 bp, Homo sapiens
tggcctatctttacttttgaaataggaaatgaactcagaagttaaaccatctttcaaggtcttataacc

SEQ ID NO: 109504 - DNA, 68 bp, Homo sapiens
ttttgaaataggaaatgaactcagaagttaaaccatctttcaaggtcttataaccgttaggtggtaga

SEQ ID NO: 109505 - DNA, 67 bp, Homo sapiens
ggaaatgaactcagaagttaaaccatctttcaaggtcttataaccgttaggtggtagaaccaagatt

SEQ ID NO: 109506 - DNA, 68 bp, Homo sapiens
actcagaagttaaaccatctttcaaggtcttataaccgttaggtggtagaaccaagatttgaagccta

SEQ ID NO: 109507 - DNA, 66 bp, Homo sapiens
agttaaaccatctttcaaggtcttataaccgttaggtggtagaaccaagatttgaagcctagttgg

SEQ ID NO: 109508 - DNA, 69 bp, Homo sapiens
atctttcaaggtcttataaccgttaggtggtagaaccaagatttgaagcctagttggtctgttgccaaa

SEQ ID NO: 109509 - DNA, 69 bp, Homo sapiens
tttcaaggtcttataaccgttaggtggtagaaccaagatttgaagcctagttggtctgttgccaaagtc

SEQ ID NO: 109510 - DNA, 71 bp, Homo sapiens
tcttataaccgttaggtggtagaaccaagatttgaagcctagttggtctgttgccaaagtccactatatta

SEQ ID NO: 109511 - DNA, 70 bp, Homo sapiens
ttataaccgttaggtggtagaaccaagatttgaagcctagttggtctgttgccaaagtccactatattaa

SEQ ID NO: 109512 - DNA, 72 bp, Homo sapiens
ttaggtggtagaaccaagatttgaagcctagttggtctgttgccaaagtccactatattaagctgtttccca

SEQ ID NO: 109513 - DNA, 73 bp, Homo sapiens
tagaaccaagatttgaagcctagttggtctgttgccaaagtccactatattaagctgtttcccaagtgaatct

SEQ ID NO: 109514 - DNA, 72 bp, Homo sapiens
accaagatttgaagcctagttggtctgttgccaaagtccactatattaagctgtttcccaagtgaatcttta

SEQ ID NO: 109515 - DNA, 72 bp, Homo sapiens
aagatttgaagcctagttggtctgttgccaaagtccactatattaagctgtttcccaagtgaatctttagga

SEQ ID NO: 109516 - DNA, 72 bp, Homo sapiens
tttgaagcctagttggtctgttgccaaagtccactatattaagctgtttcccaagtgaatctttaggaacat

SEQ ID NO: 109517 - DNA, 72 bp, Homo sapiens
agcctagttggtctgttgccaaagtccactatattaagctgtttcccaagtgaatctttaggaacattccag

SEQ ID NO: 109518 - DNA, 71 bp, Homo sapiens
aagtccactatattaagctgtttcccaagtgaatctttaggaacattccaggcacctagttcttcatcctt

SEQ ID NO: 109519 - DNA, 70 bp, Homo sapiens
tattaagctgtttcccaagtgaatctttaggaacattccaggcacctagttcttcatcctttttggttct

SEQ ID NO: 109520 - DNA, 72 bp, Homo sapiens
tttcccaagtgaatctttaggaacattccaggcacctagttcttcatcctttttggttctttctctcatcca

SEQ ID NO: 109521 - DNA, 74 bp, Homo sapiens
aatctttaggaacattccaggcacctagttcttcatcctttttggttctttctctcatccatgatgtctggtag

SEQ ID NO: 109522 - DNA, 74 bp, Homo sapiens
aacattccaggcacctagttcttcatcctttttggttctttctctcatccatgatgtctggtaggttacaaaga

SEQ ID NO: 109523 - DNA, 74 bp, Homo sapiens
acctagttcttcatcctttttggttctttctctcatccatgatgtctggtaggttacaaagagagaaggcatta

SEQ ID NO: 109524 - DNA, 76 bp, Homo sapiens
tcatcctttttggttctttctctcatccatgatgtctggtaggttacaaagagagaaggcattaaatgtgttgtta

SEQ ID NO: 109525 - DNA, 75 bp, Homo sapiens
atgatgtctggtaggttacaaagagagaaggcattaaatgtgttgttaaccagcaagcgcatgaggtagaaattt

SEQ ID NO: 109526 - DNA, 74 bp, Homo sapiens
taggttacaaagagagaaggcattaaatgtgttgttaaccagcaagcgcatgaggtagaaattttggaggatta

SEQ ID NO: 109527 - DNA, 74 bp, Homo sapiens
agagaaggcattaaatgtgttgttaaccagcaagcgcatgaggtagaaattttggaggattaaggctttattga

SEQ ID NO: 109528 - DNA, 71 bp, Homo sapiens
attaaatgtgttgttaaccagcaagcgcatgaggtagaaattttggaggattaaggctttattgaacccac

SEQ ID NO: 109529 - DNA, 74 bp, Homo sapiens
tgtgttgttaaccagcaagcgcatgaggtagaaattttggaggattaaggctttattgaacccaccaaatcata

SEQ ID NO: 109530 - DNA, 75 bp, Homo sapiens
caagcgcatgaggtagaaattttggaggattaaggctttattgaacccaccaaatcatactccaggcatctgtct

SEQ ID NO: 109531 - DNA, 70 bp, Homo sapiens
aggtagaaattttggaggattaaggctttattgaacccaccaaatcatactccaggcatctgtcttgttt

SEQ ID NO: 109532 - DNA, 71 bp, Homo sapiens
aaattttggaggattaaggctttattgaacccaccaaatcatactccaggcatctgtcttgtttttcactg

SEQ ID NO: 109533 - DNA, 73 bp, Homo sapiens
attaaggctttattgaacccaccaaatcatactccaggcatctgtcttgtttttcactgtagcttctaggaag

SEQ ID NO: 109534 - DNA, 79 bp, Homo sapiens
tccaggcatctgtcttgtttttcactgtagcttctaggaaggttaagcattagaaactcgaatggtgatgtgaatcata

SEQ ID NO: 109535 - DNA, 76 bp, Homo sapiens
atctgtcttgtttttcactgtagcttctaggaaggttaagcattagaaactcgaatggtgatgtgaatcataggaa

SEQ ID NO: 109536 - DNA, 77 bp, Homo sapiens
tagcttctaggaaggttaagcattagaaactcgaatggtgatgtgaatcataggaagcgctaagctaaactactgaa

SEQ ID NO: 109537 - DNA, 77 bp, Homo sapiens
aaggttaagcattagaaactcgaatggtgatgtgaatcataggaagcgctaagctaaactactgaatgagtcattct

SEQ ID NO: 109538 - DNA, 79 bp, Homo sapiens
attagaaactcgaatggtgatgtgaatcataggaagcgctaagctaaactactgaatgagtcattctttccagagacaa

SEQ ID NO: 109539 - DNA, 79 bp, Homo sapiens
atgtgaatcataggaagcgctaagctaaactactgaatgagtcattctttccagagacaatggcccttatttctctcaa

SEQ ID NO: 109540 - DNA, 75 bp, Homo sapiens
ataggaagcgctaagctaaactactgaatgagtcattctttccagagacaatggcccttatttctctcaaactct

SEQ ID NO: 109541 - DNA, 75 bp, Homo sapiens
taagctaaactactgaatgagtcattctttccagagacaatggcccttatttctctcaaactcttaacagactta

SEQ ID NO: 109542 - DNA, 75 bp, Homo sapiens
actactgaatgagtcattctttccagagacaatggcccttatttctctcaaactcttaacagacttacaaatgag

SEQ ID NO: 109543 - DNA, 71 bp, Homo sapiens
attctttccagagacaatggcccttatttctctcaaactcttaacagacttacaaatgagggtagaagaaa

SEQ ID NO: 109544 - DNA, 71 bp, Homo sapiens
agagacaatggcccttatttctctcaaactcttaacagacttacaaatgagggtagaagaaaagctactta

SEQ ID NO: 109545 - DNA, 68 bp, Homo sapiens
aatggcccttatttctctcaaactcttaacagacttacaaatgagggtagaagaaaagctacttaaat

SEQ ID NO: 109546 - DNA, 67 bp, Homo sapiens
atttctctcaaactcttaacagacttacaaatgagggtagaagaaaagctacttaaatttactaccc

SEQ ID NO: 109547 - DNA, 65 bp, Homo sapiens
agacttacaaatgagggtagaagaaaagctacttaaatttactacccctactaataacaccaaaa

SEQ ID NO: 109548 - DNA, 64 bp, Homo sapiens
atgagggtagaagaaaagctacttaaatttactacccctactaataacaccaaaataaatttat

SEQ ID NO: 109549 - DNA, 66 bp, Homo sapiens
aagctacttaaatttactacccctactaataacaccaaaataaatttattactctactacagagct

SEQ ID NO: 109550 - DNA, 66 bp, Homo sapiens
acttaaatttactacccctactaataacaccaaaataaatttattactctactacagagctttcac

SEQ ID NO: 109551 - DNA, 68 bp, Homo sapiens
ccctactaataacaccaaaataaatttattactctactacagagctttcactttttcataagttgtta

SEQ ID NO: 109552 - DNA, 70 bp, Homo sapiens
aacaccaaaataaatttattactctactacagagctttcactttttcataagttgttatcaacattttga

SEQ ID NO: 109553 - DNA, 69 bp, Homo sapiens
taaatttattactctactacagagctttcactttttcataagttgttatcaacattttgatttttgggt

SEQ ID NO: 109554 - DNA, 74 bp, Homo sapiens
tactctactacagagctttcactttttcataagttgttatcaacattttgatttttgggttatcagaacatcta

SEQ ID NO: 109555 - DNA, 75 bp, Homo sapiens
cagagctttcactttttcataagttgttatcaacattttgatttttgggttatcagaacatctaacagcatgttc

SEQ ID NO: 109556 - DNA, 72 bp, Homo sapiens
agttgttatcaacattttgatttttgggttatcagaacatctaacagcatgttctaaatgtcaaataaaagg

SEQ ID NO: 109557 - DNA, 78 bp, Homo sapiens
acatctaacagcatgttctaaatgtcaaataaaaggtaattacatgaaatgataatgatatacaatctctttactgtc

SEQ ID NO: 109558 - DNA, 78 bp, Homo sapiens
gcatgttctaaatgtcaaataaaaggtaattacatgaaatgataatgatatacaatctctttactgtcttatctaaga

SEQ ID NO: 109559 - DNA, 76 bp, Homo sapiens
atgtcaaataaaaggtaattacatgaaatgataatgatatacaatctctttactgtcttatctaagacaatctctt

SEQ ID NO: 109560 - DNA, 79 bp, Homo sapiens
ggtaattacatgaaatgataatgatatacaatctctttactgtcttatctaagacaatctcttttgtgtgctgggagta

SEQ ID NO: 109561 - DNA, 79 bp, Homo sapiens
catgaaatgataatgatatacaatctctttactgtcttatctaagacaatctcttttgtgtgctgggagtacaacaaac

SEQ ID NO: 109562 - DNA, 78 bp, Homo sapiens
gataatgatatacaatctctttactgtcttatctaagacaatctcttttgtgtgctgggagtacaacaaacttgattc

SEQ ID NO: 109563 - DNA, 76 bp, Homo sapiens
atacaatctctttactgtcttatctaagacaatctcttttgtgtgctgggagtacaacaaacttgattcttggcta

SEQ ID NO: 109564 - DNA, 75 bp, Homo sapiens
tttactgtcttatctaagacaatctcttttgtgtgctgggagtacaacaaacttgattcttggctacctggggca

SEQ ID NO: 109565 - DNA, 69 bp, Homo sapiens
ctgggagtacaacaaacttgattcttggctacctggggcaggggtttagattactaagaatcctagaac

SEQ ID NO: 109566 - DNA, 70 bp, Homo sapiens
agtacaacaaacttgattcttggctacctggggcaggggtttagattactaagaatcctagaactacaca

SEQ ID NO: 109567 - DNA, 73 bp, Homo sapiens
ttgattcttggctacctggggcaggggtttagattactaagaatcctagaactacacacagtctgccataaaa

SEQ ID NO: 109568 - DNA, 72 bp, Homo sapiens
acctggggcaggggtttagattactaagaatcctagaactacacacagtctgccataaaacttatctgtgga

SEQ ID NO: 109569 - DNA, 72 bp, Homo sapiens
aggggtttagattactaagaatcctagaactacacacagtctgccataaaacttatctgtggaggagaccat

SEQ ID NO: 109570 - DNA, 79 bp, Homo sapiens
ttagattactaagaatcctagaactacacacagtctgccataaaacttatctgtggaggagaccattgcaatagctata

SEQ ID NO: 109571 - DNA, 75 bp, Homo sapiens
tggaggagaccattgcaatagctataactctttggtgtgttgtggggggaaaatggtttgagactcactatttca

SEQ ID NO: 109572 - DNA, 73 bp, Homo sapiens
accattgcaatagctataactctttggtgtgttgtggggggaaaatggtttgagactcactatttcagaggaa

SEQ ID NO: 109573 - DNA, 71 bp, Homo sapiens
tataactctttggtgtgttgtggggggaaaatggtttgagactcactatttcagaggaagtggtggcaaaa

SEQ ID NO: 109574 - DNA, 71 bp, Homo sapiens
tctttggtgtgttgtggggggaaaatggtttgagactcactatttcagaggaagtggtggcaaaaggaaga

SEQ ID NO: 109575 - DNA, 72 bp, Homo sapiens
tgttgtggggggaaaatggtttgagactcactatttcagaggaagtggtggcaaaaggaagaggagaatgaa

SEQ ID NO: 109576 - DNA, 78 bp, Homo sapiens
ttgagactcactatttcagaggaagtggtggcaaaaggaagaggagaatgaagttggtagcttgcagaaatagcagag

SEQ ID NO: 109577 - DNA, 77 bp, Homo sapiens
tcagaggaagtggtggcaaaaggaagaggagaatgaagttggtagcttgcagaaatagcagagtggagtagctaaaa

SEQ ID NO: 109578 - DNA, 74 bp, Homo sapiens
aagtggtggcaaaaggaagaggagaatgaagttggtagcttgcagaaatagcagagtggagtagctaaaactta

SEQ ID NO: 109579 - DNA, 74 bp, Homo sapiens
aaggaagaggagaatgaagttggtagcttgcagaaatagcagagtggagtagctaaaacttagctagtggtttg

SEQ ID NO: 109580 - DNA, 74 bp, Homo sapiens
aggagaatgaagttggtagcttgcagaaatagcagagtggagtagctaaaacttagctagtggtttggtgtggg

SEQ ID NO: 109581 - DNA, 74 bp, Homo sapiens
aagttggtagcttgcagaaatagcagagtggagtagctaaaacttagctagtggtttggtgtgggggtggagca

SEQ ID NO: 109582 - DNA, 74 bp, Homo sapiens
agaaatagcagagtggagtagctaaaacttagctagtggtttggtgtgggggtggagcagggtcatcaccatta

SEQ ID NO: 109583 - DNA, 73 bp, Homo sapiens
agagtggagtagctaaaacttagctagtggtttggtgtgggggtggagcagggtcatcaccattaactctgaa

SEQ ID NO: 109584 - DNA, 73 bp, Homo sapiens
aacttagctagtggtttggtgtgggggtggagcagggtcatcaccattaactctgaagtttagccctgctgac

SEQ ID NO: 109585 - DNA, 75 bp, Homo sapiens
tggtttggtgtgggggtggagcagggtcatcaccattaactctgaagtttagccctgctgactcaggggccaatg

SEQ ID NO: 109586 - DNA, 79 bp, Homo sapiens
agcagggtcatcaccattaactctgaagtttagccctgctgactcaggggccaatggtgctgctgccagaaatagggga

SEQ ID NO: 109587 - DNA, 78 bp, Homo sapiens
attaactctgaagtttagccctgctgactcaggggccaatggtgctgctgccagaaataggggagctggaaaatctga

SEQ ID NO: 109588 - DNA, 79 bp, Homo sapiens
aagtttagccctgctgactcaggggccaatggtgctgctgccagaaataggggagctggaaaatctgagaagatgatta

SEQ ID NO: 109589 - DNA, 83 bp, Homo sapiens
tagccctgctgactcaggggccaatggtgctgctgccagaaataggggagctggaaaatctgagaagatgattaattcagctg

SEQ ID NO: 109590 - DNA, 78 bp, Homo sapiens
aggggccaatggtgctgctgccagaaataggggagctggaaaatctgagaagatgattaattcagctggggacatatt

SEQ ID NO: 109591 - DNA, 80 bp, Homo sapiens
aatggtgctgctgccagaaataggggagctggaaaatctgagaagatgattaattcagctggggacatatttgcctcaag

SEQ ID NO: 109592 - DNA, 77 bp, Homo sapiens
ccagaaataggggagctggaaaatctgagaagatgattaattcagctggggacatatttgcctcaaggttcctcaga

SEQ ID NO: 109593 - DNA, 75 bp, Homo sapiens
aataggggagctggaaaatctgagaagatgattaattcagctggggacatatttgcctcaaggttcctcagaggg

SEQ ID NO: 109594 - DNA, 77 bp, Homo sapiens
aaaatctgagaagatgattaattcagctggggacatatttgcctcaaggttcctcagaggggcatccccagtggatg

SEQ ID NO: 109595 - DNA, 77 bp, Homo sapiens
aagatgattaattcagctggggacatatttgcctcaaggttcctcagaggggcatccccagtggatgtgttcagaag

SEQ ID NO: 109596 - DNA, 75 bp, Homo sapiens
atttgcctcaaggttcctcagaggggcatccccagtggatgtgttcagaagtcaattgaaaataaggccagcacc

SEQ ID NO: 109597 - DNA, 74 bp, Homo sapiens
aggttcctcagaggggcatccccagtggatgtgttcagaagtcaattgaaaataaggccagcacccagaaatgg

SEQ ID NO: 109598 - DNA, 78 bp, Homo sapiens
gcatccccagtggatgtgttcagaagtcaattgaaaataaggccagcacccagaaatgggctgagctggagggttaga

SEQ ID NO: 109599 - DNA, 77 bp, Homo sapiens
agtggatgtgttcagaagtcaattgaaaataaggccagcacccagaaatgggctgagctggagggttagagttgcca

SEQ ID NO: 109600 - DNA, 78 bp, Homo sapiens
tcagaagtcaattgaaaataaggccagcacccagaaatgggctgagctggagggttagagttgccagtcatgggtcta

SEQ ID NO: 109601 - DNA, 77 bp, Homo sapiens
ttgaaaataaggccagcacccagaaatgggctgagctggagggttagagttgccagtcatgggtctatggtgttcaa

SEQ ID NO: 109602 - DNA, 77 bp, Homo sapiens
aataaggccagcacccagaaatgggctgagctggagggttagagttgccagtcatgggtctatggtgttcaagacaa

SEQ ID NO: 109603 - DNA, 74 bp, Homo sapiens
agggttagagttgccagtcatgggtctatggtgttcaagacaagagtggccagattcacaaagggaacaaggtg

SEQ ID NO: 109604 - DNA, 76 bp, Homo sapiens
atgggtctatggtgttcaagacaagagtggccagattcacaaagggaacaaggtggaccagagagagaagagagcc

SEQ ID NO: 109605 - DNA, 77 bp, Homo sapiens
tatggtgttcaagacaagagtggccagattcacaaagggaacaaggtggaccagagagagaagagagcctgggacag

SEQ ID NO: 109606 - DNA, 75 bp, Homo sapiens
aagagtggccagattcacaaagggaacaaggtggaccagagagagaagagagcctgggacagggtctaggatgta

SEQ ID NO: 109607 - DNA, 74 bp, Homo sapiens
agattcacaaagggaacaaggtggaccagagagagaagagagcctgggacagggtctaggatgtatttggagta

SEQ ID NO: 109608 - DNA, 73 bp, Homo sapiens
acaaagggaacaaggtggaccagagagagaagagagcctgggacagggtctaggatgtatttggagtaagaga

SEQ ID NO: 109609 - DNA, 74 bp, Homo sapiens
aaggtggaccagagagagaagagagcctgggacagggtctaggatgtatttggagtaagagagaaggaagagta

SEQ ID NO: 109610 - DNA, 74 bp, Homo sapiens
agagagaagagagcctgggacagggtctaggatgtatttggagtaagagagaaggaagagtagctagagaaaaa

SEQ ID NO: 109611 - DNA, 72 bp, Homo sapiens
aagagagcctgggacagggtctaggatgtatttggagtaagagagaaggaagagtagctagagaaaaaaatg

SEQ ID NO: 109612 - DNA, 72 bp, Homo sapiens
agggtctaggatgtatttggagtaagagagaaggaagagtagctagagaaaaaaatgtggaaaaagcagtga

SEQ ID NO: 109613 - DNA, 73 bp, Homo sapiens
ggagtaagagagaaggaagagtagctagagaaaaaaatgtggaaaaagcagtgataataagataacagaagaa

SEQ ID NO: 109614 - DNA, 76 bp, Homo sapiens
gagaaggaagagtagctagagaaaaaaatgtggaaaaagcagtgataataagataacagaagaaatcatcacagtg

SEQ ID NO: 109615 - DNA, 77 bp, Homo sapiens
gagtagctagagaaaaaaatgtggaaaaagcagtgataataagataacagaagaaatcatcacagtgtgaaaaagca

SEQ ID NO: 109616 - DNA, 76 bp, Homo sapiens
agtgataataagataacagaagaaatcatcacagtgtgaaaaagcaaggccaaggatggataatttgttcttggag

SEQ ID NO: 109617 - DNA, 74 bp, Homo sapiens
agtgtgaaaaagcaaggccaaggatggataatttgttcttggaggatgaagtggcctagactataagccccaga

SEQ ID NO: 109618 - DNA, 74 bp, Homo sapiens
aaagcaaggccaaggatggataatttgttcttggaggatgaagtggcctagactataagccccagagtagcaaa

SEQ ID NO: 109619 - DNA, 75 bp, Homo sapiens
ataatttgttcttggaggatgaagtggcctagactataagccccagagtagcaaatcagttagcaaagtggccaa

SEQ ID NO: 109620 - DNA, 80 bp, Homo sapiens
ttggaggatgaagtggcctagactataagccccagagtagcaaatcagttagcaaagtggccaatctcagtatgtcattg

SEQ ID NO: 109621 - DNA, 80 bp, Homo sapiens
aagtggcctagactataagccccagagtagcaaatcagttagcaaagtggccaatctcagtatgtcattgtgcaccagaa

SEQ ID NO: 109622 - DNA, 81 bp, Homo sapiens
actataagccccagagtagcaaatcagttagcaaagtggccaatctcagtatgtcattgtgcaccagaaggtcccatatga

SEQ ID NO: 109623 - DNA, 80 bp, Homo sapiens
agagtagcaaatcagttagcaaagtggccaatctcagtatgtcattgtgcaccagaaggtcccatatgagggcagaaaaa

SEQ ID NO: 109624 - DNA, 77 bp, Homo sapiens
aatcagttagcaaagtggccaatctcagtatgtcattgtgcaccagaaggtcccatatgagggcagaaaaaaaacta

SEQ ID NO: 109625 - DNA, 76 bp, Homo sapiens
aaagtggccaatctcagtatgtcattgtgcaccagaaggtcccatatgagggcagaaaaaaaactatagaactata

SEQ ID NO: 109626 - DNA, 73 bp, Homo sapiens
accagaaggtcccatatgagggcagaaaaaaaactatagaactatacacagtcttccatataacttatctgtg

SEQ ID NO: 109627 - DNA, 75 bp, Homo sapiens
ggcagaaaaaaaactatagaactatacacagtcttccatataacttatctgtgggggaggccactgcaatagcta

SEQ ID NO: 109628 - DNA, 74 bp, Homo sapiens
aaaactatagaactatacacagtcttccatataacttatctgtgggggaggccactgcaatagctacggctctt

SEQ ID NO: 109629 - DNA, 75 bp, Homo sapiens
agtcttccatataacttatctgtgggggaggccactgcaatagctacggctctttggtgcgctgtggaggaaaaa

SEQ ID NO: 109630 - DNA, 77 bp, Homo sapiens
tatctgtgggggaggccactgcaatagctacggctctttggtgcgctgtggaggaaaaatggtttgagattcactat

SEQ ID NO: 109631 - DNA, 76 bp, Homo sapiens
aggccactgcaatagctacggctctttggtgcgctgtggaggaaaaatggtttgagattcactatttcagaggaag

SEQ ID NO: 109632 - DNA, 75 bp, Homo sapiens
aatagctacggctctttggtgcgctgtggaggaaaaatggtttgagattcactatttcagaggaagtggtggcaa

SEQ ID NO: 109633 - DNA, 74 bp, Homo sapiens
tctttggtgcgctgtggaggaaaaatggtttgagattcactatttcagaggaagtggtggcaaaaggaagaaga

SEQ ID NO: 109634 - DNA, 71 bp, Homo sapiens
ctgtggaggaaaaatggtttgagattcactatttcagaggaagtggtggcaaaaggaagaagagaaagaag

SEQ ID NO: 109635 - DNA, 69 bp, Homo sapiens
aggaaaaatggtttgagattcactatttcagaggaagtggtggcaaaaggaagaagagaaagaagttgg

SEQ ID NO: 109636 - DNA, 74 bp, Homo sapiens
gtttgagattcactatttcagaggaagtggtggcaaaaggaagaagagaaagaagttggtggcttgcagaaata

SEQ ID NO: 109637 - DNA, 74 bp, Homo sapiens
tatttcagaggaagtggtggcaaaaggaagaagagaaagaagttggtggcttgcagaaatagcagaatcaaaaa

SEQ ID NO: 109638 - DNA, 72 bp, Homo sapiens
aagtggtggcaaaaggaagaagagaaagaagttggtggcttgcagaaatagcagaatcaaaaagaagagtat

SEQ ID NO: 109639 - DNA, 72 bp, Homo sapiens
caaaaggaagaagagaaagaagttggtggcttgcagaaatagcagaatcaaaaagaagagtattttaagaca

SEQ ID NO: 109640 - DNA, 74 bp, Homo sapiens
aagaagttggtggcttgcagaaatagcagaatcaaaaagaagagtattttaagacaagagaaatgcccagccag

SEQ ID NO: 109641 - DNA, 77 bp, Homo sapiens
cttgcagaaatagcagaatcaaaaagaagagtattttaagacaagagaaatgcccagccagtggagagagaccagga

SEQ ID NO: 109642 - DNA, 75 bp, Homo sapiens
aaatagcagaatcaaaaagaagagtattttaagacaagagaaatgcccagccagtggagagagaccaggagtgga

SEQ ID NO: 109643 - DNA, 75 bp, Homo sapiens
atcaaaaagaagagtattttaagacaagagaaatgcccagccagtggagagagaccaggagtggagaggagagaa

SEQ ID NO: 109644 - DNA, 76 bp, Homo sapiens
tattttaagacaagagaaatgcccagccagtggagagagaccaggagtggagaggagagaagtgcaggaaggaaaa

SEQ ID NO: 109645 - DNA, 75 bp, Homo sapiens
aagacaagagaaatgcccagccagtggagagagaccaggagtggagaggagagaagtgcaggaaggaaaagaagg

SEQ ID NO: 109646 - DNA, 74 bp, Homo sapiens
aaatgcccagccagtggagagagaccaggagtggagaggagagaagtgcaggaaggaaaagaagggaatgaagg

SEQ ID NO: 109647 - DNA, 74 bp, Homo sapiens
tggagagagaccaggagtggagaggagagaagtgcaggaaggaaaagaagggaatgaagggttgatggaacagt

SEQ ID NO: 109648 - DNA, 73 bp, Homo sapiens
caggagtggagaggagagaagtgcaggaaggaaaagaagggaatgaagggttgatggaacagttctagaggaa

SEQ ID NO: 109649 - DNA, 72 bp, Homo sapiens
agaggagagaagtgcaggaaggaaaagaagggaatgaagggttgatggaacagttctagaggaagctggagg

SEQ ID NO: 109650 - DNA, 72 bp, Homo sapiens
agaagtgcaggaaggaaaagaagggaatgaagggttgatggaacagttctagaggaagctggagggcttgag

SEQ ID NO: 109651 - DNA, 79 bp, Homo sapiens
aagggaatgaagggttgatggaacagttctagaggaagctggagggcttgagtgcagaagcacagttatgtggcacatg

SEQ ID NO: 109652 - DNA, 81 bp, Homo sapiens
aagggttgatggaacagttctagaggaagctggagggcttgagtgcagaagcacagttatgtggcacatgtctgcaaagta

SEQ ID NO: 109653 - DNA, 81 bp, Homo sapiens
agttctagaggaagctggagggcttgagtgcagaagcacagttatgtggcacatgtctgcaaagtagttgggcaaatacaa

SEQ ID NO: 109654 - DNA, 84 bp, Homo sapiens
aggaagctggagggcttgagtgcagaagcacagttatgtggcacatgtctgcaaagtagttgggcaaatacaatgtccatcaga

SEQ ID NO: 109655 - DNA, 87 bp, Homo sapiens
ggcttgagtgcagaagcacagttatgtggcacatgtctgcaaagtagttgggcaaatacaatgtccatcagagagaggtcacatgaa

SEQ ID NO: 109656 - DNA, 89 bp, Homo sapiens
cagaagcacagttatgtggcacatgtctgcaaagtagttgggcaaatacaatgtccatcagagagaggtcacatgaagatgcagataga

SEQ ID NO: 109657 - DNA, 84 bp, Homo sapiens
acatgtctgcaaagtagttgggcaaatacaatgtccatcagagagaggtcacatgaagatgcagatagaccccgtcatgtgaag

SEQ ID NO: 109658 - DNA, 80 bp, Homo sapiens
aaagtagttgggcaaatacaatgtccatcagagagaggtcacatgaagatgcagatagaccccgtcatgtgaaggaagga

SEQ ID NO: 109659 - DNA, 83 bp, Homo sapiens
agttgggcaaatacaatgtccatcagagagaggtcacatgaagatgcagatagaccccgtcatgtgaaggaaggaagtgatca

SEQ ID NO: 109660 - DNA, 82 bp, Homo sapiens
aatgtccatcagagagaggtcacatgaagatgcagatagaccccgtcatgtgaaggaaggaagtgatcaggtactttccata

SEQ ID NO: 109661 - DNA, 80 bp, Homo sapiens
gagagaggtcacatgaagatgcagatagaccccgtcatgtgaaggaaggaagtgatcaggtactttccatagaactcatt

SEQ ID NO: 109662 - DNA, 80 bp, Homo sapiens
acatgaagatgcagatagaccccgtcatgtgaaggaaggaagtgatcaggtactttccatagaactcatttctcttctca

SEQ ID NO: 109663 - DNA, 78 bp, Homo sapiens
atgcagatagaccccgtcatgtgaaggaaggaagtgatcaggtactttccatagaactcatttctcttctcaggaata

SEQ ID NO: 109664 - DNA, 75 bp, Homo sapiens
tagaccccgtcatgtgaaggaaggaagtgatcaggtactttccatagaactcatttctcttctcaggaatacagg

SEQ ID NO: 109665 - DNA, 76 bp, Homo sapiens
tgaaggaaggaagtgatcaggtactttccatagaactcatttctcttctcaggaatacaggggtgacaggatcttc

SEQ ID NO: 109666 - DNA, 79 bp, Homo sapiens
tactttccatagaactcatttctcttctcaggaatacaggggtgacaggatcttcccagaggacaggctgcatggtatg

SEQ ID NO: 109667 - DNA, 78 bp, Homo sapiens
atagaactcatttctcttctcaggaatacaggggtgacaggatcttcccagaggacaggctgcatggtatgggggtca

SEQ ID NO: 109668 - DNA, 78 bp, Homo sapiens
atttctcttctcaggaatacaggggtgacaggatcttcccagaggacaggctgcatggtatgggggtcagggctggca

SEQ ID NO: 109669 - DNA, 80 bp, Homo sapiens
tctcaggaatacaggggtgacaggatcttcccagaggacaggctgcatggtatgggggtcagggctggcagcccaggcca

SEQ ID NO: 109670 - DNA, 77 bp, Homo sapiens
gggtgacaggatcttcccagaggacaggctgcatggtatgggggtcagggctggcagcccaggccaggtttggaata

SEQ ID NO: 109671 - DNA, 75 bp, Homo sapiens
tcttcccagaggacaggctgcatggtatgggggtcagggctggcagcccaggccaggtttggaatagccccaaaa

SEQ ID NO: 109672 - DNA, 77 bp, Homo sapiens
agaggacaggctgcatggtatgggggtcagggctggcagcccaggccaggtttggaatagccccaaaatatatagca

SEQ ID NO: 109673 - DNA, 77 bp, Homo sapiens
gggtcagggctggcagcccaggccaggtttggaatagccccaaaatatatagcatggtaggaggttgtgcatggata

SEQ ID NO: 109674 - DNA, 80 bp, Homo sapiens
tggcagcccaggccaggtttggaatagccccaaaatatatagcatggtaggaggttgtgcatggatatattgagtattca

SEQ ID NO: 109675 - DNA, 79 bp, Homo sapiens
aggccaggtttggaatagccccaaaatatatagcatggtaggaggttgtgcatggatatattgagtattcagtgcacag

SEQ ID NO: 109676 - DNA, 78 bp, Homo sapiens
cccaaaatatatagcatggtaggaggttgtgcatggatatattgagtattcagtgcacaggttaggatgaaaaaattg

SEQ ID NO: 109677 - DNA, 81 bp, Homo sapiens
tatatagcatggtaggaggttgtgcatggatatattgagtattcagtgcacaggttaggatgaaaaaattgtgtcaaagta

SEQ ID NO: 109678 - DNA, 79 bp, Homo sapiens
taggaggttgtgcatggatatattgagtattcagtgcacaggttaggatgaaaaaattgtgtcaaagtagttatgtgat

SEQ ID NO: 109679 - DNA, 76 bp, Homo sapiens
tgagtattcagtgcacaggttaggatgaaaaaattgtgtcaaagtagttatgtgattccaataatacttagaagac

SEQ ID NO: 109680 - DNA, 75 bp, Homo sapiens
ttcagtgcacaggttaggatgaaaaaattgtgtcaaagtagttatgtgattccaataatacttagaagacttaga

SEQ ID NO: 109681 - DNA, 73 bp, Homo sapiens
aaattgtgtcaaagtagttatgtgattccaataatacttagaagacttagaacaagagcagagaaagtaagtg

SEQ ID NO: 109682 - DNA, 74 bp, Homo sapiens
aaagtagttatgtgattccaataatacttagaagacttagaacaagagcagagaaagtaagtggtcatcctgag

SEQ ID NO: 109683 - DNA, 73 bp, Homo sapiens
ttccaataatacttagaagacttagaacaagagcagagaaagtaagtggtcatcctgagttaataaatgaagg

SEQ ID NO: 109684 - DNA, 71 bp, Homo sapiens
acttagaagacttagaacaagagcagagaaagtaagtggtcatcctgagttaataaatgaaggtaaagaac

SEQ ID NO: 109685 - DNA, 73 bp, Homo sapiens
aacaagagcagagaaagtaagtggtcatcctgagttaataaatgaaggtaaagaacttagcactccattgaaa

SEQ ID NO: 109686 - DNA, 72 bp, Homo sapiens
gagaaagtaagtggtcatcctgagttaataaatgaaggtaaagaacttagcactccattgaaaggtacagta

SEQ ID NO: 109687 - DNA, 70 bp, Homo sapiens
agtaagtggtcatcctgagttaataaatgaaggtaaagaacttagcactccattgaaaggtacagtaatt

SEQ ID NO: 109688 - DNA, 72 bp, Homo sapiens
aatgaaggtaaagaacttagcactccattgaaaggtacagtaatttaatattgatattagattgatgggtcc

SEQ ID NO: 109689 - DNA, 72 bp, Homo sapiens
aagaacttagcactccattgaaaggtacagtaatttaatattgatattagattgatgggtccttcatttccc

SEQ ID NO: 109690 - DNA, 81 bp, Homo sapiens
taatattgatattagattgatgggtccttcatttccctatggtctcatcatagtttcttgcaatagggatgacagagcagg

SEQ ID NO: 109691 - DNA, 79 bp, Homo sapiens
attagattgatgggtccttcatttccctatggtctcatcatagtttcttgcaatagggatgacagagcagggagtaata

SEQ ID NO: 109692 - DNA, 81 bp, Homo sapiens
tccttcatttccctatggtctcatcatagtttcttgcaatagggatgacagagcagggagtaataggctgccagcaggacc

SEQ ID NO: 109693 - DNA, 81 bp, Homo sapiens
atttccctatggtctcatcatagtttcttgcaatagggatgacagagcagggagtaataggctgccagcaggacctcaatg

SEQ ID NO: 109694 - DNA, 83 bp, Homo sapiens
tcatcatagtttcttgcaatagggatgacagagcagggagtaataggctgccagcaggacctcaatggagtgacccagtcttg

SEQ ID NO: 109695 - DNA, 79 bp, Homo sapiens
tagtttcttgcaatagggatgacagagcagggagtaataggctgccagcaggacctcaatggagtgacccagtcttggg

SEQ ID NO: 109696 - DNA, 78 bp, Homo sapiens
aatagggatgacagagcagggagtaataggctgccagcaggacctcaatggagtgacccagtcttgggttcaggccca

SEQ ID NO: 109697 - DNA, 77 bp, Homo sapiens
agagcagggagtaataggctgccagcaggacctcaatggagtgacccagtcttgggttcaggcccatcggggcagaa

SEQ ID NO: 109698 - DNA, 75 bp, Homo sapiens
taataggctgccagcaggacctcaatggagtgacccagtcttgggttcaggcccatcggggcagaactaggtttg

SEQ ID NO: 109699 - DNA, 72 bp, Homo sapiens
cagcaggacctcaatggagtgacccagtcttgggttcaggcccatcggggcagaactaggtttgtcaaaggg

SEQ ID NO: 109700 - DNA, 75 bp, Homo sapiens
tcaatggagtgacccagtcttgggttcaggcccatcggggcagaactaggtttgtcaaagggtgcttgctgactg

SEQ ID NO: 109701 - DNA, 73 bp, Homo sapiens
agtgacccagtcttgggttcaggcccatcggggcagaactaggtttgtcaaagggtgcttgctgactggcttg

SEQ ID NO: 109702 - DNA, 75 bp, Homo sapiens
agtcttgggttcaggcccatcggggcagaactaggtttgtcaaagggtgcttgctgactggcttggagagcagag

SEQ ID NO: 109703 - DNA, 77 bp, Homo sapiens
cccatcggggcagaactaggtttgtcaaagggtgcttgctgactggcttggagagcagaggtagccagaggtgtctg

SEQ ID NO: 109704 - DNA, 79 bp, Homo sapiens
cagaactaggtttgtcaaagggtgcttgctgactggcttggagagcagaggtagccagaggtgtctggggtcaccatga

SEQ ID NO: 109705 - DNA, 78 bp, Homo sapiens
taggtttgtcaaagggtgcttgctgactggcttggagagcagaggtagccagaggtgtctggggtcaccatgaagacg

SEQ ID NO: 109706 - DNA, 78 bp, Homo sapiens
aaagggtgcttgctgactggcttggagagcagaggtagccagaggtgtctggggtcaccatgaagacggcaagtacaa

SEQ ID NO: 109707 - DNA, 80 bp, Homo sapiens
tgactggcttggagagcagaggtagccagaggtgtctggggtcaccatgaagacggcaagtacaatctgtaggagtggaa

SEQ ID NO: 109708 - DNA, 79 bp, Homo sapiens
ttggagagcagaggtagccagaggtgtctggggtcaccatgaagacggcaagtacaatctgtaggagtggaataggcag

SEQ ID NO: 109709 - DNA, 75 bp, Homo sapiens
agaggtagccagaggtgtctggggtcaccatgaagacggcaagtacaatctgtaggagtggaataggcagggaag

SEQ ID NO: 109710 - DNA, 75 bp, Homo sapiens
agaggtgtctggggtcaccatgaagacggcaagtacaatctgtaggagtggaataggcagggaaggagtagaagc

SEQ ID NO: 109711 - DNA, 80 bp, Homo sapiens
aagaacattccagaatgtgagatcttggagatgacacgattttttctctgaaagctctcagcccatggtgagcattaaaa

SEQ ID NO: 109712 - DNA, 82 bp, Homo sapiens
attccagaatgtgagatcttggagatgacacgattttttctctgaaagctctcagcccatggtgagcattaaaacactctca

SEQ ID NO: 109713 - DNA, 80 bp, Homo sapiens
agatcttggagatgacacgattttttctctgaaagctctcagcccatggtgagcattaaaacactctcagggcaaccaca

SEQ ID NO: 109714 - DNA, 79 bp, Homo sapiens
agatgacacgattttttctctgaaagctctcagcccatggtgagcattaaaacactctcagggcaaccacacaccaatc

SEQ ID NO: 109715 - DNA, 78 bp, Homo sapiens
tttttctctgaaagctctcagcccatggtgagcattaaaacactctcagggcaaccacacaccaatccctatactgac

SEQ ID NO: 109716 - DNA, 76 bp, Homo sapiens
aaagctctcagcccatggtgagcattaaaacactctcagggcaaccacacaccaatccctatactgacccctactc

SEQ ID NO: 109717 - DNA, 74 bp, Homo sapiens
gcccatggtgagcattaaaacactctcagggcaaccacacaccaatccctatactgacccctactccaaatgtt

SEQ ID NO: 109718 - DNA, 71 bp, Homo sapiens
agcattaaaacactctcagggcaaccacacaccaatccctatactgacccctactccaaatgtttagggtg

SEQ ID NO: 109719 - DNA, 71 bp, Homo sapiens
taaaacactctcagggcaaccacacaccaatccctatactgacccctactccaaatgtttagggtggagcc

SEQ ID NO: 109720 - DNA, 70 bp, Homo sapiens
gcaaccacacaccaatccctatactgacccctactccaaatgtttagggtggagccctttggggatacca

SEQ ID NO: 109721 - DNA, 69 bp, Homo sapiens
acacaccaatccctatactgacccctactccaaatgtttagggtggagccctttggggataccatatgg

SEQ ID NO: 109722 - DNA, 67 bp, Homo sapiens
tatactgacccctactccaaatgtttagggtggagccctttggggataccatatgggggtttcttta

SEQ ID NO: 109723 - DNA, 67 bp, Homo sapiens
cctactccaaatgtttagggtggagccctttggggataccatatgggggtttctttaatattcctca

SEQ ID NO: 109724 - DNA, 66 bp, Homo sapiens
aaatgtttagggtggagccctttggggataccatatgggggtttctttaatattcctcagtggact

SEQ ID NO: 109725 - DNA, 67 bp, Homo sapiens
gggtggagccctttggggataccatatgggggtttctttaatattcctcagtggacttggcttcctt

SEQ ID NO: 109726 - DNA, 72 bp, Homo sapiens
ctttggggataccatatgggggtttctttaatattcctcagtggacttggcttcctttctcacagacagaca

SEQ ID NO: 109727 - DNA, 73 bp, Homo sapiens
atatgggggtttctttaatattcctcagtggacttggcttcctttctcacagacagacagggactgttatgaa

SEQ ID NO: 109728 - DNA, 75 bp, Homo sapiens
tattcctcagtggacttggcttcctttctcacagacagacagggactgttatgaatggggtacacacctatttta

SEQ ID NO: 109729 - DNA, 74 bp, Homo sapiens
acttggcttcctttctcacagacagacagggactgttatgaatggggtacacacctattttattcactcatatt

SEQ ID NO: 109730 - DNA, 74 bp, Homo sapiens
cttcctttctcacagacagacagggactgttatgaatggggtacacacctattttattcactcatattttatta

SEQ ID NO: 109731 - DNA, 76 bp, Homo sapiens
cacagacagacagggactgttatgaatggggtacacacctattttattcactcatattttattatcctatattata

SEQ ID NO: 109732 - DNA, 77 bp, Homo sapiens
tgaatggggtacacacctattttattcactcatattttattatcctatattatattattatagtcatttcactgcca

SEQ ID NO: 109733 - DNA, 76 bp, Homo sapiens
ggtacacacctattttattcactcatattttattatcctatattatattattatagtcatttcactgccaccaaca

SEQ ID NO: 109734 - DNA, 77 bp, Homo sapiens
tattcactcatattttattatcctatattatattattatagtcatttcactgccaccaacatttccttctccaacga

SEQ ID NO: 109735 - DNA, 77 bp, Homo sapiens
tattttattatcctatattatattattatagtcatttcactgccaccaacatttccttctccaacgatgtggtatgc

SEQ ID NO: 109736 - DNA, 78 bp, Homo sapiens
tattatcctatattatattattatagtcatttcactgccaccaacatttccttctccaacgatgtggtatgcggtgta

SEQ ID NO: 109737 - DNA, 74 bp, Homo sapiens
tattattatagtcatttcactgccaccaacatttccttctccaacgatgtggtatgcggtgtaacaaatggttt

SEQ ID NO: 109738 - DNA, 75 bp, Homo sapiens
ttatagtcatttcactgccaccaacatttccttctccaacgatgtggtatgcggtgtaacaaatggttttagaga

SEQ ID NO: 109739 - DNA, 74 bp, Homo sapiens
ttcactgccaccaacatttccttctccaacgatgtggtatgcggtgtaacaaatggttttagagaaagtgtctg

SEQ ID NO: 109740 - DNA, 73 bp, Homo sapiens
atttccttctccaacgatgtggtatgcggtgtaacaaatggttttagagaaagtgtctggtggtctatcaaca

SEQ ID NO: 109741 - DNA, 75 bp, Homo sapiens
cttctccaacgatgtggtatgcggtgtaacaaatggttttagagaaagtgtctggtggtctatcaacaactctga

SEQ ID NO: 109742 - DNA, 72 bp, Homo sapiens
tggtatgcggtgtaacaaatggttttagagaaagtgtctggtggtctatcaacaactctgaccagacttttt

SEQ ID NO: 109743 - DNA, 68 bp, Homo sapiens
cggtgtaacaaatggttttagagaaagtgtctggtggtctatcaacaactctgaccagactttttttt

SEQ ID NO: 109744 - DNA, 80 bp, Homo sapiens
atgctgggatttcaggtatgaaccattgcacccagcccagactgttttggctgatcatttatgtccctagatactgtcca

SEQ ID NO: 109745 - DNA, 77 bp, Homo sapiens
atttcaggtatgaaccattgcacccagcccagactgttttggctgatcatttatgtccctagatactgtccactgtt

SEQ ID NO: 109746 - DNA, 79 bp, Homo sapiens
tatgaaccattgcacccagcccagactgttttggctgatcatttatgtccctagatactgtccactgtttcaccttcca

SEQ ID NO: 109747 - DNA, 78 bp, Homo sapiens
cccagcccagactgttttggctgatcatttatgtccctagatactgtccactgtttcaccttccagtctgccttgcat

SEQ ID NO: 109748 - DNA, 77 bp, Homo sapiens
actgttttggctgatcatttatgtccctagatactgtccactgtttcaccttccagtctgccttgcattaactttca

SEQ ID NO: 109749 - DNA, 79 bp, Homo sapiens
ttggctgatcatttatgtccctagatactgtccactgtttcaccttccagtctgccttgcattaactttcaatgctctt

SEQ ID NO: 109750 - DNA, 77 bp, Homo sapiens
atttatgtccctagatactgtccactgtttcaccttccagtctgccttgcattaactttcaatgctctttccatcaa

SEQ ID NO: 109751 - DNA, 79 bp, Homo sapiens
tagatactgtccactgtttcaccttccagtctgccttgcattaactttcaatgctctttccatcaaatcacactgggtc

SEQ ID NO: 109752 - DNA, 77 bp, Homo sapiens
actgtttcaccttccagtctgccttgcattaactttcaatgctctttccatcaaatcacactgggtcctatgtcaaa

SEQ ID NO: 109753 - DNA, 79 bp, Homo sapiens
ttccagtctgccttgcattaactttcaatgctctttccatcaaatcacactgggtcctatgtcaaaggctggcactgtt

SEQ ID NO: 109754 - DNA, 76 bp, Homo sapiens
ccttgcattaactttcaatgctctttccatcaaatcacactgggtcctatgtcaaaggctggcactgtttgtttcc

SEQ ID NO: 109755 - DNA, 75 bp, Homo sapiens
attaactttcaatgctctttccatcaaatcacactgggtcctatgtcaaaggctggcactgtttgtttcctcaaa

SEQ ID NO: 109756 - DNA, 74 bp, Homo sapiens
ctctttccatcaaatcacactgggtcctatgtcaaaggctggcactgtttgtttcctcaaacctgaaagttgaa

SEQ ID NO: 109757 - DNA, 73 bp, Homo sapiens
atcaaatcacactgggtcctatgtcaaaggctggcactgtttgtttcctcaaacctgaaagttgaaaggtcaa

SEQ ID NO: 109758 - DNA, 72 bp, Homo sapiens
actgggtcctatgtcaaaggctggcactgtttgtttcctcaaacctgaaagttgaaaggtcaagattcaaca

SEQ ID NO: 109759 - DNA, 77 bp, Homo sapiens
tatgtcaaaggctggcactgtttgtttcctcaaacctgaaagttgaaaggtcaagattcaacatcatgcaccaagag

SEQ ID NO: 109760 - DNA, 76 bp, Homo sapiens
tggcactgtttgtttcctcaaacctgaaagttgaaaggtcaagattcaacatcatgcaccaagagtttagtctgtg

SEQ ID NO: 109761 - DNA, 74 bp, Homo sapiens
tttgtttcctcaaacctgaaagttgaaaggtcaagattcaacatcatgcaccaagagtttagtctgtggaggag

SEQ ID NO: 109762 - DNA, 73 bp, Homo sapiens
aaacctgaaagttgaaaggtcaagattcaacatcatgcaccaagagtttagtctgtggaggaggtctcaaaat

SEQ ID NO: 109763 - DNA, 78 bp, Homo sapiens
tgaaaggtcaagattcaacatcatgcaccaagagtttagtctgtggaggaggtctcaaaattgaggatggaataacta

SEQ ID NO: 109764 - DNA, 77 bp, Homo sapiens
agattcaacatcatgcaccaagagtttagtctgtggaggaggtctcaaaattgaggatggaataactaactccacaa

SEQ ID NO: 109765 - DNA, 76 bp, Homo sapiens
aacatcatgcaccaagagtttagtctgtggaggaggtctcaaaattgaggatggaataactaactccacaagatgg

SEQ ID NO: 109766 - DNA, 72 bp, Homo sapiens
accaagagtttagtctgtggaggaggtctcaaaattgaggatggaataactaactccacaagatgggggcag

SEQ ID NO: 109767 - DNA, 76 bp, Homo sapiens
ttagtctgtggaggaggtctcaaaattgaggatggaataactaactccacaagatgggggcagggagcaggagata

SEQ ID NO: 109768 - DNA, 77 bp, Homo sapiens
aggtctcaaaattgaggatggaataactaactccacaagatgggggcagggagcaggagatatgtggcatttagcaa

SEQ ID NO: 109769 - DNA, 74 bp, Homo sapiens
aataactaactccacaagatgggggcagggagcaggagatatgtggcatttagcaaaaaagccatggttcccta

SEQ ID NO: 109770 - DNA, 77 bp, Homo sapiens
ctaactccacaagatgggggcagggagcaggagatatgtggcatttagcaaaaaagccatggttccctatgtgtctc

SEQ ID NO: 109771 - DNA, 76 bp, Homo sapiens
aagatgggggcagggagcaggagatatgtggcatttagcaaaaaagccatggttccctatgtgtctcccaaatatc

SEQ ID NO: 109772 - DNA, 77 bp, Homo sapiens
agcaggagatatgtggcatttagcaaaaaagccatggttccctatgtgtctcccaaatatccacatctacctagaac

SEQ ID NO: 109773 - DNA, 71 bp, Homo sapiens
ttccctatgtgtctcccaaatatccacatctacctagaacctcaggttgtcacgctttttggaaataaggt

SEQ ID NO: 109774 - DNA, 71 bp, Homo sapiens
tctacctagaacctcaggttgtcacgctttttggaaataaggtttgtgtaaatgtgatttgttaagatgag

SEQ ID NO: 109775 - DNA, 73 bp, Homo sapiens
cgctttttggaaataaggtttgtgtaaatgtgatttgttaagatgaggtcatactagattaggttggctgcta

SEQ ID NO: 109776 - DNA, 78 bp, Homo sapiens
aataaggtttgtgtaaatgtgatttgttaagatgaggtcatactagattaggttggctgctaaattcaatgatcagca

SEQ ID NO: 109777 - DNA, 81 bp, Homo sapiens
ttgtgtaaatgtgatttgttaagatgaggtcatactagattaggttggctgctaaattcaatgatcagcatccttataaga

SEQ ID NO: 109778 - DNA, 81 bp, Homo sapiens
tcatactagattaggttggctgctaaattcaatgatcagcatccttataagaagaggagaagacacacaggggtacacaga

SEQ ID NO: 109779 - DNA, 81 bp, Homo sapiens
attaggttggctgctaaattcaatgatcagcatccttataagaagaggagaagacacacaggggtacacagagagatgcca

SEQ ID NO: 109780 - DNA, 84 bp, Homo sapiens
ctaaattcaatgatcagcatccttataagaagaggagaagacacacaggggtacacagagagatgccatgcgaagacagaggca

SEQ ID NO: 109781 - DNA, 81 bp, Homo sapiens
cttataagaagaggagaagacacacaggggtacacagagagatgccatgcgaagacagaggcagaaactggagtaatgcaa

SEQ ID NO: 109782 - DNA, 84 bp, Homo sapiens
tacacagagagatgccatgcgaagacagaggcagaaactggagtaatgcaaagatgactcaagggatgtcaagggttgctggga

SEQ ID NO: 109783 - DNA, 82 bp, Homo sapiens
atgcgaagacagaggcagaaactggagtaatgcaaagatgactcaagggatgtcaagggttgctgggagtcaccagatgctg

SEQ ID NO: 109784 - DNA, 78 bp, Homo sapiens
agaggcagaaactggagtaatgcaaagatgactcaagggatgtcaagggttgctgggagtcaccagatgctgggggaa

SEQ ID NO: 109785 - DNA, 77 bp, Homo sapiens
aactggagtaatgcaaagatgactcaagggatgtcaagggttgctgggagtcaccagatgctgggggaagcaaggaa

SEQ ID NO: 109786 - DNA, 75 bp, Homo sapiens
actcaagggatgtcaagggttgctgggagtcaccagatgctgggggaagcaaggaaggatcctctcctggagcct

SEQ ID NO: 109787 - DNA, 78 bp, Homo sapiens
atgtcaagggttgctgggagtcaccagatgctgggggaagcaaggaaggatcctctcctggagccttcagagggagca

SEQ ID NO: 109788 - DNA, 81 bp, Homo sapiens
ttgctgggagtcaccagatgctgggggaagcaaggaaggatcctctcctggagccttcagagggagcacagaaatgccagc

SEQ ID NO: 109789 - DNA, 79 bp, Homo sapiens
accagatgctgggggaagcaaggaaggatcctctcctggagccttcagagggagcacagaaatgccagcgccttgatct

SEQ ID NO: 109790 - DNA, 79 bp, Homo sapiens
ggaagcaaggaaggatcctctcctggagccttcagagggagcacagaaatgccagcgccttgatcttggaattctagcc

SEQ ID NO: 109791 - DNA, 78 bp, Homo sapiens
aaggaaggatcctctcctggagccttcagagggagcacagaaatgccagcgccttgatcttggaattctagcctctag

SEQ ID NO: 109792 - DNA, 81 bp, Homo sapiens
tctcctggagccttcagagggagcacagaaatgccagcgccttgatcttggaattctagcctctagggctgtaagagaata

SEQ ID NO: 109793 - DNA, 79 bp, Homo sapiens
agccttcagagggagcacagaaatgccagcgccttgatcttggaattctagcctctagggctgtaagagaatacatttc

SEQ ID NO: 109794 - DNA, 75 bp, Homo sapiens
tttgttatggcagccacaggaaactaacacagtcccctaacctcaaccactgagcttcactgactagctgggaag

SEQ ID NO: 109795 - DNA, 74 bp, Homo sapiens
cagccacaggaaactaacacagtcccctaacctcaaccactgagcttcactgactagctgggaagtttctccca

SEQ ID NO: 109796 - DNA, 72 bp, Homo sapiens
aaactaacacagtcccctaacctcaaccactgagcttcactgactagctgggaagtttctcccaggaggcca

SEQ ID NO: 109797 - DNA, 74 bp, Homo sapiens
aacacagtcccctaacctcaaccactgagcttcactgactagctgggaagtttctcccaggaggccatgttgtc

SEQ ID NO: 109798 - DNA, 76 bp, Homo sapiens
ctaacctcaaccactgagcttcactgactagctgggaagtttctcccaggaggccatgttgtccctgaagccagtc

SEQ ID NO: 109799 - DNA, 75 bp, Homo sapiens
aaccactgagcttcactgactagctgggaagtttctcccaggaggccatgttgtccctgaagccagtcccaatgg

SEQ ID NO: 109800 - DNA, 76 bp, Homo sapiens
accactgagcttcactgactagctgggaagtttctcccaggaggccatgttgtccctgaagccagtcccaatggga

SEQ ID NO: 109801 - DNA, 76 bp, Homo sapiens
actgactagctgggaagtttctcccaggaggccatgttgtccctgaagccagtcccaatgggaccgacatgattga

SEQ ID NO: 109802 - DNA, 75 bp, Homo sapiens
actagctgggaagtttctcccaggaggccatgttgtccctgaagccagtcccaatgggaccgacatgattgacag

SEQ ID NO: 109803 - DNA, 74 bp, Homo sapiens
aagtttctcccaggaggccatgttgtccctgaagccagtcccaatgggaccgacatgattgacaggccagggaa

SEQ ID NO: 109804 - DNA, 75 bp, Homo sapiens
cccaggaggccatgttgtccctgaagccagtcccaatgggaccgacatgattgacaggccagggaagcctcaccc

SEQ ID NO: 109805 - DNA, 76 bp, Homo sapiens
ccaatgggaccgacatgattgacaggccagggaagcctcaccccacaaggctgcatgcccaggtaagtgtgtttct

SEQ ID NO: 109806 - DNA, 77 bp, Homo sapiens
accgacatgattgacaggccagggaagcctcaccccacaaggctgcatgcccaggtaagtgtgtttcttgcaccgcc

SEQ ID NO: 109807 - DNA, 77 bp, Homo sapiens
aggccagggaagcctcaccccacaaggctgcatgcccaggtaagtgtgtttcttgcaccgcccttgccatgacaatg

SEQ ID NO: 109808 - DNA, 79 bp, Homo sapiens
aagcctcaccccacaaggctgcatgcccaggtaagtgtgtttcttgcaccgcccttgccatgacaatggcttgttctga

SEQ ID NO: 109809 - DNA, 75 bp, Homo sapiens
catgcccaggtaagtgtgtttcttgcaccgcccttgccatgacaatggcttgttctgacttacggctttgttact

SEQ ID NO: 109810 - DNA, 76 bp, Homo sapiens
tgtttcttgcaccgcccttgccatgacaatggcttgttctgacttacggctttgttactttgaacttcaatcaatg

SEQ ID NO: 109811 - DNA, 75 bp, Homo sapiens
accgcccttgccatgacaatggcttgttctgacttacggctttgttactttgaacttcaatcaatggctgaaaga

SEQ ID NO: 109812 - DNA, 73 bp, Homo sapiens
tgacaatggcttgttctgacttacggctttgttactttgaacttcaatcaatggctgaaagaggaacgttgtt

SEQ ID NO: 109813 - DNA, 71 bp, Homo sapiens
ttgttctgacttacggctttgttactttgaacttcaatcaatggctgaaagaggaacgttgttttgactag

SEQ ID NO: 109814 - DNA, 69 bp, Homo sapiens
ttgttactttgaacttcaatcaatggctgaaagaggaacgttgttttgactaggctcggggtttctaaa

SEQ ID NO: 109815 - DNA, 69 bp, Homo sapiens
ttgaacttcaatcaatggctgaaagaggaacgttgttttgactaggctcggggtttctaaactccccac

SEQ ID NO: 109816 - DNA, 68 bp, Homo sapiens
atcaatggctgaaagaggaacgttgttttgactaggctcggggtttctaaactccccactgtgtggtt

SEQ ID NO: 109817 - DNA, 70 bp, Homo sapiens
ttgttttgactaggctcggggtttctaaactccccactgtgtggtttccaggtcagacagtcaggctttg

SEQ ID NO: 109818 - DNA, 73 bp, Homo sapiens
taggctcggggtttctaaactccccactgtgtggtttccaggtcagacagtcaggctttgttctgtgaatcat

SEQ ID NO: 109819 - DNA, 78 bp, Homo sapiens
tctaaactccccactgtgtggtttccaggtcagacagtcaggctttgttctgtgaatcattgctgaaagattcaatta

SEQ ID NO: 109820 - DNA, 79 bp, Homo sapiens
ccactgtgtggtttccaggtcagacagtcaggctttgttctgtgaatcattgctgaaagattcaattaaatctcgcttc

SEQ ID NO: 109821 - DNA, 77 bp, Homo sapiens
gtttccaggtcagacagtcaggctttgttctgtgaatcattgctgaaagattcaattaaatctcgcttcgtccgcct

SEQ ID NO: 109822 - DNA, 79 bp, Homo sapiens
aggtcagacagtcaggctttgttctgtgaatcattgctgaaagattcaattaaatctcgcttcgtccgccttgtggcca

SEQ ID NO: 109823 - DNA, 75 bp, Homo sapiens
aggctttgttctgtgaatcattgctgaaagattcaattaaatctcgcttcgtccgccttgtggccagggtttcag

SEQ ID NO: 109824 - DNA, 78 bp, Homo sapiens
ttctgtgaatcattgctgaaagattcaattaaatctcgcttcgtccgccttgtggccagggtttcagtgacttagcaa

SEQ ID NO: 109825 - DNA, 76 bp, Homo sapiens
atcattgctgaaagattcaattaaatctcgcttcgtccgccttgtggccagggtttcagtgacttagcaagaacag

SEQ ID NO: 109826 - DNA, 75 bp, Homo sapiens
aaagattcaattaaatctcgcttcgtccgccttgtggccagggtttcagtgacttagcaagaacaggagcatgta

SEQ ID NO: 109827 - DNA, 78 bp, Homo sapiens
ttaaatctcgcttcgtccgccttgtggccagggtttcagtgacttagcaagaacaggagcatgtagccagttgctgag

SEQ ID NO: 109828 - DNA, 80 bp, Homo sapiens
tccgccttgtggccagggtttcagtgacttagcaagaacaggagcatgtagccagttgctgaggaaagccagacatttga

SEQ ID NO: 109829 - DNA, 78 bp, Homo sapiens
cttgtggccagggtttcagtgacttagcaagaacaggagcatgtagccagttgctgaggaaagccagacatttgaggg

SEQ ID NO: 109830 - DNA, 81 bp, Homo sapiens
acttagcaagaacaggagcatgtagccagttgctgaggaaagccagacatttgaggggagcgggctgctgacacgaggcag

SEQ ID NO: 109831 - DNA, 83 bp, Homo sapiens
aacaggagcatgtagccagttgctgaggaaagccagacatttgaggggagcgggctgctgacacgaggcagggagcacagaga

SEQ ID NO: 109832 - DNA, 81 bp, Homo sapiens
atgtagccagttgctgaggaaagccagacatttgaggggagcgggctgctgacacgaggcagggagcacagagatcttcgg

SEQ ID NO: 109833 - DNA, 82 bp, Homo sapiens
ttgctgaggaaagccagacatttgaggggagcgggctgctgacacgaggcagggagcacagagatcttcggggctccagaca

SEQ ID NO: 109834 - DNA, 81 bp, Homo sapiens
agacatttgaggggagcgggctgctgacacgaggcagggagcacagagatcttcggggctccagacagcggtgaagaatga

SEQ ID NO: 109835 - DNA, 80 bp, Homo sapiens
tttgaggggagcgggctgctgacacgaggcagggagcacagagatcttcggggctccagacagcggtgaagaatgaagtc

SEQ ID NO: 109836 - DNA, 80 bp, Homo sapiens
ctgctgacacgaggcagggagcacagagatcttcggggctccagacagcggtgaagaatgaagtccccaggcgcccagct

SEQ ID NO: 109837 - DNA, 78 bp, Homo sapiens
agggagcacagagatcttcggggctccagacagcggtgaagaatgaagtccccaggcgcccagcttcttggctgagaa

SEQ ID NO: 109838 - DNA, 78 bp, Homo sapiens
atcttcggggctccagacagcggtgaagaatgaagtccccaggcgcccagcttcttggctgagaaggcagctgttgat

SEQ ID NO: 109839 - DNA, 81 bp, Homo sapiens
tccagacagcggtgaagaatgaagtccccaggcgcccagcttcttggctgagaaggcagctgttgattcctgacatactaa

SEQ ID NO: 109840 - DNA, 78 bp, Homo sapiens
agcggtgaagaatgaagtccccaggcgcccagcttcttggctgagaaggcagctgttgattcctgacatactaattta

SEQ ID NO: 109841 - DNA, 74 bp, Homo sapiens
aagtccccaggcgcccagcttcttggctgagaaggcagctgttgattcctgacatactaatttaggacccgaaa

SEQ ID NO: 109842 - DNA, 76 bp, Homo sapiens
aggcgcccagcttcttggctgagaaggcagctgttgattcctgacatactaatttaggacccgaaagagaaagtga

SEQ ID NO: 109843 - DNA, 70 bp, Homo sapiens
agaaggcagctgttgattcctgacatactaatttaggacccgaaagagaaagtgagggggctttgtaaaa

SEQ ID NO: 109844 - DNA, 69 bp, Homo sapiens
tgttgattcctgacatactaatttaggacccgaaagagaaagtgagggggctttgtaaaatcacttaaa

SEQ ID NO: 109845 - DNA, 68 bp, Homo sapiens
actaatttaggacccgaaagagaaagtgagggggctttgtaaaatcacttaaaggaggctgaatgtca

SEQ ID NO: 109846 - DNA, 74 bp, Homo sapiens
agaaagtgagggggctttgtaaaatcacttaaaggaggctgaatgtcaagggggagatgagccatgtgttagca

SEQ ID NO: 109847 - DNA, 75 bp, Homo sapiens
tttgtaaaatcacttaaaggaggctgaatgtcaagggggagatgagccatgtgttagcaccactgtccttttcac

SEQ ID NO: 109848 - DNA, 79 bp, Homo sapiens
aaatcacttaaaggaggctgaatgtcaagggggagatgagccatgtgttagcaccactgtccttttcacgcaggcatga

SEQ ID NO: 109849 - DNA, 80 bp, Homo sapiens
aaaggaggctgaatgtcaagggggagatgagccatgtgttagcaccactgtccttttcacgcaggcatgagaaagaatca

SEQ ID NO: 109850 - DNA, 81 bp, Homo sapiens
aatgtcaagggggagatgagccatgtgttagcaccactgtccttttcacgcaggcatgagaaagaatcacaaatgtgagtc

SEQ ID NO: 109851 - DNA, 83 bp, Homo sapiens
agatgagccatgtgttagcaccactgtccttttcacgcaggcatgagaaagaatcacaaatgtgagtctggttgagatcttta

SEQ ID NO: 109852 - DNA, 80 bp, Homo sapiens
atgtgttagcaccactgtccttttcacgcaggcatgagaaagaatcacaaatgtgagtctggttgagatctttatggtta

SEQ ID NO: 109853 - DNA, 77 bp, Homo sapiens
accactgtccttttcacgcaggcatgagaaagaatcacaaatgtgagtctggttgagatctttatggttaggaggcc

SEQ ID NO: 109854 - DNA, 77 bp, Homo sapiens
cttttcacgcaggcatgagaaagaatcacaaatgtgagtctggttgagatctttatggttaggaggcctcctttgaa

SEQ ID NO: 109855 - DNA, 79 bp, Homo sapiens
catgagaaagaatcacaaatgtgagtctggttgagatctttatggttaggaggcctcctttgaagtctgacatcgctaa

SEQ ID NO: 109856 - DNA, 75 bp, Homo sapiens
aagaatcacaaatgtgagtctggttgagatctttatggttaggaggcctcctttgaagtctgacatcgctaaaaa

SEQ ID NO: 109857 - DNA, 72 bp, Homo sapiens
ttgagatctttatggttaggaggcctcctttgaagtctgacatcgctaaaaaaattctcataaaaccaaaga

SEQ ID NO: 109858 - DNA, 69 bp, Homo sapiens
atctttatggttaggaggcctcctttgaagtctgacatcgctaaaaaaattctcataaaaccaaagagg

SEQ ID NO: 109859 - DNA, 69 bp, Homo sapiens
tctgacatcgctaaaaaaattctcataaaaccaaagagggggaaaaaaagagcattttatcctagctag

SEQ ID NO: 109860 - DNA, 67 bp, Homo sapiens
aaaattctcataaaaccaaagagggggaaaaaaagagcattttatcctagctaggagagcaccaaag

SEQ ID NO: 109861 - DNA, 75 bp, Homo sapiens
aaaagagcattttatcctagctaggagagcaccaaagtatgtggaaaggagaaaaggctacagccctctgcagaa

SEQ ID NO: 109862 - DNA, 74 bp, Homo sapiens
attttatcctagctaggagagcaccaaagtatgtggaaaggagaaaaggctacagccctctgcagaaacaggaa

SEQ ID NO: 109863 - DNA, 76 bp, Homo sapiens
tagctaggagagcaccaaagtatgtggaaaggagaaaaggctacagccctctgcagaaacaggaattcggcagaac

SEQ ID NO: 109864 - DNA, 72 bp, Homo sapiens
accaaagtatgtggaaaggagaaaaggctacagccctctgcagaaacaggaattcggcagaaccccaagtca

SEQ ID NO: 109865 - DNA, 74 bp, Homo sapiens
tatgtggaaaggagaaaaggctacagccctctgcagaaacaggaattcggcagaaccccaagtcactcagaaaa

SEQ ID NO: 109866 - DNA, 72 bp, Homo sapiens
aaggagaaaaggctacagccctctgcagaaacaggaattcggcagaaccccaagtcactcagaaaagagaaa

SEQ ID NO: 109867 - DNA, 74 bp, Homo sapiens
tacagccctctgcagaaacaggaattcggcagaaccccaagtcactcagaaaagagaaaatgaaagacaagatt

SEQ ID NO: 109868 - DNA, 74 bp, Homo sapiens
tctgcagaaacaggaattcggcagaaccccaagtcactcagaaaagagaaaatgaaagacaagatttcttgaag

SEQ ID NO: 109869 - DNA, 76 bp, Homo sapiens
aagtcactcagaaaagagaaaatgaaagacaagatttcttgaagtgcctggaaaatgctagcttcgtgtgcagact

SEQ ID NO: 109870 - DNA, 76 bp, Homo sapiens
aaaagagaaaatgaaagacaagatttcttgaagtgcctggaaaatgctagcttcgtgtgcagacttgctctagagg

SEQ ID NO: 109871 - DNA, 77 bp, Homo sapiens
aaatgaaagacaagatttcttgaagtgcctggaaaatgctagcttcgtgtgcagacttgctctagaggggacagtct

SEQ ID NO: 109872 - DNA, 82 bp, Homo sapiens
aagatttcttgaagtgcctggaaaatgctagcttcgtgtgcagacttgctctagaggggacagtcttgtgtgatgccagaga

SEQ ID NO: 109873 - DNA, 85 bp, Homo sapiens
aagtgcctggaaaatgctagcttcgtgtgcagacttgctctagaggggacagtcttgtgtgatgccagagatccaggctgatgaa

SEQ ID NO: 109874 - DNA, 84 bp, Homo sapiens
aaaatgctagcttcgtgtgcagacttgctctagaggggacagtcttgtgtgatgccagagatccaggctgatgaacaactccca

SEQ ID NO: 109875 - DNA, 81 bp, Homo sapiens
agacttgctctagaggggacagtcttgtgtgatgccagagatccaggctgatgaacaactcccatccccagggcacaggtg

SEQ ID NO: 109876 - DNA, 82 bp, Homo sapiens
tagaggggacagtcttgtgtgatgccagagatccaggctgatgaacaactcccatccccagggcacaggtggcctgaaatca

SEQ ID NO: 109877 - DNA, 78 bp, Homo sapiens
atgccagagatccaggctgatgaacaactcccatccccagggcacaggtggcctgaaatcacggagattcttagaacc

SEQ ID NO: 109878 - DNA, 75 bp, Homo sapiens
atccaggctgatgaacaactcccatccccagggcacaggtggcctgaaatcacggagattcttagaacctcagtt

SEQ ID NO: 109879 - DNA, 70 bp, Homo sapiens
aacaactcccatccccagggcacaggtggcctgaaatcacggagattcttagaacctcagtttggtttct

SEQ ID NO: 109880 - DNA, 71 bp, Homo sapiens
atccccagggcacaggtggcctgaaatcacggagattcttagaacctcagtttggtttcttatttatagaa

SEQ ID NO: 109881 - DNA, 76 bp, Homo sapiens
cacaggtggcctgaaatcacggagattcttagaacctcagtttggtttcttatttatagaatgagacaattcatgc

SEQ ID NO: 109882 - DNA, 75 bp, Homo sapiens
ctgaaatcacggagattcttagaacctcagtttggtttcttatttatagaatgagacaattcatgccacctctct

SEQ ID NO: 109883 - DNA, 74 bp, Homo sapiens
atcacggagattcttagaacctcagtttggtttcttatttatagaatgagacaattcatgccacctctcttttc

SEQ ID NO: 109884 - DNA, 74 bp, Homo sapiens
ttagaacctcagtttggtttcttatttatagaatgagacaattcatgccacctctcttttctcttgcaggattt

SEQ ID NO: 109885 - DNA, 78 bp, Homo sapiens
ttatttatagaatgagacaattcatgccacctctcttttctcttgcaggattttgtggggctcagaggagttgctgtt

SEQ ID NO: 109886 - DNA, 79 bp, Homo sapiens
atagaatgagacaattcatgccacctctcttttctcttgcaggattttgtggggctcagaggagttgctgtttgtgaat

SEQ ID NO: 109887 - DNA, 78 bp, Homo sapiens
aattcatgccacctctcttttctcttgcaggattttgtggggctcagaggagttgctgtttgtgaattcactctgtaa

SEQ ID NO: 109888 - DNA, 78 bp, Homo sapiens
tctcttttctcttgcaggattttgtggggctcagaggagttgctgtttgtgaattcactctgtaaatttctagcatcc

SEQ ID NO: 109889 - DNA, 79 bp, Homo sapiens
tcttgcaggattttgtggggctcagaggagttgctgtttgtgaattcactctgtaaatttctagcatcctataattgta

SEQ ID NO: 109890 - DNA, 76 bp, Homo sapiens
attttgtggggctcagaggagttgctgtttgtgaattcactctgtaaatttctagcatcctataattgtagacaag

SEQ ID NO: 109891 - DNA, 80 bp, Homo sapiens
ggctcagaggagttgctgtttgtgaattcactctgtaaatttctagcatcctataattgtagacaagtcagtatgcgccc

SEQ ID NO: 109892 - DNA, 78 bp, Homo sapiens
agttgctgtttgtgaattcactctgtaaatttctagcatcctataattgtagacaagtcagtatgcgcccctcctcaa

SEQ ID NO: 109893 - DNA, 79 bp, Homo sapiens
tgtgaattcactctgtaaatttctagcatcctataattgtagacaagtcagtatgcgcccctcctcaaggctgggctta

SEQ ID NO: 109894 - DNA, 77 bp, Homo sapiens
tgtaaatttctagcatcctataattgtagacaagtcagtatgcgcccctcctcaaggctgggcttaggatcccaaga

SEQ ID NO: 109895 - DNA, 79 bp, Homo sapiens
tataattgtagacaagtcagtatgcgcccctcctcaaggctgggcttaggatcccaagacatccctattgcctgcacca

SEQ ID NO: 109896 - DNA, 78 bp, Homo sapiens
tagacaagtcagtatgcgcccctcctcaaggctgggcttaggatcccaagacatccctattgcctgcaccacatcggg

SEQ ID NO: 109897 - DNA, 78 bp, Homo sapiens
agtatgcgcccctcctcaaggctgggcttaggatcccaagacatccctattgcctgcaccacatcgggtgccagctaa

SEQ ID NO: 109898 - DNA, 76 bp, Homo sapiens
ctcaaggctgggcttaggatcccaagacatccctattgcctgcaccacatcgggtgccagctaaggtagaggaggg

SEQ ID NO: 109899 - DNA, 76 bp, Homo sapiens
ggcttaggatcccaagacatccctattgcctgcaccacatcgggtgccagctaaggtagaggaggggtgccaagga

SEQ ID NO: 109900 - DNA, 77 bp, Homo sapiens
aggatcccaagacatccctattgcctgcaccacatcgggtgccagctaaggtagaggaggggtgccaaggaagatca

SEQ ID NO: 109901 - DNA, 78 bp, Homo sapiens
acatccctattgcctgcaccacatcgggtgccagctaaggtagaggaggggtgccaaggaagatcagagaagcccagc

SEQ ID NO: 109902 - DNA, 79 bp, Homo sapiens
ttgcctgcaccacatcgggtgccagctaaggtagaggaggggtgccaaggaagatcagagaagcccagctcctggtgcc

SEQ ID NO: 109903 - DNA, 74 bp, Homo sapiens
acatcgggtgccagctaaggtagaggaggggtgccaaggaagatcagagaagcccagctcctggtgcccctggg

SEQ ID NO: 109904 - DNA, 73 bp, Homo sapiens
tagaggaggggtgccaaggaagatcagagaagcccagctcctggtgcccctggggtcagtacggtccttcttc

SEQ ID NO: 109905 - DNA, 74 bp, Homo sapiens
caaggaagatcagagaagcccagctcctggtgcccctggggtcagtacggtccttcttcccttgtatctgcaaa

SEQ ID NO: 109906 - DNA, 72 bp, Homo sapiens
aagcccagctcctggtgcccctggggtcagtacggtccttcttcccttgtatctgcaaaggacttgtggaca

SEQ ID NO: 109907 - DNA, 72 bp, Homo sapiens
tacggtccttcttcccttgtatctgcaaaggacttgtggacacagccgggggaaacatggttgctaagagac

SEQ ID NO: 109908 - DNA, 76 bp, Homo sapiens
caaaggacttgtggacacagccgggggaaacatggttgctaagagactggcattgctgcactttcgaggacaccag

SEQ ID NO: 109909 - DNA, 77 bp, Homo sapiens
acttgtggacacagccgggggaaacatggttgctaagagactggcattgctgcactttcgaggacaccaggcgtgta

SEQ ID NO: 109910 - DNA, 77 bp, Homo sapiens
acagccgggggaaacatggttgctaagagactggcattgctgcactttcgaggacaccaggcgtgtagtctcatctt

SEQ ID NO: 109911 - DNA, 81 bp, Homo sapiens
aaacatggttgctaagagactggcattgctgcactttcgaggacaccaggcgtgtagtctcatctttcatcaacattcctg

SEQ ID NO: 109912 - DNA, 81 bp, Homo sapiens
taagagactggcattgctgcactttcgaggacaccaggcgtgtagtctcatctttcatcaacattcctggggctgctcctt

SEQ ID NO: 109913 - DNA, 82 bp, Homo sapiens
actggcattgctgcactttcgaggacaccaggcgtgtagtctcatctttcatcaacattcctggggctgctcctttcataca

SEQ ID NO: 109914 - DNA, 79 bp, Homo sapiens
actttcgaggacaccaggcgtgtagtctcatctttcatcaacattcctggggctgctcctttcatacatgagcccagaa

SEQ ID NO: 109915 - DNA, 79 bp, Homo sapiens
aggacaccaggcgtgtagtctcatctttcatcaacattcctggggctgctcctttcatacatgagcccagaaggaccag

SEQ ID NO: 109916 - DNA, 82 bp, Homo sapiens
tgtagtctcatctttcatcaacattcctggggctgctcctttcatacatgagcccagaaggaccagggcggtgcagatccca

SEQ ID NO: 109917 - DNA, 78 bp, Homo sapiens
atctttcatcaacattcctggggctgctcctttcatacatgagcccagaaggaccagggcggtgcagatcccagggaa

SEQ ID NO: 109918 - DNA, 76 bp, Homo sapiens
atcaacattcctggggctgctcctttcatacatgagcccagaaggaccagggcggtgcagatcccagggaagggga

SEQ ID NO: 109919 - DNA, 80 bp, Homo sapiens
gggctgctcctttcatacatgagcccagaaggaccagggcggtgcagatcccagggaaggggatggcagggctcagctgc

SEQ ID NO: 109920 - DNA, 79 bp, Homo sapiens
tcctttcatacatgagcccagaaggaccagggcggtgcagatcccagggaaggggatggcagggctcagctgcccagcc

SEQ ID NO: 109921 - DNA, 81 bp, Homo sapiens
atgagcccagaaggaccagggcggtgcagatcccagggaaggggatggcagggctcagctgcccagcctgctgtcctgctg

SEQ ID NO: 109922 - DNA, 82 bp, Homo sapiens
aaggaccagggcggtgcagatcccagggaaggggatggcagggctcagctgcccagcctgctgtcctgctgtggctctgtgc

SEQ ID NO: 109923 - DNA, 91 bp, Homo sapiens
tgcagatcccagggaaggggatggcagggctcagctgcccagcctgctgtcctgctgtggctctgtgctgcagcatcatctagtactttca

SEQ ID NO: 109924 - DNA, 85 bp, Homo sapiens
agggaaggggatggcagggctcagctgcccagcctgctgtcctgctgtggctctgtgctgcagcatcatctagtactttcaaaaa

SEQ ID NO: 109925 - DNA, 82 bp, Homo sapiens
ctctgtgctgcagcatcatctagtactttcaaaaactgtgctgtgggcactcgcctcggctcctgtacaactgtccttccca

SEQ ID NO: 109926 - DNA, 77 bp, Homo sapiens
tagtactttcaaaaactgtgctgtgggcactcgcctcggctcctgtacaactgtccttcccatctccatctgccaaa

SEQ ID NO: 109927 - DNA, 77 bp, Homo sapiens
aaaaactgtgctgtgggcactcgcctcggctcctgtacaactgtccttcccatctccatctgccaaactcattctta

SEQ ID NO: 109928 - DNA, 76 bp, Homo sapiens
ctgtgggcactcgcctcggctcctgtacaactgtccttcccatctccatctgccaaactcattcttacccctagga

SEQ ID NO: 109929 - DNA, 76 bp, Homo sapiens
actcgcctcggctcctgtacaactgtccttcccatctccatctgccaaactcattcttacccctaggacctgctga

SEQ ID NO: 109930 - DNA, 80 bp, Homo sapiens
tcctgtacaactgtccttcccatctccatctgccaaactcattcttacccctaggacctgctgagatgctgcctctacca

SEQ ID NO: 109931 - DNA, 81 bp, Homo sapiens
tacaactgtccttcccatctccatctgccaaactcattcttacccctaggacctgctgagatgctgcctctaccatgaagc

SEQ ID NO: 109932 - DNA, 83 bp, Homo sapiens
catctccatctgccaaactcattcttacccctaggacctgctgagatgctgcctctaccatgaagccatccctgagaacagta

SEQ ID NO: 109933 - DNA, 81 bp, Homo sapiens
tgccaaactcattcttacccctaggacctgctgagatgctgcctctaccatgaagccatccctgagaacagtagcttgtta

SEQ ID NO: 109934 - DNA, 78 bp, Homo sapiens
attcttacccctaggacctgctgagatgctgcctctaccatgaagccatccctgagaacagtagcttgttatttctac

SEQ ID NO: 109935 - DNA, 83 bp, Homo sapiens
ctaggacctgctgagatgctgcctctaccatgaagccatccctgagaacagtagcttgttatttctactgctgcttccagctt

SEQ ID NO: 109936 - DNA, 84 bp, Homo sapiens
ctgagatgctgcctctaccatgaagccatccctgagaacagtagcttgttatttctactgctgcttccagctttgattggctct

SEQ ID NO: 109937 - DNA, 81 bp, Homo sapiens
taccatgaagccatccctgagaacagtagcttgttatttctactgctgcttccagctttgattggctcttccctactcatc

SEQ ID NO: 109938 - DNA, 77 bp, Homo sapiens
atccctgagaacagtagcttgttatttctactgctgcttccagctttgattggctcttccctactcatcccctcacc

SEQ ID NO: 109939 - DNA, 81 bp, Homo sapiens
tatttctactgctgcttccagctttgattggctcttccctactcatcccctcacctgacatccggacagtgtgtgcaacaa

SEQ ID NO: 109940 - DNA, 80 bp, Homo sapiens
ctgcttccagctttgattggctcttccctactcatcccctcacctgacatccggacagtgtgtgcaacaacttattatga

SEQ ID NO: 109941 - DNA, 79 bp, Homo sapiens
tccagctttgattggctcttccctactcatcccctcacctgacatccggacagtgtgtgcaacaacttattatgattat

SEQ ID NO: 109942 - DNA, 77 bp, Homo sapiens
ccctactcatcccctcacctgacatccggacagtgtgtgcaacaacttattatgattattattgggatggtctcctc

SEQ ID NO: 109943 - DNA, 78 bp, Homo sapiens
ctcacctgacatccggacagtgtgtgcaacaacttattatgattattattgggatggtctcctccggcacccataatc

SEQ ID NO: 109944 - DNA, 77 bp, Homo sapiens
atccggacagtgtgtgcaacaacttattatgattattattgggatggtctcctccggcacccataatcctgtcctga

SEQ ID NO: 109945 - DNA, 78 bp, Homo sapiens
agtgtgtgcaacaacttattatgattattattgggatggtctcctccggcacccataatcctgtcctgagtgagcacc

SEQ ID NO: 109946 - DNA, 79 bp, Homo sapiens
aacaacttattatgattattattgggatggtctcctccggcacccataatcctgtcctgagtgagcaccctgcacatga

SEQ ID NO: 109947 - DNA, 78 bp, Homo sapiens
attattattgggatggtctcctccggcacccataatcctgtcctgagtgagcaccctgcacatgaggttgtttgagaa

SEQ ID NO: 109948 - DNA, 79 bp, Homo sapiens
attgggatggtctcctccggcacccataatcctgtcctgagtgagcaccctgcacatgaggttgtttgagaacactggc

SEQ ID NO: 109949 - DNA, 80 bp, Homo sapiens
tccggcacccataatcctgtcctgagtgagcaccctgcacatgaggttgtttgagaacactggctgaacctgtcaacagt

SEQ ID NO: 109950 - DNA, 83 bp, Homo sapiens
tgtcctgagtgagcaccctgcacatgaggttgtttgagaacactggctgaacctgtcaacagttggtggattctgatccagta

SEQ ID NO: 109951 - DNA, 82 bp, Homo sapiens
agcaccctgcacatgaggttgtttgagaacactggctgaacctgtcaacagttggtggattctgatccagtagctgatagtg

SEQ ID NO: 109952 - DNA, 79 bp, Homo sapiens
gttgtttgagaacactggctgaacctgtcaacagttggtggattctgatccagtagctgatagtgggcaggagaatagg

SEQ ID NO: 109953 - DNA, 78 bp, Homo sapiens
aacactggctgaacctgtcaacagttggtggattctgatccagtagctgatagtgggcaggagaataggggtgtggct

SEQ ID NO: 109954 - DNA, 77 bp, Homo sapiens
aacctgtcaacagttggtggattctgatccagtagctgatagtgggcaggagaataggggtgtggctttccaggctc

SEQ ID NO: 109955 - DNA, 77 bp, Homo sapiens
acagttggtggattctgatccagtagctgatagtgggcaggagaataggggtgtggctttccaggctctgaggcccc

SEQ ID NO: 109956 - DNA, 78 bp, Homo sapiens
attctgatccagtagctgatagtgggcaggagaataggggtgtggctttccaggctctgaggcccccacatcctcaaa

SEQ ID NO: 109957 - DNA, 76 bp, Homo sapiens
ggcaggagaataggggtgtggctttccaggctctgaggcccccacatcctcaaagggaactgagatgatcccaata

SEQ ID NO: 109958 - DNA, 76 bp, Homo sapiens
agaataggggtgtggctttccaggctctgaggcccccacatcctcaaagggaactgagatgatcccaataggtgca

SEQ ID NO: 109959 - DNA, 77 bp, Homo sapiens
gctttccaggctctgaggcccccacatcctcaaagggaactgagatgatcccaataggtgcaggttcaggcaaagtg

SEQ ID NO: 109960 - DNA, 79 bp, Homo sapiens
ctctgaggcccccacatcctcaaagggaactgagatgatcccaataggtgcaggttcaggcaaagtggagagatccaga

SEQ ID NO: 109961 - DNA, 79 bp, Homo sapiens
cccacatcctcaaagggaactgagatgatcccaataggtgcaggttcaggcaaagtggagagatccagaacatgtgcct

SEQ ID NO: 109962 - DNA, 79 bp, Homo sapiens
atcctcaaagggaactgagatgatcccaataggtgcaggttcaggcaaagtggagagatccagaacatgtgcctttggc

SEQ ID NO: 109963 - DNA, 82 bp, Homo sapiens
aactgagatgatcccaataggtgcaggttcaggcaaagtggagagatccagaacatgtgcctttggctggcccagatctctc

SEQ ID NO: 109964 - DNA, 75 bp, Homo sapiens
agccacggcgcccggccccagatctctttatactgatctttgccattctctactctgcttggggtagcttcttag

SEQ ID NO: 109965 - DNA, 74 bp, Homo sapiens
cccggccccagatctctttatactgatctttgccattctctactctgcttggggtagcttcttagttcgtacta

SEQ ID NO: 109966 - DNA, 77 bp, Homo sapiens
agatctctttatactgatctttgccattctctactctgcttggggtagcttcttagttcgtactacagcttaaatga

SEQ ID NO: 109967 - DNA, 77 bp, Homo sapiens
ctttatactgatctttgccattctctactctgcttggggtagcttcttagttcgtactacagcttaaatgactgata

SEQ ID NO: 109968 - DNA, 73 bp, Homo sapiens
tttgccattctctactctgcttggggtagcttcttagttcgtactacagcttaaatgactgatagttttacct

SEQ ID NO: 109969 - DNA, 72 bp, Homo sapiens
ttctctactctgcttggggtagcttcttagttcgtactacagcttaaatgactgatagttttacctttctag

SEQ ID NO: 109970 - DNA, 71 bp, Homo sapiens
cttggggtagcttcttagttcgtactacagcttaaatgactgatagttttacctttctaggagagctgact

SEQ ID NO: 109971 - DNA, 73 bp, Homo sapiens
cttcttagttcgtactacagcttaaatgactgatagttttacctttctaggagagctgacttctcagaggtta

SEQ ID NO: 109972 - DNA, 74 bp, Homo sapiens
gtactacagcttaaatgactgatagttttacctttctaggagagctgacttctcagaggttacctaagcttgaa

SEQ ID NO: 109973 - DNA, 73 bp, Homo sapiens
agcttaaatgactgatagttttacctttctaggagagctgacttctcagaggttacctaagcttgaagtcaaa

SEQ ID NO: 109974 - DNA, 76 bp, Homo sapiens
atagttttacctttctaggagagctgacttctcagaggttacctaagcttgaagtcaaaggcatgaggctgtgcta

SEQ ID NO: 109975 - DNA, 77 bp, Homo sapiens
ttacctttctaggagagctgacttctcagaggttacctaagcttgaagtcaaaggcatgaggctgtgctaggaggtg

SEQ ID NO: 109976 - DNA, 73 bp, Homo sapiens
ttctcagaggttacctaagcttgaagtcaaaggcatgaggctgtgctaggaggtgtgggggaggaagttactt

SEQ ID NO: 109977 - DNA, 71 bp, Homo sapiens
ggttacctaagcttgaagtcaaaggcatgaggctgtgctaggaggtgtgggggaggaagttacttttggaa

SEQ ID NO: 109978 - DNA, 70 bp, Homo sapiens
aaaggcatgaggctgtgctaggaggtgtgggggaggaagttacttttggaagccagggtctttcccaggc

SEQ ID NO: 109979 - DNA, 71 bp, Homo sapiens
ctgtgctaggaggtgtgggggaggaagttacttttggaagccagggtctttcccaggcttctgaaatcatc

SEQ ID NO: 109980 - DNA, 69 bp, Homo sapiens
tgtgggggaggaagttacttttggaagccagggtctttcccaggcttctgaaatcatccccttgggcaa

SEQ ID NO: 109981 - DNA, 74 bp, Homo sapiens
gaagttacttttggaagccagggtctttcccaggcttctgaaatcatccccttgggcaactgcctggcatgatg

SEQ ID NO: 109982 - DNA, 77 bp, Homo sapiens
ttggaagccagggtctttcccaggcttctgaaatcatccccttgggcaactgcctggcatgatgtgtccctgattaa

SEQ ID NO: 109983 - DNA, 75 bp, Homo sapiens
agggtctttcccaggcttctgaaatcatccccttgggcaactgcctggcatgatgtgtccctgattaaagcagtt

SEQ ID NO: 109984 - DNA, 78 bp, Homo sapiens
tttcccaggcttctgaaatcatccccttgggcaactgcctggcatgatgtgtccctgattaaagcagtttctctcctc

SEQ ID NO: 109985 - DNA, 78 bp, Homo sapiens
ttctgaaatcatccccttgggcaactgcctggcatgatgtgtccctgattaaagcagtttctctcctcctagtctact

SEQ ID NO: 109986 - DNA, 79 bp, Homo sapiens
cttgggcaactgcctggcatgatgtgtccctgattaaagcagtttctctcctcctagtctacttgggaagctctgagga

SEQ ID NO: 109987 - DNA, 79 bp, Homo sapiens
aactgcctggcatgatgtgtccctgattaaagcagtttctctcctcctagtctacttgggaagctctgaggatgattct

SEQ ID NO: 109988 - DNA, 76 bp, Homo sapiens
atgatgtgtccctgattaaagcagtttctctcctcctagtctacttgggaagctctgaggatgattctttctcttt

SEQ ID NO: 109989 - DNA, 78 bp, Homo sapiens
tgattaaagcagtttctctcctcctagtctacttgggaagctctgaggatgattctttctcttttgatacatcaaatc

SEQ ID NO: 109990 - DNA, 75 bp, Homo sapiens
agtttctctcctcctagtctacttgggaagctctgaggatgattctttctcttttgatacatcaaatccacccaa

SEQ ID NO: 109991 - DNA, 78 bp, Homo sapiens
ctcctagtctacttgggaagctctgaggatgattctttctcttttgatacatcaaatccacccaaagcagcttctgaa

SEQ ID NO: 109992 - DNA, 76 bp, Homo sapiens
agtctacttgggaagctctgaggatgattctttctcttttgatacatcaaatccacccaaagcagcttctgaaaaa

SEQ ID NO: 109993 - DNA, 75 bp, Homo sapiens
aagctctgaggatgattctttctcttttgatacatcaaatccacccaaagcagcttctgaaaaaactatgaaaaa

SEQ ID NO: 109994 - DNA, 73 bp, Homo sapiens
tcttttgatacatcaaatccacccaaagcagcttctgaaaaaactatgaaaaactggccacaggagtgtttgt

SEQ ID NO: 109995 - DNA, 69 bp, Homo sapiens
acccaaagcagcttctgaaaaaactatgaaaaactggccacaggagtgtttgttctggtagaatttaaa

SEQ ID NO: 109996 - DNA, 73 bp, Homo sapiens
aactatgaaaaactggccacaggagtgtttgttctggtagaatttaaatgtctttgtgctgcaaaagctgaaa

SEQ ID NO: 109997 - DNA, 74 bp, Homo sapiens
aaactggccacaggagtgtttgttctggtagaatttaaatgtctttgtgctgcaaaagctgaaatgtctagtaa

SEQ ID NO: 109998 - DNA, 75 bp, Homo sapiens
aggagtgtttgttctggtagaatttaaatgtctttgtgctgcaaaagctgaaatgtctagtaagatttctgacca

SEQ ID NO: 109999 - DNA, 74 bp, Homo sapiens
ttgttctggtagaatttaaatgtctttgtgctgcaaaagctgaaatgtctagtaagatttctgaccaaagcctt

SEQ ID NO: 110000 - DNA, 80 bp, Homo sapiens
aaatgtctttgtgctgcaaaagctgaaatgtctagtaagatttctgaccaaagcctttcagctcactataagcattggca

SEQ ID NO: 110001 - DNA, 77 bp, Homo sapiens
tgcaaaagctgaaatgtctagtaagatttctgaccaaagcctttcagctcactataagcattggcacgaagggtaaa

SEQ ID NO: 110002 - DNA, 73 bp, Homo sapiens
aaatgtctagtaagatttctgaccaaagcctttcagctcactataagcattggcacgaagggtaaaccacagg

SEQ ID NO: 110003 - DNA, 76 bp, Homo sapiens
taagatttctgaccaaagcctttcagctcactataagcattggcacgaagggtaaaccacagggatccagctctta

SEQ ID NO: 110004 - DNA, 78 bp, Homo sapiens
tgaccaaagcctttcagctcactataagcattggcacgaagggtaaaccacagggatccagctcttacaatgcttcat

SEQ ID NO: 110005 - DNA, 76 bp, Homo sapiens
aagcctttcagctcactataagcattggcacgaagggtaaaccacagggatccagctcttacaatgcttcattccc

SEQ ID NO: 110006 - DNA, 75 bp, Homo sapiens
attggcacgaagggtaaaccacagggatccagctcttacaatgcttcattcccttctgcaggccctagagactcc

SEQ ID NO: 110007 - DNA, 73 bp, Homo sapiens
aagggtaaaccacagggatccagctcttacaatgcttcattcccttctgcaggccctagagactccctgggct

SEQ ID NO: 110008 - DNA, 80 bp, Homo sapiens
tccagctcttacaatgcttcattcccttctgcaggccctagagactccctgggctttgcctgccacatctgtacactggg

SEQ ID NO: 110009 - DNA, 76 bp, Homo sapiens
tccctgggctttgcctgccacatctgtacactggggagaaggtggattacctcttacgctccaagtagcaagtcat

SEQ ID NO: 110010 - DNA, 75 bp, Homo sapiens
gggctttgcctgccacatctgtacactggggagaaggtggattacctcttacgctccaagtagcaagtcatttaa

SEQ ID NO: 110011 - DNA, 75 bp, Homo sapiens
acatctgtacactggggagaaggtggattacctcttacgctccaagtagcaagtcatttaacctcactcctcatg

SEQ ID NO: 110012 - DNA, 73 bp, Homo sapiens
tacactggggagaaggtggattacctcttacgctccaagtagcaagtcatttaacctcactcctcatgggttg

SEQ ID NO: 110013 - DNA, 70 bp, Homo sapiens
agaaggtggattacctcttacgctccaagtagcaagtcatttaacctcactcctcatgggttggggacgg

SEQ ID NO: 110014 - DNA, 75 bp, Homo sapiens
attacctcttacgctccaagtagcaagtcatttaacctcactcctcatgggttggggacgggagcatgctcacag

SEQ ID NO: 110015 - DNA, 75 bp, Homo sapiens
acgctccaagtagcaagtcatttaacctcactcctcatgggttggggacgggagcatgctcacagggtggaagga

SEQ ID NO: 110016 - DNA, 76 bp, Homo sapiens
agtcatttaacctcactcctcatgggttggggacgggagcatgctcacagggtggaaggaggatgaaacggatgca

SEQ ID NO: 110017 - DNA, 76 bp, Homo sapiens
taacctcactcctcatgggttggggacgggagcatgctcacagggtggaaggaggatgaaacggatgcacagtaaa

SEQ ID NO: 110018 - DNA, 79 bp, Homo sapiens
tcatgggttggggacgggagcatgctcacagggtggaaggaggatgaaacggatgcacagtaaatgtgagctgttttca

SEQ ID NO: 110019 - DNA, 78 bp, Homo sapiens
gggacgggagcatgctcacagggtggaaggaggatgaaacggatgcacagtaaatgtgagctgttttcacaattacaa

SEQ ID NO: 110020 - DNA, 75 bp, Homo sapiens
agggtggaaggaggatgaaacggatgcacagtaaatgtgagctgttttcacaattacaagtctcacctcccactc

SEQ ID NO: 110021 - DNA, 78 bp, Homo sapiens
aaggaggatgaaacggatgcacagtaaatgtgagctgttttcacaattacaagtctcacctcccactctgagcttcta

SEQ ID NO: 110022 - DNA, 81 bp, Homo sapiens
gatgcacagtaaatgtgagctgttttcacaattacaagtctcacctcccactctgagcttctatgactctatcgttcattt

SEQ ID NO: 110023 - DNA, 79 bp, Homo sapiens
tgttttcacaattacaagtctcacctcccactctgagcttctatgactctatcgttcatttttctgcacagggactgac

SEQ ID NO: 110024 - DNA, 80 bp, Homo sapiens
attacaagtctcacctcccactctgagcttctatgactctatcgttcatttttctgcacagggactgactcaaggctcta

SEQ ID NO: 110025 - DNA, 80 bp, Homo sapiens
tcacctcccactctgagcttctatgactctatcgttcatttttctgcacagggactgactcaaggctctaaggttctatc

SEQ ID NO: 110026 - DNA, 82 bp, Homo sapiens
tcccactctgagcttctatgactctatcgttcatttttctgcacagggactgactcaaggctctaaggttctatctctgtgc

SEQ ID NO: 110027 - DNA, 85 bp, Homo sapiens
agcttctatgactctatcgttcatttttctgcacagggactgactcaaggctctaaggttctatctctgtgctgctgcactgagc

SEQ ID NO: 110028 - DNA, 84 bp, Homo sapiens
actctatcgttcatttttctgcacagggactgactcaaggctctaaggttctatctctgtgctgctgcactgagctgctccctc

SEQ ID NO: 110029 - DNA, 86 bp, Homo sapiens
atttttctgcacagggactgactcaaggctctaaggttctatctctgtgctgctgcactgagctgctccctcctgaatgtctctgc

SEQ ID NO: 110030 - DNA, 86 bp, Homo sapiens
agggactgactcaaggctctaaggttctatctctgtgctgctgcactgagctgctccctcctgaatgtctctgcctgtcagtttca

SEQ ID NO: 110031 - DNA, 87 bp, Homo sapiens
actcaaggctctaaggttctatctctgtgctgctgcactgagctgctccctcctgaatgtctctgcctgtcagtttcattcagagac

SEQ ID NO: 110032 - DNA, 87 bp, Homo sapiens
tctaaggttctatctctgtgctgctgcactgagctgctccctcctgaatgtctctgcctgtcagtttcattcagagacccctgacca

SEQ ID NO: 110033 - DNA, 90 bp, Homo sapiens
tctgtgctgctgcactgagctgctccctcctgaatgtctctgcctgtcagtttcattcagagacccctgaccaccagtaatcatcagata

SEQ ID NO: 110034 - DNA, 86 bp, Homo sapiens
ctgcactgagctgctccctcctgaatgtctctgcctgtcagtttcattcagagacccctgaccaccagtaatcatcagatatttca

SEQ ID NO: 110035 - DNA, 86 bp, Homo sapiens
agctgctccctcctgaatgtctctgcctgtcagtttcattcagagacccctgaccaccagtaatcatcagatatttcatgcagctg

SEQ ID NO: 110036 - DNA, 86 bp, Homo sapiens
tgcctgtcagtttcattcagagacccctgaccaccagtaatcatcagatatttcatgcagctgggtgaggcatcagatccgacaaa

SEQ ID NO: 110037 - DNA, 83 bp, Homo sapiens
tttcattcagagacccctgaccaccagtaatcatcagatatttcatgcagctgggtgaggcatcagatccgacaaaataggaa

SEQ ID NO: 110038 - DNA, 80 bp, Homo sapiens
agacccctgaccaccagtaatcatcagatatttcatgcagctgggtgaggcatcagatccgacaaaataggaagattctt

SEQ ID NO: 110039 - DNA, 78 bp, Homo sapiens
accaccagtaatcatcagatatttcatgcagctgggtgaggcatcagatccgacaaaataggaagattctttttaaaa

SEQ ID NO: 110040 - DNA, 75 bp, Homo sapiens
atatttcatgcagctgggtgaggcatcagatccgacaaaataggaagattctttttaaaaccagaatctctaaaa

SEQ ID NO: 110041 - DNA, 69 bp, Homo sapiens
ccgacaaaataggaagattctttttaaaaccagaatctctaaaatgagtttgtttgtgatgcaagtagg

SEQ ID NO: 110042 - DNA, 72 bp, Homo sapiens
gaagattctttttaaaaccagaatctctaaaatgagtttgtttgtgatgcaagtagggtctggatcctacaa

SEQ ID NO: 110043 - DNA, 71 bp, Homo sapiens
tttaaaaccagaatctctaaaatgagtttgtttgtgatgcaagtagggtctggatcctacaaaccacggaa

SEQ ID NO: 110044 - DNA, 74 bp, Homo sapiens
aatgagtttgtttgtgatgcaagtagggtctggatcctacaaaccacggaagacttgcagacaaggcagtttct

SEQ ID NO: 110045 - DNA, 75 bp, Homo sapiens
tttgtttgtgatgcaagtagggtctggatcctacaaaccacggaagacttgcagacaaggcagtttcttctggaa

SEQ ID NO: 110046 - DNA, 74 bp, Homo sapiens
atgcaagtagggtctggatcctacaaaccacggaagacttgcagacaaggcagtttcttctggaagcttcccca

SEQ ID NO: 110047 - DNA, 72 bp, Homo sapiens
gggtctggatcctacaaaccacggaagacttgcagacaaggcagtttcttctggaagcttccccagggaaga

SEQ ID NO: 110048 - DNA, 71 bp, Homo sapiens
cctacaaaccacggaagacttgcagacaaggcagtttcttctggaagcttccccagggaagagcaggaacc

SEQ ID NO: 110049 - DNA, 73 bp, Homo sapiens
acggaagacttgcagacaaggcagtttcttctggaagcttccccagggaagagcaggaacccccagaatggca

SEQ ID NO: 110050 - DNA, 76 bp, Homo sapiens
agacaaggcagtttcttctggaagcttccccagggaagagcaggaacccccagaatggcagagctgcacgtgtgcc

SEQ ID NO: 110051 - DNA, 79 bp, Homo sapiens
tttcttctggaagcttccccagggaagagcaggaacccccagaatggcagagctgcacgtgtgccgctgtgtgacattc

SEQ ID NO: 110052 - DNA, 79 bp, Homo sapiens
agcttccccagggaagagcaggaacccccagaatggcagagctgcacgtgtgccgctgtgtgacattcctggtgctaaa

SEQ ID NO: 110053 - DNA, 79 bp, Homo sapiens
aggaacccccagaatggcagagctgcacgtgtgccgctgtgtgacattcctggtgctaaaaagaaacagtgatggatct

SEQ ID NO: 110054 - DNA, 82 bp, Homo sapiens
agaatggcagagctgcacgtgtgccgctgtgtgacattcctggtgctaaaaagaaacagtgatggatctttgccatagtggg

SEQ ID NO: 110055 - DNA, 78 bp, Homo sapiens
agctgcacgtgtgccgctgtgtgacattcctggtgctaaaaagaaacagtgatggatctttgccatagtggggaaaaa

SEQ ID NO: 110056 - DNA, 77 bp, Homo sapiens
acgtgtgccgctgtgtgacattcctggtgctaaaaagaaacagtgatggatctttgccatagtggggaaaaatgagc

SEQ ID NO: 110057 - DNA, 78 bp, Homo sapiens
tgacattcctggtgctaaaaagaaacagtgatggatctttgccatagtggggaaaaatgagccagtgcaataggccta

SEQ ID NO: 110058 - DNA, 73 bp, Homo sapiens
aaaaagaaacagtgatggatctttgccatagtggggaaaaatgagccagtgcaataggcctagtcataaaagg

SEQ ID NO: 110059 - DNA, 77 bp, Homo sapiens
agtgatggatctttgccatagtggggaaaaatgagccagtgcaataggcctagtcataaaaggtggatcagagggag

SEQ ID NO: 110060 - DNA, 72 bp, Homo sapiens
taggcctagtcataaaaggtggatcagagggagggttttagttgaaagcttttgagaggttgagcttcatta

SEQ ID NO: 110061 - DNA, 73 bp, Homo sapiens
ctagtcataaaaggtggatcagagggagggttttagttgaaagcttttgagaggttgagcttcattatcctgc

SEQ ID NO: 110062 - DNA, 79 bp, Homo sapiens
tggatcagagggagggttttagttgaaagcttttgagaggttgagcttcattatcctgctgctgttatatgatgaacca

SEQ ID NO: 110063 - DNA, 77 bp, Homo sapiens
agagggagggttttagttgaaagcttttgagaggttgagcttcattatcctgctgctgttatatgatgaaccacaga

SEQ ID NO: 110064 - DNA, 81 bp, Homo sapiens
ttttagttgaaagcttttgagaggttgagcttcattatcctgctgctgttatatgatgaaccacagagacgtgcacccata

SEQ ID NO: 110065 - DNA, 82 bp, Homo sapiens
ttttgagaggttgagcttcattatcctgctgctgttatatgatgaaccacagagacgtgcacccataccactggggctcttc

SEQ ID NO: 110066 - DNA, 83 bp, Homo sapiens
tgagcttcattatcctgctgctgttatatgatgaaccacagagacgtgcacccataccactggggctcttccattaacggata

SEQ ID NO: 110067 - DNA, 80 bp, Homo sapiens
ttatcctgctgctgttatatgatgaaccacagagacgtgcacccataccactggggctcttccattaacggatataatgt

SEQ ID NO: 110068 - DNA, 79 bp, Homo sapiens
ctgttatatgatgaaccacagagacgtgcacccataccactggggctcttccattaacggatataatgttgggatatga

SEQ ID NO: 110069 - DNA, 76 bp, Homo sapiens
atgaaccacagagacgtgcacccataccactggggctcttccattaacggatataatgttgggatatgaggaataa

SEQ ID NO: 110070 - DNA, 73 bp, Homo sapiens
acagagacgtgcacccataccactggggctcttccattaacggatataatgttgggatatgaggaataatttt

SEQ ID NO: 110071 - DNA, 70 bp, Homo sapiens
gtgcacccataccactggggctcttccattaacggatataatgttgggatatgaggaataattttttttt

SEQ ID NO: 110072 - DNA, 72 bp, Homo sapiens
caccgtgcccggctggggaataaatttttgctatacattttgcataaaagcagacaaatgctcagtaacttt

SEQ ID NO: 110073 - DNA, 73 bp, Homo sapiens
cccggctggggaataaatttttgctatacattttgcataaaagcagacaaatgctcagtaactttttcataga

SEQ ID NO: 110074 - DNA, 76 bp, Homo sapiens
taaatttttgctatacattttgcataaaagcagacaaatgctcagtaactttttcatagaaacatctgtaactctg

SEQ ID NO: 110075 - DNA, 81 bp, Homo sapiens
tgctatacattttgcataaaagcagacaaatgctcagtaactttttcatagaaacatctgtaactctgttcatgaggagaa

SEQ ID NO: 110076 - DNA, 80 bp, Homo sapiens
atacattttgcataaaagcagacaaatgctcagtaactttttcatagaaacatctgtaactctgttcatgaggagaatgc

SEQ ID NO: 110077 - DNA, 80 bp, Homo sapiens
attttgcataaaagcagacaaatgctcagtaactttttcatagaaacatctgtaactctgttcatgaggagaatgccaca

SEQ ID NO: 110078 - DNA, 79 bp, Homo sapiens
ataaaagcagacaaatgctcagtaactttttcatagaaacatctgtaactctgttcatgaggagaatgccacaggtcac

SEQ ID NO: 110079 - DNA, 80 bp, Homo sapiens
cagacaaatgctcagtaactttttcatagaaacatctgtaactctgttcatgaggagaatgccacaggtcactcacttat

SEQ ID NO: 110080 - DNA, 79 bp, Homo sapiens
ctcagtaactttttcatagaaacatctgtaactctgttcatgaggagaatgccacaggtcactcacttatttgcacaaa

SEQ ID NO: 110081 - DNA, 78 bp, Homo sapiens
agtaactttttcatagaaacatctgtaactctgttcatgaggagaatgccacaggtcactcacttatttgcacaaaga

SEQ ID NO: 110082 - DNA, 80 bp, Homo sapiens
atagaaacatctgtaactctgttcatgaggagaatgccacaggtcactcacttatttgcacaaagagccgtacagttcaa

SEQ ID NO: 110083 - DNA, 79 bp, Homo sapiens
aacatctgtaactctgttcatgaggagaatgccacaggtcactcacttatttgcacaaagagccgtacagttcaaggga

SEQ ID NO: 110084 - DNA, 78 bp, Homo sapiens
agaatgccacaggtcactcacttatttgcacaaagagccgtacagttcaagggaacgctgtgtcattctgtccaacca

SEQ ID NO: 110085 - DNA, 75 bp, Homo sapiens
ccacaggtcactcacttatttgcacaaagagccgtacagttcaagggaacgctgtgtcattctgtccaaccaggg

SEQ ID NO: 110086 - DNA, 75 bp, Homo sapiens
acaaagagccgtacagttcaagggaacgctgtgtcattctgtccaaccagggggttagagaatcactgatcacta

SEQ ID NO: 110087 - DNA, 77 bp, Homo sapiens
tacagttcaagggaacgctgtgtcattctgtccaaccagggggttagagaatcactgatcactaaagccaggagcaa

SEQ ID NO: 110088 - DNA, 77 bp, Homo sapiens
aagggaacgctgtgtcattctgtccaaccagggggttagagaatcactgatcactaaagccaggagcaatgctggaa

SEQ ID NO: 110089 - DNA, 80 bp, Homo sapiens
ctgtgtcattctgtccaaccagggggttagagaatcactgatcactaaagccaggagcaatgctggaagcctgtctccac

SEQ ID NO: 110090 - DNA, 80 bp, Homo sapiens
ggggttagagaatcactgatcactaaagccaggagcaatgctggaagcctgtctccactgctgcgctggcgaagaccggg

SEQ ID NO: 110091 - DNA, 82 bp, Homo sapiens
agaatcactgatcactaaagccaggagcaatgctggaagcctgtctccactgctgcgctggcgaagaccggggcccagcctc

SEQ ID NO: 110092 - DNA, 80 bp, Homo sapiens
aggagcaatgctggaagcctgtctccactgctgcgctggcgaagaccggggcccagcctctgtggttccaccttgcctgc

SEQ ID NO: 110093 - DNA, 79 bp, Homo sapiens
aatgctggaagcctgtctccactgctgcgctggcgaagaccggggcccagcctctgtggttccaccttgcctgcctctc

SEQ ID NO: 110094 - DNA, 80 bp, Homo sapiens
ctgtctccactgctgcgctggcgaagaccggggcccagcctctgtggttccaccttgcctgcctctcttgctatatccca

SEQ ID NO: 110095 - DNA, 81 bp, Homo sapiens
actgctgcgctggcgaagaccggggcccagcctctgtggttccaccttgcctgcctctcttgctatatcccagctgcttca

SEQ ID NO: 110096 - DNA, 76 bp, Homo sapiens
aagaccggggcccagcctctgtggttccaccttgcctgcctctcttgctatatcccagctgcttcaggttttctga

SEQ ID NO: 110097 - DNA, 79 bp, Homo sapiens
cccagcctctgtggttccaccttgcctgcctctcttgctatatcccagctgcttcaggttttctgaacatgccaggccc

SEQ ID NO: 110098 - DNA, 78 bp, Homo sapiens
ctctgtggttccaccttgcctgcctctcttgctatatcccagctgcttcaggttttctgaacatgccaggcccctacc

SEQ ID NO: 110099 - DNA, 79 bp, Homo sapiens
tctcttgctatatcccagctgcttcaggttttctgaacatgccaggcccctacctgcccctagatccctggacatgcct

SEQ ID NO: 110100 - DNA, 76 bp, Homo sapiens
tatatcccagctgcttcaggttttctgaacatgccaggcccctacctgcccctagatccctggacatgcctttacc

SEQ ID NO: 110101 - DNA, 74 bp, Homo sapiens
tgcttcaggttttctgaacatgccaggcccctacctgcccctagatccctggacatgcctttacctcctcccga

SEQ ID NO: 110102 - DNA, 71 bp, Homo sapiens
ttttctgaacatgccaggcccctacctgcccctagatccctggacatgcctttacctcctcccgaaattcc

SEQ ID NO: 110103 - DNA, 69 bp, Homo sapiens
aacatgccaggcccctacctgcccctagatccctggacatgcctttacctcctcccgaaattccctcgg

SEQ ID NO: 110104 - DNA, 68 bp, Homo sapiens
ctacctgcccctagatccctggacatgcctttacctcctcccgaaattccctcggtcctctcttccct

SEQ ID NO: 110105 - DNA, 68 bp, Homo sapiens
gacatgcctttacctcctcccgaaattccctcggtcctctcttcccttggctagataccccttgttaa

SEQ ID NO: 110106 - DNA, 66 bp, Homo sapiens
tttacctcctcccgaaattccctcggtcctctcttcccttggctagataccccttgttaaagagaa

SEQ ID NO: 110107 - DNA, 75 bp, Homo sapiens
cctctcttcccttggctagataccccttgttaaagagaatattcacatctgccatggctccctcagcctgggtag

SEQ ID NO: 110108 - DNA, 78 bp, Homo sapiens
cccttgttaaagagaatattcacatctgccatggctccctcagcctgggtaggcgccctgccctgtgcattctggttg

SEQ ID NO: 110109 - DNA, 81 bp, Homo sapiens
agaatattcacatctgccatggctccctcagcctgggtaggcgccctgccctgtgcattctggttggccctatgagtctgt

SEQ ID NO: 110110 - DNA, 80 bp, Homo sapiens
ttcacatctgccatggctccctcagcctgggtaggcgccctgccctgtgcattctggttggccctatgagtctgttccct

SEQ ID NO: 110111 - DNA, 78 bp, Homo sapiens
atggctccctcagcctgggtaggcgccctgccctgtgcattctggttggccctatgagtctgttcccttctgtgtcac

SEQ ID NO: 110112 - DNA, 75 bp, Homo sapiens
agcctgggtaggcgccctgccctgtgcattctggttggccctatgagtctgttcccttctgtgtcacccccagtg

SEQ ID NO: 110113 - DNA, 77 bp, Homo sapiens
gcgccctgccctgtgcattctggttggccctatgagtctgttcccttctgtgtcacccccagtggggcccttgatga

SEQ ID NO: 110114 - DNA, 78 bp, Homo sapiens
tggttggccctatgagtctgttcccttctgtgtcacccccagtggggcccttgatgacatggctgtccatgcagttta

SEQ ID NO: 110115 - DNA, 80 bp, Homo sapiens
ttctgtgtcacccccagtggggcccttgatgacatggctgtccatgcagtttacctctacatagcagctacgggcacttg

SEQ ID NO: 110116 - DNA, 81 bp, Homo sapiens
agtggggcccttgatgacatggctgtccatgcagtttacctctacatagcagctacgggcacttggctgactttatctgac

SEQ ID NO: 110117 - DNA, 86 bp, Homo sapiens
ttgatgacatggctgtccatgcagtttacctctacatagcagctacgggcacttggctgactttatctgaccaaactgcatagcta

SEQ ID NO: 110118 - DNA, 84 bp, Homo sapiens
atggctgtccatgcagtttacctctacatagcagctacgggcacttggctgactttatctgaccaaactgcatagctatcacta

SEQ ID NO: 110119 - DNA, 84 bp, Homo sapiens
ttacctctacatagcagctacgggcacttggctgactttatctgaccaaactgcatagctatcactatgtgcccggcagcattc

SEQ ID NO: 110120 - DNA, 82 bp, Homo sapiens
agctacgggcacttggctgactttatctgaccaaactgcatagctatcactatgtgcccggcagcattcctagcagggatta

SEQ ID NO: 110121 - DNA, 87 bp, Homo sapiens
ggcacttggctgactttatctgaccaaactgcatagctatcactatgtgcccggcagcattcctagcagggattacgatgatgatga

SEQ ID NO: 110122 - DNA, 81 bp, Homo sapiens
gatggtgatgatgactgttatttctgttttacaggtggaaaagcagaggcacaaagcggtgatgtgacttgcctgaagtca

SEQ ID NO: 110123 - DNA, 78 bp, Homo sapiens
atgatgactgttatttctgttttacaggtggaaaagcagaggcacaaagcggtgatgtgacttgcctgaagtcacacg

SEQ ID NO: 110124 - DNA, 76 bp, Homo sapiens
ttatttctgttttacaggtggaaaagcagaggcacaaagcggtgatgtgacttgcctgaagtcacacggctacaaa

SEQ ID NO: 110125 - DNA, 77 bp, Homo sapiens
ttttacaggtggaaaagcagaggcacaaagcggtgatgtgacttgcctgaagtcacacggctacaaagtggtagata

SEQ ID NO: 110126 - DNA, 75 bp, Homo sapiens
aaaagcagaggcacaaagcggtgatgtgacttgcctgaagtcacacggctacaaagtggtagataggggaacggc

SEQ ID NO: 110127 - DNA, 74 bp, Homo sapiens
acaaagcggtgatgtgacttgcctgaagtcacacggctacaaagtggtagataggggaacggctcccacgtctg

SEQ ID NO: 110128 - DNA, 77 bp, Homo sapiens
tgatgtgacttgcctgaagtcacacggctacaaagtggtagataggggaacggctcccacgtctgtatggtctgaac

SEQ ID NO: 110129 - DNA, 73 bp, Homo sapiens
gcctgaagtcacacggctacaaagtggtagataggggaacggctcccacgtctgtatggtctgaactgggttg

SEQ ID NO: 110130 - DNA, 72 bp, Homo sapiens
aagtcacacggctacaaagtggtagataggggaacggctcccacgtctgtatggtctgaactgggttgtgta

SEQ ID NO: 110131 - DNA, 69 bp, Homo sapiens
aaagtggtagataggggaacggctcccacgtctgtatggtctgaactgggttgtgtagtgttccccaaa

SEQ ID NO: 110132 - DNA, 71 bp, Homo sapiens
ggtagataggggaacggctcccacgtctgtatggtctgaactgggttgtgtagtgttccccaaagttcatg

SEQ ID NO: 110133 - DNA, 75 bp, Homo sapiens
ggctcccacgtctgtatggtctgaactgggttgtgtagtgttccccaaagttcatgtccacatagaacctcagaa

SEQ ID NO: 110134 - DNA, 76 bp, Homo sapiens
ccacgtctgtatggtctgaactgggttgtgtagtgttccccaaagttcatgtccacatagaacctcagaatgtgac

SEQ ID NO: 110135 - DNA, 71 bp, Homo sapiens
tgtgaccttatttggatatagcgtttttgaagaagtaactggttaagacgaggtcatcctggattagggtg

SEQ ID NO: 110136 - DNA, 72 bp, Homo sapiens
tatttggatatagcgtttttgaagaagtaactggttaagacgaggtcatcctggattagggtgggctctgaa

SEQ ID NO: 110137 - DNA, 73 bp, Homo sapiens
atatagcgtttttgaagaagtaactggttaagacgaggtcatcctggattagggtgggctctgaatctaatga

SEQ ID NO: 110138 - DNA, 75 bp, Homo sapiens
tttgaagaagtaactggttaagacgaggtcatcctggattagggtgggctctgaatctaatgactgatgtcctta

SEQ ID NO: 110139 - DNA, 80 bp, Homo sapiens
gatgtccttataagaagaaaaaacggacagacagagggaagacctcatatgatgctggaggcagagactgggctgatgta

SEQ ID NO: 110140 - DNA, 79 bp, Homo sapiens
ataagaagaaaaaacggacagacagagggaagacctcatatgatgctggaggcagagactgggctgatgtagcccagaa

SEQ ID NO: 110141 - DNA, 79 bp, Homo sapiens
aaaaacggacagacagagggaagacctcatatgatgctggaggcagagactgggctgatgtagcccagaagctaaggag

SEQ ID NO: 110142 - DNA, 85 bp, Homo sapiens
acagagggaagacctcatatgatgctggaggcagagactgggctgatgtagcccagaagctaaggagtgctggcaactgctgtaa

SEQ ID NO: 110143 - DNA, 84 bp, Homo sapiens
aagacctcatatgatgctggaggcagagactgggctgatgtagcccagaagctaaggagtgctggcaactgctgtaaggtagaa

SEQ ID NO: 110144 - DNA, 84 bp, Homo sapiens
atatgatgctggaggcagagactgggctgatgtagcccagaagctaaggagtgctggcaactgctgtaaggtagaaagaggcaa

SEQ ID NO: 110145 - DNA, 79 bp, Homo sapiens
ggaggcagagactgggctgatgtagcccagaagctaaggagtgctggcaactgctgtaaggtagaaagaggcaaggaag

SEQ ID NO: 110146 - DNA, 77 bp, Homo sapiens
agagactgggctgatgtagcccagaagctaaggagtgctggcaactgctgtaaggtagaaagaggcaaggaaggatt

SEQ ID NO: 110147 - DNA, 76 bp, Homo sapiens
actgggctgatgtagcccagaagctaaggagtgctggcaactgctgtaaggtagaaagaggcaaggaaggatttcc

SEQ ID NO: 110148 - DNA, 74 bp, Homo sapiens
atgtagcccagaagctaaggagtgctggcaactgctgtaaggtagaaagaggcaaggaaggatttccccctaga

SEQ ID NO: 110149 - DNA, 74 bp, Homo sapiens
aagctaaggagtgctggcaactgctgtaaggtagaaagaggcaaggaaggatttccccctagagcctgcacagg

SEQ ID NO: 110150 - DNA, 76 bp, Homo sapiens
taaggagtgctggcaactgctgtaaggtagaaagaggcaaggaaggatttccccctagagcctgcacagggagcaa

SEQ ID NO: 110151 - DNA, 75 bp, Homo sapiens
agtgctggcaactgctgtaaggtagaaagaggcaaggaaggatttccccctagagcctgcacagggagcaagggc

SEQ ID NO: 110152 - DNA, 74 bp, Homo sapiens
actgctgtaaggtagaaagaggcaaggaaggatttccccctagagcctgcacagggagcaagggcctgccaaca

SEQ ID NO: 110153 - DNA, 72 bp, Homo sapiens
tgtaaggtagaaagaggcaaggaaggatttccccctagagcctgcacagggagcaagggcctgccaacacct

SEQ ID NO: 110154 - DNA, 73 bp, Homo sapiens
tggacttctggcgtccaaagctgtgaaaataatttctgttgttttcagccacccagtttgtagtaatgtgtta

SEQ ID NO: 110155 - DNA, 73 bp, Homo sapiens
tgtgaaaataatttctgttgttttcagccacccagtttgtagtaatgtgttatggcaagcatgggaaagtaac

SEQ ID NO: 110156 - DNA, 74 bp, Homo sapiens
ttgttttcagccacccagtttgtagtaatgtgttatggcaagcatgggaaagtaacgcaccccctctcaggaga

SEQ ID NO: 110157 - DNA, 73 bp, Homo sapiens
ccagtttgtagtaatgtgttatggcaagcatgggaaagtaacgcaccccctctcaggagagtgaagcgggcgg

SEQ ID NO: 110158 - DNA, 76 bp, Homo sapiens
ttgtagtaatgtgttatggcaagcatgggaaagtaacgcaccccctctcaggagagtgaagcgggcggtgtctcca

SEQ ID NO: 110159 - DNA, 74 bp, Homo sapiens
gtgttatggcaagcatgggaaagtaacgcaccccctctcaggagagtgaagcgggcggtgtctccaggggcctg

SEQ ID NO: 110160 - DNA, 72 bp, Homo sapiens
aagcatgggaaagtaacgcaccccctctcaggagagtgaagcgggcggtgtctccaggggcctggacatttc

SEQ ID NO: 110161 - DNA, 72 bp, Homo sapiens
tgggaaagtaacgcaccccctctcaggagagtgaagcgggcggtgtctccaggggcctggacatttctgccc

SEQ ID NO: 110162 - DNA, 71 bp, Homo sapiens
aagtaacgcaccccctctcaggagagtgaagcgggcggtgtctccaggggcctggacatttctgccccttc

SEQ ID NO: 110163 - DNA, 72 bp, Homo sapiens
acgcaccccctctcaggagagtgaagcgggcggtgtctccaggggcctggacatttctgccccttcccagga

SEQ ID NO: 110164 - DNA, 74 bp, Homo sapiens
gtgaagcgggcggtgtctccaggggcctggacatttctgccccttcccaggacagggtacagagccagcaggcc

SEQ ID NO: 110165 - DNA, 75 bp, Homo sapiens
gcggtgtctccaggggcctggacatttctgccccttcccaggacagggtacagagccagcaggcctgcttccctg

SEQ ID NO: 110166 - DNA, 73 bp, Homo sapiens
ccttcccaggacagggtacagagccagcaggcctgcttccctggaagttctgcccggtggtggatgtagtggg

SEQ ID NO: 110167 - DNA, 74 bp, Homo sapiens
agggtacagagccagcaggcctgcttccctggaagttctgcccggtggtggatgtagtgggggactcccagatg

SEQ ID NO: 110168 - DNA, 79 bp, Homo sapiens
ccagcaggcctgcttccctggaagttctgcccggtggtggatgtagtgggggactcccagatggcgcacacattgcaca

SEQ ID NO: 110169 - DNA, 80 bp, Homo sapiens
aagttctgcccggtggtggatgtagtgggggactcccagatggcgcacacattgcacaggcaggccagcatgttcctctc

SEQ ID NO: 110170 - DNA, 82 bp, Homo sapiens
cggtggtggatgtagtgggggactcccagatggcgcacacattgcacaggcaggccagcatgttcctctcccaagatggcat

SEQ ID NO: 110171 - DNA, 83 bp, Homo sapiens
tggatgtagtgggggactcccagatggcgcacacattgcacaggcaggccagcatgttcctctcccaagatggcattttggga

SEQ ID NO: 110172 - DNA, 85 bp, Homo sapiens
gactcccagatggcgcacacattgcacaggcaggccagcatgttcctctcccaagatggcattttgggaggtacacagtgctgga

SEQ ID NO: 110173 - DNA, 84 bp, Homo sapiens
acacattgcacaggcaggccagcatgttcctctcccaagatggcattttgggaggtacacagtgctggagcacgagccaggagc

SEQ ID NO: 110174 - DNA, 80 bp, Homo sapiens
acaggcaggccagcatgttcctctcccaagatggcattttgggaggtacacagtgctggagcacgagccaggagcctggg

SEQ ID NO: 110175 - DNA, 77 bp, Homo sapiens
atgttcctctcccaagatggcattttgggaggtacacagtgctggagcacgagccaggagcctggggcacattcccg

SEQ ID NO: 110176 - DNA, 78 bp, Homo sapiens
ccaagatggcattttgggaggtacacagtgctggagcacgagccaggagcctggggcacattcccggcagccagactt

SEQ ID NO: 110177 - DNA, 77 bp, Homo sapiens
attttgggaggtacacagtgctggagcacgagccaggagcctggggcacattcccggcagccagactttggaaagca

SEQ ID NO: 110178 - DNA, 79 bp, Homo sapiens
gggaggtacacagtgctggagcacgagccaggagcctggggcacattcccggcagccagactttggaaagcaggaggca

SEQ ID NO: 110179 - DNA, 78 bp, Homo sapiens
agtgctggagcacgagccaggagcctggggcacattcccggcagccagactttggaaagcaggaggcagccacctggg

SEQ ID NO: 110180 - DNA, 76 bp, Homo sapiens
agccaggagcctggggcacattcccggcagccagactttggaaagcaggaggcagccacctggggcttcaatctcc

SEQ ID NO: 110181 - DNA, 73 bp, Homo sapiens
ctggggcacattcccggcagccagactttggaaagcaggaggcagccacctggggcttcaatctcccttttta

SEQ ID NO: 110182 - DNA, 71 bp, Homo sapiens
acattcccggcagccagactttggaaagcaggaggcagccacctggggcttcaatctccctttttagaaaa

SEQ ID NO: 110183 - DNA, 72 bp, Homo sapiens
agccagactttggaaagcaggaggcagccacctggggcttcaatctccctttttagaaaatgaatccctgaa

SEQ ID NO: 110184 - DNA, 73 bp, Homo sapiens
acctggggcttcaatctccctttttagaaaatgaatccctgaagtgaacatgagtcaggtactgttctgggca

SEQ ID NO: 110185 - DNA, 75 bp, Homo sapiens
aatctccctttttagaaaatgaatccctgaagtgaacatgagtcaggtactgttctgggcactgaggatggatta

SEQ ID NO: 110186 - DNA, 79 bp, Homo sapiens
ttttagaaaatgaatccctgaagtgaacatgagtcaggtactgttctgggcactgaggatggattaggcagtgagattg

SEQ ID NO: 110187 - DNA, 79 bp, Homo sapiens
aaatgaatccctgaagtgaacatgagtcaggtactgttctgggcactgaggatggattaggcagtgagattggtcccag

SEQ ID NO: 110188 - DNA, 82 bp, Homo sapiens
aagtgaacatgagtcaggtactgttctgggcactgaggatggattaggcagtgagattggtcccagtctctgtctccatgga

SEQ ID NO: 110189 - DNA, 81 bp, Homo sapiens
atgagtcaggtactgttctgggcactgaggatggattaggcagtgagattggtcccagtctctgtctccatggaattaaca

SEQ ID NO: 110190 - DNA, 79 bp, Homo sapiens
tactgttctgggcactgaggatggattaggcagtgagattggtcccagtctctgtctccatggaattaacatcctaggg

SEQ ID NO: 110191 - DNA, 80 bp, Homo sapiens
ctgaggatggattaggcagtgagattggtcccagtctctgtctccatggaattaacatcctaggggtgaccagccatgaa

SEQ ID NO: 110192 - DNA, 78 bp, Homo sapiens
attaggcagtgagattggtcccagtctctgtctccatggaattaacatcctaggggtgaccagccatgaatctcccaa

SEQ ID NO: 110193 - DNA, 79 bp, Homo sapiens
tgagattggtcccagtctctgtctccatggaattaacatcctaggggtgaccagccatgaatctcccaatcattaaaca

SEQ ID NO: 110194 - DNA, 77 bp, Homo sapiens
ccagtctctgtctccatggaattaacatcctaggggtgaccagccatgaatctcccaatcattaaacaagtggtgat

SEQ ID NO: 110195 - DNA, 79 bp, Homo sapiens
tctccatggaattaacatcctaggggtgaccagccatgaatctcccaatcattaaacaagtggtgatttcagagagtga

SEQ ID NO: 110196 - DNA, 77 bp, Homo sapiens
atggaattaacatcctaggggtgaccagccatgaatctcccaatcattaaacaagtggtgatttcagagagtgataa

SEQ ID NO: 110197 - DNA, 74 bp, Homo sapiens
accagccatgaatctcccaatcattaaacaagtggtgatttcagagagtgataagaggtataaagaaaaactcc

SEQ ID NO: 110198 - DNA, 72 bp, Homo sapiens
aatctcccaatcattaaacaagtggtgatttcagagagtgataagaggtataaagaaaaactcccctctcaa

SEQ ID NO: 110199 - DNA, 72 bp, Homo sapiens
cattaaacaagtggtgatttcagagagtgataagaggtataaagaaaaactcccctctcaaaagattatgac

SEQ ID NO: 110200 - DNA, 70 bp, Homo sapiens
aagtggtgatttcagagagtgataagaggtataaagaaaaactcccctctcaaaagattatgacgtttct

SEQ ID NO: 110201 - DNA, 69 bp, Homo sapiens
gtgataagaggtataaagaaaaactcccctctcaaaagattatgacgtttctttcacaagattaaacat

SEQ ID NO: 110202 - DNA, 69 bp, Homo sapiens
gtataaagaaaaactcccctctcaaaagattatgacgtttctttcacaagattaaacattacaaatata

SEQ ID NO: 110203 - DNA, 66 bp, Homo sapiens
aaactcccctctcaaaagattatgacgtttctttcacaagattaaacattacaaatataaaaaaaa

SEQ ID NO: 110204 - DNA, 74 bp, Homo sapiens
aaaaaaaaacaacccaagaaatgggatggcgatgccctttggccatgttcactgctgcatatccacacaaacgc

SEQ ID NO: 110205 - DNA, 76 bp, Homo sapiens
aaaacaacccaagaaatgggatggcgatgccctttggccatgttcactgctgcatatccacacaaacgccttcgtg

SEQ ID NO: 110206 - DNA, 82 bp, Homo sapiens
aagaaatgggatggcgatgccctttggccatgttcactgctgcatatccacacaaacgccttcgtggcagcccaggcagtgc

SEQ ID NO: 110207 - DNA, 86 bp, Homo sapiens
atggcgatgccctttggccatgttcactgctgcatatccacacaaacgccttcgtggcagcccaggcagtgcccagcaagctcaga

SEQ ID NO: 110208 - DNA, 86 bp, Homo sapiens
ctttggccatgttcactgctgcatatccacacaaacgccttcgtggcagcccaggcagtgcccagcaagctcagactcagccagtc

SEQ ID NO: 110209 - DNA, 87 bp, Homo sapiens
ttcactgctgcatatccacacaaacgccttcgtggcagcccaggcagtgcccagcaagctcagactcagccagtcctcgagctggcc

SEQ ID NO: 110210 - DNA, 83 bp, Homo sapiens
atatccacacaaacgccttcgtggcagcccaggcagtgcccagcaagctcagactcagccagtcctcgagctggcctggcagg

SEQ ID NO: 110211 - DNA, 82 bp, Homo sapiens
aaacgccttcgtggcagcccaggcagtgcccagcaagctcagactcagccagtcctcgagctggcctggcagggctttgcaa

SEQ ID NO: 110212 - DNA, 86 bp, Homo sapiens
ttcgtggcagcccaggcagtgcccagcaagctcagactcagccagtcctcgagctggcctggcagggctttgcaatgcagctacct

SEQ ID NO: 110213 - DNA, 85 bp, Homo sapiens
aggcagtgcccagcaagctcagactcagccagtcctcgagctggcctggcagggctttgcaatgcagctaccttgtggccagagg

SEQ ID NO: 110214 - DNA, 84 bp, Homo sapiens
agcaagctcagactcagccagtcctcgagctggcctggcagggctttgcaatgcagctaccttgtggccagaggggcccatcca

SEQ ID NO: 110215 - DNA, 81 bp, Homo sapiens
agactcagccagtcctcgagctggcctggcagggctttgcaatgcagctaccttgtggccagaggggcccatccaagtcca

SEQ ID NO: 110216 - DNA, 80 bp, Homo sapiens
tggcctggcagggctttgcaatgcagctaccttgtggccagaggggcccatccaagtccagtttctccatgtcagggcta

SEQ ID NO: 110217 - DNA, 79 bp, Homo sapiens
agggctttgcaatgcagctaccttgtggccagaggggcccatccaagtccagtttctccatgtcagggctagcaatgag

SEQ ID NO: 110218 - DNA, 80 bp, Homo sapiens
aatgcagctaccttgtggccagaggggcccatccaagtccagtttctccatgtcagggctagcaatgaggaggatgactg

SEQ ID NO: 110219 - DNA, 82 bp, Homo sapiens
atccaagtccagtttctccatgtcagggctagcaatgaggaggatgactgtgcaggcagcccgcccaggcctcagcagggag

SEQ ID NO: 110220 - DNA, 81 bp, Homo sapiens
agtttctccatgtcagggctagcaatgaggaggatgactgtgcaggcagcccgcccaggcctcagcagggaggggagcgga

SEQ ID NO: 110221 - DNA, 81 bp, Homo sapiens
atgtcagggctagcaatgaggaggatgactgtgcaggcagcccgcccaggcctcagcagggaggggagcggagactccctc

SEQ ID NO: 110222 - DNA, 76 bp, Homo sapiens
caatgaggaggatgactgtgcaggcagcccgcccaggcctcagcagggaggggagcggagactccctccgggtggt

SEQ ID NO: 110223 - DNA, 75 bp, Homo sapiens
aggatgactgtgcaggcagcccgcccaggcctcagcagggaggggagcggagactccctccgggtggttctctag

SEQ ID NO: 110224 - DNA, 79 bp, Homo sapiens
tgtgcaggcagcccgcccaggcctcagcagggaggggagcggagactccctccgggtggttctctaggcagagctgcca

SEQ ID NO: 110225 - DNA, 76 bp, Homo sapiens
gcccaggcctcagcagggaggggagcggagactccctccgggtggttctctaggcagagctgccagcagggtggac

SEQ ID NO: 110226 - DNA, 72 bp, Homo sapiens
gggagcggagactccctccgggtggttctctaggcagagctgccagcagggtggacggttccctgaaaggac

SEQ ID NO: 110227 - DNA, 72 bp, Homo sapiens
agactccctccgggtggttctctaggcagagctgccagcagggtggacggttccctgaaaggaccactctct

SEQ ID NO: 110228 - DNA, 75 bp, Homo sapiens
gggtggttctctaggcagagctgccagcagggtggacggttccctgaaaggaccactctcttgccctgccaggaa

SEQ ID NO: 110229 - DNA, 78 bp, Homo sapiens
ttctctaggcagagctgccagcagggtggacggttccctgaaaggaccactctcttgccctgccaggaagggcatctg

SEQ ID NO: 110230 - DNA, 73 bp, Homo sapiens
tgccagcagggtggacggttccctgaaaggaccactctcttgccctgccaggaagggcatctggggcctttgg

SEQ ID NO: 110231 - DNA, 69 bp, Homo sapiens
agggtggacggttccctgaaaggaccactctcttgccctgccaggaagggcatctggggcctttgggaa

SEQ ID NO: 110232 - DNA, 72 bp, Homo sapiens
ttccctgaaaggaccactctcttgccctgccaggaagggcatctggggcctttgggaagcactcgtggaagg

SEQ ID NO: 110233 - DNA, 72 bp, Homo sapiens
aaaggaccactctcttgccctgccaggaagggcatctggggcctttgggaagcactcgtggaaggtgctggg

SEQ ID NO: 110234 - DNA, 78 bp, Homo sapiens
tttgggaagcactcgtggaaggtgctgggtgcttcacctcgtatctggcggacgccatcacctctgctctacttctag

SEQ ID NO: 110235 - DNA, 80 bp, Homo sapiens
tcgtggaaggtgctgggtgcttcacctcgtatctggcggacgccatcacctctgctctacttctagggtgactgctttga

SEQ ID NO: 110236 - DNA, 78 bp, Homo sapiens
aaggtgctgggtgcttcacctcgtatctggcggacgccatcacctctgctctacttctagggtgactgctttgaggaa

SEQ ID NO: 110237 - DNA, 79 bp, Homo sapiens
ttcacctcgtatctggcggacgccatcacctctgctctacttctagggtgactgctttgaggaagacgtggcaatttca

SEQ ID NO: 110238 - DNA, 78 bp, Homo sapiens
tatctggcggacgccatcacctctgctctacttctagggtgactgctttgaggaagacgtggcaatttcagaagcttt

SEQ ID NO: 110239 - DNA, 74 bp, Homo sapiens
acgccatcacctctgctctacttctagggtgactgctttgaggaagacgtggcaatttcagaagctttttaaac

SEQ ID NO: 110240 - DNA, 72 bp, Homo sapiens
acctctgctctacttctagggtgactgctttgaggaagacgtggcaatttcagaagctttttaaacttccca

SEQ ID NO: 110241 - DNA, 73 bp, Homo sapiens
tctacttctagggtgactgctttgaggaagacgtggcaatttcagaagctttttaaacttcccagagcagaag

SEQ ID NO: 110242 - DNA, 71 bp, Homo sapiens
actgctttgaggaagacgtggcaatttcagaagctttttaaacttcccagagcagaaggccaagtttccca

SEQ ID NO: 110243 - DNA, 71 bp, Homo sapiens
tttgaggaagacgtggcaatttcagaagctttttaaacttcccagagcagaaggccaagtttcccaatcta

SEQ ID NO: 110244 - DNA, 73 bp, Homo sapiens
gtggcaatttcagaagctttttaaacttcccagagcagaaggccaagtttcccaatctaatctatatgcctta

SEQ ID NO: 110245 - DNA, 73 bp, Homo sapiens
aagctttttaaacttcccagagcagaaggccaagtttcccaatctaatctatatgccttagcgatgtcactcc

SEQ ID NO: 110246 - DNA, 75 bp, Homo sapiens
ttttaaacttcccagagcagaaggccaagtttcccaatctaatctatatgccttagcgatgtcactcctggacag

SEQ ID NO: 110247 - DNA, 75 bp, Homo sapiens
agagcagaaggccaagtttcccaatctaatctatatgccttagcgatgtcactcctggacagggataattttaaa

SEQ ID NO: 110248 - DNA, 79 bp, Homo sapiens
caagtttcccaatctaatctatatgccttagcgatgtcactcctggacagggataattttaaatgcaagcatactgatg

SEQ ID NO: 110249 - DNA, 82 bp, Homo sapiens
aatctaatctatatgccttagcgatgtcactcctggacagggataattttaaatgcaagcatactgatgtagctataggatg

SEQ ID NO: 110250 - DNA, 81 bp, Homo sapiens
atctatatgccttagcgatgtcactcctggacagggataattttaaatgcaagcatactgatgtagctataggatggggta

SEQ ID NO: 110251 - DNA, 76 bp, Homo sapiens
tcctggacagggataattttaaatgcaagcatactgatgtagctataggatggggtaaggtaagatgtagggtaga

SEQ ID NO: 110252 - DNA, 74 bp, Homo sapiens
ggataattttaaatgcaagcatactgatgtagctataggatggggtaaggtaagatgtagggtagaaaccatta

SEQ ID NO: 110253 - DNA, 74 bp, Homo sapiens
attttaaatgcaagcatactgatgtagctataggatggggtaaggtaagatgtagggtagaaaccattatctta

SEQ ID NO: 110254 - DNA, 71 bp, Homo sapiens
aagcatactgatgtagctataggatggggtaaggtaagatgtagggtagaaaccattatcttaaaaaaaga

SEQ ID NO: 110255 - DNA, 70 bp, Homo sapiens
atgtagctataggatggggtaaggtaagatgtagggtagaaaccattatcttaaaaaaagagcaacttca

SEQ ID NO: 110256 - DNA, 67 bp, Homo sapiens
aggatggggtaaggtaagatgtagggtagaaaccattatcttaaaaaaagagcaacttcagagaaaa

SEQ ID NO: 110257 - DNA, 68 bp, Homo sapiens
ggtaagatgtagggtagaaaccattatcttaaaaaaagagcaacttcagagaaaaaagcagttctagg

SEQ ID NO: 110258 - DNA, 69 bp, Homo sapiens
tgtagggtagaaaccattatcttaaaaaaagagcaacttcagagaaaaaagcagttctaggggcaaaca

SEQ ID NO: 110259 - DNA, 69 bp, Homo sapiens
cattatcttaaaaaaagagcaacttcagagaaaaaagcagttctaggggcaaacaaaactgtaccagag

SEQ ID NO: 110260 - DNA, 68 bp, Homo sapiens
aaaaagagcaacttcagagaaaaaagcagttctaggggcaaacaaaactgtaccagaggggctcctag

SEQ ID NO: 110261 - DNA, 68 bp, Homo sapiens
aacttcagagaaaaaagcagttctaggggcaaacaaaactgtaccagaggggctcctaggaacctcag

SEQ ID NO: 110262 - DNA, 67 bp, Homo sapiens
aaaaagcagttctaggggcaaacaaaactgtaccagaggggctcctaggaacctcagggactttcca

SEQ ID NO: 110263 - DNA, 67 bp, Homo sapiens
agttctaggggcaaacaaaactgtaccagaggggctcctaggaacctcagggactttccatttgatt

SEQ ID NO: 110264 - DNA, 68 bp, Homo sapiens
aacaaaactgtaccagaggggctcctaggaacctcagggactttccatttgatttgccttttcaggta

SEQ ID NO: 110265 - DNA, 69 bp, Homo sapiens
taccagaggggctcctaggaacctcagggactttccatttgatttgccttttcaggtaaaacaccatta

SEQ ID NO: 110266 - DNA, 71 bp, Homo sapiens
gctcctaggaacctcagggactttccatttgatttgccttttcaggtaaaacaccattaataggagccaga

SEQ ID NO: 110267 - DNA, 71 bp, Homo sapiens
aacctcagggactttccatttgatttgccttttcaggtaaaacaccattaataggagccagaatagagtca

SEQ ID NO: 110268 - DNA, 73 bp, Homo sapiens
actttccatttgatttgccttttcaggtaaaacaccattaataggagccagaatagagtcagaggacaatgtc

SEQ ID NO: 110269 - DNA, 73 bp, Homo sapiens
tttgatttgccttttcaggtaaaacaccattaataggagccagaatagagtcagaggacaatgtctgtttgtt

SEQ ID NO: 110270 - DNA, 74 bp, Homo sapiens
ttttcaggtaaaacaccattaataggagccagaatagagtcagaggacaatgtctgtttgtttgtccctacaca

SEQ ID NO: 110271 - DNA, 85 bp, Homo sapiens
cacacacacacgggtatgtgactgaggaatgtgacatgaatgacctggcataaatgcaatgttctaatttattccacatcattca

SEQ ID NO: 110272 - DNA, 83 bp, Homo sapiens
acgggtatgtgactgaggaatgtgacatgaatgacctggcataaatgcaatgttctaatttattccacatcattcactgagat

SEQ ID NO: 110273 - DNA, 85 bp, Homo sapiens
actgaggaatgtgacatgaatgacctggcataaatgcaatgttctaatttattccacatcattcactgagattctccactcacta

SEQ ID NO: 110274 - DNA, 82 bp, Homo sapiens
aatgtgacatgaatgacctggcataaatgcaatgttctaatttattccacatcattcactgagattctccactcactaattt

SEQ ID NO: 110275 - DNA, 80 bp, Homo sapiens
atgaatgacctggcataaatgcaatgttctaatttattccacatcattcactgagattctccactcactaattttcctaa

SEQ ID NO: 110276 - DNA, 78 bp, Homo sapiens
ggcataaatgcaatgttctaatttattccacatcattcactgagattctccactcactaattttcctaaaagcagatt

SEQ ID NO: 110277 - DNA, 75 bp, Homo sapiens
gttctaatttattccacatcattcactgagattctccactcactaattttcctaaaagcagattttttcatatcc

SEQ ID NO: 110278 - DNA, 76 bp, Homo sapiens
attccacatcattcactgagattctccactcactaattttcctaaaagcagattttttcatatcctttgaagtcaa

SEQ ID NO: 110279 - DNA, 76 bp, Homo sapiens
atcattcactgagattctccactcactaattttcctaaaagcagattttttcatatcctttgaagtcaagcaagtg

SEQ ID NO: 110280 - DNA, 71 bp, Homo sapiens
gattctccactcactaattttcctaaaagcagattttttcatatcctttgaagtcaagcaagtggttttgg

SEQ ID NO: 110281 - DNA, 69 bp, Homo sapiens
ccactcactaattttcctaaaagcagattttttcatatcctttgaagtcaagcaagtggttttggggaa

SEQ ID NO: 110282 - DNA, 67 bp, Homo sapiens
tttcctaaaagcagattttttcatatcctttgaagtcaagcaagtggttttggggaaagggttgttc

SEQ ID NO: 110283 - DNA, 66 bp, Homo sapiens
aagcagattttttcatatcctttgaagtcaagcaagtggttttggggaaagggttgttccctccgg

SEQ ID NO: 110284 - DNA, 68 bp, Homo sapiens
atatcctttgaagtcaagcaagtggttttggggaaagggttgttccctccgggccggctggcaacata

SEQ ID NO: 110285 - DNA, 67 bp, Homo sapiens
ttgaagtcaagcaagtggttttggggaaagggttgttccctccgggccggctggcaacatacggaat

SEQ ID NO: 110286 - DNA, 65 bp, Homo sapiens
aagtggttttggggaaagggttgttccctccgggccggctggcaacatacggaattgtctcaaaa

SEQ ID NO: 110287 - DNA, 70 bp, Homo sapiens
ctccgggccggctggcaacatacggaattgtctcaaaagccccgttagcaacagaggaaaggtcagcccc

SEQ ID NO: 110288 - DNA, 72 bp, Homo sapiens
caacatacggaattgtctcaaaagccccgttagcaacagaggaaaggtcagccccctcttagtgaatggaga

SEQ ID NO: 110289 - DNA, 70 bp, Homo sapiens
aattgtctcaaaagccccgttagcaacagaggaaaggtcagccccctcttagtgaatggagaaggagaaa

SEQ ID NO: 110290 - DNA, 70 bp, Homo sapiens
tctcaaaagccccgttagcaacagaggaaaggtcagccccctcttagtgaatggagaaggagaaagtaaa

SEQ ID NO: 110291 - DNA, 74 bp, Homo sapiens
tagcaacagaggaaaggtcagccccctcttagtgaatggagaaggagaaagtaaaggttgtgatgataaacata

SEQ ID NO: 110292 - DNA, 72 bp, Homo sapiens
agccccctcttagtgaatggagaaggagaaagtaaaggttgtgatgataaacatagagcaagttttgacaac

SEQ ID NO: 110293 - DNA, 76 bp, Homo sapiens
tagtgaatggagaaggagaaagtaaaggttgtgatgataaacatagagcaagttttgacaaccattggatcattta

SEQ ID NO: 110294 - DNA, 74 bp, Homo sapiens
gaaggagaaagtaaaggttgtgatgataaacatagagcaagttttgacaaccattggatcatttaacagtacca

SEQ ID NO: 110295 - DNA, 76 bp, Homo sapiens
agtaaaggttgtgatgataaacatagagcaagttttgacaaccattggatcatttaacagtaccagaacatctaga

SEQ ID NO: 110296 - DNA, 77 bp, Homo sapiens
tgatgataaacatagagcaagttttgacaaccattggatcatttaacagtaccagaacatctagacggaaccacatt

SEQ ID NO: 110297 - DNA, 72 bp, Homo sapiens
aacatagagcaagttttgacaaccattggatcatttaacagtaccagaacatctagacggaaccacattttt

SEQ ID NO: 110298 - DNA, 70 bp, Homo sapiens
gcaagttttgacaaccattggatcatttaacagtaccagaacatctagacggaaccacatttttttttac

SEQ ID NO: 110299 - DNA, 72 bp, Homo sapiens
acaaccattggatcatttaacagtaccagaacatctagacggaaccacatttttttttaccattgctattca

SEQ ID NO: 110300 - DNA, 71 bp, Homo sapiens
ggatcatttaacagtaccagaacatctagacggaaccacatttttttttaccattgctattcatatatttt

SEQ ID NO: 110301 - DNA, 69 bp, Homo sapiens
acagtaccagaacatctagacggaaccacatttttttttaccattgctattcatatattttttaagaaa

SEQ ID NO: 110302 - DNA, 63 bp, Homo sapiens
ttaaaaaaaaaacttccaagacattttctaaactgggaaggaggataaaatatttacccatgg

SEQ ID NO: 110303 - DNA, 66 bp, Homo sapiens
aaaacttccaagacattttctaaactgggaaggaggataaaatatttacccatggtgtaaactatg

SEQ ID NO: 110304 - DNA, 70 bp, Homo sapiens
aactgggaaggaggataaaatatttacccatggtgtaaactatgtaaaatgcaataatgtgtaagacctg

SEQ ID NO: 110305 - DNA, 74 bp, Homo sapiens
ggaggataaaatatttacccatggtgtaaactatgtaaaatgcaataatgtgtaagacctggtatttgacagca

SEQ ID NO: 110306 - DNA, 73 bp, Homo sapiens
aatatttacccatggtgtaaactatgtaaaatgcaataatgtgtaagacctggtatttgacagcataacaggg

SEQ ID NO: 110307 - DNA, 77 bp, Homo sapiens
atggtgtaaactatgtaaaatgcaataatgtgtaagacctggtatttgacagcataacagggtgaccatagtcaata

SEQ ID NO: 110308 - DNA, 75 bp, Homo sapiens
aaactatgtaaaatgcaataatgtgtaagacctggtatttgacagcataacagggtgaccatagtcaataataat

SEQ ID NO: 110309 - DNA, 83 bp, Homo sapiens
gtgtgatcacagctccacagctgtgcacctgctatgcgtatacacctactatgcacctaaatgcctaggtacctacatttacg

SEQ ID NO: 110310 - DNA, 79 bp, Homo sapiens
acagctccacagctgtgcacctgctatgcgtatacacctactatgcacctaaatgcctaggtacctacatttacgggta

SEQ ID NO: 110311 - DNA, 76 bp, Homo sapiens
agctgtgcacctgctatgcgtatacacctactatgcacctaaatgcctaggtacctacatttacgggtactacgta

SEQ ID NO: 110312 - DNA, 72 bp, Homo sapiens
tgctatgcgtatacacctactatgcacctaaatgcctaggtacctacatttacgggtactacgtacccgtaa

SEQ ID NO: 110313 - DNA, 68 bp, Homo sapiens
tacacctactatgcacctaaatgcctaggtacctacatttacgggtactacgtacccgtaaaaattga

SEQ ID NO: 110314 - DNA, 66 bp, Homo sapiens
ctactatgcacctaaatgcctaggtacctacatttacgggtactacgtacccgtaaaaattgaaaa

SEQ ID NO: 110315 - DNA, 62 bp, Homo sapiens
cctaaatgcctaggtacctacatttacgggtactacgtacccgtaaaaattgaaaattaaaa

SEQ ID NO: 110316 - DNA, 73 bp, Homo sapiens
aaaataaataaacgaaatgatctattatcttcttctactgatgaggacataatgaagggtttggtatgttaga

SEQ ID NO: 110317 - DNA, 77 bp, Homo sapiens
aataaacgaaatgatctattatcttcttctactgatgaggacataatgaagggtttggtatgttagactcatacaca

SEQ ID NO: 110318 - DNA, 81 bp, Homo sapiens
aatgatctattatcttcttctactgatgaggacataatgaagggtttggtatgttagactcatacacatatatgcagactt

SEQ ID NO: 110319 - DNA, 81 bp, Homo sapiens
tctattatcttcttctactgatgaggacataatgaagggtttggtatgttagactcatacacatatatgcagacttttgtg

SEQ ID NO: 110320 - DNA, 76 bp, Homo sapiens
atgaggacataatgaagggtttggtatgttagactcatacacatatatgcagacttttgtggttgtagttaaattg

SEQ ID NO: 110321 - DNA, 76 bp, Homo sapiens
gggtttggtatgttagactcatacacatatatgcagacttttgtggttgtagttaaattggtcaatagatatagac

SEQ ID NO: 110322 - DNA, 78 bp, Homo sapiens
ggtatgttagactcatacacatatatgcagacttttgtggttgtagttaaattggtcaatagatatagactgacctaa

SEQ ID NO: 110323 - DNA, 77 bp, Homo sapiens
gttagactcatacacatatatgcagacttttgtggttgtagttaaattggtcaatagatatagactgacctaagaaa

SEQ ID NO: 110324 - DNA, 77 bp, Homo sapiens
ctcatacacatatatgcagacttttgtggttgtagttaaattggtcaatagatatagactgacctaagaaaagagga

SEQ ID NO: 110325 - DNA, 72 bp, Homo sapiens
atatgcagacttttgtggttgtagttaaattggtcaatagatatagactgacctaagaaaagaggaattaac

SEQ ID NO: 110326 - DNA, 70 bp, Homo sapiens
ttttgtggttgtagttaaattggtcaatagatatagactgacctaagaaaagaggaattaacttccagcc

SEQ ID NO: 110327 - DNA, 72 bp, Homo sapiens
gtagttaaattggtcaatagatatagactgacctaagaaaagaggaattaacttccagcctaatactgactg

SEQ ID NO: 110328 - DNA, 72 bp, Homo sapiens
aaattggtcaatagatatagactgacctaagaaaagaggaattaacttccagcctaatactgactgggcact

SEQ ID NO: 110329 - DNA, 73 bp, Homo sapiens
tagatatagactgacctaagaaaagaggaattaacttccagcctaatactgactgggcacttctgttcccgta

SEQ ID NO: 110330 - DNA, 70 bp, Homo sapiens
acctaagaaaagaggaattaacttccagcctaatactgactgggcacttctgttcccgtacaccctcaga

SEQ ID NO: 110331 - DNA, 72 bp, Homo sapiens
aaaagaggaattaacttccagcctaatactgactgggcacttctgttcccgtacaccctcagagacttcagc

SEQ ID NO: 110332 - DNA, 74 bp, Homo sapiens
attaacttccagcctaatactgactgggcacttctgttcccgtacaccctcagagacttcagccaacttctgaa

SEQ ID NO: 110333 - DNA, 74 bp, Homo sapiens
actgggcacttctgttcccgtacaccctcagagacttcagccaacttctgaagcagttaattggctttcctggc

SEQ ID NO: 110334 - DNA, 73 bp, Homo sapiens
cttctgttcccgtacaccctcagagacttcagccaacttctgaagcagttaattggctttcctggctggaacc

SEQ ID NO: 110335 - DNA, 77 bp, Homo sapiens
accctcagagacttcagccaacttctgaagcagttaattggctttcctggctggaaccgcaacgccattgcaggcaa

SEQ ID NO: 110336 - DNA, 78 bp, Homo sapiens
aacttctgaagcagttaattggctttcctggctggaaccgcaacgccattgcaggcaagtgtcttggagctccagaca

SEQ ID NO: 110337 - DNA, 77 bp, Homo sapiens
cagttaattggctttcctggctggaaccgcaacgccattgcaggcaagtgtcttggagctccagacaggcccgtgaa

SEQ ID NO: 110338 - DNA, 76 bp, Homo sapiens
aattggctttcctggctggaaccgcaacgccattgcaggcaagtgtcttggagctccagacaggcccgtgaacagg

SEQ ID NO: 110339 - DNA, 79 bp, Homo sapiens
tggctggaaccgcaacgccattgcaggcaagtgtcttggagctccagacaggcccgtgaacagggtggcaagaagtcta

SEQ ID NO: 110340 - DNA, 78 bp, Homo sapiens
aacgccattgcaggcaagtgtcttggagctccagacaggcccgtgaacagggtggcaagaagtctaggagaacatgaa

SEQ ID NO: 110341 - DNA, 79 bp, Homo sapiens
attgcaggcaagtgtcttggagctccagacaggcccgtgaacagggtggcaagaagtctaggagaacatgaatcagccc

SEQ ID NO: 110342 - DNA, 77 bp, Homo sapiens
tccagacaggcccgtgaacagggtggcaagaagtctaggagaacatgaatcagccccgcatggacacccgtggcatt

SEQ ID NO: 110343 - DNA, 75 bp, Homo sapiens
aggcccgtgaacagggtggcaagaagtctaggagaacatgaatcagccccgcatggacacccgtggcatttaagc

SEQ ID NO: 110344 - DNA, 72 bp, Homo sapiens
aagaagtctaggagaacatgaatcagccccgcatggacacccgtggcatttaagcccgaaaggaaacttgac

SEQ ID NO: 110345 - DNA, 73 bp, Homo sapiens
aacatgaatcagccccgcatggacacccgtggcatttaagcccgaaaggaaacttgactggtagccgaagtca

SEQ ID NO: 110346 - DNA, 75 bp, Homo sapiens
atggacacccgtggcatttaagcccgaaaggaaacttgactggtagccgaagtcagcaatggatgccaagcaggc

SEQ ID NO: 110347 - DNA, 77 bp, Homo sapiens
ccgtggcatttaagcccgaaaggaaacttgactggtagccgaagtcagcaatggatgccaagcaggctgtgccatgt

SEQ ID NO: 110348 - DNA, 76 bp, Homo sapiens
ttaagcccgaaaggaaacttgactggtagccgaagtcagcaatggatgccaagcaggctgtgccatgttgggggac

SEQ ID NO: 110349 - DNA, 76 bp, Homo sapiens
aaggaaacttgactggtagccgaagtcagcaatggatgccaagcaggctgtgccatgttgggggactgaggggtgg

SEQ ID NO: 110350 - DNA, 80 bp, Homo sapiens
aagtcagcaatggatgccaagcaggctgtgccatgttgggggactgaggggtggggaccggctcctgagcatggctggtg

SEQ ID NO: 110351 - DNA, 78 bp, Homo sapiens
aatggatgccaagcaggctgtgccatgttgggggactgaggggtggggaccggctcctgagcatggctggtggccacg

SEQ ID NO: 110352 - DNA, 75 bp, Homo sapiens
aagcaggctgtgccatgttgggggactgaggggtggggaccggctcctgagcatggctggtggccacggaggccc

SEQ ID NO: 110353 - DNA, 72 bp, Homo sapiens
atgttgggggactgaggggtggggaccggctcctgagcatggctggtggccacggaggccccaccttgtgag

SEQ ID NO: 110354 - DNA, 74 bp, Homo sapiens
actgaggggtggggaccggctcctgagcatggctggtggccacggaggccccaccttgtgaggccactatgtcc

SEQ ID NO: 110355 - DNA, 73 bp, Homo sapiens
gggaccggctcctgagcatggctggtggccacggaggccccaccttgtgaggccactatgtcccctttggccc

SEQ ID NO: 110356 - DNA, 78 bp, Homo sapiens
tcctgagcatggctggtggccacggaggccccaccttgtgaggccactatgtcccctttggccctacacatcagactc

SEQ ID NO: 110357 - DNA, 73 bp, Homo sapiens
gctggtggccacggaggccccaccttgtgaggccactatgtcccctttggccctacacatcagactccaccct

SEQ ID NO: 110358 - DNA, 73 bp, Homo sapiens
tggccacggaggccccaccttgtgaggccactatgtcccctttggccctacacatcagactccacccttccca

SEQ ID NO: 110359 - DNA, 75 bp, Homo sapiens
caccttgtgaggccactatgtcccctttggccctacacatcagactccacccttcccagcagactctctgaccct

SEQ ID NO: 110360 - DNA, 77 bp, Homo sapiens
aggccactatgtcccctttggccctacacatcagactccacccttcccagcagactctctgaccctttcagctctga

SEQ ID NO: 110361 - DNA, 77 bp, Homo sapiens
tatgtcccctttggccctacacatcagactccacccttcccagcagactctctgaccctttcagctctgaccacaaa

SEQ ID NO: 110362 - DNA, 75 bp, Homo sapiens
ccctacacatcagactccacccttcccagcagactctctgaccctttcagctctgaccacaaagggtggaactta

SEQ ID NO: 110363 - DNA, 77 bp, Homo sapiens
acatcagactccacccttcccagcagactctctgaccctttcagctctgaccacaaagggtggaacttaatgagctg

SEQ ID NO: 110364 - DNA, 69 bp, Homo sapiens
accctttcagctctgaccacaaagggtggaacttaatgagctgggaacccaatttctcactggttttgg

SEQ ID NO: 110365 - DNA, 66 bp, Homo sapiens
aaagggtggaacttaatgagctgggaacccaatttctcactggttttggtaaattaaaagcgataa

SEQ ID NO: 110366 - DNA, 69 bp, Homo sapiens
gtggaacttaatgagctgggaacccaatttctcactggttttggtaaattaaaagcgataaaatgagta

SEQ ID NO: 110367 - DNA, 69 bp, Homo sapiens
gctgggaacccaatttctcactggttttggtaaattaaaagcgataaaatgagtaatccattaaagtca

SEQ ID NO: 110368 - DNA, 68 bp, Homo sapiens
aacccaatttctcactggttttggtaaattaaaagcgataaaatgagtaatccattaaagtcatcatt

SEQ ID NO: 110369 - DNA, 70 bp, Homo sapiens
ctcactggttttggtaaattaaaagcgataaaatgagtaatccattaaagtcatcatttttcctaactga

SEQ ID NO: 110370 - DNA, 67 bp, Homo sapiens
ttggtaaattaaaagcgataaaatgagtaatccattaaagtcatcatttttcctaactgaaaaaaaa

SEQ ID NO: 110371 - DNA, 69 bp, Homo sapiens
actgaaaaaaaaaagtatgacaactctgttgagacttgacctctttgaaataaaggctgttactttctg

SEQ ID NO: 110372 - DNA, 69 bp, Homo sapiens
aaaaagtatgacaactctgttgagacttgacctctttgaaataaaggctgttactttctgggagctttt

SEQ ID NO: 110373 - DNA, 69 bp, Homo sapiens
tatgacaactctgttgagacttgacctctttgaaataaaggctgttactttctgggagctttttttttt

SEQ ID NO: 110374 - DNA, 81 bp, Homo sapiens
caccatgcctggcatctggcaggtattctgagatttaaatctttagatactgcagtttactcattgtcctttgttgtcatg

SEQ ID NO: 110375 - DNA, 78 bp, Homo sapiens
ggcatctggcaggtattctgagatttaaatctttagatactgcagtttactcattgtcctttgttgtcatggagttta

SEQ ID NO: 110376 - DNA, 76 bp, Homo sapiens
ggcaggtattctgagatttaaatctttagatactgcagtttactcattgtcctttgttgtcatggagtttatagaa

SEQ ID NO: 110377 - DNA, 74 bp, Homo sapiens
ctgagatttaaatctttagatactgcagtttactcattgtcctttgttgtcatggagtttatagaaaaggctat

SEQ ID NO: 110378 - DNA, 73 bp, Homo sapiens
atctttagatactgcagtttactcattgtcctttgttgtcatggagtttatagaaaaggctatttaggaacta

SEQ ID NO: 110379 - DNA, 75 bp, Homo sapiens
tactgcagtttactcattgtcctttgttgtcatggagtttatagaaaaggctatttaggaactaatgctgtctta

SEQ ID NO: 110380 - DNA, 72 bp, Homo sapiens
ctcattgtcctttgttgtcatggagtttatagaaaaggctatttaggaactaatgctgtcttaattattttc

SEQ ID NO: 110381 - DNA, 72 bp, Homo sapiens
gtcctttgttgtcatggagtttatagaaaaggctatttaggaactaatgctgtcttaattattttctctgtc

SEQ ID NO: 110382 - DNA, 73 bp, Homo sapiens
atggagtttatagaaaaggctatttaggaactaatgctgtcttaattattttctctgtctctcctctgcctct

SEQ ID NO: 110383 - DNA, 75 bp, Homo sapiens
ttatagaaaaggctatttaggaactaatgctgtcttaattattttctctgtctctcctctgcctcttcgaatgta

SEQ ID NO: 110384 - DNA, 78 bp, Homo sapiens
tatttaggaactaatgctgtcttaattattttctctgtctctcctctgcctcttcgaatgtacatgtgtaggtgtatg

SEQ ID NO: 110385 - DNA, 72 bp, Homo sapiens
gtgtgtgtatatgtacgtgtttctttttatacttggctttttgtagccatcattttttatcttttagaatgc

SEQ ID NO: 110386 - DNA, 69 bp, Homo sapiens
gtatatgtacgtgtttctttttatacttggctttttgtagccatcattttttatcttttagaatgcccc

SEQ ID NO: 110387 - DNA, 73 bp, Homo sapiens
ttctttttatacttggctttttgtagccatcattttttatcttttagaatgcccccaccacacattcagcata

SEQ ID NO: 110388 - DNA, 76 bp, Homo sapiens
tttgtagccatcattttttatcttttagaatgcccccaccacacattcagcatagatttgcttttcagaattttga

SEQ ID NO: 110389 - DNA, 76 bp, Homo sapiens
ccatcattttttatcttttagaatgcccccaccacacattcagcatagatttgcttttcagaattttgaacattga

SEQ ID NO: 110390 - DNA, 76 bp, Homo sapiens
atcttttagaatgcccccaccacacattcagcatagatttgcttttcagaattttgaacattgagaattctttgaa

SEQ ID NO: 110391 - DNA, 76 bp, Homo sapiens
agaatgcccccaccacacattcagcatagatttgcttttcagaattttgaacattgagaattctttgaatattttc

SEQ ID NO: 110392 - DNA, 77 bp, Homo sapiens
ccacacattcagcatagatttgcttttcagaattttgaacattgagaattctttgaatattttctaatacctgaaca

SEQ ID NO: 110393 - DNA, 75 bp, Homo sapiens
tcagcatagatttgcttttcagaattttgaacattgagaattctttgaatattttctaatacctgaacatttacc

SEQ ID NO: 110394 - DNA, 74 bp, Homo sapiens
ttttcagaattttgaacattgagaattctttgaatattttctaatacctgaacatttacctttatatgtctgca

SEQ ID NO: 110395 - DNA, 76 bp, Homo sapiens
tttgaacattgagaattctttgaatattttctaatacctgaacatttacctttatatgtctgcagcctgtggacag

SEQ ID NO: 110396 - DNA, 76 bp, Homo sapiens
attgagaattctttgaatattttctaatacctgaacatttacctttatatgtctgcagcctgtggacaggtgtgta

SEQ ID NO: 110397 - DNA, 80 bp, Homo sapiens
ttgaatattttctaatacctgaacatttacctttatatgtctgcagcctgtggacaggtgtgtagaatagcagactgtca

SEQ ID NO: 110398 - DNA, 78 bp, Homo sapiens
attttctaatacctgaacatttacctttatatgtctgcagcctgtggacaggtgtgtagaatagcagactgtcagact

SEQ ID NO: 110399 - DNA, 82 bp, Homo sapiens
tacctttatatgtctgcagcctgtggacaggtgtgtagaatagcagactgtcagacttgggaggaccatgaggctattgact

SEQ ID NO: 110400 - DNA, 84 bp, Homo sapiens
tgcagcctgtggacaggtgtgtagaatagcagactgtcagacttgggaggaccatgaggctattgacttggaccttccatctca

SEQ ID NO: 110401 - DNA, 82 bp, Homo sapiens
ctgtggacaggtgtgtagaatagcagactgtcagacttgggaggaccatgaggctattgacttggaccttccatctcatcaa

SEQ ID NO: 110402 - DNA, 81 bp, Homo sapiens
ggtgtgtagaatagcagactgtcagacttgggaggaccatgaggctattgacttggaccttccatctcatcaagcaggaat

SEQ ID NO: 110403 - DNA, 78 bp, Homo sapiens
agactgtcagacttgggaggaccatgaggctattgacttggaccttccatctcatcaagcaggaattctcccaaggaa

SEQ ID NO: 110404 - DNA, 75 bp, Homo sapiens
agacttgggaggaccatgaggctattgacttggaccttccatctcatcaagcaggaattctcccaaggaaccacc

SEQ ID NO: 110405 - DNA, 76 bp, Homo sapiens
accatgaggctattgacttggaccttccatctcatcaagcaggaattctcccaaggaaccaccgccctgacctatc

SEQ ID NO: 110406 - DNA, 74 bp, Homo sapiens
aggctattgacttggaccttccatctcatcaagcaggaattctcccaaggaaccaccgccctgacctatcccag

SEQ ID NO: 110407 - DNA, 72 bp, Homo sapiens
acttggaccttccatctcatcaagcaggaattctcccaaggaaccaccgccctgacctatcccaggggtcag

SEQ ID NO: 110408 - DNA, 73 bp, Homo sapiens
atctcatcaagcaggaattctcccaaggaaccaccgccctgacctatcccaggggtcaggcctgcctaaacca

SEQ ID NO: 110409 - DNA, 69 bp, Homo sapiens
aggaattctcccaaggaaccaccgccctgacctatcccaggggtcaggcctgcctaaaccaggcttgag

SEQ ID NO: 110410 - DNA, 70 bp, Homo sapiens
tcccaaggaaccaccgccctgacctatcccaggggtcaggcctgcctaaaccaggcttgagttttgtata

SEQ ID NO: 110411 - DNA, 74 bp, Homo sapiens
accgccctgacctatcccaggggtcaggcctgcctaaaccaggcttgagttttgtatatattgctcagctcagt

SEQ ID NO: 110412 - DNA, 77 bp, Homo sapiens
acctatcccaggggtcaggcctgcctaaaccaggcttgagttttgtatatattgctcagctcagttgtagagctcag

SEQ ID NO: 110413 - DNA, 81 bp, Homo sapiens
gggtcaggcctgcctaaaccaggcttgagttttgtatatattgctcagctcagttgtagagctcaggtgtgataactctgc

SEQ ID NO: 110414 - DNA, 80 bp, Homo sapiens
aaaccaggcttgagttttgtatatattgctcagctcagttgtagagctcaggtgtgataactctgcctaagaggggatga

SEQ ID NO: 110415 - DNA, 80 bp, Homo sapiens
ttttgtatatattgctcagctcagttgtagagctcaggtgtgataactctgcctaagaggggatgaggaggagggctaaa

SEQ ID NO: 110416 - DNA, 80 bp, Homo sapiens
atatattgctcagctcagttgtagagctcaggtgtgataactctgcctaagaggggatgaggaggagggctaaatggagg

SEQ ID NO: 110417 - DNA, 75 bp, Homo sapiens
agctcagttgtagagctcaggtgtgataactctgcctaagaggggatgaggaggagggctaaatggagggaaaag

SEQ ID NO: 110418 - DNA, 75 bp, Homo sapiens
tagagctcaggtgtgataactctgcctaagaggggatgaggaggagggctaaatggagggaaaagtggtacagga

SEQ ID NO: 110419 - DNA, 72 bp, Homo sapiens
tctgcctaagaggggatgaggaggagggctaaatggagggaaaagtggtacaggagagaaaatagagagaaa

SEQ ID NO: 110420 - DNA, 68 bp, Homo sapiens
aggagggctaaatggagggaaaagtggtacaggagagaaaatagagagaaagggacattataagggtg

SEQ ID NO: 110421 - DNA, 68 bp, Homo sapiens
taaatggagggaaaagtggtacaggagagaaaatagagagaaagggacattataagggtgggactggg

SEQ ID NO: 110422 - DNA, 69 bp, Homo sapiens
aaaagtggtacaggagagaaaatagagagaaagggacattataagggtgggactggggtcagaggctgg

SEQ ID NO: 110423 - DNA, 69 bp, Homo sapiens
acaggagagaaaatagagagaaagggacattataagggtgggactggggtcagaggctgggaactgggg

SEQ ID NO: 110424 - DNA, 68 bp, Homo sapiens
aaatagagagaaagggacattataagggtgggactggggtcagaggctgggaactgggggctggggga

SEQ ID NO: 110425 - DNA, 70 bp, Homo sapiens
aaagggacattataagggtgggactggggtcagaggctgggaactgggggctgggggagatctatcagaa

SEQ ID NO: 110426 - DNA, 76 bp, Homo sapiens
tataagggtgggactggggtcagaggctgggaactgggggctgggggagatctatcagaagagagcaggctgcagg

SEQ ID NO: 110427 - DNA, 76 bp, Homo sapiens
actggggtcagaggctgggaactgggggctgggggagatctatcagaagagagcaggctgcagggacgtcctcctg

SEQ ID NO: 110428 - DNA, 79 bp, Homo sapiens
gctgggaactgggggctgggggagatctatcagaagagagcaggctgcagggacgtcctcctgggttcctgctgtgtca

SEQ ID NO: 110429 - DNA, 80 bp, Homo sapiens
gggggctgggggagatctatcagaagagagcaggctgcagggacgtcctcctgggttcctgctgtgtcatgcgtctgacc

SEQ ID NO: 110430 - DNA, 82 bp, Homo sapiens
ggagatctatcagaagagagcaggctgcagggacgtcctcctgggttcctgctgtgtcatgcgtctgaccttttgtgtctct

SEQ ID NO: 110431 - DNA, 82 bp, Homo sapiens
tatcagaagagagcaggctgcagggacgtcctcctgggttcctgctgtgtcatgcgtctgaccttttgtgtctctttctcaa

SEQ ID NO: 110432 - DNA, 76 bp, Homo sapiens
caggctgcagggacgtcctcctgggttcctgctgtgtcatgcgtctgaccttttgtgtctctttctcaaaccctgt

SEQ ID NO: 110433 - DNA, 80 bp, Homo sapiens
ttcctgctgtgtcatgcgtctgaccttttgtgtctctttctcaaaccctgttgatgtgtcagcccacgagatgctggggg

SEQ ID NO: 110434 - DNA, 80 bp, Homo sapiens
tcatgcgtctgaccttttgtgtctctttctcaaaccctgttgatgtgtcagcccacgagatgctgggggtgtggagagga

SEQ ID NO: 110435 - DNA, 76 bp, Homo sapiens
ttttgtgtctctttctcaaaccctgttgatgtgtcagcccacgagatgctgggggtgtggagaggacgaagaccag

SEQ ID NO: 110436 - DNA, 76 bp, Homo sapiens
ccctgttgatgtgtcagcccacgagatgctgggggtgtggagaggacgaagaccagggcagaatctttggcctaaa

SEQ ID NO: 110437 - DNA, 78 bp, Homo sapiens
ttgatgtgtcagcccacgagatgctgggggtgtggagaggacgaagaccagggcagaatctttggcctaaaaagcaga

SEQ ID NO: 110438 - DNA, 73 bp, Homo sapiens
acgagatgctgggggtgtggagaggacgaagaccagggcagaatctttggcctaaaaagcagagttcctggaa

SEQ ID NO: 110439 - DNA, 72 bp, Homo sapiens
gggggtgtggagaggacgaagaccagggcagaatctttggcctaaaaagcagagttcctggaacagtgtcga

SEQ ID NO: 110440 - DNA, 71 bp, Homo sapiens
agaggacgaagaccagggcagaatctttggcctaaaaagcagagttcctggaacagtgtcgacattttaaa

SEQ ID NO: 110441 - DNA, 72 bp, Homo sapiens
agaatctttggcctaaaaagcagagttcctggaacagtgtcgacattttaaaaatattagctagcttgaaga

SEQ ID NO: 110442 - DNA, 73 bp, Homo sapiens
tttggcctaaaaagcagagttcctggaacagtgtcgacattttaaaaatattagctagcttgaagaggaatgc

SEQ ID NO: 110443 - DNA, 74 bp, Homo sapiens
ctctctctctctattgttctctcctacttaatttcataactgatctcctcttattgaaactgtaagtggaaaaa

SEQ ID NO: 110444 - DNA, 72 bp, Homo sapiens
ctctctattgttctctcctacttaatttcataactgatctcctcttattgaaactgtaagtggaaaaaaaga

SEQ ID NO: 110445 - DNA, 73 bp, Homo sapiens
tctctcctacttaatttcataactgatctcctcttattgaaactgtaagtggaaaaaaagatggtttcacaga

SEQ ID NO: 110446 - DNA, 74 bp, Homo sapiens
tttcataactgatctcctcttattgaaactgtaagtggaaaaaaagatggtttcacagagatcctcattaaaga

SEQ ID NO: 110447 - DNA, 72 bp, Homo sapiens
actgatctcctcttattgaaactgtaagtggaaaaaaagatggtttcacagagatcctcattaaagaaagtg

SEQ ID NO: 110448 - DNA, 71 bp, Homo sapiens
ctcttattgaaactgtaagtggaaaaaaagatggtttcacagagatcctcattaaagaaagtgttgccgta

SEQ ID NO: 110449 - DNA, 71 bp, Homo sapiens
ctgtaagtggaaaaaaagatggtttcacagagatcctcattaaagaaagtgttgccgtaagtaatctagta

SEQ ID NO: 110450 - DNA, 71 bp, Homo sapiens
aaaaagatggtttcacagagatcctcattaaagaaagtgttgccgtaagtaatctagtaatgtaggcgttc

SEQ ID NO: 110451 - DNA, 77 bp, Homo sapiens
tttcacagagatcctcattaaagaaagtgttgccgtaagtaatctagtaatgtaggcgttctgcagcacaacattcc

SEQ ID NO: 110452 - DNA, 77 bp, Homo sapiens
agagatcctcattaaagaaagtgttgccgtaagtaatctagtaatgtaggcgttctgcagcacaacattcctcctga

SEQ ID NO: 110453 - DNA, 76 bp, Homo sapiens
aagaaagtgttgccgtaagtaatctagtaatgtaggcgttctgcagcacaacattcctcctgagcttatcacttta

SEQ ID NO: 110454 - DNA, 79 bp, Homo sapiens
agtgttgccgtaagtaatctagtaatgtaggcgttctgcagcacaacattcctcctgagcttatcactttacactgtga

SEQ ID NO: 110455 - DNA, 80 bp, Homo sapiens
taagtaatctagtaatgtaggcgttctgcagcacaacattcctcctgagcttatcactttacactgtgaggccaagatgt

SEQ ID NO: 110456 - DNA, 80 bp, Homo sapiens
taatctagtaatgtaggcgttctgcagcacaacattcctcctgagcttatcactttacactgtgaggccaagatgttaaa

SEQ ID NO: 110457 - DNA, 79 bp, Homo sapiens
aatctagtaatgtaggcgttctgcagcacaacattcctcctgagcttatcactttacactgtgaggccaagatgttaaa

SEQ ID NO: 110458 - DNA, 77 bp, Homo sapiens
tgtaggcgttctgcagcacaacattcctcctgagcttatcactttacactgtgaggccaagatgttaaaaaaaaata

SEQ ID NO: 110459 - DNA, 75 bp, Homo sapiens
aaaaatacacacatacacagcaaacccctactcccaaacataagagtttagatcttgagcaataagacatagata

SEQ ID NO: 110460 - DNA, 76 bp, Homo sapiens
agcaaacccctactcccaaacataagagtttagatcttgagcaataagacatagatactatcacaatattttgcaa

SEQ ID NO: 110461 - DNA, 78 bp, Homo sapiens
ccctactcccaaacataagagtttagatcttgagcaataagacatagatactatcacaatattttgcaaatctcagaa

SEQ ID NO: 110462 - DNA, 81 bp, Homo sapiens
cataagagtttagatcttgagcaataagacatagatactatcacaatattttgcaaatctcagaaacattgccacattttc

SEQ ID NO: 110463 - DNA, 80 bp, Homo sapiens
gtttagatcttgagcaataagacatagatactatcacaatattttgcaaatctcagaaacattgccacattttccatagg

SEQ ID NO: 110464 - DNA, 82 bp, Homo sapiens
tgagcaataagacatagatactatcacaatattttgcaaatctcagaaacattgccacattttccatagggttaacatctga

SEQ ID NO: 110465 - DNA, 80 bp, Homo sapiens
gacatagatactatcacaatattttgcaaatctcagaaacattgccacattttccatagggttaacatctgagatgaaaa

SEQ ID NO: 110466 - DNA, 77 bp, Homo sapiens
agatactatcacaatattttgcaaatctcagaaacattgccacattttccatagggttaacatctgagatgaaaaac

SEQ ID NO: 110467 - DNA, 77 bp, Homo sapiens
cacaatattttgcaaatctcagaaacattgccacattttccatagggttaacatctgagatgaaaaactaattcaga

SEQ ID NO: 110468 - DNA, 74 bp, Homo sapiens
attttgcaaatctcagaaacattgccacattttccatagggttaacatctgagatgaaaaactaattcagaact

SEQ ID NO: 110469 - DNA, 77 bp, Homo sapiens
gcaaatctcagaaacattgccacattttccatagggttaacatctgagatgaaaaactaattcagaacttatgattc

SEQ ID NO: 110470 - DNA, 75 bp, Homo sapiens
tctcagaaacattgccacattttccatagggttaacatctgagatgaaaaactaattcagaacttatgattcctt

SEQ ID NO: 110471 - DNA, 73 bp, Homo sapiens
gaaacattgccacattttccatagggttaacatctgagatgaaaaactaattcagaacttatgattcctttta

SEQ ID NO: 110472 - DNA, 71 bp, Homo sapiens
attgccacattttccatagggttaacatctgagatgaaaaactaattcagaacttatgattccttttaaaa

SEQ ID NO: 110473 - DNA, 69 bp, Homo sapiens
cacattttccatagggttaacatctgagatgaaaaactaattcagaacttatgattccttttaaaaaaa

SEQ ID NO: 110474 - DNA, 68 bp, Homo sapiens
gggttaacatctgagatgaaaaactaattcagaacttatgattccttttaaaaaaattcccttagcca

SEQ ID NO: 110475 - DNA, 70 bp, Homo sapiens
catctgagatgaaaaactaattcagaacttatgattccttttaaaaaaattcccttagccaaactgaaga

SEQ ID NO: 110476 - DNA, 66 bp, Homo sapiens
cagaacttatgattccttttaaaaaaattcccttagccaaactgaagaaatttactcgggagaaga

SEQ ID NO: 110477 - DNA, 65 bp, Homo sapiens
aaaattcccttagccaaactgaagaaatttactcgggagaagaaaatgacttaacttgtagtttc

SEQ ID NO: 110478 - DNA, 69 bp, Homo sapiens
ccttagccaaactgaagaaatttactcgggagaagaaaatgacttaacttgtagtttccacaatgagaa

SEQ ID NO: 110479 - DNA, 73 bp, Homo sapiens
aatttactcgggagaagaaaatgacttaacttgtagtttccacaatgagaaacatattctcatggctttcagc

SEQ ID NO: 110480 - DNA, 78 bp, Homo sapiens
agaaaatgacttaacttgtagtttccacaatgagaaacatattctcatggctttcagccactttctatcattatgtga

SEQ ID NO: 110481 - DNA, 78 bp, Homo sapiens
ttaacttgtagtttccacaatgagaaacatattctcatggctttcagccactttctatcattatgtgatgggcttaaa

SEQ ID NO: 110482 - DNA, 82 bp, Homo sapiens
ttgtagtttccacaatgagaaacatattctcatggctttcagccactttctatcattatgtgatgggcttaaattgcattca

SEQ ID NO: 110483 - DNA, 82 bp, Homo sapiens
aacatattctcatggctttcagccactttctatcattatgtgatgggcttaaattgcattcactgacagtgaattaaaagca

SEQ ID NO: 110484 - DNA, 80 bp, Homo sapiens
ctttcagccactttctatcattatgtgatgggcttaaattgcattcactgacagtgaattaaaagcatgaatgaaatctt

SEQ ID NO: 110485 - DNA, 81 bp, Homo sapiens
gccactttctatcattatgtgatgggcttaaattgcattcactgacagtgaattaaaagcatgaatgaaatctttaaatga

SEQ ID NO: 110486 - DNA, 80 bp, Homo sapiens
atcattatgtgatgggcttaaattgcattcactgacagtgaattaaaagcatgaatgaaatctttaaatgaacaactgaa

SEQ ID NO: 110487 - DNA, 76 bp, Homo sapiens
gatgggcttaaattgcattcactgacagtgaattaaaagcatgaatgaaatctttaaatgaacaactgaaataaaa

SEQ ID NO: 110488 - DNA, 77 bp, Homo sapiens
tgacagtgaattaaaagcatgaatgaaatctttaaatgaacaactgaaataaaatcatgatttaaacatcctagcac

SEQ ID NO: 110489 - DNA, 73 bp, Homo sapiens
taaaagcatgaatgaaatctttaaatgaacaactgaaataaaatcatgatttaaacatcctagcacttaaaag

SEQ ID NO: 110490 - DNA, 71 bp, Homo sapiens
gaatgaaatctttaaatgaacaactgaaataaaatcatgatttaaacatcctagcacttaaaagtaaaaga

SEQ ID NO: 110491 - DNA, 71 bp, Homo sapiens
taaatgaacaactgaaataaaatcatgatttaaacatcctagcacttaaaagtaaaagaaacttttgcatg

SEQ ID NO: 110492 - DNA, 77 bp, Homo sapiens
aatcatgatttaaacatcctagcacttaaaagtaaaagaaacttttgcatggctgtagacataatgatcaatactga

SEQ ID NO: 110493 - DNA, 75 bp, Homo sapiens
tgatttaaacatcctagcacttaaaagtaaaagaaacttttgcatggctgtagacataatgatcaatactgagtt

SEQ ID NO: 110494 - DNA, 73 bp, Homo sapiens
cctagcacttaaaagtaaaagaaacttttgcatggctgtagacataatgatcaatactgagttttaatcccaa

SEQ ID NO: 110495 - DNA, 75 bp, Homo sapiens
agtaaaagaaacttttgcatggctgtagacataatgatcaatactgagttttaatcccaaacctgacagcccata

SEQ ID NO: 110496 - DNA, 78 bp, Homo sapiens
tggctgtagacataatgatcaatactgagttttaatcccaaacctgacagcccatatttttcaaactgagtgcctcaa

SEQ ID NO: 110497 - DNA, 74 bp, Homo sapiens
gatcaatactgagttttaatcccaaacctgacagcccatatttttcaaactgagtgcctcaaattcacaataaa

SEQ ID NO: 110498 - DNA, 70 bp, Homo sapiens
ccaaacctgacagcccatatttttcaaactgagtgcctcaaattcacaataaaaaaaaataggcctctta

SEQ ID NO: 110499 - DNA, 75 bp, Homo sapiens
agcccatatttttcaaactgagtgcctcaaattcacaataaaaaaaaataggcctcttattgctgcagtgagata

SEQ ID NO: 110500 - DNA, 76 bp, Homo sapiens
tttcaaactgagtgcctcaaattcacaataaaaaaaaataggcctcttattgctgcagtgagatagggcagtgtaa

SEQ ID NO: 110501 - DNA, 78 bp, Homo sapiens
agtgcctcaaattcacaataaaaaaaaataggcctcttattgctgcagtgagatagggcagtgtaatgcctatgagtg

SEQ ID NO: 110502 - DNA, 77 bp, Homo sapiens
aaattcacaataaaaaaaaataggcctcttattgctgcagtgagatagggcagtgtaatgcctatgagtgtgtctct

SEQ ID NO: 110503 - DNA, 81 bp, Homo sapiens
aaaaataggcctcttattgctgcagtgagatagggcagtgtaatgcctatgagtgtgtctcttcctgtgttgtatctggcc

SEQ ID NO: 110504 - DNA, 85 bp, Homo sapiens
ctcttattgctgcagtgagatagggcagtgtaatgcctatgagtgtgtctcttcctgtgttgtatctggccttgagtccacagaa

SEQ ID NO: 110505 - DNA, 84 bp, Homo sapiens
attgctgcagtgagatagggcagtgtaatgcctatgagtgtgtctcttcctgtgttgtatctggccttgagtccacagaatccc

SEQ ID NO: 110506 - DNA, 80 bp, Homo sapiens
atagggcagtgtaatgcctatgagtgtgtctcttcctgtgttgtatctggccttgagtccacagaatcccccaacatcaa

SEQ ID NO: 110507 - DNA, 78 bp, Homo sapiens
agtgtaatgcctatgagtgtgtctcttcctgtgttgtatctggccttgagtccacagaatcccccaacatcaaaggaa

SEQ ID NO: 110508 - DNA, 78 bp, Homo sapiens
tcttcctgtgttgtatctggccttgagtccacagaatcccccaacatcaaaggaagcagtaggagatggtgtgtggaa

SEQ ID NO: 110509 - DNA, 79 bp, Homo sapiens
tgttgtatctggccttgagtccacagaatcccccaacatcaaaggaagcagtaggagatggtgtgtggaacaccagata

SEQ ID NO: 110510 - DNA, 76 bp, Homo sapiens
cttgagtccacagaatcccccaacatcaaaggaagcagtaggagatggtgtgtggaacaccagatagccggaggaa

SEQ ID NO: 110511 - DNA, 74 bp, Homo sapiens
tccacagaatcccccaacatcaaaggaagcagtaggagatggtgtgtggaacaccagatagccggaggaaaggg

SEQ ID NO: 110512 - DNA, 72 bp, Homo sapiens
caacatcaaaggaagcagtaggagatggtgtgtggaacaccagatagccggaggaaaggggaaactcttcct

SEQ ID NO: 110513 - DNA, 71 bp, Homo sapiens
aaaggaagcagtaggagatggtgtgtggaacaccagatagccggaggaaaggggaaactcttcctttgcca

SEQ ID NO: 110514 - DNA, 73 bp, Homo sapiens
taggagatggtgtgtggaacaccagatagccggaggaaaggggaaactcttcctttgccaagagggattgcta

SEQ ID NO: 110515 - DNA, 71 bp, Homo sapiens
tgtgtggaacaccagatagccggaggaaaggggaaactcttcctttgccaagagggattgctaaaattaga

SEQ ID NO: 110516 - DNA, 69 bp, Homo sapiens
cagatagccggaggaaaggggaaactcttcctttgccaagagggattgctaaaattagatggtaaagta

SEQ ID NO: 110517 - DNA, 69 bp, Homo sapiens
gaggaaaggggaaactcttcctttgccaagagggattgctaaaattagatggtaaagtagtcttggcac

SEQ ID NO: 110518 - DNA, 71 bp, Homo sapiens
gaaactcttcctttgccaagagggattgctaaaattagatggtaaagtagtcttggcactggaagtcgtct

SEQ ID NO: 110519 - DNA, 76 bp, Homo sapiens
ttcctttgccaagagggattgctaaaattagatggtaaagtagtcttggcactggaagtcgtcttgctgacgatca

SEQ ID NO: 110520 - DNA, 79 bp, Homo sapiens
agggattgctaaaattagatggtaaagtagtcttggcactggaagtcgtcttgctgacgatcagcttcaatagatgata

SEQ ID NO: 110521 - DNA, 78 bp, Homo sapiens
ctaaaattagatggtaaagtagtcttggcactggaagtcgtcttgctgacgatcagcttcaatagatgatagaactgt

SEQ ID NO: 110522 - DNA, 81 bp, Homo sapiens
tagatggtaaagtagtcttggcactggaagtcgtcttgctgacgatcagcttcaatagatgatagaactgttgcttatttg

SEQ ID NO: 110523 - DNA, 81 bp, Homo sapiens
tagtcttggcactggaagtcgtcttgctgacgatcagcttcaatagatgatagaactgttgcttatttggagactttcaaa

SEQ ID NO: 110524 - DNA, 78 bp, Homo sapiens
actggaagtcgtcttgctgacgatcagcttcaatagatgatagaactgttgcttatttggagactttcaaagagaggg

SEQ ID NO: 110525 - DNA, 79 bp, Homo sapiens
tcgtcttgctgacgatcagcttcaatagatgatagaactgttgcttatttggagactttcaaagagaggggcttacacc

SEQ ID NO: 110526 - DNA, 76 bp, Homo sapiens
atcagcttcaatagatgatagaactgttgcttatttggagactttcaaagagaggggcttacaccccaggcaggaa

SEQ ID NO: 110527 - DNA, 70 bp, Homo sapiens
atagaactgttgcttatttggagactttcaaagagaggggcttacaccccaggcaggaacgtcttaccag

SEQ ID NO: 110528 - DNA, 74 bp, Homo sapiens
aaagagaggggcttacaccccaggcaggaacgtcttaccaggctgaagagctctttctgtgtggagatgctttc

SEQ ID NO: 110529 - DNA, 76 bp, Homo sapiens
tacaccccaggcaggaacgtcttaccaggctgaagagctctttctgtgtggagatgctttcctaggtctatcttaa

SEQ ID NO: 110530 - DNA, 76 bp, Homo sapiens
aggcaggaacgtcttaccaggctgaagagctctttctgtgtggagatgctttcctaggtctatcttaaattcttca

SEQ ID NO: 110531 - DNA, 77 bp, Homo sapiens
aagagctctttctgtgtggagatgctttcctaggtctatcttaaattcttcatgctgatattcaaccccacttcctc

SEQ ID NO: 110532 - DNA, 77 bp, Homo sapiens
tctttctgtgtggagatgctttcctaggtctatcttaaattcttcatgctgatattcaaccccacttcctcttgctt

SEQ ID NO: 110533 - DNA, 78 bp, Homo sapiens
agatgctttcctaggtctatcttaaattcttcatgctgatattcaaccccacttcctcttgctttggagcttagtgca

SEQ ID NO: 110534 - DNA, 76 bp, Homo sapiens
tttcctaggtctatcttaaattcttcatgctgatattcaaccccacttcctcttgctttggagcttagtgcagaag

SEQ ID NO: 110535 - DNA, 77 bp, Homo sapiens
tatcttaaattcttcatgctgatattcaaccccacttcctcttgctttggagcttagtgcagaaggggccttgccag

SEQ ID NO: 110536 - DNA, 77 bp, Homo sapiens
ttcatgctgatattcaaccccacttcctcttgctttggagcttagtgcagaaggggccttgccaggcactattcttt

SEQ ID NO: 110537 - DNA, 75 bp, Homo sapiens
atattcaaccccacttcctcttgctttggagcttagtgcagaaggggccttgccaggcactattcttttcctgca

SEQ ID NO: 110538 - DNA, 75 bp, Homo sapiens
ctttggagcttagtgcagaaggggccttgccaggcactattcttttcctgcaaacttcccaagatgattttcata

SEQ ID NO: 110539 - DNA, 75 bp, Homo sapiens
agaaggggccttgccaggcactattcttttcctgcaaacttcccaagatgattttcataactcaagaccatcatc

SEQ ID NO: 110540 - DNA, 76 bp, Homo sapiens
cttgccaggcactattcttttcctgcaaacttcccaagatgattttcataactcaagaccatcatccttctctccc

SEQ ID NO: 110541 - DNA, 73 bp, Homo sapiens
actattcttttcctgcaaacttcccaagatgattttcataactcaagaccatcatccttctctccccaacacc

SEQ ID NO: 110542 - DNA, 73 bp, Homo sapiens
caaacttcccaagatgattttcataactcaagaccatcatccttctctccccaacacccccaatctgggcgct

SEQ ID NO: 110543 - DNA, 74 bp, Homo sapiens
ttcccaagatgattttcataactcaagaccatcatccttctctccccaacacccccaatctgggcgcttcattt

SEQ ID NO: 110544 - DNA, 71 bp, Homo sapiens
attttcataactcaagaccatcatccttctctccccaacacccccaatctgggcgcttcattttggccttt

SEQ ID NO: 110545 - DNA, 74 bp, Homo sapiens
actcaagaccatcatccttctctccccaacacccccaatctgggcgcttcattttggccttttctgtgcatttg

SEQ ID NO: 110546 - DNA, 74 bp, Homo sapiens
tccttctctccccaacacccccaatctgggcgcttcattttggccttttctgtgcatttggggtgcatgtggaa

SEQ ID NO: 110547 - DNA, 72 bp, Homo sapiens
ccaacacccccaatctgggcgcttcattttggccttttctgtgcatttggggtgcatgtggaaagaaggttc

SEQ ID NO: 110548 - DNA, 75 bp, Homo sapiens
cccaatctgggcgcttcattttggccttttctgtgcatttggggtgcatgtggaaagaaggttctgcaagatggg

SEQ ID NO: 110549 - DNA, 75 bp, Homo sapiens
gcttcattttggccttttctgtgcatttggggtgcatgtggaaagaaggttctgcaagatggggtggaaggacca

SEQ ID NO: 110550 - DNA, 73 bp, Homo sapiens
attttggccttttctgtgcatttggggtgcatgtggaaagaaggttctgcaagatggggtggaaggaccagga

SEQ ID NO: 110551 - DNA, 76 bp, Homo sapiens
tttctgtgcatttggggtgcatgtggaaagaaggttctgcaagatggggtggaaggaccaggactgggctctcact

SEQ ID NO: 110552 - DNA, 77 bp, Homo sapiens
ggtgcatgtggaaagaaggttctgcaagatggggtggaaggaccaggactgggctctcacttgggctgagcgtatgg

SEQ ID NO: 110553 - DNA, 76 bp, Homo sapiens
atgtggaaagaaggttctgcaagatggggtggaaggaccaggactgggctctcacttgggctgagcgtatggtcac

SEQ ID NO: 110554 - DNA, 78 bp, Homo sapiens
aaggttctgcaagatggggtggaaggaccaggactgggctctcacttgggctgagcgtatggtcacctggcacatcca

SEQ ID NO: 110555 - DNA, 78 bp, Homo sapiens
atggggtggaaggaccaggactgggctctcacttgggctgagcgtatggtcacctggcacatccagggccatctctac

SEQ ID NO: 110556 - DNA, 78 bp, Homo sapiens
actgggctctcacttgggctgagcgtatggtcacctggcacatccagggccatctctactctcctcccccatctccct

SEQ ID NO: 110557 - DNA, 78 bp, Homo sapiens
acttgggctgagcgtatggtcacctggcacatccagggccatctctactctcctcccccatctcccttgcctctgcct

SEQ ID NO: 110558 - DNA, 79 bp, Homo sapiens
acctggcacatccagggccatctctactctcctcccccatctcccttgcctctgccttgccctggtgacattatctaga

SEQ ID NO: 110559 - DNA, 79 bp, Homo sapiens
atccagggccatctctactctcctcccccatctcccttgcctctgccttgccctggtgacattatctagacatctacca

SEQ ID NO: 110560 - DNA, 78 bp, Homo sapiens
ctcccccatctcccttgcctctgccttgccctggtgacattatctagacatctaccactcaaatgtatgacttgggta

SEQ ID NO: 110561 - DNA, 82 bp, Homo sapiens
tcccttgcctctgccttgccctggtgacattatctagacatctaccactcaaatgtatgacttgggtaagcattgcatcttc

SEQ ID NO: 110562 - DNA, 83 bp, Homo sapiens
tctgccttgccctggtgacattatctagacatctaccactcaaatgtatgacttgggtaagcattgcatcttctatgtttctc

SEQ ID NO: 110563 - DNA, 79 bp, Homo sapiens
cctggtgacattatctagacatctaccactcaaatgtatgacttgggtaagcattgcatcttctatgtttctcttttaa

SEQ ID NO: 110564 - DNA, 78 bp, Homo sapiens
agacatctaccactcaaatgtatgacttgggtaagcattgcatcttctatgtttctcttttaaactttgagaccatca

SEQ ID NO: 110565 - DNA, 72 bp, Homo sapiens
aaatgtatgacttgggtaagcattgcatcttctatgtttctcttttaaactttgagaccatcaggaaagggt

SEQ ID NO: 110566 - DNA, 75 bp, Homo sapiens
tatgacttgggtaagcattgcatcttctatgtttctcttttaaactttgagaccatcaggaaagggttgagcctg

SEQ ID NO: 110567 - DNA, 76 bp, Homo sapiens
taagcattgcatcttctatgtttctcttttaaactttgagaccatcaggaaagggttgagcctgtcaatattaata

SEQ ID NO: 110568 - DNA, 74 bp, Homo sapiens
catcttctatgtttctcttttaaactttgagaccatcaggaaagggttgagcctgtcaatattaatatctttgc

SEQ ID NO: 110569 - DNA, 72 bp, Homo sapiens
tcttttaaactttgagaccatcaggaaagggttgagcctgtcaatattaatatctttgctgccctcgtttcc

SEQ ID NO: 110570 - DNA, 75 bp, Homo sapiens
tttgagaccatcaggaaagggttgagcctgtcaatattaatatctttgctgccctcgtttcctctcaagaaaata

SEQ ID NO: 110571 - DNA, 73 bp, Homo sapiens
accatcaggaaagggttgagcctgtcaatattaatatctttgctgccctcgtttcctctcaagaaaatattta

SEQ ID NO: 110572 - DNA, 72 bp, Homo sapiens
aaagggttgagcctgtcaatattaatatctttgctgccctcgtttcctctcaagaaaatatttagggaagca

SEQ ID NO: 110573 - DNA, 74 bp, Homo sapiens
tgtcaatattaatatctttgctgccctcgtttcctctcaagaaaatatttagggaagcaagaagggctgggaga

SEQ ID NO: 110574 - DNA, 70 bp, Homo sapiens
attaatatctttgctgccctcgtttcctctcaagaaaatatttagggaagcaagaagggctgggagaggg

SEQ ID NO: 110575 - DNA, 70 bp, Homo sapiens
tgccctcgtttcctctcaagaaaatatttagggaagcaagaagggctgggagaggggatgaagaggaaaa

SEQ ID NO: 110576 - DNA, 69 bp, Homo sapiens
cgtttcctctcaagaaaatatttagggaagcaagaagggctgggagaggggatgaagaggaaaagcagg

SEQ ID NO: 110577 - DNA, 67 bp, Homo sapiens
aaatatttagggaagcaagaagggctgggagaggggatgaagaggaaaagcagggggcttaggaaaa

SEQ ID NO: 110578 - DNA, 67 bp, Homo sapiens
tttagggaagcaagaagggctgggagaggggatgaagaggaaaagcagggggcttaggaaaagggga

SEQ ID NO: 110579 - DNA, 67 bp, Homo sapiens
aagaagggctgggagaggggatgaagaggaaaagcagggggcttaggaaaaggggacctgagcaggg

SEQ ID NO: 110580 - DNA, 71 bp, Homo sapiens
agaggggatgaagaggaaaagcagggggcttaggaaaaggggacctgagcaggggccacagagatcagccc

SEQ ID NO: 110581 - DNA, 71 bp, Homo sapiens
atgaagaggaaaagcagggggcttaggaaaaggggacctgagcaggggccacagagatcagccccattttc

SEQ ID NO: 110582 - DNA, 70 bp, Homo sapiens
aaaagcagggggcttaggaaaaggggacctgagcaggggccacagagatcagccccattttcctgagaac

SEQ ID NO: 110583 - DNA, 72 bp, Homo sapiens
cttaggaaaaggggacctgagcaggggccacagagatcagccccattttcctgagaacgtccctgtggcttc

SEQ ID NO: 110584 - DNA, 74 bp, Homo sapiens
aggggccacagagatcagccccattttcctgagaacgtccctgtggcttcctcagagggaccacacaacgtcca

SEQ ID NO: 110585 - DNA, 75 bp, Homo sapiens
acagagatcagccccattttcctgagaacgtccctgtggcttcctcagagggaccacacaacgtccagagaccac

SEQ ID NO: 110586 - DNA, 74 bp, Homo sapiens
cattttcctgagaacgtccctgtggcttcctcagagggaccacacaacgtccagagaccaccgtgtgactttca

SEQ ID NO: 110587 - DNA, 76 bp, Homo sapiens
tcctgagaacgtccctgtggcttcctcagagggaccacacaacgtccagagaccaccgtgtgactttcagagataa

SEQ ID NO: 110588 - DNA, 79 bp, Homo sapiens
tgtggcttcctcagagggaccacacaacgtccagagaccaccgtgtgactttcagagataacagcgacagttcctggca

SEQ ID NO: 110589 - DNA, 77 bp, Homo sapiens
tcctcagagggaccacacaacgtccagagaccaccgtgtgactttcagagataacagcgacagttcctggcaacatt

SEQ ID NO: 110590 - DNA, 76 bp, Homo sapiens
accacacaacgtccagagaccaccgtgtgactttcagagataacagcgacagttcctggcaacatttgctccctcc

SEQ ID NO: 110591 - DNA, 74 bp, Homo sapiens
aacgtccagagaccaccgtgtgactttcagagataacagcgacagttcctggcaacatttgctccctcccccac

SEQ ID NO: 110592 - DNA, 75 bp, Homo sapiens
accaccgtgtgactttcagagataacagcgacagttcctggcaacatttgctccctcccccacctccatccttca

SEQ ID NO: 110593 - DNA, 76 bp, Homo sapiens
actttcagagataacagcgacagttcctggcaacatttgctccctcccccacctccatccttcatcctcctcctca

SEQ ID NO: 110594 - DNA, 75 bp, Homo sapiens
taacagcgacagttcctggcaacatttgctccctcccccacctccatccttcatcctcctcctcagagaatttta

SEQ ID NO: 110595 - DNA, 72 bp, Homo sapiens
agttcctggcaacatttgctccctcccccacctccatccttcatcctcctcctcagagaattttatttggct

SEQ ID NO: 110596 - DNA, 72 bp, Homo sapiens
aacatttgctccctcccccacctccatccttcatcctcctcctcagagaattttatttggctttgggcaaca

SEQ ID NO: 110597 - DNA, 73 bp, Homo sapiens
ctcccccacctccatccttcatcctcctcctcagagaattttatttggctttgggcaacatgaaagtcaactc

SEQ ID NO: 110598 - DNA, 77 bp, Homo sapiens
acctccatccttcatcctcctcctcagagaattttatttggctttgggcaacatgaaagtcaactccacagagtgca

SEQ ID NO: 110599 - DNA, 78 bp, Homo sapiens
atcctcctcctcagagaattttatttggctttgggcaacatgaaagtcaactccacagagtgcagagggagtcagaga

SEQ ID NO: 110600 - DNA, 80 bp, Homo sapiens
tcagagaattttatttggctttgggcaacatgaaagtcaactccacagagtgcagagggagtcagagagcccagtcctca

SEQ ID NO: 110601 - DNA, 79 bp, Homo sapiens
aattttatttggctttgggcaacatgaaagtcaactccacagagtgcagagggagtcagagagcccagtcctcatctca

SEQ ID NO: 110602 - DNA, 82 bp, Homo sapiens
ttgggcaacatgaaagtcaactccacagagtgcagagggagtcagagagcccagtcctcatctcatctggtcagcttctttt

SEQ ID NO: 110603 - DNA, 80 bp, Homo sapiens
aacatgaaagtcaactccacagagtgcagagggagtcagagagcccagtcctcatctcatctggtcagcttcttttttct

SEQ ID NO: 110604 - DNA, 67 bp, Homo sapiens
tgcccggcctcttttttcttaagaccaaaacaaaccacaaacgctctcaccctactaaatatccacc

SEQ ID NO: 110605 - DNA, 68 bp, Homo sapiens
cttttttcttaagaccaaaacaaaccacaaacgctctcaccctactaaatatccacccatgaagtaca

SEQ ID NO: 110606 - DNA, 69 bp, Homo sapiens
ttaagaccaaaacaaaccacaaacgctctcaccctactaaatatccacccatgaagtacagttgggaaa

SEQ ID NO: 110607 - DNA, 72 bp, Homo sapiens
aacaaaccacaaacgctctcaccctactaaatatccacccatgaagtacagttgggaaatctgtgctccaaa

SEQ ID NO: 110608 - DNA, 72 bp, Homo sapiens
aaacgctctcaccctactaaatatccacccatgaagtacagttgggaaatctgtgctccaaagcaaaaccat

SEQ ID NO: 110609 - DNA, 72 bp, Homo sapiens
accctactaaatatccacccatgaagtacagttgggaaatctgtgctccaaagcaaaaccattctctttgaa

SEQ ID NO: 110610 - DNA, 75 bp, Homo sapiens
aatatccacccatgaagtacagttgggaaatctgtgctccaaagcaaaaccattctctttgaaggagccagccta

SEQ ID NO: 110611 - DNA, 77 bp, Homo sapiens
atgaagtacagttgggaaatctgtgctccaaagcaaaaccattctctttgaaggagccagcctagactgctctatcc

SEQ ID NO: 110612 - DNA, 77 bp, Homo sapiens
agttgggaaatctgtgctccaaagcaaaaccattctctttgaaggagccagcctagactgctctatcccaccaatga

SEQ ID NO: 110613 - DNA, 79 bp, Homo sapiens
atctgtgctccaaagcaaaaccattctctttgaaggagccagcctagactgctctatcccaccaatgagagagttaata

SEQ ID NO: 110614 - DNA, 77 bp, Homo sapiens
aaagcaaaaccattctctttgaaggagccagcctagactgctctatcccaccaatgagagagttaatagacttgatg

SEQ ID NO: 110615 - DNA, 81 bp, Homo sapiens
attctctttgaaggagccagcctagactgctctatcccaccaatgagagagttaatagacttgatgggagacaggcacatg

SEQ ID NO: 110616 - DNA, 82 bp, Homo sapiens
ttgaaggagccagcctagactgctctatcccaccaatgagagagttaatagacttgatgggagacaggcacatggcaataag

SEQ ID NO: 110617 - DNA, 81 bp, Homo sapiens
tagactgctctatcccaccaatgagagagttaatagacttgatgggagacaggcacatggcaataaggaggtctgttctta

SEQ ID NO: 110618 - DNA, 78 bp, Homo sapiens
tatcccaccaatgagagagttaatagacttgatgggagacaggcacatggcaataaggaggtctgttcttaggtgaaa

SEQ ID NO: 110619 - DNA, 77 bp, Homo sapiens
atgagagagttaatagacttgatgggagacaggcacatggcaataaggaggtctgttcttaggtgaaataggtgagt

SEQ ID NO: 110620 - DNA, 77 bp, Homo sapiens
agttaatagacttgatgggagacaggcacatggcaataaggaggtctgttcttaggtgaaataggtgagttgtgctg

SEQ ID NO: 110621 - DNA, 82 bp, Homo sapiens
ttgatgggagacaggcacatggcaataaggaggtctgttcttaggtgaaataggtgagttgtgctggccatcagcactggaa

SEQ ID NO: 110622 - DNA, 79 bp, Homo sapiens
aggcacatggcaataaggaggtctgttcttaggtgaaataggtgagttgtgctggccatcagcactggaagccctgaat

SEQ ID NO: 110623 - DNA, 77 bp, Homo sapiens
caataaggaggtctgttcttaggtgaaataggtgagttgtgctggccatcagcactggaagccctgaattcaggcct

SEQ ID NO: 110624 - DNA, 77 bp, Homo sapiens
aggtctgttcttaggtgaaataggtgagttgtgctggccatcagcactggaagccctgaattcaggcctttgggtga

SEQ ID NO: 110625 - DNA, 81 bp, Homo sapiens
ttcttaggtgaaataggtgagttgtgctggccatcagcactggaagccctgaattcaggcctttgggtgagcagggcagca

SEQ ID NO: 110626 - DNA, 81 bp, Homo sapiens
aaataggtgagttgtgctggccatcagcactggaagccctgaattcaggcctttgggtgagcagggcagcacacacaactg

SEQ ID NO: 110627 - DNA, 82 bp, Homo sapiens
tgctggccatcagcactggaagccctgaattcaggcctttgggtgagcagggcagcacacacaactgggcagagtggccctt

SEQ ID NO: 110628 - DNA, 81 bp, Homo sapiens
atcagcactggaagccctgaattcaggcctttgggtgagcagggcagcacacacaactgggcagagtggccctttatctca

SEQ ID NO: 110629 - DNA, 81 bp, Homo sapiens
aagccctgaattcaggcctttgggtgagcagggcagcacacacaactgggcagagtggccctttatctcatgccagctgga

SEQ ID NO: 110630 - DNA, 82 bp, Homo sapiens
tttgggtgagcagggcagcacacacaactgggcagagtggccctttatctcatgccagctggacccagagccggagcttgga

SEQ ID NO: 110631 - DNA, 83 bp, Homo sapiens
ggcagcacacacaactgggcagagtggccctttatctcatgccagctggacccagagccggagcttggaggctggggtgatca

SEQ ID NO: 110632 - DNA, 79 bp, Homo sapiens
acaactgggcagagtggccctttatctcatgccagctggacccagagccggagcttggaggctggggtgatcaggctgt

SEQ ID NO: 110633 - DNA, 80 bp, Homo sapiens
agagtggccctttatctcatgccagctggacccagagccggagcttggaggctggggtgatcaggctgttcttggcagag

SEQ ID NO: 110634 - DNA, 80 bp, Homo sapiens
tttatctcatgccagctggacccagagccggagcttggaggctggggtgatcaggctgttcttggcagaggttcctgaaa

SEQ ID NO: 110635 - DNA, 80 bp, Homo sapiens
atgccagctggacccagagccggagcttggaggctggggtgatcaggctgttcttggcagaggttcctgaaatgaaatga

SEQ ID NO: 110636 - DNA, 78 bp, Homo sapiens
ctggggtgatcaggctgttcttggcagaggttcctgaaatgaaatgactctggtggtgatgggaggccgtggctccag

SEQ ID NO: 110637 - DNA, 79 bp, Homo sapiens
ttcttggcagaggttcctgaaatgaaatgactctggtggtgatgggaggccgtggctccaggcctgccccagcataaca

SEQ ID NO: 110638 - DNA, 79 bp, Homo sapiens
ttcctgaaatgaaatgactctggtggtgatgggaggccgtggctccaggcctgccccagcataacacgttgttagcata

SEQ ID NO: 110639 - DNA, 78 bp, Homo sapiens
aatgaaatgactctggtggtgatgggaggccgtggctccaggcctgccccagcataacacgttgttagcatatgttaa

SEQ ID NO: 110640 - DNA, 77 bp, Homo sapiens
tggtggtgatgggaggccgtggctccaggcctgccccagcataacacgttgttagcatatgttaacaggctgccttt

SEQ ID NO: 110641 - DNA, 77 bp, Homo sapiens
gtggctccaggcctgccccagcataacacgttgttagcatatgttaacaggctgccttttctccaaagatcacaaaa

SEQ ID NO: 110642 - DNA, 78 bp, Homo sapiens
ctgccccagcataacacgttgttagcatatgttaacaggctgccttttctccaaagatcacaaaatgcattccattta

SEQ ID NO: 110643 - DNA, 76 bp, Homo sapiens
ataacacgttgttagcatatgttaacaggctgccttttctccaaagatcacaaaatgcattccatttagtgtctgt

SEQ ID NO: 110644 - DNA, 76 bp, Homo sapiens
gttgttagcatatgttaacaggctgccttttctccaaagatcacaaaatgcattccatttagtgtctgttttggaa

SEQ ID NO: 110645 - DNA, 76 bp, Homo sapiens
atatgttaacaggctgccttttctccaaagatcacaaaatgcattccatttagtgtctgttttggaagtgttgcta

SEQ ID NO: 110646 - DNA, 76 bp, Homo sapiens
ctgccttttctccaaagatcacaaaatgcattccatttagtgtctgttttggaagtgttgctatctgtgttttata

SEQ ID NO: 110647 - DNA, 76 bp, Homo sapiens
tccaaagatcacaaaatgcattccatttagtgtctgttttggaagtgttgctatctgtgttttataggtgacaaaa

SEQ ID NO: 110648 - DNA, 76 bp, Homo sapiens
tcacaaaatgcattccatttagtgtctgttttggaagtgttgctatctgtgttttataggtgacaaaaccaagata

SEQ ID NO: 110649 - DNA, 73 bp, Homo sapiens
attccatttagtgtctgttttggaagtgttgctatctgtgttttataggtgacaaaaccaagatacatcaagg

SEQ ID NO: 110650 - DNA, 76 bp, Homo sapiens
ttagtgtctgttttggaagtgttgctatctgtgttttataggtgacaaaaccaagatacatcaaggtcatggagcc

SEQ ID NO: 110651 - DNA, 77 bp, Homo sapiens
ttttggaagtgttgctatctgtgttttataggtgacaaaaccaagatacatcaaggtcatggagcccccacagctga

SEQ ID NO: 110652 - DNA, 77 bp, Homo sapiens
tatctgtgttttataggtgacaaaaccaagatacatcaaggtcatggagcccccacagctgagggtgagtgagttag

SEQ ID NO: 110653 - DNA, 74 bp, Homo sapiens
gtgttttataggtgacaaaaccaagatacatcaaggtcatggagcccccacagctgagggtgagtgagttaggg

SEQ ID NO: 110654 - DNA, 75 bp, Homo sapiens
acaaaaccaagatacatcaaggtcatggagcccccacagctgagggtgagtgagttaggggctgacctgggagac

SEQ ID NO: 110655 - DNA, 77 bp, Homo sapiens
aaggtcatggagcccccacagctgagggtgagtgagttaggggctgacctgggagacctgcgcttcctgattctcag

SEQ ID NO: 110656 - DNA, 80 bp, Homo sapiens
ccccacagctgagggtgagtgagttaggggctgacctgggagacctgcgcttcctgattctcaggctgttgctcaacagc

SEQ ID NO: 110657 - DNA, 80 bp, Homo sapiens
tgagttaggggctgacctgggagacctgcgcttcctgattctcaggctgttgctcaacagctgacccctgatctttccaa

SEQ ID NO: 110658 - DNA, 78 bp, Homo sapiens
agacctgcgcttcctgattctcaggctgttgctcaacagctgacccctgatctttccaaactccttccagaatggtcc

SEQ ID NO: 110659 - DNA, 78 bp, Homo sapiens
attctcaggctgttgctcaacagctgacccctgatctttccaaactccttccagaatggtccttttggcctgcagatc

SEQ ID NO: 110660 - DNA, 78 bp, Homo sapiens
tgttgctcaacagctgacccctgatctttccaaactccttccagaatggtccttttggcctgcagatctcagggtctg

SEQ ID NO: 110661 - DNA, 74 bp, Homo sapiens
tgacccctgatctttccaaactccttccagaatggtccttttggcctgcagatctcagggtctggtaggagtta

SEQ ID NO: 110662 - DNA, 71 bp, Homo sapiens
atctttccaaactccttccagaatggtccttttggcctgcagatctcagggtctggtaggagttaaaagga

SEQ ID NO: 110663 - DNA, 70 bp, Homo sapiens
aaactccttccagaatggtccttttggcctgcagatctcagggtctggtaggagttaaaaggaacacgtg

SEQ ID NO: 110664 - DNA, 72 bp, Homo sapiens
agaatggtccttttggcctgcagatctcagggtctggtaggagttaaaaggaacacgtgtgttctgaactcc

SEQ ID NO: 110665 - DNA, 74 bp, Homo sapiens
ttggcctgcagatctcagggtctggtaggagttaaaaggaacacgtgtgttctgaactccctggaagagagtat

SEQ ID NO: 110666 - DNA, 71 bp, Homo sapiens
agatctcagggtctggtaggagttaaaaggaacacgtgtgttctgaactccctggaagagagtattgaaaa

SEQ ID NO: 110667 - DNA, 72 bp, Homo sapiens
agttaaaaggaacacgtgtgttctgaactccctggaagagagtattgaaaacacacacacaatctagtgttc

SEQ ID NO: 110668 - DNA, 75 bp, Homo sapiens
aaggaacacgtgtgttctgaactccctggaagagagtattgaaaacacacacacaatctagtgttcgacatgtgg

SEQ ID NO: 110669 - DNA, 77 bp, Homo sapiens
tgttctgaactccctggaagagagtattgaaaacacacacacaatctagtgttcgacatgtggggaccgagatgaaa

SEQ ID NO: 110670 - DNA, 74 bp, Homo sapiens
actccctggaagagagtattgaaaacacacacacaatctagtgttcgacatgtggggaccgagatgaaagggga

SEQ ID NO: 110671 - DNA, 76 bp, Homo sapiens
agagagtattgaaaacacacacacaatctagtgttcgacatgtggggaccgagatgaaaggggacagctgtttcag

SEQ ID NO: 110672 - DNA, 74 bp, Homo sapiens
gtgttcgacatgtggggaccgagatgaaaggggacagctgtttcagtgctgggttttgtgaccacacgtggtta

SEQ ID NO: 110673 - DNA, 73 bp, Homo sapiens
gggaccgagatgaaaggggacagctgtttcagtgctgggttttgtgaccacacgtggttaggccttcagccca

SEQ ID NO: 110674 - DNA, 72 bp, Homo sapiens
agatgaaaggggacagctgtttcagtgctgggttttgtgaccacacgtggttaggccttcagcccacggaaa

SEQ ID NO: 110675 - DNA, 73 bp, Homo sapiens
ggttttgtgaccacacgtggttaggccttcagcccacggaaagcacatggaaaatgagtggaagacctggctc

SEQ ID NO: 110676 - DNA, 73 bp, Homo sapiens
accacacgtggttaggccttcagcccacggaaagcacatggaaaatgagtggaagacctggctccctctcttc

SEQ ID NO: 110677 - DNA, 73 bp, Homo sapiens
ttaggccttcagcccacggaaagcacatggaaaatgagtggaagacctggctccctctcttctctcccgttag

SEQ ID NO: 110678 - DNA, 74 bp, Homo sapiens
cacggaaagcacatggaaaatgagtggaagacctggctccctctcttctctcccgttaggcacaagacggtgta

SEQ ID NO: 110679 - DNA, 73 bp, Homo sapiens
aaagcacatggaaaatgagtggaagacctggctccctctcttctctcccgttaggcacaagacggtgtaaatc

SEQ ID NO: 110680 - DNA, 71 bp, Homo sapiens
aaaatgagtggaagacctggctccctctcttctctcccgttaggcacaagacggtgtaaatcctggtcttc

SEQ ID NO: 110681 - DNA, 68 bp, Homo sapiens
acctggctccctctcttctctcccgttaggcacaagacggtgtaaatcctggtcttcctccttttaaa

SEQ ID NO: 110682 - DNA, 69 bp, Homo sapiens
ctctcttctctcccgttaggcacaagacggtgtaaatcctggtcttcctccttttaaaagtgtgactat

SEQ ID NO: 110683 - DNA, 71 bp, Homo sapiens
tcccgttaggcacaagacggtgtaaatcctggtcttcctccttttaaaagtgtgactattgcgtcagacta

SEQ ID NO: 110684 - DNA, 71 bp, Homo sapiens
cacaagacggtgtaaatcctggtcttcctccttttaaaagtgtgactattgcgtcagactaagctttctaa

SEQ ID NO: 110685 - DNA, 73 bp, Homo sapiens
tggtcttcctccttttaaaagtgtgactattgcgtcagactaagctttctaaggaactcgccactggtatcat

SEQ ID NO: 110686 - DNA, 73 bp, Homo sapiens
cttttaaaagtgtgactattgcgtcagactaagctttctaaggaactcgccactggtatcattcaacagaaag

SEQ ID NO: 110687 - DNA, 75 bp, Homo sapiens
ctattgcgtcagactaagctttctaaggaactcgccactggtatcattcaacagaaaggaacctgctagattaaa

SEQ ID NO: 110688 - DNA, 73 bp, Homo sapiens
taagctttctaaggaactcgccactggtatcattcaacagaaaggaacctgctagattaaagctaagtgaaat

SEQ ID NO: 110689 - DNA, 73 bp, Homo sapiens
ttctaaggaactcgccactggtatcattcaacagaaaggaacctgctagattaaagctaagtgaaattttcca

SEQ ID NO: 110690 - DNA, 76 bp, Homo sapiens
tatcattcaacagaaaggaacctgctagattaaagctaagtgaaattttccaaatgatttcagctggctctaccta

SEQ ID NO: 110691 - DNA, 71 bp, Homo sapiens
aaaggaacctgctagattaaagctaagtgaaattttccaaatgatttcagctggctctacctagtggttaa

SEQ ID NO: 110692 - DNA, 74 bp, Homo sapiens
ctagattaaagctaagtgaaattttccaaatgatttcagctggctctacctagtggttaagcttcatctttatc

SEQ ID NO: 110693 - DNA, 73 bp, Homo sapiens
ttaaagctaagtgaaattttccaaatgatttcagctggctctacctagtggttaagcttcatctttatcgggc

SEQ ID NO: 110694 - DNA, 77 bp, Homo sapiens
attttccaaatgatttcagctggctctacctagtggttaagcttcatctttatcgggctgaacgagatgagctttca

SEQ ID NO: 110695 - DNA, 77 bp, Homo sapiens
aaatgatttcagctggctctacctagtggttaagcttcatctttatcgggctgaacgagatgagctttcacccaaga

SEQ ID NO: 110696 - DNA, 78 bp, Homo sapiens
agctggctctacctagtggttaagcttcatctttatcgggctgaacgagatgagctttcacccaagatgttggagcca

SEQ ID NO: 110697 - DNA, 77 bp, Homo sapiens
tagtggttaagcttcatctttatcgggctgaacgagatgagctttcacccaagatgttggagccacgcttataatat

SEQ ID NO: 110698 - DNA, 77 bp, Homo sapiens
ttaagcttcatctttatcgggctgaacgagatgagctttcacccaagatgttggagccacgcttataatatttgact

SEQ ID NO: 110699 - DNA, 75 bp, Homo sapiens
tttatcgggctgaacgagatgagctttcacccaagatgttggagccacgcttataatatttgacttttacacaaa

SEQ ID NO: 110700 - DNA, 74 bp, Homo sapiens
aacgagatgagctttcacccaagatgttggagccacgcttataatatttgacttttacacaaacagttatttga

SEQ ID NO: 110701 - DNA, 76 bp, Homo sapiens
atgagctttcacccaagatgttggagccacgcttataatatttgacttttacacaaacagttatttgattgcaatc

SEQ ID NO: 110702 - DNA, 74 bp, Homo sapiens
cacccaagatgttggagccacgcttataatatttgacttttacacaaacagttatttgattgcaatccaaacaa

SEQ ID NO: 110703 - DNA, 75 bp, Homo sapiens
ggagccacgcttataatatttgacttttacacaaacagttatttgattgcaatccaaacaaaagcaaatgatgtc

SEQ ID NO: 110704 - DNA, 73 bp, Homo sapiens
cgcttataatatttgacttttacacaaacagttatttgattgcaatccaaacaaaagcaaatgatgtccaaag

SEQ ID NO: 110705 - DNA, 75 bp, Homo sapiens
tgacttttacacaaacagttatttgattgcaatccaaacaaaagcaaatgatgtccaaagttagaactatggata

SEQ ID NO: 110706 - DNA, 76 bp, Homo sapiens
acaaacagttatttgattgcaatccaaacaaaagcaaatgatgtccaaagttagaactatggatacaaggcactga

SEQ ID NO: 110707 - DNA, 76 bp, Homo sapiens
gttatttgattgcaatccaaacaaaagcaaatgatgtccaaagttagaactatggatacaaggcactgaaacatct

SEQ ID NO: 110708 - DNA, 73 bp, Homo sapiens
aaaagcaaatgatgtccaaagttagaactatggatacaaggcactgaaacatcttaaaactcaaggctgaaag

SEQ ID NO: 110709 - DNA, 74 bp, Homo sapiens
atgatgtccaaagttagaactatggatacaaggcactgaaacatcttaaaactcaaggctgaaaggtatctaag

SEQ ID NO: 110710 - DNA, 71 bp, Homo sapiens
gttagaactatggatacaaggcactgaaacatcttaaaactcaaggctgaaaggtatctaaggaatttttg

SEQ ID NO: 110711 - DNA, 73 bp, Homo sapiens
tatggatacaaggcactgaaacatcttaaaactcaaggctgaaaggtatctaaggaatttttgtctcaaggaa

SEQ ID NO: 110712 - DNA, 71 bp, Homo sapiens
cactgaaacatcttaaaactcaaggctgaaaggtatctaaggaatttttgtctcaaggaagaggtgttata

SEQ ID NO: 110713 - DNA, 70 bp, Homo sapiens
catcttaaaactcaaggctgaaaggtatctaaggaatttttgtctcaaggaagaggtgttataattccca

SEQ ID NO: 110714 - DNA, 68 bp, Homo sapiens
actcaaggctgaaaggtatctaaggaatttttgtctcaaggaagaggtgttataattcccaaaaagga

SEQ ID NO: 110715 - DNA, 69 bp, Homo sapiens
ggtatctaaggaatttttgtctcaaggaagaggtgttataattcccaaaaaggaaactgtgtctactga

SEQ ID NO: 110716 - DNA, 66 bp, Homo sapiens
aggaatttttgtctcaaggaagaggtgttataattcccaaaaaggaaactgtgtctactgattttt

SEQ ID NO: 110717 - DNA, 69 bp, Homo sapiens
tgtctcaaggaagaggtgttataattcccaaaaaggaaactgtgtctactgatttttttaaatctagag

SEQ ID NO: 110718 - DNA, 69 bp, Homo sapiens
gaggtgttataattcccaaaaaggaaactgtgtctactgatttttttaaatctagagggaagacgatca

SEQ ID NO: 110719 - DNA, 68 bp, Homo sapiens
attcccaaaaaggaaactgtgtctactgatttttttaaatctagagggaagacgatcatataattttc

SEQ ID NO: 110720 - DNA, 67 bp, Homo sapiens
aaaaaggaaactgtgtctactgatttttttaaatctagagggaagacgatcatataattttctttct

SEQ ID NO: 110721 - DNA, 75 bp, Homo sapiens
accgcacccagcctcatataattttcatcaggcactaaagcttaacaatcaactggcaaacaaatgtttaccata

SEQ ID NO: 110722 - DNA, 76 bp, Homo sapiens
agcctcatataattttcatcaggcactaaagcttaacaatcaactggcaaacaaatgtttaccatacacgactgta

SEQ ID NO: 110723 - DNA, 75 bp, Homo sapiens
taattttcatcaggcactaaagcttaacaatcaactggcaaacaaatgtttaccatacacgactgtatgcaaagt

SEQ ID NO: 110724 - DNA, 74 bp, Homo sapiens
atcaggcactaaagcttaacaatcaactggcaaacaaatgtttaccatacacgactgtatgcaaagttccggaa

SEQ ID NO: 110725 - DNA, 76 bp, Homo sapiens
gtttaccatacacgactgtatgcaaagttccggaagggcaggcagatagctattttattcatgttcccatagttga

SEQ ID NO: 110726 - DNA, 77 bp, Homo sapiens
actgtatgcaaagttccggaagggcaggcagatagctattttattcatgttcccatagttgagtgcttcatgttctt

SEQ ID NO: 110727 - DNA, 78 bp, Homo sapiens
gggcaggcagatagctattttattcatgttcccatagttgagtgcttcatgttctttggacttgtataagtaacatta

SEQ ID NO: 110728 - DNA, 77 bp, Homo sapiens
ggcagatagctattttattcatgttcccatagttgagtgcttcatgttctttggacttgtataagtaacattaacta

SEQ ID NO: 110729 - DNA, 75 bp, Homo sapiens
tattcatgttcccatagttgagtgcttcatgttctttggacttgtataagtaacattaactactcttaatactgg

SEQ ID NO: 110730 - DNA, 72 bp, Homo sapiens
gttcccatagttgagtgcttcatgttctttggacttgtataagtaacattaactactcttaatactgggaaa

SEQ ID NO: 110731 - DNA, 71 bp, Homo sapiens
agttgagtgcttcatgttctttggacttgtataagtaacattaactactcttaatactgggaaattctttg

SEQ ID NO: 110732 - DNA, 71 bp, Homo sapiens
tgttctttggacttgtataagtaacattaactactcttaatactgggaaattctttgttatctctctcaac

SEQ ID NO: 110733 - DNA, 72 bp, Homo sapiens
ggacttgtataagtaacattaactactcttaatactgggaaattctttgttatctctctcaaccgtctctca

SEQ ID NO: 110734 - DNA, 74 bp, Homo sapiens
taagtaacattaactactcttaatactgggaaattctttgttatctctctcaaccgtctctcacatcattgcct

SEQ ID NO: 110735 - DNA, 74 bp, Homo sapiens
ttaactactcttaatactgggaaattctttgttatctctctcaaccgtctctcacatcattgccttttggtatg

SEQ ID NO: 110736 - DNA, 75 bp, Homo sapiens
ttaatactgggaaattctttgttatctctctcaaccgtctctcacatcattgccttttggtatggcctcctaatc

SEQ ID NO: 110737 - DNA, 76 bp, Homo sapiens
aaattctttgttatctctctcaaccgtctctcacatcattgccttttggtatggcctcctaatctgagttctgttc

SEQ ID NO: 110738 - DNA, 77 bp, Homo sapiens
tgttatctctctcaaccgtctctcacatcattgccttttggtatggcctcctaatctgagttctgttccagggaaaa

SEQ ID NO: 110739 - DNA, 74 bp, Homo sapiens
aaccgtctctcacatcattgccttttggtatggcctcctaatctgagttctgttccagggaaaatgggaatgga

SEQ ID NO: 110740 - DNA, 78 bp, Homo sapiens
tctcacatcattgccttttggtatggcctcctaatctgagttctgttccagggaaaatgggaatggaagtcactctca

SEQ ID NO: 110741 - DNA, 75 bp, Homo sapiens
acatcattgccttttggtatggcctcctaatctgagttctgttccagggaaaatgggaatggaagtcactctcaa

SEQ ID NO: 110742 - DNA, 76 bp, Homo sapiens
atcattgccttttggtatggcctcctaatctgagttctgttccagggaaaatgggaatggaagtcactctcaatga

SEQ ID NO: 110743 - DNA, 76 bp, Homo sapiens
ttctgttccagggaaaatgggaatggaagtcactctcaatgacagccctgcacacgcagggaacacctggttacta

SEQ ID NO: 110744 - DNA, 74 bp, Homo sapiens
agggaaaatgggaatggaagtcactctcaatgacagccctgcacacgcagggaacacctggttactagtttgtc

SEQ ID NO: 110745 - DNA, 76 bp, Homo sapiens
aatggaagtcactctcaatgacagccctgcacacgcagggaacacctggttactagtttgtccctgagccacttct

SEQ ID NO: 110746 - DNA, 76 bp, Homo sapiens
aagtcactctcaatgacagccctgcacacgcagggaacacctggttactagtttgtccctgagccacttcttctgg

SEQ ID NO: 110747 - DNA, 77 bp, Homo sapiens
acagccctgcacacgcagggaacacctggttactagtttgtccctgagccacttcttctggtgccaggctgagctaa

SEQ ID NO: 110748 - DNA, 76 bp, Homo sapiens
ggaacacctggttactagtttgtccctgagccacttcttctggtgccaggctgagctaaggataaggcagcagaaa

SEQ ID NO: 110749 - DNA, 80 bp, Homo sapiens
tccctgagccacttcttctggtgccaggctgagctaaggataaggcagcagaaagcaaaaggcaacctcgaatgtctcta

SEQ ID NO: 110750 - DNA, 79 bp, Homo sapiens
acttcttctggtgccaggctgagctaaggataaggcagcagaaagcaaaaggcaacctcgaatgtctctagatccagac

SEQ ID NO: 110751 - DNA, 78 bp, Homo sapiens
gtgccaggctgagctaaggataaggcagcagaaagcaaaaggcaacctcgaatgtctctagatccagacttttggtct

SEQ ID NO: 110752 - DNA, 76 bp, Homo sapiens
aggctgagctaaggataaggcagcagaaagcaaaaggcaacctcgaatgtctctagatccagacttttggtctttc

SEQ ID NO: 110753 - DNA, 73 bp, Homo sapiens
aggataaggcagcagaaagcaaaaggcaacctcgaatgtctctagatccagacttttggtctttccctccaaa

SEQ ID NO: 110754 - DNA, 71 bp, Homo sapiens
agaaagcaaaaggcaacctcgaatgtctctagatccagacttttggtctttccctccaaatgtcttcctcc

SEQ ID NO: 110755 - DNA, 75 bp, Homo sapiens
aatgtctctagatccagacttttggtctttccctccaaatgtcttcctcccatagtcctctatggcaattgcagt

SEQ ID NO: 110756 - DNA, 75 bp, Homo sapiens
tagatccagacttttggtctttccctccaaatgtcttcctcccatagtcctctatggcaattgcagtttccagat

SEQ ID NO: 110757 - DNA, 79 bp, Homo sapiens
tccctccaaatgtcttcctcccatagtcctctatggcaattgcagtttccagatttcttacgctgaagaacatgtgata

SEQ ID NO: 110758 - DNA, 78 bp, Homo sapiens
catagtcctctatggcaattgcagtttccagatttcttacgctgaagaacatgtgatacttccatgcctgttttcttt

SEQ ID NO: 110759 - DNA, 79 bp, Homo sapiens
tctatggcaattgcagtttccagatttcttacgctgaagaacatgtgatacttccatgcctgttttcttttgctcgttc

SEQ ID NO: 110760 - DNA, 75 bp, Homo sapiens
aattgcagtttccagatttcttacgctgaagaacatgtgatacttccatgcctgttttcttttgctcgttccctc

SEQ ID NO: 110761 - DNA, 77 bp, Homo sapiens
agatttcttacgctgaagaacatgtgatacttccatgcctgttttcttttgctcgttccctccatctaccagtcatc

SEQ ID NO: 110762 - DNA, 77 bp, Homo sapiens
cttacgctgaagaacatgtgatacttccatgcctgttttcttttgctcgttccctccatctaccagtcatcgactaa

SEQ ID NO: 110763 - DNA, 76 bp, Homo sapiens
aacatgtgatacttccatgcctgttttcttttgctcgttccctccatctaccagtcatcgactaatgctggtttta

SEQ ID NO: 110764 - DNA, 73 bp, Homo sapiens
ttccatgcctgttttcttttgctcgttccctccatctaccagtcatcgactaatgctggttttacctccaaaa

SEQ ID NO: 110765 - DNA, 72 bp, Homo sapiens
gttttcttttgctcgttccctccatctaccagtcatcgactaatgctggttttacctccaaaacagtcactc

SEQ ID NO: 110766 - DNA, 73 bp, Homo sapiens
tccatctaccagtcatcgactaatgctggttttacctccaaaacagtcactctctttaccgtctctataattt

SEQ ID NO: 110767 - DNA, 70 bp, Homo sapiens
taccagtcatcgactaatgctggttttacctccaaaacagtcactctctttaccgtctctataatttttt

SEQ ID NO: 110768 - DNA, 67 bp, Homo sapiens
cgactaatgctggttttacctccaaaacagtcactctctttaccgtctctataattttttttacttc

SEQ ID NO: 110769 - DNA, 67 bp, Homo sapiens
ggttttacctccaaaacagtcactctctttaccgtctctataattttttttacttccatttgcaata

SEQ ID NO: 110770 - DNA, 67 bp, Homo sapiens
ccaaaacagtcactctctttaccgtctctataattttttttacttccatttgcaatagtttcttatt

SEQ ID NO: 110771 - DNA, 66 bp, Homo sapiens
cactctctttaccgtctctataattttttttacttccatttgcaatagtttcttatttgtattttt

SEQ ID NO: 110772 - DNA, 72 bp, Homo sapiens
atataattcacatatcatatagttcacctatttcaaatgtacaattcaataagtttttggcctattattttt

SEQ ID NO: 110773 - DNA, 72 bp, Homo sapiens
attcacatatcatatagttcacctatttcaaatgtacaattcaataagtttttggcctattattttttttga

SEQ ID NO: 110774 - DNA, 69 bp, Homo sapiens
catatagttcacctatttcaaatgtacaattcaataagtttttggcctattattttttttgagttatgg

SEQ ID NO: 110775 - DNA, 67 bp, Homo sapiens
cctatttcaaatgtacaattcaataagtttttggcctattattttttttgagttatggttttatata

SEQ ID NO: 110776 - DNA, 75 bp, Homo sapiens
atatatatatatacgcatatataacatacagtttgacattttaagaatttttaactatagttctatggcactaat

SEQ ID NO: 110777 - DNA, 76 bp, Homo sapiens
tatacgcatatataacatacagtttgacattttaagaatttttaactatagttctatggcactaattacattcaca

SEQ ID NO: 110778 - DNA, 74 bp, Homo sapiens
tacagtttgacattttaagaatttttaactatagttctatggcactaattacattcacaatgttggcaataata

SEQ ID NO: 110779 - DNA, 73 bp, Homo sapiens
ttaagaatttttaactatagttctatggcactaattacattcacaatgttggcaataataattactattcatt

SEQ ID NO: 110780 - DNA, 73 bp, Homo sapiens
ttttaactatagttctatggcactaattacattcacaatgttggcaataataattactattcatttttcccaa

SEQ ID NO: 110781 - DNA, 72 bp, Homo sapiens
tatagttctatggcactaattacattcacaatgttggcaataataattactattcatttttcccaaaacttt

SEQ ID NO: 110782 - DNA, 71 bp, Homo sapiens
gcactaattacattcacaatgttggcaataataattactattcatttttcccaaaactttttaattgccca

SEQ ID NO: 110783 - DNA, 69 bp, Homo sapiens
tggcaataataattactattcatttttcccaaaactttttaattgcccaaataaagactaaatatgcat

SEQ ID NO: 110784 - DNA, 68 bp, Homo sapiens
attactattcatttttcccaaaactttttaattgcccaaataaagactaaatatgcattaggagtaga

SEQ ID NO: 110785 - DNA, 66 bp, Homo sapiens
catttttcccaaaactttttaattgcccaaataaagactaaatatgcattaggagtagaagaaaac

SEQ ID NO: 110786 - DNA, 68 bp, Homo sapiens
ccaaaactttttaattgcccaaataaagactaaatatgcattaggagtagaagaaaacttcaacacga

SEQ ID NO: 110787 - DNA, 74 bp, Homo sapiens
attgcccaaataaagactaaatatgcattaggagtagaagaaaacttcaacacgataaagctcatatatagaaa

SEQ ID NO: 110788 - DNA, 74 bp, Homo sapiens
taaagactaaatatgcattaggagtagaagaaaacttcaacacgataaagctcatatatagaaacccacaacta

SEQ ID NO: 110789 - DNA, 74 bp, Homo sapiens
atatgcattaggagtagaagaaaacttcaacacgataaagctcatatatagaaacccacaactaacataatacc

SEQ ID NO: 110790 - DNA, 73 bp, Homo sapiens
ggagtagaagaaaacttcaacacgataaagctcatatatagaaacccacaactaacataataccgaatgataa

SEQ ID NO: 110791 - DNA, 73 bp, Homo sapiens
gaaaacttcaacacgataaagctcatatatagaaacccacaactaacataataccgaatgataaactactgaa

SEQ ID NO: 110792 - DNA, 71 bp, Homo sapiens
aagctcatatatagaaacccacaactaacataataccgaatgataaactactgaaagcttttcccctaaga

SEQ ID NO: 110793 - DNA, 70 bp, Homo sapiens
atatagaaacccacaactaacataataccgaatgataaactactgaaagcttttcccctaagatcaggaa

SEQ ID NO: 110794 - DNA, 72 bp, Homo sapiens
tattcaacacagtactggaaattctagccggagcaattaagaaaacaacatataaaagacacccaaattgga

SEQ ID NO: 110795 - DNA, 70 bp, Homo sapiens
cacagtactggaaattctagccggagcaattaagaaaacaacatataaaagacacccaaattggaaagta

SEQ ID NO: 110796 - DNA, 70 bp, Homo sapiens
tggaaattctagccggagcaattaagaaaacaacatataaaagacacccaaattggaaagtaaggagtca

SEQ ID NO: 110797 - DNA, 69 bp, Homo sapiens
agccggagcaattaagaaaacaacatataaaagacacccaaattggaaagtaaggagtcaaattatctc

SEQ ID NO: 110798 - DNA, 73 bp, Homo sapiens
gaaaacaacatataaaagacacccaaattggaaagtaaggagtcaaattatctctttacagatgccatgatat

SEQ ID NO: 110799 - DNA, 76 bp, Homo sapiens
caacatataaaagacacccaaattggaaagtaaggagtcaaattatctctttacagatgccatgatattatatgta

SEQ ID NO: 110800 - DNA, 74 bp, Homo sapiens
aagacacccaaattggaaagtaaggagtcaaattatctctttacagatgccatgatattatatgtagaaaactc

SEQ ID NO: 110801 - DNA, 75 bp, Homo sapiens
ggaaagtaaggagtcaaattatctctttacagatgccatgatattatatgtagaaaactctaaagaatcctgaaa

SEQ ID NO: 110802 - DNA, 76 bp, Homo sapiens
ggagtcaaattatctctttacagatgccatgatattatatgtagaaaactctaaagaatcctgaaataaaaatctg

SEQ ID NO: 110803 - DNA, 77 bp, Homo sapiens
tctctttacagatgccatgatattatatgtagaaaactctaaagaatcctgaaataaaaatctgttcgatataataa

SEQ ID NO: 110804 - DNA, 79 bp, Homo sapiens
gatgccatgatattatatgtagaaaactctaaagaatcctgaaataaaaatctgttcgatataataagtgaattctgca

SEQ ID NO: 110805 - DNA, 75 bp, Homo sapiens
tatgtagaaaactctaaagaatcctgaaataaaaatctgttcgatataataagtgaattctgcaagcttgtagaa

SEQ ID NO: 110806 - DNA, 74 bp, Homo sapiens
agaaaactctaaagaatcctgaaataaaaatctgttcgatataataagtgaattctgcaagcttgtagaatata

SEQ ID NO: 110807 - DNA, 75 bp, Homo sapiens
aactctaaagaatcctgaaataaaaatctgttcgatataataagtgaattctgcaagcttgtagaatatatagaa

SEQ ID NO: 110808 - DNA, 77 bp, Homo sapiens
atcctgaaataaaaatctgttcgatataataagtgaattctgcaagcttgtagaatatatagaaacacaaagagcag

SEQ ID NO: 110809 - DNA, 78 bp, Homo sapiens
ttctgcaagcttgtagaatatatagaaacacaaagagcagttgtgtttctacatacttgcaatgaccaattcaaaaag

SEQ ID NO: 110810 - DNA, 71 bp, Homo sapiens
agaaacacaaagagcagttgtgtttctacatacttgcaatgaccaattcaaaaaggtaactgaaaacaatt

SEQ ID NO: 110811 - DNA, 74 bp, Homo sapiens
cacaaagagcagttgtgtttctacatacttgcaatgaccaattcaaaaaggtaactgaaaacaatttcattcaa

SEQ ID NO: 110812 - DNA, 71 bp, Homo sapiens
agttgtgtttctacatacttgcaatgaccaattcaaaaaggtaactgaaaacaatttcattcaaaataaca

SEQ ID NO: 110813 - DNA, 71 bp, Homo sapiens
ctacatacttgcaatgaccaattcaaaaaggtaactgaaaacaatttcattcaaaataacattgaaaagaa

SEQ ID NO: 110814 - DNA, 68 bp, Homo sapiens
attcaaaaaggtaactgaaaacaatttcattcaaaataacattgaaaagaacaaaatatgtacaagta

SEQ ID NO: 110815 - DNA, 68 bp, Homo sapiens
tgaaaacaatttcattcaaaataacattgaaaagaacaaaatatgtacaagtaaattttaaacaagga

SEQ ID NO: 110816 - DNA, 68 bp, Homo sapiens
ttcattcaaaataacattgaaaagaacaaaatatgtacaagtaaattttaaacaaggaggcaaaagac

SEQ ID NO: 110817 - DNA, 70 bp, Homo sapiens
ataacattgaaaagaacaaaatatgtacaagtaaattttaaacaaggaggcaaaagactcatatactgaa

SEQ ID NO: 110818 - DNA, 69 bp, Homo sapiens
gaaaagaacaaaatatgtacaagtaaattttaaacaaggaggcaaaagactcatatactgaaaaccaca

SEQ ID NO: 110819 - DNA, 70 bp, Homo sapiens
aatatgtacaagtaaattttaaacaaggaggcaaaagactcatatactgaaaaccacaaaatattactca

SEQ ID NO: 110820 - DNA, 68 bp, Homo sapiens
caagtaaattttaaacaaggaggcaaaagactcatatactgaaaaccacaaaatattactcaaagaaa

SEQ ID NO: 110821 - DNA, 69 bp, Homo sapiens
tttaaacaaggaggcaaaagactcatatactgaaaaccacaaaatattactcaaagaaattaaagaaca

SEQ ID NO: 110822 - DNA, 70 bp, Homo sapiens
ggaggcaaaagactcatatactgaaaaccacaaaatattactcaaagaaattaaagaacaaaataaatga

SEQ ID NO: 110823 - DNA, 73 bp, Homo sapiens
gattggaagacctgctgttaagataactatactacccaaagcaaactaaagattcagtgtaatcccccatcaa

SEQ ID NO: 110824 - DNA, 71 bp, Homo sapiens
aagacctgctgttaagataactatactacccaaagcaaactaaagattcagtgtaatcccccatcaaaatc

SEQ ID NO: 110825 - DNA, 70 bp, Homo sapiens
gttaagataactatactacccaaagcaaactaaagattcagtgtaatcccccatcaaaatcccaatatta

SEQ ID NO: 110826 - DNA, 73 bp, Homo sapiens
ttattactatttttacagaaataataagacccatcctgaaatgctaactggctttttgcacttgctgtttctc

SEQ ID NO: 110827 - DNA, 72 bp, Homo sapiens
actatttttacagaaataataagacccatcctgaaatgctaactggctttttgcacttgctgtttctccttc

SEQ ID NO: 110828 - DNA, 76 bp, Homo sapiens
agaaataataagacccatcctgaaatgctaactggctttttgcacttgctgtttctccttcctggtgtgctcctga

SEQ ID NO: 110829 - DNA, 78 bp, Homo sapiens
aagacccatcctgaaatgctaactggctttttgcacttgctgtttctccttcctggtgtgctcctgagtcagacatta

SEQ ID NO: 110830 - DNA, 80 bp, Homo sapiens
aactggctttttgcacttgctgtttctccttcctggtgtgctcctgagtcagacattagcatggctcccagtgtcacctc

SEQ ID NO: 110831 - DNA, 82 bp, Homo sapiens
acttgctgtttctccttcctggtgtgctcctgagtcagacattagcatggctcccagtgtcacctccttcaggtgagtatgc

SEQ ID NO: 110832 - DNA, 88 bp, Homo sapiens
tctccttcctggtgtgctcctgagtcagacattagcatggctcccagtgtcacctccttcaggtgagtatgccacatgacactcatca

SEQ ID NO: 110833 - DNA, 88 bp, Homo sapiens
ctggtgtgctcctgagtcagacattagcatggctcccagtgtcacctccttcaggtgagtatgccacatgacactcatcaccttctca

SEQ ID NO: 110834 - DNA, 87 bp, Homo sapiens
tcctgagtcagacattagcatggctcccagtgtcacctccttcaggtgagtatgccacatgacactcatcaccttctcagcgtgccc

SEQ ID NO: 110835 - DNA, 84 bp, Homo sapiens
acattagcatggctcccagtgtcacctccttcaggtgagtatgccacatgacactcatcaccttctcagcgtgcccctccttca

SEQ ID NO: 110836 - DNA, 81 bp, Homo sapiens
gtgtcacctccttcaggtgagtatgccacatgacactcatcaccttctcagcgtgcccctccttcaccagctttgcacccc

SEQ ID NO: 110837 - DNA, 80 bp, Homo sapiens
aggtgagtatgccacatgacactcatcaccttctcagcgtgcccctccttcaccagctttgcacccccagctgcccctta

SEQ ID NO: 110838 - DNA, 78 bp, Homo sapiens
ccacatgacactcatcaccttctcagcgtgcccctccttcaccagctttgcacccccagctgccccttatttgtctta

SEQ ID NO: 110839 - DNA, 75 bp, Homo sapiens
actcatcaccttctcagcgtgcccctccttcaccagctttgcacccccagctgccccttatttgtcttatgcttt

SEQ ID NO: 110840 - DNA, 73 bp, Homo sapiens
accttctcagcgtgcccctccttcaccagctttgcacccccagctgccccttatttgtcttatgcttttccat

SEQ ID NO: 110841 - DNA, 73 bp, Homo sapiens
cccctccttcaccagctttgcacccccagctgccccttatttgtcttatgcttttccattgcccttagtatca

SEQ ID NO: 110842 - DNA, 74 bp, Homo sapiens
ttcaccagctttgcacccccagctgccccttatttgtcttatgcttttccattgcccttagtatcattttccca

SEQ ID NO: 110843 - DNA, 73 bp, Homo sapiens
cacccccagctgccccttatttgtcttatgcttttccattgcccttagtatcattttcccacacagcacattt

SEQ ID NO: 110844 - DNA, 73 bp, Homo sapiens
agctgccccttatttgtcttatgcttttccattgcccttagtatcattttcccacacagcacattttatttat

SEQ ID NO: 110845 - DNA, 66 bp, Homo sapiens
atttttataatttcccctttaaatacaaatttcacgaggtcaggaagttttatgtttgttcactgc

SEQ ID NO: 110846 - DNA, 75 bp, Homo sapiens
taaatacaaatttcacgaggtcaggaagttttatgtttgttcactgctgtatttccagcatctaaaacatgtcag

SEQ ID NO: 110847 - DNA, 78 bp, Homo sapiens
aaatttcacgaggtcaggaagttttatgtttgttcactgctgtatttccagcatctaaaacatgtcaggcacatagca

SEQ ID NO: 110848 - DNA, 82 bp, Homo sapiens
tcaggaagttttatgtttgttcactgctgtatttccagcatctaaaacatgtcaggcacatagcaggcattcaagataaata

SEQ ID NO: 110849 - DNA, 80 bp, Homo sapiens
agttttatgtttgttcactgctgtatttccagcatctaaaacatgtcaggcacatagcaggcattcaagataaatattta

SEQ ID NO: 110850 - DNA, 88 bp, Homo sapiens
tcactgctgtatttccagcatctaaaacatgtcaggcacatagcaggcattcaagataaatatttatcaaatgcaagcatgagtgtaa

SEQ ID NO: 110851 - DNA, 85 bp, Homo sapiens
tatttccagcatctaaaacatgtcaggcacatagcaggcattcaagataaatatttatcaaatgcaagcatgagtgtaaaatgta

SEQ ID NO: 110852 - DNA, 84 bp, Homo sapiens
catctaaaacatgtcaggcacatagcaggcattcaagataaatatttatcaaatgcaagcatgagtgtaaaatgtatgagaaaa

SEQ ID NO: 110853 - DNA, 83 bp, Homo sapiens
acatgtcaggcacatagcaggcattcaagataaatatttatcaaatgcaagcatgagtgtaaaatgtatgagaaaaaccaata

SEQ ID NO: 110854 - DNA, 82 bp, Homo sapiens
cacatagcaggcattcaagataaatatttatcaaatgcaagcatgagtgtaaaatgtatgagaaaaaccaatacatccacat

SEQ ID NO: 110855 - DNA, 79 bp, Homo sapiens
gcattcaagataaatatttatcaaatgcaagcatgagtgtaaaatgtatgagaaaaaccaatacatccacatttattat

SEQ ID NO: 110856 - DNA, 78 bp, Homo sapiens
tgcaagcatgagtgtaaaatgtatgagaaaaaccaatacatccacatttattatttttgtaatgagacaagaccaaca

SEQ ID NO: 110857 - DNA, 75 bp, Homo sapiens
gcatgagtgtaaaatgtatgagaaaaaccaatacatccacatttattatttttgtaatgagacaagaccaacaag

SEQ ID NO: 110858 - DNA, 74 bp, Homo sapiens
tgtatgagaaaaaccaatacatccacatttattatttttgtaatgagacaagaccaacaagtgattactaatgg

SEQ ID NO: 110859 - DNA, 72 bp, Homo sapiens
aaccaatacatccacatttattatttttgtaatgagacaagaccaacaagtgattactaatgggattttcgc

SEQ ID NO: 110860 - DNA, 73 bp, Homo sapiens
tccacatttattatttttgtaatgagacaagaccaacaagtgattactaatgggattttcgcctcacattttc

SEQ ID NO: 110861 - DNA, 71 bp, Homo sapiens
catttattatttttgtaatgagacaagaccaacaagtgattactaatgggattttcgcctcacattttcct

SEQ ID NO: 110862 - DNA, 72 bp, Homo sapiens
ttatttttgtaatgagacaagaccaacaagtgattactaatgggattttcgcctcacattttccttaacaga

SEQ ID NO: 110863 - DNA, 71 bp, Homo sapiens
ttttgtaatgagacaagaccaacaagtgattactaatgggattttcgcctcacattttccttaacagaatt

SEQ ID NO: 110864 - DNA, 72 bp, Homo sapiens
tttgtaatgagacaagaccaacaagtgattactaatgggattttcgcctcacattttccttaacagaattta

SEQ ID NO: 110865 - DNA, 70 bp, Homo sapiens
aatgagacaagaccaacaagtgattactaatgggattttcgcctcacattttccttaacagaatttaaaa

SEQ ID NO: 110866 - DNA, 71 bp, Homo sapiens
caagaccaacaagtgattactaatgggattttcgcctcacattttccttaacagaatttaaaattgtggca

SEQ ID NO: 110867 - DNA, 70 bp, Homo sapiens
gaccaacaagtgattactaatgggattttcgcctcacattttccttaacagaatttaaaattgtggcaaa

SEQ ID NO: 110868 - DNA, 71 bp, Homo sapiens
ttactaatgggattttcgcctcacattttccttaacagaatttaaaattgtggcaaaacatggtggtgcaa

SEQ ID NO: 110869 - DNA, 72 bp, Homo sapiens
taatgggattttcgcctcacattttccttaacagaatttaaaattgtggcaaaacatggtggtgcaagaaca

SEQ ID NO: 110870 - DNA, 71 bp, Homo sapiens
ttttcgcctcacattttccttaacagaatttaaaattgtggcaaaacatggtggtgcaagaacaatacaac

SEQ ID NO: 110871 - DNA, 73 bp, Homo sapiens
gcctcacattttccttaacagaatttaaaattgtggcaaaacatggtggtgcaagaacaatacaacttcatta

SEQ ID NO: 110872 - DNA, 72 bp, Homo sapiens
taacagaatttaaaattgtggcaaaacatggtggtgcaagaacaatacaacttcattacacacccaaagaag

SEQ ID NO: 110873 - DNA, 72 bp, Homo sapiens
aatttaaaattgtggcaaaacatggtggtgcaagaacaatacaacttcattacacacccaaagaagtggtga

SEQ ID NO: 110874 - DNA, 74 bp, Homo sapiens
gtggtgcaagaacaatacaacttcattacacacccaaagaagtggtgagttcatctatttcctcccactcgaaa

SEQ ID NO: 110875 - DNA, 71 bp, Homo sapiens
aacaatacaacttcattacacacccaaagaagtggtgagttcatctatttcctcccactcgaaaagcaaat

SEQ ID NO: 110876 - DNA, 72 bp, Homo sapiens
tacaacttcattacacacccaaagaagtggtgagttcatctatttcctcccactcgaaaagcaaattcattt

SEQ ID NO: 110877 - DNA, 71 bp, Homo sapiens
tacacacccaaagaagtggtgagttcatctatttcctcccactcgaaaagcaaattcattttgggctgttt

SEQ ID NO: 110878 - DNA, 74 bp, Homo sapiens
aaagaagtggtgagttcatctatttcctcccactcgaaaagcaaattcattttgggctgttttcacatcatcaa

SEQ ID NO: 110879 - DNA, 76 bp, Homo sapiens
ttcatctatttcctcccactcgaaaagcaaattcattttgggctgttttcacatcatcaactctccttccaatgta

SEQ ID NO: 110880 - DNA, 76 bp, Homo sapiens
tatttcctcccactcgaaaagcaaattcattttgggctgttttcacatcatcaactctccttccaatgtactgctc

SEQ ID NO: 110881 - DNA, 78 bp, Homo sapiens
gaaaagcaaattcattttgggctgttttcacatcatcaactctccttccaatgtactgctccttgaatcagaatacat

SEQ ID NO: 110882 - DNA, 77 bp, Homo sapiens
aaattcattttgggctgttttcacatcatcaactctccttccaatgtactgctccttgaatcagaatacatttgaaa

SEQ ID NO: 110883 - DNA, 79 bp, Homo sapiens
tttgggctgttttcacatcatcaactctccttccaatgtactgctccttgaatcagaatacatttgaaatcatttccca

SEQ ID NO: 110884 - DNA, 79 bp, Homo sapiens
tttcacatcatcaactctccttccaatgtactgctccttgaatcagaatacatttgaaatcatttcccagtctgaaaaa

SEQ ID NO: 110885 - DNA, 78 bp, Homo sapiens
actctccttccaatgtactgctccttgaatcagaatacatttgaaatcatttcccagtctgaaaaagtcatcagtgta

SEQ ID NO: 110886 - DNA, 79 bp, Homo sapiens
ttccaatgtactgctccttgaatcagaatacatttgaaatcatttcccagtctgaaaaagtcatcagtgtatcttaatc

SEQ ID NO: 110887 - DNA, 78 bp, Homo sapiens
ctccttgaatcagaatacatttgaaatcatttcccagtctgaaaaagtcatcagtgtatcttaatccatcttaatctg

SEQ ID NO: 110888 - DNA, 77 bp, Homo sapiens
gaatacatttgaaatcatttcccagtctgaaaaagtcatcagtgtatcttaatccatcttaatctgtaatggcaaag

SEQ ID NO: 110889 - DNA, 75 bp, Homo sapiens
atttgaaatcatttcccagtctgaaaaagtcatcagtgtatcttaatccatcttaatctgtaatggcaaaggacc

SEQ ID NO: 110890 - DNA, 80 bp, Homo sapiens
taatccatcttaatctgtaatggcaaaggaccccatgtgagtggagatgcagttatggctaagtgtgggatgccaagaac

SEQ ID NO: 110891 - DNA, 78 bp, Homo sapiens
ttaatctgtaatggcaaaggaccccatgtgagtggagatgcagttatggctaagtgtgggatgccaagaacttgactt

SEQ ID NO: 110892 - DNA, 82 bp, Homo sapiens
cccatgtgagtggagatgcagttatggctaagtgtgggatgccaagaacttgactttggctgggtgagagcaagtctcaata

SEQ ID NO: 110893 - DNA, 80 bp, Homo sapiens
agtggagatgcagttatggctaagtgtgggatgccaagaacttgactttggctgggtgagagcaagtctcaatagcaagg

SEQ ID NO: 110894 - DNA, 78 bp, Homo sapiens
agttatggctaagtgtgggatgccaagaacttgactttggctgggtgagagcaagtctcaatagcaagggagcaagta

SEQ ID NO: 110895 - DNA, 80 bp, Homo sapiens
taagtgtgggatgccaagaacttgactttggctgggtgagagcaagtctcaatagcaagggagcaagtagacagctggta

SEQ ID NO: 110896 - DNA, 79 bp, Homo sapiens
atgccaagaacttgactttggctgggtgagagcaagtctcaatagcaagggagcaagtagacagctggtaggaaaatca

SEQ ID NO: 110897 - DNA, 76 bp, Homo sapiens
aacttgactttggctgggtgagagcaagtctcaatagcaagggagcaagtagacagctggtaggaaaatcatgggt

SEQ ID NO: 110898 - DNA, 82 bp, Homo sapiens
tgggtgagagcaagtctcaatagcaagggagcaagtagacagctggtaggaaaatcatgggttcgcctgcatgtgagtaaca

SEQ ID NO: 110899 - DNA, 79 bp, Homo sapiens
caagtctcaatagcaagggagcaagtagacagctggtaggaaaatcatgggttcgcctgcatgtgagtaacaaggacga

SEQ ID NO: 110900 - DNA, 76 bp, Homo sapiens
tagcaagggagcaagtagacagctggtaggaaaatcatgggttcgcctgcatgtgagtaacaaggacgaacggtaa

SEQ ID NO: 110901 - DNA, 75 bp, Homo sapiens
agcaagtagacagctggtaggaaaatcatgggttcgcctgcatgtgagtaacaaggacgaacggtaatgggagac

SEQ ID NO: 110902 - DNA, 73 bp, Homo sapiens
agctggtaggaaaatcatgggttcgcctgcatgtgagtaacaaggacgaacggtaatgggagactcccacaag

SEQ ID NO: 110903 - DNA, 72 bp, Homo sapiens
aaaatcatgggttcgcctgcatgtgagtaacaaggacgaacggtaatgggagactcccacaagtgggaaaca

SEQ ID NO: 110904 - DNA, 75 bp, Homo sapiens
gttcgcctgcatgtgagtaacaaggacgaacggtaatgggagactcccacaagtgggaaacagtacatgtagaca

SEQ ID NO: 110905 - DNA, 76 bp, Homo sapiens
atgtgagtaacaaggacgaacggtaatgggagactcccacaagtgggaaacagtacatgtagacatgactacatgc

SEQ ID NO: 110906 - DNA, 74 bp, Homo sapiens
agtaacaaggacgaacggtaatgggagactcccacaagtgggaaacagtacatgtagacatgactacatgccaa

SEQ ID NO: 110907 - DNA, 75 bp, Homo sapiens
acgaacggtaatgggagactcccacaagtgggaaacagtacatgtagacatgactacatgccaaacaaatgtaca

SEQ ID NO: 110908 - DNA, 77 bp, Homo sapiens
agactcccacaagtgggaaacagtacatgtagacatgactacatgccaaacaaatgtacaattgcacatacttaact

SEQ ID NO: 110909 - DNA, 77 bp, Homo sapiens
acaagtgggaaacagtacatgtagacatgactacatgccaaacaaatgtacaattgcacatacttaacttatgattt

SEQ ID NO: 110910 - DNA, 82 bp, Homo sapiens
catgtagacatgactacatgccaaacaaatgtacaattgcacatacttaacttatgatttttactttgatgataatgagtga

SEQ ID NO: 110911 - DNA, 77 bp, Homo sapiens
ctacatgccaaacaaatgtacaattgcacatacttaacttatgatttttactttgatgataatgagtgaacaagaag

SEQ ID NO: 110912 - DNA, 76 bp, Homo sapiens
caaatgtacaattgcacatacttaacttatgatttttactttgatgataatgagtgaacaagaaggagaaaagctg

SEQ ID NO: 110913 - DNA, 73 bp, Homo sapiens
ttttaaaaaaaaagatgactcaaccatgtcttatattaaatagatattgggaacatttgcctgaattacatca

SEQ ID NO: 110914 - DNA, 79 bp, Homo sapiens
aaaagatgactcaaccatgtcttatattaaatagatattgggaacatttgcctgaattacatcactgacctcatgaagc

SEQ ID NO: 110915 - DNA, 80 bp, Homo sapiens
actcaaccatgtcttatattaaatagatattgggaacatttgcctgaattacatcactgacctcatgaagccatgaaatc

SEQ ID NO: 110916 - DNA, 81 bp, Homo sapiens
tcttatattaaatagatattgggaacatttgcctgaattacatcactgacctcatgaagccatgaaatctcccacagaaca

SEQ ID NO: 110917 - DNA, 82 bp, Homo sapiens
gaacatttgcctgaattacatcactgacctcatgaagccatgaaatctcccacagaacaccacaaagccacagctttatctc

SEQ ID NO: 110918 - DNA, 83 bp, Homo sapiens
ctgaattacatcactgacctcatgaagccatgaaatctcccacagaacaccacaaagccacagctttatctccaagctcaaca

SEQ ID NO: 110919 - DNA, 80 bp, Homo sapiens
acctcatgaagccatgaaatctcccacagaacaccacaaagccacagctttatctccaagctcaacactttgtaatggca

SEQ ID NO: 110920 - DNA, 77 bp, Homo sapiens
atgaaatctcccacagaacaccacaaagccacagctttatctccaagctcaacactttgtaatggcacctcttcaag

SEQ ID NO: 110921 - DNA, 76 bp, Homo sapiens
tcccacagaacaccacaaagccacagctttatctccaagctcaacactttgtaatggcacctcttcaaggcttagt

SEQ ID NO: 110922 - DNA, 75 bp, Homo sapiens
acagctttatctccaagctcaacactttgtaatggcacctcttcaaggcttagttcctgtatttccattctcagg

SEQ ID NO: 110923 - DNA, 78 bp, Homo sapiens
ttatctccaagctcaacactttgtaatggcacctcttcaaggcttagttcctgtatttccattctcaggggcagatgc

SEQ ID NO: 110924 - DNA, 73 bp, Homo sapiens
aacactttgtaatggcacctcttcaaggcttagttcctgtatttccattctcaggggcagatgcttcccttag

SEQ ID NO: 110925 - DNA, 77 bp, Homo sapiens
ttcaaggcttagttcctgtatttccattctcaggggcagatgcttcccttaggaagagaagcccactgtctctctga

SEQ ID NO: 110926 - DNA, 77 bp, Homo sapiens
ttagttcctgtatttccattctcaggggcagatgcttcccttaggaagagaagcccactgtctctctgagaggagaa

SEQ ID NO: 110927 - DNA, 79 bp, Homo sapiens
tttccattctcaggggcagatgcttcccttaggaagagaagcccactgtctctctgagaggagaaactgatgcttctta

SEQ ID NO: 110928 - DNA, 77 bp, Homo sapiens
attctcaggggcagatgcttcccttaggaagagaagcccactgtctctctgagaggagaaactgatgcttcttaccc

SEQ ID NO: 110929 - DNA, 79 bp, Homo sapiens
gcagatgcttcccttaggaagagaagcccactgtctctctgagaggagaaactgatgcttcttaccctgagactgaaag

SEQ ID NO: 110930 - DNA, 77 bp, Homo sapiens
agatgcttcccttaggaagagaagcccactgtctctctgagaggagaaactgatgcttcttaccctgagactgaaag

SEQ ID NO: 110931 - DNA, 78 bp, Homo sapiens
ttcccttaggaagagaagcccactgtctctctgagaggagaaactgatgcttcttaccctgagactgaaagggctgca

SEQ ID NO: 110932 - DNA, 83 bp, Homo sapiens
actgtctctctgagaggagaaactgatgcttcttaccctgagactgaaagggctgcagtgcctaaaatgagcactgtgatcca

SEQ ID NO: 110933 - DNA, 83 bp, Homo sapiens
tgtctctctgagaggagaaactgatgcttcttaccctgagactgaaagggctgcagtgcctaaaatgagcactgtgatccaac

SEQ ID NO: 110934 - DNA, 82 bp, Homo sapiens
tgagaggagaaactgatgcttcttaccctgagactgaaagggctgcagtgcctaaaatgagcactgtgatccaacctggaga

SEQ ID NO: 110935 - DNA, 79 bp, Homo sapiens
aactgatgcttcttaccctgagactgaaagggctgcagtgcctaaaatgagcactgtgatccaacctggagaaactgta

SEQ ID NO: 110936 - DNA, 77 bp, Homo sapiens
ttcttaccctgagactgaaagggctgcagtgcctaaaatgagcactgtgatccaacctggagaaactgtatctttaa

SEQ ID NO: 110937 - DNA, 78 bp, Homo sapiens
agactgaaagggctgcagtgcctaaaatgagcactgtgatccaacctggagaaactgtatctttaacacactcacaaa

SEQ ID NO: 110938 - DNA, 76 bp, Homo sapiens
aaagggctgcagtgcctaaaatgagcactgtgatccaacctggagaaactgtatctttaacacactcacaaagaaa

SEQ ID NO: 110939 - DNA, 73 bp, Homo sapiens
agtgcctaaaatgagcactgtgatccaacctggagaaactgtatctttaacacactcacaaagaaaaaaataa

SEQ ID NO: 110940 - DNA, 71 bp, Homo sapiens
taaaaaagaaaaccatattctttagatttatttcgttcaaatacactctttagctagagcacaggcattta

SEQ ID NO: 110941 - DNA, 72 bp, Homo sapiens
aaccatattctttagatttatttcgttcaaatacactctttagctagagcacaggcatttaccttccaattc

SEQ ID NO: 110942 - DNA, 73 bp, Homo sapiens
ctttagatttatttcgttcaaatacactctttagctagagcacaggcatttaccttccaattctacttatcta

SEQ ID NO: 110943 - DNA, 76 bp, Homo sapiens
ttatttcgttcaaatacactctttagctagagcacaggcatttaccttccaattctacttatctattgatccaaca

SEQ ID NO: 110944 - DNA, 76 bp, Homo sapiens
tttcgttcaaatacactctttagctagagcacaggcatttaccttccaattctacttatctattgatccaacatat

SEQ ID NO: 110945 - DNA, 78 bp, Homo sapiens
ttcaaatacactctttagctagagcacaggcatttaccttccaattctacttatctattgatccaacatatttacata

SEQ ID NO: 110946 - DNA, 76 bp, Homo sapiens
atacactctttagctagagcacaggcatttaccttccaattctacttatctattgatccaacatatttacatattt

SEQ ID NO: 110947 - DNA, 76 bp, Homo sapiens
ctctttagctagagcacaggcatttaccttccaattctacttatctattgatccaacatatttacatattttcaaa

SEQ ID NO: 110948 - DNA, 77 bp, Homo sapiens
gctagagcacaggcatttaccttccaattctacttatctattgatccaacatatttacatattttcaaaataatcca

SEQ ID NO: 110949 - DNA, 76 bp, Homo sapiens
taccttccaattctacttatctattgatccaacatatttacatattttcaaaataatccacacacattctataatc

SEQ ID NO: 110950 - DNA, 76 bp, Homo sapiens
caattctacttatctattgatccaacatatttacatattttcaaaataatccacacacattctataatcccaccca

SEQ ID NO: 110951 - DNA, 77 bp, Homo sapiens
tacttatctattgatccaacatatttacatattttcaaaataatccacacacattctataatcccacccatataaga

SEQ ID NO: 110952 - DNA, 69 bp, Homo sapiens
ttcaaaataatccacacacattctataatcccacccatataagatttctttaaagtggtaaaccttttc

SEQ ID NO: 110953 - DNA, 69 bp, Homo sapiens
tccacacacattctataatcccacccatataagatttctttaaagtggtaaaccttttccaccaccatt

SEQ ID NO: 110954 - DNA, 66 bp, Homo sapiens
catataagatttctttaaagtggtaaaccttttccaccaccatttactgttgagaaaataaaggga

SEQ ID NO: 110955 - DNA, 69 bp, Homo sapiens
ttaaagtggtaaaccttttccaccaccatttactgttgagaaaataaagggatgagaaagcattagctg

SEQ ID NO: 110956 - DNA, 73 bp, Homo sapiens
taaaccttttccaccaccatttactgttgagaaaataaagggatgagaaagcattagctgtgttctagacatg

SEQ ID NO: 110957 - DNA, 75 bp, Homo sapiens
accaccatttactgttgagaaaataaagggatgagaaagcattagctgtgttctagacatggtccagtcaaagaa

SEQ ID NO: 110958 - DNA, 75 bp, Homo sapiens
atttactgttgagaaaataaagggatgagaaagcattagctgtgttctagacatggtccagtcaaagaagggaga

SEQ ID NO: 110959 - DNA, 76 bp, Homo sapiens
atgagaaagcattagctgtgttctagacatggtccagtcaaagaagggagaacttggaaatacagaactgtggtta

SEQ ID NO: 110960 - DNA, 75 bp, Homo sapiens
aaagcattagctgtgttctagacatggtccagtcaaagaagggagaacttggaaatacagaactgtggttattca

SEQ ID NO: 110961 - DNA, 78 bp, Homo sapiens
tgtgttctagacatggtccagtcaaagaagggagaacttggaaatacagaactgtggttattcatcgtgactctgcca

SEQ ID NO: 110962 - DNA, 77 bp, Homo sapiens
atggtccagtcaaagaagggagaacttggaaatacagaactgtggttattcatcgtgactctgccagccattgacta

SEQ ID NO: 110963 - DNA, 76 bp, Homo sapiens
aaagaagggagaacttggaaatacagaactgtggttattcatcgtgactctgccagccattgactacttgtgtaca

SEQ ID NO: 110964 - DNA, 77 bp, Homo sapiens
aacttggaaatacagaactgtggttattcatcgtgactctgccagccattgactacttgtgtacacttggaccaaga

SEQ ID NO: 110965 - DNA, 77 bp, Homo sapiens
aatacagaactgtggttattcatcgtgactctgccagccattgactacttgtgtacacttggaccaagagactggtt

SEQ ID NO: 110966 - DNA, 78 bp, Homo sapiens
aactgtggttattcatcgtgactctgccagccattgactacttgtgtacacttggaccaagagactggtttgatacca

SEQ ID NO: 110967 - DNA, 82 bp, Homo sapiens
actctgccagccattgactacttgtgtacacttggaccaagagactggtttgataccagtcacatccatgatggtgacattc

SEQ ID NO: 110968 - DNA, 82 bp, Homo sapiens
ttgactacttgtgtacacttggaccaagagactggtttgataccagtcacatccatgatggtgacattccatgggatgacaa

SEQ ID NO: 110969 - DNA, 82 bp, Homo sapiens
ttgtgtacacttggaccaagagactggtttgataccagtcacatccatgatggtgacattccatgggatgacaaagtgcctg

SEQ ID NO: 110970 - DNA, 82 bp, Homo sapiens
accaagagactggtttgataccagtcacatccatgatggtgacattccatgggatgacaaagtgcctgtggttgtgccagaa

SEQ ID NO: 110971 - DNA, 82 bp, Homo sapiens
tggtttgataccagtcacatccatgatggtgacattccatgggatgacaaagtgcctgtggttgtgccagaactttcttgta

SEQ ID NO: 110972 - DNA, 82 bp, Homo sapiens
ataccagtcacatccatgatggtgacattccatgggatgacaaagtgcctgtggttgtgccagaactttcttgtatcaaata

SEQ ID NO: 110973 - DNA, 77 bp, Homo sapiens
atggtgacattccatgggatgacaaagtgcctgtggttgtgccagaactttcttgtatcaaataattctagaaaaca

SEQ ID NO: 110974 - DNA, 75 bp, Homo sapiens
atgggatgacaaagtgcctgtggttgtgccagaactttcttgtatcaaataattctagaaaacaagaggcccaga

SEQ ID NO: 110975 - DNA, 73 bp, Homo sapiens
aaagtgcctgtggttgtgccagaactttcttgtatcaaataattctagaaaacaagaggcccagaagctagaa

SEQ ID NO: 110976 - DNA, 74 bp, Homo sapiens
tgtggttgtgccagaactttcttgtatcaaataattctagaaaacaagaggcccagaagctagaaccaagacac

SEQ ID NO: 110977 - DNA, 71 bp, Homo sapiens
attctagaaaacaagaggcccagaagctagaaccaagacaccacttttgtatgaattaacaagacctcaat

SEQ ID NO: 110978 - DNA, 72 bp, Homo sapiens
aaaacaagaggcccagaagctagaaccaagacaccacttttgtatgaattaacaagacctcaattgcttggc

SEQ ID NO: 110979 - DNA, 77 bp, Homo sapiens
agaagctagaaccaagacaccacttttgtatgaattaacaagacctcaattgcttggccatagtggctcccatcatg

SEQ ID NO: 110980 - DNA, 79 bp, Homo sapiens
tagaaccaagacaccacttttgtatgaattaacaagacctcaattgcttggccatagtggctcccatcatggcttctga

SEQ ID NO: 110981 - DNA, 78 bp, Homo sapiens
cacttttgtatgaattaacaagacctcaattgcttggccatagtggctcccatcatggcttctgagttgtagacctta

SEQ ID NO: 110982 - DNA, 83 bp, Homo sapiens
taacaagacctcaattgcttggccatagtggctcccatcatggcttctgagttgtagaccttagcattatggcacatctcaag

SEQ ID NO: 110983 - DNA, 82 bp, Homo sapiens
aattgcttggccatagtggctcccatcatggcttctgagttgtagaccttagcattatggcacatctcaagggactatgaaa

SEQ ID NO: 110984 - DNA, 81 bp, Homo sapiens
atagtggctcccatcatggcttctgagttgtagaccttagcattatggcacatctcaagggactatgaaaaatcagctccc

SEQ ID NO: 110985 - DNA, 83 bp, Homo sapiens
catcatggcttctgagttgtagaccttagcattatggcacatctcaagggactatgaaaaatcagctccccatctgtgttcca

SEQ ID NO: 110986 - DNA, 81 bp, Homo sapiens
tagaccttagcattatggcacatctcaagggactatgaaaaatcagctccccatctgtgttccatagaacagcacgacaat

SEQ ID NO: 110987 - DNA, 82 bp, Homo sapiens
ttagcattatggcacatctcaagggactatgaaaaatcagctccccatctgtgttccatagaacagcacgacaatttcagga

SEQ ID NO: 110988 - DNA, 79 bp, Homo sapiens
acatctcaagggactatgaaaaatcagctccccatctgtgttccatagaacagcacgacaatttcaggacctagctgag

SEQ ID NO: 110989 - DNA, 79 bp, Homo sapiens
actatgaaaaatcagctccccatctgtgttccatagaacagcacgacaatttcaggacctagctgagggcgtgtcttga

SEQ ID NO: 110990 - DNA, 77 bp, Homo sapiens
aaaatcagctccccatctgtgttccatagaacagcacgacaatttcaggacctagctgagggcgtgtcttgagtaaa

SEQ ID NO: 110991 - DNA, 78 bp, Homo sapiens
ttccatagaacagcacgacaatttcaggacctagctgagggcgtgtcttgagtaaagtcacagataaagcttacacta

SEQ ID NO: 110992 - DNA, 75 bp, Homo sapiens
aacagcacgacaatttcaggacctagctgagggcgtgtcttgagtaaagtcacagataaagcttacactagaacc

SEQ ID NO: 110993 - DNA, 72 bp, Homo sapiens
aatttcaggacctagctgagggcgtgtcttgagtaaagtcacagataaagcttacactagaacctgggaact

SEQ ID NO: 110994 - DNA, 73 bp, Homo sapiens
tagctgagggcgtgtcttgagtaaagtcacagataaagcttacactagaacctgggaactttgatcctgtttt

SEQ ID NO: 110995 - DNA, 72 bp, Homo sapiens
agggcgtgtcttgagtaaagtcacagataaagcttacactagaacctgggaactttgatcctgtttttatca

SEQ ID NO: 110996 - DNA, 69 bp, Homo sapiens
agataaagcttacactagaacctgggaactttgatcctgtttttatcaccccgtccattgttgaagtaa

SEQ ID NO: 110997 - DNA, 69 bp, Homo sapiens
ttacactagaacctgggaactttgatcctgtttttatcaccccgtccattgttgaagtaatcatttaat

SEQ ID NO: 110998 - DNA, 67 bp, Homo sapiens
agaacctgggaactttgatcctgtttttatcaccccgtccattgttgaagtaatcatttaattttcc

SEQ ID NO: 110999 - DNA, 70 bp, Homo sapiens
tgtttttatcaccccgtccattgttgaagtaatcatttaattttcccaaatggtccatggactgtttgaa

SEQ ID NO: 111000 - DNA, 72 bp, Homo sapiens
cgtccattgttgaagtaatcatttaattttcccaaatggtccatggactgtttgaagcaggaccttacctga

SEQ ID NO: 111001 - DNA, 72 bp, Homo sapiens
attgttgaagtaatcatttaattttcccaaatggtccatggactgtttgaagcaggaccttacctgattcta

SEQ ID NO: 111002 - DNA, 69 bp, Homo sapiens
atttaattttcccaaatggtccatggactgtttgaagcaggaccttacctgattctaccccacttctaa

SEQ ID NO: 111003 - DNA, 71 bp, Homo sapiens
actgtttgaagcaggaccttacctgattctaccccacttctaatgcttctgtacctgaagattttattaaa

SEQ ID NO: 111004 - DNA, 74 bp, Homo sapiens
gaccttacctgattctaccccacttctaatgcttctgtacctgaagattttattaaatgacaagggatcatgta

SEQ ID NO: 111005 - DNA, 74 bp, Homo sapiens
tacctgattctaccccacttctaatgcttctgtacctgaagattttattaaatgacaagggatcatgtatttgg

SEQ ID NO: 111006 - DNA, 76 bp, Homo sapiens
cacttctaatgcttctgtacctgaagattttattaaatgacaagggatcatgtatttggggaaacagagacattca

SEQ ID NO: 111007 - DNA, 74 bp, Homo sapiens
ctaatgcttctgtacctgaagattttattaaatgacaagggatcatgtatttggggaaacagagacattcaact

SEQ ID NO: 111008 - DNA, 74 bp, Homo sapiens
ctgaagattttattaaatgacaagggatcatgtatttggggaaacagagacattcaactttcgggctcacaaga

SEQ ID NO: 111009 - DNA, 74 bp, Homo sapiens
aatgacaagggatcatgtatttggggaaacagagacattcaactttcgggctcacaagagaggcagctttaagt

SEQ ID NO: 111010 - DNA, 74 bp, Homo sapiens
atcatgtatttggggaaacagagacattcaactttcgggctcacaagagaggcagctttaagttcagaccttcc

SEQ ID NO: 111011 - DNA, 74 bp, Homo sapiens
ggaaacagagacattcaactttcgggctcacaagagaggcagctttaagttcagaccttcccttgttgtctgct

SEQ ID NO: 111012 - DNA, 76 bp, Homo sapiens
agacattcaactttcgggctcacaagagaggcagctttaagttcagaccttcccttgttgtctgcttgctggagaa

SEQ ID NO: 111013 - DNA, 75 bp, Homo sapiens
aactttcgggctcacaagagaggcagctttaagttcagaccttcccttgttgtctgcttgctggagaagtgtctg

SEQ ID NO: 111014 - DNA, 78 bp, Homo sapiens
aagagaggcagctttaagttcagaccttcccttgttgtctgcttgctggagaagtgtctgtcttgtgatcccagctta

SEQ ID NO: 111015 - DNA, 77 bp, Homo sapiens
agctttaagttcagaccttcccttgttgtctgcttgctggagaagtgtctgtcttgtgatcccagcttacaattggc

SEQ ID NO: 111016 - DNA, 77 bp, Homo sapiens
ttcccttgttgtctgcttgctggagaagtgtctgtcttgtgatcccagcttacaattggccctggaccacaaaccag

SEQ ID NO: 111017 - DNA, 79 bp, Homo sapiens
tgcttgctggagaagtgtctgtcttgtgatcccagcttacaattggccctggaccacaaaccaggcctacaagaacatg

SEQ ID NO: 111018 - DNA, 78 bp, Homo sapiens
tcttgtgatcccagcttacaattggccctggaccacaaaccaggcctacaagaacatggatgtggtgcccatgtttca

SEQ ID NO: 111019 - DNA, 74 bp, Homo sapiens
atcccagcttacaattggccctggaccacaaaccaggcctacaagaacatggatgtggtgcccatgtttcaaat

SEQ ID NO: 111020 - DNA, 77 bp, Homo sapiens
ttacaattggccctggaccacaaaccaggcctacaagaacatggatgtggtgcccatgtttcaaattcatctcactc

SEQ ID NO: 111021 - DNA, 78 bp, Homo sapiens
ctacaagaacatggatgtggtgcccatgtttcaaattcatctcactctcttatcagcaggggactttgatttggcttt

SEQ ID NO: 111022 - DNA, 78 bp, Homo sapiens
atggatgtggtgcccatgtttcaaattcatctcactctcttatcagcaggggactttgatttggcttttcctaagaca

SEQ ID NO: 111023 - DNA, 73 bp, Homo sapiens
atgtttcaaattcatctcactctcttatcagcaggggactttgatttggcttttcctaagacatggttaaaat

SEQ ID NO: 111024 - DNA, 74 bp, Homo sapiens
tcaaattcatctcactctcttatcagcaggggactttgatttggcttttcctaagacatggttaaaattcttat

SEQ ID NO: 111025 - DNA, 73 bp, Homo sapiens
actctcttatcagcaggggactttgatttggcttttcctaagacatggttaaaattcttattatcagcttcaa

SEQ ID NO: 111026 - DNA, 75 bp, Homo sapiens
tatcagcaggggactttgatttggcttttcctaagacatggttaaaattcttattatcagcttcaatttctgtgc

SEQ ID NO: 111027 - DNA, 72 bp, Homo sapiens
ggactttgatttggcttttcctaagacatggttaaaattcttattatcagcttcaatttctgtgccacagtt

SEQ ID NO: 111028 - DNA, 71 bp, Homo sapiens
ggcttttcctaagacatggttaaaattcttattatcagcttcaatttctgtgccacagttttaagactaac

SEQ ID NO: 111029 - DNA, 72 bp, Homo sapiens
agacatggttaaaattcttattatcagcttcaatttctgtgccacagttttaagactaaccacctctgcttt

SEQ ID NO: 111030 - DNA, 75 bp, Homo sapiens
taaaattcttattatcagcttcaatttctgtgccacagttttaagactaaccacctctgcttttctctatccaca

SEQ ID NO: 111031 - DNA, 77 bp, Homo sapiens
ttattatcagcttcaatttctgtgccacagttttaagactaaccacctctgcttttctctatccacagcataaacca

SEQ ID NO: 111032 - DNA, 75 bp, Homo sapiens
cacagttttaagactaaccacctctgcttttctctatccacagcataaaccacaaaaactgctgtcaccactgaa

SEQ ID NO: 111033 - DNA, 74 bp, Homo sapiens
ttttaagactaaccacctctgcttttctctatccacagcataaaccacaaaaactgctgtcaccactgaattgt

SEQ ID NO: 111034 - DNA, 75 bp, Homo sapiens
aaccacctctgcttttctctatccacagcataaaccacaaaaactgctgtcaccactgaattgttgaaagagaag

SEQ ID NO: 111035 - DNA, 77 bp, Homo sapiens
taaaccacaaaaactgctgtcaccactgaattgttgaaagagaaggcataggtagattttattgatgtattcagaga

SEQ ID NO: 111036 - DNA, 80 bp, Homo sapiens
aaactgctgtcaccactgaattgttgaaagagaaggcataggtagattttattgatgtattcagagatctccagaaatca

SEQ ID NO: 111037 - DNA, 77 bp, Homo sapiens
caccactgaattgttgaaagagaaggcataggtagattttattgatgtattcagagatctccagaaatcatgttttt

SEQ ID NO: 111038 - DNA, 73 bp, Homo sapiens
ttttttttattagagttgaatttcttcttcataccaatatgcttacccaatgtgatggagtgatgaggaaacg

SEQ ID NO: 111039 - DNA, 78 bp, Homo sapiens
ttattagagttgaatttcttcttcataccaatatgcttacccaatgtgatggagtgatgaggaaacgggagagatgaa

SEQ ID NO: 111040 - DNA, 81 bp, Homo sapiens
ttgaatttcttcttcataccaatatgcttacccaatgtgatggagtgatgaggaaacgggagagatgaagacagagataca

SEQ ID NO: 111041 - DNA, 86 bp, Homo sapiens
tcttcataccaatatgcttacccaatgtgatggagtgatgaggaaacgggagagatgaagacagagatacagacagagatgagaga

SEQ ID NO: 111042 - DNA, 86 bp, Homo sapiens
tatgcttacccaatgtgatggagtgatgaggaaacgggagagatgaagacagagatacagacagagatgagagaggctgcatttta

SEQ ID NO: 111043 - DNA, 82 bp, Homo sapiens
tggagtgatgaggaaacgggagagatgaagacagagatacagacagagatgagagaggctgcattttactcagtaaagaccc

SEQ ID NO: 111044 - DNA, 80 bp, Homo sapiens
tgaagacagagatacagacagagatgagagaggctgcattttactcagtaaagacccccactgaccccacaatttgtcta

SEQ ID NO: 111045 - DNA, 78 bp, Homo sapiens
gatacagacagagatgagagaggctgcattttactcagtaaagacccccactgaccccacaatttgtctacagtccta

SEQ ID NO: 111046 - DNA, 75 bp, Homo sapiens
agagatgagagaggctgcattttactcagtaaagacccccactgaccccacaatttgtctacagtcctataaaca

SEQ ID NO: 111047 - DNA, 72 bp, Homo sapiens
agaggctgcattttactcagtaaagacccccactgaccccacaatttgtctacagtcctataaacaccatta

SEQ ID NO: 111048 - DNA, 69 bp, Homo sapiens
attttactcagtaaagacccccactgaccccacaatttgtctacagtcctataaacaccattaggattc

SEQ ID NO: 111049 - DNA, 74 bp, Homo sapiens
taaagacccccactgaccccacaatttgtctacagtcctataaacaccattaggattctgtatgactcattgta

SEQ ID NO: 111050 - DNA, 78 bp, Homo sapiens
aatttgtctacagtcctataaacaccattaggattctgtatgactcattgtatatgcaaggaaatagcctcttctgtc

SEQ ID NO: 111051 - DNA, 78 bp, Homo sapiens
ctacagtcctataaacaccattaggattctgtatgactcattgtatatgcaaggaaatagcctcttctgtcctctaaa

SEQ ID NO: 111052 - DNA, 78 bp, Homo sapiens
attaggattctgtatgactcattgtatatgcaaggaaatagcctcttctgtcctctaaagcaccacaattaaattcca

SEQ ID NO: 111053 - DNA, 76 bp, Homo sapiens
attgtatatgcaaggaaatagcctcttctgtcctctaaagcaccacaattaaattccacacttgagtcaaattgga

SEQ ID NO: 111054 - DNA, 76 bp, Homo sapiens
aaggaaatagcctcttctgtcctctaaagcaccacaattaaattccacacttgagtcaaattggagtcagatcaga

SEQ ID NO: 111055 - DNA, 76 bp, Homo sapiens
cctcttctgtcctctaaagcaccacaattaaattccacacttgagtcaaattggagtcagatcagaccaatggccc

SEQ ID NO: 111056 - DNA, 73 bp, Homo sapiens
acaattaaattccacacttgagtcaaattggagtcagatcagaccaatggccccaccccataccccacgaata

SEQ ID NO: 111057 - DNA, 73 bp, Homo sapiens
ttccacacttgagtcaaattggagtcagatcagaccaatggccccaccccataccccacgaataatttaatta

SEQ ID NO: 111058 - DNA, 71 bp, Homo sapiens
acttgagtcaaattggagtcagatcagaccaatggccccaccccataccccacgaataatttaattaataa

SEQ ID NO: 111059 - DNA, 69 bp, Homo sapiens
aattggagtcagatcagaccaatggccccaccccataccccacgaataatttaattaataatttagtta

SEQ ID NO: 111060 - DNA, 69 bp, Homo sapiens
gatcagaccaatggccccaccccataccccacgaataatttaattaataatttagttaatctatactaa

SEQ ID NO: 111061 - DNA, 66 bp, Homo sapiens
ggccccaccccataccccacgaataatttaattaataatttagttaatctatactaagaaccttca

SEQ ID NO: 111062 - DNA, 70 bp, Homo sapiens
cataccccacgaataatttaattaataatttagttaatctatactaagaaccttcatattacagcttctc

SEQ ID NO: 111063 - DNA, 69 bp, Homo sapiens
cacgaataatttaattaataatttagttaatctatactaagaaccttcatattacagcttctctatttt

SEQ ID NO: 111064 - DNA, 72 bp, Homo sapiens
taataatttagttaatctatactaagaaccttcatattacagcttctctatttttaagcctaggaactatca

SEQ ID NO: 111065 - DNA, 72 bp, Homo sapiens
gttaatctatactaagaaccttcatattacagcttctctatttttaagcctaggaactatcagttttccaga

SEQ ID NO: 111066 - DNA, 73 bp, Homo sapiens
ctatactaagaaccttcatattacagcttctctatttttaagcctaggaactatcagttttccagacatacta

SEQ ID NO: 111067 - DNA, 74 bp, Homo sapiens
gaaccttcatattacagcttctctatttttaagcctaggaactatcagttttccagacatactatatgacttaa

SEQ ID NO: 111068 - DNA, 74 bp, Homo sapiens
ttacagcttctctatttttaagcctaggaactatcagttttccagacatactatatgacttaaaagacaggctc

SEQ ID NO: 111069 - DNA, 74 bp, Homo sapiens
tatttttaagcctaggaactatcagttttccagacatactatatgacttaaaagacaggctccacagttccatc

SEQ ID NO: 111070 - DNA, 75 bp, Homo sapiens
aagcctaggaactatcagttttccagacatactatatgacttaaaagacaggctccacagttccatcctcatccc

SEQ ID NO: 111071 - DNA, 80 bp, Homo sapiens
agacatactatatgacttaaaagacaggctccacagttccatcctcatccctggcacctaatcataaaggacattcatga

SEQ ID NO: 111072 - DNA, 79 bp, Homo sapiens
actatatgacttaaaagacaggctccacagttccatcctcatccctggcacctaatcataaaggacattcatgatccta

SEQ ID NO: 111073 - DNA, 79 bp, Homo sapiens
taaaagacaggctccacagttccatcctcatccctggcacctaatcataaaggacattcatgatcctagctatccctta

SEQ ID NO: 111074 - DNA, 80 bp, Homo sapiens
atcctcatccctggcacctaatcataaaggacattcatgatcctagctatcccttagcttccttcttacagctcagactc

SEQ ID NO: 111075 - DNA, 81 bp, Homo sapiens
atccctggcacctaatcataaaggacattcatgatcctagctatcccttagcttccttcttacagctcagactctgctgga

SEQ ID NO: 111076 - DNA, 81 bp, Homo sapiens
atcataaaggacattcatgatcctagctatcccttagcttccttcttacagctcagactctgctggaccgaccctgatata

SEQ ID NO: 111077 - DNA, 80 bp, Homo sapiens
aaggacattcatgatcctagctatcccttagcttccttcttacagctcagactctgctggaccgaccctgatatacctgc

SEQ ID NO: 111078 - DNA, 83 bp, Homo sapiens
atgatcctagctatcccttagcttccttcttacagctcagactctgctggaccgaccctgatatacctgctcagcactcgcca

SEQ ID NO: 111079 - DNA, 84 bp, Homo sapiens
cttcttacagctcagactctgctggaccgaccctgatatacctgctcagcactcgccagctagttgccttccctcatgctataa

SEQ ID NO: 111080 - DNA, 86 bp, Homo sapiens
ctcagactctgctggaccgaccctgatatacctgctcagcactcgccagctagttgccttccctcatgctataaatgctgtacatg

SEQ ID NO: 111081 - DNA, 84 bp, Homo sapiens
actctgctggaccgaccctgatatacctgctcagcactcgccagctagttgccttccctcatgctataaatgctgtacatggag

SEQ ID NO: 111082 - DNA, 82 bp, Homo sapiens
accgaccctgatatacctgctcagcactcgccagctagttgccttccctcatgctataaatgctgtacatggaggaagaaca

SEQ ID NO: 111083 - DNA, 83 bp, Homo sapiens
atatacctgctcagcactcgccagctagttgccttccctcatgctataaatgctgtacatggaggaagaacatggcttttggc

SEQ ID NO: 111084 - DNA, 82 bp, Homo sapiens
actcgccagctagttgccttccctcatgctataaatgctgtacatggaggaagaacatggcttttggctgcagctggaagtc

SEQ ID NO: 111085 - DNA, 81 bp, Homo sapiens
agctagttgccttccctcatgctataaatgctgtacatggaggaagaacatggcttttggctgcagctggaagtctcctcc

SEQ ID NO: 111086 - DNA, 79 bp, Homo sapiens
tataaatgctgtacatggaggaagaacatggcttttggctgcagctggaagtctcctcccctccatctcttatctttta

SEQ ID NO: 111087 - DNA, 72 bp, Homo sapiens
aagaacatggcttttggctgcagctggaagtctcctcccctccatctcttatcttttaagtaccctttgaat

SEQ ID NO: 111088 - DNA, 75 bp, Homo sapiens
atggcttttggctgcagctggaagtctcctcccctccatctcttatcttttaagtaccctttgaatttcatgcca

SEQ ID NO: 111089 - DNA, 75 bp, Homo sapiens
cagctggaagtctcctcccctccatctcttatcttttaagtaccctttgaatttcatgccagtgtcaggtgagta

SEQ ID NO: 111090 - DNA, 72 bp, Homo sapiens
aagtctcctcccctccatctcttatcttttaagtaccctttgaatttcatgccagtgtcaggtgagtatggg

SEQ ID NO: 111091 - DNA, 77 bp, Homo sapiens
tccatctcttatcttttaagtaccctttgaatttcatgccagtgtcaggtgagtatggggtggcactattatgtgat

SEQ ID NO: 111092 - DNA, 74 bp, Homo sapiens
ctcttatcttttaagtaccctttgaatttcatgccagtgtcaggtgagtatggggtggcactattatgtgattt

SEQ ID NO: 111093 - DNA, 76 bp, Homo sapiens
ttaagtaccctttgaatttcatgccagtgtcaggtgagtatggggtggcactattatgtgattttcctgccacatt

SEQ ID NO: 111094 - DNA, 83 bp, Homo sapiens
tttgaatttcatgccagtgtcaggtgagtatggggtggcactattatgtgattttcctgccacatttgcaggtgtgcctcatg

SEQ ID NO: 111095 - DNA, 81 bp, Homo sapiens
agtgtcaggtgagtatggggtggcactattatgtgattttcctgccacatttgcaggtgtgcctcatggccttgacacatt

SEQ ID NO: 111096 - DNA, 81 bp, Homo sapiens
gtggcactattatgtgattttcctgccacatttgcaggtgtgcctcatggccttgacacatttaatgtcactttctttcaa

SEQ ID NO: 111097 - DNA, 80 bp, Homo sapiens
tattatgtgattttcctgccacatttgcaggtgtgcctcatggccttgacacatttaatgtcactttctttcaactggga

SEQ ID NO: 111098 - DNA, 79 bp, Homo sapiens
attttcctgccacatttgcaggtgtgcctcatggccttgacacatttaatgtcactttctttcaactgggatgtgtggc

SEQ ID NO: 111099 - DNA, 78 bp, Homo sapiens
atttgcaggtgtgcctcatggccttgacacatttaatgtcactttctttcaactgggatgtgtggcgaccagtacgtc

SEQ ID NO: 111100 - DNA, 78 bp, Homo sapiens
atggccttgacacatttaatgtcactttctttcaactgggatgtgtggcgaccagtacgtccactccagctggaatgc

SEQ ID NO: 111101 - DNA, 74 bp, Homo sapiens
actttctttcaactgggatgtgtggcgaccagtacgtccactccagctggaatgcctgggattgtgtttttatg

SEQ ID NO: 111102 - DNA, 77 bp, Homo sapiens
aactgggatgtgtggcgaccagtacgtccactccagctggaatgcctgggattgtgtttttatggatgacgtcttca

SEQ ID NO: 111103 - DNA, 79 bp, Homo sapiens
atgtgtggcgaccagtacgtccactccagctggaatgcctgggattgtgtttttatggatgacgtcttcacagctggga

SEQ ID NO: 111104 - DNA, 79 bp, Homo sapiens
accagtacgtccactccagctggaatgcctgggattgtgtttttatggatgacgtcttcacagctgggaagcatctctc

SEQ ID NO: 111105 - DNA, 81 bp, Homo sapiens
actccagctggaatgcctgggattgtgtttttatggatgacgtcttcacagctgggaagcatctctccagggtctctgaca

SEQ ID NO: 111106 - DNA, 79 bp, Homo sapiens
aatgcctgggattgtgtttttatggatgacgtcttcacagctgggaagcatctctccagggtctctgacagtgagtaag

SEQ ID NO: 111107 - DNA, 82 bp, Homo sapiens
tgggaagcatctctccagggtctctgacagtgagtaagttgctcacatcattgttggcaggctcatcccaattttaagtcat

SEQ ID NO: 111108 - DNA, 81 bp, Homo sapiens
atctctccagggtctctgacagtgagtaagttgctcacatcattgttggcaggctcatcccaattttaagtcattctctaa

SEQ ID NO: 111109 - DNA, 78 bp, Homo sapiens
agtgagtaagttgctcacatcattgttggcaggctcatcccaattttaagtcattctctaagacaaggcagacaaaaa

SEQ ID NO: 111110 - DNA, 79 bp, Homo sapiens
ctcacatcattgttggcaggctcatcccaattttaagtcattctctaagacaaggcagacaaaaagtctcatctattaa

SEQ ID NO: 111111 - DNA, 76 bp, Homo sapiens
attgttggcaggctcatcccaattttaagtcattctctaagacaaggcagacaaaaagtctcatctattaaggtca

SEQ ID NO: 111112 - DNA, 73 bp, Homo sapiens
ctcatcccaattttaagtcattctctaagacaaggcagacaaaaagtctcatctattaaggtcaccaggcctt

SEQ ID NO: 111113 - DNA, 75 bp, Homo sapiens
aattttaagtcattctctaagacaaggcagacaaaaagtctcatctattaaggtcaccaggcctttgagtgctga

SEQ ID NO: 111114 - DNA, 76 bp, Homo sapiens
ttctctaagacaaggcagacaaaaagtctcatctattaaggtcaccaggcctttgagtgctgaggagctaaactaa

SEQ ID NO: 111115 - DNA, 75 bp, Homo sapiens
agacaaaaagtctcatctattaaggtcaccaggcctttgagtgctgaggagctaaactaaagcgttgcatccagg

SEQ ID NO: 111116 - DNA, 77 bp, Homo sapiens
atctattaaggtcaccaggcctttgagtgctgaggagctaaactaaagcgttgcatccaggtgctggattgtggagt

SEQ ID NO: 111117 - DNA, 78 bp, Homo sapiens
taaggtcaccaggcctttgagtgctgaggagctaaactaaagcgttgcatccaggtgctggattgtggagttgttgta

SEQ ID NO: 111118 - DNA, 80 bp, Homo sapiens
agtgctgaggagctaaactaaagcgttgcatccaggtgctggattgtggagttgttgtatgcattgtctttgagagaaag

SEQ ID NO: 111119 - DNA, 79 bp, Homo sapiens
ctaaactaaagcgttgcatccaggtgctggattgtggagttgttgtatgcattgtctttgagagaaaggctacagtgaa

SEQ ID NO: 111120 - DNA, 81 bp, Homo sapiens
aagcgttgcatccaggtgctggattgtggagttgttgtatgcattgtctttgagagaaaggctacagtgaaggagatggag

SEQ ID NO: 111121 - DNA, 79 bp, Homo sapiens
aggtgctggattgtggagttgttgtatgcattgtctttgagagaaaggctacagtgaaggagatggaggcacccacacg

SEQ ID NO: 111122 - DNA, 78 bp, Homo sapiens
attgtggagttgttgtatgcattgtctttgagagaaaggctacagtgaaggagatggaggcacccacacgtggaagat

SEQ ID NO: 111123 - DNA, 78 bp, Homo sapiens
ttgtatgcattgtctttgagagaaaggctacagtgaaggagatggaggcacccacacgtggaagattggagatttaaa

SEQ ID NO: 111124 - DNA, 76 bp, Homo sapiens
attgtctttgagagaaaggctacagtgaaggagatggaggcacccacacgtggaagattggagatttaaacatgaa

SEQ ID NO: 111125 - DNA, 75 bp, Homo sapiens
tacagtgaaggagatggaggcacccacacgtggaagattggagatttaaacatgaaacagcctcaatgtttttct

SEQ ID NO: 111126 - DNA, 73 bp, Homo sapiens
aggagatggaggcacccacacgtggaagattggagatttaaacatgaaacagcctcaatgtttttcttgaaaa

SEQ ID NO: 111127 - DNA, 73 bp, Homo sapiens
atttaaacatgaaacagcctcaatgtttttcttgaaaatctgctttgcctccataaaagcctcaaggaggcaa

SEQ ID NO: 111128 - DNA, 74 bp, Homo sapiens
tgaaacagcctcaatgtttttcttgaaaatctgctttgcctccataaaagcctcaaggaggcaaactgaactaa

SEQ ID NO: 111129 - DNA, 72 bp, Homo sapiens
tcaatgtttttcttgaaaatctgctttgcctccataaaagcctcaaggaggcaaactgaactaaatgtactt

SEQ ID NO: 111130 - DNA, 71 bp, Homo sapiens
tttttcttgaaaatctgctttgcctccataaaagcctcaaggaggcaaactgaactaaatgtacttttcag

SEQ ID NO: 111131 - DNA, 73 bp, Homo sapiens
aaatctgctttgcctccataaaagcctcaaggaggcaaactgaactaaatgtacttttcaggaaacacaatga

SEQ ID NO: 111132 - DNA, 75 bp, Homo sapiens
ctccataaaagcctcaaggaggcaaactgaactaaatgtacttttcaggaaacacaatgagaaggacatcatctg

SEQ ID NO: 111133 - DNA, 75 bp, Homo sapiens
ctcaaggaggcaaactgaactaaatgtacttttcaggaaacacaatgagaaggacatcatctggttaacacaata

SEQ ID NO: 111134 - DNA, 74 bp, Homo sapiens
aggcaaactgaactaaatgtacttttcaggaaacacaatgagaaggacatcatctggttaacacaataaagcca

SEQ ID NO: 111135 - DNA, 74 bp, Homo sapiens
aactaaatgtacttttcaggaaacacaatgagaaggacatcatctggttaacacaataaagccacactactctc

SEQ ID NO: 111136 - DNA, 74 bp, Homo sapiens
gtacttttcaggaaacacaatgagaaggacatcatctggttaacacaataaagccacactactctctctccccc

SEQ ID NO: 111137 - DNA, 76 bp, Homo sapiens
aaacacaatgagaaggacatcatctggttaacacaataaagccacactactctctctccccctctctctctttcaa

SEQ ID NO: 111138 - DNA, 75 bp, Homo sapiens
atcatctggttaacacaataaagccacactactctctctccccctctctctctttcaagccttccagagcaccct

SEQ ID NO: 111139 - DNA, 77 bp, Homo sapiens
acaataaagccacactactctctctccccctctctctctttcaagccttccagagcacccttcctctagcagacata

SEQ ID NO: 111140 - DNA, 75 bp, Homo sapiens
acactactctctctccccctctctctctttcaagccttccagagcacccttcctctagcagacatagaagaaaac

SEQ ID NO: 111141 - DNA, 77 bp, Homo sapiens
ctctctctttcaagccttccagagcacccttcctctagcagacatagaagaaaactacccacatggctcagaggtta

SEQ ID NO: 111142 - DNA, 73 bp, Homo sapiens
acccttcctctagcagacatagaagaaaactacccacatggctcagaggttaagggcctgggaacgagcctca

SEQ ID NO: 111143 - DNA, 76 bp, Homo sapiens
agacatagaagaaaactacccacatggctcagaggttaagggcctgggaacgagcctcaggcagacatggatagga

SEQ ID NO: 111144 - DNA, 77 bp, Homo sapiens
acatggctcagaggttaagggcctgggaacgagcctcaggcagacatggataggagttccattctgctggttgactt

SEQ ID NO: 111145 - DNA, 74 bp, Homo sapiens
taagggcctgggaacgagcctcaggcagacatggataggagttccattctgctggttgactttgggaaagttag

SEQ ID NO: 111146 - DNA, 76 bp, Homo sapiens
aacgagcctcaggcagacatggataggagttccattctgctggttgactttgggaaagttaggcaacctctctgga

SEQ ID NO: 111147 - DNA, 77 bp, Homo sapiens
aggcagacatggataggagttccattctgctggttgactttgggaaagttaggcaacctctctggatcagaagagga

SEQ ID NO: 111148 - DNA, 76 bp, Homo sapiens
ataggagttccattctgctggttgactttgggaaagttaggcaacctctctggatcagaagaggagagcaataata

SEQ ID NO: 111149 - DNA, 76 bp, Homo sapiens
attctgctggttgactttgggaaagttaggcaacctctctggatcagaagaggagagcaataataccagtatcctg

SEQ ID NO: 111150 - DNA, 75 bp, Homo sapiens
ttgactttgggaaagttaggcaacctctctggatcagaagaggagagcaataataccagtatcctggttgttaca

SEQ ID NO: 111151 - DNA, 75 bp, Homo sapiens
ttgggaaagttaggcaacctctctggatcagaagaggagagcaataataccagtatcctggttgttacataggaa

SEQ ID NO: 111152 - DNA, 81 bp, Homo sapiens
ttaggcaacctctctggatcagaagaggagagcaataataccagtatcctggttgttacataggaagtgctgggcacagca

SEQ ID NO: 111153 - DNA, 78 bp, Homo sapiens
aagaggagagcaataataccagtatcctggttgttacataggaagtgctgggcacagcaccgcgcacataaggggtgc

SEQ ID NO: 111154 - DNA, 80 bp, Homo sapiens
aataataccagtatcctggttgttacataggaagtgctgggcacagcaccgcgcacataaggggtgctcagtacatgctg

SEQ ID NO: 111155 - DNA, 81 bp, Homo sapiens
ttacataggaagtgctgggcacagcaccgcgcacataaggggtgctcagtacatgctggtcaatattatcgttattaatat

SEQ ID NO: 111156 - DNA, 78 bp, Homo sapiens
aagtgctgggcacagcaccgcgcacataaggggtgctcagtacatgctggtcaatattatcgttattaatatttcctt

SEQ ID NO: 111157 - DNA, 78 bp, Homo sapiens
acagcaccgcgcacataaggggtgctcagtacatgctggtcaatattatcgttattaatatttcctttgtctgagtgg

SEQ ID NO: 111158 - DNA, 79 bp, Homo sapiens
cgcacataaggggtgctcagtacatgctggtcaatattatcgttattaatatttcctttgtctgagtggtgaatgagga

SEQ ID NO: 111159 - DNA, 81 bp, Homo sapiens
ggtgctcagtacatgctggtcaatattatcgttattaatatttcctttgtctgagtggtgaatgaggagcatggagaagtg

SEQ ID NO: 111160 - DNA, 80 bp, Homo sapiens
agtacatgctggtcaatattatcgttattaatatttcctttgtctgagtggtgaatgaggagcatggagaagtggtgtca

SEQ ID NO: 111161 - DNA, 78 bp, Homo sapiens
tcaatattatcgttattaatatttcctttgtctgagtggtgaatgaggagcatggagaagtggtgtcaccacatcttt

SEQ ID NO: 111162 - DNA, 79 bp, Homo sapiens
aatatttcctttgtctgagtggtgaatgaggagcatggagaagtggtgtcaccacatcttttgatcctggggctcagtg

SEQ ID NO: 111163 - DNA, 81 bp, Homo sapiens
tttgtctgagtggtgaatgaggagcatggagaagtggtgtcaccacatcttttgatcctggggctcagtggtgctttagag

SEQ ID NO: 111164 - DNA, 80 bp, Homo sapiens
aatgaggagcatggagaagtggtgtcaccacatcttttgatcctggggctcagtggtgctttagagtgggtgaaggctga

SEQ ID NO: 111165 - DNA, 80 bp, Homo sapiens
atggagaagtggtgtcaccacatcttttgatcctggggctcagtggtgctttagagtgggtgaaggctgagcctgaatca

SEQ ID NO: 111166 - DNA, 78 bp, Homo sapiens
aagtggtgtcaccacatcttttgatcctggggctcagtggtgctttagagtgggtgaaggctgagcctgaatcaaggc

SEQ ID NO: 111167 - DNA, 78 bp, Homo sapiens
acatcttttgatcctggggctcagtggtgctttagagtgggtgaaggctgagcctgaatcaaggcctgcccagagcct

SEQ ID NO: 111168 - DNA, 79 bp, Homo sapiens
tttgatcctggggctcagtggtgctttagagtgggtgaaggctgagcctgaatcaaggcctgcccagagcctttctcta

SEQ ID NO: 111169 - DNA, 77 bp, Homo sapiens
tcagtggtgctttagagtgggtgaaggctgagcctgaatcaaggcctgcccagagcctttctctaccaggcaaaacg

SEQ ID NO: 111170 - DNA, 76 bp, Homo sapiens
tttagagtgggtgaaggctgagcctgaatcaaggcctgcccagagcctttctctaccaggcaaaacgtgctggaaa

SEQ ID NO: 111171 - DNA, 78 bp, Homo sapiens
tgggtgaaggctgagcctgaatcaaggcctgcccagagcctttctctaccaggcaaaacgtgctggaaagatagaaga

SEQ ID NO: 111172 - DNA, 78 bp, Homo sapiens
agcctgaatcaaggcctgcccagagcctttctctaccaggcaaaacgtgctggaaagatagaagagaggagctcctga

SEQ ID NO: 111173 - DNA, 75 bp, Homo sapiens
agagcctttctctaccaggcaaaacgtgctggaaagatagaagagaggagctcctgattcacccaggacagtccc

SEQ ID NO: 111174 - DNA, 74 bp, Homo sapiens
aaaacgtgctggaaagatagaagagaggagctcctgattcacccaggacagtccccatttactgtacttgccac

SEQ ID NO: 111175 - DNA, 74 bp, Homo sapiens
tggaaagatagaagagaggagctcctgattcacccaggacagtccccatttactgtacttgccacctccttttc

SEQ ID NO: 111176 - DNA, 74 bp, Homo sapiens
atagaagagaggagctcctgattcacccaggacagtccccatttactgtacttgccacctccttttccactctg

SEQ ID NO: 111177 - DNA, 69 bp, Homo sapiens
ttcacccaggacagtccccatttactgtacttgccacctccttttccactctgggaagtacccagttaa

SEQ ID NO: 111178 - DNA, 67 bp, Homo sapiens
agtccccatttactgtacttgccacctccttttccactctgggaagtacccagttaaggaggacaaa

SEQ ID NO: 111179 - DNA, 71 bp, Homo sapiens
atttactgtacttgccacctccttttccactctgggaagtacccagttaaggaggacaaatgacactgtca

SEQ ID NO: 111180 - DNA, 71 bp, Homo sapiens
acttgccacctccttttccactctgggaagtacccagttaaggaggacaaatgacactgtcaccctctcta

SEQ ID NO: 111181 - DNA, 70 bp, Homo sapiens
ttttccactctgggaagtacccagttaaggaggacaaatgacactgtcaccctctctaggaggtacctta

SEQ ID NO: 111182 - DNA, 71 bp, Homo sapiens
ggaagtacccagttaaggaggacaaatgacactgtcaccctctctaggaggtaccttaggtggcttctaca

SEQ ID NO: 111183 - DNA, 75 bp, Homo sapiens
agttaaggaggacaaatgacactgtcaccctctctaggaggtaccttaggtggcttctacagctgcactgcttgg

SEQ ID NO: 111184 - DNA, 76 bp, Homo sapiens
aggaggacaaatgacactgtcaccctctctaggaggtaccttaggtggcttctacagctgcactgcttggtattgg

SEQ ID NO: 111185 - DNA, 78 bp, Homo sapiens
atgacactgtcaccctctctaggaggtaccttaggtggcttctacagctgcactgcttggtattggtgccaccagccc

SEQ ID NO: 111186 - DNA, 78 bp, Homo sapiens
ctctctaggaggtaccttaggtggcttctacagctgcactgcttggtattggtgccaccagccccatgtgggcaagaa

SEQ ID NO: 111187 - DNA, 79 bp, Homo sapiens
aggaggtaccttaggtggcttctacagctgcactgcttggtattggtgccaccagccccatgtgggcaagaagcatgtg

SEQ ID NO: 111188 - DNA, 86 bp, Homo sapiens
tggcttctacagctgcactgcttggtattggtgccaccagccccatgtgggcaagaagcatgtggctgagacagctcgaaagtgta

SEQ ID NO: 111189 - DNA, 86 bp, Homo sapiens
tacagctgcactgcttggtattggtgccaccagccccatgtgggcaagaagcatgtggctgagacagctcgaaagtgtaacctgca

SEQ ID NO: 111190 - DNA, 82 bp, Homo sapiens
cttggtattggtgccaccagccccatgtgggcaagaagcatgtggctgagacagctcgaaagtgtaacctgcacaccagatc

SEQ ID NO: 111191 - DNA, 84 bp, Homo sapiens
tattggtgccaccagccccatgtgggcaagaagcatgtggctgagacagctcgaaagtgtaacctgcacaccagatctcaaaga

SEQ ID NO: 111192 - DNA, 80 bp, Homo sapiens
ccccatgtgggcaagaagcatgtggctgagacagctcgaaagtgtaacctgcacaccagatctcaaagactcgggaaaga

SEQ ID NO: 111193 - DNA, 79 bp, Homo sapiens
atgtggctgagacagctcgaaagtgtaacctgcacaccagatctcaaagactcgggaaagagaaagagtgtaagctatg

SEQ ID NO: 111194 - DNA, 79 bp, Homo sapiens
tgcacaccagatctcaaagactcgggaaagagaaagagtgtaagctatggcattaataatttttatatagaatgcatat

SEQ ID NO: 111195 - DNA, 77 bp, Homo sapiens
ccagatctcaaagactcgggaaagagaaagagtgtaagctatggcattaataatttttatatagaatgcatattgaa

SEQ ID NO: 111196 - DNA, 76 bp, Homo sapiens
tcgggaaagagaaagagtgtaagctatggcattaataatttttatatagaatgcatattgaaatgtaacatttggc

SEQ ID NO: 111197 - DNA, 75 bp, Homo sapiens
agtgtaagctatggcattaataatttttatatagaatgcatattgaaatgtaacatttggctatagtgggttaaa

SEQ ID NO: 111198 - DNA, 73 bp, Homo sapiens
atggcattaataatttttatatagaatgcatattgaaatgtaacatttggctatagtgggttaaaaatattag

SEQ ID NO: 111199 - DNA, 73 bp, Homo sapiens
tttatatagaatgcatattgaaatgtaacatttggctatagtgggttaaaaatattagtaaattaatctcacg

SEQ ID NO: 111200 - DNA, 72 bp, Homo sapiens
gaatgcatattgaaatgtaacatttggctatagtgggttaaaaatattagtaaattaatctcacgtgtttct

SEQ ID NO: 111201 - DNA, 68 bp, Homo sapiens
gaaatgtaacatttggctatagtgggttaaaaatattagtaaattaatctcacgtgtttcttttcact

SEQ ID NO: 111202 - DNA, 69 bp, Homo sapiens
catttggctatagtgggttaaaaatattagtaaattaatctcacgtgtttcttttcacttacttgattg

SEQ ID NO: 111203 - DNA, 69 bp, Homo sapiens
gtgggttaaaaatattagtaaattaatctcacgtgtttcttttcacttacttgattgtggctacagaac

SEQ ID NO: 111204 - DNA, 75 bp, Homo sapiens
taaattaatctcacgtgtttcttttcacttacttgattgtggctacagaacgttcatctgcgggcttgtgttcta

SEQ ID NO: 111205 - DNA, 76 bp, Homo sapiens
tttcttttcacttacttgattgtggctacagaacgttcatctgcgggcttgtgttctattctgcggggcagggctg

SEQ ID NO: 111206 - DNA, 78 bp, Homo sapiens
ttacttgattgtggctacagaacgttcatctgcgggcttgtgttctattctgcggggcagggctgtcctggaggttga

SEQ ID NO: 111207 - DNA, 78 bp, Homo sapiens
tgtggctacagaacgttcatctgcgggcttgtgttctattctgcggggcagggctgtcctggaggttgagccccatgg

SEQ ID NO: 111208 - DNA, 77 bp, Homo sapiens
aacgttcatctgcgggcttgtgttctattctgcggggcagggctgtcctggaggttgagccccatgggcagtggaca

SEQ ID NO: 111209 - DNA, 83 bp, Homo sapiens
tgttctattctgcggggcagggctgtcctggaggttgagccccatgggcagtggacatgtagctgtgctctggacagacgctg

SEQ ID NO: 111210 - DNA, 84 bp, Homo sapiens
gggcagggctgtcctggaggttgagccccatgggcagtggacatgtagctgtgctctggacagacgctgtggctgccaccacat

SEQ ID NO: 111211 - DNA, 85 bp, Homo sapiens
tgtcctggaggttgagccccatgggcagtggacatgtagctgtgctctggacagacgctgtggctgccaccacattttctctcag

SEQ ID NO: 111212 - DNA, 83 bp, Homo sapiens
aggttgagccccatgggcagtggacatgtagctgtgctctggacagacgctgtggctgccaccacattttctctcaggctttg

SEQ ID NO: 111213 - DNA, 83 bp, Homo sapiens
atgggcagtggacatgtagctgtgctctggacagacgctgtggctgccaccacattttctctcaggctttgggggaaatgctc

SEQ ID NO: 111214 - DNA, 81 bp, Homo sapiens
agtggacatgtagctgtgctctggacagacgctgtggctgccaccacattttctctcaggctttgggggaaatgctctccc

SEQ ID NO: 111215 - DNA, 80 bp, Homo sapiens
tagctgtgctctggacagacgctgtggctgccaccacattttctctcaggctttgggggaaatgctctcccccagcccca

SEQ ID NO: 111216 - DNA, 74 bp, Homo sapiens
tggctgccaccacattttctctcaggctttgggggaaatgctctcccccagccccaccccagaactgtgcctta

SEQ ID NO: 111217 - DNA, 71 bp, Homo sapiens
acattttctctcaggctttgggggaaatgctctcccccagccccaccccagaactgtgccttaatgccctg

SEQ ID NO: 111218 - DNA, 71 bp, Homo sapiens
ttctctcaggctttgggggaaatgctctcccccagccccaccccagaactgtgccttaatgccctggcccg

SEQ ID NO: 111219 - DNA, 73 bp, Homo sapiens
aatgctctcccccagccccaccccagaactgtgccttaatgccctggcccggttgggtctccatccctgcatc

SEQ ID NO: 111220 - DNA, 73 bp, Homo sapiens
agccccaccccagaactgtgccttaatgccctggcccggttgggtctccatccctgcatccctgcagttagcc

SEQ ID NO: 111221 - DNA, 75 bp, Homo sapiens
ttaatgccctggcccggttgggtctccatccctgcatccctgcagttagccctgctctctaggtgacccgccgtc

SEQ ID NO: 111222 - DNA, 79 bp, Homo sapiens
cctgcatccctgcagttagccctgctctctaggtgacccgccgtcctttggatgtgctaaagccaccacattcaatata

SEQ ID NO: 111223 - DNA, 78 bp, Homo sapiens
atccctgcagttagccctgctctctaggtgacccgccgtcctttggatgtgctaaagccaccacattcaatatattca

SEQ ID NO: 111224 - DNA, 80 bp, Homo sapiens
ttagccctgctctctaggtgacccgccgtcctttggatgtgctaaagccaccacattcaatatattcagacatgtgccac

SEQ ID NO: 111225 - DNA, 78 bp, Homo sapiens
tctctaggtgacccgccgtcctttggatgtgctaaagccaccacattcaatatattcagacatgtgccaccacttccc

SEQ ID NO: 111226 - DNA, 74 bp, Homo sapiens
acccgccgtcctttggatgtgctaaagccaccacattcaatatattcagacatgtgccaccacttccccttccc

SEQ ID NO: 111227 - DNA, 76 bp, Homo sapiens
tttggatgtgctaaagccaccacattcaatatattcagacatgtgccaccacttccccttccctggctccaccctt

SEQ ID NO: 111228 - DNA, 77 bp, Homo sapiens
taaagccaccacattcaatatattcagacatgtgccaccacttccccttccctggctccaccctttgtctccctgca

SEQ ID NO: 111229 - DNA, 76 bp, Homo sapiens
acattcaatatattcagacatgtgccaccacttccccttccctggctccaccctttgtctccctgcagtgtttctc

SEQ ID NO: 111230 - DNA, 76 bp, Homo sapiens
tatattcagacatgtgccaccacttccccttccctggctccaccctttgtctccctgcagtgtttctcctccagga

SEQ ID NO: 111231 - DNA, 73 bp, Homo sapiens
tgccaccacttccccttccctggctccaccctttgtctccctgcagtgtttctcctccaggatagcagccctt

SEQ ID NO: 111232 - DNA, 71 bp, Homo sapiens
ttccccttccctggctccaccctttgtctccctgcagtgtttctcctccaggatagcagcccttttgggta

SEQ ID NO: 111233 - DNA, 74 bp, Homo sapiens
tggctccaccctttgtctccctgcagtgtttctcctccaggatagcagcccttttgggtaccagagtccagacc

SEQ ID NO: 111234 - DNA, 76 bp, Homo sapiens
ttctcctccaggatagcagcccttttgggtaccagagtccagaccttcatgtcacctcttgctggcctctactcct

SEQ ID NO: 111235 - DNA, 78 bp, Homo sapiens
aggatagcagcccttttgggtaccagagtccagaccttcatgtcacctcttgctggcctctactccttgctcttcaga

SEQ ID NO: 111236 - DNA, 78 bp, Homo sapiens
ccttttgggtaccagagtccagaccttcatgtcacctcttgctggcctctactccttgctcttcagaagcaagtcatc

SEQ ID NO: 111237 - DNA, 80 bp, Homo sapiens
ggtaccagagtccagaccttcatgtcacctcttgctggcctctactccttgctcttcagaagcaagtcatctgccaaccc

SEQ ID NO: 111238 - DNA, 78 bp, Homo sapiens
agaccttcatgtcacctcttgctggcctctactccttgctcttcagaagcaagtcatctgccaacccccttggtggcc

SEQ ID NO: 111239 - DNA, 78 bp, Homo sapiens
ttgctggcctctactccttgctcttcagaagcaagtcatctgccaacccccttggtggcctctctcctacctcttctc

SEQ ID NO: 111240 - DNA, 74 bp, Homo sapiens
aagtcatctgccaacccccttggtggcctctctcctacctcttctccactctcactgccaccaccctcgttcag

SEQ ID NO: 111241 - DNA, 70 bp, Homo sapiens
aacccccttggtggcctctctcctacctcttctccactctcactgccaccaccctcgttcaggcccttta

SEQ ID NO: 111242 - DNA, 74 bp, Homo sapiens
ttggtggcctctctcctacctcttctccactctcactgccaccaccctcgttcaggccctttattttgtgatat

SEQ ID NO: 111243 - DNA, 73 bp, Homo sapiens
tcctacctcttctccactctcactgccaccaccctcgttcaggccctttattttgtgatatttactgtttcaa

SEQ ID NO: 111244 - DNA, 74 bp, Homo sapiens
ttctccactctcactgccaccaccctcgttcaggccctttattttgtgatatttactgtttcaacatcctccaa

SEQ ID NO: 111245 - DNA, 76 bp, Homo sapiens
cactgccaccaccctcgttcaggccctttattttgtgatatttactgtttcaacatcctccaagctgatcagctta

SEQ ID NO: 111246 - DNA, 73 bp, Homo sapiens
accctcgttcaggccctttattttgtgatatttactgtttcaacatcctccaagctgatcagcttacttatct

SEQ ID NO: 111247 - DNA, 75 bp, Homo sapiens
gttcaggccctttattttgtgatatttactgtttcaacatcctccaagctgatcagcttacttatcttcctatta

SEQ ID NO: 111248 - DNA, 73 bp, Homo sapiens
ttattttgtgatatttactgtttcaacatcctccaagctgatcagcttacttatcttcctattacccccaaac

SEQ ID NO: 111249 - DNA, 75 bp, Homo sapiens
atatttactgtttcaacatcctccaagctgatcagcttacttatcttcctattacccccaaacgccgatgagatc

SEQ ID NO: 111250 - DNA, 73 bp, Homo sapiens
caagctgatcagcttacttatcttcctattacccccaaacgccgatgagatccttttataatccagaactatt

SEQ ID NO: 111251 - DNA, 71 bp, Homo sapiens
ctattacccccaaacgccgatgagatccttttataatccagaactatttcatgttccagctttaaaatatg

SEQ ID NO: 111252 - DNA, 73 bp, Homo sapiens
aaacgccgatgagatccttttataatccagaactatttcatgttccagctttaaaatatgtccctgatcctcc

SEQ ID NO: 111253 - DNA, 71 bp, Homo sapiens
atccttttataatccagaactatttcatgttccagctttaaaatatgtccctgatcctccctggtacccaa

SEQ ID NO: 111254 - DNA, 75 bp, Homo sapiens
ttataatccagaactatttcatgttccagctttaaaatatgtccctgatcctccctggtacccaagctcttcagc

SEQ ID NO: 111255 - DNA, 76 bp, Homo sapiens
aactatttcatgttccagctttaaaatatgtccctgatcctccctggtacccaagctcttcagcctggcattcaca

SEQ ID NO: 111256 - DNA, 75 bp, Homo sapiens
tttaaaatatgtccctgatcctccctggtacccaagctcttcagcctggcattcacagccctttagaactcagcc

SEQ ID NO: 111257 - DNA, 76 bp, Homo sapiens
tccctgatcctccctggtacccaagctcttcagcctggcattcacagccctttagaactcagccccattttatgga

SEQ ID NO: 111258 - DNA, 75 bp, Homo sapiens
tggtacccaagctcttcagcctggcattcacagccctttagaactcagccccattttatggatccaggtttattc

SEQ ID NO: 111259 - DNA, 74 bp, Homo sapiens
aagctcttcagcctggcattcacagccctttagaactcagccccattttatggatccaggtttattccctgtta

SEQ ID NO: 111260 - DNA, 72 bp, Homo sapiens
agcctggcattcacagccctttagaactcagccccattttatggatccaggtttattccctgttatttccat

SEQ ID NO: 111261 - DNA, 71 bp, Homo sapiens
attcacagccctttagaactcagccccattttatggatccaggtttattccctgttatttccattgcctcc

SEQ ID NO: 111262 - DNA, 71 bp, Homo sapiens
ctttagaactcagccccattttatggatccaggtttattccctgttatttccattgcctcctcccatctac

SEQ ID NO: 111263 - DNA, 70 bp, Homo sapiens
cccattttatggatccaggtttattccctgttatttccattgcctcctcccatctaccccacggccacca

SEQ ID NO: 111264 - DNA, 70 bp, Homo sapiens
ttatggatccaggtttattccctgttatttccattgcctcctcccatctaccccacggccaccacccctg

SEQ ID NO: 111265 - DNA, 70 bp, Homo sapiens
ttattccctgttatttccattgcctcctcccatctaccccacggccaccacccctgggccatgctatttt

SEQ ID NO: 111266 - DNA, 73 bp, Homo sapiens
tgcctcctcccatctaccccacggccaccacccctgggccatgctatttttcacaaacacatgctgtaccttt

SEQ ID NO: 111267 - DNA, 73 bp, Homo sapiens
atctaccccacggccaccacccctgggccatgctatttttcacaaacacatgctgtacctttttagctctcag

SEQ ID NO: 111268 - DNA, 77 bp, Homo sapiens
acggccaccacccctgggccatgctatttttcacaaacacatgctgtacctttttagctctcagtgtctgatccatg

SEQ ID NO: 111269 - DNA, 80 bp, Homo sapiens
ccctgggccatgctatttttcacaaacacatgctgtacctttttagctctcagtgtctgatccatggtgctccttggcac

SEQ ID NO: 111270 - DNA, 81 bp, Homo sapiens
tgctatttttcacaaacacatgctgtacctttttagctctcagtgtctgatccatggtgctccttggcaccaatgtcctct

SEQ ID NO: 111271 - DNA, 80 bp, Homo sapiens
tttttcacaaacacatgctgtacctttttagctctcagtgtctgatccatggtgctccttggcaccaatgtcctcttcac

SEQ ID NO: 111272 - DNA, 80 bp, Homo sapiens
tacctttttagctctcagtgtctgatccatggtgctccttggcaccaatgtcctcttcactccctcatctgctttgggga

SEQ ID NO: 111273 - DNA, 79 bp, Homo sapiens
atccatggtgctccttggcaccaatgtcctcttcactccctcatctgctttggggagttccatctaacctgagggctca

SEQ ID NO: 111274 - DNA, 74 bp, Homo sapiens
accaatgtcctcttcactccctcatctgctttggggagttccatctaacctgagggctcagttaaaacctgcat

SEQ ID NO: 111275 - DNA, 74 bp, Homo sapiens
tcttcactccctcatctgctttggggagttccatctaacctgagggctcagttaaaacctgcattctccaaaaa

SEQ ID NO: 111276 - DNA, 72 bp, Homo sapiens
tccctcatctgctttggggagttccatctaacctgagggctcagttaaaacctgcattctccaaaaactttc

SEQ ID NO: 111277 - DNA, 68 bp, Homo sapiens
ctttggggagttccatctaacctgagggctcagttaaaacctgcattctccaaaaactttccctgccc

SEQ ID NO: 111278 - DNA, 68 bp, Homo sapiens
ttccatctaacctgagggctcagttaaaacctgcattctccaaaaactttccctgcccctccccccaa

SEQ ID NO: 111279 - DNA, 67 bp, Homo sapiens
agggctcagttaaaacctgcattctccaaaaactttccctgcccctccccccaacagaattggttca

SEQ ID NO: 111280 - DNA, 68 bp, Homo sapiens
taaaacctgcattctccaaaaactttccctgcccctccccccaacagaattggttcatcttcctacaa

SEQ ID NO: 111281 - DNA, 68 bp, Homo sapiens
attctccaaaaactttccctgcccctccccccaacagaattggttcatcttcctacaaccaatggcaa

SEQ ID NO: 111282 - DNA, 68 bp, Homo sapiens
aaaaactttccctgcccctccccccaacagaattggttcatcttcctacaaccaatggcaatttcatg

SEQ ID NO: 111283 - DNA, 76 bp, Homo sapiens
tgcccctccccccaacagaattggttcatcttcctacaaccaatggcaatttcatggtggtgccatgtacacattc

SEQ ID NO: 111284 - DNA, 78 bp, Homo sapiens
atcttcctacaaccaatggcaatttcatggtggtgccatgtacacattcgagttggcctcatattaggggaatgtatg

SEQ ID NO: 111285 - DNA, 82 bp, Homo sapiens
aatttcatggtggtgccatgtacacattcgagttggcctcatattaggggaatgtatgtgagcatttccattctcatctaga

SEQ ID NO: 111286 - DNA, 81 bp, Homo sapiens
tgccatgtacacattcgagttggcctcatattaggggaatgtatgtgagcatttccattctcatctagaggaggacttctt

SEQ ID NO: 111287 - DNA, 74 bp, Homo sapiens
atattaggggaatgtatgtgagcatttccattctcatctagaggaggacttctttagtatttggtggttatttc

SEQ ID NO: 111288 - DNA, 78 bp, Homo sapiens
aatgtatgtgagcatttccattctcatctagaggaggacttctttagtatttggtggttatttcttcacattctgatc

SEQ ID NO: 111289 - DNA, 73 bp, Homo sapiens
atttccattctcatctagaggaggacttctttagtatttggtggttatttcttcacattctgatcctccctcc

SEQ ID NO: 111290 - DNA, 76 bp, Homo sapiens
ttctcatctagaggaggacttctttagtatttggtggttatttcttcacattctgatcctccctcctccatagcaa

SEQ ID NO: 111291 - DNA, 74 bp, Homo sapiens
aggacttctttagtatttggtggttatttcttcacattctgatcctccctcctccatagcaactagcatcaact

SEQ ID NO: 111292 - DNA, 77 bp, Homo sapiens
ttctttagtatttggtggttatttcttcacattctgatcctccctcctccatagcaactagcatcaacttccagcca

SEQ ID NO: 111293 - DNA, 77 bp, Homo sapiens
tttggtggttatttcttcacattctgatcctccctcctccatagcaactagcatcaacttccagccaccatttggaa

SEQ ID NO: 111294 - DNA, 78 bp, Homo sapiens
atttcttcacattctgatcctccctcctccatagcaactagcatcaacttccagccaccatttggaaggtgttcaata

SEQ ID NO: 111295 - DNA, 76 bp, Homo sapiens
gatcctccctcctccatagcaactagcatcaacttccagccaccatttggaaggtgttcaatacgtgagggtgact

SEQ ID NO: 111296 - DNA, 78 bp, Homo sapiens
tcctccatagcaactagcatcaacttccagccaccatttggaaggtgttcaatacgtgagggtgacttgaggcaaaga

SEQ ID NO: 111297 - DNA, 76 bp, Homo sapiens
atagcaactagcatcaacttccagccaccatttggaaggtgttcaatacgtgagggtgacttgaggcaaagacaag

SEQ ID NO: 111298 - DNA, 71 bp, Homo sapiens
aacttccagccaccatttggaaggtgttcaatacgtgagggtgacttgaggcaaagacaagggtcaaccta

SEQ ID NO: 111299 - DNA, 70 bp, Homo sapiens
caccatttggaaggtgttcaatacgtgagggtgacttgaggcaaagacaagggtcaacctaacacgtctt

SEQ ID NO: 111300 - DNA, 70 bp, Homo sapiens
tttggaaggtgttcaatacgtgagggtgacttgaggcaaagacaagggtcaacctaacacgtctttggaa

SEQ ID NO: 111301 - DNA, 74 bp, Homo sapiens
gttcaatacgtgagggtgacttgaggcaaagacaagggtcaacctaacacgtctttggaaggatcgatgctcag

SEQ ID NO: 111302 - DNA, 76 bp, Homo sapiens
ggtgacttgaggcaaagacaagggtcaacctaacacgtctttggaaggatcgatgctcaggcttgtctcagctttg

SEQ ID NO: 111303 - DNA, 73 bp, Homo sapiens
aagggtcaacctaacacgtctttggaaggatcgatgctcaggcttgtctcagctttgggctgggagaattcct

SEQ ID NO: 111304 - DNA, 78 bp, Homo sapiens
cttgtctcagctttgggctgggagaattccttgaggactgatgaggatggggcagaccacagtagcatttaaagagaa

SEQ ID NO: 111305 - DNA, 72 bp, Homo sapiens
ggagaattccttgaggactgatgaggatggggcagaccacagtagcatttaaagagaaaaagggaaaagtta

SEQ ID NO: 111306 - DNA, 70 bp, Homo sapiens
attccttgaggactgatgaggatggggcagaccacagtagcatttaaagagaaaaagggaaaagttaggt

SEQ ID NO: 111307 - DNA, 76 bp, Homo sapiens
actgatgaggatggggcagaccacagtagcatttaaagagaaaaagggaaaagttaggttgtgcacatctgcatag

SEQ ID NO: 111308 - DNA, 75 bp, Homo sapiens
ggcagaccacagtagcatttaaagagaaaaagggaaaagttaggttgtgcacatctgcataggcagactttctaa

SEQ ID NO: 111309 - DNA, 71 bp, Homo sapiens
agtagcatttaaagagaaaaagggaaaagttaggttgtgcacatctgcataggcagactttctaattttgt

SEQ ID NO: 111310 - DNA, 71 bp, Homo sapiens
aaagagaaaaagggaaaagttaggttgtgcacatctgcataggcagactttctaattttgttacttcagta

SEQ ID NO: 111311 - DNA, 74 bp, Homo sapiens
aaagggaaaagttaggttgtgcacatctgcataggcagactttctaattttgttacttcagtatatttgctgaa

SEQ ID NO: 111312 - DNA, 83 bp, Homo sapiens
taggttgtgcacatctgcataggcagactttctaattttgttacttcagtatatttgctgaatgtgcactgcaagaatattta

SEQ ID NO: 111313 - DNA, 82 bp, Homo sapiens
cacatctgcataggcagactttctaattttgttacttcagtatatttgctgaatgtgcactgcaagaatatttaaagatcaa

SEQ ID NO: 111314 - DNA, 79 bp, Homo sapiens
tgcataggcagactttctaattttgttacttcagtatatttgctgaatgtgcactgcaagaatatttaaagatcaaagt

SEQ ID NO: 111315 - DNA, 80 bp, Homo sapiens
tctaattttgttacttcagtatatttgctgaatgtgcactgcaagaatatttaaagatcaaagttctatagcagtgagcc

SEQ ID NO: 111316 - DNA, 84 bp, Homo sapiens
atatttgctgaatgtgcactgcaagaatatttaaagatcaaagttctatagcagtgagcccagaacatgctcaagcatggttaa

SEQ ID NO: 111317 - DNA, 78 bp, Homo sapiens
atatttaaagatcaaagttctatagcagtgagcccagaacatgctcaagcatggttaattctgccactttcaccctct

SEQ ID NO: 111318 - DNA, 81 bp, Homo sapiens
atcaaagttctatagcagtgagcccagaacatgctcaagcatggttaattctgccactttcaccctcttctccttcatcac

SEQ ID NO: 111319 - DNA, 85 bp, Homo sapiens
tatagcagtgagcccagaacatgctcaagcatggttaattctgccactttcaccctcttctccttcatcaccgatatggcagata

SEQ ID NO: 111320 - DNA, 81 bp, Homo sapiens
cagaacatgctcaagcatggttaattctgccactttcaccctcttctccttcatcaccgatatggcagatacctagtggtg

SEQ ID NO: 111321 - DNA, 80 bp, Homo sapiens
atgctcaagcatggttaattctgccactttcaccctcttctccttcatcaccgatatggcagatacctagtggtggactc

SEQ ID NO: 111322 - DNA, 77 bp, Homo sapiens
ttaattctgccactttcaccctcttctccttcatcaccgatatggcagatacctagtggtggactcggtgcttctaa

SEQ ID NO: 111323 - DNA, 77 bp, Homo sapiens
cactttcaccctcttctccttcatcaccgatatggcagatacctagtggtggactcggtgcttctaaccatactgat

SEQ ID NO: 111324 - DNA, 81 bp, Homo sapiens
ctcttctccttcatcaccgatatggcagatacctagtggtggactcggtgcttctaaccatactgattatggaatgatcat

SEQ ID NO: 111325 - DNA, 81 bp, Homo sapiens
ttcatcaccgatatggcagatacctagtggtggactcggtgcttctaaccatactgattatggaatgatcattacagactt

SEQ ID NO: 111326 - DNA, 79 bp, Homo sapiens
atatggcagatacctagtggtggactcggtgcttctaaccatactgattatggaatgatcattacagactttgaataag

SEQ ID NO: 111327 - DNA, 76 bp, Homo sapiens
agatacctagtggtggactcggtgcttctaaccatactgattatggaatgatcattacagactttgaataaggtag

SEQ ID NO: 111328 - DNA, 77 bp, Homo sapiens
gtggactcggtgcttctaaccatactgattatggaatgatcattacagactttgaataaggtaggcttctggaagaa

SEQ ID NO: 111329 - DNA, 76 bp, Homo sapiens
gtgcttctaaccatactgattatggaatgatcattacagactttgaataaggtaggcttctggaagaagataaaat

SEQ ID NO: 111330 - DNA, 75 bp, Homo sapiens
accatactgattatggaatgatcattacagactttgaataaggtaggcttctggaagaagataaaattacacttc

SEQ ID NO: 111331 - DNA, 75 bp, Homo sapiens
tggaatgatcattacagactttgaataaggtaggcttctggaagaagataaaattacacttctattagaacgtca

SEQ ID NO: 111332 - DNA, 71 bp, Homo sapiens
ttacagactttgaataaggtaggcttctggaagaagataaaattacacttctattagaacgtcaagtagga

SEQ ID NO: 111333 - DNA, 71 bp, Homo sapiens
aaggtaggcttctggaagaagataaaattacacttctattagaacgtcaagtaggaccttgcatgaaaaga

SEQ ID NO: 111334 - DNA, 72 bp, Homo sapiens
aagaagataaaattacacttctattagaacgtcaagtaggaccttgcatgaaaagagccattgatccaaagg

SEQ ID NO: 111335 - DNA, 71 bp, Homo sapiens
acttctattagaacgtcaagtaggaccttgcatgaaaagagccattgatccaaagggaagaaaggtaaaga

SEQ ID NO: 111336 - DNA, 73 bp, Homo sapiens
acagcaacaacaaaaaacggagcccaccgactgtaatggagaggttgatgcttggctttaggagagcaggtcg

SEQ ID NO: 111337 - DNA, 73 bp, Homo sapiens
acaacaaaaaacggagcccaccgactgtaatggagaggttgatgcttggctttaggagagcaggtcgtgtgtg

SEQ ID NO: 111338 - DNA, 76 bp, Homo sapiens
aacggagcccaccgactgtaatggagaggttgatgcttggctttaggagagcaggtcgtgtgtgtgttgaattaca

SEQ ID NO: 111339 - DNA, 79 bp, Homo sapiens
actgtaatggagaggttgatgcttggctttaggagagcaggtcgtgtgtgtgttgaattacaggcaattatcagtggtc

SEQ ID NO: 111340 - DNA, 78 bp, Homo sapiens
agaggttgatgcttggctttaggagagcaggtcgtgtgtgtgttgaattacaggcaattatcagtggtctccctgttg

SEQ ID NO: 111341 - DNA, 78 bp, Homo sapiens
atgcttggctttaggagagcaggtcgtgtgtgtgttgaattacaggcaattatcagtggtctccctgttggccctgaa

SEQ ID NO: 111342 - DNA, 76 bp, Homo sapiens
tttaggagagcaggtcgtgtgtgtgttgaattacaggcaattatcagtggtctccctgttggccctgaagaattta

SEQ ID NO: 111343 - DNA, 76 bp, Homo sapiens
tcgtgtgtgtgttgaattacaggcaattatcagtggtctccctgttggccctgaagaatttagaactgcgtcaaaa

SEQ ID NO: 111344 - DNA, 74 bp, Homo sapiens
tgttgaattacaggcaattatcagtggtctccctgttggccctgaagaatttagaactgcgtcaaaaggaaatc

SEQ ID NO: 111345 - DNA, 74 bp, Homo sapiens
ttacaggcaattatcagtggtctccctgttggccctgaagaatttagaactgcgtcaaaaggaaatctggtcta

SEQ ID NO: 111346 - DNA, 75 bp, Homo sapiens
cctgttggccctgaagaatttagaactgcgtcaaaaggaaatctggtctatcaggagggaggtcctgctgcatct

SEQ ID NO: 111347 - DNA, 77 bp, Homo sapiens
tcaaaaggaaatctggtctatcaggagggaggtcctgctgcatcttttaaccctgtgccaactccactgcacttgaa

SEQ ID NO: 111348 - DNA, 75 bp, Homo sapiens
aaatctggtctatcaggagggaggtcctgctgcatcttttaaccctgtgccaactccactgcacttgaaactttc

SEQ ID NO: 111349 - DNA, 79 bp, Homo sapiens
tatcaggagggaggtcctgctgcatcttttaaccctgtgccaactccactgcacttgaaactttccatgatgtatccta

SEQ ID NO: 111350 - DNA, 76 bp, Homo sapiens
aggtcctgctgcatcttttaaccctgtgccaactccactgcacttgaaactttccatgatgtatcctattcttaaa

SEQ ID NO: 111351 - DNA, 79 bp, Homo sapiens
tgctgcatcttttaaccctgtgccaactccactgcacttgaaactttccatgatgtatcctattcttaaaatctcacaa

SEQ ID NO: 111352 - DNA, 75 bp, Homo sapiens
catcttttaaccctgtgccaactccactgcacttgaaactttccatgatgtatcctattcttaaaatctcacaaa

SEQ ID NO: 111353 - DNA, 74 bp, Homo sapiens
atcttttaaccctgtgccaactccactgcacttgaaactttccatgatgtatcctattcttaaaatctcacaaa

SEQ ID NO: 111354 - DNA, 76 bp, Homo sapiens
tgccaactccactgcacttgaaactttccatgatgtatcctattcttaaaatctcacaaatgttgttggtaaaaca

SEQ ID NO: 111355 - DNA, 74 bp, Homo sapiens
ctccactgcacttgaaactttccatgatgtatcctattcttaaaatctcacaaatgttgttggtaaaacaactg

SEQ ID NO: 111356 - DNA, 75 bp, Homo sapiens
ctgcacttgaaactttccatgatgtatcctattcttaaaatctcacaaatgttgttggtaaaacaactgttagca

SEQ ID NO: 111357 - DNA, 75 bp, Homo sapiens
gaaactttccatgatgtatcctattcttaaaatctcacaaatgttgttggtaaaacaactgttagcatttgatgc

SEQ ID NO: 111358 - DNA, 76 bp, Homo sapiens
ctttccatgatgtatcctattcttaaaatctcacaaatgttgttggtaaaacaactgttagcatttgatgcgagga

SEQ ID NO: 111359 - DNA, 76 bp, Homo sapiens
ccatgatgtatcctattcttaaaatctcacaaatgttgttggtaaaacaactgttagcatttgatgcgaggataaa

SEQ ID NO: 111360 - DNA, 74 bp, Homo sapiens
cctattcttaaaatctcacaaatgttgttggtaaaacaactgttagcatttgatgcgaggataaaactctctgc

SEQ ID NO: 111361 - DNA, 77 bp, Homo sapiens
atctcacaaatgttgttggtaaaacaactgttagcatttgatgcgaggataaaactctctgctagatcacgtgttct

SEQ ID NO: 111362 - DNA, 74 bp, Homo sapiens
aaatgttgttggtaaaacaactgttagcatttgatgcgaggataaaactctctgctagatcacgtgttctttta

SEQ ID NO: 111363 - DNA, 73 bp, Homo sapiens
atttgatgcgaggataaaactctctgctagatcacgtgttcttttaggggcccaaattgggattgtgaaaatg

SEQ ID NO: 111364 - DNA, 71 bp, Homo sapiens
ataaaactctctgctagatcacgtgttcttttaggggcccaaattgggattgtgaaaatgttatatgattt

SEQ ID NO: 111365 - DNA, 73 bp, Homo sapiens
tctgctagatcacgtgttcttttaggggcccaaattgggattgtgaaaatgttatatgattttaaagactgaa

SEQ ID NO: 111366 - DNA, 69 bp, Homo sapiens
atcacgtgttcttttaggggcccaaattgggattgtgaaaatgttatatgattttaaagactgaaataa

SEQ ID NO: 111367 - DNA, 70 bp, Homo sapiens
tttaggggcccaaattgggattgtgaaaatgttatatgattttaaagactgaaataaatcctgcccgatg

SEQ ID NO: 111368 - DNA, 76 bp, Homo sapiens
gtgaaaatgttatatgattttaaagactgaaataaatcctgcccgatgtcttctctgctttctagcagtttatcca

SEQ ID NO: 111369 - DNA, 76 bp, Homo sapiens
tgttatatgattttaaagactgaaataaatcctgcccgatgtcttctctgctttctagcagtttatccacaaggaa

SEQ ID NO: 111370 - DNA, 72 bp, Homo sapiens
attttaaagactgaaataaatcctgcccgatgtcttctctgctttctagcagtttatccacaaggaaggaac

SEQ ID NO: 111371 - DNA, 75 bp, Homo sapiens
aataaatcctgcccgatgtcttctctgctttctagcagtttatccacaaggaaggaaccaacacttctgcacaaa

SEQ ID NO: 111372 - DNA, 74 bp, Homo sapiens
tctctgctttctagcagtttatccacaaggaaggaaccaacacttctgcacaaaccccaccgagtgagtgttgt

SEQ ID NO: 111373 - DNA, 74 bp, Homo sapiens
tctagcagtttatccacaaggaaggaaccaacacttctgcacaaaccccaccgagtgagtgttgttcaccaata

SEQ ID NO: 111374 - DNA, 72 bp, Homo sapiens
tttatccacaaggaaggaaccaacacttctgcacaaaccccaccgagtgagtgttgttcaccaatataatct

SEQ ID NO: 111375 - DNA, 73 bp, Homo sapiens
caaaccccaccgagtgagtgttgttcaccaatataatcttgaggcactacaagcccatgaagtttgggcggat

SEQ ID NO: 111376 - DNA, 75 bp, Homo sapiens
accgagtgagtgttgttcaccaatataatcttgaggcactacaagcccatgaagtttgggcggattctccaaaga

SEQ ID NO: 111377 - DNA, 74 bp, Homo sapiens
agtgttgttcaccaatataatcttgaggcactacaagcccatgaagtttgggcggattctccaaagaataatta

SEQ ID NO: 111378 - DNA, 73 bp, Homo sapiens
aatataatcttgaggcactacaagcccatgaagtttgggcggattctccaaagaataattacactccggtcaa

SEQ ID NO: 111379 - DNA, 70 bp, Homo sapiens
aagcccatgaagtttgggcggattctccaaagaataattacactccggtcaatgcaattttagtgttaat

SEQ ID NO: 111380 - DNA, 71 bp, Homo sapiens
atgaagtttgggcggattctccaaagaataattacactccggtcaatgcaattttagtgttaattacacat

SEQ ID NO: 111381 - DNA, 72 bp, Homo sapiens
gggcggattctccaaagaataattacactccggtcaatgcaattttagtgttaattacacattattatattc

SEQ ID NO: 111382 - DNA, 73 bp, Homo sapiens
agaataattacactccggtcaatgcaattttagtgttaattacacattattatattcctgggataagacacac

SEQ ID NO: 111383 - DNA, 78 bp, Homo sapiens
tacactccggtcaatgcaattttagtgttaattacacattattatattcctgggataagacacacttatatgagcatc

SEQ ID NO: 111384 - DNA, 80 bp, Homo sapiens
gtcaatgcaattttagtgttaattacacattattatattcctgggataagacacacttatatgagcatctcagccaccta

SEQ ID NO: 111385 - DNA, 80 bp, Homo sapiens
aattttagtgttaattacacattattatattcctgggataagacacacttatatgagcatctcagccacctaagcatgca

SEQ ID NO: 111386 - DNA, 82 bp, Homo sapiens
ttaattacacattattatattcctgggataagacacacttatatgagcatctcagccacctaagcatgcatcactgaaaaac

SEQ ID NO: 111387 - DNA, 82 bp, Homo sapiens
tcctgggataagacacacttatatgagcatctcagccacctaagcatgcatcactgaaaaacggagatcaaggtggttcaaa

SEQ ID NO: 111388 - DNA, 85 bp, Homo sapiens
tatgagcatctcagccacctaagcatgcatcactgaaaaacggagatcaaggtggttcaaaggcttcatggagccaggcctgcta

SEQ ID NO: 111389 - DNA, 79 bp, Homo sapiens
ccacctaagcatgcatcactgaaaaacggagatcaaggtggttcaaaggcttcatggagccaggcctgctagaggacaa

SEQ ID NO: 111390 - DNA, 79 bp, Homo sapiens
atgcatcactgaaaaacggagatcaaggtggttcaaaggcttcatggagccaggcctgctagaggacaatgggcacttc

SEQ ID NO: 111391 - DNA, 76 bp, Homo sapiens
tgaaaaacggagatcaaggtggttcaaaggcttcatggagccaggcctgctagaggacaatgggcacttctcccat

SEQ ID NO: 111392 - DNA, 80 bp, Homo sapiens
agatcaaggtggttcaaaggcttcatggagccaggcctgctagaggacaatgggcacttctcccatttatgcactgtgac

SEQ ID NO: 111393 - DNA, 81 bp, Homo sapiens
caggcctgctagaggacaatgggcacttctcccatttatgcactgtgacctggactggtcagagttggccctgctcattcc

SEQ ID NO: 111394 - DNA, 81 bp, Homo sapiens
ctagaggacaatgggcacttctcccatttatgcactgtgacctggactggtcagagttggccctgctcattcctcttgcca

SEQ ID NO: 111395 - DNA, 79 bp, Homo sapiens
atgggcacttctcccatttatgcactgtgacctggactggtcagagttggccctgctcattcctcttgccagcccttaa

SEQ ID NO: 111396 - DNA, 78 bp, Homo sapiens
ttctcccatttatgcactgtgacctggactggtcagagttggccctgctcattcctcttgccagcccttaagggacaa

SEQ ID NO: 111397 - DNA, 79 bp, Homo sapiens
ttatgcactgtgacctggactggtcagagttggccctgctcattcctcttgccagcccttaagggacaacagggacaca

SEQ ID NO: 111398 - DNA, 78 bp, Homo sapiens
tggactggtcagagttggccctgctcattcctcttgccagcccttaagggacaacagggacacaccatgcttctgatt

SEQ ID NO: 111399 - DNA, 77 bp, Homo sapiens
agagttggccctgctcattcctcttgccagcccttaagggacaacagggacacaccatgcttctgatttagatggaa

SEQ ID NO: 111400 - DNA, 80 bp, Homo sapiens
ctgctcattcctcttgccagcccttaagggacaacagggacacaccatgcttctgatttagatggaatgaaggtgactga

SEQ ID NO: 111401 - DNA, 76 bp, Homo sapiens
ctcttgccagcccttaagggacaacagggacacaccatgcttctgatttagatggaatgaaggtgactgagtaaaa

SEQ ID NO: 111402 - DNA, 74 bp, Homo sapiens
acaacagggacacaccatgcttctgatttagatggaatgaaggtgactgagtaaaaaatatggaaactaaatac

SEQ ID NO: 111403 - DNA, 73 bp, Homo sapiens
agggacacaccatgcttctgatttagatggaatgaaggtgactgagtaaaaaatatggaaactaaatacttaa

SEQ ID NO: 111404 - DNA, 73 bp, Homo sapiens
catgcttctgatttagatggaatgaaggtgactgagtaaaaaatatggaaactaaatacttaaagggtgactc

SEQ ID NO: 111405 - DNA, 67 bp, Homo sapiens
agatggaatgaaggtgactgagtaaaaaatatggaaactaaatacttaaagggtgactctaattttt

SEQ ID NO: 111406 - DNA, 67 bp, Homo sapiens
tgaaggtgactgagtaaaaaatatggaaactaaatacttaaagggtgactctaattttttttcagga

SEQ ID NO: 111407 - DNA, 63 bp, Homo sapiens
ctgagtaaaaaatatggaaactaaatacttaaagggtgactctaattttttttcaggagggtt

SEQ ID NO: 111408 - DNA, 63 bp, Homo sapiens
tatggaaactaaatacttaaagggtgactctaattttttttcaggagggtttaaaattttgac

SEQ ID NO: 111409 - DNA, 63 bp, Homo sapiens
atacttaaagggtgactctaattttttttcaggagggtttaaaattttgactaaccaaacatg

SEQ ID NO: 111410 - DNA, 66 bp, Homo sapiens
ggtgactctaattttttttcaggagggtttaaaattttgactaaccaaacatggagcttgggccta

SEQ ID NO: 111411 - DNA, 65 bp, Homo sapiens
attttttttcaggagggtttaaaattttgactaaccaaacatggagcttgggcctaatacttcaa

SEQ ID NO: 111412 - DNA, 67 bp, Homo sapiens
tttcaggagggtttaaaattttgactaaccaaacatggagcttgggcctaatacttcaacatttttg

SEQ ID NO: 111413 - DNA, 67 bp, Homo sapiens
ggtttaaaattttgactaaccaaacatggagcttgggcctaatacttcaacatttttgtgctttagt

SEQ ID NO: 111414 - DNA, 71 bp, Homo sapiens
tttgactaaccaaacatggagcttgggcctaatacttcaacatttttgtgctttagttttcttatatgtaa

SEQ ID NO: 111415 - DNA, 76 bp, Homo sapiens
ttgggcctaatacttcaacatttttgtgctttagttttcttatatgtaaaagatgagcagatgaccatatgccact

SEQ ID NO: 111416 - DNA, 78 bp, Homo sapiens
acttcaacatttttgtgctttagttttcttatatgtaaaagatgagcagatgaccatatgccacttgcaagcattaag

SEQ ID NO: 111417 - DNA, 79 bp, Homo sapiens
atttttgtgctttagttttcttatatgtaaaagatgagcagatgaccatatgccacttgcaagcattaaggtcctatca

SEQ ID NO: 111418 - DNA, 82 bp, Homo sapiens
ctttagttttcttatatgtaaaagatgagcagatgaccatatgccacttgcaagcattaaggtcctatcagttgatgctgaa

SEQ ID NO: 111419 - DNA, 87 bp, Homo sapiens
atatgtaaaagatgagcagatgaccatatgccacttgcaagcattaaggtcctatcagttgatgctgaagctgtgttagacaaatca

SEQ ID NO: 111420 - DNA, 88 bp, Homo sapiens
tgagcagatgaccatatgccacttgcaagcattaaggtcctatcagttgatgctgaagctgtgttagacaaatcacacgctggtataa

SEQ ID NO: 111421 - DNA, 84 bp, Homo sapiens
atgaccatatgccacttgcaagcattaaggtcctatcagttgatgctgaagctgtgttagacaaatcacacgctggtataacta

SEQ ID NO: 111422 - DNA, 82 bp, Homo sapiens
acttgcaagcattaaggtcctatcagttgatgctgaagctgtgttagacaaatcacacgctggtataactaggctggatgaa

SEQ ID NO: 111423 - DNA, 80 bp, Homo sapiens
attaaggtcctatcagttgatgctgaagctgtgttagacaaatcacacgctggtataactaggctggatgaaagtctatc

SEQ ID NO: 111424 - DNA, 84 bp, Homo sapiens
tcctatcagttgatgctgaagctgtgttagacaaatcacacgctggtataactaggctggatgaaagtctatcctgagtgttca

SEQ ID NO: 111425 - DNA, 83 bp, Homo sapiens
gttgatgctgaagctgtgttagacaaatcacacgctggtataactaggctggatgaaagtctatcctgagtgttcacacagaa

SEQ ID NO: 111426 - DNA, 81 bp, Homo sapiens
tgtgttagacaaatcacacgctggtataactaggctggatgaaagtctatcctgagtgttcacacagaactgcatagaaag

SEQ ID NO: 111427 - DNA, 80 bp, Homo sapiens
acaaatcacacgctggtataactaggctggatgaaagtctatcctgagtgttcacacagaactgcatagaaagttgatat

SEQ ID NO: 111428 - DNA, 80 bp, Homo sapiens
acgctggtataactaggctggatgaaagtctatcctgagtgttcacacagaactgcatagaaagttgatattggtaatga

SEQ ID NO: 111429 - DNA, 79 bp, Homo sapiens
taactaggctggatgaaagtctatcctgagtgttcacacagaactgcatagaaagttgatattggtaatgagggcctag

SEQ ID NO: 111430 - DNA, 78 bp, Homo sapiens
tatcctgagtgttcacacagaactgcatagaaagttgatattggtaatgagggcctaggttagaactgttcagagaaa

SEQ ID NO: 111431 - DNA, 76 bp, Homo sapiens
acacagaactgcatagaaagttgatattggtaatgagggcctaggttagaactgttcagagaaagcacgacgtctg

SEQ ID NO: 111432 - DNA, 80 bp, Homo sapiens
tgcatagaaagttgatattggtaatgagggcctaggttagaactgttcagagaaagcacgacgtctgtgacagctgaata

SEQ ID NO: 111433 - DNA, 78 bp, Homo sapiens
taatgagggcctaggttagaactgttcagagaaagcacgacgtctgtgacagctgaatattgtgtggcaatattaagt

SEQ ID NO: 111434 - DNA, 77 bp, Homo sapiens
ctaggttagaactgttcagagaaagcacgacgtctgtgacagctgaatattgtgtggcaatattaagttgggttctg

SEQ ID NO: 111435 - DNA, 79 bp, Homo sapiens
agagaaagcacgacgtctgtgacagctgaatattgtgtggcaatattaagttgggttctgtttcatctctggctataag

SEQ ID NO: 111436 - DNA, 78 bp, Homo sapiens
acgtctgtgacagctgaatattgtgtggcaatattaagttgggttctgtttcatctctggctataaggcatacaaaac

SEQ ID NO: 111437 - DNA, 77 bp, Homo sapiens
atattgtgtggcaatattaagttgggttctgtttcatctctggctataaggcatacaaaaccatattgcatattttg

SEQ ID NO: 111438 - DNA, 75 bp, Homo sapiens
ggcaatattaagttgggttctgtttcatctctggctataaggcatacaaaaccatattgcatattttggtttcaa

SEQ ID NO: 111439 - DNA, 72 bp, Homo sapiens
ttgggttctgtttcatctctggctataaggcatacaaaaccatattgcatattttggtttcaaggtgttttt

SEQ ID NO: 111440 - DNA, 71 bp, Homo sapiens
gtttcatctctggctataaggcatacaaaaccatattgcatattttggtttcaaggtgtttttttttcctc

SEQ ID NO: 111441 - DNA, 68 bp, Homo sapiens
ctggctataaggcatacaaaaccatattgcatattttggtttcaaggtgtttttttttcctccctaaa

SEQ ID NO: 111442 - DNA, 67 bp, Homo sapiens
ggcatacaaaaccatattgcatattttggtttcaaggtgtttttttttcctccctaaatttatacca

SEQ ID NO: 111443 - DNA, 68 bp, Homo sapiens
ccatattgcatattttggtttcaaggtgtttttttttcctccctaaatttataccaatagcaaggcat

SEQ ID NO: 111444 - DNA, 66 bp, Homo sapiens
ttttggtttcaaggtgtttttttttcctccctaaatttataccaatagcaaggcattattactcca

SEQ ID NO: 111445 - DNA, 67 bp, Homo sapiens
ggtgtttttttttcctccctaaatttataccaatagcaaggcattattactccataagctccaaaaa

SEQ ID NO: 111446 - DNA, 68 bp, Homo sapiens
tttttcctccctaaatttataccaatagcaaggcattattactccataagctccaaaaacattatttt

SEQ ID NO: 111447 - DNA, 69 bp, Homo sapiens
tccctaaatttataccaatagcaaggcattattactccataagctccaaaaacattatttttaaaaaca

SEQ ID NO: 111448 - DNA, 73 bp, Homo sapiens
tataccaatagcaaggcattattactccataagctccaaaaacattatttttaaaaacatatccaatatagat

SEQ ID NO: 111449 - DNA, 68 bp, Homo sapiens
aacattatttttaaaaacatatccaatatagatttggggtagtaacaacaactgctaggaatttaatc

SEQ ID NO: 111450 - DNA, 72 bp, Homo sapiens
ttaaaaacatatccaatatagatttggggtagtaacaacaactgctaggaatttaatccatcaattacactc

SEQ ID NO: 111451 - DNA, 71 bp, Homo sapiens
acatatccaatatagatttggggtagtaacaacaactgctaggaatttaatccatcaattacactcctttt

SEQ ID NO: 111452 - DNA, 68 bp, Homo sapiens
atatagatttggggtagtaacaacaactgctaggaatttaatccatcaattacactcctttttttaaa

SEQ ID NO: 111453 - DNA, 72 bp, Homo sapiens
aaaaaaaaatctggtcttctgccttaatgtttaaatatgcagaggttcaaagcacctgacaattaggtgctc

SEQ ID NO: 111454 - DNA, 77 bp, Homo sapiens
aatctggtcttctgccttaatgtttaaatatgcagaggttcaaagcacctgacaattaggtgctctgtgccttctta

SEQ ID NO: 111455 - DNA, 77 bp, Homo sapiens
ttctgccttaatgtttaaatatgcagaggttcaaagcacctgacaattaggtgctctgtgccttcttaccagacact

SEQ ID NO: 111456 - DNA, 77 bp, Homo sapiens
aatgtttaaatatgcagaggttcaaagcacctgacaattaggtgctctgtgccttcttaccagacacttcacattaa

SEQ ID NO: 111457 - DNA, 76 bp, Homo sapiens
acaattaggtgctctgtgccttcttaccagacacttcacattaagacatgtcctttgttgacgagaatgtttttgc

SEQ ID NO: 111458 - DNA, 77 bp, Homo sapiens
cttcttaccagacacttcacattaagacatgtcctttgttgacgagaatgtttttgcctggctgtctgttgcatttc

SEQ ID NO: 111459 - DNA, 79 bp, Homo sapiens
agacacttcacattaagacatgtcctttgttgacgagaatgtttttgcctggctgtctgttgcatttctctctctcttc

SEQ ID NO: 111460 - DNA, 80 bp, Homo sapiens
atgtcctttgttgacgagaatgtttttgcctggctgtctgttgcatttctctctctcttcctagcttctgtgatgctact

SEQ ID NO: 111461 - DNA, 82 bp, Homo sapiens
gagaatgtttttgcctggctgtctgttgcatttctctctctcttcctagcttctgtgatgctacttggtagagagtgatgtt

SEQ ID NO: 111462 - DNA, 82 bp, Homo sapiens
ttttgcctggctgtctgttgcatttctctctctcttcctagcttctgtgatgctacttggtagagagtgatgtttaataata

SEQ ID NO: 111463 - DNA, 80 bp, Homo sapiens
tgtctgttgcatttctctctctcttcctagcttctgtgatgctacttggtagagagtgatgtttaataatagtttgttaa

SEQ ID NO: 111464 - DNA, 78 bp, Homo sapiens
tttctctctctcttcctagcttctgtgatgctacttggtagagagtgatgtttaataatagtttgttaaatgaatcaa

SEQ ID NO: 111465 - DNA, 76 bp, Homo sapiens
ctcttcctagcttctgtgatgctacttggtagagagtgatgtttaataatagtttgttaaatgaatcaacaggtaa

SEQ ID NO: 111466 - DNA, 75 bp, Homo sapiens
cttcctagcttctgtgatgctacttggtagagagtgatgtttaataatagtttgttaaatgaatcaacaggtaaa

SEQ ID NO: 111467 - DNA, 76 bp, Homo sapiens
ctagcttctgtgatgctacttggtagagagtgatgtttaataatagtttgttaaatgaatcaacaggtaaacataa

SEQ ID NO: 111468 - DNA, 76 bp, Homo sapiens
tctgtgatgctacttggtagagagtgatgtttaataatagtttgttaaatgaatcaacaggtaaacataaaatatg

SEQ ID NO: 111469 - DNA, 76 bp, Homo sapiens
tgatgctacttggtagagagtgatgtttaataatagtttgttaaatgaatcaacaggtaaacataaaatatggtca

SEQ ID NO: 111470 - DNA, 74 bp, Homo sapiens
ttggtagagagtgatgtttaataatagtttgttaaatgaatcaacaggtaaacataaaatatggtcagtcacac

SEQ ID NO: 111471 - DNA, 73 bp, Homo sapiens
gagagtgatgtttaataatagtttgttaaatgaatcaacaggtaaacataaaatatggtcagtcacactaccg

SEQ ID NO: 111472 - DNA, 73 bp, Homo sapiens
gtgatgtttaataatagtttgttaaatgaatcaacaggtaaacataaaatatggtcagtcacactaccgtgag

SEQ ID NO: 111473 - DNA, 73 bp, Homo sapiens
tttaataatagtttgttaaatgaatcaacaggtaaacataaaatatggtcagtcacactaccgtgagtacaca

SEQ ID NO: 111474 - DNA, 76 bp, Homo sapiens
taatagtttgttaaatgaatcaacaggtaaacataaaatatggtcagtcacactaccgtgagtacacacacacgca

SEQ ID NO: 111475 - DNA, 74 bp, Homo sapiens
cacacacacactcattcacaaagtcctacacaggaaactaccccaggccattcccatttagaaaaaaatgtgca

SEQ ID NO: 111476 - DNA, 71 bp, Homo sapiens
acactcattcacaaagtcctacacaggaaactaccccaggccattcccatttagaaaaaaatgtgcaactc

SEQ ID NO: 111477 - DNA, 72 bp, Homo sapiens
acaaagtcctacacaggaaactaccccaggccattcccatttagaaaaaaatgtgcaactcgctgccagcac

SEQ ID NO: 111478 - DNA, 73 bp, Homo sapiens
acaggaaactaccccaggccattcccatttagaaaaaaatgtgcaactcgctgccagcactcatgtaatttta

SEQ ID NO: 111479 - DNA, 73 bp, Homo sapiens
aactaccccaggccattcccatttagaaaaaaatgtgcaactcgctgccagcactcatgtaattttacataaa

SEQ ID NO: 111480 - DNA, 71 bp, Homo sapiens
tgaaaataaaatctaaaaactgtttttggagttatttccaaacagaactatcattagaatcatctgaaaca

SEQ ID NO: 111481 - DNA, 74 bp, Homo sapiens
aaatctaaaaactgtttttggagttatttccaaacagaactatcattagaatcatctgaaacatcagaatcatc

SEQ ID NO: 111482 - DNA, 76 bp, Homo sapiens
aactgtttttggagttatttccaaacagaactatcattagaatcatctgaaacatcagaatcatctattctggaaa

SEQ ID NO: 111483 - DNA, 81 bp, Homo sapiens
tggagttatttccaaacagaactatcattagaatcatctgaaacatcagaatcatctattctggaaaaatcggattcatca

SEQ ID NO: 111484 - DNA, 81 bp, Homo sapiens
aatcatctgaaacatcagaatcatctattctggaaaaatcggattcatcaaatgcatctttagccaacaactgttcgagaa

SEQ ID NO: 111485 - DNA, 82 bp, Homo sapiens
agaatcatctattctggaaaaatcggattcatcaaatgcatctttagccaacaactgttcgagaatgatgtgaacatcacag

SEQ ID NO: 111486 - DNA, 80 bp, Homo sapiens
tattctggaaaaatcggattcatcaaatgcatctttagccaacaactgttcgagaatgatgtgaacatcacaggtaggaa

SEQ ID NO: 111487 - DNA, 80 bp, Homo sapiens
aaaaatcggattcatcaaatgcatctttagccaacaactgttcgagaatgatgtgaacatcacaggtaggaatgctatgt

SEQ ID NO: 111488 - DNA, 82 bp, Homo sapiens
atcaaatgcatctttagccaacaactgttcgagaatgatgtgaacatcacaggtaggaatgctatgttttctagaattcaca

SEQ ID NO: 111489 - DNA, 79 bp, Homo sapiens
atctttagccaacaactgttcgagaatgatgtgaacatcacaggtaggaatgctatgttttctagaattcacattttca

SEQ ID NO: 111490 - DNA, 80 bp, Homo sapiens
tttagccaacaactgttcgagaatgatgtgaacatcacaggtaggaatgctatgttttctagaattcacattttcagtga

SEQ ID NO: 111491 - DNA, 80 bp, Homo sapiens
aactgttcgagaatgatgtgaacatcacaggtaggaatgctatgttttctagaattcacattttcagtgactgagaatta

SEQ ID NO: 111492 - DNA, 74 bp, Homo sapiens
gttttctagaattcacattttcagtgactgagaattactatattttgtaagtgaagataccactaccaaaatca

SEQ ID NO: 111493 - DNA, 76 bp, Homo sapiens
gaattcacattttcagtgactgagaattactatattttgtaagtgaagataccactaccaaaatcaaaatgctata

SEQ ID NO: 111494 - DNA, 78 bp, Homo sapiens
tcagtgactgagaattactatattttgtaagtgaagataccactaccaaaatcaaaatgctataaatagaatgatatc

SEQ ID NO: 111495 - DNA, 74 bp, Homo sapiens
gagaattactatattttgtaagtgaagataccactaccaaaatcaaaatgctataaatagaatgatatcttttg

SEQ ID NO: 111496 - DNA, 74 bp, Homo sapiens
ttttgtaagtgaagataccactaccaaaatcaaaatgctataaatagaatgatatcttttgtttccagagtcga

SEQ ID NO: 111497 - DNA, 75 bp, Homo sapiens
gaagataccactaccaaaatcaaaatgctataaatagaatgatatcttttgtttccagagtcgatttgctagtag

SEQ ID NO: 111498 - DNA, 75 bp, Homo sapiens
caaaatgctataaatagaatgatatcttttgtttccagagtcgatttgctagtaggttggtgcagaaataattcc

SEQ ID NO: 111499 - DNA, 72 bp, Homo sapiens
agaatgatatcttttgtttccagagtcgatttgctagtaggttggtgcagaaataattccggtttttgccat

SEQ ID NO: 111500 - DNA, 68 bp, Homo sapiens
cttttgtttccagagtcgatttgctagtaggttggtgcagaaataattccggtttttgccattaaaag

SEQ ID NO: 111501 - DNA, 75 bp, Homo sapiens
tgctagtaggttggtgcagaaataattccggtttttgccattaaaagtgatgtgaataacaatgaaagtgagata

SEQ ID NO: 111502 - DNA, 76 bp, Homo sapiens
gttggtgcagaaataattccggtttttgccattaaaagtgatgtgaataacaatgaaagtgagatatttcatggca

SEQ ID NO: 111503 - DNA, 73 bp, Homo sapiens
ggtttttgccattaaaagtgatgtgaataacaatgaaagtgagatatttcatggcaaagttaactggggataa

SEQ ID NO: 111504 - DNA, 77 bp, Homo sapiens
ttgccattaaaagtgatgtgaataacaatgaaagtgagatatttcatggcaaagttaactggggataaatggtgcac

SEQ ID NO: 111505 - DNA, 77 bp, Homo sapiens
attaaaagtgatgtgaataacaatgaaagtgagatatttcatggcaaagttaactggggataaatggtgcacctgca

SEQ ID NO: 111506 - DNA, 77 bp, Homo sapiens
ttaaaagtgatgtgaataacaatgaaagtgagatatttcatggcaaagttaactggggataaatggtgcacctgcaa

SEQ ID NO: 111507 - DNA, 80 bp, Homo sapiens
aagtgatgtgaataacaatgaaagtgagatatttcatggcaaagttaactggggataaatggtgcacctgcaagcactgc

SEQ ID NO: 111508 - DNA, 79 bp, Homo sapiens
aataacaatgaaagtgagatatttcatggcaaagttaactggggataaatggtgcacctgcaagcactgctggtgagta

SEQ ID NO: 111509 - DNA, 79 bp, Homo sapiens
ataacaatgaaagtgagatatttcatggcaaagttaactggggataaatggtgcacctgcaagcactgctggtgagtat

SEQ ID NO: 111510 - DNA, 79 bp, Homo sapiens
aatgaaagtgagatatttcatggcaaagttaactggggataaatggtgcacctgcaagcactgctggtgagtattcttg

SEQ ID NO: 111511 - DNA, 80 bp, Homo sapiens
tgagatatttcatggcaaagttaactggggataaatggtgcacctgcaagcactgctggtgagtattcttgggacaaaca

SEQ ID NO: 111512 - DNA, 77 bp, Homo sapiens
atatttcatggcaaagttaactggggataaatggtgcacctgcaagcactgctggtgagtattcttgggacaaacag

SEQ ID NO: 111513 - DNA, 77 bp, Homo sapiens
tcatggcaaagttaactggggataaatggtgcacctgcaagcactgctggtgagtattcttgggacaaacagggaaa

SEQ ID NO: 111514 - DNA, 75 bp, Homo sapiens
atggcaaagttaactggggataaatggtgcacctgcaagcactgctggtgagtattcttgggacaaacagggaaa

SEQ ID NO: 111515 - DNA, 73 bp, Homo sapiens
tggggataaatggtgcacctgcaagcactgctggtgagtattcttgggacaaacagggaaagggttaagtagt

SEQ ID NO: 111516 - DNA, 74 bp, Homo sapiens
aatggtgcacctgcaagcactgctggtgagtattcttgggacaaacagggaaagggttaagtagttcaggaata

SEQ ID NO: 111517 - DNA, 73 bp, Homo sapiens
tggtgagtattcttgggacaaacagggaaagggttaagtagttcaggaatagtgaagatgcttcaccttctca

SEQ ID NO: 111518 - DNA, 73 bp, Homo sapiens
aaagggttaagtagttcaggaatagtgaagatgcttcaccttctcaggccttttcctgatcccaagcccatga

SEQ ID NO: 111519 - DNA, 78 bp, Homo sapiens
aagtagttcaggaatagtgaagatgcttcaccttctcaggccttttcctgatcccaagcccatgacacacatgacaat

SEQ ID NO: 111520 - DNA, 80 bp, Homo sapiens
atagtgaagatgcttcaccttctcaggccttttcctgatcccaagcccatgacacacatgacaattgatccaggcaactt

SEQ ID NO: 111521 - DNA, 79 bp, Homo sapiens
agatgcttcaccttctcaggccttttcctgatcccaagcccatgacacacatgacaattgatccaggcaactttcctac

SEQ ID NO: 111522 - DNA, 77 bp, Homo sapiens
ttctcaggccttttcctgatcccaagcccatgacacacatgacaattgatccaggcaactttcctaccgagactcct

SEQ ID NO: 111523 - DNA, 77 bp, Homo sapiens
ttttcctgatcccaagcccatgacacacatgacaattgatccaggcaactttcctaccgagactccttctcaagccc

SEQ ID NO: 111524 - DNA, 77 bp, Homo sapiens
atcccaagcccatgacacacatgacaattgatccaggcaactttcctaccgagactccttctcaagccccagctccg

SEQ ID NO: 111525 - DNA, 79 bp, Homo sapiens
atgacacacatgacaattgatccaggcaactttcctaccgagactccttctcaagccccagctccggggcagtgagaca

SEQ ID NO: 111526 - DNA, 75 bp, Homo sapiens
aattgatccaggcaactttcctaccgagactccttctcaagccccagctccggggcagtgagacagccactacta

SEQ ID NO: 111527 - DNA, 74 bp, Homo sapiens
aggcaactttcctaccgagactccttctcaagccccagctccggggcagtgagacagccactactaattcataa

SEQ ID NO: 111528 - DNA, 76 bp, Homo sapiens
tccttctcaagccccagctccggggcagtgagacagccactactaattcataagagttgtcacttgggataaagta

SEQ ID NO: 111529 - DNA, 72 bp, Homo sapiens
aagccccagctccggggcagtgagacagccactactaattcataagagttgtcacttgggataaagtaaagg

SEQ ID NO: 111530 - DNA, 74 bp, Homo sapiens
agtgagacagccactactaattcataagagttgtcacttgggataaagtaaaggttccatccctggaatagaca

SEQ ID NO: 111531 - DNA, 72 bp, Homo sapiens
ccactactaattcataagagttgtcacttgggataaagtaaaggttccatccctggaatagacatggctctt

SEQ ID NO: 111532 - DNA, 77 bp, Homo sapiens
ttcataagagttgtcacttgggataaagtaaaggttccatccctggaatagacatggctctttgctgtcaactcata

SEQ ID NO: 111533 - DNA, 77 bp, Homo sapiens
ttgtcacttgggataaagtaaaggttccatccctggaatagacatggctctttgctgtcaactcatatgttaatgtc

SEQ ID NO: 111534 - DNA, 76 bp, Homo sapiens
ataaagtaaaggttccatccctggaatagacatggctctttgctgtcaactcatatgttaatgtctggggatcagg

SEQ ID NO: 111535 - DNA, 77 bp, Homo sapiens
aaaggttccatccctggaatagacatggctctttgctgtcaactcatatgttaatgtctggggatcaggtggatccc

SEQ ID NO: 111536 - DNA, 79 bp, Homo sapiens
tggaatagacatggctctttgctgtcaactcatatgttaatgtctggggatcaggtggatccctccgtgggttgaaaca

SEQ ID NO: 111537 - DNA, 76 bp, Homo sapiens
acatggctctttgctgtcaactcatatgttaatgtctggggatcaggtggatccctccgtgggttgaaacagaaaa

SEQ ID NO: 111538 - DNA, 74 bp, Homo sapiens
tttgctgtcaactcatatgttaatgtctggggatcaggtggatccctccgtgggttgaaacagaaaagaactta

SEQ ID NO: 111539 - DNA, 70 bp, Homo sapiens
aactcatatgttaatgtctggggatcaggtggatccctccgtgggttgaaacagaaaagaacttaaaaca

SEQ ID NO: 111540 - DNA, 70 bp, Homo sapiens
taatgtctggggatcaggtggatccctccgtgggttgaaacagaaaagaacttaaaacaacttggcatta

SEQ ID NO: 111541 - DNA, 69 bp, Homo sapiens
atcaggtggatccctccgtgggttgaaacagaaaagaacttaaaacaacttggcattatccataggaaa

SEQ ID NO: 111542 - DNA, 67 bp, Homo sapiens
atccctccgtgggttgaaacagaaaagaacttaaaacaacttggcattatccataggaaaccgagga

SEQ ID NO: 111543 - DNA, 68 bp, Homo sapiens
gttgaaacagaaaagaacttaaaacaacttggcattatccataggaaaccgaggagggtaagcaataa

SEQ ID NO: 111544 - DNA, 69 bp, Homo sapiens
cagaaaagaacttaaaacaacttggcattatccataggaaaccgaggagggtaagcaataaatctacat

SEQ ID NO: 111545 - DNA, 68 bp, Homo sapiens
acttaaaacaacttggcattatccataggaaaccgaggagggtaagcaataaatctacattaataaaa

SEQ ID NO: 111546 - DNA, 70 bp, Homo sapiens
acttggcattatccataggaaaccgaggagggtaagcaataaatctacattaataaaaaaatgccaggag

SEQ ID NO: 111547 - DNA, 68 bp, Homo sapiens
atccataggaaaccgaggagggtaagcaataaatctacattaataaaaaaatgccaggaggggtttca

SEQ ID NO: 111548 - DNA, 68 bp, Homo sapiens
aaccgaggagggtaagcaataaatctacattaataaaaaaatgccaggaggggtttcagcgccctcca

SEQ ID NO: 111549 - DNA, 75 bp, Homo sapiens
taagcaataaatctacattaataaaaaaatgccaggaggggtttcagcgccctccatggccactgcctgtggaca

SEQ ID NO: 111550 - DNA, 78 bp, Homo sapiens
aaaaaatgccaggaggggtttcagcgccctccatggccactgcctgtggacaagagctctgctgactgtcaagtggaa

SEQ ID NO: 111551 - DNA, 81 bp, Homo sapiens
aggaggggtttcagcgccctccatggccactgcctgtggacaagagctctgctgactgtcaagtggaattgatcccatcca

SEQ ID NO: 111552 - DNA, 87 bp, Homo sapiens
tccatggccactgcctgtggacaagagctctgctgactgtcaagtggaattgatcccatccatgtttcatcacttcaacagcgagtg

SEQ ID NO: 111553 - DNA, 86 bp, Homo sapiens
ctgcctgtggacaagagctctgctgactgtcaagtggaattgatcccatccatgtttcatcacttcaacagcgagtggaagcagaa

SEQ ID NO: 111554 - DNA, 85 bp, Homo sapiens
acaagagctctgctgactgtcaagtggaattgatcccatccatgtttcatcacttcaacagcgagtggaagcagaagagcattta

SEQ ID NO: 111555 - DNA, 83 bp, Homo sapiens
aattgatcccatccatgtttcatcacttcaacagcgagtggaagcagaagagcatttatcatcatgaaacagacaagaattct

SEQ ID NO: 111556 - DNA, 82 bp, Homo sapiens
atgtttcatcacttcaacagcgagtggaagcagaagagcatttatcatcatgaaacagacaagaattcttgctaattaccat

SEQ ID NO: 111557 - DNA, 78 bp, Homo sapiens
acttcaacagcgagtggaagcagaagagcatttatcatcatgaaacagacaagaattcttgctaattaccattttgtt

SEQ ID NO: 111558 - DNA, 73 bp, Homo sapiens
tttatcatcatgaaacagacaagaattcttgctaattaccattttgttttaaagtatagtaagatttagggca

SEQ ID NO: 111559 - DNA, 70 bp, Homo sapiens
tgaaacagacaagaattcttgctaattaccattttgttttaaagtatagtaagatttagggcaccctcgc

SEQ ID NO: 111560 - DNA, 69 bp, Homo sapiens
cagacaagaattcttgctaattaccattttgttttaaagtatagtaagatttagggcaccctcgctacc

SEQ ID NO: 111561 - DNA, 68 bp, Homo sapiens
tgctaattaccattttgttttaaagtatagtaagatttagggcaccctcgctaccccaactagcttct

SEQ ID NO: 111562 - DNA, 66 bp, Homo sapiens
attttgttttaaagtatagtaagatttagggcaccctcgctaccccaactagcttctttccttgac

SEQ ID NO: 111563 - DNA, 71 bp, Homo sapiens
taagatttagggcaccctcgctaccccaactagcttctttccttgacttttatgtgggcagtgttgttata

SEQ ID NO: 111564 - DNA, 70 bp, Homo sapiens
ttagggcaccctcgctaccccaactagcttctttccttgacttttatgtgggcagtgttgttataatttc

SEQ ID NO: 111565 - DNA, 72 bp, Homo sapiens
agcttctttccttgacttttatgtgggcagtgttgttataatttctctgttcaaataaagtctgtagaaagc

SEQ ID NO: 111566 - DNA, 72 bp, Homo sapiens
ctttccttgacttttatgtgggcagtgttgttataatttctctgttcaaataaagtctgtagaaagccacaa

SEQ ID NO: 111567 - DNA, 74 bp, Homo sapiens
tttatgtgggcagtgttgttataatttctctgttcaaataaagtctgtagaaagccacaaaaagagatctggac

SEQ ID NO: 111568 - DNA, 71 bp, Homo sapiens
gtgttgttataatttctctgttcaaataaagtctgtagaaagccacaaaaagagatctggaccctaaagct

SEQ ID NO: 111569 - DNA, 70 bp, Homo sapiens
taatttctctgttcaaataaagtctgtagaaagccacaaaaagagatctggaccctaaagcttaacggat

SEQ ID NO: 111570 - DNA, 75 bp, Homo sapiens
aagccacaaaaagagatctggaccctaaagcttaacggattctggaaagcagctggcttgtaacatgagtcattc

SEQ ID NO: 111571 - DNA, 75 bp, Homo sapiens
aaaagagatctggaccctaaagcttaacggattctggaaagcagctggcttgtaacatgagtcattccagccaaa

SEQ ID NO: 111572 - DNA, 73 bp, Homo sapiens
accctaaagcttaacggattctggaaagcagctggcttgtaacatgagtcattccagccaaagctttctcttt

SEQ ID NO: 111573 - DNA, 75 bp, Homo sapiens
aagcttaacggattctggaaagcagctggcttgtaacatgagtcattccagccaaagctttctcttttgtatgtt

SEQ ID NO: 111574 - DNA, 77 bp, Homo sapiens
tggaaagcagctggcttgtaacatgagtcattccagccaaagctttctcttttgtatgtttttctctgacctaaaga

SEQ ID NO: 111575 - DNA, 73 bp, Homo sapiens
ctggcttgtaacatgagtcattccagccaaagctttctcttttgtatgtttttctctgacctaaagagtgggt

SEQ ID NO: 111576 - DNA, 73 bp, Homo sapiens
ttgtaacatgagtcattccagccaaagctttctcttttgtatgtttttctctgacctaaagagtgggttattg

SEQ ID NO: 111577 - DNA, 72 bp, Homo sapiens
agtcattccagccaaagctttctcttttgtatgtttttctctgacctaaagagtgggttattggatgtcttc

SEQ ID NO: 111578 - DNA, 73 bp, Homo sapiens
aaagctttctcttttgtatgtttttctctgacctaaagagtgggttattggatgtcttctggcaggtgctaca

SEQ ID NO: 111579 - DNA, 73 bp, Homo sapiens
ttttgtatgtttttctctgacctaaagagtgggttattggatgtcttctggcaggtgctacaggattaagaag

SEQ ID NO: 111580 - DNA, 75 bp, Homo sapiens
tttttctctgacctaaagagtgggttattggatgtcttctggcaggtgctacaggattaagaaggtagctggtca

SEQ ID NO: 111581 - DNA, 73 bp, Homo sapiens
acctaaagagtgggttattggatgtcttctggcaggtgctacaggattaagaaggtagctggtcagaaacaaa

SEQ ID NO: 111582 - DNA, 67 bp, Homo sapiens
caggtgctacaggattaagaaggtagctggtcagaaacaaactttgaattagggggattttttaaaa

SEQ ID NO: 111583 - DNA, 66 bp, Homo sapiens
gctacaggattaagaaggtagctggtcagaaacaaactttgaattagggggattttttaaaaaata

SEQ ID NO: 111584 - DNA, 71 bp, Homo sapiens
tttaaaaaatagttgactaaagtaaatatgatcgttagcttaatcctccatatctaacgtgagattcaaat

SEQ ID NO: 111585 - DNA, 73 bp, Homo sapiens
agttgactaaagtaaatatgatcgttagcttaatcctccatatctaacgtgagattcaaatttaataggcaag

SEQ ID NO: 111586 - DNA, 72 bp, Homo sapiens
actaaagtaaatatgatcgttagcttaatcctccatatctaacgtgagattcaaatttaataggcaagttta

SEQ ID NO: 111587 - DNA, 75 bp, Homo sapiens
tatgatcgttagcttaatcctccatatctaacgtgagattcaaatttaataggcaagtttaaaaatcggctggca

SEQ ID NO: 111588 - DNA, 76 bp, Homo sapiens
cttaatcctccatatctaacgtgagattcaaatttaataggcaagtttaaaaatcggctggcatgtgcatctatta

SEQ ID NO: 111589 - DNA, 77 bp, Homo sapiens
ctccatatctaacgtgagattcaaatttaataggcaagtttaaaaatcggctggcatgtgcatctattatttgtgta

SEQ ID NO: 111590 - DNA, 77 bp, Homo sapiens
aacgtgagattcaaatttaataggcaagtttaaaaatcggctggcatgtgcatctattatttgtgtatgtgtctgga

SEQ ID NO: 111591 - DNA, 78 bp, Homo sapiens
aaatttaataggcaagtttaaaaatcggctggcatgtgcatctattatttgtgtatgtgtctggatgccttgctccaa

SEQ ID NO: 111592 - DNA, 78 bp, Homo sapiens
aagtttaaaaatcggctggcatgtgcatctattatttgtgtatgtgtctggatgccttgctccaagagtacaggttag

SEQ ID NO: 111593 - DNA, 80 bp, Homo sapiens
taaaaatcggctggcatgtgcatctattatttgtgtatgtgtctggatgccttgctccaagagtacaggttagttgtccg

SEQ ID NO: 111594 - DNA, 80 bp, Homo sapiens
atgtgcatctattatttgtgtatgtgtctggatgccttgctccaagagtacaggttagttgtccgtgatgaaatttccaa

SEQ ID NO: 111595 - DNA, 76 bp, Homo sapiens
tattatttgtgtatgtgtctggatgccttgctccaagagtacaggttagttgtccgtgatgaaatttccaagacct

SEQ ID NO: 111596 - DNA, 77 bp, Homo sapiens
tatgtgtctggatgccttgctccaagagtacaggttagttgtccgtgatgaaatttccaagaccttcctgtttatca

SEQ ID NO: 111597 - DNA, 75 bp, Homo sapiens
gtctggatgccttgctccaagagtacaggttagttgtccgtgatgaaatttccaagaccttcctgtttatcaggc

SEQ ID NO: 111598 - DNA, 73 bp, Homo sapiens
tccaagagtacaggttagttgtccgtgatgaaatttccaagaccttcctgtttatcaggcccagcagtccaaa

SEQ ID NO: 111599 - DNA, 71 bp, Homo sapiens
agtacaggttagttgtccgtgatgaaatttccaagaccttcctgtttatcaggcccagcagtccaaaagcc

SEQ ID NO: 111600 - DNA, 72 bp, Homo sapiens
tagttgtccgtgatgaaatttccaagaccttcctgtttatcaggcccagcagtccaaaagcccaaataccca

SEQ ID NO: 111601 - DNA, 69 bp, Homo sapiens
aaatttccaagaccttcctgtttatcaggcccagcagtccaaaagcccaaatacccacatgacctcctt

SEQ ID NO: 111602 - DNA, 71 bp, Homo sapiens
agaccttcctgtttatcaggcccagcagtccaaaagcccaaatacccacatgacctccttttctaggatta

SEQ ID NO: 111603 - DNA, 73 bp, Homo sapiens
tgtttatcaggcccagcagtccaaaagcccaaatacccacatgacctccttttctaggattatgagagaaaaa

SEQ ID NO: 111604 - DNA, 72 bp, Homo sapiens
ccagcagtccaaaagcccaaatacccacatgacctccttttctaggattatgagagaaaaacaagtagaata

SEQ ID NO: 111605 - DNA, 70 bp, Homo sapiens
agtccaaaagcccaaatacccacatgacctccttttctaggattatgagagaaaaacaagtagaatatta

SEQ ID NO: 111606 - DNA, 71 bp, Homo sapiens
atacccacatgacctccttttctaggattatgagagaaaaacaagtagaatattaataaattacagtggga

SEQ ID NO: 111607 - DNA, 71 bp, Homo sapiens
cacatgacctccttttctaggattatgagagaaaaacaagtagaatattaataaattacagtgggaaatta

SEQ ID NO: 111608 - DNA, 67 bp, Homo sapiens
ccttttctaggattatgagagaaaaacaagtagaatattaataaattacagtgggaaattattcttt

SEQ ID NO: 111609 - DNA, 69 bp, Homo sapiens
gattatgagagaaaaacaagtagaatattaataaattacagtgggaaattattcttttgttaaagtcac

SEQ ID NO: 111610 - DNA, 65 bp, Homo sapiens
acaagtagaatattaataaattacagtgggaaattattcttttgttaaagtcacttttacaaagt

SEQ ID NO: 111611 - DNA, 64 bp, Homo sapiens
atattaataaattacagtgggaaattattcttttgttaaagtcacttttacaaagtttgtaggg

SEQ ID NO: 111612 - DNA, 66 bp, Homo sapiens
ttacagtgggaaattattcttttgttaaagtcacttttacaaagtttgtaggggattccagactat

SEQ ID NO: 111613 - DNA, 68 bp, Homo sapiens
ggaaattattcttttgttaaagtcacttttacaaagtttgtaggggattccagactatttctcacatc

SEQ ID NO: 111614 - DNA, 74 bp, Homo sapiens
agtcacttttacaaagtttgtaggggattccagactatttctcacatctataattctgagccatgataaattaa

SEQ ID NO: 111615 - DNA, 79 bp, Homo sapiens
tgtaggggattccagactatttctcacatctataattctgagccatgataaattaatagatttttgtataactctcaga

SEQ ID NO: 111616 - DNA, 82 bp, Homo sapiens
cagactatttctcacatctataattctgagccatgataaattaatagatttttgtataactctcagatatttctgaagatgc

SEQ ID NO: 111617 - DNA, 80 bp, Homo sapiens
cacatctataattctgagccatgataaattaatagatttttgtataactctcagatatttctgaagatgcttcaggtttc

SEQ ID NO: 111618 - DNA, 79 bp, Homo sapiens
ctataattctgagccatgataaattaatagatttttgtataactctcagatatttctgaagatgcttcaggtttctgaa

SEQ ID NO: 111619 - DNA, 78 bp, Homo sapiens
atttttgtataactctcagatatttctgaagatgcttcaggtttctgaatcattaaggcaagatcgacttgaatggta

SEQ ID NO: 111620 - DNA, 78 bp, Homo sapiens
aactctcagatatttctgaagatgcttcaggtttctgaatcattaaggcaagatcgacttgaatggtatccactttta

SEQ ID NO: 111621 - DNA, 78 bp, Homo sapiens
tatttctgaagatgcttcaggtttctgaatcattaaggcaagatcgacttgaatggtatccacttttagaggtggcga

SEQ ID NO: 111622 - DNA, 77 bp, Homo sapiens
ttcaggtttctgaatcattaaggcaagatcgacttgaatggtatccacttttagaggtggcgactctctcttaatga

SEQ ID NO: 111623 - DNA, 76 bp, Homo sapiens
ttctgaatcattaaggcaagatcgacttgaatggtatccacttttagaggtggcgactctctcttaatgaacaaaa

SEQ ID NO: 111624 - DNA, 73 bp, Homo sapiens
attaaggcaagatcgacttgaatggtatccacttttagaggtggcgactctctcttaatgaacaaaatacttg

SEQ ID NO: 111625 - DNA, 73 bp, Homo sapiens
agatcgacttgaatggtatccacttttagaggtggcgactctctcttaatgaacaaaatacttggattaataa

SEQ ID NO: 111626 - DNA, 70 bp, Homo sapiens
gaatggtatccacttttagaggtggcgactctctcttaatgaacaaaatacttggattaataaaaattag

SEQ ID NO: 111627 - DNA, 70 bp, Homo sapiens
cacttttagaggtggcgactctctcttaatgaacaaaatacttggattaataaaaattagtgacccacag

SEQ ID NO: 111628 - DNA, 73 bp, Homo sapiens
gtggcgactctctcttaatgaacaaaatacttggattaataaaaattagtgacccacaggtttgacatctata

SEQ ID NO: 111629 - DNA, 75 bp, Homo sapiens
ctcttaatgaacaaaatacttggattaataaaaattagtgacccacaggtttgacatctatatggacatatgaca

SEQ ID NO: 111630 - DNA, 81 bp, Homo sapiens
attaataaaaattagtgacccacaggtttgacatctatatggacatatgacataggacatatgtccacatctatatggaca

SEQ ID NO: 111631 - DNA, 89 bp, Homo sapiens
cacaggtttgacatctatatggacatatgacataggacatatgtccacatctatatggacatatgacaaaatctctgagcatgactttg

SEQ ID NO: 111632 - DNA, 88 bp, Homo sapiens
acatctatatggacatatgacataggacatatgtccacatctatatggacatatgacaaaatctctgagcatgactttggacaataat

SEQ ID NO: 111633 - DNA, 87 bp, Homo sapiens
tatatggacatatgacataggacatatgtccacatctatatggacatatgacaaaatctctgagcatgactttggacaataatttaa

SEQ ID NO: 111634 - DNA, 84 bp, Homo sapiens
tatgacataggacatatgtccacatctatatggacatatgacaaaatctctgagcatgactttggacaataatttaaccttgaa

SEQ ID NO: 111635 - DNA, 82 bp, Homo sapiens
acatatgtccacatctatatggacatatgacaaaatctctgagcatgactttggacaataatttaaccttgaagagattcat

SEQ ID NO: 111636 - DNA, 82 bp, Homo sapiens
cacatctatatggacatatgacaaaatctctgagcatgactttggacaataatttaaccttgaagagattcatttacacatc

SEQ ID NO: 111637 - DNA, 82 bp, Homo sapiens
atctctgagcatgactttggacaataatttaaccttgaagagattcatttacacatctatacattgagatgaatgattacac

SEQ ID NO: 111638 - DNA, 83 bp, Homo sapiens
gcatgactttggacaataatttaaccttgaagagattcatttacacatctatacattgagatgaatgattacacttgctgtca

SEQ ID NO: 111639 - DNA, 83 bp, Homo sapiens
gacaataatttaaccttgaagagattcatttacacatctatacattgagatgaatgattacacttgctgtcacagcatggtaa

SEQ ID NO: 111640 - DNA, 81 bp, Homo sapiens
aagagattcatttacacatctatacattgagatgaatgattacacttgctgtcacagcatggtaaagagaaaggaaagtgt

SEQ ID NO: 111641 - DNA, 81 bp, Homo sapiens
tacacatctatacattgagatgaatgattacacttgctgtcacagcatggtaaagagaaaggaaagtgttctcggtgaaaa

SEQ ID NO: 111642 - DNA, 77 bp, Homo sapiens
tatacattgagatgaatgattacacttgctgtcacagcatggtaaagagaaaggaaagtgttctcggtgaaaaccct

SEQ ID NO: 111643 - DNA, 75 bp, Homo sapiens
agatgaatgattacacttgctgtcacagcatggtaaagagaaaggaaagtgttctcggtgaaaaccctttagata

SEQ ID NO: 111644 - DNA, 72 bp, Homo sapiens
attacacttgctgtcacagcatggtaaagagaaaggaaagtgttctcggtgaaaaccctttagatactctaa

SEQ ID NO: 111645 - DNA, 69 bp, Homo sapiens
acagcatggtaaagagaaaggaaagtgttctcggtgaaaaccctttagatactctaaagtagagtagaa

SEQ ID NO: 111646 - DNA, 68 bp, Homo sapiens
tggtaaagagaaaggaaagtgttctcggtgaaaaccctttagatactctaaagtagagtagaaatcag

SEQ ID NO: 111647 - DNA, 68 bp, Homo sapiens
gaaagtgttctcggtgaaaaccctttagatactctaaagtagagtagaaatcaggcgtcagaaaactt

SEQ ID NO: 111648 - DNA, 69 bp, Homo sapiens
ttctcggtgaaaaccctttagatactctaaagtagagtagaaatcaggcgtcagaaaacttttatggta

SEQ ID NO: 111649 - DNA, 70 bp, Homo sapiens
aaccctttagatactctaaagtagagtagaaatcaggcgtcagaaaacttttatggtaaaatgtcagaca

SEQ ID NO: 111650 - DNA, 71 bp, Homo sapiens
agatactctaaagtagagtagaaatcaggcgtcagaaaacttttatggtaaaatgtcagacaataaatatt

SEQ ID NO: 111651 - DNA, 69 bp, Homo sapiens
aaagtagagtagaaatcaggcgtcagaaaacttttatggtaaaatgtcagacaataaatattttaggct

SEQ ID NO: 111652 - DNA, 77 bp, Homo sapiens
ttttaggctttgtgcataaggtttttatcaaaactactcaactctgtcacagcaagaaagcagccatcgataataca

SEQ ID NO: 111653 - DNA, 78 bp, Homo sapiens
ctttgtgcataaggtttttatcaaaactactcaactctgtcacagcaagaaagcagccatcgataatacataaatgaa

SEQ ID NO: 111654 - DNA, 76 bp, Homo sapiens
ataaggtttttatcaaaactactcaactctgtcacagcaagaaagcagccatcgataatacataaatgaacgggca

SEQ ID NO: 111655 - DNA, 79 bp, Homo sapiens
aaaactactcaactctgtcacagcaagaaagcagccatcgataatacataaatgaacgggcatgactgtattccaataa

SEQ ID NO: 111656 - DNA, 81 bp, Homo sapiens
actcaactctgtcacagcaagaaagcagccatcgataatacataaatgaacgggcatgactgtattccaataaggcattat

SEQ ID NO: 111657 - DNA, 80 bp, Homo sapiens
aactctgtcacagcaagaaagcagccatcgataatacataaatgaacgggcatgactgtattccaataaggcattattta

SEQ ID NO: 111658 - DNA, 80 bp, Homo sapiens
tgtcacagcaagaaagcagccatcgataatacataaatgaacgggcatgactgtattccaataaggcattatttacaaaa

SEQ ID NO: 111659 - DNA, 79 bp, Homo sapiens
acagcaagaaagcagccatcgataatacataaatgaacgggcatgactgtattccaataaggcattatttacaaaatca

SEQ ID NO: 111660 - DNA, 77 bp, Homo sapiens
aagaaagcagccatcgataatacataaatgaacgggcatgactgtattccaataaggcattatttacaaaatcaggc

SEQ ID NO: 111661 - DNA, 78 bp, Homo sapiens
aaagcagccatcgataatacataaatgaacgggcatgactgtattccaataaggcattatttacaaaatcaggctcag

SEQ ID NO: 111662 - DNA, 77 bp, Homo sapiens
atcgataatacataaatgaacgggcatgactgtattccaataaggcattatttacaaaatcaggctcaggccagatt

SEQ ID NO: 111663 - DNA, 76 bp, Homo sapiens
aatacataaatgaacgggcatgactgtattccaataaggcattatttacaaaatcaggctcaggccagatttggcc

SEQ ID NO: 111664 - DNA, 75 bp, Homo sapiens
ataaatgaacgggcatgactgtattccaataaggcattatttacaaaatcaggctcaggccagatttggcccacg

SEQ ID NO: 111665 - DNA, 75 bp, Homo sapiens
aacgggcatgactgtattccaataaggcattatttacaaaatcaggctcaggccagatttggcccacggacttca

SEQ ID NO: 111666 - DNA, 75 bp, Homo sapiens
taaggcattatttacaaaatcaggctcaggccagatttggcccacggacttcagtttgctgagccctgatttaaa

SEQ ID NO: 111667 - DNA, 75 bp, Homo sapiens
aaaatcaggctcaggccagatttggcccacggacttcagtttgctgagccctgatttaaacactagttcttgcga

SEQ ID NO: 111668 - DNA, 76 bp, Homo sapiens
ccagatttggcccacggacttcagtttgctgagccctgatttaaacactagttcttgcgatgactgaacaacgtga

SEQ ID NO: 111669 - DNA, 80 bp, Homo sapiens
ttgctgagccctgatttaaacactagttcttgcgatgactgaacaacgtgaacgtccatgttatcgcatgtatacaaaca

SEQ ID NO: 111670 - DNA, 80 bp, Homo sapiens
actagttcttgcgatgactgaacaacgtgaacgtccatgttatcgcatgtatacaaacatactatcccaatatgaataca

SEQ ID NO: 111671 - DNA, 83 bp, Homo sapiens
tgactgaacaacgtgaacgtccatgttatcgcatgtatacaaacatactatcccaatatgaatacacacatctacatcattta

SEQ ID NO: 111672 - DNA, 79 bp, Homo sapiens
aacaacgtgaacgtccatgttatcgcatgtatacaaacatactatcccaatatgaatacacacatctacatcatttacc

SEQ ID NO: 111673 - DNA, 78 bp, Homo sapiens
atcgcatgtatacaaacatactatcccaatatgaatacacacatctacatcatttaccttctttaaaaatgtcctgcc

SEQ ID NO: 111674 - DNA, 75 bp, Homo sapiens
tacaaacatactatcccaatatgaatacacacatctacatcatttaccttctttaaaaatgtcctgccttttgta

SEQ ID NO: 111675 - DNA, 74 bp, Homo sapiens
ctatcccaatatgaatacacacatctacatcatttaccttctttaaaaatgtcctgccttttgtaagccattgg

SEQ ID NO: 111676 - DNA, 71 bp, Homo sapiens
aatacacacatctacatcatttaccttctttaaaaatgtcctgccttttgtaagccattggtacctgtaag

SEQ ID NO: 111677 - DNA, 70 bp, Homo sapiens
acacatctacatcatttaccttctttaaaaatgtcctgccttttgtaagccattggtacctgtaagtaaa

SEQ ID NO: 111678 - DNA, 68 bp, Homo sapiens
atcatttaccttctttaaaaatgtcctgccttttgtaagccattggtacctgtaagtaaataacatta

SEQ ID NO: 111679 - DNA, 69 bp, Homo sapiens
gtaagccattggtacctgtaagtaaataacattatattgggggtctatagatttagttgaattttcacc

SEQ ID NO: 111680 - DNA, 70 bp, Homo sapiens
ggtacctgtaagtaaataacattatattgggggtctatagatttagttgaattttcacccttgccttgca

SEQ ID NO: 111681 - DNA, 69 bp, Homo sapiens
aacattatattgggggtctatagatttagttgaattttcacccttgccttgcagcaaagaaaaaaagtc

SEQ ID NO: 111682 - DNA, 74 bp, Homo sapiens
ggtctatagatttagttgaattttcacccttgccttgcagcaaagaaaaaaagtctgaggcaacacatttgaca

SEQ ID NO: 111683 - DNA, 73 bp, Homo sapiens
atagatttagttgaattttcacccttgccttgcagcaaagaaaaaaagtctgaggcaacacatttgacagttg

SEQ ID NO: 111684 - DNA, 75 bp, Homo sapiens
attttcacccttgccttgcagcaaagaaaaaaagtctgaggcaacacatttgacagttggcccttgcatattata

SEQ ID NO: 111685 - DNA, 75 bp, Homo sapiens
gcaaagaaaaaaagtctgaggcaacacatttgacagttggcccttgcatattataaaatctaatctaaatgagac

SEQ ID NO: 111686 - DNA, 76 bp, Homo sapiens
aaaagtctgaggcaacacatttgacagttggcccttgcatattataaaatctaatctaaatgagaccaacacataa

SEQ ID NO: 111687 - DNA, 77 bp, Homo sapiens
caacacatttgacagttggcccttgcatattataaaatctaatctaaatgagaccaacacataagcacctttataca

SEQ ID NO: 111688 - DNA, 77 bp, Homo sapiens
catttgacagttggcccttgcatattataaaatctaatctaaatgagaccaacacataagcacctttatacatataa

SEQ ID NO: 111689 - DNA, 75 bp, Homo sapiens
ttggcccttgcatattataaaatctaatctaaatgagaccaacacataagcacctttatacatataaatctagtt

SEQ ID NO: 111690 - DNA, 76 bp, Homo sapiens
tataaaatctaatctaaatgagaccaacacataagcacctttatacatataaatctagtttataactgaatatcaa

SEQ ID NO: 111691 - DNA, 75 bp, Homo sapiens
ctaatctaaatgagaccaacacataagcacctttatacatataaatctagtttataactgaatatcaactgagtt

SEQ ID NO: 111692 - DNA, 75 bp, Homo sapiens
aaatgagaccaacacataagcacctttatacatataaatctagtttataactgaatatcaactgagtttattcat

SEQ ID NO: 111693 - DNA, 80 bp, Homo sapiens
ttatacatataaatctagtttataactgaatatcaactgagtttattcattatttgcttttcacagctctgcagacagga

SEQ ID NO: 111694 - DNA, 79 bp, Homo sapiens
catataaatctagtttataactgaatatcaactgagtttattcattatttgcttttcacagctctgcagacaggaagaa

SEQ ID NO: 111695 - DNA, 80 bp, Homo sapiens
tataactgaatatcaactgagtttattcattatttgcttttcacagctctgcagacaggaagaaatggctaccagaataa

SEQ ID NO: 111696 - DNA, 79 bp, Homo sapiens
gtttattcattatttgcttttcacagctctgcagacaggaagaaatggctaccagaataacagcaactctgagaagtta

SEQ ID NO: 111697 - DNA, 79 bp, Homo sapiens
attatttgcttttcacagctctgcagacaggaagaaatggctaccagaataacagcaactctgagaagttattacgaga

SEQ ID NO: 111698 - DNA, 79 bp, Homo sapiens
tcacagctctgcagacaggaagaaatggctaccagaataacagcaactctgagaagttattacgagaggtgaaggttat

SEQ ID NO: 111699 - DNA, 78 bp, Homo sapiens
tctgcagacaggaagaaatggctaccagaataacagcaactctgagaagttattacgagaggtgaaggttattgcaaa

SEQ ID NO: 111700 - DNA, 73 bp, Homo sapiens
agaaatggctaccagaataacagcaactctgagaagttattacgagaggtgaaggttattgcaaagttgagtt

SEQ ID NO: 111701 - DNA, 72 bp, Homo sapiens
ctaccagaataacagcaactctgagaagttattacgagaggtgaaggttattgcaaagttgagtttattaaa

SEQ ID NO: 111702 - DNA, 70 bp, Homo sapiens
aataacagcaactctgagaagttattacgagaggtgaaggttattgcaaagttgagtttattaaagaccc

SEQ ID NO: 111703 - DNA, 70 bp, Homo sapiens
ttattacgagaggtgaaggttattgcaaagttgagtttattaaagaccctcatccccaaattggagagaa

SEQ ID NO: 111704 - DNA, 70 bp, Homo sapiens
gtgaaggttattgcaaagttgagtttattaaagaccctcatccccaaattggagagaagttacaatgaaa

SEQ ID NO: 111705 - DNA, 68 bp, Homo sapiens
ttattgcaaagttgagtttattaaagaccctcatccccaaattggagagaagttacaatgaaaaaaaa

SEQ ID NO: 111706 - DNA, 77 bp, Homo sapiens
aaataataaaacaaagtggagataatgtccagtgatgataagagtggaggcaaaatagccaccgtcatgcactgtgg

SEQ ID NO: 111707 - DNA, 79 bp, Homo sapiens
acaaagtggagataatgtccagtgatgataagagtggaggcaaaatagccaccgtcatgcactgtggggtggaatataa

SEQ ID NO: 111708 - DNA, 82 bp, Homo sapiens
tggagataatgtccagtgatgataagagtggaggcaaaatagccaccgtcatgcactgtggggtggaatataagttggcaca

SEQ ID NO: 111709 - DNA, 79 bp, Homo sapiens
agtgatgataagagtggaggcaaaatagccaccgtcatgcactgtggggtggaatataagttggcacagcctttccaga

SEQ ID NO: 111710 - DNA, 76 bp, Homo sapiens
aggcaaaatagccaccgtcatgcactgtggggtggaatataagttggcacagcctttccagaaagggcaatgtgtc

SEQ ID NO: 111711 - DNA, 73 bp, Homo sapiens
accgtcatgcactgtggggtggaatataagttggcacagcctttccagaaagggcaatgtgtccgtaccaaaa

SEQ ID NO: 111712 - DNA, 70 bp, Homo sapiens
actgtggggtggaatataagttggcacagcctttccagaaagggcaatgtgtccgtaccaaaactcttaa

SEQ ID NO: 111713 - DNA, 70 bp, Homo sapiens
tggaatataagttggcacagcctttccagaaagggcaatgtgtccgtaccaaaactcttaaaaatccttg

SEQ ID NO: 111714 - DNA, 70 bp, Homo sapiens
ttggcacagcctttccagaaagggcaatgtgtccgtaccaaaactcttaaaaatccttgtagcctttgaa

SEQ ID NO: 111715 - DNA, 69 bp, Homo sapiens
aaagggcaatgtgtccgtaccaaaactcttaaaaatccttgtagcctttgaaacagatgtctatttcta

SEQ ID NO: 111716 - DNA, 69 bp, Homo sapiens
ccaaaactcttaaaaatccttgtagcctttgaaacagatgtctatttctaggaacttatcctaaggcag

SEQ ID NO: 111717 - DNA, 74 bp, Homo sapiens
taaaaatccttgtagcctttgaaacagatgtctatttctaggaacttatcctaaggcagtaatcagaaatgcac

SEQ ID NO: 111718 - DNA, 75 bp, Homo sapiens
tagcctttgaaacagatgtctatttctaggaacttatcctaaggcagtaatcagaaatgcacccaaagattatgt

SEQ ID NO: 111719 - DNA, 76 bp, Homo sapiens
aaacagatgtctatttctaggaacttatcctaaggcagtaatcagaaatgcacccaaagattatgttcagagatgt

SEQ ID NO: 111720 - DNA, 79 bp, Homo sapiens
tctatttctaggaacttatcctaaggcagtaatcagaaatgcacccaaagattatgttcagagatgttcattgcaacat

SEQ ID NO: 111721 - DNA, 80 bp, Homo sapiens
gaacttatcctaaggcagtaatcagaaatgcacccaaagattatgttcagagatgttcattgcaacattattatactgaa

SEQ ID NO: 111722 - DNA, 81 bp, Homo sapiens
tcctaaggcagtaatcagaaatgcacccaaagattatgttcagagatgttcattgcaacattattatactgaaacattaga

SEQ ID NO: 111723 - DNA, 80 bp, Homo sapiens
gtaatcagaaatgcacccaaagattatgttcagagatgttcattgcaacattattatactgaaacattagaaacaatcta

SEQ ID NO: 111724 - DNA, 80 bp, Homo sapiens
tgcacccaaagattatgttcagagatgttcattgcaacattattatactgaaacattagaaacaatctaaattatcaaca

SEQ ID NO: 111725 - DNA, 77 bp, Homo sapiens
atgttcagagatgttcattgcaacattattatactgaaacattagaaacaatctaaattatcaacaatttaaggcca

SEQ ID NO: 111726 - DNA, 76 bp, Homo sapiens
cagagatgttcattgcaacattattatactgaaacattagaaacaatctaaattatcaacaatttaaggccattta

SEQ ID NO: 111727 - DNA, 71 bp, Homo sapiens
ttgcaacattattatactgaaacattagaaacaatctaaattatcaacaatttaaggccatttaagtaaac

SEQ ID NO: 111728 - DNA, 71 bp, Homo sapiens
tatactgaaacattagaaacaatctaaattatcaacaatttaaggccatttaagtaaactactgtgttata

SEQ ID NO: 111729 - DNA, 73 bp, Homo sapiens
cattagaaacaatctaaattatcaacaatttaaggccatttaagtaaactactgtgttatagaaattcatgca

SEQ ID NO: 111730 - DNA, 70 bp, Homo sapiens
aattatcaacaatttaaggccatttaagtaaactactgtgttatagaaattcatgcaaaaattaaggtga

SEQ ID NO: 111731 - DNA, 69 bp, Homo sapiens
aactactgtgttatagaaattcatgcaaaaattaaggtgatattttagaagaatttttaatgaataaaa

SEQ ID NO: 111732 - DNA, 73 bp, Homo sapiens
tagaaattcatgcaaaaattaaggtgatattttagaagaatttttaatgaataaaatatattcattcataaca

SEQ ID NO: 111733 - DNA, 72 bp, Homo sapiens
tcatgcaaaaattaaggtgatattttagaagaatttttaatgaataaaatatattcattcataacattttaa

SEQ ID NO: 111734 - DNA, 69 bp, Homo sapiens
tagaagaatttttaatgaataaaatatattcattcataacattttaaaagagacaaaagtagtttacaa

SEQ ID NO: 111735 - DNA, 72 bp, Homo sapiens
tttaatgaataaaatatattcattcataacattttaaaagagacaaaagtagtttacaaagcagcactttga

SEQ ID NO: 111736 - DNA, 74 bp, Homo sapiens
aaaatatattcattcataacattttaaaagagacaaaagtagtttacaaagcagcactttgagtatgatgccaa

SEQ ID NO: 111737 - DNA, 74 bp, Homo sapiens
atattcattcataacattttaaaagagacaaaagtagtttacaaagcagcactttgagtatgatgccaaataaa

SEQ ID NO: 111738 - DNA, 71 bp, Homo sapiens
ataacattttaaaagagacaaaagtagtttacaaagcagcactttgagtatgatgccaaataaaaatacat

SEQ ID NO: 111739 - DNA, 73 bp, Homo sapiens
agagacaaaagtagtttacaaagcagcactttgagtatgatgccaaataaaaatacattttaacattatggaa

SEQ ID NO: 111740 - DNA, 73 bp, Homo sapiens
agtttacaaagcagcactttgagtatgatgccaaataaaaatacattttaacattatggaaaaaaggacatca

SEQ ID NO: 111741 - DNA, 76 bp, Homo sapiens
gcagcactttgagtatgatgccaaataaaaatacattttaacattatggaaaaaaggacatcaaatgataacagga

SEQ ID NO: 111742 - DNA, 72 bp, Homo sapiens
atacattttaacattatggaaaaaaggacatcaaatgataacaggagacctggaataattactaggattatg

SEQ ID NO: 111743 - DNA, 73 bp, Homo sapiens
acattatggaaaaaaggacatcaaatgataacaggagacctggaataattactaggattatgggtcatgttaa

SEQ ID NO: 111744 - DNA, 71 bp, Homo sapiens
aaaaaggacatcaaatgataacaggagacctggaataattactaggattatgggtcatgttaacttcttta

SEQ ID NO: 111745 - DNA, 73 bp, Homo sapiens
tactaggattatgggtcatgttaacttctttaaacatgtctgatgttttaaggttgctccaatgaacttttga

SEQ ID NO: 111746 - DNA, 72 bp, Homo sapiens
atgggtcatgttaacttctttaaacatgtctgatgttttaaggttgctccaatgaacttttgaaataagaca

SEQ ID NO: 111747 - DNA, 70 bp, Homo sapiens
catgttaacttctttaaacatgtctgatgttttaaggttgctccaatgaacttttgaaataagacaaaag

SEQ ID NO: 111748 - DNA, 71 bp, Homo sapiens
tctttaaacatgtctgatgttttaaggttgctccaatgaacttttgaaataagacaaaagtacacataatt

SEQ ID NO: 111749 - DNA, 69 bp, Homo sapiens
tgtctgatgttttaaggttgctccaatgaacttttgaaataagacaaaagtacacataattttaaaaat

SEQ ID NO: 111750 - DNA, 67 bp, Homo sapiens
ttttaaaaattaatatcttagttatcttagttaaccagaatcagctgtactttaattaattggattt

SEQ ID NO: 111751 - DNA, 67 bp, Homo sapiens
tttaaaaattaatatcttagttatcttagttaaccagaatcagctgtactttaattaattggatttt

SEQ ID NO: 111752 - DNA, 68 bp, Homo sapiens
aattaatatcttagttatcttagttaaccagaatcagctgtactttaattaattggattttttaagga

SEQ ID NO: 111753 - DNA, 70 bp, Homo sapiens
ttatcttagttaaccagaatcagctgtactttaattaattggattttttaaggaaatggacaatttcagc

SEQ ID NO: 111754 - DNA, 71 bp, Homo sapiens
gttaaccagaatcagctgtactttaattaattggattttttaaggaaatggacaatttcagctggtatcta

SEQ ID NO: 111755 - DNA, 69 bp, Homo sapiens
cagctgtactttaattaattggattttttaaggaaatggacaatttcagctggtatctaagggtccagt

SEQ ID NO: 111756 - DNA, 70 bp, Homo sapiens
ttaattaattggattttttaaggaaatggacaatttcagctggtatctaagggtccagttttcatgttgc

SEQ ID NO: 111757 - DNA, 74 bp, Homo sapiens
tggattttttaaggaaatggacaatttcagctggtatctaagggtccagttttcatgttgcgtgccatacataa

SEQ ID NO: 111758 - DNA, 76 bp, Homo sapiens
aggaaatggacaatttcagctggtatctaagggtccagttttcatgttgcgtgccatacataatcagtctaatatt

SEQ ID NO: 111759 - DNA, 79 bp, Homo sapiens
atggacaatttcagctggtatctaagggtccagttttcatgttgcgtgccatacataatcagtctaatatttcaatctc

SEQ ID NO: 111760 - DNA, 81 bp, Homo sapiens
tggtatctaagggtccagttttcatgttgcgtgccatacataatcagtctaatatttcaatctcctgcagcaactgaatta

SEQ ID NO: 111761 - DNA, 81 bp, Homo sapiens
cgtgccatacataatcagtctaatatttcaatctcctgcagcaactgaattaaacaatgaaacatcctgcctaggtgtata

SEQ ID NO: 111762 - DNA, 79 bp, Homo sapiens
atacataatcagtctaatatttcaatctcctgcagcaactgaattaaacaatgaaacatcctgcctaggtgtatagttg

SEQ ID NO: 111763 - DNA, 78 bp, Homo sapiens
agtctaatatttcaatctcctgcagcaactgaattaaacaatgaaacatcctgcctaggtgtatagttgttcaggtga

SEQ ID NO: 111764 - DNA, 79 bp, Homo sapiens
aatctcctgcagcaactgaattaaacaatgaaacatcctgcctaggtgtatagttgttcaggtgaggagtagtggcata

SEQ ID NO: 111765 - DNA, 80 bp, Homo sapiens
tgcagcaactgaattaaacaatgaaacatcctgcctaggtgtatagttgttcaggtgaggagtagtggcatagacacact

SEQ ID NO: 111766 - DNA, 78 bp, Homo sapiens
caactgaattaaacaatgaaacatcctgcctaggtgtatagttgttcaggtgaggagtagtggcatagacacacttga

SEQ ID NO: 111767 - DNA, 78 bp, Homo sapiens
tgaattaaacaatgaaacatcctgcctaggtgtatagttgttcaggtgaggagtagtggcatagacacacttgattag

SEQ ID NO: 111768 - DNA, 77 bp, Homo sapiens
ttaaacaatgaaacatcctgcctaggtgtatagttgttcaggtgaggagtagtggcatagacacacttgattaggaa

SEQ ID NO: 111769 - DNA, 77 bp, Homo sapiens
aaacaatgaaacatcctgcctaggtgtatagttgttcaggtgaggagtagtggcatagacacacttgattaggaatc

SEQ ID NO: 111770 - DNA, 77 bp, Homo sapiens
aacatcctgcctaggtgtatagttgttcaggtgaggagtagtggcatagacacacttgattaggaatctggtgactt

SEQ ID NO: 111771 - DNA, 78 bp, Homo sapiens
acatcctgcctaggtgtatagttgttcaggtgaggagtagtggcatagacacacttgattaggaatctggtgactttc

SEQ ID NO: 111772 - DNA, 76 bp, Homo sapiens
cctaggtgtatagttgttcaggtgaggagtagtggcatagacacacttgattaggaatctggtgactttccttcta

SEQ ID NO: 111773 - DNA, 78 bp, Homo sapiens
tgtatagttgttcaggtgaggagtagtggcatagacacacttgattaggaatctggtgactttccttctagtccagga

SEQ ID NO: 111774 - DNA, 78 bp, Homo sapiens
tatagttgttcaggtgaggagtagtggcatagacacacttgattaggaatctggtgactttccttctagtccaggatc

SEQ ID NO: 111775 - DNA, 78 bp, Homo sapiens
ttcaggtgaggagtagtggcatagacacacttgattaggaatctggtgactttccttctagtccaggatcgatactta

SEQ ID NO: 111776 - DNA, 79 bp, Homo sapiens
ggagtagtggcatagacacacttgattaggaatctggtgactttccttctagtccaggatcgatacttagtcatctcta

SEQ ID NO: 111777 - DNA, 78 bp, Homo sapiens
ttgattaggaatctggtgactttccttctagtccaggatcgatacttagtcatctctagccttgggcacatttcataa

SEQ ID NO: 111778 - DNA, 79 bp, Homo sapiens
aatctggtgactttccttctagtccaggatcgatacttagtcatctctagccttgggcacatttcataacgcatgagtc

SEQ ID NO: 111779 - DNA, 81 bp, Homo sapiens
tagtccaggatcgatacttagtcatctctagccttgggcacatttcataacgcatgagtctcagtttccacatatacggaa

SEQ ID NO: 111780 - DNA, 78 bp, Homo sapiens
atacttagtcatctctagccttgggcacatttcataacgcatgagtctcagtttccacatatacggaaaggagataaa

SEQ ID NO: 111781 - DNA, 79 bp, Homo sapiens
tagtcatctctagccttgggcacatttcataacgcatgagtctcagtttccacatatacggaaaggagataaacatccg

SEQ ID NO: 111782 - DNA, 75 bp, Homo sapiens
aacgcatgagtctcagtttccacatatacggaaaggagataaacatccgggctcagcttatctccaaagagttcc

SEQ ID NO: 111783 - DNA, 72 bp, Homo sapiens
agtttccacatatacggaaaggagataaacatccgggctcagcttatctccaaagagttcctgggaaggtca

SEQ ID NO: 111784 - DNA, 76 bp, Homo sapiens
acatatacggaaaggagataaacatccgggctcagcttatctccaaagagttcctgggaaggtcaagcatgatatg

SEQ ID NO: 111785 - DNA, 76 bp, Homo sapiens
aggagataaacatccgggctcagcttatctccaaagagttcctgggaaggtcaagcatgatatggctttctcctta

SEQ ID NO: 111786 - DNA, 76 bp, Homo sapiens
aaacatccgggctcagcttatctccaaagagttcctgggaaggtcaagcatgatatggctttctccttatcagtgg

SEQ ID NO: 111787 - DNA, 73 bp, Homo sapiens
aaagagttcctgggaaggtcaagcatgatatggctttctccttatcagtggttctgaaaacccagaaccataa

SEQ ID NO: 111788 - DNA, 75 bp, Homo sapiens
ttcctgggaaggtcaagcatgatatggctttctccttatcagtggttctgaaaacccagaaccataacatgttaa

SEQ ID NO: 111789 - DNA, 75 bp, Homo sapiens
aggtcaagcatgatatggctttctccttatcagtggttctgaaaacccagaaccataacatgttaagccagggga

SEQ ID NO: 111790 - DNA, 73 bp, Homo sapiens
ttctccttatcagtggttctgaaaacccagaaccataacatgttaagccaggggagccagtagaaaccactgc

SEQ ID NO: 111791 - DNA, 69 bp, Homo sapiens
gttctgaaaacccagaaccataacatgttaagccaggggagccagtagaaaccactgccccatagtttt

SEQ ID NO: 111792 - DNA, 68 bp, Homo sapiens
aaaacccagaaccataacatgttaagccaggggagccagtagaaaccactgccccatagtttttacaa

SEQ ID NO: 111793 - DNA, 71 bp, Homo sapiens
ataacatgttaagccaggggagccagtagaaaccactgccccatagtttttacaatgtgtgcttttggtaa

SEQ ID NO: 111794 - DNA, 72 bp, Homo sapiens
tgttaagccaggggagccagtagaaaccactgccccatagtttttacaatgtgtgcttttggtaacagcaac

SEQ ID NO: 111795 - DNA, 72 bp, Homo sapiens
aaaccactgccccatagtttttacaatgtgtgcttttggtaacagcaacccatgttagcaaatcggagcttc

SEQ ID NO: 111796 - DNA, 74 bp, Homo sapiens
cccatagtttttacaatgtgtgcttttggtaacagcaacccatgttagcaaatcggagcttcctccatgggcac

SEQ ID NO: 111797 - DNA, 76 bp, Homo sapiens
tttttacaatgtgtgcttttggtaacagcaacccatgttagcaaatcggagcttcctccatgggcactgccagggc

SEQ ID NO: 111798 - DNA, 80 bp, Homo sapiens
ggtaacagcaacccatgttagcaaatcggagcttcctccatgggcactgccagggcgtcctcagagctctgctttccagc

SEQ ID NO: 111799 - DNA, 79 bp, Homo sapiens
acccatgttagcaaatcggagcttcctccatgggcactgccagggcgtcctcagagctctgctttccagccacagacgg

SEQ ID NO: 111800 - DNA, 79 bp, Homo sapiens
aaatcggagcttcctccatgggcactgccagggcgtcctcagagctctgctttccagccacagacggggctgagccctc

SEQ ID NO: 111801 - DNA, 82 bp, Homo sapiens
cttcctccatgggcactgccagggcgtcctcagagctctgctttccagccacagacggggctgagccctctctgccgaggca

SEQ ID NO: 111802 - DNA, 79 bp, Homo sapiens
actgccagggcgtcctcagagctctgctttccagccacagacggggctgagccctctctgccgaggcagccgtttactc

SEQ ID NO: 111803 - DNA, 81 bp, Homo sapiens
cgtcctcagagctctgctttccagccacagacggggctgagccctctctgccgaggcagccgtttactcttgtgtgccatg

SEQ ID NO: 111804 - DNA, 81 bp, Homo sapiens
agctctgctttccagccacagacggggctgagccctctctgccgaggcagccgtttactcttgtgtgccatggagccctca

SEQ ID NO: 111805 - DNA, 79 bp, Homo sapiens
tttccagccacagacggggctgagccctctctgccgaggcagccgtttactcttgtgtgccatggagccctcagctccc

SEQ ID NO: 111806 - DNA, 82 bp, Homo sapiens
agccctctctgccgaggcagccgtttactcttgtgtgccatggagccctcagctccctgtaaacatccatcacagcactcac

SEQ ID NO: 111807 - DNA, 85 bp, Homo sapiens
cgtttactcttgtgtgccatggagccctcagctccctgtaaacatccatcacagcactcactgctgcactattgcgacttctctg

SEQ ID NO: 111808 - DNA, 86 bp, Homo sapiens
atggagccctcagctccctgtaaacatccatcacagcactcactgctgcactattgcgacttctctgttcgtctcccttggcagca

SEQ ID NO: 111809 - DNA, 88 bp, Homo sapiens
agctccctgtaaacatccatcacagcactcactgctgcactattgcgacttctctgttcgtctcccttggcagcacatggtgatgctc

SEQ ID NO: 111810 - DNA, 92 bp, Homo sapiens
tgtaaacatccatcacagcactcactgctgcactattgcgacttctctgttcgtctcccttggcagcacatggtgatgctctgatcagagcc

SEQ ID NO: 111811 - DNA, 90 bp, Homo sapiens
atcacagcactcactgctgcactattgcgacttctctgttcgtctcccttggcagcacatggtgatgctctgatcagagcctggtcttcc

SEQ ID NO: 111812 - DNA, 80 bp, Homo sapiens
actattgcgacttctctgttcgtctcccttggcagcacatggtgatgctctgatcagagcctggtcttccctccctgggt

SEQ ID NO: 111813 - DNA, 79 bp, Homo sapiens
acttctctgttcgtctcccttggcagcacatggtgatgctctgatcagagcctggtcttccctccctgggtttcccaca

SEQ ID NO: 111814 - DNA, 80 bp, Homo sapiens
tcgtctcccttggcagcacatggtgatgctctgatcagagcctggtcttccctccctgggtttcccacaaggtctggata

SEQ ID NO: 111815 - DNA, 88 bp, Homo sapiens
ttggcagcacatggtgatgctctgatcagagcctggtcttccctccctgggtttcccacaaggtctggatagcagagcatatgctgca

SEQ ID NO: 111816 - DNA, 85 bp, Homo sapiens
atggtgatgctctgatcagagcctggtcttccctccctgggtttcccacaaggtctggatagcagagcatatgctgcacagccca

SEQ ID NO: 111817 - DNA, 85 bp, Homo sapiens
tctgatcagagcctggtcttccctccctgggtttcccacaaggtctggatagcagagcatatgctgcacagcccacacagctgtc

SEQ ID NO: 111818 - DNA, 80 bp, Homo sapiens
gtcttccctccctgggtttcccacaaggtctggatagcagagcatatgctgcacagcccacacagctgtcctggtaggaa

SEQ ID NO: 111819 - DNA, 81 bp, Homo sapiens
gtttcccacaaggtctggatagcagagcatatgctgcacagcccacacagctgtcctggtaggaactgaggaaacaaggaa

SEQ ID NO: 111820 - DNA, 82 bp, Homo sapiens
agcatatgctgcacagcccacacagctgtcctggtaggaactgaggaaacaaggaagggagtgcactcaactcttgacagat

SEQ ID NO: 111821 - DNA, 80 bp, Homo sapiens
tgcacagcccacacagctgtcctggtaggaactgaggaaacaaggaagggagtgcactcaactcttgacagatttggaga

SEQ ID NO: 111822 - DNA, 75 bp, Homo sapiens
acacagctgtcctggtaggaactgaggaaacaaggaagggagtgcactcaactcttgacagatttggagaagagg

SEQ ID NO: 111823 - DNA, 75 bp, Homo sapiens
tgtcctggtaggaactgaggaaacaaggaagggagtgcactcaactcttgacagatttggagaagagggagagaa

SEQ ID NO: 111824 - DNA, 76 bp, Homo sapiens
aactgaggaaacaaggaagggagtgcactcaactcttgacagatttggagaagagggagagaaaacagctgatgga

SEQ ID NO: 111825 - DNA, 77 bp, Homo sapiens
aaacaaggaagggagtgcactcaactcttgacagatttggagaagagggagagaaaacagctgatggagaagaggca

SEQ ID NO: 111826 - DNA, 81 bp, Homo sapiens
gtgcactcaactcttgacagatttggagaagagggagagaaaacagctgatggagaagaggcagcaacgtggagtgaataa

SEQ ID NO: 111827 - DNA, 78 bp, Homo sapiens
aactcttgacagatttggagaagagggagagaaaacagctgatggagaagaggcagcaacgtggagtgaataagcgcg

SEQ ID NO: 111828 - DNA, 81 bp, Homo sapiens
atttggagaagagggagagaaaacagctgatggagaagaggcagcaacgtggagtgaataagcgcggagatgctgaagtca

SEQ ID NO: 111829 - DNA, 81 bp, Homo sapiens
aaaacagctgatggagaagaggcagcaacgtggagtgaataagcgcggagatgctgaagtcaaactgcccaggttcattca

SEQ ID NO: 111830 - DNA, 82 bp, Homo sapiens
tggagaagaggcagcaacgtggagtgaataagcgcggagatgctgaagtcaaactgcccaggttcattcaccagctctgcct

SEQ ID NO: 111831 - DNA, 79 bp, Homo sapiens
aagaggcagcaacgtggagtgaataagcgcggagatgctgaagtcaaactgcccaggttcattcaccagctctgccttt

SEQ ID NO: 111832 - DNA, 81 bp, Homo sapiens
aataagcgcggagatgctgaagtcaaactgcccaggttcattcaccagctctgccttttcctggctgtgagatcctgggca

SEQ ID NO: 111833 - DNA, 78 bp, Homo sapiens
atgctgaagtcaaactgcccaggttcattcaccagctctgccttttcctggctgtgagatcctgggcacgttcctaaa

SEQ ID NO: 111834 - DNA, 73 bp, Homo sapiens
aaactgcccaggttcattcaccagctctgccttttcctggctgtgagatcctgggcacgttcctaaatccctt

SEQ ID NO: 111835 - DNA, 75 bp, Homo sapiens
aggttcattcaccagctctgccttttcctggctgtgagatcctgggcacgttcctaaatccctttgcatttcaac

SEQ ID NO: 111836 - DNA, 76 bp, Homo sapiens
attcaccagctctgccttttcctggctgtgagatcctgggcacgttcctaaatccctttgcatttcaacttccaca

SEQ ID NO: 111837 - DNA, 73 bp, Homo sapiens
cttttcctggctgtgagatcctgggcacgttcctaaatccctttgcatttcaacttccacacctgtgacgtgg

SEQ ID NO: 111838 - DNA, 75 bp, Homo sapiens
ctgtgagatcctgggcacgttcctaaatccctttgcatttcaacttccacacctgtgacgtggggatcataatcc

SEQ ID NO: 111839 - DNA, 72 bp, Homo sapiens
ctgggcacgttcctaaatccctttgcatttcaacttccacacctgtgacgtggggatcataatcctacctaa

SEQ ID NO: 111840 - DNA, 72 bp, Homo sapiens
acgttcctaaatccctttgcatttcaacttccacacctgtgacgtggggatcataatcctacctaactcaga

SEQ ID NO: 111841 - DNA, 75 bp, Homo sapiens
aatccctttgcatttcaacttccacacctgtgacgtggggatcataatcctacctaactcagagggttgctgtga

SEQ ID NO: 111842 - DNA, 72 bp, Homo sapiens
atttcaacttccacacctgtgacgtggggatcataatcctacctaactcagagggttgctgtgagggttaaa

SEQ ID NO: 111843 - DNA, 72 bp, Homo sapiens
acacctgtgacgtggggatcataatcctacctaactcagagggttgctgtgagggttaaacttggtaatata

SEQ ID NO: 111844 - DNA, 73 bp, Homo sapiens
tggggatcataatcctacctaactcagagggttgctgtgagggttaaacttggtaatatatgggaagtgctta

SEQ ID NO: 111845 - DNA, 73 bp, Homo sapiens
atcataatcctacctaactcagagggttgctgtgagggttaaacttggtaatatatgggaagtgcttagaata

SEQ ID NO: 111846 - DNA, 74 bp, Homo sapiens
taactcagagggttgctgtgagggttaaacttggtaatatatgggaagtgcttagaatagacaccacataataa

SEQ ID NO: 111847 - DNA, 72 bp, Homo sapiens
gggttgctgtgagggttaaacttggtaatatatgggaagtgcttagaatagacaccacataataattaataa

SEQ ID NO: 111848 - DNA, 72 bp, Homo sapiens
aggatatttaggtgttagctttcttccccttgtttttggtatgagaagctcttgagcatatttaggagacaa

SEQ ID NO: 111849 - DNA, 72 bp, Homo sapiens
atttaggtgttagctttcttccccttgtttttggtatgagaagctcttgagcatatttaggagacaagagaa

SEQ ID NO: 111850 - DNA, 74 bp, Homo sapiens
ttcttccccttgtttttggtatgagaagctcttgagcatatttaggagacaagagaatgtttaccatgggataa

SEQ ID NO: 111851 - DNA, 75 bp, Homo sapiens
tgtttttggtatgagaagctcttgagcatatttaggagacaagagaatgtttaccatgggataatgggtttggaa

SEQ ID NO: 111852 - DNA, 78 bp, Homo sapiens
tcttgagcatatttaggagacaagagaatgtttaccatgggataatgggtttggaaggatgaaggctgctttatcaca

SEQ ID NO: 111853 - DNA, 74 bp, Homo sapiens
atatttaggagacaagagaatgtttaccatgggataatgggtttggaaggatgaaggctgctttatcacagaag

SEQ ID NO: 111854 - DNA, 74 bp, Homo sapiens
aagagaatgtttaccatgggataatgggtttggaaggatgaaggctgctttatcacagaaggtgctttatggta

SEQ ID NO: 111855 - DNA, 72 bp, Homo sapiens
aatgtttaccatgggataatgggtttggaaggatgaaggctgctttatcacagaaggtgctttatggtaaaa

SEQ ID NO: 111856 - DNA, 71 bp, Homo sapiens
ataatgggtttggaaggatgaaggctgctttatcacagaaggtgctttatggtaaaagaaactcgtcctac

SEQ ID NO: 111857 - DNA, 73 bp, Homo sapiens
tttggaaggatgaaggctgctttatcacagaaggtgctttatggtaaaagaaactcgtcctactcgccaataa

SEQ ID NO: 111858 - DNA, 77 bp, Homo sapiens
atgaaggctgctttatcacagaaggtgctttatggtaaaagaaactcgtcctactcgccaataatgagatacaatga

SEQ ID NO: 111859 - DNA, 77 bp, Homo sapiens
tttatcacagaaggtgctttatggtaaaagaaactcgtcctactcgccaataatgagatacaatgatgccagtggtg

SEQ ID NO: 111860 - DNA, 75 bp, Homo sapiens
agaaggtgctttatggtaaaagaaactcgtcctactcgccaataatgagatacaatgatgccagtggtggaagag

SEQ ID NO: 111861 - DNA, 77 bp, Homo sapiens
tttatggtaaaagaaactcgtcctactcgccaataatgagatacaatgatgccagtggtggaagaggtggtggctga

SEQ ID NO: 111862 - DNA, 79 bp, Homo sapiens
aaactcgtcctactcgccaataatgagatacaatgatgccagtggtggaagaggtggtggctgaggtgcgaacatcaaa

SEQ ID NO: 111863 - DNA, 83 bp, Homo sapiens
caataatgagatacaatgatgccagtggtggaagaggtggtggctgaggtgcgaacatcaaacacagccactcataacaagta

SEQ ID NO: 111864 - DNA, 82 bp, Homo sapiens
aataatgagatacaatgatgccagtggtggaagaggtggtggctgaggtgcgaacatcaaacacagccactcataacaagta

SEQ ID NO: 111865 - DNA, 80 bp, Homo sapiens
atacaatgatgccagtggtggaagaggtggtggctgaggtgcgaacatcaaacacagccactcataacaagtactagaaa

SEQ ID NO: 111866 - DNA, 78 bp, Homo sapiens
agtggtggaagaggtggtggctgaggtgcgaacatcaaacacagccactcataacaagtactagaaaactcatctcag

SEQ ID NO: 111867 - DNA, 80 bp, Homo sapiens
aagaggtggtggctgaggtgcgaacatcaaacacagccactcataacaagtactagaaaactcatctcaggctttgatca

SEQ ID NO: 111868 - DNA, 83 bp, Homo sapiens
tggctgaggtgcgaacatcaaacacagccactcataacaagtactagaaaactcatctcaggctttgatcatgcgaaagtcaa

SEQ ID NO: 111869 - DNA, 82 bp, Homo sapiens
ctgaggtgcgaacatcaaacacagccactcataacaagtactagaaaactcatctcaggctttgatcatgcgaaagtcaatg

SEQ ID NO: 111870 - DNA, 82 bp, Homo sapiens
gtgcgaacatcaaacacagccactcataacaagtactagaaaactcatctcaggctttgatcatgcgaaagtcaatggccta

SEQ ID NO: 111871 - DNA, 80 bp, Homo sapiens
aaacacagccactcataacaagtactagaaaactcatctcaggctttgatcatgcgaaagtcaatggcctactaggcata

SEQ ID NO: 111872 - DNA, 80 bp, Homo sapiens
aagtactagaaaactcatctcaggctttgatcatgcgaaagtcaatggcctactaggcatacttagtgatcacataggaa

SEQ ID NO: 111873 - DNA, 81 bp, Homo sapiens
aggctttgatcatgcgaaagtcaatggcctactaggcatacttagtgatcacataggaaggaggaagcaaaggagcatctg

SEQ ID NO: 111874 - DNA, 81 bp, Homo sapiens
atgcgaaagtcaatggcctactaggcatacttagtgatcacataggaaggaggaagcaaaggagcatctgttgagtgctta

SEQ ID NO: 111875 - DNA, 79 bp, Homo sapiens
aaagtcaatggcctactaggcatacttagtgatcacataggaaggaggaagcaaaggagcatctgttgagtgcttactg

SEQ ID NO: 111876 - DNA, 79 bp, Homo sapiens
cctactaggcatacttagtgatcacataggaaggaggaagcaaaggagcatctgttgagtgcttactgtgttccaggcc

SEQ ID NO: 111877 - DNA, 79 bp, Homo sapiens
atacttagtgatcacataggaaggaggaagcaaaggagcatctgttgagtgcttactgtgttccaggccctggactaga

SEQ ID NO: 111878 - DNA, 77 bp, Homo sapiens
atcacataggaaggaggaagcaaaggagcatctgttgagtgcttactgtgttccaggccctggactagaagagaact

SEQ ID NO: 111879 - DNA, 80 bp, Homo sapiens
aggaagcaaaggagcatctgttgagtgcttactgtgttccaggccctggactagaagagaacttgacttgcatcatctcc

SEQ ID NO: 111880 - DNA, 79 bp, Homo sapiens
aaaggagcatctgttgagtgcttactgtgttccaggccctggactagaagagaacttgacttgcatcatctcccactaa

SEQ ID NO: 111881 - DNA, 78 bp, Homo sapiens
ttgagtgcttactgtgttccaggccctggactagaagagaacttgacttgcatcatctcccactaacttcacaagaac

SEQ ID NO: 111882 - DNA, 78 bp, Homo sapiens
ttactgtgttccaggccctggactagaagagaacttgacttgcatcatctcccactaacttcacaagaactctatgga

SEQ ID NO: 111883 - DNA, 76 bp, Homo sapiens
aggccctggactagaagagaacttgacttgcatcatctcccactaacttcacaagaactctatggagtaagcgttg

SEQ ID NO: 111884 - DNA, 75 bp, Homo sapiens
ctagaagagaacttgacttgcatcatctcccactaacttcacaagaactctatggagtaagcgttgtccctgttt

SEQ ID NO: 111885 - DNA, 76 bp, Homo sapiens
agagaacttgacttgcatcatctcccactaacttcacaagaactctatggagtaagcgttgtccctgttttacaga

SEQ ID NO: 111886 - DNA, 74 bp, Homo sapiens
acttgcatcatctcccactaacttcacaagaactctatggagtaagcgttgtccctgttttacagacaacaaaa

SEQ ID NO: 111887 - DNA, 74 bp, Homo sapiens
tctcccactaacttcacaagaactctatggagtaagcgttgtccctgttttacagacaacaaaactgagattca

SEQ ID NO: 111888 - DNA, 75 bp, Homo sapiens
aactctatggagtaagcgttgtccctgttttacagacaacaaaactgagattcagagaggtggacaggtcactca

SEQ ID NO: 111889 - DNA, 74 bp, Homo sapiens
agtaagcgttgtccctgttttacagacaacaaaactgagattcagagaggtggacaggtcactcaaggtcaaga

SEQ ID NO: 111890 - DNA, 80 bp, Homo sapiens
tgagattcagagaggtggacaggtcactcaaggtcaagagctagttaatgacagggcagagagttaagcctcagtcttta

SEQ ID NO: 111891 - DNA, 77 bp, Homo sapiens
actcaaggtcaagagctagttaatgacagggcagagagttaagcctcagtctttatgactccagtgtacaagttgtc

SEQ ID NO: 111892 - DNA, 78 bp, Homo sapiens
aagagctagttaatgacagggcagagagttaagcctcagtctttatgactccagtgtacaagttgtcctgcaccacac

SEQ ID NO: 111893 - DNA, 82 bp, Homo sapiens
taatgacagggcagagagttaagcctcagtctttatgactccagtgtacaagttgtcctgcaccacactctgcagcccagta

SEQ ID NO: 111894 - DNA, 80 bp, Homo sapiens
agagttaagcctcagtctttatgactccagtgtacaagttgtcctgcaccacactctgcagcccagtagcaattacagaa

SEQ ID NO: 111895 - DNA, 81 bp, Homo sapiens
tttatgactccagtgtacaagttgtcctgcaccacactctgcagcccagtagcaattacagaaattatcaaatgtgtattg

SEQ ID NO: 111896 - DNA, 79 bp, Homo sapiens
tgtacaagttgtcctgcaccacactctgcagcccagtagcaattacagaaattatcaaatgtgtattgggtgacctttg

SEQ ID NO: 111897 - DNA, 80 bp, Homo sapiens
tcctgcaccacactctgcagcccagtagcaattacagaaattatcaaatgtgtattgggtgacctttgttgtgagtttca

SEQ ID NO: 111898 - DNA, 77 bp, Homo sapiens
acactctgcagcccagtagcaattacagaaattatcaaatgtgtattgggtgacctttgttgtgagtttcatttcat

SEQ ID NO: 111899 - DNA, 77 bp, Homo sapiens
agcaattacagaaattatcaaatgtgtattgggtgacctttgttgtgagtttcatttcattatgatagtatacttga

SEQ ID NO: 111900 - DNA, 77 bp, Homo sapiens
gaaattatcaaatgtgtattgggtgacctttgttgtgagtttcatttcattatgatagtatacttgatacatgttat

SEQ ID NO: 111901 - DNA, 77 bp, Homo sapiens
gtgtattgggtgacctttgttgtgagtttcatttcattatgatagtatacttgatacatgttattttaggcttcaga

SEQ ID NO: 111902 - DNA, 75 bp, Homo sapiens
gggtgacctttgttgtgagtttcatttcattatgatagtatacttgatacatgttattttaggcttcagaactac

SEQ ID NO: 111903 - DNA, 78 bp, Homo sapiens
tgttgtgagtttcatttcattatgatagtatacttgatacatgttattttaggcttcagaactactcaagtagcctgg

SEQ ID NO: 111904 - DNA, 77 bp, Homo sapiens
tttcattatgatagtatacttgatacatgttattttaggcttcagaactactcaagtagcctggtcacctaataaca

SEQ ID NO: 111905 - DNA, 76 bp, Homo sapiens
ttatgatagtatacttgatacatgttattttaggcttcagaactactcaagtagcctggtcacctaataacagctt

SEQ ID NO: 111906 - DNA, 73 bp, Homo sapiens
atacttgatacatgttattttaggcttcagaactactcaagtagcctggtcacctaataacagctttggaaaa

SEQ ID NO: 111907 - DNA, 72 bp, Homo sapiens
atgttattttaggcttcagaactactcaagtagcctggtcacctaataacagctttggaaaacgctgaagag

SEQ ID NO: 111908 - DNA, 73 bp, Homo sapiens
aactactcaagtagcctggtcacctaataacagctttggaaaacgctgaagagtccatcaatgggaaagagac

SEQ ID NO: 111909 - DNA, 73 bp, Homo sapiens
gtagcctggtcacctaataacagctttggaaaacgctgaagagtccatcaatgggaaagagaccaaatgggga

SEQ ID NO: 111910 - DNA, 76 bp, Homo sapiens
taataacagctttggaaaacgctgaagagtccatcaatgggaaagagaccaaatggggatgctgggcataatggaa

SEQ ID NO: 111911 - DNA, 76 bp, Homo sapiens
ctgaagagtccatcaatgggaaagagaccaaatggggatgctgggcataatggaaacaatgcttgttttgcagttt

SEQ ID NO: 111912 - DNA, 77 bp, Homo sapiens
catcaatgggaaagagaccaaatggggatgctgggcataatggaaacaatgcttgttttgcagttttgcctaagaca

SEQ ID NO: 111913 - DNA, 75 bp, Homo sapiens
aaatggggatgctgggcataatggaaacaatgcttgttttgcagttttgcctaagacaggccttggatatggtta

SEQ ID NO: 111914 - DNA, 77 bp, Homo sapiens
atgctgggcataatggaaacaatgcttgttttgcagttttgcctaagacaggccttggatatggttagctatatttc

SEQ ID NO: 111915 - DNA, 76 bp, Homo sapiens
taatggaaacaatgcttgttttgcagttttgcctaagacaggccttggatatggttagctatatttccactgctgt

SEQ ID NO: 111916 - DNA, 78 bp, Homo sapiens
acaatgcttgttttgcagttttgcctaagacaggccttggatatggttagctatatttccactgctgtttctctgcaa

SEQ ID NO: 111917 - DNA, 80 bp, Homo sapiens
ttgcctaagacaggccttggatatggttagctatatttccactgctgtttctctgcaacccaacatgccattgtcttcag

SEQ ID NO: 111918 - DNA, 82 bp, Homo sapiens
aggccttggatatggttagctatatttccactgctgtttctctgcaacccaacatgccattgtcttcagtgctctctgcttc

SEQ ID NO: 111919 - DNA, 82 bp, Homo sapiens
atatggttagctatatttccactgctgtttctctgcaacccaacatgccattgtcttcagtgctctctgcttcccttgcgcg

SEQ ID NO: 111920 - DNA, 82 bp, Homo sapiens
tatatttccactgctgtttctctgcaacccaacatgccattgtcttcagtgctctctgcttcccttgcgcgtggggtgtgac

SEQ ID NO: 111921 - DNA, 82 bp, Homo sapiens
tgtttctctgcaacccaacatgccattgtcttcagtgctctctgcttcccttgcgcgtggggtgtgactgcaaggtgaagtg

SEQ ID NO: 111922 - DNA, 83 bp, Homo sapiens
caacccaacatgccattgtcttcagtgctctctgcttcccttgcgcgtggggtgtgactgcaaggtgaagtggctgatctaga

SEQ ID NO: 111923 - DNA, 82 bp, Homo sapiens
aacatgccattgtcttcagtgctctctgcttcccttgcgcgtggggtgtgactgcaaggtgaagtggctgatctagaacaaa

SEQ ID NO: 111924 - DNA, 82 bp, Homo sapiens
ttcagtgctctctgcttcccttgcgcgtggggtgtgactgcaaggtgaagtggctgatctagaacaaaggttgcaggacata

SEQ ID NO: 111925 - DNA, 81 bp, Homo sapiens
tctgcttcccttgcgcgtggggtgtgactgcaaggtgaagtggctgatctagaacaaaggttgcaggacatacacagcttc

SEQ ID NO: 111926 - DNA, 80 bp, Homo sapiens
tcccttgcgcgtggggtgtgactgcaaggtgaagtggctgatctagaacaaaggttgcaggacatacacagcttcttgta

SEQ ID NO: 111927 - DNA, 82 bp, Homo sapiens
ggtgtgactgcaaggtgaagtggctgatctagaacaaaggttgcaggacatacacagcttcttgtagacagcttctctccta

SEQ ID NO: 111928 - DNA, 80 bp, Homo sapiens
actgcaaggtgaagtggctgatctagaacaaaggttgcaggacatacacagcttcttgtagacagcttctctcctaaaga

SEQ ID NO: 111929 - DNA, 80 bp, Homo sapiens
aagtggctgatctagaacaaaggttgcaggacatacacagcttcttgtagacagcttctctcctaaagagcactggtgag

SEQ ID NO: 111930 - DNA, 79 bp, Homo sapiens
tctagaacaaaggttgcaggacatacacagcttcttgtagacagcttctctcctaaagagcactggtgagtcagttgtt

SEQ ID NO: 111931 - DNA, 80 bp, Homo sapiens
ttgcaggacatacacagcttcttgtagacagcttctctcctaaagagcactggtgagtcagttgtttggggcttgagtaa

SEQ ID NO: 111932 - DNA, 76 bp, Homo sapiens
atacacagcttcttgtagacagcttctctcctaaagagcactggtgagtcagttgtttggggcttgagtaaagctt

SEQ ID NO: 111933 - DNA, 72 bp, Homo sapiens
acagcttctctcctaaagagcactggtgagtcagttgtttggggcttgagtaaagctttctattaaaataaa

SEQ ID NO: 111934 - DNA, 71 bp, Homo sapiens
tctcctaaagagcactggtgagtcagttgtttggggcttgagtaaagctttctattaaaataaagttacag

SEQ ID NO: 111935 - DNA, 68 bp, Homo sapiens
actggtgagtcagttgtttggggcttgagtaaagctttctattaaaataaagttacagtgggaataag

SEQ ID NO: 111936 - DNA, 69 bp, Homo sapiens
gtcagttgtttggggcttgagtaaagctttctattaaaataaagttacagtgggaataaggcttatgga

SEQ ID NO: 111937 - DNA, 70 bp, Homo sapiens
gcttgagtaaagctttctattaaaataaagttacagtgggaataaggcttatggaatagcccaggcccat

SEQ ID NO: 111938 - DNA, 69 bp, Homo sapiens
taaagctttctattaaaataaagttacagtgggaataaggcttatggaatagcccaggcccattggagt

SEQ ID NO: 111939 - DNA, 69 bp, Homo sapiens
ttaaaataaagttacagtgggaataaggcttatggaatagcccaggcccattggagtttgttttgccca

SEQ ID NO: 111940 - DNA, 71 bp, Homo sapiens
taaagttacagtgggaataaggcttatggaatagcccaggcccattggagtttgttttgcccaccatacgc

SEQ ID NO: 111941 - DNA, 74 bp, Homo sapiens
aataaggcttatggaatagcccaggcccattggagtttgttttgcccaccatacgccagctgcagaagtaattg

SEQ ID NO: 111942 - DNA, 76 bp, Homo sapiens
cttatggaatagcccaggcccattggagtttgttttgcccaccatacgccagctgcagaagtaattggagatctgg

SEQ ID NO: 111943 - DNA, 75 bp, Homo sapiens
atagcccaggcccattggagtttgttttgcccaccatacgccagctgcagaagtaattggagatctgggtcctaa

SEQ ID NO: 111944 - DNA, 78 bp, Homo sapiens
ttggagtttgttttgcccaccatacgccagctgcagaagtaattggagatctgggtcctaagatgagggactgcatat

SEQ ID NO: 111945 - DNA, 82 bp, Homo sapiens
accatacgccagctgcagaagtaattggagatctgggtcctaagatgagggactgcatattggaggaggaagaagcagcatc

SEQ ID NO: 111946 - DNA, 79 bp, Homo sapiens
ctgcagaagtaattggagatctgggtcctaagatgagggactgcatattggaggaggaagaagcagcatcctctccctt

SEQ ID NO: 111947 - DNA, 77 bp, Homo sapiens
taattggagatctgggtcctaagatgagggactgcatattggaggaggaagaagcagcatcctctccctttcttaaa

SEQ ID NO: 111948 - DNA, 76 bp, Homo sapiens
tgggtcctaagatgagggactgcatattggaggaggaagaagcagcatcctctccctttcttaaactcaggcaaat

SEQ ID NO: 111949 - DNA, 76 bp, Homo sapiens
taagatgagggactgcatattggaggaggaagaagcagcatcctctccctttcttaaactcaggcaaattataaaa

SEQ ID NO: 111950 - DNA, 76 bp, Homo sapiens
tgcatattggaggaggaagaagcagcatcctctccctttcttaaactcaggcaaattataaaataggtacagttca

SEQ ID NO: 111951 - DNA, 72 bp, Homo sapiens
aagaagcagcatcctctccctttcttaaactcaggcaaattataaaataggtacagttcaattccctcatcc

SEQ ID NO: 111952 - DNA, 70 bp, Homo sapiens
cctctccctttcttaaactcaggcaaattataaaataggtacagttcaattccctcatcctgctccttct

SEQ ID NO: 111953 - DNA, 75 bp, Homo sapiens
gcaaattataaaataggtacagttcaattccctcatcctgctccttcttctgcctgaggggacagaacagcctta

SEQ ID NO: 111954 - DNA, 78 bp, Homo sapiens
tacagttcaattccctcatcctgctccttcttctgcctgaggggacagaacagccttaatctgtcctgacccatggtc

SEQ ID NO: 111955 - DNA, 75 bp, Homo sapiens
aattccctcatcctgctccttcttctgcctgaggggacagaacagccttaatctgtcctgacccatggtccaggg

SEQ ID NO: 111956 - DNA, 75 bp, Homo sapiens
ctccttcttctgcctgaggggacagaacagccttaatctgtcctgacccatggtccaggggctagtgtagtcatt

SEQ ID NO: 111957 - DNA, 77 bp, Homo sapiens
tcttctgcctgaggggacagaacagccttaatctgtcctgacccatggtccaggggctagtgtagtcatttgatacc

SEQ ID NO: 111958 - DNA, 74 bp, Homo sapiens
ggacagaacagccttaatctgtcctgacccatggtccaggggctagtgtagtcatttgataccccatttctggg

SEQ ID NO: 111959 - DNA, 74 bp, Homo sapiens
aacagccttaatctgtcctgacccatggtccaggggctagtgtagtcatttgataccccatttctggggcctga

SEQ ID NO: 111960 - DNA, 73 bp, Homo sapiens
tcctgacccatggtccaggggctagtgtagtcatttgataccccatttctggggcctgaagggtccaggtata

SEQ ID NO: 111961 - DNA, 70 bp, Homo sapiens
atggtccaggggctagtgtagtcatttgataccccatttctggggcctgaagggtccaggtataaaggga

SEQ ID NO: 111962 - DNA, 72 bp, Homo sapiens
tgtagtcatttgataccccatttctggggcctgaagggtccaggtataaagggaccaagacaggaatgctgg

SEQ ID NO: 111963 - DNA, 69 bp, Homo sapiens
taccccatttctggggcctgaagggtccaggtataaagggaccaagacaggaatgctggggacctctta

SEQ ID NO: 111964 - DNA, 71 bp, Homo sapiens
tttctggggcctgaagggtccaggtataaagggaccaagacaggaatgctggggacctcttagcacttgcc

SEQ ID NO: 111965 - DNA, 70 bp, Homo sapiens
aggtataaagggaccaagacaggaatgctggggacctcttagcacttgccccaggcccccttccatccag

SEQ ID NO: 111966 - DNA, 74 bp, Homo sapiens
caagacaggaatgctggggacctcttagcacttgccccaggcccccttccatccagggctgtttcatgtccttc

SEQ ID NO: 111967 - DNA, 73 bp, Homo sapiens
aatgctggggacctcttagcacttgccccaggcccccttccatccagggctgtttcatgtccttcccatccaa

SEQ ID NO: 111968 - DNA, 74 bp, Homo sapiens
cctcttagcacttgccccaggcccccttccatccagggctgtttcatgtccttcccatccaagaggctctacat

SEQ ID NO: 111969 - DNA, 73 bp, Homo sapiens
acttgccccaggcccccttccatccagggctgtttcatgtccttcccatccaagaggctctacattagcctac

SEQ ID NO: 111970 - DNA, 76 bp, Homo sapiens
gcccccttccatccagggctgtttcatgtccttcccatccaagaggctctacattagcctactgaagagcctgttg

SEQ ID NO: 111971 - DNA, 80 bp, Homo sapiens
ttccatccagggctgtttcatgtccttcccatccaagaggctctacattagcctactgaagagcctgttgtatcagaatc

SEQ ID NO: 111972 - DNA, 80 bp, Homo sapiens
tgtttcatgtccttcccatccaagaggctctacattagcctactgaagagcctgttgtatcagaatccgtagaatctctg

SEQ ID NO: 111973 - DNA, 78 bp, Homo sapiens
atgtccttcccatccaagaggctctacattagcctactgaagagcctgttgtatcagaatccgtagaatctctgggac

SEQ ID NO: 111974 - DNA, 82 bp, Homo sapiens
aagaggctctacattagcctactgaagagcctgttgtatcagaatccgtagaatctctgggacttgcagtgtgtgcacattg

SEQ ID NO: 111975 - DNA, 84 bp, Homo sapiens
ctctacattagcctactgaagagcctgttgtatcagaatccgtagaatctctgggacttgcagtgtgtgcacattgtgtgtgtg

SEQ ID NO: 111976 - DNA, 82 bp, Homo sapiens
tgtgtgtgtgtgtagctgatacagagtagccaaggcctaggggtgggtggcaggcagagaagctcataaagtgcagagtaag

SEQ ID NO: 111977 - DNA, 79 bp, Homo sapiens
tgtagctgatacagagtagccaaggcctaggggtgggtggcaggcagagaagctcataaagtgcagagtaagggcccaa

SEQ ID NO: 111978 - DNA, 77 bp, Homo sapiens
ctgatacagagtagccaaggcctaggggtgggtggcaggcagagaagctcataaagtgcagagtaagggcccaaaga

SEQ ID NO: 111979 - DNA, 75 bp, Homo sapiens
caaggcctaggggtgggtggcaggcagagaagctcataaagtgcagagtaagggcccaaagagcagtaatgggaa

SEQ ID NO: 111980 - DNA, 72 bp, Homo sapiens
caggcagagaagctcataaagtgcagagtaagggcccaaagagcagtaatgggaagggggtgagggtttaaa

SEQ ID NO: 111981 - DNA, 67 bp, Homo sapiens
ataaagtgcagagtaagggcccaaagagcagtaatgggaagggggtgagggtttaaatggaaaagag

SEQ ID NO: 111982 - DNA, 65 bp, Homo sapiens
agtaagggcccaaagagcagtaatgggaagggggtgagggtttaaatggaaaagaggcaaaaatg

SEQ ID NO: 111983 - DNA, 64 bp, Homo sapiens
aaagagcagtaatgggaagggggtgagggtttaaatggaaaagaggcaaaaatgggagggggtg

SEQ ID NO: 111984 - DNA, 63 bp, Homo sapiens
gtaatgggaagggggtgagggtttaaatggaaaagaggcaaaaatgggagggggtgggaagga

SEQ ID NO: 111985 - DNA, 67 bp, Homo sapiens
tgagggtttaaatggaaaagaggcaaaaatgggagggggtgggaaggagtgggtggagctggcctcc

SEQ ID NO: 111986 - DNA, 70 bp, Homo sapiens
taaatggaaaagaggcaaaaatgggagggggtgggaaggagtgggtggagctggcctccctcagaatcaa

SEQ ID NO: 111987 - DNA, 72 bp, Homo sapiens
aaagaggcaaaaatgggagggggtgggaaggagtgggtggagctggcctccctcagaatcaagctgggctca

SEQ ID NO: 111988 - DNA, 76 bp, Homo sapiens
tgggaaggagtgggtggagctggcctccctcagaatcaagctgggctcacttgtgatttaggaggtatgaagtggg

SEQ ID NO: 111989 - DNA, 76 bp, Homo sapiens
tggcctccctcagaatcaagctgggctcacttgtgatttaggaggtatgaagtggggaatcagtctttgtctacct

SEQ ID NO: 111990 - DNA, 74 bp, Homo sapiens
agaatcaagctgggctcacttgtgatttaggaggtatgaagtggggaatcagtctttgtctaccttctgttccc

SEQ ID NO: 111991 - DNA, 74 bp, Homo sapiens
aagctgggctcacttgtgatttaggaggtatgaagtggggaatcagtctttgtctaccttctgttccctgcacc

SEQ ID NO: 111992 - DNA, 72 bp, Homo sapiens
acttgtgatttaggaggtatgaagtggggaatcagtctttgtctaccttctgttccctgcacccagacctcc

SEQ ID NO: 111993 - DNA, 71 bp, Homo sapiens
tttaggaggtatgaagtggggaatcagtctttgtctaccttctgttccctgcacccagacctcctccactt

SEQ ID NO: 111994 - DNA, 69 bp, Homo sapiens
aagtggggaatcagtctttgtctaccttctgttccctgcacccagacctcctccactttcttagggtaa

SEQ ID NO: 111995 - DNA, 70 bp, Homo sapiens
atcagtctttgtctaccttctgttccctgcacccagacctcctccactttcttagggtaagaaatgcctt

SEQ ID NO: 111996 - DNA, 70 bp, Homo sapiens
ttgtctaccttctgttccctgcacccagacctcctccactttcttagggtaagaaatgcctttgataggg

SEQ ID NO: 111997 - DNA, 68 bp, Homo sapiens
tccctgcacccagacctcctccactttcttagggtaagaaatgcctttgataggggtaaagcctttct

SEQ ID NO: 111998 - DNA, 66 bp, Homo sapiens
acccagacctcctccactttcttagggtaagaaatgcctttgataggggtaaagcctttctttcca

SEQ ID NO: 111999 - DNA, 70 bp, Homo sapiens
tcctccactttcttagggtaagaaatgcctttgataggggtaaagcctttctttccagagtttgagatca

SEQ ID NO: 112000 - DNA, 72 bp, Homo sapiens
tcttagggtaagaaatgcctttgataggggtaaagcctttctttccagagtttgagatcagagacttcaata

SEQ ID NO: 112001 - DNA, 73 bp, Homo sapiens
aagaaatgcctttgataggggtaaagcctttctttccagagtttgagatcagagacttcaatatgcaaagtct

SEQ ID NO: 112002 - DNA, 76 bp, Homo sapiens
tttgataggggtaaagcctttctttccagagtttgagatcagagacttcaatatgcaaagtcttggggtatgctga

SEQ ID NO: 112003 - DNA, 81 bp, Homo sapiens
tttccagagtttgagatcagagacttcaatatgcaaagtcttggggtatgctgacagatcagcacacgtgctttttatatt

SEQ ID NO: 112004 - DNA, 77 bp, Homo sapiens
acagatcagcacacgtgctttttatatttaaataattctcacaacctatgtggcttgtcaggaatgaagaatctaaa

SEQ ID NO: 112005 - DNA, 76 bp, Homo sapiens
cagcacacgtgctttttatatttaaataattctcacaacctatgtggcttgtcaggaatgaagaatctaaagctta

SEQ ID NO: 112006 - DNA, 74 bp, Homo sapiens
ttttatatttaaataattctcacaacctatgtggcttgtcaggaatgaagaatctaaagcttattgtgctaggg

SEQ ID NO: 112007 - DNA, 75 bp, Homo sapiens
atttaaataattctcacaacctatgtggcttgtcaggaatgaagaatctaaagcttattgtgctaggggagctcc

SEQ ID NO: 112008 - DNA, 77 bp, Homo sapiens
ttctcacaacctatgtggcttgtcaggaatgaagaatctaaagcttattgtgctaggggagctccgagtgaacaaag

SEQ ID NO: 112009 - DNA, 76 bp, Homo sapiens
tatgtggcttgtcaggaatgaagaatctaaagcttattgtgctaggggagctccgagtgaacaaagggtgccgaaa

SEQ ID NO: 112010 - DNA, 72 bp, Homo sapiens
aggaatgaagaatctaaagcttattgtgctaggggagctccgagtgaacaaagggtgccgaaaggagagtgg

SEQ ID NO: 112011 - DNA, 70 bp, Homo sapiens
atctaaagcttattgtgctaggggagctccgagtgaacaaagggtgccgaaaggagagtggggggacaat

SEQ ID NO: 112012 - DNA, 74 bp, Homo sapiens
ttattgtgctaggggagctccgagtgaacaaagggtgccgaaaggagagtggggggacaattgcatcatcaatt

SEQ ID NO: 112013 - DNA, 78 bp, Homo sapiens
taggggagctccgagtgaacaaagggtgccgaaaggagagtggggggacaattgcatcatcaatttgcagatgtcaga

SEQ ID NO: 112014 - DNA, 78 bp, Homo sapiens
cgagtgaacaaagggtgccgaaaggagagtggggggacaattgcatcatcaatttgcagatgtcagaatgtcacattt

SEQ ID NO: 112015 - DNA, 76 bp, Homo sapiens
aacaaagggtgccgaaaggagagtggggggacaattgcatcatcaatttgcagatgtcagaatgtcacattttggt

SEQ ID NO: 112016 - DNA, 81 bp, Homo sapiens
gggggacaattgcatcatcaatttgcagatgtcagaatgtcacattttggttagggatcaggctcattttacacacgccta

SEQ ID NO: 112017 - DNA, 78 bp, Homo sapiens
atcaatttgcagatgtcagaatgtcacattttggttagggatcaggctcattttacacacgcctaagcaactggaaaa

SEQ ID NO: 112018 - DNA, 78 bp, Homo sapiens
tgtcagaatgtcacattttggttagggatcaggctcattttacacacgcctaagcaactggaaaacatgagagagtat

SEQ ID NO: 112019 - DNA, 75 bp, Homo sapiens
aatgtcacattttggttagggatcaggctcattttacacacgcctaagcaactggaaaacatgagagagtattgg

SEQ ID NO: 112020 - DNA, 77 bp, Homo sapiens
tggttagggatcaggctcattttacacacgcctaagcaactggaaaacatgagagagtattggggccagttgtgata

SEQ ID NO: 112021 - DNA, 76 bp, Homo sapiens
atcaggctcattttacacacgcctaagcaactggaaaacatgagagagtattggggccagttgtgataggggccaa

SEQ ID NO: 112022 - DNA, 77 bp, Homo sapiens
taagcaactggaaaacatgagagagtattggggccagttgtgataggggccaaggagactgaaatgaggacacctga

SEQ ID NO: 112023 - DNA, 74 bp, Homo sapiens
aaaacatgagagagtattggggccagttgtgataggggccaaggagactgaaatgaggacacctgaggtctact

SEQ ID NO: 112024 - DNA, 75 bp, Homo sapiens
atgagagagtattggggccagttgtgataggggccaaggagactgaaatgaggacacctgaggtctacttttcag

SEQ ID NO: 112025 - DNA, 76 bp, Homo sapiens
ggccagttgtgataggggccaaggagactgaaatgaggacacctgaggtctacttttcaggctatctggtgtgact

SEQ ID NO: 112026 - DNA, 77 bp, Homo sapiens
ttgtgataggggccaaggagactgaaatgaggacacctgaggtctacttttcaggctatctggtgtgactttggata

SEQ ID NO: 112027 - DNA, 74 bp, Homo sapiens
aaggagactgaaatgaggacacctgaggtctacttttcaggctatctggtgtgactttggataagttatttcac

SEQ ID NO: 112028 - DNA, 73 bp, Homo sapiens
actgaaatgaggacacctgaggtctacttttcaggctatctggtgtgactttggataagttatttcacctccg

SEQ ID NO: 112029 - DNA, 72 bp, Homo sapiens
acacctgaggtctacttttcaggctatctggtgtgactttggataagttatttcacctccgtgggccagaag

SEQ ID NO: 112030 - DNA, 76 bp, Homo sapiens
tacttttcaggctatctggtgtgactttggataagttatttcacctccgtgggccagaaggtgctgatctatcaaa

SEQ ID NO: 112031 - DNA, 79 bp, Homo sapiens
ttcaggctatctggtgtgactttggataagttatttcacctccgtgggccagaaggtgctgatctatcaaatgagcagg

SEQ ID NO: 112032 - DNA, 79 bp, Homo sapiens
tccgtgggccagaaggtgctgatctatcaaatgagcagggaacgtgggaactctaagtttgccctgctatgaatcactc

SEQ ID NO: 112033 - DNA, 78 bp, Homo sapiens
aggtgctgatctatcaaatgagcagggaacgtgggaactctaagtttgccctgctatgaatcactctgggtctatgtt

SEQ ID NO: 112034 - DNA, 75 bp, Homo sapiens
atctatcaaatgagcagggaacgtgggaactctaagtttgccctgctatgaatcactctgggtctatgttttggg

SEQ ID NO: 112035 - DNA, 76 bp, Homo sapiens
atgagcagggaacgtgggaactctaagtttgccctgctatgaatcactctgggtctatgttttgggggactgagca

SEQ ID NO: 112036 - DNA, 73 bp, Homo sapiens
aacgtgggaactctaagtttgccctgctatgaatcactctgggtctatgttttgggggactgagcactgggga

SEQ ID NO: 112037 - DNA, 77 bp, Homo sapiens
taagtttgccctgctatgaatcactctgggtctatgttttgggggactgagcactggggagtctgtgttagccatct

SEQ ID NO: 112038 - DNA, 79 bp, Homo sapiens
tgctatgaatcactctgggtctatgttttgggggactgagcactggggagtctgtgttagccatctttcttctcatagt

SEQ ID NO: 112039 - DNA, 77 bp, Homo sapiens
gtctatgttttgggggactgagcactggggagtctgtgttagccatctttcttctcatagttctgtgttctccagtg

SEQ ID NO: 112040 - DNA, 79 bp, Homo sapiens
gggactgagcactggggagtctgtgttagccatctttcttctcatagttctgtgttctccagtgggcttttatcatagc

SEQ ID NO: 112041 - DNA, 77 bp, Homo sapiens
actggggagtctgtgttagccatctttcttctcatagttctgtgttctccagtgggcttttatcatagccgtcttca

SEQ ID NO: 112042 - DNA, 76 bp, Homo sapiens
agtctgtgttagccatctttcttctcatagttctgtgttctccagtgggcttttatcatagccgtcttcaggaaag

SEQ ID NO: 112043 - DNA, 78 bp, Homo sapiens
ttagccatctttcttctcatagttctgtgttctccagtgggcttttatcatagccgtcttcaggaaaggagctgcagg

SEQ ID NO: 112044 - DNA, 78 bp, Homo sapiens
ttcttctcatagttctgtgttctccagtgggcttttatcatagccgtcttcaggaaaggagctgcagggcattcaccc

SEQ ID NO: 112045 - DNA, 76 bp, Homo sapiens
ttctgtgttctccagtgggcttttatcatagccgtcttcaggaaaggagctgcagggcattcacccgggtgcaaag

SEQ ID NO: 112046 - DNA, 75 bp, Homo sapiens
agtgggcttttatcatagccgtcttcaggaaaggagctgcagggcattcacccgggtgcaaaggaccagcagtcc

SEQ ID NO: 112047 - DNA, 77 bp, Homo sapiens
ttttatcatagccgtcttcaggaaaggagctgcagggcattcacccgggtgcaaaggaccagcagtccttccagaga

SEQ ID NO: 112048 - DNA, 74 bp, Homo sapiens
cgtcttcaggaaaggagctgcagggcattcacccgggtgcaaaggaccagcagtccttccagagaaagaagtaa

SEQ ID NO: 112049 - DNA, 72 bp, Homo sapiens
aaaggagctgcagggcattcacccgggtgcaaaggaccagcagtccttccagagaaagaagtaaagtcttta

SEQ ID NO: 112050 - DNA, 70 bp, Homo sapiens
agggcattcacccgggtgcaaaggaccagcagtccttccagagaaagaagtaaagtctttagctaaagaa

SEQ ID NO: 112051 - DNA, 69 bp, Homo sapiens
attcacccgggtgcaaaggaccagcagtccttccagagaaagaagtaaagtctttagctaaagaacaaa

SEQ ID NO: 112052 - DNA, 67 bp, Homo sapiens
aaaggaccagcagtccttccagagaaagaagtaaagtctttagctaaagaacaaagatttaacggtg

SEQ ID NO: 112053 - DNA, 68 bp, Homo sapiens
gagaaagaagtaaagtctttagctaaagaacaaagatttaacggtggaactgtccacttgaattggaa

SEQ ID NO: 112054 - DNA, 69 bp, Homo sapiens
tctttagctaaagaacaaagatttaacggtggaactgtccacttgaattggaagggctggtagctttgg

SEQ ID NO: 112055 - DNA, 69 bp, Homo sapiens
aagaacaaagatttaacggtggaactgtccacttgaattggaagggctggtagctttgggtccagcaag

SEQ ID NO: 112056 - DNA, 72 bp, Homo sapiens
taacggtggaactgtccacttgaattggaagggctggtagctttgggtccagcaagggcaccccagatatta

SEQ ID NO: 112057 - DNA, 73 bp, Homo sapiens
aactgtccacttgaattggaagggctggtagctttgggtccagcaagggcaccccagatattaaatcaatgaa

SEQ ID NO: 112058 - DNA, 74 bp, Homo sapiens
acttgaattggaagggctggtagctttgggtccagcaagggcaccccagatattaaatcaatgaataatatgga

SEQ ID NO: 112059 - DNA, 77 bp, Homo sapiens
gctggtagctttgggtccagcaagggcaccccagatattaaatcaatgaataatatggagagtatagtatattgtta

SEQ ID NO: 112060 - DNA, 77 bp, Homo sapiens
tttgggtccagcaagggcaccccagatattaaatcaatgaataatatggagagtatagtatattgttactggctgaa

SEQ ID NO: 112061 - DNA, 79 bp, Homo sapiens
agcaagggcaccccagatattaaatcaatgaataatatggagagtatagtatattgttactggctgaattgtgcccata

SEQ ID NO: 112062 - DNA, 76 bp, Homo sapiens
cccagatattaaatcaatgaataatatggagagtatagtatattgttactggctgaattgtgcccataccccaaaa

SEQ ID NO: 112063 - DNA, 75 bp, Homo sapiens
attaaatcaatgaataatatggagagtatagtatattgttactggctgaattgtgcccataccccaaaatttata

SEQ ID NO: 112064 - DNA, 74 bp, Homo sapiens
atgaataatatggagagtatagtatattgttactggctgaattgtgcccataccccaaaatttatatttcctgt

SEQ ID NO: 112065 - DNA, 70 bp, Homo sapiens
ggagagtatagtatattgttactggctgaattgtgcccataccccaaaatttatatttcctgtttttgtt

SEQ ID NO: 112066 - DNA, 73 bp, Homo sapiens
cactgcgcctggccccaaattcatatttccaaggcccagcccctagtatctcaaaaggtgaacctggaacaga

SEQ ID NO: 112067 - DNA, 70 bp, Homo sapiens
cctggccccaaattcatatttccaaggcccagcccctagtatctcaaaaggtgaacctggaacagatcct

SEQ ID NO: 112068 - DNA, 72 bp, Homo sapiens
aaattcatatttccaaggcccagcccctagtatctcaaaaggtgaacctggaacagatccttccctcatggc

SEQ ID NO: 112069 - DNA, 74 bp, Homo sapiens
tttccaaggcccagcccctagtatctcaaaaggtgaacctggaacagatccttccctcatggctgtcagaagga

SEQ ID NO: 112070 - DNA, 73 bp, Homo sapiens
ccctagtatctcaaaaggtgaacctggaacagatccttccctcatggctgtcagaaggaaccaaccctgccaa

SEQ ID NO: 112071 - DNA, 77 bp, Homo sapiens
taaatttctgttgcttgagtcctccagtcggtggtactttgcagcctgagcggacgaatgcatatatcttacaaacc

SEQ ID NO: 112072 - DNA, 78 bp, Homo sapiens
ttgcttgagtcctccagtcggtggtactttgcagcctgagcggacgaatgcatatatcttacaaacctttcataagaa

SEQ ID NO: 112073 - DNA, 75 bp, Homo sapiens
agtcctccagtcggtggtactttgcagcctgagcggacgaatgcatatatcttacaaacctttcataagaaatct

SEQ ID NO: 112074 - DNA, 75 bp, Homo sapiens
agtcggtggtactttgcagcctgagcggacgaatgcatatatcttacaaacctttcataagaaatctttcctctg

SEQ ID NO: 112075 - DNA, 76 bp, Homo sapiens
tttgcagcctgagcggacgaatgcatatatcttacaaacctttcataagaaatctttcctctgtaggcccaagtaa

SEQ ID NO: 112076 - DNA, 74 bp, Homo sapiens
ctgagcggacgaatgcatatatcttacaaacctttcataagaaatctttcctctgtaggcccaagtaatttgat

SEQ ID NO: 112077 - DNA, 72 bp, Homo sapiens
agcggacgaatgcatatatcttacaaacctttcataagaaatctttcctctgtaggcccaagtaatttgatt

SEQ ID NO: 112078 - DNA, 72 bp, Homo sapiens
ggacgaatgcatatatcttacaaacctttcataagaaatctttcctctgtaggcccaagtaatttgatttct

SEQ ID NO: 112079 - DNA, 72 bp, Homo sapiens
acaaacctttcataagaaatctttcctctgtaggcccaagtaatttgatttcttagtgtgatctgatatcgt

SEQ ID NO: 112080 - DNA, 73 bp, Homo sapiens
cctttcataagaaatctttcctctgtaggcccaagtaatttgatttcttagtgtgatctgatatcgtttgaat

SEQ ID NO: 112081 - DNA, 75 bp, Homo sapiens
cataagaaatctttcctctgtaggcccaagtaatttgatttcttagtgtgatctgatatcgtttgaattatcact

SEQ ID NO: 112082 - DNA, 74 bp, Homo sapiens
gaaatctttcctctgtaggcccaagtaatttgatttcttagtgtgatctgatatcgtttgaattatcacttaac

SEQ ID NO: 112083 - DNA, 74 bp, Homo sapiens
tctttcctctgtaggcccaagtaatttgatttcttagtgtgatctgatatcgtttgaattatcacttaacttgg

SEQ ID NO: 112084 - DNA, 73 bp, Homo sapiens
tttcctctgtaggcccaagtaatttgatttcttagtgtgatctgatatcgtttgaattatcacttaacttggg

SEQ ID NO: 112085 - DNA, 76 bp, Homo sapiens
tgatttcttagtgtgatctgatatcgtttgaattatcacttaacttgggggaattaaataaggcactctggacata

SEQ ID NO: 112086 - DNA, 77 bp, Homo sapiens
tcttagtgtgatctgatatcgtttgaattatcacttaacttgggggaattaaataaggcactctggacatacgcagc

SEQ ID NO: 112087 - DNA, 72 bp, Homo sapiens
atatcgtttgaattatcacttaacttgggggaattaaataaggcactctggacatacgcagcccctcaggaa

SEQ ID NO: 112088 - DNA, 73 bp, Homo sapiens
tttgaattatcacttaacttgggggaattaaataaggcactctggacatacgcagcccctcaggaacacagct

SEQ ID NO: 112089 - DNA, 73 bp, Homo sapiens
acttaacttgggggaattaaataaggcactctggacatacgcagcccctcaggaacacagcttggtgagtgga

SEQ ID NO: 112090 - DNA, 77 bp, Homo sapiens
gaattaaataaggcactctggacatacgcagcccctcaggaacacagcttggtgagtggatgatccttttgtttgaa

SEQ ID NO: 112091 - DNA, 74 bp, Homo sapiens
ctctggacatacgcagcccctcaggaacacagcttggtgagtggatgatccttttgtttgaaaaaggtgcccct

SEQ ID NO: 112092 - DNA, 74 bp, Homo sapiens
aggaacacagcttggtgagtggatgatccttttgtttgaaaaaggtgccccttcctctacgcagtcacacctca

SEQ ID NO: 112093 - DNA, 72 bp, Homo sapiens
agcttggtgagtggatgatccttttgtttgaaaaaggtgccccttcctctacgcagtcacacctcaccctgg

SEQ ID NO: 112094 - DNA, 71 bp, Homo sapiens
ttttgtttgaaaaaggtgccccttcctctacgcagtcacacctcaccctgggacccttgatttggcaagca

SEQ ID NO: 112095 - DNA, 72 bp, Homo sapiens
aaaaaggtgccccttcctctacgcagtcacacctcaccctgggacccttgatttggcaagcagagccaaggc

SEQ ID NO: 112096 - DNA, 77 bp, Homo sapiens
ttcctctacgcagtcacacctcaccctgggacccttgatttggcaagcagagccaaggctggatttcacctcccaca

SEQ ID NO: 112097 - DNA, 75 bp, Homo sapiens
acgcagtcacacctcaccctgggacccttgatttggcaagcagagccaaggctggatttcacctcccacagtccc

SEQ ID NO: 112098 - DNA, 73 bp, Homo sapiens
acctcaccctgggacccttgatttggcaagcagagccaaggctggatttcacctcccacagtccccctcagtg

SEQ ID NO: 112099 - DNA, 73 bp, Homo sapiens
acccttgatttggcaagcagagccaaggctggatttcacctcccacagtccccctcagtggggtgcctttgta

SEQ ID NO: 112100 - DNA, 75 bp, Homo sapiens
tttggcaagcagagccaaggctggatttcacctcccacagtccccctcagtggggtgcctttgtacagtgtccaa

SEQ ID NO: 112101 - DNA, 72 bp, Homo sapiens
agccaaggctggatttcacctcccacagtccccctcagtggggtgcctttgtacagtgtccaacctgcccaa

SEQ ID NO: 112102 - DNA, 74 bp, Homo sapiens
atttcacctcccacagtccccctcagtggggtgcctttgtacagtgtccaacctgcccaacgatctgcagtgaa

SEQ ID NO: 112103 - DNA, 80 bp, Homo sapiens
tcccacagtccccctcagtggggtgcctttgtacagtgtccaacctgcccaacgatctgcagtgaacctgcatgagatca

SEQ ID NO: 112104 - DNA, 79 bp, Homo sapiens
tacagtgtccaacctgcccaacgatctgcagtgaacctgcatgagatcaggaacccctcaggaatagggattatcttaa

SEQ ID NO: 112105 - DNA, 75 bp, Homo sapiens
aacctgcccaacgatctgcagtgaacctgcatgagatcaggaacccctcaggaatagggattatcttaatctttt

SEQ ID NO: 112106 - DNA, 73 bp, Homo sapiens
ctgcatgagatcaggaacccctcaggaatagggattatcttaatctttttggaggcctaagacttagcttggg

SEQ ID NO: 112107 - DNA, 70 bp, Homo sapiens
aacccctcaggaatagggattatcttaatctttttggaggcctaagacttagcttggggctgactctcca

SEQ ID NO: 112108 - DNA, 72 bp, Homo sapiens
aggaatagggattatcttaatctttttggaggcctaagacttagcttggggctgactctccaagcaccctca

SEQ ID NO: 112109 - DNA, 72 bp, Homo sapiens
tatcttaatctttttggaggcctaagacttagcttggggctgactctccaagcaccctcagccaacgttagt

SEQ ID NO: 112110 - DNA, 72 bp, Homo sapiens
tttttggaggcctaagacttagcttggggctgactctccaagcaccctcagccaacgttagttgttcgaaca

SEQ ID NO: 112111 - DNA, 73 bp, Homo sapiens
cctaagacttagcttggggctgactctccaagcaccctcagccaacgttagttgttcgaacaaaggcagcttg

SEQ ID NO: 112112 - DNA, 71 bp, Homo sapiens
acttagcttggggctgactctccaagcaccctcagccaacgttagttgttcgaacaaaggcagcttggttt

SEQ ID NO: 112113 - DNA, 70 bp, Homo sapiens
ggggctgactctccaagcaccctcagccaacgttagttgttcgaacaaaggcagcttggttttctttggg

SEQ ID NO: 112114 - DNA, 67 bp, Homo sapiens
agcaccctcagccaacgttagttgttcgaacaaaggcagcttggttttctttgggggttgaagggaa

SEQ ID NO: 112115 - DNA, 65 bp, Homo sapiens
agccaacgttagttgttcgaacaaaggcagcttggttttctttgggggttgaagggaaacaggga

SEQ ID NO: 112116 - DNA, 66 bp, Homo sapiens
ttagttgttcgaacaaaggcagcttggttttctttgggggttgaagggaaacagggaataatttca

SEQ ID NO: 112117 - DNA, 66 bp, Homo sapiens
aacaaaggcagcttggttttctttgggggttgaagggaaacagggaataatttcaccacactttca

SEQ ID NO: 112118 - DNA, 67 bp, Homo sapiens
ttggttttctttgggggttgaagggaaacagggaataatttcaccacactttcagctcaaaagtctc

SEQ ID NO: 112119 - DNA, 68 bp, Homo sapiens
tttctttgggggttgaagggaaacagggaataatttcaccacactttcagctcaaaagtctccatagg

SEQ ID NO: 112120 - DNA, 74 bp, Homo sapiens
ttgaagggaaacagggaataatttcaccacactttcagctcaaaagtctccataggtctctactgccttcagga

SEQ ID NO: 112121 - DNA, 76 bp, Homo sapiens
atttcaccacactttcagctcaaaagtctccataggtctctactgccttcaggaggaagtcttaccatctggctta

SEQ ID NO: 112122 - DNA, 76 bp, Homo sapiens
actttcagctcaaaagtctccataggtctctactgccttcaggaggaagtcttaccatctggcttagattggcctg

SEQ ID NO: 112123 - DNA, 73 bp, Homo sapiens
aaaagtctccataggtctctactgccttcaggaggaagtcttaccatctggcttagattggcctgggctaacc

SEQ ID NO: 112124 - DNA, 75 bp, Homo sapiens
ataggtctctactgccttcaggaggaagtcttaccatctggcttagattggcctgggctaacctgaactggtcaa

SEQ ID NO: 112125 - DNA, 77 bp, Homo sapiens
tgccttcaggaggaagtcttaccatctggcttagattggcctgggctaacctgaactggtcaaccatcccatcatta

SEQ ID NO: 112126 - DNA, 74 bp, Homo sapiens
aggaagtcttaccatctggcttagattggcctgggctaacctgaactggtcaaccatcccatcattaccttcta

SEQ ID NO: 112127 - DNA, 77 bp, Homo sapiens
gtcttaccatctggcttagattggcctgggctaacctgaactggtcaaccatcccatcattaccttctaacactgca

SEQ ID NO: 112128 - DNA, 76 bp, Homo sapiens
ttagattggcctgggctaacctgaactggtcaaccatcccatcattaccttctaacactgcatccccttcatttga

SEQ ID NO: 112129 - DNA, 76 bp, Homo sapiens
ttggcctgggctaacctgaactggtcaaccatcccatcattaccttctaacactgcatccccttcatttgaagtga

SEQ ID NO: 112130 - DNA, 78 bp, Homo sapiens
taacctgaactggtcaaccatcccatcattaccttctaacactgcatccccttcatttgaagtgatccactcatcgtc

SEQ ID NO: 112131 - DNA, 79 bp, Homo sapiens
tggtcaaccatcccatcattaccttctaacactgcatccccttcatttgaagtgatccactcatcgtcctcaaccacac

SEQ ID NO: 112132 - DNA, 80 bp, Homo sapiens
taccttctaacactgcatccccttcatttgaagtgatccactcatcgtcctcaaccacacctggcacttcctgccttgca

SEQ ID NO: 112133 - DNA, 80 bp, Homo sapiens
catccccttcatttgaagtgatccactcatcgtcctcaaccacacctggcacttcctgccttgcaggtgctgctttcttc

SEQ ID NO: 112134 - DNA, 82 bp, Homo sapiens
ttcatttgaagtgatccactcatcgtcctcaaccacacctggcacttcctgccttgcaggtgctgctttcttctcctggata

SEQ ID NO: 112135 - DNA, 78 bp, Homo sapiens
aagtgatccactcatcgtcctcaaccacacctggcacttcctgccttgcaggtgctgctttcttctcctggatacctt

SEQ ID NO: 112136 - DNA, 76 bp, Homo sapiens
atcgtcctcaaccacacctggcacttcctgccttgcaggtgctgctttcttctcctggatacctttccctgttctc

SEQ ID NO: 112137 - DNA, 73 bp, Homo sapiens
aaccacacctggcacttcctgccttgcaggtgctgctttcttctcctggatacctttccctgttctcctttaa

SEQ ID NO: 112138 - DNA, 74 bp, Homo sapiens
ttgcaggtgctgctttcttctcctggatacctttccctgttctcctttaacagcaaaatcctaagttgacctga

SEQ ID NO: 112139 - DNA, 72 bp, Homo sapiens
tgctttcttctcctggatacctttccctgttctcctttaacagcaaaatcctaagttgacctgagtcctctg

SEQ ID NO: 112140 - DNA, 72 bp, Homo sapiens
tcttctcctggatacctttccctgttctcctttaacagcaaaatcctaagttgacctgagtcctctgtaatg

SEQ ID NO: 112141 - DNA, 72 bp, Homo sapiens
atacctttccctgttctcctttaacagcaaaatcctaagttgacctgagtcctctgtaatggctcgagacac

SEQ ID NO: 112142 - DNA, 75 bp, Homo sapiens
tgttctcctttaacagcaaaatcctaagttgacctgagtcctctgtaatggctcgagacaccttctagccttcca

SEQ ID NO: 112143 - DNA, 82 bp, Homo sapiens
ctgagtcctctgtaatggctcgagacaccttctagccttccagtcgtctgaatggctatggtattactgcatgccctgctta

SEQ ID NO: 112144 - DNA, 81 bp, Homo sapiens
ctctgtaatggctcgagacaccttctagccttccagtcgtctgaatggctatggtattactgcatgccctgcttagtcctg

SEQ ID NO: 112145 - DNA, 81 bp, Homo sapiens
tcgagacaccttctagccttccagtcgtctgaatggctatggtattactgcatgccctgcttagtcctgtgcagtttaaga

SEQ ID NO: 112146 - DNA, 79 bp, Homo sapiens
accttctagccttccagtcgtctgaatggctatggtattactgcatgccctgcttagtcctgtgcagtttaagattctc

SEQ ID NO: 112147 - DNA, 79 bp, Homo sapiens
ttccagtcgtctgaatggctatggtattactgcatgccctgcttagtcctgtgcagtttaagattctccccacctattc

SEQ ID NO: 112148 - DNA, 78 bp, Homo sapiens
aatggctatggtattactgcatgccctgcttagtcctgtgcagtttaagattctccccacctattccacaggtatatg

SEQ ID NO: 112149 - DNA, 79 bp, Homo sapiens
tatggtattactgcatgccctgcttagtcctgtgcagtttaagattctccccacctattccacaggtatatgtcttctg

SEQ ID NO: 112150 - DNA, 78 bp, Homo sapiens
actgcatgccctgcttagtcctgtgcagtttaagattctccccacctattccacaggtatatgtcttctgtcctcaaa

SEQ ID NO: 112151 - DNA, 77 bp, Homo sapiens
ttagtcctgtgcagtttaagattctccccacctattccacaggtatatgtcttctgtcctcaaactgctgggagaca

SEQ ID NO: 112152 - DNA, 76 bp, Homo sapiens
cagtttaagattctccccacctattccacaggtatatgtcttctgtcctcaaactgctgggagacaaagatacata

SEQ ID NO: 112153 - DNA, 75 bp, Homo sapiens
attctccccacctattccacaggtatatgtcttctgtcctcaaactgctgggagacaaagatacatagctttctt

SEQ ID NO: 112154 - DNA, 78 bp, Homo sapiens
ctattccacaggtatatgtcttctgtcctcaaactgctgggagacaaagatacatagctttcttttatgtctgtaaga

SEQ ID NO: 112155 - DNA, 77 bp, Homo sapiens
acaggtatatgtcttctgtcctcaaactgctgggagacaaagatacatagctttcttttatgtctgtaagaggcctg

SEQ ID NO: 112156 - DNA, 78 bp, Homo sapiens
atgtcttctgtcctcaaactgctgggagacaaagatacatagctttcttttatgtctgtaagaggcctggcataatac

SEQ ID NO: 112157 - DNA, 81 bp, Homo sapiens
aaactgctgggagacaaagatacatagctttcttttatgtctgtaagaggcctggcataatactgccagtgcactgagcaa

SEQ ID NO: 112158 - DNA, 81 bp, Homo sapiens
ttcttttatgtctgtaagaggcctggcataatactgccagtgcactgagcaagttagcaacaacctcatagaaaatgctaa

SEQ ID NO: 112159 - DNA, 79 bp, Homo sapiens
aggcctggcataatactgccagtgcactgagcaagttagcaacaacctcatagaaaatgctaatgctgaaaaaattaaa

SEQ ID NO: 112160 - DNA, 79 bp, Homo sapiens
cataatactgccagtgcactgagcaagttagcaacaacctcatagaaaatgctaatgctgaaaaaattaaaataattca

SEQ ID NO: 112161 - DNA, 79 bp, Homo sapiens
cagtgcactgagcaagttagcaacaacctcatagaaaatgctaatgctgaaaaaattaaaataattcaatgattatcta

SEQ ID NO: 112162 - DNA, 79 bp, Homo sapiens
tcatagaaaatgctaatgctgaaaaaattaaaataattcaatgattatctatattcggacaaagcattctggaatcaca

SEQ ID NO: 112163 - DNA, 78 bp, Homo sapiens
aatgctaatgctgaaaaaattaaaataattcaatgattatctatattcggacaaagcattctggaatcacagcaagaa

SEQ ID NO: 112164 - DNA, 76 bp, Homo sapiens
gaaaaaattaaaataattcaatgattatctatattcggacaaagcattctggaatcacagcaagaaaatgtggcaa

SEQ ID NO: 112165 - DNA, 77 bp, Homo sapiens
aaaataattcaatgattatctatattcggacaaagcattctggaatcacagcaagaaaatgtggcaaacctccttga

SEQ ID NO: 112166 - DNA, 80 bp, Homo sapiens
ttcaatgattatctatattcggacaaagcattctggaatcacagcaagaaaatgtggcaaacctccttgagcccttgagc

SEQ ID NO: 112167 - DNA, 79 bp, Homo sapiens
atctatattcggacaaagcattctggaatcacagcaagaaaatgtggcaaacctccttgagcccttgagcctctgcacc

SEQ ID NO: 112168 - DNA, 75 bp, Homo sapiens
aagaaaatgtggcaaacctccttgagcccttgagcctctgcacctcacacaggatcacacccacaccccccagaa

SEQ ID NO: 112169 - DNA, 79 bp, Homo sapiens
cttgagcccttgagcctctgcacctcacacaggatcacacccacaccccccagaaagctgaataagacctatgcaaaca

SEQ ID NO: 112170 - DNA, 78 bp, Homo sapiens
ttgagcctctgcacctcacacaggatcacacccacaccccccagaaagctgaataagacctatgcaaacaaccttcca

SEQ ID NO: 112171 - DNA, 72 bp, Homo sapiens
aggatcacacccacaccccccagaaagctgaataagacctatgcaaacaaccttccagggaagggatcgaca

SEQ ID NO: 112172 - DNA, 73 bp, Homo sapiens
tatgcaaacaaccttccagggaagggatcgacaaccacaatcagccttctgcctagttaatcataaacccaaa

SEQ ID NO: 112173 - DNA, 69 bp, Homo sapiens
aacaaccttccagggaagggatcgacaaccacaatcagccttctgcctagttaatcataaacccaaacc

SEQ ID NO: 112174 - DNA, 73 bp, Homo sapiens
aagggatcgacaaccacaatcagccttctgcctagttaatcataaacccaaacctgccgaagccaagtccatc

SEQ ID NO: 112175 - DNA, 74 bp, Homo sapiens
acaaccacaatcagccttctgcctagttaatcataaacccaaacctgccgaagccaagtccatcgccagaacaa

SEQ ID NO: 112176 - DNA, 73 bp, Homo sapiens
aaccacaatcagccttctgcctagttaatcataaacccaaacctgccgaagccaagtccatcgccagaacaag

SEQ ID NO: 112177 - DNA, 73 bp, Homo sapiens
tcagccttctgcctagttaatcataaacccaaacctgccgaagccaagtccatcgccagaacaaggggacaat

SEQ ID NO: 112178 - DNA, 74 bp, Homo sapiens
ttaatcataaacccaaacctgccgaagccaagtccatcgccagaacaaggggacaattagcattgccctttgca

SEQ ID NO: 112179 - DNA, 74 bp, Homo sapiens
ataaacccaaacctgccgaagccaagtccatcgccagaacaaggggacaattagcattgccctttgcacacagc

SEQ ID NO: 112180 - DNA, 76 bp, Homo sapiens
acccaaacctgccgaagccaagtccatcgccagaacaaggggacaattagcattgccctttgcacacagctactca

SEQ ID NO: 112181 - DNA, 78 bp, Homo sapiens
tgccgaagccaagtccatcgccagaacaaggggacaattagcattgccctttgcacacagctactcactgggaaaatc

SEQ ID NO: 112182 - DNA, 80 bp, Homo sapiens
aagtccatcgccagaacaaggggacaattagcattgccctttgcacacagctactcactgggaaaatcgtgcactgatca

SEQ ID NO: 112183 - DNA, 82 bp, Homo sapiens
atcgccagaacaaggggacaattagcattgccctttgcacacagctactcactgggaaaatcgtgcactgatcagtgcacgc

SEQ ID NO: 112184 - DNA, 82 bp, Homo sapiens
ggacaattagcattgccctttgcacacagctactcactgggaaaatcgtgcactgatcagtgcacgcggcttcaactttctc

SEQ ID NO: 112185 - DNA, 82 bp, Homo sapiens
attagcattgccctttgcacacagctactcactgggaaaatcgtgcactgatcagtgcacgcggcttcaactttctcctgac

SEQ ID NO: 112186 - DNA, 79 bp, Homo sapiens
agctactcactgggaaaatcgtgcactgatcagtgcacgcggcttcaactttctcctgaccccagaagattctagcgaa

SEQ ID NO: 112187 - DNA, 78 bp, Homo sapiens
cactgatcagtgcacgcggcttcaactttctcctgaccccagaagattctagcgaagggctgcttggttatagaaata

SEQ ID NO: 112188 - DNA, 76 bp, Homo sapiens
atcagtgcacgcggcttcaactttctcctgaccccagaagattctagcgaagggctgcttggttatagaaatagaa

SEQ ID NO: 112189 - DNA, 73 bp, Homo sapiens
ttcaactttctcctgaccccagaagattctagcgaagggctgcttggttatagaaatagaaagcccttatcag

SEQ ID NO: 112190 - DNA, 76 bp, Homo sapiens
agaagattctagcgaagggctgcttggttatagaaatagaaagcccttatcaggaagctgtcaatttcatgacaaa

SEQ ID NO: 112191 - DNA, 75 bp, Homo sapiens
attctagcgaagggctgcttggttatagaaatagaaagcccttatcaggaagctgtcaatttcatgacaaacttg

SEQ ID NO: 112192 - DNA, 73 bp, Homo sapiens
agggctgcttggttatagaaatagaaagcccttatcaggaagctgtcaatttcatgacaaacttggtatcggg

SEQ ID NO: 112193 - DNA, 75 bp, Homo sapiens
atagaaatagaaagcccttatcaggaagctgtcaatttcatgacaaacttggtatcggggaagcagataatgggc

SEQ ID NO: 112194 - DNA, 75 bp, Homo sapiens
aaagcccttatcaggaagctgtcaatttcatgacaaacttggtatcggggaagcagataatgggctgtttacata

SEQ ID NO: 112195 - DNA, 77 bp, Homo sapiens
ttatcaggaagctgtcaatttcatgacaaacttggtatcggggaagcagataatgggctgtttacatagtcttaggc

SEQ ID NO: 112196 - DNA, 76 bp, Homo sapiens
tcaatttcatgacaaacttggtatcggggaagcagataatgggctgtttacatagtcttaggcggaccaggattca

SEQ ID NO: 112197 - DNA, 76 bp, Homo sapiens
ttcatgacaaacttggtatcggggaagcagataatgggctgtttacatagtcttaggcggaccaggattcatcttg

SEQ ID NO: 112198 - DNA, 73 bp, Homo sapiens
acttggtatcggggaagcagataatgggctgtttacatagtcttaggcggaccaggattcatcttgggtctta

SEQ ID NO: 112199 - DNA, 71 bp, Homo sapiens
aagcagataatgggctgtttacatagtcttaggcggaccaggattcatcttgggtcttagggtttcccaat

SEQ ID NO: 112200 - DNA, 71 bp, Homo sapiens
ataatgggctgtttacatagtcttaggcggaccaggattcatcttgggtcttagggtttcccaattccaga

SEQ ID NO: 112201 - DNA, 71 bp, Homo sapiens
tttacatagtcttaggcggaccaggattcatcttgggtcttagggtttcccaattccagatatttcaaata

SEQ ID NO: 112202 - DNA, 71 bp, Homo sapiens
tcttaggcggaccaggattcatcttgggtcttagggtttcccaattccagatatttcaaatatggaaaaca

SEQ ID NO: 112203 - DNA, 71 bp, Homo sapiens
gattcatcttgggtcttagggtttcccaattccagatatttcaaatatggaaaacagcaaaacaagtcaaa

SEQ ID NO: 112204 - DNA, 75 bp, Homo sapiens
ccaattccagatatttcaaatatggaaaacagcaaaacaagtcaaaatgatttaatactgtatatatagcaataa

SEQ ID NO: 112205 - DNA, 71 bp, Homo sapiens
tatggaaaacagcaaaacaagtcaaaatgatttaatactgtatatatagcaataaaaaaactgaaaaagta

SEQ ID NO: 112206 - DNA, 69 bp, Homo sapiens
agcaaaacaagtcaaaatgatttaatactgtatatatagcaataaaaaaactgaaaaagtattattttc

SEQ ID NO: 112207 - DNA, 69 bp, Homo sapiens
gtcaaaatgatttaatactgtatatatagcaataaaaaaactgaaaaagtattattttctaaatcttta

SEQ ID NO: 112208 - DNA, 66 bp, Homo sapiens
atatagcaataaaaaaactgaaaaagtattattttctaaatctttaagagttgcaattagattttt

SEQ ID NO: 112209 - DNA, 62 bp, Homo sapiens
aataaaaaaactgaaaaagtattattttctaaatctttaagagttgcaattagatttttttt

SEQ ID NO: 112210 - DNA, 65 bp, Homo sapiens
tttttttttaaccaaaatagcacaactgttccccttctctatagaaagttttcattagttcctcc

SEQ ID NO: 112211 - DNA, 67 bp, Homo sapiens
ttaaccaaaatagcacaactgttccccttctctatagaaagttttcattagttcctccccgacctta

SEQ ID NO: 112212 - DNA, 68 bp, Homo sapiens
aatagcacaactgttccccttctctatagaaagttttcattagttcctccccgaccttactttccaga

SEQ ID NO: 112213 - DNA, 67 bp, Homo sapiens
tccccttctctatagaaagttttcattagttcctccccgaccttactttccagaggacctggtaata

SEQ ID NO: 112214 - DNA, 66 bp, Homo sapiens
tctatagaaagttttcattagttcctccccgaccttactttccagaggacctggtaataaacaaaa

SEQ ID NO: 112215 - DNA, 68 bp, Homo sapiens
tagttcctccccgaccttactttccagaggacctggtaataaacaaaagaatgatcccttgagcattt

SEQ ID NO: 112216 - DNA, 76 bp, Homo sapiens
cttactttccagaggacctggtaataaacaaaagaatgatcccttgagcatttttcatcatagcatcatgctttta

SEQ ID NO: 112217 - DNA, 79 bp, Homo sapiens
tttccagaggacctggtaataaacaaaagaatgatcccttgagcatttttcatcatagcatcatgcttttaatggagca

SEQ ID NO: 112218 - DNA, 84 bp, Homo sapiens
aaacaaaagaatgatcccttgagcatttttcatcatagcatcatgcttttaatggagcagagatgaatcctgggctgctgtgac

SEQ ID NO: 112219 - DNA, 83 bp, Homo sapiens
tcccttgagcatttttcatcatagcatcatgcttttaatggagcagagatgaatcctgggctgctgtgacccacgggtagaaa

SEQ ID NO: 112220 - DNA, 82 bp, Homo sapiens
tttttcatcatagcatcatgcttttaatggagcagagatgaatcctgggctgctgtgacccacgggtagaaaacacagtgct

SEQ ID NO: 112221 - DNA, 81 bp, Homo sapiens
atagcatcatgcttttaatggagcagagatgaatcctgggctgctgtgacccacgggtagaaaacacagtgcttctgtgtt

SEQ ID NO: 112222 - DNA, 75 bp, Homo sapiens
cttttaatggagcagagatgaatcctgggctgctgtgacccacgggtagaaaacacagtgcttctgtgtttgggt

SEQ ID NO: 112223 - DNA, 78 bp, Homo sapiens
aatggagcagagatgaatcctgggctgctgtgacccacgggtagaaaacacagtgcttctgtgtttgggtttgatcac

SEQ ID NO: 112224 - DNA, 75 bp, Homo sapiens
aatcctgggctgctgtgacccacgggtagaaaacacagtgcttctgtgtttgggtttgatcaccctcatggagaa

SEQ ID NO: 112225 - DNA, 77 bp, Homo sapiens
tgctgtgacccacgggtagaaaacacagtgcttctgtgtttgggtttgatcaccctcatggagaaagtggctcctga

SEQ ID NO: 112226 - DNA, 73 bp, Homo sapiens
acccacgggtagaaaacacagtgcttctgtgtttgggtttgatcaccctcatggagaaagtggctcctgaaga

SEQ ID NO: 112227 - DNA, 75 bp, Homo sapiens
aaaacacagtgcttctgtgtttgggtttgatcaccctcatggagaaagtggctcctgaagacagatgtaattagt

SEQ ID NO: 112228 - DNA, 78 bp, Homo sapiens
ttgatcaccctcatggagaaagtggctcctgaagacagatgtaattagttctaatgtctgaggcctttggggatgttc

SEQ ID NO: 112229 - DNA, 73 bp, Homo sapiens
ctcctgaagacagatgtaattagttctaatgtctgaggcctttggggatgttcctaaggctttttattgagaa

SEQ ID NO: 112230 - DNA, 72 bp, Homo sapiens
aagacagatgtaattagttctaatgtctgaggcctttggggatgttcctaaggctttttattgagaaggcaa

SEQ ID NO: 112231 - DNA, 73 bp, Homo sapiens
gtaattagttctaatgtctgaggcctttggggatgttcctaaggctttttattgagaaggcaaagcaagcaga

SEQ ID NO: 112232 - DNA, 76 bp, Homo sapiens
taatgtctgaggcctttggggatgttcctaaggctttttattgagaaggcaaagcaagcagaggtgagatctggga

SEQ ID NO: 112233 - DNA, 74 bp, Homo sapiens
tttggggatgttcctaaggctttttattgagaaggcaaagcaagcagaggtgagatctgggaggataaagtaga

SEQ ID NO: 112234 - DNA, 75 bp, Homo sapiens
tttttattgagaaggcaaagcaagcagaggtgagatctgggaggataaagtagaaggcaatgagacccgaaagag

SEQ ID NO: 112235 - DNA, 75 bp, Homo sapiens
agaaggcaaagcaagcagaggtgagatctgggaggataaagtagaaggcaatgagacccgaaagagtttggctta

SEQ ID NO: 112236 - DNA, 75 bp, Homo sapiens
caagcagaggtgagatctgggaggataaagtagaaggcaatgagacccgaaagagtttggcttatgcaaaggaat

SEQ ID NO: 112237 - DNA, 73 bp, Homo sapiens
aggtgagatctgggaggataaagtagaaggcaatgagacccgaaagagtttggcttatgcaaaggaatttcca

SEQ ID NO: 112238 - DNA, 74 bp, Homo sapiens
gaggataaagtagaaggcaatgagacccgaaagagtttggcttatgcaaaggaatttccatgagcacccacaaa

SEQ ID NO: 112239 - DNA, 74 bp, Homo sapiens
taaagtagaaggcaatgagacccgaaagagtttggcttatgcaaaggaatttccatgagcacccacaaacattg

SEQ ID NO: 112240 - DNA, 73 bp, Homo sapiens
aatgagacccgaaagagtttggcttatgcaaaggaatttccatgagcacccacaaacattggtccaggtactc

SEQ ID NO: 112241 - DNA, 74 bp, Homo sapiens
aaagagtttggcttatgcaaaggaatttccatgagcacccacaaacattggtccaggtactctcttagtcactg

SEQ ID NO: 112242 - DNA, 75 bp, Homo sapiens
tttggcttatgcaaaggaatttccatgagcacccacaaacattggtccaggtactctcttagtcactgtcccctc

SEQ ID NO: 112243 - DNA, 72 bp, Homo sapiens
aaaggaatttccatgagcacccacaaacattggtccaggtactctcttagtcactgtcccctcgaggatggg

SEQ ID NO: 112244 - DNA, 73 bp, Homo sapiens
acaaacattggtccaggtactctcttagtcactgtcccctcgaggatggggaagaggaagctgccaacgtcac

SEQ ID NO: 112245 - DNA, 75 bp, Homo sapiens
attggtccaggtactctcttagtcactgtcccctcgaggatggggaagaggaagctgccaacgtcacctggctgc

SEQ ID NO: 112246 - DNA, 79 bp, Homo sapiens
tactctcttagtcactgtcccctcgaggatggggaagaggaagctgccaacgtcacctggctgctgcatcgacttcctc

SEQ ID NO: 112247 - DNA, 78 bp, Homo sapiens
agtcactgtcccctcgaggatggggaagaggaagctgccaacgtcacctggctgctgcatcgacttcctcctcttgcc

SEQ ID NO: 112248 - DNA, 81 bp, Homo sapiens
gaggatggggaagaggaagctgccaacgtcacctggctgctgcatcgacttcctcctcttgccccatcatccatctcagtt

SEQ ID NO: 112249 - DNA, 80 bp, Homo sapiens
aagaggaagctgccaacgtcacctggctgctgcatcgacttcctcctcttgccccatcatccatctcagttttagattta

SEQ ID NO: 112250 - DNA, 80 bp, Homo sapiens
aagctgccaacgtcacctggctgctgcatcgacttcctcctcttgccccatcatccatctcagttttagatttaagccag

SEQ ID NO: 112251 - DNA, 84 bp, Homo sapiens
ttgccccatcatccatctcagttttagatttaagccaggactgattctctgtggtctaggctgatgtgcaagtgagaatcttga

SEQ ID NO: 112252 - DNA, 81 bp, Homo sapiens
tccatctcagttttagatttaagccaggactgattctctgtggtctaggctgatgtgcaagtgagaatcttgattagaaaa

SEQ ID NO: 112253 - DNA, 76 bp, Homo sapiens
atttaagccaggactgattctctgtggtctaggctgatgtgcaagtgagaatcttgattagaaaacccccaaataa

SEQ ID NO: 112254 - DNA, 75 bp, Homo sapiens
ggactgattctctgtggtctaggctgatgtgcaagtgagaatcttgattagaaaacccccaaataactaaataaa

SEQ ID NO: 112255 - DNA, 75 bp, Homo sapiens
tctgtggtctaggctgatgtgcaagtgagaatcttgattagaaaacccccaaataactaaataaatgaagtctgt

SEQ ID NO: 112256 - DNA, 74 bp, Homo sapiens
ggctgatgtgcaagtgagaatcttgattagaaaacccccaaataactaaataaatgaagtctgttgcttgttta

SEQ ID NO: 112257 - DNA, 71 bp, Homo sapiens
gcaagtgagaatcttgattagaaaacccccaaataactaaataaatgaagtctgttgcttgtttaatgcct

SEQ ID NO: 112258 - DNA, 69 bp, Homo sapiens
tgattagaaaacccccaaataactaaataaatgaagtctgttgcttgtttaatgcctttaaatagtgtc

SEQ ID NO: 112259 - DNA, 68 bp, Homo sapiens
gaaaacccccaaataactaaataaatgaagtctgttgcttgtttaatgcctttaaatagtgtctcatt

SEQ ID NO: 112260 - DNA, 71 bp, Homo sapiens
actaaataaatgaagtctgttgcttgtttaatgcctttaaatagtgtctcatttataaaatgtatttacaa

SEQ ID NO: 112261 - DNA, 69 bp, Homo sapiens
atgcctttaaatagtgtctcatttataaaatgtatttacaacctttaaaagtacactttgcttctatgg

SEQ ID NO: 112262 - DNA, 67 bp, Homo sapiens
catttataaaatgtatttacaacctttaaaagtacactttgcttctatggggacttatggaacgttc

SEQ ID NO: 112263 - DNA, 68 bp, Homo sapiens
atgtatttacaacctttaaaagtacactttgcttctatggggacttatggaacgttctgacctaagtc

SEQ ID NO: 112264 - DNA, 68 bp, Homo sapiens
aacctttaaaagtacactttgcttctatggggacttatggaacgttctgacctaagtccttgtcagta

SEQ ID NO: 112265 - DNA, 72 bp, Homo sapiens
taaaagtacactttgcttctatggggacttatggaacgttctgacctaagtccttgtcagtagctttgagaa

SEQ ID NO: 112266 - DNA, 72 bp, Homo sapiens
ctttgcttctatggggacttatggaacgttctgacctaagtccttgtcagtagctttgagaaggggaatgag

SEQ ID NO: 112267 - DNA, 71 bp, Homo sapiens
gacttatggaacgttctgacctaagtccttgtcagtagctttgagaaggggaatgaggtccccacaaagaa

SEQ ID NO: 112268 - DNA, 71 bp, Homo sapiens
atggaacgttctgacctaagtccttgtcagtagctttgagaaggggaatgaggtccccacaaagaatctgg

SEQ ID NO: 112269 - DNA, 72 bp, Homo sapiens
acctaagtccttgtcagtagctttgagaaggggaatgaggtccccacaaagaatctggggcttcccatcatc

SEQ ID NO: 112270 - DNA, 73 bp, Homo sapiens
ttgtcagtagctttgagaaggggaatgaggtccccacaaagaatctggggcttcccatcatctccacttacct

SEQ ID NO: 112271 - DNA, 74 bp, Homo sapiens
tagctttgagaaggggaatgaggtccccacaaagaatctggggcttcccatcatctccacttaccttcaggctg

SEQ ID NO: 112272 - DNA, 77 bp, Homo sapiens
ggaatgaggtccccacaaagaatctggggcttcccatcatctccacttaccttcaggctggctggctgaggcacttg

SEQ ID NO: 112273 - DNA, 76 bp, Homo sapiens
cccacaaagaatctggggcttcccatcatctccacttaccttcaggctggctggctgaggcacttgggtaatgact

SEQ ID NO: 112274 - DNA, 75 bp, Homo sapiens
aaagaatctggggcttcccatcatctccacttaccttcaggctggctggctgaggcacttgggtaatgactttgg

SEQ ID NO: 112275 - DNA, 77 bp, Homo sapiens
tcccatcatctccacttaccttcaggctggctggctgaggcacttgggtaatgactttggggagacaataacatgtt

SEQ ID NO: 112276 - DNA, 76 bp, Homo sapiens
ttcaggctggctggctgaggcacttgggtaatgactttggggagacaataacatgtttagctttagtcttttctca

SEQ ID NO: 112277 - DNA, 73 bp, Homo sapiens
ctggctgaggcacttgggtaatgactttggggagacaataacatgtttagctttagtcttttctcaagagaaa

SEQ ID NO: 112278 - DNA, 70 bp, Homo sapiens
aggcacttgggtaatgactttggggagacaataacatgtttagctttagtcttttctcaagagaaaattc

SEQ ID NO: 112279 - DNA, 74 bp, Homo sapiens
taatgactttggggagacaataacatgtttagctttagtcttttctcaagagaaaattccatcttggcagtgtc

SEQ ID NO: 112280 - DNA, 74 bp, Homo sapiens
ggagacaataacatgtttagctttagtcttttctcaagagaaaattccatcttggcagtgtccaccagggatac

SEQ ID NO: 112281 - DNA, 75 bp, Homo sapiens
ttttctcaagagaaaattccatcttggcagtgtccaccagggatactctgtccctaggttttggagtatgctcat

SEQ ID NO: 112282 - DNA, 75 bp, Homo sapiens
aaaattccatcttggcagtgtccaccagggatactctgtccctaggttttggagtatgctcattccccatgactg

SEQ ID NO: 112283 - DNA, 76 bp, Homo sapiens
tcttggcagtgtccaccagggatactctgtccctaggttttggagtatgctcattccccatgactggcaaagtaaa

SEQ ID NO: 112284 - DNA, 74 bp, Homo sapiens
agtgtccaccagggatactctgtccctaggttttggagtatgctcattccccatgactggcaaagtaaaattga

SEQ ID NO: 112285 - DNA, 75 bp, Homo sapiens
atactctgtccctaggttttggagtatgctcattccccatgactggcaaagtaaaattgaaccatggagccagaa

SEQ ID NO: 112286 - DNA, 74 bp, Homo sapiens
ctgtccctaggttttggagtatgctcattccccatgactggcaaagtaaaattgaaccatggagccagaaagtc

SEQ ID NO: 112287 - DNA, 80 bp, Homo sapiens
ttttggagtatgctcattccccatgactggcaaagtaaaattgaaccatggagccagaaagtctgagtcagtctgagtca

SEQ ID NO: 112288 - DNA, 78 bp, Homo sapiens
tcattccccatgactggcaaagtaaaattgaaccatggagccagaaagtctgagtcagtctgagtcaggccctgtaac

SEQ ID NO: 112289 - DNA, 78 bp, Homo sapiens
atgactggcaaagtaaaattgaaccatggagccagaaagtctgagtcagtctgagtcaggccctgtaaccctgcacac

SEQ ID NO: 112290 - DNA, 76 bp, Homo sapiens
agtaaaattgaaccatggagccagaaagtctgagtcagtctgagtcaggccctgtaaccctgcacaccaatctgtt

SEQ ID NO: 112291 - DNA, 78 bp, Homo sapiens
attgaaccatggagccagaaagtctgagtcagtctgagtcaggccctgtaaccctgcacaccaatctgtttctcagtt

SEQ ID NO: 112292 - DNA, 77 bp, Homo sapiens
cagaaagtctgagtcagtctgagtcaggccctgtaaccctgcacaccaatctgtttctcagtttcccatccgcaaaa

SEQ ID NO: 112293 - DNA, 77 bp, Homo sapiens
tgagtcaggccctgtaaccctgcacaccaatctgtttctcagtttcccatccgcaaaatggggtgaatagctgtatc

SEQ ID NO: 112294 - DNA, 79 bp, Homo sapiens
tgcacaccaatctgtttctcagtttcccatccgcaaaatggggtgaatagctgtatctactatgtaaagattgttctga

SEQ ID NO: 112295 - DNA, 75 bp, Homo sapiens
aatctgtttctcagtttcccatccgcaaaatggggtgaatagctgtatctactatgtaaagattgttctgaggat

SEQ ID NO: 112296 - DNA, 80 bp, Homo sapiens
atccgcaaaatggggtgaatagctgtatctactatgtaaagattgttctgaggattacatgagttattatctgcaaagca

SEQ ID NO: 112297 - DNA, 82 bp, Homo sapiens
tactatgtaaagattgttctgaggattacatgagttattatctgcaaagcacctagaacaattcctggcacatagcgagcga

SEQ ID NO: 112298 - DNA, 83 bp, Homo sapiens
agattgttctgaggattacatgagttattatctgcaaagcacctagaacaattcctggcacatagcgagcgagcactgtctaa

SEQ ID NO: 112299 - DNA, 81 bp, Homo sapiens
attacatgagttattatctgcaaagcacctagaacaattcctggcacatagcgagcgagcactgtctaagtgtttatgaac

SEQ ID NO: 112300 - DNA, 79 bp, Homo sapiens
ttattatctgcaaagcacctagaacaattcctggcacatagcgagcgagcactgtctaagtgtttatgaactaactaaa

SEQ ID NO: 112301 - DNA, 78 bp, Homo sapiens
atctgcaaagcacctagaacaattcctggcacatagcgagcgagcactgtctaagtgtttatgaactaactaaataaa

SEQ ID NO: 112302 - DNA, 75 bp, Homo sapiens
tagaacaattcctggcacatagcgagcgagcactgtctaagtgtttatgaactaactaaataaatggtcttaact

SEQ ID NO: 112303 - DNA, 74 bp, Homo sapiens
aattcctggcacatagcgagcgagcactgtctaagtgtttatgaactaactaaataaatggtcttaactttcta

SEQ ID NO: 112304 - DNA, 73 bp, Homo sapiens
atagcgagcgagcactgtctaagtgtttatgaactaactaaataaatggtcttaactttctaggtgctgattt

SEQ ID NO: 112305 - DNA, 70 bp, Homo sapiens
cgagcactgtctaagtgtttatgaactaactaaataaatggtcttaactttctaggtgctgatttttttc

SEQ ID NO: 112306 - DNA, 69 bp, Homo sapiens
aagtgtttatgaactaactaaataaatggtcttaactttctaggtgctgatttttttctctatcaggga

SEQ ID NO: 112307 - DNA, 69 bp, Homo sapiens
ctaactaaataaatggtcttaactttctaggtgctgatttttttctctatcagggaaaatgtttctgtg

SEQ ID NO: 112308 - DNA, 72 bp, Homo sapiens
aaatggtcttaactttctaggtgctgatttttttctctatcagggaaaatgtttctgtgtgctatttgtgga

SEQ ID NO: 112309 - DNA, 74 bp, Homo sapiens
gtcttaactttctaggtgctgatttttttctctatcagggaaaatgtttctgtgtgctatttgtggaataagca

SEQ ID NO: 112310 - DNA, 78 bp, Homo sapiens
gtgctgatttttttctctatcagggaaaatgtttctgtgtgctatttgtggaataagcaataatgatagaagctccaa

SEQ ID NO: 112311 - DNA, 77 bp, Homo sapiens
cagggaaaatgtttctgtgtgctatttgtggaataagcaataatgatagaagctccaaacatagtcacttaaataca

SEQ ID NO: 112312 - DNA, 81 bp, Homo sapiens
atgtttctgtgtgctatttgtggaataagcaataatgatagaagctccaaacatagtcacttaaatacactatgagcacta

SEQ ID NO: 112313 - DNA, 86 bp, Homo sapiens
tgtgctatttgtggaataagcaataatgatagaagctccaaacatagtcacttaaatacactatgagcactatgcgtgtgcacata

SEQ ID NO: 112314 - DNA, 86 bp, Homo sapiens
tggaataagcaataatgatagaagctccaaacatagtcacttaaatacactatgagcactatgcgtgtgcacatacacataatata

SEQ ID NO: 112315 - DNA, 81 bp, Homo sapiens
acttaaatacactatgagcactatgcgtgtgcacatacacataatatataaatacactgagctaaacattactatcttccc

SEQ ID NO: 112316 - DNA, 83 bp, Homo sapiens
actatgcgtgtgcacatacacataatatataaatacactgagctaaacattactatcttccccatgtcaagctctgaagcaac

SEQ ID NO: 112317 - DNA, 81 bp, Homo sapiens
cacatacacataatatataaatacactgagctaaacattactatcttccccatgtcaagctctgaagcaactgagaaataa

SEQ ID NO: 112318 - DNA, 76 bp, Homo sapiens
ataatatataaatacactgagctaaacattactatcttccccatgtcaagctctgaagcaactgagaaataaaccc

SEQ ID NO: 112319 - DNA, 76 bp, Homo sapiens
atacactgagctaaacattactatcttccccatgtcaagctctgaagcaactgagaaataaacccctgaaatcaaa

SEQ ID NO: 112320 - DNA, 75 bp, Homo sapiens
taaacattactatcttccccatgtcaagctctgaagcaactgagaaataaacccctgaaatcaaatgaagaagta

SEQ ID NO: 112321 - DNA, 75 bp, Homo sapiens
tactatcttccccatgtcaagctctgaagcaactgagaaataaacccctgaaatcaaatgaagaagtaaatacca

SEQ ID NO: 112322 - DNA, 76 bp, Homo sapiens
atgtcaagctctgaagcaactgagaaataaacccctgaaatcaaatgaagaagtaaataccagcattttgcttgta

SEQ ID NO: 112323 - DNA, 72 bp, Homo sapiens
gagaaataaacccctgaaatcaaatgaagaagtaaataccagcattttgcttgtagagttgagttggagaaa

SEQ ID NO: 112324 - DNA, 74 bp, Homo sapiens
ccctgaaatcaaatgaagaagtaaataccagcattttgcttgtagagttgagttggagaaagagcccatctggg

SEQ ID NO: 112325 - DNA, 72 bp, Homo sapiens
aaatcaaatgaagaagtaaataccagcattttgcttgtagagttgagttggagaaagagcccatctggggtt

SEQ ID NO: 112326 - DNA, 74 bp, Homo sapiens
aagaagtaaataccagcattttgcttgtagagttgagttggagaaagagcccatctggggtttcttccagagca

SEQ ID NO: 112327 - DNA, 79 bp, Homo sapiens
taccagcattttgcttgtagagttgagttggagaaagagcccatctggggtttcttccagagcatgagaagtacctgca

SEQ ID NO: 112328 - DNA, 77 bp, Homo sapiens
ttgcttgtagagttgagttggagaaagagcccatctggggtttcttccagagcatgagaagtacctgcagggaccta

SEQ ID NO: 112329 - DNA, 75 bp, Homo sapiens
agttgagttggagaaagagcccatctggggtttcttccagagcatgagaagtacctgcagggacctacccagcca

SEQ ID NO: 112330 - DNA, 78 bp, Homo sapiens
atctggggtttcttccagagcatgagaagtacctgcagggacctacccagccagccacaggggcctgcgctgacctca

SEQ ID NO: 112331 - DNA, 83 bp, Homo sapiens
tttcttccagagcatgagaagtacctgcagggacctacccagccagccacaggggcctgcgctgacctcatctctgctgagcc

SEQ ID NO: 112332 - DNA, 85 bp, Homo sapiens
tgagaagtacctgcagggacctacccagccagccacaggggcctgcgctgacctcatctctgctgagccctgagatcaggacata

SEQ ID NO: 112333 - DNA, 84 bp, Homo sapiens
gtacctgcagggacctacccagccagccacaggggcctgcgctgacctcatctctgctgagccctgagatcaggacatagctgg

SEQ ID NO: 112334 - DNA, 82 bp, Homo sapiens
acctacccagccagccacaggggcctgcgctgacctcatctctgctgagccctgagatcaggacatagctggggtgggagcg

SEQ ID NO: 112335 - DNA, 83 bp, Homo sapiens
agccacaggggcctgcgctgacctcatctctgctgagccctgagatcaggacatagctggggtgggagcgggccctgcctcag

SEQ ID NO: 112336 - DNA, 84 bp, Homo sapiens
cctgcgctgacctcatctctgctgagccctgagatcaggacatagctggggtgggagcgggccctgcctcaggcctcatccagg

SEQ ID NO: 112337 - DNA, 83 bp, Homo sapiens
acctcatctctgctgagccctgagatcaggacatagctggggtgggagcgggccctgcctcaggcctcatccagggagacaga

SEQ ID NO: 112338 - DNA, 84 bp, Homo sapiens
tctctgctgagccctgagatcaggacatagctggggtgggagcgggccctgcctcaggcctcatccagggagacagaggcagag

SEQ ID NO: 112339 - DNA, 84 bp, Homo sapiens
tgagatcaggacatagctggggtgggagcgggccctgcctcaggcctcatccagggagacagaggcagaggagaatgcaccata

SEQ ID NO: 112340 - DNA, 81 bp, Homo sapiens
aggacatagctggggtgggagcgggccctgcctcaggcctcatccagggagacagaggcagaggagaatgcaccatatcag

SEQ ID NO: 112341 - DNA, 84 bp, Homo sapiens
cctcaggcctcatccagggagacagaggcagaggagaatgcaccatatcaggcaggctgtccccagaaggcctctctcaatctc

SEQ ID NO: 112342 - DNA, 84 bp, Homo sapiens
agaggagaatgcaccatatcaggcaggctgtccccagaaggcctctctcaatctctcccattggatgtgcctctcctctcataa

SEQ ID NO: 112343 - DNA, 80 bp, Homo sapiens
atatcaggcaggctgtccccagaaggcctctctcaatctctcccattggatgtgcctctcctctcataaggcggaagaag

SEQ ID NO: 112344 - DNA, 80 bp, Homo sapiens
aggcaggctgtccccagaaggcctctctcaatctctcccattggatgtgcctctcctctcataaggcggaagaaggcaga

SEQ ID NO: 112345 - DNA, 86 bp, Homo sapiens
tctcaatctctcccattggatgtgcctctcctctcataaggcggaagaaggcagaggcagatagaagctcagagctcttctctcaa

SEQ ID NO: 112346 - DNA, 83 bp, Homo sapiens
ttggatgtgcctctcctctcataaggcggaagaaggcagaggcagatagaagctcagagctcttctctcaatgcttccaaaag

SEQ ID NO: 112347 - DNA, 79 bp, Homo sapiens
tcctctcataaggcggaagaaggcagaggcagatagaagctcagagctcttctctcaatgcttccaaaagggtaggagt

SEQ ID NO: 112348 - DNA, 77 bp, Homo sapiens
gcggaagaaggcagaggcagatagaagctcagagctcttctctcaatgcttccaaaagggtaggagttcccatttaa

SEQ ID NO: 112349 - DNA, 77 bp, Homo sapiens
aaggcagaggcagatagaagctcagagctcttctctcaatgcttccaaaagggtaggagttcccatttaagaggctg

SEQ ID NO: 112350 - DNA, 76 bp, Homo sapiens
atagaagctcagagctcttctctcaatgcttccaaaagggtaggagttcccatttaagaggctggcaagaactcca

SEQ ID NO: 112351 - DNA, 77 bp, Homo sapiens
agctcagagctcttctctcaatgcttccaaaagggtaggagttcccatttaagaggctggcaagaactccaggagca

SEQ ID NO: 112352 - DNA, 76 bp, Homo sapiens
ttctctcaatgcttccaaaagggtaggagttcccatttaagaggctggcaagaactccaggagcaggcgagaatga

SEQ ID NO: 112353 - DNA, 73 bp, Homo sapiens
ttccaaaagggtaggagttcccatttaagaggctggcaagaactccaggagcaggcgagaatgatccccaaga

SEQ ID NO: 112354 - DNA, 79 bp, Homo sapiens
taggagttcccatttaagaggctggcaagaactccaggagcaggcgagaatgatccccaagacacatatcaatgtgaaa

SEQ ID NO: 112355 - DNA, 81 bp, Homo sapiens
catttaagaggctggcaagaactccaggagcaggcgagaatgatccccaagacacatatcaatgtgaaatacatgtgttta

SEQ ID NO: 112356 - DNA, 81 bp, Homo sapiens
aagaactccaggagcaggcgagaatgatccccaagacacatatcaatgtgaaatacatgtgtttatattgtgaaacagtca

SEQ ID NO: 112357 - DNA, 82 bp, Homo sapiens
caggcgagaatgatccccaagacacatatcaatgtgaaatacatgtgtttatattgtgaaacagtcaactccagcttcagaa

SEQ ID NO: 112358 - DNA, 80 bp, Homo sapiens
aatgatccccaagacacatatcaatgtgaaatacatgtgtttatattgtgaaacagtcaactccagcttcagaagcagtt

SEQ ID NO: 112359 - DNA, 80 bp, Homo sapiens
cccaagacacatatcaatgtgaaatacatgtgtttatattgtgaaacagtcaactccagcttcagaagcagtttgctggg

SEQ ID NO: 112360 - DNA, 81 bp, Homo sapiens
atatcaatgtgaaatacatgtgtttatattgtgaaacagtcaactccagcttcagaagcagtttgctggggatcattgtcc

SEQ ID NO: 112361 - DNA, 78 bp, Homo sapiens
tgtttatattgtgaaacagtcaactccagcttcagaagcagtttgctggggatcattgtcccctccagactgaacacg

SEQ ID NO: 112362 - DNA, 77 bp, Homo sapiens
aaacagtcaactccagcttcagaagcagtttgctggggatcattgtcccctccagactgaacacgggctaacatgta

SEQ ID NO: 112363 - DNA, 79 bp, Homo sapiens
tttgctggggatcattgtcccctccagactgaacacgggctaacatgtagctgagagcgggtgtagacaatagtcttga

SEQ ID NO: 112364 - DNA, 79 bp, Homo sapiens
atcattgtcccctccagactgaacacgggctaacatgtagctgagagcgggtgtagacaatagtcttgaaggagctgat

SEQ ID NO: 112365 - DNA, 78 bp, Homo sapiens
cagactgaacacgggctaacatgtagctgagagcgggtgtagacaatagtcttgaaggagctgattggcggttccgtg

SEQ ID NO: 112366 - DNA, 75 bp, Homo sapiens
acacgggctaacatgtagctgagagcgggtgtagacaatagtcttgaaggagctgattggcggttccgtggttta

SEQ ID NO: 112367 - DNA, 78 bp, Homo sapiens
taacatgtagctgagagcgggtgtagacaatagtcttgaaggagctgattggcggttccgtggtttaccagcagcacc

SEQ ID NO: 112368 - DNA, 73 bp, Homo sapiens
agagcgggtgtagacaatagtcttgaaggagctgattggcggttccgtggtttaccagcagcaccgggcaaag

SEQ ID NO: 112369 - DNA, 75 bp, Homo sapiens
tagacaatagtcttgaaggagctgattggcggttccgtggtttaccagcagcaccgggcaaaggaatgtggctta

SEQ ID NO: 112370 - DNA, 72 bp, Homo sapiens
atagtcttgaaggagctgattggcggttccgtggtttaccagcagcaccgggcaaaggaatgtggcttacct

SEQ ID NO: 112371 - DNA, 71 bp, Homo sapiens
ctgattggcggttccgtggtttaccagcagcaccgggcaaaggaatgtggcttacctttgaacagacgaaa

SEQ ID NO: 112372 - DNA, 70 bp, Homo sapiens
gttccgtggtttaccagcagcaccgggcaaaggaatgtggcttacctttgaacagacgaaagagggtgga

SEQ ID NO: 112373 - DNA, 74 bp, Homo sapiens
agcagcaccgggcaaaggaatgtggcttacctttgaacagacgaaagagggtggaagcgtctgcaccaggtgtg

SEQ ID NO: 112374 - DNA, 80 bp, Homo sapiens
tgtggcttacctttgaacagacgaaagagggtggaagcgtctgcaccaggtgtgtgcaggcaagggcatgttgagagata

SEQ ID NO: 112375 - DNA, 78 bp, Homo sapiens
acgaaagagggtggaagcgtctgcaccaggtgtgtgcaggcaagggcatgttgagagataggctgggtggtaaagaga

SEQ ID NO: 112376 - DNA, 77 bp, Homo sapiens
aagcgtctgcaccaggtgtgtgcaggcaagggcatgttgagagataggctgggtggtaaagagaggttccttctcgg

SEQ ID NO: 112377 - DNA, 75 bp, Homo sapiens
ccaggtgtgtgcaggcaagggcatgttgagagataggctgggtggtaaagagaggttccttctcggtcttactct

SEQ ID NO: 112378 - DNA, 74 bp, Homo sapiens
gcatgttgagagataggctgggtggtaaagagaggttccttctcggtcttactcttgatggagtccgctggttt

SEQ ID NO: 112379 - DNA, 73 bp, Homo sapiens
ttgagagataggctgggtggtaaagagaggttccttctcggtcttactcttgatggagtccgctggttttcta

SEQ ID NO: 112380 - DNA, 71 bp, Homo sapiens
ctgggtggtaaagagaggttccttctcggtcttactcttgatggagtccgctggttttctagcctgcgccc

SEQ ID NO: 112381 - DNA, 74 bp, Homo sapiens
taaagagaggttccttctcggtcttactcttgatggagtccgctggttttctagcctgcgccccgcaggagtgc

SEQ ID NO: 112382 - DNA, 74 bp, Homo sapiens
ttccttctcggtcttactcttgatggagtccgctggttttctagcctgcgccccgcaggagtgcctgaagggtg

SEQ ID NO: 112383 - DNA, 77 bp, Homo sapiens
ttactcttgatggagtccgctggttttctagcctgcgccccgcaggagtgcctgaagggtgtctggtatcagtaatc

SEQ ID NO: 112384 - DNA, 76 bp, Homo sapiens
atggagtccgctggttttctagcctgcgccccgcaggagtgcctgaagggtgtctggtatcagtaatctcctatcc

SEQ ID NO: 112385 - DNA, 76 bp, Homo sapiens
tggttttctagcctgcgccccgcaggagtgcctgaagggtgtctggtatcagtaatctcctatccctaaaccagca

SEQ ID NO: 112386 - DNA, 77 bp, Homo sapiens
ctagcctgcgccccgcaggagtgcctgaagggtgtctggtatcagtaatctcctatccctaaaccagcaggagctgg

SEQ ID NO: 112387 - DNA, 75 bp, Homo sapiens
caggagtgcctgaagggtgtctggtatcagtaatctcctatccctaaaccagcaggagctggggaacatttaaca

SEQ ID NO: 112388 - DNA, 74 bp, Homo sapiens
gtgcctgaagggtgtctggtatcagtaatctcctatccctaaaccagcaggagctggggaacatttaacaacca

SEQ ID NO: 112389 - DNA, 75 bp, Homo sapiens
tctggtatcagtaatctcctatccctaaaccagcaggagctggggaacatttaacaaccagctcttcaggataaa

SEQ ID NO: 112390 - DNA, 72 bp, Homo sapiens
agtaatctcctatccctaaaccagcaggagctggggaacatttaacaaccagctcttcaggataaacagctt

SEQ ID NO: 112391 - DNA, 74 bp, Homo sapiens
tatccctaaaccagcaggagctggggaacatttaacaaccagctcttcaggataaacagctttgacttataaca

SEQ ID NO: 112392 - DNA, 83 bp, Homo sapiens
tggggaacatttaacaaccagctcttcaggataaacagctttgacttataacatgtgcagatttcagcaatcactgctgatca

SEQ ID NO: 112393 - DNA, 84 bp, Homo sapiens
taacaaccagctcttcaggataaacagctttgacttataacatgtgcagatttcagcaatcactgctgatcactatagttcctc

SEQ ID NO: 112394 - DNA, 87 bp, Homo sapiens
agctcttcaggataaacagctttgacttataacatgtgcagatttcagcaatcactgctgatcactatagttcctctcacagcaaca

SEQ ID NO: 112395 - DNA, 86 bp, Homo sapiens
ataaacagctttgacttataacatgtgcagatttcagcaatcactgctgatcactatagttcctctcacagcaacactctatgtta

SEQ ID NO: 112396 - DNA, 88 bp, Homo sapiens
tataacatgtgcagatttcagcaatcactgctgatcactatagttcctctcacagcaacactctatgttagagcatttccaccattta

SEQ ID NO: 112397 - DNA, 84 bp, Homo sapiens
atttcagcaatcactgctgatcactatagttcctctcacagcaacactctatgttagagcatttccaccatttagagataagaa

SEQ ID NO: 112398 - DNA, 81 bp, Homo sapiens
aatcactgctgatcactatagttcctctcacagcaacactctatgttagagcatttccaccatttagagataagaaacaag

SEQ ID NO: 112399 - DNA, 82 bp, Homo sapiens
tcactatagttcctctcacagcaacactctatgttagagcatttccaccatttagagataagaaacaagtgcatatagatct

SEQ ID NO: 112400 - DNA, 80 bp, Homo sapiens
ttcctctcacagcaacactctatgttagagcatttccaccatttagagataagaaacaagtgcatatagatctttgtaaa

SEQ ID NO: 112401 - DNA, 80 bp, Homo sapiens
cagcaacactctatgttagagcatttccaccatttagagataagaaacaagtgcatatagatctttgtaaactgcaataa

SEQ ID NO: 112402 - DNA, 77 bp, Homo sapiens
ctctatgttagagcatttccaccatttagagataagaaacaagtgcatatagatctttgtaaactgcaataaaataa

SEQ ID NO: 112403 - DNA, 77 bp, Homo sapiens
gcatttccaccatttagagataagaaacaagtgcatatagatctttgtaaactgcaataaaataataaggcagaggc

SEQ ID NO: 112404 - DNA, 77 bp, Homo sapiens
atttagagataagaaacaagtgcatatagatctttgtaaactgcaataaaataataaggcagaggctgggcgctgta

SEQ ID NO: 112405 - DNA, 78 bp, Homo sapiens
ataagaaacaagtgcatatagatctttgtaaactgcaataaaataataaggcagaggctgggcgctgtagctcaggcc

SEQ ID NO: 112406 - DNA, 72 bp, Homo sapiens
ccacacctggcctttgtttaactcttaagtttgcataatttaattttgcatgatgtctttgtttaactgcca

SEQ ID NO: 112407 - DNA, 74 bp, Homo sapiens
ctggcctttgtttaactcttaagtttgcataatttaattttgcatgatgtctttgtttaactgccagcctgcaa

SEQ ID NO: 112408 - DNA, 72 bp, Homo sapiens
actcttaagtttgcataatttaattttgcatgatgtctttgtttaactgccagcctgcaaaactccggaaaa

SEQ ID NO: 112409 - DNA, 74 bp, Homo sapiens
ttgcataatttaattttgcatgatgtctttgtttaactgccagcctgcaaaactccggaaaattaacaatcaag

SEQ ID NO: 112410 - DNA, 74 bp, Homo sapiens
tttaattttgcatgatgtctttgtttaactgccagcctgcaaaactccggaaaattaacaatcaagtcttgtga

SEQ ID NO: 112411 - DNA, 78 bp, Homo sapiens
tgatgtctttgtttaactgccagcctgcaaaactccggaaaattaacaatcaagtcttgtgagatgatgcaaacagaa

SEQ ID NO: 112412 - DNA, 75 bp, Homo sapiens
tttgtttaactgccagcctgcaaaactccggaaaattaacaatcaagtcttgtgagatgatgcaaacagaaacta

SEQ ID NO: 112413 - DNA, 77 bp, Homo sapiens
cagcctgcaaaactccggaaaattaacaatcaagtcttgtgagatgatgcaaacagaaactactcgaagcccatatg

SEQ ID NO: 112414 - DNA, 76 bp, Homo sapiens
aaaactccggaaaattaacaatcaagtcttgtgagatgatgcaaacagaaactactcgaagcccatatgtcattgc

SEQ ID NO: 112415 - DNA, 78 bp, Homo sapiens
ggaaaattaacaatcaagtcttgtgagatgatgcaaacagaaactactcgaagcccatatgtcattgctgtaggaaaa

SEQ ID NO: 112416 - DNA, 81 bp, Homo sapiens
acaatcaagtcttgtgagatgatgcaaacagaaactactcgaagcccatatgtcattgctgtaggaaaagcaggcagattt

SEQ ID NO: 112417 - DNA, 84 bp, Homo sapiens
ttgtgagatgatgcaaacagaaactactcgaagcccatatgtcattgctgtaggaaaagcaggcagattttcacctgcaagcat

SEQ ID NO: 112418 - DNA, 76 bp, Homo sapiens
aaacagaaactactcgaagcccatatgtcattgctgtaggaaaagcaggcagattttcacctgcaagcatttccct

SEQ ID NO: 112419 - DNA, 76 bp, Homo sapiens
taggaaaagcaggcagattttcacctgcaagcatttcccttctcctctgtcactctctccctgtcccaggtgggtg

SEQ ID NO: 112420 - DNA, 81 bp, Homo sapiens
ttcacctgcaagcatttcccttctcctctgtcactctctccctgtcccaggtgggtgggtggatcagactgaggctgcagc

SEQ ID NO: 112421 - DNA, 79 bp, Homo sapiens
atttcccttctcctctgtcactctctccctgtcccaggtgggtgggtggatcagactgaggctgcagctcatggcaggg

SEQ ID NO: 112422 - DNA, 84 bp, Homo sapiens
tcactctctccctgtcccaggtgggtgggtggatcagactgaggctgcagctcatggcagggggctggactgtggatgactgtc

SEQ ID NO: 112423 - DNA, 82 bp, Homo sapiens
ctgtcccaggtgggtgggtggatcagactgaggctgcagctcatggcagggggctggactgtggatgactgtctcctcccta

SEQ ID NO: 112424 - DNA, 84 bp, Homo sapiens
atcagactgaggctgcagctcatggcagggggctggactgtggatgactgtctcctccctagccgggaggccagaggcactcag

SEQ ID NO: 112425 - DNA, 81 bp, Homo sapiens
tgcagctcatggcagggggctggactgtggatgactgtctcctccctagccgggaggccagaggcactcaggtggttcaag

SEQ ID NO: 112426 - DNA, 76 bp, Homo sapiens
ggctggactgtggatgactgtctcctccctagccgggaggccagaggcactcaggtggttcaagttgacctgcggg

SEQ ID NO: 112427 - DNA, 77 bp, Homo sapiens
atgactgtctcctccctagccgggaggccagaggcactcaggtggttcaagttgacctgcggggctagcagggcaga

SEQ ID NO: 112428 - DNA, 76 bp, Homo sapiens
tgtctcctccctagccgggaggccagaggcactcaggtggttcaagttgacctgcggggctagcagggcagagtag

SEQ ID NO: 112429 - DNA, 75 bp, Homo sapiens
cgggaggccagaggcactcaggtggttcaagttgacctgcggggctagcagggcagagtagggcttccctgcact

SEQ ID NO: 112430 - DNA, 76 bp, Homo sapiens
agaggcactcaggtggttcaagttgacctgcggggctagcagggcagagtagggcttccctgcactttggtctcca

SEQ ID NO: 112431 - DNA, 78 bp, Homo sapiens
ttcaagttgacctgcggggctagcagggcagagtagggcttccctgcactttggtctccagccctgcctcattgaggc

SEQ ID NO: 112432 - DNA, 76 bp, Homo sapiens
ggggctagcagggcagagtagggcttccctgcactttggtctccagccctgcctcattgaggccaatggtttgctt

SEQ ID NO: 112433 - DNA, 78 bp, Homo sapiens
tagcagggcagagtagggcttccctgcactttggtctccagccctgcctcattgaggccaatggtttgctttctctcc

SEQ ID NO: 112434 - DNA, 76 bp, Homo sapiens
agtagggcttccctgcactttggtctccagccctgcctcattgaggccaatggtttgctttctctcctggctagtc

SEQ ID NO: 112435 - DNA, 83 bp, Homo sapiens
ttggtctccagccctgcctcattgaggccaatggtttgctttctctcctggctagtctccagctgtgaatgcatctggataaa

SEQ ID NO: 112436 - DNA, 83 bp, Homo sapiens
cctgcctcattgaggccaatggtttgctttctctcctggctagtctccagctgtgaatgcatctggataaagacaggactgga

SEQ ID NO: 112437 - DNA, 82 bp, Homo sapiens
ttgaggccaatggtttgctttctctcctggctagtctccagctgtgaatgcatctggataaagacaggactggagcctgagg

SEQ ID NO: 112438 - DNA, 81 bp, Homo sapiens
ttgctttctctcctggctagtctccagctgtgaatgcatctggataaagacaggactggagcctgagggtgggaaatgaaa

SEQ ID NO: 112439 - DNA, 79 bp, Homo sapiens
ttctctcctggctagtctccagctgtgaatgcatctggataaagacaggactggagcctgagggtgggaaatgaaaggg

SEQ ID NO: 112440 - DNA, 78 bp, Homo sapiens
tagtctccagctgtgaatgcatctggataaagacaggactggagcctgagggtgggaaatgaaaggggggcacaggaa

SEQ ID NO: 112441 - DNA, 77 bp, Homo sapiens
tgaatgcatctggataaagacaggactggagcctgagggtgggaaatgaaaggggggcacaggaatccagtcaacat

SEQ ID NO: 112442 - DNA, 75 bp, Homo sapiens
tggataaagacaggactggagcctgagggtgggaaatgaaaggggggcacaggaatccagtcaacattgcctgat

SEQ ID NO: 112443 - DNA, 73 bp, Homo sapiens
aaagacaggactggagcctgagggtgggaaatgaaaggggggcacaggaatccagtcaacattgcctgattta

SEQ ID NO: 112444 - DNA, 76 bp, Homo sapiens
gcctgagggtgggaaatgaaaggggggcacaggaatccagtcaacattgcctgatttacaggagtgacggctcaca

SEQ ID NO: 112445 - DNA, 75 bp, Homo sapiens
tgggaaatgaaaggggggcacaggaatccagtcaacattgcctgatttacaggagtgacggctcacaagtgggta

SEQ ID NO: 112446 - DNA, 75 bp, Homo sapiens
aaaggggggcacaggaatccagtcaacattgcctgatttacaggagtgacggctcacaagtgggtacacaattga

SEQ ID NO: 112447 - DNA, 77 bp, Homo sapiens
acaggaatccagtcaacattgcctgatttacaggagtgacggctcacaagtgggtacacaattgaggatgggtggaa

SEQ ID NO: 112448 - DNA, 77 bp, Homo sapiens
agtcaacattgcctgatttacaggagtgacggctcacaagtgggtacacaattgaggatgggtggaagtgagaataa

SEQ ID NO: 112449 - DNA, 78 bp, Homo sapiens
attgcctgatttacaggagtgacggctcacaagtgggtacacaattgaggatgggtggaagtgagaataaggagagca

SEQ ID NO: 112450 - DNA, 78 bp, Homo sapiens
ttacaggagtgacggctcacaagtgggtacacaattgaggatgggtggaagtgagaataaggagagcatctgtgggta

SEQ ID NO: 112451 - DNA, 75 bp, Homo sapiens
ctcacaagtgggtacacaattgaggatgggtggaagtgagaataaggagagcatctgtgggtaccagttttatgg

SEQ ID NO: 112452 - DNA, 75 bp, Homo sapiens
aagtgggtacacaattgaggatgggtggaagtgagaataaggagagcatctgtgggtaccagttttatggtgtca

SEQ ID NO: 112453 - DNA, 74 bp, Homo sapiens
aattgaggatgggtggaagtgagaataaggagagcatctgtgggtaccagttttatggtgtcacagacttcttt

SEQ ID NO: 112454 - DNA, 73 bp, Homo sapiens
atgggtggaagtgagaataaggagagcatctgtgggtaccagttttatggtgtcacagacttcttttgtaaaa

SEQ ID NO: 112455 - DNA, 73 bp, Homo sapiens
gtgagaataaggagagcatctgtgggtaccagttttatggtgtcacagacttcttttgtaaaaataataaaca

SEQ ID NO: 112456 - DNA, 69 bp, Homo sapiens
tgtgggtaccagttttatggtgtcacagacttcttttgtaaaaataataaacacataaattaaatatta

SEQ ID NO: 112457 - DNA, 75 bp, Homo sapiens
gcacagcaaaagactgtatttcccagcctactttacagctaggtgcctccatatgtttgtttacgttctggtcaa

SEQ ID NO: 112458 - DNA, 72 bp, Homo sapiens
aaagactgtatttcccagcctactttacagctaggtgcctccatatgtttgtttacgttctggtcaatgatt

SEQ ID NO: 112459 - DNA, 76 bp, Homo sapiens
tatttcccagcctactttacagctaggtgcctccatatgtttgtttacgttctggtcaatgatttgtcagcaggag

SEQ ID NO: 112460 - DNA, 77 bp, Homo sapiens
tactttacagctaggtgcctccatatgtttgtttacgttctggtcaatgatttgtcagcaggagtgtctgggcaaat

SEQ ID NO: 112461 - DNA, 78 bp, Homo sapiens
agctaggtgcctccatatgtttgtttacgttctggtcaatgatttgtcagcaggagtgtctgggcaaatttcagatcc

SEQ ID NO: 112462 - DNA, 78 bp, Homo sapiens
atatgtttgtttacgttctggtcaatgatttgtcagcaggagtgtctgggcaaatttcagatcctgctcttcaaggga

SEQ ID NO: 112463 - DNA, 77 bp, Homo sapiens
tttgtttacgttctggtcaatgatttgtcagcaggagtgtctgggcaaatttcagatcctgctcttcaagggaaaga

SEQ ID NO: 112464 - DNA, 79 bp, Homo sapiens
ttacgttctggtcaatgatttgtcagcaggagtgtctgggcaaatttcagatcctgctcttcaagggaaagagtagatc

SEQ ID NO: 112465 - DNA, 79 bp, Homo sapiens
ttctggtcaatgatttgtcagcaggagtgtctgggcaaatttcagatcctgctcttcaagggaaagagtagatcttccc

SEQ ID NO: 112466 - DNA, 78 bp, Homo sapiens
atgatttgtcagcaggagtgtctgggcaaatttcagatcctgctcttcaagggaaagagtagatcttccccttccata

SEQ ID NO: 112467 - DNA, 76 bp, Homo sapiens
atttgtcagcaggagtgtctgggcaaatttcagatcctgctcttcaagggaaagagtagatcttccccttccatat

SEQ ID NO: 112468 - DNA, 76 bp, Homo sapiens
aggagtgtctgggcaaatttcagatcctgctcttcaagggaaagagtagatcttccccttccatattctctcttgc

SEQ ID NO: 112469 - DNA, 78 bp, Homo sapiens
agtgtctgggcaaatttcagatcctgctcttcaagggaaagagtagatcttccccttccatattctctcttgctgctg

SEQ ID NO: 112470 - DNA, 79 bp, Homo sapiens
tgggcaaatttcagatcctgctcttcaagggaaagagtagatcttccccttccatattctctcttgctgctggctggaa

SEQ ID NO: 112471 - DNA, 78 bp, Homo sapiens
aaatttcagatcctgctcttcaagggaaagagtagatcttccccttccatattctctcttgctgctggctggaatgtg

SEQ ID NO: 112472 - DNA, 79 bp, Homo sapiens
agtagatcttccccttccatattctctcttgctgctggctggaatgtggatgtgatgttgggggctggagcacccattt

SEQ ID NO: 112473 - DNA, 87 bp, Homo sapiens
tctcttgctgctggctggaatgtggatgtgatgttgggggctggagcacccattttgagccatgaggtaaatgccaggcattgcaga

SEQ ID NO: 112474 - DNA, 81 bp, Homo sapiens
atgttgggggctggagcacccattttgagccatgaggtaaatgccaggcattgcagaaggcagcccatcagggtagcagaa

SEQ ID NO: 112475 - DNA, 80 bp, Homo sapiens
ctggagcacccattttgagccatgaggtaaatgccaggcattgcagaaggcagcccatcagggtagcagaaacctggttc

SEQ ID NO: 112476 - DNA, 80 bp, Homo sapiens
cattttgagccatgaggtaaatgccaggcattgcagaaggcagcccatcagggtagcagaaacctggttctttgtgattg

SEQ ID NO: 112477 - DNA, 82 bp, Homo sapiens
ccatgaggtaaatgccaggcattgcagaaggcagcccatcagggtagcagaaacctggttctttgtgattgtgaagatgcca

SEQ ID NO: 112478 - DNA, 84 bp, Homo sapiens
taaatgccaggcattgcagaaggcagcccatcagggtagcagaaacctggttctttgtgattgtgaagatgccatgccaatcta

SEQ ID NO: 112479 - DNA, 83 bp, Homo sapiens
ttgcagaaggcagcccatcagggtagcagaaacctggttctttgtgattgtgaagatgccatgccaatctactgagacttcta

SEQ ID NO: 112480 - DNA, 80 bp, Homo sapiens
aaggcagcccatcagggtagcagaaacctggttctttgtgattgtgaagatgccatgccaatctactgagacttctacaa

SEQ ID NO: 112481 - DNA, 80 bp, Homo sapiens
atcagggtagcagaaacctggttctttgtgattgtgaagatgccatgccaatctactgagacttctacaagagagagaaa

SEQ ID NO: 112482 - DNA, 80 bp, Homo sapiens
gttctttgtgattgtgaagatgccatgccaatctactgagacttctacaagagagagaaacacacttctatcttgtttaa

SEQ ID NO: 112483 - DNA, 77 bp, Homo sapiens
atgccaatctactgagacttctacaagagagagaaacacacttctatcttgtttaagccctgataatttggaatctc

SEQ ID NO: 112484 - DNA, 76 bp, Homo sapiens
aatctactgagacttctacaagagagagaaacacacttctatcttgtttaagccctgataatttggaatctctctc

SEQ ID NO: 112485 - DNA, 77 bp, Homo sapiens
ttctacaagagagagaaacacacttctatcttgtttaagccctgataatttggaatctctctctcatagcaacctaa

SEQ ID NO: 112486 - DNA, 75 bp, Homo sapiens
agagagaaacacacttctatcttgtttaagccctgataatttggaatctctctctcatagcaacctaaccaatac

SEQ ID NO: 112487 - DNA, 74 bp, Homo sapiens
atcttgtttaagccctgataatttggaatctctctctcatagcaacctaaccaataccctaatacaacacaatg

SEQ ID NO: 112488 - DNA, 79 bp, Homo sapiens
tgataatttggaatctctctctcatagcaacctaaccaataccctaatacaacacaatgtctttatgtgtgtgctatta

SEQ ID NO: 112489 - DNA, 77 bp, Homo sapiens
tttggaatctctctctcatagcaacctaaccaataccctaatacaacacaatgtctttatgtgtgtgctattagtaa

SEQ ID NO: 112490 - DNA, 82 bp, Homo sapiens
tctctctcatagcaacctaaccaataccctaatacaacacaatgtctttatgtgtgtgctattagtaatcagagcatgtctg

SEQ ID NO: 112491 - DNA, 79 bp, Homo sapiens
tctttatgtgtgtgctattagtaatcagagcatgtctgtggtaaaagtagacctctgggcattcttcaaaagacttaga

SEQ ID NO: 112492 - DNA, 77 bp, Homo sapiens
tgtgctattagtaatcagagcatgtctgtggtaaaagtagacctctgggcattcttcaaaagacttagaactgactt

SEQ ID NO: 112493 - DNA, 74 bp, Homo sapiens
attagtaatcagagcatgtctgtggtaaaagtagacctctgggcattcttcaaaagacttagaactgactttta

SEQ ID NO: 112494 - DNA, 72 bp, Homo sapiens
agcatgtctgtggtaaaagtagacctctgggcattcttcaaaagacttagaactgacttttaactcactttc

SEQ ID NO: 112495 - DNA, 72 bp, Homo sapiens
taaaagtagacctctgggcattcttcaaaagacttagaactgacttttaactcactttctgcatcccatcct

SEQ ID NO: 112496 - DNA, 70 bp, Homo sapiens
acctctgggcattcttcaaaagacttagaactgacttttaactcactttctgcatcccatccttttaact

SEQ ID NO: 112497 - DNA, 71 bp, Homo sapiens
cattcttcaaaagacttagaactgacttttaactcactttctgcatcccatccttttaacttctcagaaag

SEQ ID NO: 112498 - DNA, 72 bp, Homo sapiens
aaaagacttagaactgacttttaactcactttctgcatcccatccttttaacttctcagaaagtgaggatca

SEQ ID NO: 112499 - DNA, 74 bp, Homo sapiens
gaactgacttttaactcactttctgcatcccatccttttaacttctcagaaagtgaggatcagttatatagtta

SEQ ID NO: 112500 - DNA, 74 bp, Homo sapiens
tttaactcactttctgcatcccatccttttaacttctcagaaagtgaggatcagttatatagttaggttcctgc

SEQ ID NO: 112501 - DNA, 74 bp, Homo sapiens
tttctgcatcccatccttttaacttctcagaaagtgaggatcagttatatagttaggttcctgccctgaaagta

SEQ ID NO: 112502 - DNA, 73 bp, Homo sapiens
atccttttaacttctcagaaagtgaggatcagttatatagttaggttcctgccctgaaagtactacagtatga

SEQ ID NO: 112503 - DNA, 77 bp, Homo sapiens
tctcagaaagtgaggatcagttatatagttaggttcctgccctgaaagtactacagtatgacagcaccaggctttta

SEQ ID NO: 112504 - DNA, 73 bp, Homo sapiens
aaagtgaggatcagttatatagttaggttcctgccctgaaagtactacagtatgacagcaccaggcttttatt

SEQ ID NO: 112505 - DNA, 70 bp, Homo sapiens
agttatatagttaggttcctgccctgaaagtactacagtatgacagcaccaggcttttattttcttttta

SEQ ID NO: 112506 - DNA, 67 bp, Homo sapiens
attttctttttaactaggtgtgactaatttggagattactttttaaacatacacctaagatgttgta

SEQ ID NO: 112507 - DNA, 75 bp, Homo sapiens
tgactaatttggagattactttttaaacatacacctaagatgttgtagctaatactgcctcttccatcctagtca

SEQ ID NO: 112508 - DNA, 72 bp, Homo sapiens
atttggagattactttttaaacatacacctaagatgttgtagctaatactgcctcttccatcctagtcactt

SEQ ID NO: 112509 - DNA, 75 bp, Homo sapiens
ttttaaacatacacctaagatgttgtagctaatactgcctcttccatcctagtcactttgcaacttgacattctt

SEQ ID NO: 112510 - DNA, 76 bp, Homo sapiens
aacatacacctaagatgttgtagctaatactgcctcttccatcctagtcactttgcaacttgacattcttttctag

SEQ ID NO: 112511 - DNA, 79 bp, Homo sapiens
ctaagatgttgtagctaatactgcctcttccatcctagtcactttgcaacttgacattcttttctagtgatgatgaaat

SEQ ID NO: 112512 - DNA, 80 bp, Homo sapiens
taagatgttgtagctaatactgcctcttccatcctagtcactttgcaacttgacattcttttctagtgatgatgaaattc

SEQ ID NO: 112513 - DNA, 82 bp, Homo sapiens
taatactgcctcttccatcctagtcactttgcaacttgacattcttttctagtgatgatgaaattctcagcatccagttaga

SEQ ID NO: 112514 - DNA, 83 bp, Homo sapiens
tgcctcttccatcctagtcactttgcaacttgacattcttttctagtgatgatgaaattctcagcatccagttagaattcata

SEQ ID NO: 112515 - DNA, 82 bp, Homo sapiens
tcttccatcctagtcactttgcaacttgacattcttttctagtgatgatgaaattctcagcatccagttagaattcatacaa

SEQ ID NO: 112516 - DNA, 82 bp, Homo sapiens
ttccatcctagtcactttgcaacttgacattcttttctagtgatgatgaaattctcagcatccagttagaattcatacaatg

SEQ ID NO: 112517 - DNA, 85 bp, Homo sapiens
tagtcactttgcaacttgacattcttttctagtgatgatgaaattctcagcatccagttagaattcatacaatggtgcatatgct

SEQ ID NO: 112518 - DNA, 83 bp, Homo sapiens
actttgcaacttgacattcttttctagtgatgatgaaattctcagcatccagttagaattcatacaatggtgcatatgcttta

SEQ ID NO: 112519 - DNA, 83 bp, Homo sapiens
aacttgacattcttttctagtgatgatgaaattctcagcatccagttagaattcatacaatggtgcatatgctttagaatagc

SEQ ID NO: 112520 - DNA, 86 bp, Homo sapiens
tttctagtgatgatgaaattctcagcatccagttagaattcatacaatggtgcatatgctttagaatagcctcaatgtctggaata

SEQ ID NO: 112521 - DNA, 80 bp, Homo sapiens
agttagaattcatacaatggtgcatatgctttagaatagcctcaatgtctggaatataagtgatgggtctgatttttaga

SEQ ID NO: 112522 - DNA, 80 bp, Homo sapiens
aattcatacaatggtgcatatgctttagaatagcctcaatgtctggaatataagtgatgggtctgatttttagaaacagc

SEQ ID NO: 112523 - DNA, 80 bp, Homo sapiens
tgcatatgctttagaatagcctcaatgtctggaatataagtgatgggtctgatttttagaaacagccagaaggcatttaa

SEQ ID NO: 112524 - DNA, 77 bp, Homo sapiens
tttagaatagcctcaatgtctggaatataagtgatgggtctgatttttagaaacagccagaaggcatttaagatcaa

SEQ ID NO: 112525 - DNA, 78 bp, Homo sapiens
tcaatgtctggaatataagtgatgggtctgatttttagaaacagccagaaggcatttaagatcaagactggtgacaaa

SEQ ID NO: 112526 - DNA, 75 bp, Homo sapiens
taagtgatgggtctgatttttagaaacagccagaaggcatttaagatcaagactggtgacaaataaggtgaccaa

SEQ ID NO: 112527 - DNA, 73 bp, Homo sapiens
atttttagaaacagccagaaggcatttaagatcaagactggtgacaaataaggtgaccaaggaagcttgacaa

SEQ ID NO: 112528 - DNA, 74 bp, Homo sapiens
aaacagccagaaggcatttaagatcaagactggtgacaaataaggtgaccaaggaagcttgacaatacctgtct

SEQ ID NO: 112529 - DNA, 73 bp, Homo sapiens
aaggcatttaagatcaagactggtgacaaataaggtgaccaaggaagcttgacaatacctgtcttgttcaaaa

SEQ ID NO: 112530 - DNA, 74 bp, Homo sapiens
ttaagatcaagactggtgacaaataaggtgaccaaggaagcttgacaatacctgtcttgttcaaaaatgaggtg

SEQ ID NO: 112531 - DNA, 72 bp, Homo sapiens
gtgacaaataaggtgaccaaggaagcttgacaatacctgtcttgttcaaaaatgaggtgtgatttaaaagta

SEQ ID NO: 112532 - DNA, 70 bp, Homo sapiens
aataaggtgaccaaggaagcttgacaatacctgtcttgttcaaaaatgaggtgtgatttaaaagtaagga

SEQ ID NO: 112533 - DNA, 70 bp, Homo sapiens
cttgacaatacctgtcttgttcaaaaatgaggtgtgatttaaaagtaaggaggatttacttgtttagcca

SEQ ID NO: 112534 - DNA, 68 bp, Homo sapiens
cctgtcttgttcaaaaatgaggtgtgatttaaaagtaaggaggatttacttgtttagccaataaacta

SEQ ID NO: 112535 - DNA, 67 bp, Homo sapiens
caaaaatgaggtgtgatttaaaagtaaggaggatttacttgtttagccaataaactaactctgaaag

SEQ ID NO: 112536 - DNA, 68 bp, Homo sapiens
ggtgtgatttaaaagtaaggaggatttacttgtttagccaataaactaactctgaaagtcatttcaaa

SEQ ID NO: 112537 - DNA, 70 bp, Homo sapiens
gtaaggaggatttacttgtttagccaataaactaactctgaaagtcatttcaaaaaagcagatccgaaga

SEQ ID NO: 112538 - DNA, 70 bp, Homo sapiens
ggatttacttgtttagccaataaactaactctgaaagtcatttcaaaaaagcagatccgaagatgtttaa

SEQ ID NO: 112539 - DNA, 73 bp, Homo sapiens
tagccaataaactaactctgaaagtcatttcaaaaaagcagatccgaagatgtttaaagtaataatggtgctg

SEQ ID NO: 112540 - DNA, 72 bp, Homo sapiens
atttcaaaaaagcagatccgaagatgtttaaagtaataatggtgctgttagaatggtgctccctctccctcc

SEQ ID NO: 112541 - DNA, 72 bp, Homo sapiens
aagatgtttaaagtaataatggtgctgttagaatggtgctccctctccctcccaggggatgactttgaagga

SEQ ID NO: 112542 - DNA, 76 bp, Homo sapiens
tgttagaatggtgctccctctccctcccaggggatgactttgaaggacactacaataacagatgtgtaaattctga

SEQ ID NO: 112543 - DNA, 74 bp, Homo sapiens
aatggtgctccctctccctcccaggggatgactttgaaggacactacaataacagatgtgtaaattctgaaata

SEQ ID NO: 112544 - DNA, 74 bp, Homo sapiens
gggatgactttgaaggacactacaataacagatgtgtaaattctgaaatatatggctaaaatgaggtttattat

SEQ ID NO: 112545 - DNA, 73 bp, Homo sapiens
gactttgaaggacactacaataacagatgtgtaaattctgaaatatatggctaaaatgaggtttattattttc

SEQ ID NO: 112546 - DNA, 74 bp, Homo sapiens
gacactacaataacagatgtgtaaattctgaaatatatggctaaaatgaggtttattattttctagtcaccact

SEQ ID NO: 112547 - DNA, 73 bp, Homo sapiens
gatgtgtaaattctgaaatatatggctaaaatgaggtttattattttctagtcaccacttagacatcttttag

SEQ ID NO: 112548 - DNA, 72 bp, Homo sapiens
attctgaaatatatggctaaaatgaggtttattattttctagtcaccacttagacatcttttagtcatttgt

SEQ ID NO: 112549 - DNA, 73 bp, Homo sapiens
atatatggctaaaatgaggtttattattttctagtcaccacttagacatcttttagtcatttgtttatgacag

SEQ ID NO: 112550 - DNA, 73 bp, Homo sapiens
atgaggtttattattttctagtcaccacttagacatcttttagtcatttgtttatgacagtttataaatgaga

SEQ ID NO: 112551 - DNA, 73 bp, Homo sapiens
ttctagtcaccacttagacatcttttagtcatttgtttatgacagtttataaatgagaaagaagtccatttaa

SEQ ID NO: 112552 - DNA, 73 bp, Homo sapiens
ttagtcatttgtttatgacagtttataaatgagaaagaagtccatttaaaatatctccatgaggacctcaagg

SEQ ID NO: 112553 - DNA, 73 bp, Homo sapiens
tgtttatgacagtttataaatgagaaagaagtccatttaaaatatctccatgaggacctcaaggtaaataata

SEQ ID NO: 112554 - DNA, 73 bp, Homo sapiens
gtttataaatgagaaagaagtccatttaaaatatctccatgaggacctcaaggtaaataataggaatcgatca

SEQ ID NO: 112555 - DNA, 77 bp, Homo sapiens
atgagaaagaagtccatttaaaatatctccatgaggacctcaaggtaaataataggaatcgatcattcatcaatctg

SEQ ID NO: 112556 - DNA, 76 bp, Homo sapiens
aagtccatttaaaatatctccatgaggacctcaaggtaaataataggaatcgatcattcatcaatctggcctggcc

SEQ ID NO: 112557 - DNA, 73 bp, Homo sapiens
aaggtaaataataggaatcgatcattcatcaatctggcctggccccggcccactgaagaaagttccttcttga

SEQ ID NO: 112558 - DNA, 77 bp, Homo sapiens
ataataggaatcgatcattcatcaatctggcctggccccggcccactgaagaaagttccttcttgagtgcattcaaa

SEQ ID NO: 112559 - DNA, 75 bp, Homo sapiens
aatctggcctggccccggcccactgaagaaagttccttcttgagtgcattcaaagctctcatggtccagccctgt

SEQ ID NO: 112560 - DNA, 76 bp, Homo sapiens
ctggccccggcccactgaagaaagttccttcttgagtgcattcaaagctctcatggtccagccctgttcaacctga

SEQ ID NO: 112561 - DNA, 82 bp, Homo sapiens
actgaagaaagttccttcttgagtgcattcaaagctctcatggtccagccctgttcaacctgagcagcatcctatctgctcc

SEQ ID NO: 112562 - DNA, 80 bp, Homo sapiens
aaagttccttcttgagtgcattcaaagctctcatggtccagccctgttcaacctgagcagcatcctatctgctcctcccc

SEQ ID NO: 112563 - DNA, 83 bp, Homo sapiens
tcttgagtgcattcaaagctctcatggtccagccctgttcaacctgagcagcatcctatctgctcctcccccagacgttccga

SEQ ID NO: 112564 - DNA, 82 bp, Homo sapiens
attcaaagctctcatggtccagccctgttcaacctgagcagcatcctatctgctcctcccccagacgttccgatgccctgca

SEQ ID NO: 112565 - DNA, 81 bp, Homo sapiens
atggtccagccctgttcaacctgagcagcatcctatctgctcctcccccagacgttccgatgccctgcaccagattcaaga

SEQ ID NO: 112566 - DNA, 77 bp, Homo sapiens
atcctatctgctcctcccccagacgttccgatgccctgcaccagattcaagagagagccaagttccccaacaggcta

SEQ ID NO: 112567 - DNA, 77 bp, Homo sapiens
ctcccccagacgttccgatgccctgcaccagattcaagagagagccaagttccccaacaggctatgcacgtggctat

SEQ ID NO: 112568 - DNA, 77 bp, Homo sapiens
agacgttccgatgccctgcaccagattcaagagagagccaagttccccaacaggctatgcacgtggctattaacacc

SEQ ID NO: 112569 - DNA, 81 bp, Homo sapiens
atgccctgcaccagattcaagagagagccaagttccccaacaggctatgcacgtggctattaacacccagcacacgctatc

SEQ ID NO: 112570 - DNA, 79 bp, Homo sapiens
agattcaagagagagccaagttccccaacaggctatgcacgtggctattaacacccagcacacgctatccctggccagc

SEQ ID NO: 112571 - DNA, 79 bp, Homo sapiens
aagagagagccaagttccccaacaggctatgcacgtggctattaacacccagcacacgctatccctggccagctctctc

SEQ ID NO: 112572 - DNA, 77 bp, Homo sapiens
gctatgcacgtggctattaacacccagcacacgctatccctggccagctctctccttcttccctaagaattaaacat

SEQ ID NO: 112573 - DNA, 73 bp, Homo sapiens
acgtggctattaacacccagcacacgctatccctggccagctctctccttcttccctaagaattaaacattct

SEQ ID NO: 112574 - DNA, 74 bp, Homo sapiens
attaacacccagcacacgctatccctggccagctctctccttcttccctaagaattaaacattctttggcctga

SEQ ID NO: 112575 - DNA, 70 bp, Homo sapiens
acgctatccctggccagctctctccttcttccctaagaattaaacattctttggcctgagttttcctcct

SEQ ID NO: 112576 - DNA, 73 bp, Homo sapiens
tggccagctctctccttcttccctaagaattaaacattctttggcctgagttttcctcctttatgtcaccata

SEQ ID NO: 112577 - DNA, 70 bp, Homo sapiens
tctccttcttccctaagaattaaacattctttggcctgagttttcctcctttatgtcaccataaagttga

SEQ ID NO: 112578 - DNA, 69 bp, Homo sapiens
ccctaagaattaaacattctttggcctgagttttcctcctttatgtcaccataaagttgagttattcat

SEQ ID NO: 112579 - DNA, 71 bp, Homo sapiens
taaacattctttggcctgagttttcctcctttatgtcaccataaagttgagttattcattattagggtcta

SEQ ID NO: 112580 - DNA, 74 bp, Homo sapiens
tctttggcctgagttttcctcctttatgtcaccataaagttgagttattcattattagggtctatacatgagta

SEQ ID NO: 112581 - DNA, 73 bp, Homo sapiens
ctgagttttcctcctttatgtcaccataaagttgagttattcattattagggtctatacatgagtagccaaaa

SEQ ID NO: 112582 - DNA, 74 bp, Homo sapiens
tcctttatgtcaccataaagttgagttattcattattagggtctatacatgagtagccaaaatatacgggtctc

SEQ ID NO: 112583 - DNA, 72 bp, Homo sapiens
gttgagttattcattattagggtctatacatgagtagccaaaatatacgggtctctatatttaggtcaaggg

SEQ ID NO: 112584 - DNA, 76 bp, Homo sapiens
tatacatgagtagccaaaatatacgggtctctatatttaggtcaaggggccttcagcaggagaacatgaataatta

SEQ ID NO: 112585 - DNA, 72 bp, Homo sapiens
agtagccaaaatatacgggtctctatatttaggtcaaggggccttcagcaggagaacatgaataattaggag

SEQ ID NO: 112586 - DNA, 75 bp, Homo sapiens
aaatatacgggtctctatatttaggtcaaggggccttcagcaggagaacatgaataattaggagtgaggccatga

SEQ ID NO: 112587 - DNA, 77 bp, Homo sapiens
tctatatttaggtcaaggggccttcagcaggagaacatgaataattaggagtgaggccatgagacagaggaagaaaa

SEQ ID NO: 112588 - DNA, 78 bp, Homo sapiens
ttaggtcaaggggccttcagcaggagaacatgaataattaggagtgaggccatgagacagaggaagaaaagctcatag

SEQ ID NO: 112589 - DNA, 82 bp, Homo sapiens
agaacatgaataattaggagtgaggccatgagacagaggaagaaaagctcataggaatgggaagacagcctctcagatgaga

SEQ ID NO: 112590 - DNA, 81 bp, Homo sapiens
aataattaggagtgaggccatgagacagaggaagaaaagctcataggaatgggaagacagcctctcagatgagaggtgtgc

SEQ ID NO: 112591 - DNA, 85 bp, Homo sapiens
gacagaggaagaaaagctcataggaatgggaagacagcctctcagatgagaggtgtgcggagtgattgctgtgaggaattgctca

SEQ ID NO: 112592 - DNA, 83 bp, Homo sapiens
agaaaagctcataggaatgggaagacagcctctcagatgagaggtgtgcggagtgattgctgtgaggaattgctcaataggaa

SEQ ID NO: 112593 - DNA, 82 bp, Homo sapiens
taggaatgggaagacagcctctcagatgagaggtgtgcggagtgattgctgtgaggaattgctcaataggaaagttagccaa

SEQ ID NO: 112594 - DNA, 81 bp, Homo sapiens
aagacagcctctcagatgagaggtgtgcggagtgattgctgtgaggaattgctcaataggaaagttagccaacctgaggac

SEQ ID NO: 112595 - DNA, 80 bp, Homo sapiens
ctctcagatgagaggtgtgcggagtgattgctgtgaggaattgctcaataggaaagttagccaacctgaggacgtttcta

SEQ ID NO: 112596 - DNA, 76 bp, Homo sapiens
atgagaggtgtgcggagtgattgctgtgaggaattgctcaataggaaagttagccaacctgaggacgtttctaggg

SEQ ID NO: 112597 - DNA, 71 bp, Homo sapiens
agtgattgctgtgaggaattgctcaataggaaagttagccaacctgaggacgtttctaggggaggaaaagg

SEQ ID NO: 112598 - DNA, 70 bp, Homo sapiens
ttgctgtgaggaattgctcaataggaaagttagccaacctgaggacgtttctaggggaggaaaagggaaa

SEQ ID NO: 112599 - DNA, 68 bp, Homo sapiens
aattgctcaataggaaagttagccaacctgaggacgtttctaggggaggaaaagggaaactcatatgg

SEQ ID NO: 112600 - DNA, 68 bp, Homo sapiens
aaagttagccaacctgaggacgtttctaggggaggaaaagggaaactcatatggttctctgctaattc

SEQ ID NO: 112601 - DNA, 67 bp, Homo sapiens
aacctgaggacgtttctaggggaggaaaagggaaactcatatggttctctgctaattcttaaaaata

SEQ ID NO: 112602 - DNA, 66 bp, Homo sapiens
aggacgtttctaggggaggaaaagggaaactcatatggttctctgctaattcttaaaaataaggta

SEQ ID NO: 112603 - DNA, 70 bp, Homo sapiens
ggaggaaaagggaaactcatatggttctctgctaattcttaaaaataaggtagattcttactcatctagg

SEQ ID NO: 112604 - DNA, 72 bp, Homo sapiens
aaagggaaactcatatggttctctgctaattcttaaaaataaggtagattcttactcatctagggtgcttgc

SEQ ID NO: 112605 - DNA, 75 bp, Homo sapiens
atatggttctctgctaattcttaaaaataaggtagattcttactcatctagggtgcttgctcgttatgaacacag

SEQ ID NO: 112606 - DNA, 74 bp, Homo sapiens
ttaaaaataaggtagattcttactcatctagggtgcttgctcgttatgaacacaggaagattaaggaatgagta

SEQ ID NO: 112607 - DNA, 77 bp, Homo sapiens
ttactcatctagggtgcttgctcgttatgaacacaggaagattaaggaatgagtatggactgtttctactctatgtt

SEQ ID NO: 112608 - DNA, 74 bp, Homo sapiens
tcgttatgaacacaggaagattaaggaatgagtatggactgtttctactctatgttttcggacaagaagaataa

SEQ ID NO: 112609 - DNA, 72 bp, Homo sapiens
gaacacaggaagattaaggaatgagtatggactgtttctactctatgttttcggacaagaagaataataaaa

SEQ ID NO: 112610 - DNA, 71 bp, Homo sapiens
gattaaggaatgagtatggactgtttctactctatgttttcggacaagaagaataataaaaaagcactggg

SEQ ID NO: 112611 - DNA, 71 bp, Homo sapiens
agtatggactgtttctactctatgttttcggacaagaagaataataaaaaagcactgggtagctggaacaa

SEQ ID NO: 112612 - DNA, 74 bp, Homo sapiens
tctatgttttcggacaagaagaataataaaaaagcactgggtagctggaacaactgcagaggccccaacaatga

SEQ ID NO: 112613 - DNA, 74 bp, Homo sapiens
acaagaagaataataaaaaagcactgggtagctggaacaactgcagaggccccaacaatgatggagactttctg

SEQ ID NO: 112614 - DNA, 75 bp, Homo sapiens
ataataaaaaagcactgggtagctggaacaactgcagaggccccaacaatgatggagactttctggtgcaccgtg

SEQ ID NO: 112615 - DNA, 76 bp, Homo sapiens
aaaagcactgggtagctggaacaactgcagaggccccaacaatgatggagactttctggtgcaccgtggcacaggg

SEQ ID NO: 112616 - DNA, 77 bp, Homo sapiens
gtagctggaacaactgcagaggccccaacaatgatggagactttctggtgcaccgtggcacaggggtctcttccaaa

SEQ ID NO: 112617 - DNA, 74 bp, Homo sapiens
ccaacaatgatggagactttctggtgcaccgtggcacaggggtctcttccaaagggactcaatcaaccccaaca

SEQ ID NO: 112618 - DNA, 76 bp, Homo sapiens
actttctggtgcaccgtggcacaggggtctcttccaaagggactcaatcaaccccaacaggcatcatcttctgtga

SEQ ID NO: 112619 - DNA, 76 bp, Homo sapiens
gtggcacaggggtctcttccaaagggactcaatcaaccccaacaggcatcatcttctgtgactcaagatgtccttt

SEQ ID NO: 112620 - DNA, 74 bp, Homo sapiens
gggtctcttccaaagggactcaatcaaccccaacaggcatcatcttctgtgactcaagatgtcctttttaggag

SEQ ID NO: 112621 - DNA, 74 bp, Homo sapiens
aaagggactcaatcaaccccaacaggcatcatcttctgtgactcaagatgtcctttttaggagtgcttgtactt

SEQ ID NO: 112622 - DNA, 76 bp, Homo sapiens
actcaatcaaccccaacaggcatcatcttctgtgactcaagatgtcctttttaggagtgcttgtactttttaatgc

SEQ ID NO: 112623 - DNA, 75 bp, Homo sapiens
atcttctgtgactcaagatgtcctttttaggagtgcttgtactttttaatgctcagagaagttcgtattactgat

SEQ ID NO: 112624 - DNA, 72 bp, Homo sapiens
actcaagatgtcctttttaggagtgcttgtactttttaatgctcagagaagttcgtattactgattcgggaa

SEQ ID NO: 112625 - DNA, 71 bp, Homo sapiens
tcctttttaggagtgcttgtactttttaatgctcagagaagttcgtattactgattcgggaacactgagtt

SEQ ID NO: 112626 - DNA, 73 bp, Homo sapiens
tttaggagtgcttgtactttttaatgctcagagaagttcgtattactgattcgggaacactgagtttttcagc

SEQ ID NO: 112627 - DNA, 72 bp, Homo sapiens
tactttttaatgctcagagaagttcgtattactgattcgggaacactgagtttttcagctcctgtaaaacta

SEQ ID NO: 112628 - DNA, 73 bp, Homo sapiens
ttaatgctcagagaagttcgtattactgattcgggaacactgagtttttcagctcctgtaaaactattttcag

SEQ ID NO: 112629 - DNA, 69 bp, Homo sapiens
gagaagttcgtattactgattcgggaacactgagtttttcagctcctgtaaaactattttcaggtttat

SEQ ID NO: 112630 - DNA, 69 bp, Homo sapiens
actgattcgggaacactgagtttttcagctcctgtaaaactattttcaggtttattttcaagtacattc

SEQ ID NO: 112631 - DNA, 65 bp, Homo sapiens
gctcctgtaaaactattttcaggtttattttcaagtacattctttacctcggggggtcaaatctt

SEQ ID NO: 112632 - DNA, 64 bp, Homo sapiens
ctattttcaggtttattttcaagtacattctttacctcggggggtcaaatcttttggtttccag

SEQ ID NO: 112633 - DNA, 67 bp, Homo sapiens
ttattttcaagtacattctttacctcggggggtcaaatcttttggtttccagtgaatatcgtggtta

SEQ ID NO: 112634 - DNA, 67 bp, Homo sapiens
aagtacattctttacctcggggggtcaaatcttttggtttccagtgaatatcgtggttatacctgtg

SEQ ID NO: 112635 - DNA, 66 bp, Homo sapiens
ttctttacctcggggggtcaaatcttttggtttccagtgaatatcgtggttatacctgtggttacc

SEQ ID NO: 112636 - DNA, 73 bp, Homo sapiens
gggtcaaatcttttggtttccagtgaatatcgtggttatacctgtggttacccactgacttctcatctgccta

SEQ ID NO: 112637 - DNA, 76 bp, Homo sapiens
ttttggtttccagtgaatatcgtggttatacctgtggttacccactgacttctcatctgcctagcttatctgataa

SEQ ID NO: 112638 - DNA, 78 bp, Homo sapiens
tttccagtgaatatcgtggttatacctgtggttacccactgacttctcatctgcctagcttatctgataacaggcaaa

SEQ ID NO: 112639 - DNA, 76 bp, Homo sapiens
atatcgtggttatacctgtggttacccactgacttctcatctgcctagcttatctgataacaggcaaatggggaaa

SEQ ID NO: 112640 - DNA, 76 bp, Homo sapiens
tatacctgtggttacccactgacttctcatctgcctagcttatctgataacaggcaaatggggaaagaggctttaa

SEQ ID NO: 112641 - DNA, 75 bp, Homo sapiens
ttacccactgacttctcatctgcctagcttatctgataacaggcaaatggggaaagaggctttaatacccctcaa

SEQ ID NO: 112642 - DNA, 73 bp, Homo sapiens
ttctcatctgcctagcttatctgataacaggcaaatggggaaagaggctttaatacccctcaaaaggggaaga

SEQ ID NO: 112643 - DNA, 71 bp, Homo sapiens
tagcttatctgataacaggcaaatggggaaagaggctttaatacccctcaaaaggggaagattgataatta

SEQ ID NO: 112644 - DNA, 70 bp, Homo sapiens
tatctgataacaggcaaatggggaaagaggctttaatacccctcaaaaggggaagattgataattagtta

SEQ ID NO: 112645 - DNA, 68 bp, Homo sapiens
aaatggggaaagaggctttaatacccctcaaaaggggaagattgataattagttattcaccgcataga

SEQ ID NO: 112646 - DNA, 70 bp, Homo sapiens
aaagaggctttaatacccctcaaaaggggaagattgataattagttattcaccgcatagaatcaggccag

SEQ ID NO: 112647 - DNA, 72 bp, Homo sapiens
tttaatacccctcaaaaggggaagattgataattagttattcaccgcatagaatcaggccaggtcaactctc

SEQ ID NO: 112648 - DNA, 72 bp, Homo sapiens
aaaaggggaagattgataattagttattcaccgcatagaatcaggccaggtcaactctctccaagaagaaaa

SEQ ID NO: 112649 - DNA, 77 bp, Homo sapiens
aagattgataattagttattcaccgcatagaatcaggccaggtcaactctctccaagaagaaaagcaatctggatat

SEQ ID NO: 112650 - DNA, 76 bp, Homo sapiens
cgcatagaatcaggccaggtcaactctctccaagaagaaaagcaatctggatattgcactttggggtcccttttca

SEQ ID NO: 112651 - DNA, 72 bp, Homo sapiens
aatcaggccaggtcaactctctccaagaagaaaagcaatctggatattgcactttggggtcccttttcattt

SEQ ID NO: 112652 - DNA, 73 bp, Homo sapiens
aggtcaactctctccaagaagaaaagcaatctggatattgcactttggggtcccttttcattttggcattaca

SEQ ID NO: 112653 - DNA, 76 bp, Homo sapiens
caagaagaaaagcaatctggatattgcactttggggtcccttttcattttggcattacaggcctcatgaggatgta

SEQ ID NO: 112654 - DNA, 74 bp, Homo sapiens
aaaagcaatctggatattgcactttggggtcccttttcattttggcattacaggcctcatgaggatgtagtctt

SEQ ID NO: 112655 - DNA, 73 bp, Homo sapiens
atattgcactttggggtcccttttcattttggcattacaggcctcatgaggatgtagtctttctgtatttctt

SEQ ID NO: 112656 - DNA, 70 bp, Homo sapiens
actttggggtcccttttcattttggcattacaggcctcatgaggatgtagtctttctgtatttctttctt

SEQ ID NO: 112657 - DNA, 74 bp, Homo sapiens
atttattttaaccaggtcaaagcattacatactgcagaagagaaagcaacttcagcttctcttaaacggtgtca

SEQ ID NO: 112658 - DNA, 75 bp, Homo sapiens
ttttaaccaggtcaaagcattacatactgcagaagagaaagcaacttcagcttctcttaaacggtgtcattttca

SEQ ID NO: 112659 - DNA, 77 bp, Homo sapiens
agcattacatactgcagaagagaaagcaacttcagcttctcttaaacggtgtcattttcatgacagctcgtaaattt

SEQ ID NO: 112660 - DNA, 77 bp, Homo sapiens
tacatactgcagaagagaaagcaacttcagcttctcttaaacggtgtcattttcatgacagctcgtaaattttggcc

SEQ ID NO: 112661 - DNA, 73 bp, Homo sapiens
aacttcagcttctcttaaacggtgtcattttcatgacagctcgtaaattttggcctcctatgggtccaggatc

SEQ ID NO: 112662 - DNA, 76 bp, Homo sapiens
cttctcttaaacggtgtcattttcatgacagctcgtaaattttggcctcctatgggtccaggatctgcgcgcatcc

SEQ ID NO: 112663 - DNA, 75 bp, Homo sapiens
gtcattttcatgacagctcgtaaattttggcctcctatgggtccaggatctgcgcgcatccgcccggggacttgt

SEQ ID NO: 112664 - DNA, 75 bp, Homo sapiens
tttcatgacagctcgtaaattttggcctcctatgggtccaggatctgcgcgcatccgcccggggacttgttggtg

SEQ ID NO: 112665 - DNA, 78 bp, Homo sapiens
tttggcctcctatgggtccaggatctgcgcgcatccgcccggggacttgttggtggatccatccctcatggcggagca

SEQ ID NO: 112666 - DNA, 76 bp, Homo sapiens
atctgcgcgcatccgcccggggacttgttggtggatccatccctcatggcggagcagcaaggggatcctttagaaa

SEQ ID NO: 112667 - DNA, 72 bp, Homo sapiens
atccgcccggggacttgttggtggatccatccctcatggcggagcagcaaggggatcctttagaaaaagcaa

SEQ ID NO: 112668 - DNA, 73 bp, Homo sapiens
acttgttggtggatccatccctcatggcggagcagcaaggggatcctttagaaaaagcaatgggcgaagtaac

SEQ ID NO: 112669 - DNA, 76 bp, Homo sapiens
tggatccatccctcatggcggagcagcaaggggatcctttagaaaaagcaatgggcgaagtaactgaaagagcgac

SEQ ID NO: 112670 - DNA, 77 bp, Homo sapiens
tcatggcggagcagcaaggggatcctttagaaaaagcaatgggcgaagtaactgaaagagcgacgcagaaagcaaca

SEQ ID NO: 112671 - DNA, 75 bp, Homo sapiens
agcagcaaggggatcctttagaaaaagcaatgggcgaagtaactgaaagagcgacgcagaaagcaacagccagaa

SEQ ID NO: 112672 - DNA, 72 bp, Homo sapiens
gatcctttagaaaaagcaatgggcgaagtaactgaaagagcgacgcagaaagcaacagccagaaacggcggg

SEQ ID NO: 112673 - DNA, 73 bp, Homo sapiens
ttagaaaaagcaatgggcgaagtaactgaaagagcgacgcagaaagcaacagccagaaacggcggggacgcga

SEQ ID NO: 112674 - DNA, 74 bp, Homo sapiens
aatgggcgaagtaactgaaagagcgacgcagaaagcaacagccagaaacggcggggacgcgagcggcccagaca

SEQ ID NO: 112675 - DNA, 72 bp, Homo sapiens
aagtaactgaaagagcgacgcagaaagcaacagccagaaacggcggggacgcgagcggcccagacaggaagg

SEQ ID NO: 112676 - DNA, 75 bp, Homo sapiens
agaaagcaacagccagaaacggcggggacgcgagcggcccagacaggaagggaggcggtggcgcagctctggtgc

SEQ ID NO: 112677 - DNA, 81 bp, Homo sapiens
gggacgcgagcggcccagacaggaagggaggcggtggcgcagctctggtgcgcagcgcgccgcagcgacggaacttctgca

SEQ ID NO: 112678 - DNA, 81 bp, Homo sapiens
agcggcccagacaggaagggaggcggtggcgcagctctggtgcgcagcgcgccgcagcgacggaacttctgcaaaagctgc

SEQ ID NO: 112679 - DNA, 83 bp, Homo sapiens
aggcggtggcgcagctctggtgcgcagcgcgccgcagcgacggaacttctgcaaaagctgcctgcccgcgcgttatcagcggc

SEQ ID NO: 112680 - DNA, 84 bp, Homo sapiens
agctctggtgcgcagcgcgccgcagcgacggaacttctgcaaaagctgcctgcccgcgcgttatcagcggcgcgcaggcctgtg

SEQ ID NO: 112681 - DNA, 81 bp, Homo sapiens
gtgcgcagcgcgccgcagcgacggaacttctgcaaaagctgcctgcccgcgcgttatcagcggcgcgcaggcctgtggttt

SEQ ID NO: 112682 - DNA, 81 bp, Homo sapiens
cgcagcgacggaacttctgcaaaagctgcctgcccgcgcgttatcagcggcgcgcaggcctgtggttttctcgctctcgca

SEQ ID NO: 112683 - DNA, 79 bp, Homo sapiens
gaacttctgcaaaagctgcctgcccgcgcgttatcagcggcgcgcaggcctgtggttttctcgctctcgcaaccctgct

SEQ ID NO: 112684 - DNA, 77 bp, Homo sapiens
aaaagctgcctgcccgcgcgttatcagcggcgcgcaggcctgtggttttctcgctctcgcaaccctgctttaactgc

SEQ ID NO: 112685 - DNA, 75 bp, Homo sapiens
tgcccgcgcgttatcagcggcgcgcaggcctgtggttttctcgctctcgcaaccctgctttaactgccggtttat

SEQ ID NO: 112686 - DNA, 74 bp, Homo sapiens
ttatcagcggcgcgcaggcctgtggttttctcgctctcgcaaccctgctttaactgccggtttatttttcgaca

SEQ ID NO: 112687 - DNA, 71 bp, Homo sapiens
cgcgcaggcctgtggttttctcgctctcgcaaccctgctttaactgccggtttatttttcgacaaacagga

SEQ ID NO: 112688 - DNA, 72 bp, Homo sapiens
ctgtggttttctcgctctcgcaaccctgctttaactgccggtttatttttcgacaaacaggatgcctccatc

SEQ ID NO: 112689 - DNA, 74 bp, Homo sapiens
ttttctcgctctcgcaaccctgctttaactgccggtttatttttcgacaaacaggatgcctccatctgaggctg

SEQ ID NO: 112690 - DNA, 76 bp, Homo sapiens
ctcgcaaccctgctttaactgccggtttatttttcgacaaacaggatgcctccatctgaggctgtcagcatcccag

SEQ ID NO: 112691 - DNA, 75 bp, Homo sapiens
ctttaactgccggtttatttttcgacaaacaggatgcctccatctgaggctgtcagcatcccaggctctttgaaa

SEQ ID NO: 112692 - DNA, 74 bp, Homo sapiens
ccggtttatttttcgacaaacaggatgcctccatctgaggctgtcagcatcccaggctctttgaaagaaaagaa

SEQ ID NO: 112693 - DNA, 77 bp, Homo sapiens
ttttcgacaaacaggatgcctccatctgaggctgtcagcatcccaggctctttgaaagaaaagaagtagagcggccc

SEQ ID NO: 112694 - DNA, 77 bp, Homo sapiens
acaggatgcctccatctgaggctgtcagcatcccaggctctttgaaagaaaagaagtagagcggccccaccctagag

SEQ ID NO: 112695 - DNA, 74 bp, Homo sapiens
tcagcatcccaggctctttgaaagaaaagaagtagagcggccccaccctagaggcaaggacggggtctgtgtca

SEQ ID NO: 112696 - DNA, 70 bp, Homo sapiens
aagaaaagaagtagagcggccccaccctagaggcaaggacggggtctgtgtcaagaggcttcccagagaa

SEQ ID NO: 112697 - DNA, 75 bp, Homo sapiens
cccaccctagaggcaaggacggggtctgtgtcaagaggcttcccagagaagtgaaaactctgcaggtgcagccgc

SEQ ID NO: 112698 - DNA, 79 bp, Homo sapiens
aggcaaggacggggtctgtgtcaagaggcttcccagagaagtgaaaactctgcaggtgcagccgctgggagagcatcaa

SEQ ID NO: 112699 - DNA, 78 bp, Homo sapiens
aggacggggtctgtgtcaagaggcttcccagagaagtgaaaactctgcaggtgcagccgctgggagagcatcaagaag

SEQ ID NO: 112700 - DNA, 80 bp, Homo sapiens
ctgtgtcaagaggcttcccagagaagtgaaaactctgcaggtgcagccgctgggagagcatcaagaagggcagggtggag

SEQ ID NO: 112701 - DNA, 75 bp, Homo sapiens
aagtgaaaactctgcaggtgcagccgctgggagagcatcaagaagggcagggtggaggggcagggggcgaaggga

SEQ ID NO: 112702 - DNA, 75 bp, Homo sapiens
actctgcaggtgcagccgctgggagagcatcaagaagggcagggtggaggggcagggggcgaagggagggggtga

SEQ ID NO: 112703 - DNA, 71 bp, Homo sapiens
agccgctgggagagcatcaagaagggcagggtggaggggcagggggcgaagggagggggtgaagcccgcac

SEQ ID NO: 112704 - DNA, 68 bp, Homo sapiens
agagcatcaagaagggcagggtggaggggcagggggcgaagggagggggtgaagcccgcaccctaccc

SEQ ID NO: 112705 - DNA, 66 bp, Homo sapiens
aagggcagggtggaggggcagggggcgaagggagggggtgaagcccgcaccctacccccacatgaa

SEQ ID NO: 112706 - DNA, 69 bp, Homo sapiens
tggaggggcagggggcgaagggagggggtgaagcccgcaccctacccccacatgaaactgattccacta

SEQ ID NO: 112707 - DNA, 67 bp, Homo sapiens
gggcagggggcgaagggagggggtgaagcccgcaccctacccccacatgaaactgattccactaccc

SEQ ID NO: 112708 - DNA, 71 bp, Homo sapiens
aagggagggggtgaagcccgcaccctacccccacatgaaactgattccactaccccatctctgcaagcgtc

SEQ ID NO: 112709 - DNA, 76 bp, Homo sapiens
gggtgaagcccgcaccctacccccacatgaaactgattccactaccccatctctgcaagcgtccagaggcagagag

SEQ ID NO: 112710 - DNA, 75 bp, Homo sapiens
accctacccccacatgaaactgattccactaccccatctctgcaagcgtccagaggcagagaggccaacatttcg

SEQ ID NO: 112711 - DNA, 78 bp, Homo sapiens
acatgaaactgattccactaccccatctctgcaagcgtccagaggcagagaggccaacatttcggggacagcttggag

SEQ ID NO: 112712 - DNA, 76 bp, Homo sapiens
aactgattccactaccccatctctgcaagcgtccagaggcagagaggccaacatttcggggacagcttggaggcgg

SEQ ID NO: 112713 - DNA, 77 bp, Homo sapiens
cccatctctgcaagcgtccagaggcagagaggccaacatttcggggacagcttggaggcgggagatttaggcagggc

SEQ ID NO: 112714 - DNA, 71 bp, Homo sapiens
gaggcagagaggccaacatttcggggacagcttggaggcgggagatttaggcagggctccttaaactttta

SEQ ID NO: 112715 - DNA, 72 bp, Homo sapiens
aggccaacatttcggggacagcttggaggcgggagatttaggcagggctccttaaacttttatgtgcatgaa

SEQ ID NO: 112716 - DNA, 72 bp, Homo sapiens
acatttcggggacagcttggaggcgggagatttaggcagggctccttaaacttttatgtgcatgaaaatcag

SEQ ID NO: 112717 - DNA, 73 bp, Homo sapiens
acagcttggaggcgggagatttaggcagggctccttaaacttttatgtgcatgaaaatcaggccaatcacggg

SEQ ID NO: 112718 - DNA, 75 bp, Homo sapiens
ggagatttaggcagggctccttaaacttttatgtgcatgaaaatcaggccaatcacggggctcttgagcaaatgg

SEQ ID NO: 112719 - DNA, 74 bp, Homo sapiens
tttaggcagggctccttaaacttttatgtgcatgaaaatcaggccaatcacggggctcttgagcaaatggggac

SEQ ID NO: 112720 - DNA, 78 bp, Homo sapiens
tccttaaacttttatgtgcatgaaaatcaggccaatcacggggctcttgagcaaatggggacgatgattcagcaggtc

SEQ ID NO: 112721 - DNA, 81 bp, Homo sapiens
cttttatgtgcatgaaaatcaggccaatcacggggctcttgagcaaatggggacgatgattcagcaggtctgggctgaggc

SEQ ID NO: 112722 - DNA, 80 bp, Homo sapiens
aatcacggggctcttgagcaaatggggacgatgattcagcaggtctgggctgaggcctcagattctgcacttctaacaag

SEQ ID NO: 112723 - DNA, 80 bp, Homo sapiens
gggctcttgagcaaatggggacgatgattcagcaggtctgggctgaggcctcagattctgcacttctaacaagttcccag

SEQ ID NO: 112724 - DNA, 78 bp, Homo sapiens
aaatggggacgatgattcagcaggtctgggctgaggcctcagattctgcacttctaacaagttcccaggtggtagtga

SEQ ID NO: 112725 - DNA, 79 bp, Homo sapiens
aggtctgggctgaggcctcagattctgcacttctaacaagttcccaggtggtagtgatgctgccagtccaaagaccaca

SEQ ID NO: 112726 - DNA, 82 bp, Homo sapiens
tgaggcctcagattctgcacttctaacaagttcccaggtggtagtgatgctgccagtccaaagaccacactgtgaatagcaa

SEQ ID NO: 112727 - DNA, 79 bp, Homo sapiens
agattctgcacttctaacaagttcccaggtggtagtgatgctgccagtccaaagaccacactgtgaatagcaaggcgtc

SEQ ID NO: 112728 - DNA, 75 bp, Homo sapiens
acttctaacaagttcccaggtggtagtgatgctgccagtccaaagaccacactgtgaatagcaaggcgtcgtcgg

SEQ ID NO: 112729 - DNA, 79 bp, Homo sapiens
ttcccaggtggtagtgatgctgccagtccaaagaccacactgtgaatagcaaggcgtcgtcgggacagtctgctttaga

SEQ ID NO: 112730 - DNA, 78 bp, Homo sapiens
tggtagtgatgctgccagtccaaagaccacactgtgaatagcaaggcgtcgtcgggacagtctgctttagagtaaaac

SEQ ID NO: 112731 - DNA, 76 bp, Homo sapiens
atgctgccagtccaaagaccacactgtgaatagcaaggcgtcgtcgggacagtctgctttagagtaaaacctaata

SEQ ID NO: 112732 - DNA, 75 bp, Homo sapiens
aaagaccacactgtgaatagcaaggcgtcgtcgggacagtctgctttagagtaaaacctaatagatgtgcaaata

SEQ ID NO: 112733 - DNA, 74 bp, Homo sapiens
acactgtgaatagcaaggcgtcgtcgggacagtctgctttagagtaaaacctaatagatgtgcaaatatttaaa

SEQ ID NO: 112734 - DNA, 71 bp, Homo sapiens
aaggcgtcgtcgggacagtctgctttagagtaaaacctaatagatgtgcaaatatttaaaccaagctgtat

SEQ ID NO: 112735 - DNA, 72 bp, Homo sapiens
gtcgtcgggacagtctgctttagagtaaaacctaatagatgtgcaaatatttaaaccaagctgtatttattc

SEQ ID NO: 112736 - DNA, 71 bp, Homo sapiens
tgctttagagtaaaacctaatagatgtgcaaatatttaaaccaagctgtatttattcctgaggccctggtt

SEQ ID NO: 112737 - DNA, 70 bp, Homo sapiens
gtaaaacctaatagatgtgcaaatatttaaaccaagctgtatttattcctgaggccctggtttaactgga

SEQ ID NO: 112738 - DNA, 74 bp, Homo sapiens
taatagatgtgcaaatatttaaaccaagctgtatttattcctgaggccctggtttaactggagccaccttgcta

SEQ ID NO: 112739 - DNA, 69 bp, Homo sapiens
aatatttaaaccaagctgtatttattcctgaggccctggtttaactggagccaccttgctaatggaaaa

SEQ ID NO: 112740 - DNA, 70 bp, Homo sapiens
ttaaaccaagctgtatttattcctgaggccctggtttaactggagccaccttgctaatggaaaatggaaa

SEQ ID NO: 112741 - DNA, 69 bp, Homo sapiens
tatttattcctgaggccctggtttaactggagccaccttgctaatggaaaatggaaaatgaaattcctt

SEQ ID NO: 112742 - DNA, 67 bp, Homo sapiens
aggccctggtttaactggagccaccttgctaatggaaaatggaaaatgaaattcctttaggttccaa

SEQ ID NO: 112743 - DNA, 67 bp, Homo sapiens
tggtttaactggagccaccttgctaatggaaaatggaaaatgaaattcctttaggttccaaagggaa

SEQ ID NO: 112744 - DNA, 66 bp, Homo sapiens
agccaccttgctaatggaaaatggaaaatgaaattcctttaggttccaaagggaaggaaagtttga

SEQ ID NO: 112745 - DNA, 66 bp, Homo sapiens
tgctaatggaaaatggaaaatgaaattcctttaggttccaaagggaaggaaagtttgaaatggtta

SEQ ID NO: 112746 - DNA, 62 bp, Homo sapiens
ggaaaatgaaattcctttaggttccaaagggaaggaaagtttgaaatggttaaggtatttaa

SEQ ID NO: 112747 - DNA, 62 bp, Homo sapiens
tgaaattcctttaggttccaaagggaaggaaagtttgaaatggttaaggtatttaaaaaatc

SEQ ID NO: 112748 - DNA, 63 bp, Homo sapiens
gttccaaagggaaggaaagtttgaaatggttaaggtatttaaaaaatcctagttgggagtggc

SEQ ID NO: 112749 - DNA, 62 bp, Homo sapiens
aagggaaggaaagtttgaaatggttaaggtatttaaaaaatcctagttgggagtggccttgg

SEQ ID NO: 112750 - DNA, 63 bp, Homo sapiens
aaagtttgaaatggttaaggtatttaaaaaatcctagttgggagtggccttggggattcggga

SEQ ID NO: 112751 - DNA, 65 bp, Homo sapiens
atggttaaggtatttaaaaaatcctagttgggagtggccttggggattcgggagagttgaagtta

SEQ ID NO: 112752 - DNA, 69 bp, Homo sapiens
ttaaaaaatcctagttgggagtggccttggggattcgggagagttgaagttaggttctgagccaagaga

SEQ ID NO: 112753 - DNA, 70 bp, Homo sapiens
atcctagttgggagtggccttggggattcgggagagttgaagttaggttctgagccaagagatgggggag

SEQ ID NO: 112754 - DNA, 69 bp, Homo sapiens
ggagtggccttggggattcgggagagttgaagttaggttctgagccaagagatgggggaggaagggtgg

SEQ ID NO: 112755 - DNA, 71 bp, Homo sapiens
attcgggagagttgaagttaggttctgagccaagagatgggggaggaagggtgggatgtggcaaataaata

SEQ ID NO: 112756 - DNA, 72 bp, Homo sapiens
agagttgaagttaggttctgagccaagagatgggggaggaagggtgggatgtggcaaataaatataaacaca

SEQ ID NO: 112757 - DNA, 75 bp, Homo sapiens
acacacaaaccccagcccaaccacaggttctttcctatcaatgaaacatttgcatcttgcaggtagaactcacac

SEQ ID NO: 112758 - DNA, 76 bp, Homo sapiens
cccagcccaaccacaggttctttcctatcaatgaaacatttgcatcttgcaggtagaactcacacgtgtccacatt

SEQ ID NO: 112759 - DNA, 76 bp, Homo sapiens
aaccacaggttctttcctatcaatgaaacatttgcatcttgcaggtagaactcacacgtgtccacatttttcagaa

SEQ ID NO: 112760 - DNA, 76 bp, Homo sapiens
tttcctatcaatgaaacatttgcatcttgcaggtagaactcacacgtgtccacatttttcagaagttgaatggttt

SEQ ID NO: 112761 - DNA, 78 bp, Homo sapiens
tatcaatgaaacatttgcatcttgcaggtagaactcacacgtgtccacatttttcagaagttgaatggttttgtgtaa

SEQ ID NO: 112762 - DNA, 74 bp, Homo sapiens
cttgcaggtagaactcacacgtgtccacatttttcagaagttgaatggttttgtgtaatggtacagaatttgga

SEQ ID NO: 112763 - DNA, 75 bp, Homo sapiens
tcacacgtgtccacatttttcagaagttgaatggttttgtgtaatggtacagaatttggagcccatatttgaata

SEQ ID NO: 112764 - DNA, 78 bp, Homo sapiens
tcagaagttgaatggttttgtgtaatggtacagaatttggagcccatatttgaatattctagatccaatgttatctca

SEQ ID NO: 112765 - DNA, 77 bp, Homo sapiens
tggttttgtgtaatggtacagaatttggagcccatatttgaatattctagatccaatgttatctcagactggcttta

SEQ ID NO: 112766 - DNA, 78 bp, Homo sapiens
ttgtgtaatggtacagaatttggagcccatatttgaatattctagatccaatgttatctcagactggctttaggatct

SEQ ID NO: 112767 - DNA, 78 bp, Homo sapiens
gaatttggagcccatatttgaatattctagatccaatgttatctcagactggctttaggatcttgtggcctacattta

SEQ ID NO: 112768 - DNA, 77 bp, Homo sapiens
tggagcccatatttgaatattctagatccaatgttatctcagactggctttaggatcttgtggcctacatttaaaaa

SEQ ID NO: 112769 - DNA, 77 bp, Homo sapiens
atttgaatattctagatccaatgttatctcagactggctttaggatcttgtggcctacatttaaaaatgcatgtttc

SEQ ID NO: 112770 - DNA, 77 bp, Homo sapiens
atccaatgttatctcagactggctttaggatcttgtggcctacatttaaaaatgcatgtttctgagtcatgtttaat

SEQ ID NO: 112771 - DNA, 77 bp, Homo sapiens
atgttatctcagactggctttaggatcttgtggcctacatttaaaaatgcatgtttctgagtcatgtttaattagta

SEQ ID NO: 112772 - DNA, 76 bp, Homo sapiens
ggctttaggatcttgtggcctacatttaaaaatgcatgtttctgagtcatgtttaattagtagtagtatctgagaa

SEQ ID NO: 112773 - DNA, 78 bp, Homo sapiens
atcttgtggcctacatttaaaaatgcatgtttctgagtcatgtttaattagtagtagtatctgagaactgagagacta

SEQ ID NO: 112774 - DNA, 78 bp, Homo sapiens
gcctacatttaaaaatgcatgtttctgagtcatgtttaattagtagtagtatctgagaactgagagactagactaaga

SEQ ID NO: 112775 - DNA, 81 bp, Homo sapiens
aatgcatgtttctgagtcatgtttaattagtagtagtatctgagaactgagagactagactaagaaatccatggtatatga

SEQ ID NO: 112776 - DNA, 78 bp, Homo sapiens
gtttctgagtcatgtttaattagtagtagtatctgagaactgagagactagactaagaaatccatggtatatgaataa

SEQ ID NO: 112777 - DNA, 77 bp, Homo sapiens
gtttaattagtagtagtatctgagaactgagagactagactaagaaatccatggtatatgaataaaatctccagaca

SEQ ID NO: 112778 - DNA, 81 bp, Homo sapiens
ttagtagtagtatctgagaactgagagactagactaagaaatccatggtatatgaataaaatctccagacagcagctagaa

SEQ ID NO: 112779 - DNA, 82 bp, Homo sapiens
tatctgagaactgagagactagactaagaaatccatggtatatgaataaaatctccagacagcagctagaacatagaggtcc

SEQ ID NO: 112780 - DNA, 80 bp, Homo sapiens
actgagagactagactaagaaatccatggtatatgaataaaatctccagacagcagctagaacatagaggtccctccaga

SEQ ID NO: 112781 - DNA, 79 bp, Homo sapiens
actaagaaatccatggtatatgaataaaatctccagacagcagctagaacatagaggtccctccagaggcagtgccagt

SEQ ID NO: 112782 - DNA, 81 bp, Homo sapiens
atggtatatgaataaaatctccagacagcagctagaacatagaggtccctccagaggcagtgccagttgtcagctgtaaaa

SEQ ID NO: 112783 - DNA, 80 bp, Homo sapiens
tccagacagcagctagaacatagaggtccctccagaggcagtgccagttgtcagctgtaaaaataggttctgctcagttt

SEQ ID NO: 112784 - DNA, 77 bp, Homo sapiens
aacatagaggtccctccagaggcagtgccagttgtcagctgtaaaaataggttctgctcagttttgcttaggcctga

SEQ ID NO: 112785 - DNA, 77 bp, Homo sapiens
tccagaggcagtgccagttgtcagctgtaaaaataggttctgctcagttttgcttaggcctgaagtttcctgaagat

SEQ ID NO: 112786 - DNA, 76 bp, Homo sapiens
tcagctgtaaaaataggttctgctcagttttgcttaggcctgaagtttcctgaagatttcatttagacttcatcaa

SEQ ID NO: 112787 - DNA, 71 bp, Homo sapiens
aaaaataggttctgctcagttttgcttaggcctgaagtttcctgaagatttcatttagacttcatcaaaac

SEQ ID NO: 112788 - DNA, 72 bp, Homo sapiens
ttttgcttaggcctgaagtttcctgaagatttcatttagacttcatcaaaaccagtcaaagacttcctgtta

SEQ ID NO: 112789 - DNA, 70 bp, Homo sapiens
gaagtttcctgaagatttcatttagacttcatcaaaaccagtcaaagacttcctgttacagaaaggttct

SEQ ID NO: 112790 - DNA, 71 bp, Homo sapiens
gaagatttcatttagacttcatcaaaaccagtcaaagacttcctgttacagaaaggttcttaaagtatggc

SEQ ID NO: 112791 - DNA, 71 bp, Homo sapiens
tttcatttagacttcatcaaaaccagtcaaagacttcctgttacagaaaggttcttaaagtatggctggga

SEQ ID NO: 112792 - DNA, 79 bp, Homo sapiens
ctgggactacagggctattaagatgcagattcttgggcctctctgcctcactcatcatggtttctcagggtgggtgccg

SEQ ID NO: 112793 - DNA, 78 bp, Homo sapiens
actacagggctattaagatgcagattcttgggcctctctgcctcactcatcatggtttctcagggtgggtgccgggaa

SEQ ID NO: 112794 - DNA, 79 bp, Homo sapiens
tattaagatgcagattcttgggcctctctgcctcactcatcatggtttctcagggtgggtgccgggaacctgcatttta

SEQ ID NO: 112795 - DNA, 74 bp, Homo sapiens
agattcttgggcctctctgcctcactcatcatggtttctcagggtgggtgccgggaacctgcattttaacaaac

SEQ ID NO: 112796 - DNA, 75 bp, Homo sapiens
tctctgcctcactcatcatggtttctcagggtgggtgccgggaacctgcattttaacaaacgctttgaggattct

SEQ ID NO: 112797 - DNA, 72 bp, Homo sapiens
actcatcatggtttctcagggtgggtgccgggaacctgcattttaacaaacgctttgaggattcttatgtac

SEQ ID NO: 112798 - DNA, 70 bp, Homo sapiens
tttctcagggtgggtgccgggaacctgcattttaacaaacgctttgaggattcttatgtactgccaagtt

SEQ ID NO: 112799 - DNA, 69 bp, Homo sapiens
agggtgggtgccgggaacctgcattttaacaaacgctttgaggattcttatgtactgccaagtttagga

SEQ ID NO: 112800 - DNA, 72 bp, Homo sapiens
gaacctgcattttaacaaacgctttgaggattcttatgtactgccaagtttaggagtccctggtctgcaggt

SEQ ID NO: 112801 - DNA, 69 bp, Homo sapiens
attttaacaaacgctttgaggattcttatgtactgccaagtttaggagtccctggtctgcaggtttaag

SEQ ID NO: 112802 - DNA, 69 bp, Homo sapiens
aaacgctttgaggattcttatgtactgccaagtttaggagtccctggtctgcaggtttaagttcaacct

SEQ ID NO: 112803 - DNA, 75 bp, Homo sapiens
attcttatgtactgccaagtttaggagtccctggtctgcaggtttaagttcaaccttctcactgcagcattcaaa

SEQ ID NO: 112804 - DNA, 75 bp, Homo sapiens
atgtactgccaagtttaggagtccctggtctgcaggtttaagttcaaccttctcactgcagcattcaaagacctg

SEQ ID NO: 112805 - DNA, 73 bp, Homo sapiens
aagtttaggagtccctggtctgcaggtttaagttcaaccttctcactgcagcattcaaagacctggcttcaat

SEQ ID NO: 112806 - DNA, 79 bp, Homo sapiens
tggtctgcaggtttaagttcaaccttctcactgcagcattcaaagacctggcttcaattttgctgttcacaggcgagcc

SEQ ID NO: 112807 - DNA, 78 bp, Homo sapiens
gtttaagttcaaccttctcactgcagcattcaaagacctggcttcaattttgctgttcacaggcgagcctcagtgact

SEQ ID NO: 112808 - DNA, 80 bp, Homo sapiens
agttcaaccttctcactgcagcattcaaagacctggcttcaattttgctgttcacaggcgagcctcagtgacttcctcac

SEQ ID NO: 112809 - DNA, 83 bp, Homo sapiens
actgcagcattcaaagacctggcttcaattttgctgttcacaggcgagcctcagtgacttcctcactgccctctgagcactcc

SEQ ID NO: 112810 - DNA, 81 bp, Homo sapiens
attcaaagacctggcttcaattttgctgttcacaggcgagcctcagtgacttcctcactgccctctgagcactcctggagc

SEQ ID NO: 112811 - DNA, 81 bp, Homo sapiens
acctggcttcaattttgctgttcacaggcgagcctcagtgacttcctcactgccctctgagcactcctggagccacctggc

SEQ ID NO: 112812 - DNA, 82 bp, Homo sapiens
agcctcagtgacttcctcactgccctctgagcactcctggagccacctggctgcctcattcatttcttctcctctgtctttc

SEQ ID NO: 112813 - DNA, 79 bp, Homo sapiens
acttcctcactgccctctgagcactcctggagccacctggctgcctcattcatttcttctcctctgtctttccccagcc

SEQ ID NO: 112814 - DNA, 79 bp, Homo sapiens
tctgagcactcctggagccacctggctgcctcattcatttcttctcctctgtctttccccagccctggaataaaatgac

SEQ ID NO: 112815 - DNA, 75 bp, Homo sapiens
acctggctgcctcattcatttcttctcctctgtctttccccagccctggaataaaatgacttccatcttcctctc

SEQ ID NO: 112816 - DNA, 74 bp, Homo sapiens
tcattcatttcttctcctctgtctttccccagccctggaataaaatgacttccatcttcctctccgaactctct

SEQ ID NO: 112817 - DNA, 73 bp, Homo sapiens
atttcttctcctctgtctttccccagccctggaataaaatgacttccatcttcctctccgaactctcttcaga

SEQ ID NO: 112818 - DNA, 77 bp, Homo sapiens
tgtctttccccagccctggaataaaatgacttccatcttcctctccgaactctcttcagatcatggcttcccactca

SEQ ID NO: 112819 - DNA, 78 bp, Homo sapiens
agccctggaataaaatgacttccatcttcctctccgaactctcttcagatcatggcttcccactcagcaagcagttac

SEQ ID NO: 112820 - DNA, 77 bp, Homo sapiens
aataaaatgacttccatcttcctctccgaactctcttcagatcatggcttcccactcagcaagcagttactttcctg

SEQ ID NO: 112821 - DNA, 82 bp, Homo sapiens
ttccatcttcctctccgaactctcttcagatcatggcttcccactcagcaagcagttactttcctggtctgccactgctgtg

SEQ ID NO: 112822 - DNA, 82 bp, Homo sapiens
aactctcttcagatcatggcttcccactcagcaagcagttactttcctggtctgccactgctgtggtattaatgataggcca

SEQ ID NO: 112823 - DNA, 82 bp, Homo sapiens
tcatggcttcccactcagcaagcagttactttcctggtctgccactgctgtggtattaatgataggccactcgattctcatt

SEQ ID NO: 112824 - DNA, 79 bp, Homo sapiens
ttcccactcagcaagcagttactttcctggtctgccactgctgtggtattaatgataggccactcgattctcattttgt

SEQ ID NO: 112825 - DNA, 78 bp, Homo sapiens
aagcagttactttcctggtctgccactgctgtggtattaatgataggccactcgattctcattttgttgactgaatat

SEQ ID NO: 112826 - DNA, 80 bp, Homo sapiens
ccactgctgtggtattaatgataggccactcgattctcattttgttgactgaatatttctcatgcttaggctttgcctcc

SEQ ID NO: 112827 - DNA, 80 bp, Homo sapiens
tgtggtattaatgataggccactcgattctcattttgttgactgaatatttctcatgcttaggctttgcctccctgacca

SEQ ID NO: 112828 - DNA, 80 bp, Homo sapiens
taatgataggccactcgattctcattttgttgactgaatatttctcatgcttaggctttgcctccctgaccagacagtaa

SEQ ID NO: 112829 - DNA, 78 bp, Homo sapiens
actcgattctcattttgttgactgaatatttctcatgcttaggctttgcctccctgaccagacagtaagttctctgaa

SEQ ID NO: 112830 - DNA, 81 bp, Homo sapiens
tttgttgactgaatatttctcatgcttaggctttgcctccctgaccagacagtaagttctctgaagccatttcatgctata

SEQ ID NO: 112831 - DNA, 81 bp, Homo sapiens
tgaatatttctcatgcttaggctttgcctccctgaccagacagtaagttctctgaagccatttcatgctatataatcttta

SEQ ID NO: 112832 - DNA, 81 bp, Homo sapiens
tttctcatgcttaggctttgcctccctgaccagacagtaagttctctgaagccatttcatgctatataatctttatgttca

SEQ ID NO: 112833 - DNA, 77 bp, Homo sapiens
ctttgcctccctgaccagacagtaagttctctgaagccatttcatgctatataatctttatgttcaagactactttc

SEQ ID NO: 112834 - DNA, 80 bp, Homo sapiens
agtaagttctctgaagccatttcatgctatataatctttatgttcaagactactttctaacgcagtgtcatgtccacatg

SEQ ID NO: 112835 - DNA, 84 bp, Homo sapiens
tctgaagccatttcatgctatataatctttatgttcaagactactttctaacgcagtgtcatgtccacatggatcattcagtaa

SEQ ID NO: 112836 - DNA, 80 bp, Homo sapiens
ccatttcatgctatataatctttatgttcaagactactttctaacgcagtgtcatgtccacatggatcattcagtaaatt

SEQ ID NO: 112837 - DNA, 80 bp, Homo sapiens
tttatgttcaagactactttctaacgcagtgtcatgtccacatggatcattcagtaaatttaccgatggcttatctatca

SEQ ID NO: 112838 - DNA, 79 bp, Homo sapiens
tactttctaacgcagtgtcatgtccacatggatcattcagtaaatttaccgatggcttatctatcaccaacatgtttta

SEQ ID NO: 112839 - DNA, 80 bp, Homo sapiens
taacgcagtgtcatgtccacatggatcattcagtaaatttaccgatggcttatctatcaccaacatgttttacagagtgt

SEQ ID NO: 112840 - DNA, 78 bp, Homo sapiens
atgtccacatggatcattcagtaaatttaccgatggcttatctatcaccaacatgttttacagagtgttattaagcag

SEQ ID NO: 112841 - DNA, 77 bp, Homo sapiens
acatggatcattcagtaaatttaccgatggcttatctatcaccaacatgttttacagagtgttattaagcagggaca

SEQ ID NO: 112842 - DNA, 78 bp, Homo sapiens
cttatctatcaccaacatgttttacagagtgttattaagcagggacactctctatgggtctaggatcagaagaagctg

SEQ ID NO: 112843 - DNA, 75 bp, Homo sapiens
aacatgttttacagagtgttattaagcagggacactctctatgggtctaggatcagaagaagctgggaagagaaa

SEQ ID NO: 112844 - DNA, 76 bp, Homo sapiens
ttattaagcagggacactctctatgggtctaggatcagaagaagctgggaagagaaatggggtagtggtgagagtg

SEQ ID NO: 112845 - DNA, 79 bp, Homo sapiens
cactctctatgggtctaggatcagaagaagctgggaagagaaatggggtagtggtgagagtgtcatgagaatctggtta

SEQ ID NO: 112846 - DNA, 80 bp, Homo sapiens
tatgggtctaggatcagaagaagctgggaagagaaatggggtagtggtgagagtgtcatgagaatctggttatacagtca

SEQ ID NO: 112847 - DNA, 78 bp, Homo sapiens
tagtggtgagagtgtcatgagaatctggttatacagtcatcaaagacacagaggaagtgggaaaaagggagtgtagac

SEQ ID NO: 112848 - DNA, 75 bp, Homo sapiens
agagtgtcatgagaatctggttatacagtcatcaaagacacagaggaagtgggaaaaagggagtgtagaccccta

SEQ ID NO: 112849 - DNA, 75 bp, Homo sapiens
agaatctggttatacagtcatcaaagacacagaggaagtgggaaaaagggagtgtagacccctagctcatctgtc

SEQ ID NO: 112850 - DNA, 78 bp, Homo sapiens
ttatacagtcatcaaagacacagaggaagtgggaaaaagggagtgtagacccctagctcatctgtctgcagtgtgaat

SEQ ID NO: 112851 - DNA, 76 bp, Homo sapiens
atcaaagacacagaggaagtgggaaaaagggagtgtagacccctagctcatctgtctgcagtgtgaattggagagg

SEQ ID NO: 112852 - DNA, 71 bp, Homo sapiens
ggaagtgggaaaaagggagtgtagacccctagctcatctgtctgcagtgtgaattggagaggggttccttt

SEQ ID NO: 112853 - DNA, 70 bp, Homo sapiens
aaaaagggagtgtagacccctagctcatctgtctgcagtgtgaattggagaggggttcctttttgtttaa

SEQ ID NO: 112854 - DNA, 68 bp, Homo sapiens
gtgtgaattggagaggggttcctttttgtttaatatagttaattttccacttgaaatcaaggtcacca

SEQ ID NO: 112855 - DNA, 67 bp, Homo sapiens
ggggttcctttttgtttaatatagttaattttccacttgaaatcaaggtcaccaaacctatgagcca

SEQ ID NO: 112856 - DNA, 73 bp, Homo sapiens
tttgtttaatatagttaattttccacttgaaatcaaggtcaccaaacctatgagccaaacgatggatgcttgc

SEQ ID NO: 112857 - DNA, 74 bp, Homo sapiens
ttaatatagttaattttccacttgaaatcaaggtcaccaaacctatgagccaaacgatggatgcttgcccttca

SEQ ID NO: 112858 - DNA, 77 bp, Homo sapiens
taattttccacttgaaatcaaggtcaccaaacctatgagccaaacgatggatgcttgcccttcacactcactgccta

SEQ ID NO: 112859 - DNA, 81 bp, Homo sapiens
ttgaaatcaaggtcaccaaacctatgagccaaacgatggatgcttgcccttcacactcactgcctagtgatggagctcttg

SEQ ID NO: 112860 - DNA, 80 bp, Homo sapiens
aggtcaccaaacctatgagccaaacgatggatgcttgcccttcacactcactgcctagtgatggagctcttggtggcctc

SEQ ID NO: 112861 - DNA, 83 bp, Homo sapiens
acctatgagccaaacgatggatgcttgcccttcacactcactgcctagtgatggagctcttggtggcctctctccaccatctc

SEQ ID NO: 112862 - DNA, 85 bp, Homo sapiens
atgcttgcccttcacactcactgcctagtgatggagctcttggtggcctctctccaccatctctgctccaccatctcttccactc

SEQ ID NO: 112863 - DNA, 86 bp, Homo sapiens
ttcacactcactgcctagtgatggagctcttggtggcctctctccaccatctctgctccaccatctcttccactctggctggcttc

SEQ ID NO: 112864 - DNA, 81 bp, Homo sapiens
tagtgatggagctcttggtggcctctctccaccatctctgctccaccatctcttccactctggctggcttcccttcttcct

SEQ ID NO: 112865 - DNA, 81 bp, Homo sapiens
gcctctctccaccatctctgctccaccatctcttccactctggctggcttcccttcttcctttctgcctgatgggttgtca

SEQ ID NO: 112866 - DNA, 78 bp, Homo sapiens
accatctctgctccaccatctcttccactctggctggcttcccttcttcctttctgcctgatgggttgtcaactcaaa

SEQ ID NO: 112867 - DNA, 79 bp, Homo sapiens
tctgctccaccatctcttccactctggctggcttcccttcttcctttctgcctgatgggttgtcaactcaaatgcccaa

SEQ ID NO: 112868 - DNA, 77 bp, Homo sapiens
tcttccactctggctggcttcccttcttcctttctgcctgatgggttgtcaactcaaatgcccaactccaagctcaa

SEQ ID NO: 112869 - DNA, 75 bp, Homo sapiens
tctggctggcttcccttcttcctttctgcctgatgggttgtcaactcaaatgcccaactccaagctcaagttaaa

SEQ ID NO: 112870 - DNA, 70 bp, Homo sapiens
cccttcttcctttctgcctgatgggttgtcaactcaaatgcccaactccaagctcaagttaaaggaaatt

SEQ ID NO: 112871 - DNA, 74 bp, Homo sapiens
tttctgcctgatgggttgtcaactcaaatgcccaactccaagctcaagttaaaggaaatttcaagtgtattaca

SEQ ID NO: 112872 - DNA, 75 bp, Homo sapiens
tgatgggttgtcaactcaaatgcccaactccaagctcaagttaaaggaaatttcaagtgtattacatataatgaa

SEQ ID NO: 112873 - DNA, 74 bp, Homo sapiens
aactcaaatgcccaactccaagctcaagttaaaggaaatttcaagtgtattacatataatgaagcagactgaaa

SEQ ID NO: 112874 - DNA, 75 bp, Homo sapiens
atgcccaactccaagctcaagttaaaggaaatttcaagtgtattacatataatgaagcagactgaaagaacagta

SEQ ID NO: 112875 - DNA, 74 bp, Homo sapiens
ccaagctcaagttaaaggaaatttcaagtgtattacatataatgaagcagactgaaagaacagtagtatactag

SEQ ID NO: 112876 - DNA, 76 bp, Homo sapiens
tcaagtgtattacatataatgaagcagactgaaagaacagtagtatactagtaagttagcttaacatggtttagtg

SEQ ID NO: 112877 - DNA, 76 bp, Homo sapiens
ttacatataatgaagcagactgaaagaacagtagtatactagtaagttagcttaacatggtttagtggaaagcagc

SEQ ID NO: 112878 - DNA, 75 bp, Homo sapiens
ataatgaagcagactgaaagaacagtagtatactagtaagttagcttaacatggtttagtggaaagcagccaata

SEQ ID NO: 112879 - DNA, 72 bp, Homo sapiens
actgaaagaacagtagtatactagtaagttagcttaacatggtttagtggaaagcagccaatacacctcagt

SEQ ID NO: 112880 - DNA, 74 bp, Homo sapiens
aacagtagtatactagtaagttagcttaacatggtttagtggaaagcagccaatacacctcagttctgatccta

SEQ ID NO: 112881 - DNA, 78 bp, Homo sapiens
tttagtggaaagcagccaatacacctcagttctgatcctaacacagctagcatcattggccgtgtcaccttggttttc

SEQ ID NO: 112882 - DNA, 77 bp, Homo sapiens
aaagcagccaatacacctcagttctgatcctaacacagctagcatcattggccgtgtcaccttggttttcttcttta

SEQ ID NO: 112883 - DNA, 75 bp, Homo sapiens
aatacacctcagttctgatcctaacacagctagcatcattggccgtgtcaccttggttttcttctttagcctttc

SEQ ID NO: 112884 - DNA, 76 bp, Homo sapiens
ttctgatcctaacacagctagcatcattggccgtgtcaccttggttttcttctttagcctttctgagcttcaaaat

SEQ ID NO: 112885 - DNA, 73 bp, Homo sapiens
taacacagctagcatcattggccgtgtcaccttggttttcttctttagcctttctgagcttcaaaatttttgt

SEQ ID NO: 112886 - DNA, 69 bp, Homo sapiens
atcattggccgtgtcaccttggttttcttctttagcctttctgagcttcaaaatttttgttatctaaac

SEQ ID NO: 112887 - DNA, 71 bp, Homo sapiens
cgtgtcaccttggttttcttctttagcctttctgagcttcaaaatttttgttatctaaactctgagcctca

SEQ ID NO: 112888 - DNA, 76 bp, Homo sapiens
tttctgagcttcaaaatttttgttatctaaactctgagcctcagtgttttcattaacagagccagcataacaatgt

SEQ ID NO: 112889 - DNA, 76 bp, Homo sapiens
tcaaaatttttgttatctaaactctgagcctcagtgttttcattaacagagccagcataacaatgttggcttctaa

SEQ ID NO: 112890 - DNA, 79 bp, Homo sapiens
tttgttatctaaactctgagcctcagtgttttcattaacagagccagcataacaatgttggcttctaaggcattgggca

SEQ ID NO: 112891 - DNA, 78 bp, Homo sapiens
aaactctgagcctcagtgttttcattaacagagccagcataacaatgttggcttctaaggcattgggcaggtgagtgg

SEQ ID NO: 112892 - DNA, 76 bp, Homo sapiens
agtgttttcattaacagagccagcataacaatgttggcttctaaggcattgggcaggtgagtggggtagttatgga

SEQ ID NO: 112893 - DNA, 77 bp, Homo sapiens
attaacagagccagcataacaatgttggcttctaaggcattgggcaggtgagtggggtagttatggagaccacctga

SEQ ID NO: 112894 - DNA, 75 bp, Homo sapiens
aacaatgttggcttctaaggcattgggcaggtgagtggggtagttatggagaccacctgagagagcctggaacac

SEQ ID NO: 112895 - DNA, 77 bp, Homo sapiens
tctaaggcattgggcaggtgagtggggtagttatggagaccacctgagagagcctggaacacggttggtgctggcaa

SEQ ID NO: 112896 - DNA, 74 bp, Homo sapiens
gtgagtggggtagttatggagaccacctgagagagcctggaacacggttggtgctggcaacctacagggcccca

SEQ ID NO: 112897 - DNA, 75 bp, Homo sapiens
tagttatggagaccacctgagagagcctggaacacggttggtgctggcaacctacagggccccagcccttggcga

SEQ ID NO: 112898 - DNA, 73 bp, Homo sapiens
acctgagagagcctggaacacggttggtgctggcaacctacagggccccagcccttggcgaggtatctttctg

SEQ ID NO: 112899 - DNA, 72 bp, Homo sapiens
agagcctggaacacggttggtgctggcaacctacagggccccagcccttggcgaggtatctttctggagaaa

SEQ ID NO: 112900 - DNA, 72 bp, Homo sapiens
aacacggttggtgctggcaacctacagggccccagcccttggcgaggtatctttctggagaaatgcttccta

SEQ ID NO: 112901 - DNA, 74 bp, Homo sapiens
tggcaacctacagggccccagcccttggcgaggtatctttctggagaaatgcttcctagtgttcctagccattc

SEQ ID NO: 112902 - DNA, 75 bp, Homo sapiens
tacagggccccagcccttggcgaggtatctttctggagaaatgcttcctagtgttcctagccattccttgcctca

SEQ ID NO: 112903 - DNA, 77 bp, Homo sapiens
aaatgcttcctagtgttcctagccattccttgcctcaggcaccttcactaccatcccaatcacaggcctactgctct

SEQ ID NO: 112904 - DNA, 78 bp, Homo sapiens
attccttgcctcaggcaccttcactaccatcccaatcacaggcctactgctcttcctggtccagcttgctggtcctag

SEQ ID NO: 112905 - DNA, 81 bp, Homo sapiens
tcaggcaccttcactaccatcccaatcacaggcctactgctcttcctggtccagcttgctggtcctagtgcttagcttctc

SEQ ID NO: 112906 - DNA, 76 bp, Homo sapiens
ccaatcacaggcctactgctcttcctggtccagcttgctggtcctagtgcttagcttctctcttaaggggatcttt

SEQ ID NO: 112907 - DNA, 74 bp, Homo sapiens
tcttcctggtccagcttgctggtcctagtgcttagcttctctcttaaggggatcttttgacctctgtaggaatt

SEQ ID NO: 112908 - DNA, 73 bp, Homo sapiens
cagcttgctggtcctagtgcttagcttctctcttaaggggatcttttgacctctgtaggaatttcttccgtct

SEQ ID NO: 112909 - DNA, 71 bp, Homo sapiens
gtcctagtgcttagcttctctcttaaggggatcttttgacctctgtaggaatttcttccgtcttgggcttc

SEQ ID NO: 112910 - DNA, 72 bp, Homo sapiens
ttagcttctctcttaaggggatcttttgacctctgtaggaatttcttccgtcttgggcttctggcatggttc

SEQ ID NO: 112911 - DNA, 72 bp, Homo sapiens
ttctctcttaaggggatcttttgacctctgtaggaatttcttccgtcttgggcttctggcatggttctattg

SEQ ID NO: 112912 - DNA, 73 bp, Homo sapiens
atcttttgacctctgtaggaatttcttccgtcttgggcttctggcatggttctattggtcacctggcaccctc

SEQ ID NO: 112913 - DNA, 75 bp, Homo sapiens
ttgacctctgtaggaatttcttccgtcttgggcttctggcatggttctattggtcacctggcaccctcctcacca

SEQ ID NO: 112914 - DNA, 74 bp, Homo sapiens
taggaatttcttccgtcttgggcttctggcatggttctattggtcacctggcaccctcctcaccacttcagtgg

SEQ ID NO: 112915 - DNA, 74 bp, Homo sapiens
ttccgtcttgggcttctggcatggttctattggtcacctggcaccctcctcaccacttcagtggtgcccccaac

SEQ ID NO: 112916 - DNA, 77 bp, Homo sapiens
ttctggcatggttctattggtcacctggcaccctcctcaccacttcagtggtgcccccaactctgcttctaggactc

SEQ ID NO: 112917 - DNA, 76 bp, Homo sapiens
atggttctattggtcacctggcaccctcctcaccacttcagtggtgcccccaactctgcttctaggactctggcaa

SEQ ID NO: 112918 - DNA, 74 bp, Homo sapiens
acctggcaccctcctcaccacttcagtggtgcccccaactctgcttctaggactctggcaagtcctacaaccac

SEQ ID NO: 112919 - DNA, 74 bp, Homo sapiens
acttcagtggtgcccccaactctgcttctaggactctggcaagtcctacaaccacgatcctggtaatagtacga

SEQ ID NO: 112920 - DNA, 72 bp, Homo sapiens
gcccccaactctgcttctaggactctggcaagtcctacaaccacgatcctggtaatagtacgaggttggatt

SEQ ID NO: 112921 - DNA, 73 bp, Homo sapiens
aactctgcttctaggactctggcaagtcctacaaccacgatcctggtaatagtacgaggttggatttgtcaac

SEQ ID NO: 112922 - DNA, 75 bp, Homo sapiens
gactctggcaagtcctacaaccacgatcctggtaatagtacgaggttggatttgtcaaccttgtcacgatcacat

SEQ ID NO: 112923 - DNA, 72 bp, Homo sapiens
aagtcctacaaccacgatcctggtaatagtacgaggttggatttgtcaaccttgtcacgatcacatttctgt

SEQ ID NO: 112924 - DNA, 76 bp, Homo sapiens
atcctggtaatagtacgaggttggatttgtcaaccttgtcacgatcacatttctgttctgcgcattgtgggctgtt

SEQ ID NO: 112925 - DNA, 78 bp, Homo sapiens
tagtacgaggttggatttgtcaaccttgtcacgatcacatttctgttctgcgcattgtgggctgtttggtagcatctt

SEQ ID NO: 112926 - DNA, 82 bp, Homo sapiens
ttggatttgtcaaccttgtcacgatcacatttctgttctgcgcattgtgggctgtttggtagcatctttggcatctgcctac

SEQ ID NO: 112927 - DNA, 82 bp, Homo sapiens
accttgtcacgatcacatttctgttctgcgcattgtgggctgtttggtagcatctttggcatctgcctactggatgttagta

SEQ ID NO: 112928 - DNA, 81 bp, Homo sapiens
acgatcacatttctgttctgcgcattgtgggctgtttggtagcatctttggcatctgcctactggatgttagtacagtccc

SEQ ID NO: 112929 - DNA, 81 bp, Homo sapiens
tgttctgcgcattgtgggctgtttggtagcatctttggcatctgcctactggatgttagtacagtcccctctatcccttga

SEQ ID NO: 112930 - DNA, 78 bp, Homo sapiens
attgtgggctgtttggtagcatctttggcatctgcctactggatgttagtacagtcccctctatcccttgagttgtga

SEQ ID NO: 112931 - DNA, 77 bp, Homo sapiens
tttggtagcatctttggcatctgcctactggatgttagtacagtcccctctatcccttgagttgtgacaactagaaa

SEQ ID NO: 112932 - DNA, 79 bp, Homo sapiens
agcatctttggcatctgcctactggatgttagtacagtcccctctatcccttgagttgtgacaactagaaatgtctcca

SEQ ID NO: 112933 - DNA, 79 bp, Homo sapiens
tgcctactggatgttagtacagtcccctctatcccttgagttgtgacaactagaaatgtctccagacagtgccaaatga

SEQ ID NO: 112934 - DNA, 76 bp, Homo sapiens
actggatgttagtacagtcccctctatcccttgagttgtgacaactagaaatgtctccagacagtgccaaatgacc

SEQ ID NO: 112935 - DNA, 73 bp, Homo sapiens
agtacagtcccctctatcccttgagttgtgacaactagaaatgtctccagacagtgccaaatgacccccttcc

SEQ ID NO: 112936 - DNA, 76 bp, Homo sapiens
tatcccttgagttgtgacaactagaaatgtctccagacagtgccaaatgacccccttcctcctcacactgcctcct

SEQ ID NO: 112937 - DNA, 77 bp, Homo sapiens
ttgagttgtgacaactagaaatgtctccagacagtgccaaatgacccccttcctcctcacactgcctccttcttcca

SEQ ID NO: 112938 - DNA, 72 bp, Homo sapiens
aactagaaatgtctccagacagtgccaaatgacccccttcctcctcacactgcctccttcttccaggtaaaa

SEQ ID NO: 112939 - DNA, 72 bp, Homo sapiens
atgtctccagacagtgccaaatgacccccttcctcctcacactgcctccttcttccaggtaaaaaccactgg

SEQ ID NO: 112940 - DNA, 70 bp, Homo sapiens
acagtgccaaatgacccccttcctcctcacactgcctccttcttccaggtaaaaaccactggtgaggccg

SEQ ID NO: 112941 - DNA, 69 bp, Homo sapiens
aaataaaaaaaccactggtgtaagatattttaaggtgacaagcatggagaagaagagaaaagtaatgag

SEQ ID NO: 112942 - DNA, 70 bp, Homo sapiens
aataaaaaaaccactggtgtaagatattttaaggtgacaagcatggagaagaagagaaaagtaatgagga

SEQ ID NO: 112943 - DNA, 70 bp, Homo sapiens
ccactggtgtaagatattttaaggtgacaagcatggagaagaagagaaaagtaatgaggaaaaactaaac

SEQ ID NO: 112944 - DNA, 73 bp, Homo sapiens
gtaagatattttaaggtgacaagcatggagaagaagagaaaagtaatgaggaaaaactaaactggcaagatca

SEQ ID NO: 112945 - DNA, 74 bp, Homo sapiens
taaggtgacaagcatggagaagaagagaaaagtaatgaggaaaaactaaactggcaagatcaataaatatggtc

SEQ ID NO: 112946 - DNA, 74 bp, Homo sapiens
gacaagcatggagaagaagagaaaagtaatgaggaaaaactaaactggcaagatcaataaatatggtctaaata

SEQ ID NO: 112947 - DNA, 71 bp, Homo sapiens
gagaagaagagaaaagtaatgaggaaaaactaaactggcaagatcaataaatatggtctaaataaatgaaa

SEQ ID NO: 112948 - DNA, 71 bp, Homo sapiens
gtaatgaggaaaaactaaactggcaagatcaataaatatggtctaaataaatgaaaaaggagattgactaa

SEQ ID NO: 112949 - DNA, 70 bp, Homo sapiens
aaaactaaactggcaagatcaataaatatggtctaaataaatgaaaaaggagattgactaaatagaccca

SEQ ID NO: 112950 - DNA, 73 bp, Homo sapiens
aactggcaagatcaataaatatggtctaaataaatgaaaaaggagattgactaaatagacccatgggaaatga

SEQ ID NO: 112951 - DNA, 72 bp, Homo sapiens
gatcaataaatatggtctaaataaatgaaaaaggagattgactaaatagacccatgggaaatgaaaccagga

SEQ ID NO: 112952 - DNA, 69 bp, Homo sapiens
ggtctaaataaatgaaaaaggagattgactaaatagacccatgggaaatgaaaccaggagataaaatgt

SEQ ID NO: 112953 - DNA, 68 bp, Homo sapiens
atgaaaaaggagattgactaaatagacccatgggaaatgaaaccaggagataaaatgttaaagaaaag

SEQ ID NO: 112954 - DNA, 68 bp, Homo sapiens
aaaggagattgactaaatagacccatgggaaatgaaaccaggagataaaatgttaaagaaaagtataa

SEQ ID NO: 112955 - DNA, 68 bp, Homo sapiens
gactaaatagacccatgggaaatgaaaccaggagataaaatgttaaagaaaagtataaaaattgcaaa

SEQ ID NO: 112956 - DNA, 69 bp, Homo sapiens
cccatgggaaatgaaaccaggagataaaatgttaaagaaaagtataaaaattgcaaagataagagggca

SEQ ID NO: 112957 - DNA, 72 bp, Homo sapiens
tgaaaccaggagataaaatgttaaagaaaagtataaaaattgcaaagataagagggcattagatcggctcaa

SEQ ID NO: 112958 - DNA, 72 bp, Homo sapiens
caggagataaaatgttaaagaaaagtataaaaattgcaaagataagagggcattagatcggctcaaaatgga

SEQ ID NO: 112959 - DNA, 71 bp, Homo sapiens
ggagataaaatgttaaagaaaagtataaaaattgcaaagataagagggcattagatcggctcaaaatggat

SEQ ID NO: 112960 - DNA, 78 bp, Homo sapiens
gtctgggcaaagatttttttgaatatgatctcaaagcatacgcaacaaaagcaacagtagacaactaggatggcttca

SEQ ID NO: 112961 - DNA, 77 bp, Homo sapiens
gcaaagatttttttgaatatgatctcaaagcatacgcaacaaaagcaacagtagacaactaggatggcttcaaaata

SEQ ID NO: 112962 - DNA, 75 bp, Homo sapiens
tttttgaatatgatctcaaagcatacgcaacaaaagcaacagtagacaactaggatggcttcaaaataaaaagct

SEQ ID NO: 112963 - DNA, 75 bp, Homo sapiens
atctcaaagcatacgcaacaaaagcaacagtagacaactaggatggcttcaaaataaaaagcttttgcacagaaa

SEQ ID NO: 112964 - DNA, 71 bp, Homo sapiens
atacgcaacaaaagcaacagtagacaactaggatggcttcaaaataaaaagcttttgcacagaaaaggaaa

SEQ ID NO: 112965 - DNA, 72 bp, Homo sapiens
aaagcaacagtagacaactaggatggcttcaaaataaaaagcttttgcacagaaaaggaaacattcaacaga

SEQ ID NO: 112966 - DNA, 73 bp, Homo sapiens
gcaacagtagacaactaggatggcttcaaaataaaaagcttttgcacagaaaaggaaacattcaacagaataa

SEQ ID NO: 112967 - DNA, 72 bp, Homo sapiens
gtagacaactaggatggcttcaaaataaaaagcttttgcacagaaaaggaaacattcaacagaataaagaca

SEQ ID NO: 112968 - DNA, 69 bp, Homo sapiens
ctaggatggcttcaaaataaaaagcttttgcacagaaaaggaaacattcaacagaataaagacaaaacc

SEQ ID NO: 112969 - DNA, 70 bp, Homo sapiens
ggatggcttcaaaataaaaagcttttgcacagaaaaggaaacattcaacagaataaagacaaaacctaca

SEQ ID NO: 112970 - DNA, 69 bp, Homo sapiens
ggcttcaaaataaaaagcttttgcacagaaaaggaaacattcaacagaataaagacaaaacctacagaa

SEQ ID NO: 112971 - DNA, 68 bp, Homo sapiens
aagcttttgcacagaaaaggaaacattcaacagaataaagacaaaacctacagaaagggaaagaatac

SEQ ID NO: 112972 - DNA, 72 bp, Homo sapiens
gcacagaaaaggaaacattcaacagaataaagacaaaacctacagaaagggaaagaatactggcaaatcata

SEQ ID NO: 112973 - DNA, 73 bp, Homo sapiens
gaaacattcaacagaataaagacaaaacctacagaaagggaaagaatactggcaaatcatagcatttgataag

SEQ ID NO: 112974 - DNA, 72 bp, Homo sapiens
caacagaataaagacaaaacctacagaaagggaaagaatactggcaaatcatagcatttgataaggtattaa

SEQ ID NO: 112975 - DNA, 70 bp, Homo sapiens
agacaaaacctacagaaagggaaagaatactggcaaatcatagcatttgataaggtattaatttccaaac

SEQ ID NO: 112976 - DNA, 73 bp, Homo sapiens
cagaaagggaaagaatactggcaaatcatagcatttgataaggtattaatttccaaactacataaagaactca

SEQ ID NO: 112977 - DNA, 72 bp, Homo sapiens
agggaaagaatactggcaaatcatagcatttgataaggtattaatttccaaactacataaagaactcaaaca

SEQ ID NO: 112978 - DNA, 67 bp, Homo sapiens
aaataatgtgatttaaaaactgggcaaaggacctgaaaaaaacatttctcagaaaaaggtacacaca

SEQ ID NO: 112979 - DNA, 70 bp, Homo sapiens
tgtgatttaaaaactgggcaaaggacctgaaaaaaacatttctcagaaaaaggtacacacatgtccagta

SEQ ID NO: 112980 - DNA, 68 bp, Homo sapiens
actgggcaaaggacctgaaaaaaacatttctcagaaaaaggtacacacatgtccagtaagtataaaaa

SEQ ID NO: 112981 - DNA, 70 bp, Homo sapiens
gcaaaggacctgaaaaaaacatttctcagaaaaaggtacacacatgtccagtaagtataaaaaatactca

SEQ ID NO: 112982 - DNA, 68 bp, Homo sapiens
aaaggacctgaaaaaaacatttctcagaaaaaggtacacacatgtccagtaagtataaaaaatactca

SEQ ID NO: 112983 - DNA, 72 bp, Homo sapiens
gaaaaaaacatttctcagaaaaaggtacacacatgtccagtaagtataaaaaatactcaacatcactcctca

SEQ ID NO: 112984 - DNA, 76 bp, Homo sapiens
aacatttctcagaaaaaggtacacacatgtccagtaagtataaaaaatactcaacatcactcctcatcatgcaaat

SEQ ID NO: 112985 - DNA, 77 bp, Homo sapiens
catttctcagaaaaaggtacacacatgtccagtaagtataaaaaatactcaacatcactcctcatcatgcaaattaa

SEQ ID NO: 112986 - DNA, 75 bp, Homo sapiens
ctcagaaaaaggtacacacatgtccagtaagtataaaaaatactcaacatcactcctcatcatgcaaattaaaac

SEQ ID NO: 112987 - DNA, 71 bp, Homo sapiens
attaaaaccacagtgagctatcacctcacacctggtaggaaagcttttatcaaaaagttaagagatggccg

SEQ ID NO: 112988 - DNA, 72 bp, Homo sapiens
accacagtgagctatcacctcacacctggtaggaaagcttttatcaaaaagttaagagatggccgggtgcgg

SEQ ID NO: 112989 - DNA, 72 bp, Homo sapiens
aggttgtggagaaagggagctcttgcacactcttggtgggaagccattatggaaaactgtatggaggttccc

SEQ ID NO: 112990 - DNA, 70 bp, Homo sapiens
agaaagggagctcttgcacactcttggtgggaagccattatggaaaactgtatggaggttccccccaaaa

SEQ ID NO: 112991 - DNA, 85 bp, Homo sapiens
gagatatctgcactgtcatgttcatagtggtactattcataataaccaagataaagaatcagcctaagtgtccatcgacagatga

SEQ ID NO: 112992 - DNA, 82 bp, Homo sapiens
cactgtcatgttcatagtggtactattcataataaccaagataaagaatcagcctaagtgtccatcgacagatgaatgaata

SEQ ID NO: 112993 - DNA, 79 bp, Homo sapiens
agcaacatggatgaacttggagtacattacactaaataaaataaggcaggcatagaagaacaaacactgcatcatctta

SEQ ID NO: 112994 - DNA, 80 bp, Homo sapiens
gatgaacttggagtacattacactaaataaaataaggcaggcatagaagaacaaacactgcatcatcttatgtatatgtg

SEQ ID NO: 112995 - DNA, 80 bp, Homo sapiens
tggagtacattacactaaataaaataaggcaggcatagaagaacaaacactgcatcatcttatgtatatgtggaatccta

SEQ ID NO: 112996 - DNA, 76 bp, Homo sapiens
cactaaataaaataaggcaggcatagaagaacaaacactgcatcatcttatgtatatgtggaatcctaaaaagtta

SEQ ID NO: 112997 - DNA, 75 bp, Homo sapiens
aaataaggcaggcatagaagaacaaacactgcatcatcttatgtatatgtggaatcctaaaaagttaaatctaaa

SEQ ID NO: 112998 - DNA, 77 bp, Homo sapiens
gcaggcatagaagaacaaacactgcatcatcttatgtatatgtggaatcctaaaaagttaaatctaaaaagactgta

SEQ ID NO: 112999 - DNA, 73 bp, Homo sapiens
caaacactgcatcatcttatgtatatgtggaatcctaaaaagttaaatctaaaaagactgtacattaaaggta

SEQ ID NO: 113000 - DNA, 72 bp, Homo sapiens
gcatcatcttatgtatatgtggaatcctaaaaagttaaatctaaaaagactgtacattaaaggtacctacca

SEQ ID NO: 113001 - DNA, 68 bp, Homo sapiens
gtatatgtggaatcctaaaaagttaaatctaaaaagactgtacattaaaggtacctaccattgttatc

SEQ ID NO: 113002 - DNA, 69 bp, Homo sapiens
gaatcctaaaaagttaaatctaaaaagactgtacattaaaggtacctaccattgttatctgtctatgga

SEQ ID NO: 113003 - DNA, 67 bp, Homo sapiens
aatctaaaaagactgtacattaaaggtacctaccattgttatctgtctatggaaatattttttaaaa

SEQ ID NO: 113004 - DNA, 67 bp, Homo sapiens
tattttttaaaaagaagttatttattttggtggaggatccactaaggaacattcctgaatggaacaa

SEQ ID NO: 113005 - DNA, 70 bp, Homo sapiens
aaagaagttatttattttggtggaggatccactaaggaacattcctgaatggaacaaagaatgaacctca

SEQ ID NO: 113006 - DNA, 73 bp, Homo sapiens
atttattttggtggaggatccactaaggaacattcctgaatggaacaaagaatgaacctcaacacagatggaa

SEQ ID NO: 113007 - DNA, 78 bp, Homo sapiens
aggatccactaaggaacattcctgaatggaacaaagaatgaacctcaacacagatggaatctgtcttagatgtggatg

SEQ ID NO: 113008 - DNA, 79 bp, Homo sapiens
actaaggaacattcctgaatggaacaaagaatgaacctcaacacagatggaatctgtcttagatgtggatgtggctatg

SEQ ID NO: 113009 - DNA, 82 bp, Homo sapiens
aacattcctgaatggaacaaagaatgaacctcaacacagatggaatctgtcttagatgtggatgtggctatgggcacagatg

SEQ ID NO: 113010 - DNA, 84 bp, Homo sapiens
tgaatggaacaaagaatgaacctcaacacagatggaatctgtcttagatgtggatgtggctatgggcacagatgggtgcttcta

SEQ ID NO: 113011 - DNA, 82 bp, Homo sapiens
aacaaagaatgaacctcaacacagatggaatctgtcttagatgtggatgtggctatgggcacagatgggtgcttctaagtga

SEQ ID NO: 113012 - DNA, 84 bp, Homo sapiens
aaagaatgaacctcaacacagatggaatctgtcttagatgtggatgtggctatgggcacagatgggtgcttctaagtgactgca

SEQ ID NO: 113013 - DNA, 85 bp, Homo sapiens
atgaacctcaacacagatggaatctgtcttagatgtggatgtggctatgggcacagatgggtgcttctaagtgactgcaggccaa

SEQ ID NO: 113014 - DNA, 86 bp, Homo sapiens
aacacagatggaatctgtcttagatgtggatgtggctatgggcacagatgggtgcttctaagtgactgcaggccaagcctggctga

SEQ ID NO: 113015 - DNA, 85 bp, Homo sapiens
aatctgtcttagatgtggatgtggctatgggcacagatgggtgcttctaagtgactgcaggccaagcctggctgagaagcatttg

SEQ ID NO: 113016 - DNA, 84 bp, Homo sapiens
agatgtggatgtggctatgggcacagatgggtgcttctaagtgactgcaggccaagcctggctgagaagcatttgggtacagag

SEQ ID NO: 113017 - DNA, 79 bp, Homo sapiens
ctatgggcacagatgggtgcttctaagtgactgcaggccaagcctggctgagaagcatttgggtacagaggggcttttg

SEQ ID NO: 113018 - DNA, 77 bp, Homo sapiens
agatgggtgcttctaagtgactgcaggccaagcctggctgagaagcatttgggtacagaggggcttttggggaatga

SEQ ID NO: 113019 - DNA, 77 bp, Homo sapiens
gtgcttctaagtgactgcaggccaagcctggctgagaagcatttgggtacagaggggcttttggggaatgatcaggg

SEQ ID NO: 113020 - DNA, 77 bp, Homo sapiens
aagcctggctgagaagcatttgggtacagaggggcttttggggaatgatcaggggtgatcaggagcaccagctccta

SEQ ID NO: 113021 - DNA, 75 bp, Homo sapiens
agaagcatttgggtacagaggggcttttggggaatgatcaggggtgatcaggagcaccagctcctacagattgtt

SEQ ID NO: 113022 - DNA, 76 bp, Homo sapiens
atttgggtacagaggggcttttggggaatgatcaggggtgatcaggagcaccagctcctacagattgtttgacaca

SEQ ID NO: 113023 - DNA, 80 bp, Homo sapiens
ggcttttggggaatgatcaggggtgatcaggagcaccagctcctacagattgtttgacacatgccacaagccttgaaatg

SEQ ID NO: 113024 - DNA, 80 bp, Homo sapiens
ggaatgatcaggggtgatcaggagcaccagctcctacagattgtttgacacatgccacaagccttgaaatggaaaaggaa

SEQ ID NO: 113025 - DNA, 82 bp, Homo sapiens
gggtgatcaggagcaccagctcctacagattgtttgacacatgccacaagccttgaaatggaaaaggaacacacatatgtca

SEQ ID NO: 113026 - DNA, 83 bp, Homo sapiens
atcaggagcaccagctcctacagattgtttgacacatgccacaagccttgaaatggaaaaggaacacacatatgtcatatcac

SEQ ID NO: 113027 - DNA, 82 bp, Homo sapiens
tcctacagattgtttgacacatgccacaagccttgaaatggaaaaggaacacacatatgtcatatcacctctcaacatttca

SEQ ID NO: 113028 - DNA, 81 bp, Homo sapiens
agattgtttgacacatgccacaagccttgaaatggaaaaggaacacacatatgtcatatcacctctcaacatttcactgaa

SEQ ID NO: 113029 - DNA, 79 bp, Homo sapiens
acacatgccacaagccttgaaatggaaaaggaacacacatatgtcatatcacctctcaacatttcactgaaggagattt

SEQ ID NO: 113030 - DNA, 74 bp, Homo sapiens
ccttgaaatggaaaaggaacacacatatgtcatatcacctctcaacatttcactgaaggagattttcccctaaa

SEQ ID NO: 113031 - DNA, 74 bp, Homo sapiens
aatggaaaaggaacacacatatgtcatatcacctctcaacatttcactgaaggagattttcccctaaatagaaa

SEQ ID NO: 113032 - DNA, 73 bp, Homo sapiens
acctctcaacatttcactgaaggagattttcccctaaatagaaagatatggagaaagagtactgagaataatg

SEQ ID NO: 113033 - DNA, 73 bp, Homo sapiens
atttcactgaaggagattttcccctaaatagaaagatatggagaaagagtactgagaataatgggctggataa

SEQ ID NO: 113034 - DNA, 75 bp, Homo sapiens
taaatagaaagatatggagaaagagtactgagaataatgggctggataagtgggacaatccttgcccttactgac

SEQ ID NO: 113035 - DNA, 75 bp, Homo sapiens
aagagtactgagaataatgggctggataagtgggacaatccttgcccttactgaccttcctgaagtgtcgctgaa

SEQ ID NO: 113036 - DNA, 74 bp, Homo sapiens
agaataatgggctggataagtgggacaatccttgcccttactgaccttcctgaagtgtcgctgaaataggtgga

SEQ ID NO: 113037 - DNA, 73 bp, Homo sapiens
aatgggctggataagtgggacaatccttgcccttactgaccttcctgaagtgtcgctgaaataggtggactta

SEQ ID NO: 113038 - DNA, 73 bp, Homo sapiens
ataagtgggacaatccttgcccttactgaccttcctgaagtgtcgctgaaataggtggacttagaactgaatg

SEQ ID NO: 113039 - DNA, 73 bp, Homo sapiens
cttactgaccttcctgaagtgtcgctgaaataggtggacttagaactgaatggaatctactctaagttattta

SEQ ID NO: 113040 - DNA, 73 bp, Homo sapiens
ttcctgaagtgtcgctgaaataggtggacttagaactgaatggaatctactctaagttatttagcaaacctct

SEQ ID NO: 113041 - DNA, 72 bp, Homo sapiens
ctgaaataggtggacttagaactgaatggaatctactctaagttatttagcaaacctcttctgttatcccac

SEQ ID NO: 113042 - DNA, 72 bp, Homo sapiens
taggtggacttagaactgaatggaatctactctaagttatttagcaaacctcttctgttatcccactagtta

SEQ ID NO: 113043 - DNA, 68 bp, Homo sapiens
agaactgaatggaatctactctaagttatttagcaaacctcttctgttatcccactagttaccttttt

SEQ ID NO: 113044 - DNA, 69 bp, Homo sapiens
atggaatctactctaagttatttagcaaacctcttctgttatcccactagttaccttttttgaagagga

SEQ ID NO: 113045 - DNA, 66 bp, Homo sapiens
ctctaagttatttagcaaacctcttctgttatcccactagttaccttttttgaagaggaaaaataa

SEQ ID NO: 113046 - DNA, 66 bp, Homo sapiens
ctcttctgttatcccactagttaccttttttgaagaggaaaaataagagttgagtttttccattaa

SEQ ID NO: 113047 - DNA, 65 bp, Homo sapiens
atcccactagttaccttttttgaagaggaaaaataagagttgagtttttccattaagaaagtcta

SEQ ID NO: 113048 - DNA, 67 bp, Homo sapiens
ttttttgaagaggaaaaataagagttgagtttttccattaagaaagtctatttaagctgataaagtg

SEQ ID NO: 113049 - DNA, 67 bp, Homo sapiens
gaggaaaaataagagttgagtttttccattaagaaagtctatttaagctgataaagtggaaaagagg

SEQ ID NO: 113050 - DNA, 69 bp, Homo sapiens
agagttgagtttttccattaagaaagtctatttaagctgataaagtggaaaagagggcatcctttctgt

SEQ ID NO: 113051 - DNA, 70 bp, Homo sapiens
gagtttttccattaagaaagtctatttaagctgataaagtggaaaagagggcatcctttctgttctttga

SEQ ID NO: 113052 - DNA, 72 bp, Homo sapiens
aagaaagtctatttaagctgataaagtggaaaagagggcatcctttctgttctttgattgatgtcctgtaaa

SEQ ID NO: 113053 - DNA, 73 bp, Homo sapiens
tatttaagctgataaagtggaaaagagggcatcctttctgttctttgattgatgtcctgtaaataacccaatg

SEQ ID NO: 113054 - DNA, 69 bp, Homo sapiens
ataaagtggaaaagagggcatcctttctgttctttgattgatgtcctgtaaataacccaatgggaaacg

SEQ ID NO: 113055 - DNA, 70 bp, Homo sapiens
aagagggcatcctttctgttctttgattgatgtcctgtaaataacccaatgggaaacggaccagacttta

SEQ ID NO: 113056 - DNA, 72 bp, Homo sapiens
atcctttctgttctttgattgatgtcctgtaaataacccaatgggaaacggaccagactttatgatcagtcc

SEQ ID NO: 113057 - DNA, 74 bp, Homo sapiens
ttctttgattgatgtcctgtaaataacccaatgggaaacggaccagactttatgatcagtcccgtgactatgaa

SEQ ID NO: 113058 - DNA, 73 bp, Homo sapiens
attgatgtcctgtaaataacccaatgggaaacggaccagactttatgatcagtcccgtgactatgaatcctct

SEQ ID NO: 113059 - DNA, 73 bp, Homo sapiens
aataacccaatgggaaacggaccagactttatgatcagtcccgtgactatgaatcctcttggtcatagacatt

SEQ ID NO: 113060 - DNA, 76 bp, Homo sapiens
accagactttatgatcagtcccgtgactatgaatcctcttggtcatagacatttgttttctacacaggtattcaat

SEQ ID NO: 113061 - DNA, 75 bp, Homo sapiens
ctttatgatcagtcccgtgactatgaatcctcttggtcatagacatttgttttctacacaggtattcaatttaaa

SEQ ID NO: 113062 - DNA, 77 bp, Homo sapiens
tcccgtgactatgaatcctcttggtcatagacatttgttttctacacaggtattcaatttaaagcctgagccaatca

SEQ ID NO: 113063 - DNA, 77 bp, Homo sapiens
atttgttttctacacaggtattcaatttaaagcctgagccaatcagctcatgggcagtaagatgtcccttgactgtg

SEQ ID NO: 113064 - DNA, 78 bp, Homo sapiens
tttctacacaggtattcaatttaaagcctgagccaatcagctcatgggcagtaagatgtcccttgactgtggtgtttc

SEQ ID NO: 113065 - DNA, 81 bp, Homo sapiens
tattcaatttaaagcctgagccaatcagctcatgggcagtaagatgtcccttgactgtggtgtttctcacatgcttctcct

SEQ ID NO: 113066 - DNA, 83 bp, Homo sapiens
ttaaagcctgagccaatcagctcatgggcagtaagatgtcccttgactgtggtgtttctcacatgcttctccttgcacacttg

SEQ ID NO: 113067 - DNA, 83 bp, Homo sapiens
aatcagctcatgggcagtaagatgtcccttgactgtggtgtttctcacatgcttctccttgcacacttgtccagcttcccaca

SEQ ID NO: 113068 - DNA, 79 bp, Homo sapiens
atgggcagtaagatgtcccttgactgtggtgtttctcacatgcttctccttgcacacttgtccagcttcccacaaggga

SEQ ID NO: 113069 - DNA, 79 bp, Homo sapiens
taagatgtcccttgactgtggtgtttctcacatgcttctccttgcacacttgtccagcttcccacaagggacacctaca

SEQ ID NO: 113070 - DNA, 78 bp, Homo sapiens
ttgcacacttgtccagcttcccacaagggacacctacatgacttccagcctggcacctctggacagaattggaaccac

SEQ ID NO: 113071 - DNA, 77 bp, Homo sapiens
tgtccagcttcccacaagggacacctacatgacttccagcctggcacctctggacagaattggaaccacctccatgt

SEQ ID NO: 113072 - DNA, 78 bp, Homo sapiens
acaagggacacctacatgacttccagcctggcacctctggacagaattggaaccacctccatgttgcctgctcctctc

SEQ ID NO: 113073 - DNA, 80 bp, Homo sapiens
acttccagcctggcacctctggacagaattggaaccacctccatgttgcctgctcctctctgctctaatattcccacata

SEQ ID NO: 113074 - DNA, 79 bp, Homo sapiens
cacctctggacagaattggaaccacctccatgttgcctgctcctctctgctctaatattcccacatacagcttcttacc

SEQ ID NO: 113075 - DNA, 79 bp, Homo sapiens
acagaattggaaccacctccatgttgcctgctcctctctgctctaatattcccacatacagcttcttacccttagctga

SEQ ID NO: 113076 - DNA, 79 bp, Homo sapiens
ctccatgttgcctgctcctctctgctctaatattcccacatacagcttcttacccttagctgatcacaggaattaaggg

SEQ ID NO: 113077 - DNA, 74 bp, Homo sapiens
tcctctctgctctaatattcccacatacagcttcttacccttagctgatcacaggaattaaggggaaccaagtt

SEQ ID NO: 113078 - DNA, 72 bp, Homo sapiens
tctaatattcccacatacagcttcttacccttagctgatcacaggaattaaggggaaccaagtttgggtgga

SEQ ID NO: 113079 - DNA, 71 bp, Homo sapiens
tattcccacatacagcttcttacccttagctgatcacaggaattaaggggaaccaagtttgggtggaaatc

SEQ ID NO: 113080 - DNA, 67 bp, Homo sapiens
tacccttagctgatcacaggaattaaggggaaccaagtttgggtggaaatcccagttacttacttcc

SEQ ID NO: 113081 - DNA, 68 bp, Homo sapiens
atcacaggaattaaggggaaccaagtttgggtggaaatcccagttacttacttcctgctgtggttgta

SEQ ID NO: 113082 - DNA, 68 bp, Homo sapiens
aattaaggggaaccaagtttgggtggaaatcccagttacttacttcctgctgtggttgtatgtgagag

SEQ ID NO: 113083 - DNA, 74 bp, Homo sapiens
aagtttgggtggaaatcccagttacttacttcctgctgtggttgtatgtgagaggagatcagtgtggcctcttc

SEQ ID NO: 113084 - DNA, 81 bp, Homo sapiens
gaaatcccagttacttacttcctgctgtggttgtatgtgagaggagatcagtgtggcctcttctgcttacatccactgatg

SEQ ID NO: 113085 - DNA, 79 bp, Homo sapiens
agttacttacttcctgctgtggttgtatgtgagaggagatcagtgtggcctcttctgcttacatccactgatgttttta

SEQ ID NO: 113086 - DNA, 82 bp, Homo sapiens
tcctgctgtggttgtatgtgagaggagatcagtgtggcctcttctgcttacatccactgatgtttttacacttaagccataa

SEQ ID NO: 113087 - DNA, 82 bp, Homo sapiens
tggttgtatgtgagaggagatcagtgtggcctcttctgcttacatccactgatgtttttacacttaagccataagcacagga

SEQ ID NO: 113088 - DNA, 82 bp, Homo sapiens
tgtgagaggagatcagtgtggcctcttctgcttacatccactgatgtttttacacttaagccataagcacaggactggtgaa

SEQ ID NO: 113089 - DNA, 79 bp, Homo sapiens
atcagtgtggcctcttctgcttacatccactgatgtttttacacttaagccataagcacaggactggtgaagctccctc

SEQ ID NO: 113090 - DNA, 79 bp, Homo sapiens
tcttctgcttacatccactgatgtttttacacttaagccataagcacaggactggtgaagctccctccatccattggtc

SEQ ID NO: 113091 - DNA, 79 bp, Homo sapiens
ttacatccactgatgtttttacacttaagccataagcacaggactggtgaagctccctccatccattggtccatctatc

SEQ ID NO: 113092 - DNA, 80 bp, Homo sapiens
ctgatgtttttacacttaagccataagcacaggactggtgaagctccctccatccattggtccatctatctgtctatcca

SEQ ID NO: 113093 - DNA, 86 bp, Homo sapiens
tccatctatccattcattcaactatctatccatctacctgcctatccatccattcatttccattcatccttctatctatccatcaa

SEQ ID NO: 113094 - DNA, 84 bp, Homo sapiens
cattcattcaactatctatccatctacctgcctatccatccattcatttccattcatccttctatctatccatcaatttgtcca

SEQ ID NO: 113095 - DNA, 83 bp, Homo sapiens
attcaactatctatccatctacctgcctatccatccattcatttccattcatccttctatctatccatcaatttgtccatctg

SEQ ID NO: 113096 - DNA, 88 bp, Homo sapiens
catctacctgcctatccatccattcatttccattcatccttctatctatccatcaatttgtccatctgtccatctgctggctcattca

SEQ ID NO: 113097 - DNA, 87 bp, Homo sapiens
acctgcctatccatccattcatttccattcatccttctatctatccatcaatttgtccatctgtccatctgctggctcattcattca

SEQ ID NO: 113098 - DNA, 84 bp, Homo sapiens
cattcattcaactatctgtccatccatgcatttgcctattcatctatccatccaacatttcttgagtgcccaaattctgccagt

SEQ ID NO: 113099 - DNA, 82 bp, Homo sapiens
attcaactatctgtccatccatgcatttgcctattcatctatccatccaacatttcttgagtgcccaaattctgccagtttc

SEQ ID NO: 113100 - DNA, 81 bp, Homo sapiens
tgtccatccatgcatttgcctattcatctatccatccaacatttcttgagtgcccaaattctgccagtttctgtttttgga

SEQ ID NO: 113101 - DNA, 75 bp, Homo sapiens
atttgcctattcatctatccatccaacatttcttgagtgcccaaattctgccagtttctgtttttggagaggtaa

SEQ ID NO: 113102 - DNA, 79 bp, Homo sapiens
catctatccatccaacatttcttgagtgcccaaattctgccagtttctgtttttggagaggtaagtgacatatgagcca

SEQ ID NO: 113103 - DNA, 78 bp, Homo sapiens
atccaacatttcttgagtgcccaaattctgccagtttctgtttttggagaggtaagtgacatatgagccatctctcaa

SEQ ID NO: 113104 - DNA, 79 bp, Homo sapiens
atttcttgagtgcccaaattctgccagtttctgtttttggagaggtaagtgacatatgagccatctctcaaattgctca

SEQ ID NO: 113105 - DNA, 80 bp, Homo sapiens
caaattctgccagtttctgtttttggagaggtaagtgacatatgagccatctctcaaattgctcagagtctctgaaagaa

SEQ ID NO: 113106 - DNA, 81 bp, Homo sapiens
cagtttctgtttttggagaggtaagtgacatatgagccatctctcaaattgctcagagtctctgaaagaacacactcataa

SEQ ID NO: 113107 - DNA, 82 bp, Homo sapiens
gtaagtgacatatgagccatctctcaaattgctcagagtctctgaaagaacacactcataaacagaaaagctggaattatgt

SEQ ID NO: 113108 - DNA, 80 bp, Homo sapiens
atatgagccatctctcaaattgctcagagtctctgaaagaacacactcataaacagaaaagctggaattatgttttggta

SEQ ID NO: 113109 - DNA, 78 bp, Homo sapiens
atctctcaaattgctcagagtctctgaaagaacacactcataaacagaaaagctggaattatgttttggtaagagcaa

SEQ ID NO: 113110 - DNA, 75 bp, Homo sapiens
attgctcagagtctctgaaagaacacactcataaacagaaaagctggaattatgttttggtaagagcaaataaac

SEQ ID NO: 113111 - DNA, 75 bp, Homo sapiens
tctctgaaagaacacactcataaacagaaaagctggaattatgttttggtaagagcaaataaaccagagcaagaa

SEQ ID NO: 113112 - DNA, 73 bp, Homo sapiens
aagaacacactcataaacagaaaagctggaattatgttttggtaagagcaaataaaccagagcaagaagaaga

SEQ ID NO: 113113 - DNA, 75 bp, Homo sapiens
taaacagaaaagctggaattatgttttggtaagagcaaataaaccagagcaagaagaagaatgtgatcctttgca

SEQ ID NO: 113114 - DNA, 75 bp, Homo sapiens
aaaagctggaattatgttttggtaagagcaaataaaccagagcaagaagaagaatgtgatcctttgcacgagcta

SEQ ID NO: 113115 - DNA, 79 bp, Homo sapiens
ttatgttttggtaagagcaaataaaccagagcaagaagaagaatgtgatcctttgcacgagctaccaatgagcatccta

SEQ ID NO: 113116 - DNA, 84 bp, Homo sapiens
taagagcaaataaaccagagcaagaagaagaatgtgatcctttgcacgagctaccaatgagcatcctagaagacatggtcatca

SEQ ID NO: 113117 - DNA, 84 bp, Homo sapiens
aataaaccagagcaagaagaagaatgtgatcctttgcacgagctaccaatgagcatcctagaagacatggtcatcagagtgtca

SEQ ID NO: 113118 - DNA, 86 bp, Homo sapiens
agaatgtgatcctttgcacgagctaccaatgagcatcctagaagacatggtcatcagagtgtcagcctggaagtattactgcttca

SEQ ID NO: 113119 - DNA, 84 bp, Homo sapiens
ctttgcacgagctaccaatgagcatcctagaagacatggtcatcagagtgtcagcctggaagtattactgcttcagggagcaaa

SEQ ID NO: 113120 - DNA, 85 bp, Homo sapiens
taccaatgagcatcctagaagacatggtcatcagagtgtcagcctggaagtattactgcttcagggagcaaacgcagatggagtg

SEQ ID NO: 113121 - DNA, 84 bp, Homo sapiens
atcctagaagacatggtcatcagagtgtcagcctggaagtattactgcttcagggagcaaacgcagatggagtgtgtccatcca

SEQ ID NO: 113122 - DNA, 85 bp, Homo sapiens
atcagagtgtcagcctggaagtattactgcttcagggagcaaacgcagatggagtgtgtccatccatgtctgtgatggggatgtg

SEQ ID NO: 113123 - DNA, 82 bp, Homo sapiens
ttcagggagcaaacgcagatggagtgtgtccatccatgtctgtgatggggatgtgggattcctgttctctgtccctctaaca

SEQ ID NO: 113124 - DNA, 83 bp, Homo sapiens
aaacgcagatggagtgtgtccatccatgtctgtgatggggatgtgggattcctgttctctgtccctctaacacctcatgcaga

SEQ ID NO: 113125 - DNA, 83 bp, Homo sapiens
agtgtgtccatccatgtctgtgatggggatgtgggattcctgttctctgtccctctaacacctcatgcagacacatgtcccaa

SEQ ID NO: 113126 - DNA, 83 bp, Homo sapiens
atccatgtctgtgatggggatgtgggattcctgttctctgtccctctaacacctcatgcagacacatgtcccaactctcataa

SEQ ID NO: 113127 - DNA, 84 bp, Homo sapiens
tgatggggatgtgggattcctgttctctgtccctctaacacctcatgcagacacatgtcccaactctcataacctgtgcaatga

SEQ ID NO: 113128 - DNA, 82 bp, Homo sapiens
atgtgggattcctgttctctgtccctctaacacctcatgcagacacatgtcccaactctcataacctgtgcaatgacttctc

SEQ ID NO: 113129 - DNA, 85 bp, Homo sapiens
tgtccctctaacacctcatgcagacacatgtcccaactctcataacctgtgcaatgacttctcttgctgaacaacagccctgtca

SEQ ID NO: 113130 - DNA, 85 bp, Homo sapiens
ctcatgcagacacatgtcccaactctcataacctgtgcaatgacttctcttgctgaacaacagccctgtcaggtgcctttaatga

SEQ ID NO: 113131 - DNA, 81 bp, Homo sapiens
cacatgtcccaactctcataacctgtgcaatgacttctcttgctgaacaacagccctgtcaggtgcctttaatgactacta

SEQ ID NO: 113132 - DNA, 78 bp, Homo sapiens
aactctcataacctgtgcaatgacttctcttgctgaacaacagccctgtcaggtgcctttaatgactactaccagaaa

SEQ ID NO: 113133 - DNA, 76 bp, Homo sapiens
ataacctgtgcaatgacttctcttgctgaacaacagccctgtcaggtgcctttaatgactactaccagaaatttcg

SEQ ID NO: 113134 - DNA, 73 bp, Homo sapiens
aatgacttctcttgctgaacaacagccctgtcaggtgcctttaatgactactaccagaaatttcgggagaaat

SEQ ID NO: 113135 - DNA, 70 bp, Homo sapiens
aacagccctgtcaggtgcctttaatgactactaccagaaatttcgggagaaattcaagttgttcaaataa

SEQ ID NO: 113136 - DNA, 72 bp, Homo sapiens
aggtgcctttaatgactactaccagaaatttcgggagaaattcaagttgttcaaataagcatggagaagtga

SEQ ID NO: 113137 - DNA, 72 bp, Homo sapiens
tttaatgactactaccagaaatttcgggagaaattcaagttgttcaaataagcatggagaagtgacctccca

SEQ ID NO: 113138 - DNA, 72 bp, Homo sapiens
tactaccagaaatttcgggagaaattcaagttgttcaaataagcatggagaagtgacctcccagagaggatt

SEQ ID NO: 113139 - DNA, 71 bp, Homo sapiens
aaatttcgggagaaattcaagttgttcaaataagcatggagaagtgacctcccagagaggatttgaaaata

SEQ ID NO: 113140 - DNA, 73 bp, Homo sapiens
agaaattcaagttgttcaaataagcatggagaagtgacctcccagagaggatttgaaaataacacatagaaaa

SEQ ID NO: 113141 - DNA, 73 bp, Homo sapiens
gttgttcaaataagcatggagaagtgacctcccagagaggatttgaaaataacacatagaaaaatgaaactaa

SEQ ID NO: 113142 - DNA, 74 bp, Homo sapiens
catggagaagtgacctcccagagaggatttgaaaataacacatagaaaaatgaaactaaatatgcattgggatt

SEQ ID NO: 113143 - DNA, 72 bp, Homo sapiens
ccagagaggatttgaaaataacacatagaaaaatgaaactaaatatgcattgggatttctgaaacttttgac

SEQ ID NO: 113144 - DNA, 73 bp, Homo sapiens
cacatagaaaaatgaaactaaatatgcattgggatttctgaaacttttgactaaatgtattatctataggtcc

SEQ ID NO: 113145 - DNA, 75 bp, Homo sapiens
tgaaactaaatatgcattgggatttctgaaacttttgactaaatgtattatctataggtccttgaaatctatcat

SEQ ID NO: 113146 - DNA, 76 bp, Homo sapiens
aatatgcattgggatttctgaaacttttgactaaatgtattatctataggtccttgaaatctatcattatcttgtc

SEQ ID NO: 113147 - DNA, 72 bp, Homo sapiens
ggatttctgaaacttttgactaaatgtattatctataggtccttgaaatctatcattatcttgtcttttagg

SEQ ID NO: 113148 - DNA, 71 bp, Homo sapiens
cttttgactaaatgtattatctataggtccttgaaatctatcattatcttgtcttttaggttactttcctc

SEQ ID NO: 113149 - DNA, 72 bp, Homo sapiens
gactaaatgtattatctataggtccttgaaatctatcattatcttgtcttttaggttactttcctcctagat

SEQ ID NO: 113150 - DNA, 69 bp, Homo sapiens
atctataggtccttgaaatctatcattatcttgtcttttaggttactttcctcctagatttttaaagtc

SEQ ID NO: 113151 - DNA, 68 bp, Homo sapiens
ggtccttgaaatctatcattatcttgtcttttaggttactttcctcctagatttttaaagtcttcaaa

SEQ ID NO: 113152 - DNA, 70 bp, Homo sapiens
tcattatcttgtcttttaggttactttcctcctagatttttaaagtcttcaaagaaatactgatgatccc

SEQ ID NO: 113153 - DNA, 69 bp, Homo sapiens
tgtcttttaggttactttcctcctagatttttaaagtcttcaaagaaatactgatgatccccactagga

SEQ ID NO: 113154 - DNA, 69 bp, Homo sapiens
taggttactttcctcctagatttttaaagtcttcaaagaaatactgatgatccccactaggaaaagaga

SEQ ID NO: 113155 - DNA, 74 bp, Homo sapiens
tcttcaaagaaatactgatgatccccactaggaaaagagaaggaaaatgagttattcaaaatcaggcactggga

SEQ ID NO: 113156 - DNA, 75 bp, Homo sapiens
tactgatgatccccactaggaaaagagaaggaaaatgagttattcaaaatcaggcactgggaggactcagaatta

SEQ ID NO: 113157 - DNA, 74 bp, Homo sapiens
cactaggaaaagagaaggaaaatgagttattcaaaatcaggcactgggaggactcagaattacagcattattat

SEQ ID NO: 113158 - DNA, 75 bp, Homo sapiens
agagaaggaaaatgagttattcaaaatcaggcactgggaggactcagaattacagcattattattacttccaata

SEQ ID NO: 113159 - DNA, 70 bp, Homo sapiens
ggcactgggaggactcagaattacagcattattattacttccaataattttaaaagagttaagggctctt

SEQ ID NO: 113160 - DNA, 67 bp, Homo sapiens
attattacttccaataattttaaaagagttaagggctctttgattaccaaatcattatcctacttcc

SEQ ID NO: 113161 - DNA, 71 bp, Homo sapiens
cttccaataattttaaaagagttaagggctctttgattaccaaatcattatcctacttcctatgtcatcta

SEQ ID NO: 113162 - DNA, 73 bp, Homo sapiens
aaaagagttaagggctctttgattaccaaatcattatcctacttcctatgtcatctataactagacacgaaga

SEQ ID NO: 113163 - DNA, 73 bp, Homo sapiens
agttaagggctctttgattaccaaatcattatcctacttcctatgtcatctataactagacacgaagataact

SEQ ID NO: 113164 - DNA, 72 bp, Homo sapiens
ctttgattaccaaatcattatcctacttcctatgtcatctataactagacacgaagataacttattttaagt

SEQ ID NO: 113165 - DNA, 74 bp, Homo sapiens
atcattatcctacttcctatgtcatctataactagacacgaagataacttattttaagtttatttcacaggaca

SEQ ID NO: 113166 - DNA, 72 bp, Homo sapiens
acttcctatgtcatctataactagacacgaagataacttattttaagtttatttcacaggacaagagtacca

SEQ ID NO: 113167 - DNA, 70 bp, Homo sapiens
taactagacacgaagataacttattttaagtttatttcacaggacaagagtaccaaagtcacaccctctc

SEQ ID NO: 113168 - DNA, 68 bp, Homo sapiens
aagataacttattttaagtttatttcacaggacaagagtaccaaagtcacaccctctctagaaggcct

SEQ ID NO: 113169 - DNA, 74 bp, Homo sapiens
tttatttcacaggacaagagtaccaaagtcacaccctctctagaaggccttctcttgaaaaatgcacagcttat

SEQ ID NO: 113170 - DNA, 76 bp, Homo sapiens
acaggacaagagtaccaaagtcacaccctctctagaaggccttctcttgaaaaatgcacagcttattcgtcaggca

SEQ ID NO: 113171 - DNA, 75 bp, Homo sapiens
caaagtcacaccctctctagaaggccttctcttgaaaaatgcacagcttattcgtcaggcacccagacttcaaaa

SEQ ID NO: 113172 - DNA, 74 bp, Homo sapiens
accctctctagaaggccttctcttgaaaaatgcacagcttattcgtcaggcacccagacttcaaaaccagacta

SEQ ID NO: 113173 - DNA, 78 bp, Homo sapiens
aaaatgcacagcttattcgtcaggcacccagacttcaaaaccagactaggattgagtgcagccctgccatttcccagc

SEQ ID NO: 113174 - DNA, 77 bp, Homo sapiens
cttattcgtcaggcacccagacttcaaaaccagactaggattgagtgcagccctgccatttcccagctgtgtgacct

SEQ ID NO: 113175 - DNA, 78 bp, Homo sapiens
tgtgaccttggatgaaatatttggccactctatagcccagtcatcaatctgtaaaattagggagagtaattgtctcca

SEQ ID NO: 113176 - DNA, 78 bp, Homo sapiens
ttggatgaaatatttggccactctatagcccagtcatcaatctgtaaaattagggagagtaattgtctccactgtgta

SEQ ID NO: 113177 - DNA, 79 bp, Homo sapiens
gatgaaatatttggccactctatagcccagtcatcaatctgtaaaattagggagagtaattgtctccactgtgtagata

SEQ ID NO: 113178 - DNA, 79 bp, Homo sapiens
tctatagcccagtcatcaatctgtaaaattagggagagtaattgtctccactgtgtagataacagagatggcaagcctt

SEQ ID NO: 113179 - DNA, 79 bp, Homo sapiens
agtcatcaatctgtaaaattagggagagtaattgtctccactgtgtagataacagagatggcaagcctttgttgcgcca

SEQ ID NO: 113180 - DNA, 79 bp, Homo sapiens
ctgtaaaattagggagagtaattgtctccactgtgtagataacagagatggcaagcctttgttgcgccagcaggccaga

SEQ ID NO: 113181 - DNA, 83 bp, Homo sapiens
attagggagagtaattgtctccactgtgtagataacagagatggcaagcctttgttgcgccagcaggccagagtcatggctgc

SEQ ID NO: 113182 - DNA, 82 bp, Homo sapiens
gtaattgtctccactgtgtagataacagagatggcaagcctttgttgcgccagcaggccagagtcatggctgccttttcttc

SEQ ID NO: 113183 - DNA, 83 bp, Homo sapiens
actgtgtagataacagagatggcaagcctttgttgcgccagcaggccagagtcatggctgccttttcttctctgctcttcacg

SEQ ID NO: 113184 - DNA, 81 bp, Homo sapiens
ataacagagatggcaagcctttgttgcgccagcaggccagagtcatggctgccttttcttctctgctcttcacgtcgggga

SEQ ID NO: 113185 - DNA, 81 bp, Homo sapiens
aagcctttgttgcgccagcaggccagagtcatggctgccttttcttctctgctcttcacgtcggggacatggctgatggtc

SEQ ID NO: 113186 - DNA, 81 bp, Homo sapiens
tttgttgcgccagcaggccagagtcatggctgccttttcttctctgctcttcacgtcggggacatggctgatggtcttaat

SEQ ID NO: 113187 - DNA, 81 bp, Homo sapiens
aggccagagtcatggctgccttttcttctctgctcttcacgtcggggacatggctgatggtcttaatttcatgcccttgca

SEQ ID NO: 113188 - DNA, 82 bp, Homo sapiens
atggctgccttttcttctctgctcttcacgtcggggacatggctgatggtcttaatttcatgcccttgcacactgactgtca

SEQ ID NO: 113189 - DNA, 78 bp, Homo sapiens
ttttcttctctgctcttcacgtcggggacatggctgatggtcttaatttcatgcccttgcacactgactgtcagtttt

SEQ ID NO: 113190 - DNA, 82 bp, Homo sapiens
tgctcttcacgtcggggacatggctgatggtcttaatttcatgcccttgcacactgactgtcagtttttgtggacatctgta

SEQ ID NO: 113191 - DNA, 82 bp, Homo sapiens
gtcggggacatggctgatggtcttaatttcatgcccttgcacactgactgtcagtttttgtggacatctgtagccagcatta

SEQ ID NO: 113192 - DNA, 82 bp, Homo sapiens
gggacatggctgatggtcttaatttcatgcccttgcacactgactgtcagtttttgtggacatctgtagccagcattagtag

SEQ ID NO: 113193 - DNA, 83 bp, Homo sapiens
acatggctgatggtcttaatttcatgcccttgcacactgactgtcagtttttgtggacatctgtagccagcattagtaggctg

SEQ ID NO: 113194 - DNA, 79 bp, Homo sapiens
atggtcttaatttcatgcccttgcacactgactgtcagtttttgtggacatctgtagccagcattagtaggctggggtg

SEQ ID NO: 113195 - DNA, 78 bp, Homo sapiens
ttaatttcatgcccttgcacactgactgtcagtttttgtggacatctgtagccagcattagtaggctggggtggggta

SEQ ID NO: 113196 - DNA, 78 bp, Homo sapiens
tgcccttgcacactgactgtcagtttttgtggacatctgtagccagcattagtaggctggggtggggtagaggtcaaa

SEQ ID NO: 113197 - DNA, 77 bp, Homo sapiens
ttgcacactgactgtcagtttttgtggacatctgtagccagcattagtaggctggggtggggtagaggtcaaattag

SEQ ID NO: 113198 - DNA, 74 bp, Homo sapiens
acactgactgtcagtttttgtggacatctgtagccagcattagtaggctggggtggggtagaggtcaaattagg

SEQ ID NO: 113199 - DNA, 74 bp, Homo sapiens
actgtcagtttttgtggacatctgtagccagcattagtaggctggggtggggtagaggtcaaattaggtgtgtg

SEQ ID NO: 113200 - DNA, 72 bp, Homo sapiens
agtttttgtggacatctgtagccagcattagtaggctggggtggggtagaggtcaaattaggtgtgtgggag

SEQ ID NO: 113201 - DNA, 75 bp, Homo sapiens
atctgtagccagcattagtaggctggggtggggtagaggtcaaattaggtgtgtgggaggcaaacatgctaaaga

SEQ ID NO: 113202 - DNA, 71 bp, Homo sapiens
ggtagaggtcaaattaggtgtgtgggaggcaaacatgctaaagagggtcaaacccgccacatcattttatt

SEQ ID NO: 113203 - DNA, 70 bp, Homo sapiens
aggtcaaattaggtgtgtgggaggcaaacatgctaaagagggtcaaacccgccacatcattttatttctt

SEQ ID NO: 113204 - DNA, 70 bp, Homo sapiens
taaagagggtcaaacccgccacatcattttatttctttgtgggaagcagcaacagtacctcggttcctaa

SEQ ID NO: 113205 - DNA, 72 bp, Homo sapiens
atcattttatttctttgtgggaagcagcaacagtacctcggttcctaaggtctttctggagctgtggttctc

SEQ ID NO: 113206 - DNA, 71 bp, Homo sapiens
tatttctttgtgggaagcagcaacagtacctcggttcctaaggtctttctggagctgtggttctccaaaaa

SEQ ID NO: 113207 - DNA, 67 bp, Homo sapiens
aacagtacctcggttcctaaggtctttctggagctgtggttctccaaaaaacattccagattttacc

SEQ ID NO: 113208 - DNA, 72 bp, Homo sapiens
taaggtctttctggagctgtggttctccaaaaaacattccagattttacccctcaggggtcatctggcaatg

SEQ ID NO: 113209 - DNA, 74 bp, Homo sapiens
agctgtggttctccaaaaaacattccagattttacccctcaggggtcatctggcaatgtctggagatacatttg

SEQ ID NO: 113210 - DNA, 73 bp, Homo sapiens
gttctccaaaaaacattccagattttacccctcaggggtcatctggcaatgtctggagatacatttggttgtg

SEQ ID NO: 113211 - DNA, 76 bp, Homo sapiens
aaaacattccagattttacccctcaggggtcatctggcaatgtctggagatacatttggttgtggcaacatgagga

SEQ ID NO: 113212 - DNA, 77 bp, Homo sapiens
ggcaatgtctggagatacatttggttgtggcaacatgaggagggaagggttgtcactagtgtctagtgggtgtgggc

SEQ ID NO: 113213 - DNA, 76 bp, Homo sapiens
tgtctggagatacatttggttgtggcaacatgaggagggaagggttgtcactagtgtctagtgggtgtgggccagg

SEQ ID NO: 113214 - DNA, 77 bp, Homo sapiens
tacatttggttgtggcaacatgaggagggaagggttgtcactagtgtctagtgggtgtgggccagggatgctgctta

SEQ ID NO: 113215 - DNA, 81 bp, Homo sapiens
caacatgaggagggaagggttgtcactagtgtctagtgggtgtgggccagggatgctgcttagcagcctacatacagcaca

SEQ ID NO: 113216 - DNA, 78 bp, Homo sapiens
aggagggaagggttgtcactagtgtctagtgggtgtgggccagggatgctgcttagcagcctacatacagcacagagg

SEQ ID NO: 113217 - DNA, 83 bp, Homo sapiens
ttgtcactagtgtctagtgggtgtgggccagggatgctgcttagcagcctacatacagcacagagggcagtcccctcaacaga

SEQ ID NO: 113218 - DNA, 83 bp, Homo sapiens
tagtgtctagtgggtgtgggccagggatgctgcttagcagcctacatacagcacagagggcagtcccctcaacagagaatgat

SEQ ID NO: 113219 - DNA, 85 bp, Homo sapiens
tgtgggccagggatgctgcttagcagcctacatacagcacagagggcagtcccctcaacagagaatgattcggttgcaaatgtca

SEQ ID NO: 113220 - DNA, 83 bp, Homo sapiens
agggatgctgcttagcagcctacatacagcacagagggcagtcccctcaacagagaatgattcggttgcaaatgtcaactgtg

SEQ ID NO: 113221 - DNA, 81 bp, Homo sapiens
ttagcagcctacatacagcacagagggcagtcccctcaacagagaatgattcggttgcaaatgtcaactgtggcgaggtcg

SEQ ID NO: 113222 - DNA, 78 bp, Homo sapiens
tacatacagcacagagggcagtcccctcaacagagaatgattcggttgcaaatgtcaactgtggcgaggtcgggaaac

SEQ ID NO: 113223 - DNA, 74 bp, Homo sapiens
acagagggcagtcccctcaacagagaatgattcggttgcaaatgtcaactgtggcgaggtcgggaaaccctgtc

SEQ ID NO: 113224 - DNA, 76 bp, Homo sapiens
agtcccctcaacagagaatgattcggttgcaaatgtcaactgtggcgaggtcgggaaaccctgtctggtgtgagca

SEQ ID NO: 113225 - DNA, 78 bp, Homo sapiens
aacagagaatgattcggttgcaaatgtcaactgtggcgaggtcgggaaaccctgtctggtgtgagcagagggcagatc

SEQ ID NO: 113226 - DNA, 78 bp, Homo sapiens
attcggttgcaaatgtcaactgtggcgaggtcgggaaaccctgtctggtgtgagcagagggcagatcctcagcctcca

SEQ ID NO: 113227 - DNA, 80 bp, Homo sapiens
aaatgtcaactgtggcgaggtcgggaaaccctgtctggtgtgagcagagggcagatcctcagcctccatgatgcctttca

SEQ ID NO: 113228 - DNA, 79 bp, Homo sapiens
actgtggcgaggtcgggaaaccctgtctggtgtgagcagagggcagatcctcagcctccatgatgcctttcaccttgac

SEQ ID NO: 113229 - DNA, 82 bp, Homo sapiens
ggaaaccctgtctggtgtgagcagagggcagatcctcagcctccatgatgcctttcaccttgaccatgggagctgagtaatc

SEQ ID NO: 113230 - DNA, 84 bp, Homo sapiens
ccctgtctggtgtgagcagagggcagatcctcagcctccatgatgcctttcaccttgaccatgggagctgagtaatcccagcca

SEQ ID NO: 113231 - DNA, 84 bp, Homo sapiens
agcagagggcagatcctcagcctccatgatgcctttcaccttgaccatgggagctgagtaatcccagccactagctctctcatt

SEQ ID NO: 113232 - DNA, 80 bp, Homo sapiens
agatcctcagcctccatgatgcctttcaccttgaccatgggagctgagtaatcccagccactagctctctcattttaccc

SEQ ID NO: 113233 - DNA, 81 bp, Homo sapiens
ctccatgatgcctttcaccttgaccatgggagctgagtaatcccagccactagctctctcattttacccgagagatgtaca

SEQ ID NO: 113234 - DNA, 78 bp, Homo sapiens
atgcctttcaccttgaccatgggagctgagtaatcccagccactagctctctcattttacccgagagatgtacaggag

SEQ ID NO: 113235 - DNA, 79 bp, Homo sapiens
ttgaccatgggagctgagtaatcccagccactagctctctcattttacccgagagatgtacaggaggaagatcagggta

SEQ ID NO: 113236 - DNA, 81 bp, Homo sapiens
agctgagtaatcccagccactagctctctcattttacccgagagatgtacaggaggaagatcagggtacaatggcacatca

SEQ ID NO: 113237 - DNA, 79 bp, Homo sapiens
aatcccagccactagctctctcattttacccgagagatgtacaggaggaagatcagggtacaatggcacatcagccagg

SEQ ID NO: 113238 - DNA, 79 bp, Homo sapiens
ctctcattttacccgagagatgtacaggaggaagatcagggtacaatggcacatcagccagggctgagacccctactca

SEQ ID NO: 113239 - DNA, 81 bp, Homo sapiens
agagatgtacaggaggaagatcagggtacaatggcacatcagccagggctgagacccctactcagcctgagtctgttcctg

SEQ ID NO: 113240 - DNA, 76 bp, Homo sapiens
agccagggctgagacccctactcagcctgagtctgttcctgttatactccccacctcatcccaagcatcagccgtt

SEQ ID NO: 113241 - DNA, 79 bp, Homo sapiens
ctgagacccctactcagcctgagtctgttcctgttatactccccacctcatcccaagcatcagccgtttgctgccagga

SEQ ID NO: 113242 - DNA, 82 bp, Homo sapiens
tactcagcctgagtctgttcctgttatactccccacctcatcccaagcatcagccgtttgctgccaggagtgaacagatcca

SEQ ID NO: 113243 - DNA, 83 bp, Homo sapiens
tgttatactccccacctcatcccaagcatcagccgtttgctgccaggagtgaacagatccagtgtacaaggatgcattagtga

SEQ ID NO: 113244 - DNA, 85 bp, Homo sapiens
ccacctcatcccaagcatcagccgtttgctgccaggagtgaacagatccagtgtacaaggatgcattagtgaccacgcgcactca

SEQ ID NO: 113245 - DNA, 84 bp, Homo sapiens
ccaagcatcagccgtttgctgccaggagtgaacagatccagtgtacaaggatgcattagtgaccacgcgcactcactgggataa

SEQ ID NO: 113246 - DNA, 76 bp, Homo sapiens
aacagatccagtgtacaaggatgcattagtgaccacgcgcactcactgggataacccacttggggttcacttgtta

SEQ ID NO: 113247 - DNA, 75 bp, Homo sapiens
atccagtgtacaaggatgcattagtgaccacgcgcactcactgggataacccacttggggttcacttgttagatt

SEQ ID NO: 113248 - DNA, 72 bp, Homo sapiens
aaggatgcattagtgaccacgcgcactcactgggataacccacttggggttcacttgttagatttggtttgg

SEQ ID NO: 113249 - DNA, 72 bp, Homo sapiens
tagtgaccacgcgcactcactgggataacccacttggggttcacttgttagatttggtttgggtagtgtgta

SEQ ID NO: 113250 - DNA, 67 bp, Homo sapiens
actcactgggataacccacttggggttcacttgttagatttggtttgggtagtgtgtaaggaagaaa

SEQ ID NO: 113251 - DNA, 65 bp, Homo sapiens
ataacccacttggggttcacttgttagatttggtttgggtagtgtgtaaggaagaaaatgggaaa

SEQ ID NO: 113252 - DNA, 68 bp, Homo sapiens
tggggttcacttgttagatttggtttgggtagtgtgtaaggaagaaaatgggaaagtccagtcaaata

SEQ ID NO: 113253 - DNA, 68 bp, Homo sapiens
ttgttagatttggtttgggtagtgtgtaaggaagaaaatgggaaagtccagtcaaatagtgtccaatt

SEQ ID NO: 113254 - DNA, 70 bp, Homo sapiens
tagtgtgtaaggaagaaaatgggaaagtccagtcaaatagtgtccaatttaaaatcaaatcagggtggaa

SEQ ID NO: 113255 - DNA, 67 bp, Homo sapiens
gaagaaaatgggaaagtccagtcaaatagtgtccaatttaaaatcaaatcagggtggaaaggaaaag

SEQ ID NO: 113256 - DNA, 69 bp, Homo sapiens
aaatgggaaagtccagtcaaatagtgtccaatttaaaatcaaatcagggtggaaaggaaaagtccatga

SEQ ID NO: 113257 - DNA, 74 bp, Homo sapiens
agtcaaatagtgtccaatttaaaatcaaatcagggtggaaaggaaaagtccatgatgatagcgaccatgtatcg

SEQ ID NO: 113258 - DNA, 78 bp, Homo sapiens
tgtccaatttaaaatcaaatcagggtggaaaggaaaagtccatgatgatagcgaccatgtatcgggcagcatattcta

SEQ ID NO: 113259 - DNA, 77 bp, Homo sapiens
tttaaaatcaaatcagggtggaaaggaaaagtccatgatgatagcgaccatgtatcgggcagcatattctatgtatt

SEQ ID NO: 113260 - DNA, 81 bp, Homo sapiens
aaatcagggtggaaaggaaaagtccatgatgatagcgaccatgtatcgggcagcatattctatgtatttctgattcagtgc

SEQ ID NO: 113261 - DNA, 86 bp, Homo sapiens
aaaggaaaagtccatgatgatagcgaccatgtatcgggcagcatattctatgtatttctgattcagtgctcgcaacagctgcatgg

SEQ ID NO: 113262 - DNA, 92 bp, Homo sapiens
atgatgatagcgaccatgtatcgggcagcatattctatgtatttctgattcagtgctcgcaacagctgcatgggtaatcatcatcgtcacac

SEQ ID NO: 113263 - DNA, 90 bp, Homo sapiens
atagcgaccatgtatcgggcagcatattctatgtatttctgattcagtgctcgcaacagctgcatgggtaatcatcatcgtcacactgta

SEQ ID NO: 113264 - DNA, 91 bp, Homo sapiens
atgtatcgggcagcatattctatgtatttctgattcagtgctcgcaacagctgcatgggtaatcatcatcgtcacactgtacagatgagga

SEQ ID NO: 113265 - DNA, 86 bp, Homo sapiens
atattctatgtatttctgattcagtgctcgcaacagctgcatgggtaatcatcatcgtcacactgtacagatgaggaaaagggaga

SEQ ID NO: 113266 - DNA, 84 bp, Homo sapiens
tatttctgattcagtgctcgcaacagctgcatgggtaatcatcatcgtcacactgtacagatgaggaaaagggagaaacagaaa

SEQ ID NO: 113267 - DNA, 78 bp, Homo sapiens
aacagctgcatgggtaatcatcatcgtcacactgtacagatgaggaaaagggagaaacagaaagggtgagtagcctgt

SEQ ID NO: 113268 - DNA, 75 bp, Homo sapiens
atgggtaatcatcatcgtcacactgtacagatgaggaaaagggagaaacagaaagggtgagtagcctgttcaagg

SEQ ID NO: 113269 - DNA, 78 bp, Homo sapiens
aatcatcatcgtcacactgtacagatgaggaaaagggagaaacagaaagggtgagtagcctgttcaaggtgactcagc

SEQ ID NO: 113270 - DNA, 73 bp, Homo sapiens
agatgaggaaaagggagaaacagaaagggtgagtagcctgttcaaggtgactcagcgggaaaggacagagctg

SEQ ID NO: 113271 - DNA, 73 bp, Homo sapiens
aaagggagaaacagaaagggtgagtagcctgttcaaggtgactcagcgggaaaggacagagctggcatttgaa

SEQ ID NO: 113272 - DNA, 78 bp, Homo sapiens
aacagaaagggtgagtagcctgttcaaggtgactcagcgggaaaggacagagctggcatttgaacacaggctctcaga

SEQ ID NO: 113273 - DNA, 80 bp, Homo sapiens
agtagcctgttcaaggtgactcagcgggaaaggacagagctggcatttgaacacaggctctcagaccccacaggctgcac

SEQ ID NO: 113274 - DNA, 79 bp, Homo sapiens
ttcaaggtgactcagcgggaaaggacagagctggcatttgaacacaggctctcagaccccacaggctgcacctgtaaaa

SEQ ID NO: 113275 - DNA, 78 bp, Homo sapiens
actcagcgggaaaggacagagctggcatttgaacacaggctctcagaccccacaggctgcacctgtaaaactctcctc

SEQ ID NO: 113276 - DNA, 76 bp, Homo sapiens
aaaggacagagctggcatttgaacacaggctctcagaccccacaggctgcacctgtaaaactctcctccccacacc

SEQ ID NO: 113277 - DNA, 81 bp, Homo sapiens
tggcatttgaacacaggctctcagaccccacaggctgcacctgtaaaactctcctccccacaccctgtcacatcacagaga

SEQ ID NO: 113278 - DNA, 79 bp, Homo sapiens
aacacaggctctcagaccccacaggctgcacctgtaaaactctcctccccacaccctgtcacatcacagagaggccaga

SEQ ID NO: 113279 - DNA, 77 bp, Homo sapiens
agaccccacaggctgcacctgtaaaactctcctccccacaccctgtcacatcacagagaggccagatgggagtggga

SEQ ID NO: 113280 - DNA, 76 bp, Homo sapiens
aggctgcacctgtaaaactctcctccccacaccctgtcacatcacagagaggccagatgggagtgggaaagccgaa

SEQ ID NO: 113281 - DNA, 77 bp, Homo sapiens
tcctccccacaccctgtcacatcacagagaggccagatgggagtgggaaagccgaagagaatctggactccaaccga

SEQ ID NO: 113282 - DNA, 77 bp, Homo sapiens
accctgtcacatcacagagaggccagatgggagtgggaaagccgaagagaatctggactccaaccgagttctgcctc

SEQ ID NO: 113283 - DNA, 74 bp, Homo sapiens
agaggccagatgggagtgggaaagccgaagagaatctggactccaaccgagttctgcctcctagaagccgtgtg

SEQ ID NO: 113284 - DNA, 73 bp, Homo sapiens
agtgggaaagccgaagagaatctggactccaaccgagttctgcctcctagaagccgtgtggcctgggctgctt

SEQ ID NO: 113285 - DNA, 73 bp, Homo sapiens
aaagccgaagagaatctggactccaaccgagttctgcctcctagaagccgtgtggcctgggctgcttttgtaa

SEQ ID NO: 113286 - DNA, 70 bp, Homo sapiens
aatctggactccaaccgagttctgcctcctagaagccgtgtggcctgggctgcttttgtaacctggtttt

SEQ ID NO: 113287 - DNA, 71 bp, Homo sapiens
tccaaccgagttctgcctcctagaagccgtgtggcctgggctgcttttgtaacctggtttttgcttcattt

SEQ ID NO: 113288 - DNA, 69 bp, Homo sapiens
agttctgcctcctagaagccgtgtggcctgggctgcttttgtaacctggtttttgcttcattttatttt

SEQ ID NO: 113289 - DNA, 71 bp, Homo sapiens
ttttttatttttagccagtgggaattagtagctgtgcctatatcgtgaggttttgattaaaagagacaatg

SEQ ID NO: 113290 - DNA, 75 bp, Homo sapiens
tatttttagccagtgggaattagtagctgtgcctatatcgtgaggttttgattaaaagagacaatggaggcagtg

SEQ ID NO: 113291 - DNA, 77 bp, Homo sapiens
agtgggaattagtagctgtgcctatatcgtgaggttttgattaaaagagacaatggaggcagtgtgcctcacaccat

SEQ ID NO: 113292 - DNA, 81 bp, Homo sapiens
tagctgtgcctatatcgtgaggttttgattaaaagagacaatggaggcagtgtgcctcacaccattgcaagtgaatgttat

SEQ ID NO: 113293 - DNA, 80 bp, Homo sapiens
tatatcgtgaggttttgattaaaagagacaatggaggcagtgtgcctcacaccattgcaagtgaatgttatttgttctca

SEQ ID NO: 113294 - DNA, 79 bp, Homo sapiens
gttttgattaaaagagacaatggaggcagtgtgcctcacaccattgcaagtgaatgttatttgttctcattattcataa

SEQ ID NO: 113295 - DNA, 80 bp, Homo sapiens
attaaaagagacaatggaggcagtgtgcctcacaccattgcaagtgaatgttatttgttctcattattcataagccacaa

SEQ ID NO: 113296 - DNA, 86 bp, Homo sapiens
tggaggcagtgtgcctcacaccattgcaagtgaatgttatttgttctcattattcataagccacaatgaaacggcatcatctcata

SEQ ID NO: 113297 - DNA, 83 bp, Homo sapiens
tgtgcctcacaccattgcaagtgaatgttatttgttctcattattcataagccacaatgaaacggcatcatctcataacttta

SEQ ID NO: 113298 - DNA, 79 bp, Homo sapiens
acaccattgcaagtgaatgttatttgttctcattattcataagccacaatgaaacggcatcatctcataactttagtgg

SEQ ID NO: 113299 - DNA, 80 bp, Homo sapiens
tgaatgttatttgttctcattattcataagccacaatgaaacggcatcatctcataactttagtgggtcagccagaattg

SEQ ID NO: 113300 - DNA, 80 bp, Homo sapiens
ttgttctcattattcataagccacaatgaaacggcatcatctcataactttagtgggtcagccagaattgttcacgacaa

SEQ ID NO: 113301 - DNA, 79 bp, Homo sapiens
attattcataagccacaatgaaacggcatcatctcataactttagtgggtcagccagaattgttcacgacaacagtgcg

SEQ ID NO: 113302 - DNA, 74 bp, Homo sapiens
atctcataactttagtgggtcagccagaattgttcacgacaacagtgcggaggacacgggacagcactaagggt

SEQ ID NO: 113303 - DNA, 72 bp, Homo sapiens
actttagtgggtcagccagaattgttcacgacaacagtgcggaggacacgggacagcactaagggttcctcc

SEQ ID NO: 113304 - DNA, 76 bp, Homo sapiens
tccctctccctctcgtttgacgcggactccagattcagaacccatgtggggcacaggtgggggctgtccaggctca

SEQ ID NO: 113305 - DNA, 79 bp, Homo sapiens
tctcgtttgacgcggactccagattcagaacccatgtggggcacaggtgggggctgtccaggctcactgcaggtctctc

SEQ ID NO: 113306 - DNA, 80 bp, Homo sapiens
ttgacgcggactccagattcagaacccatgtggggcacaggtgggggctgtccaggctcactgcaggtctctctctgctt

SEQ ID NO: 113307 - DNA, 79 bp, Homo sapiens
aacccatgtggggcacaggtgggggctgtccaggctcactgcaggtctctctctgctttctgctccttcaggtcacgtg

SEQ ID NO: 113308 - DNA, 80 bp, Homo sapiens
cacaggtgggggctgtccaggctcactgcaggtctctctctgctttctgctccttcaggtcacgtggttgtgattgaaaa

SEQ ID NO: 113309 - DNA, 81 bp, Homo sapiens
gggctgtccaggctcactgcaggtctctctctgctttctgctccttcaggtcacgtggttgtgattgaaaagaggaataga

SEQ ID NO: 113310 - DNA, 81 bp, Homo sapiens
ggtctctctctgctttctgctccttcaggtcacgtggttgtgattgaaaagaggaatagagagatgtgatgtggctgttta

SEQ ID NO: 113311 - DNA, 78 bp, Homo sapiens
tgctttctgctccttcaggtcacgtggttgtgattgaaaagaggaatagagagatgtgatgtggctgtttaaaacaac

SEQ ID NO: 113312 - DNA, 75 bp, Homo sapiens
ctccttcaggtcacgtggttgtgattgaaaagaggaatagagagatgtgatgtggctgtttaaaacaactccaac

SEQ ID NO: 113313 - DNA, 78 bp, Homo sapiens
tcacgtggttgtgattgaaaagaggaatagagagatgtgatgtggctgtttaaaacaactccaactgcttccatgtaa

SEQ ID NO: 113314 - DNA, 79 bp, Homo sapiens
ttgtgattgaaaagaggaatagagagatgtgatgtggctgtttaaaacaactccaactgcttccatgtaaatgatgtgt

SEQ ID NO: 113315 - DNA, 78 bp, Homo sapiens
agaggaatagagagatgtgatgtggctgtttaaaacaactccaactgcttccatgtaaatgatgtgtttgatcctaaa

SEQ ID NO: 113316 - DNA, 79 bp, Homo sapiens
atagagagatgtgatgtggctgtttaaaacaactccaactgcttccatgtaaatgatgtgtttgatcctaaactgagag

SEQ ID NO: 113317 - DNA, 73 bp, Homo sapiens
atgtggctgtttaaaacaactccaactgcttccatgtaaatgatgtgtttgatcctaaactgagagggttaag

SEQ ID NO: 113318 - DNA, 71 bp, Homo sapiens
ttaaaacaactccaactgcttccatgtaaatgatgtgtttgatcctaaactgagagggttaagggttggaa

SEQ ID NO: 113319 - DNA, 72 bp, Homo sapiens
aactccaactgcttccatgtaaatgatgtgtttgatcctaaactgagagggttaagggttggaactctgggc

SEQ ID NO: 113320 - DNA, 71 bp, Homo sapiens
aactgcttccatgtaaatgatgtgtttgatcctaaactgagagggttaagggttggaactctgggcctccc

SEQ ID NO: 113321 - DNA, 71 bp, Homo sapiens
cttccatgtaaatgatgtgtttgatcctaaactgagagggttaagggttggaactctgggcctccccagag

SEQ ID NO: 113322 - DNA, 73 bp, Homo sapiens
atgtaaatgatgtgtttgatcctaaactgagagggttaagggttggaactctgggcctccccagaggctgctg

SEQ ID NO: 113323 - DNA, 72 bp, Homo sapiens
aaatgatgtgtttgatcctaaactgagagggttaagggttggaactctgggcctccccagaggctgctgtgg

SEQ ID NO: 113324 - DNA, 72 bp, Homo sapiens
atgtgtttgatcctaaactgagagggttaagggttggaactctgggcctccccagaggctgctgtgggtctg

SEQ ID NO: 113325 - DNA, 70 bp, Homo sapiens
tcctaaactgagagggttaagggttggaactctgggcctccccagaggctgctgtgggtctgggggccag

SEQ ID NO: 113326 - DNA, 70 bp, Homo sapiens
aactgagagggttaagggttggaactctgggcctccccagaggctgctgtgggtctgggggccaggactc

SEQ ID NO: 113327 - DNA, 71 bp, Homo sapiens
gttaagggttggaactctgggcctccccagaggctgctgtgggtctgggggccaggactcctcaggaagaa

SEQ ID NO: 113328 - DNA, 73 bp, Homo sapiens
gcctccccagaggctgctgtgggtctgggggccaggactcctcaggaagaacccaagttgggtctgaaggtga

SEQ ID NO: 113329 - DNA, 73 bp, Homo sapiens
agaggctgctgtgggtctgggggccaggactcctcaggaagaacccaagttgggtctgaaggtgacagtggag

SEQ ID NO: 113330 - DNA, 72 bp, Homo sapiens
ctgtgggtctgggggccaggactcctcaggaagaacccaagttgggtctgaaggtgacagtggaggccatta

SEQ ID NO: 113331 - DNA, 74 bp, Homo sapiens
gccaggactcctcaggaagaacccaagttgggtctgaaggtgacagtggaggccattatccctgagggaagaca

SEQ ID NO: 113332 - DNA, 77 bp, Homo sapiens
ggccattatccctgagggaagacagaagagggagcagggagcaggtgggccaccgagccctggcgtgtgtgcagaaa

SEQ ID NO: 113333 - DNA, 77 bp, Homo sapiens
cctgagggaagacagaagagggagcagggagcaggtgggccaccgagccctggcgtgtgtgcagaaagtgctaaata

SEQ ID NO: 113334 - DNA, 76 bp, Homo sapiens
agacagaagagggagcagggagcaggtgggccaccgagccctggcgtgtgtgcagaaagtgctaaataagccggaa

SEQ ID NO: 113335 - DNA, 78 bp, Homo sapiens
ggagcagggagcaggtgggccaccgagccctggcgtgtgtgcagaaagtgctaaataagccggaagaagcacagcaaa

SEQ ID NO: 113336 - DNA, 80 bp, Homo sapiens
tggcgtgtgtgcagaaagtgctaaataagccggaagaagcacagcaaatcacaaggatgcccagaatataatctctagtt

SEQ ID NO: 113337 - DNA, 82 bp, Homo sapiens
tgcagaaagtgctaaataagccggaagaagcacagcaaatcacaaggatgcccagaatataatctctagtttatagcatgaa

SEQ ID NO: 113338 - DNA, 76 bp, Homo sapiens
ctaaataagccggaagaagcacagcaaatcacaaggatgcccagaatataatctctagtttatagcatgaaatttt

SEQ ID NO: 113339 - DNA, 76 bp, Homo sapiens
taagccggaagaagcacagcaaatcacaaggatgcccagaatataatctctagtttatagcatgaaatttttactt

SEQ ID NO: 113340 - DNA, 76 bp, Homo sapiens
gaagcacagcaaatcacaaggatgcccagaatataatctctagtttatagcatgaaatttttactttcctgttaat

SEQ ID NO: 113341 - DNA, 75 bp, Homo sapiens
atcacaaggatgcccagaatataatctctagtttatagcatgaaatttttactttcctgttaattgtacattctg

SEQ ID NO: 113342 - DNA, 75 bp, Homo sapiens
gatgcccagaatataatctctagtttatagcatgaaatttttactttcctgttaattgtacattctgtataagaa

SEQ ID NO: 113343 - DNA, 69 bp, Homo sapiens
catgaaatttttactttcctgttaattgtacattctgtataagaaaagcaggttcctttcctaaggagc

SEQ ID NO: 113344 - DNA, 70 bp, Homo sapiens
gttaattgtacattctgtataagaaaagcaggttcctttcctaaggagctttatgattttattatattat

SEQ ID NO: 113345 - DNA, 70 bp, Homo sapiens
ctgtataagaaaagcaggttcctttcctaaggagctttatgattttattatattattattgtttattgtg

SEQ ID NO: 113346 - DNA, 70 bp, Homo sapiens
agaaaagcaggttcctttcctaaggagctttatgattttattatattattattgtttattgtggagaata

SEQ ID NO: 113347 - DNA, 74 bp, Homo sapiens
tcctttcctaaggagctttatgattttattatattattattgtttattgtggagaataattagcttgcacatct

SEQ ID NO: 113348 - DNA, 74 bp, Homo sapiens
gagctttatgattttattatattattattgtttattgtggagaataattagcttgcacatcttttaatttgtcc

SEQ ID NO: 113349 - DNA, 73 bp, Homo sapiens
gattttattatattattattgtttattgtggagaataattagcttgcacatcttttaatttgtcccattaaga

SEQ ID NO: 113350 - DNA, 77 bp, Homo sapiens
attattattgtttattgtggagaataattagcttgcacatcttttaatttgtcccattaagatgtttgcagagcagc

SEQ ID NO: 113351 - DNA, 79 bp, Homo sapiens
tattgtttattgtggagaataattagcttgcacatcttttaatttgtcccattaagatgtttgcagagcagccgtgaga

SEQ ID NO: 113352 - DNA, 81 bp, Homo sapiens
tgtggagaataattagcttgcacatcttttaatttgtcccattaagatgtttgcagagcagccgtgagaggctggccagcc

SEQ ID NO: 113353 - DNA, 79 bp, Homo sapiens
aattagcttgcacatcttttaatttgtcccattaagatgtttgcagagcagccgtgagaggctggccagccccctgcat

SEQ ID NO: 113354 - DNA, 79 bp, Homo sapiens
atcttttaatttgtcccattaagatgtttgcagagcagccgtgagaggctggccagccccctgcatttccattgatcag

SEQ ID NO: 113355 - DNA, 88 bp, Homo sapiens
attaagatgtttgcagagcagccgtgagaggctggccagccccctgcatttccattgatcagggcactcacatggctggctgtgagca

SEQ ID NO: 113356 - DNA, 88 bp, Homo sapiens
ttgcagagcagccgtgagaggctggccagccccctgcatttccattgatcagggcactcacatggctggctgtgagcaggctttgcgg

SEQ ID NO: 113357 - DNA, 85 bp, Homo sapiens
tgagaggctggccagccccctgcatttccattgatcagggcactcacatggctggctgtgagcaggctttgcggggagaaagtca

SEQ ID NO: 113358 - DNA, 82 bp, Homo sapiens
ccagccccctgcatttccattgatcagggcactcacatggctggctgtgagcaggctttgcggggagaaagtcatttatgat

SEQ ID NO: 113359 - DNA, 86 bp, Homo sapiens
attgatcagggcactcacatggctggctgtgagcaggctttgcggggagaaagtcatttatgattgcatccttcagcatgccgaac

SEQ ID NO: 113360 - DNA, 83 bp, Homo sapiens
actcacatggctggctgtgagcaggctttgcggggagaaagtcatttatgattgcatccttcagcatgccgaacccctccaga

SEQ ID NO: 113361 - DNA, 79 bp, Homo sapiens
ctggctgtgagcaggctttgcggggagaaagtcatttatgattgcatccttcagcatgccgaacccctccagaaaggga

SEQ ID NO: 113362 - DNA, 73 bp, Homo sapiens
tttgcggggagaaagtcatttatgattgcatccttcagcatgccgaacccctccagaaagggaaggaactttc

SEQ ID NO: 113363 - DNA, 76 bp, Homo sapiens
aagtcatttatgattgcatccttcagcatgccgaacccctccagaaagggaaggaactttctgtgactctgaagta

SEQ ID NO: 113364 - DNA, 74 bp, Homo sapiens
atccttcagcatgccgaacccctccagaaagggaaggaactttctgtgactctgaagtagtctgttgtagaata

SEQ ID NO: 113365 - DNA, 71 bp, Homo sapiens
gaacccctccagaaagggaaggaactttctgtgactctgaagtagtctgttgtagaataaccagaggagaa

SEQ ID NO: 113366 - DNA, 71 bp, Homo sapiens
agaaagggaaggaactttctgtgactctgaagtagtctgttgtagaataaccagaggagaaatgcctttta

SEQ ID NO: 113367 - DNA, 72 bp, Homo sapiens
aaggaactttctgtgactctgaagtagtctgttgtagaataaccagaggagaaatgccttttatacaataaa

SEQ ID NO: 113368 - DNA, 73 bp, Homo sapiens
tttctgtgactctgaagtagtctgttgtagaataaccagaggagaaatgccttttatacaataaaggtgaagg

SEQ ID NO: 113369 - DNA, 68 bp, Homo sapiens
aagtagtctgttgtagaataaccagaggagaaatgccttttatacaataaaggtgaagggggaaaaga

SEQ ID NO: 113370 - DNA, 66 bp, Homo sapiens
ttgtagaataaccagaggagaaatgccttttatacaataaaggtgaagggggaaaagaaggggaaa

SEQ ID NO: 113371 - DNA, 63 bp, Homo sapiens
aataaccagaggagaaatgccttttatacaataaaggtgaagggggaaaagaaggggaaaaaa

SEQ ID NO: 113372 - DNA, 61 bp, Homo sapiens
gaaatgccttttatacaataaaggtgaagggggaaaagaaggggaaaaaaaccccaacttc

SEQ ID NO: 113373 - DNA, 62 bp, Homo sapiens
tatacaataaaggtgaagggggaaaagaaggggaaaaaaaccccaacttcttgacaaaagga

SEQ ID NO: 113374 - DNA, 62 bp, Homo sapiens
taaaggtgaagggggaaaagaaggggaaaaaaaccccaacttcttgacaaaaggaattatca

SEQ ID NO: 113375 - DNA, 70 bp, Homo sapiens
gaaaagaaggggaaaaaaaccccaacttcttgacaaaaggaattatcatgatgtcagaggactggtgaca

SEQ ID NO: 113376 - DNA, 73 bp, Homo sapiens
ggaaaaaaaccccaacttcttgacaaaaggaattatcatgatgtcagaggactggtgacatggactttgtgaa

SEQ ID NO: 113377 - DNA, 81 bp, Homo sapiens
cccaacttcttgacaaaaggaattatcatgatgtcagaggactggtgacatggactttgtgaaatgacaaatgcctctgca

SEQ ID NO: 113378 - DNA, 80 bp, Homo sapiens
actggtgacatggactttgtgaaatgacaaatgcctctgcagaaaggccattctcaaaggccaaccagtaggcgtgtgca

SEQ ID NO: 113379 - DNA, 80 bp, Homo sapiens
tggactttgtgaaatgacaaatgcctctgcagaaaggccattctcaaaggccaaccagtaggcgtgtgcatctcaactct

SEQ ID NO: 113380 - DNA, 81 bp, Homo sapiens
aatgcctctgcagaaaggccattctcaaaggccaaccagtaggcgtgtgcatctcaactcttgttatgccactgacactta

SEQ ID NO: 113381 - DNA, 79 bp, Homo sapiens
agaaaggccattctcaaaggccaaccagtaggcgtgtgcatctcaactcttgttatgccactgacacttagtggtatga

SEQ ID NO: 113382 - DNA, 78 bp, Homo sapiens
ttctcaaaggccaaccagtaggcgtgtgcatctcaactcttgttatgccactgacacttagtggtatgaggtcctgtt

SEQ ID NO: 113383 - DNA, 77 bp, Homo sapiens
aaaggccaaccagtaggcgtgtgcatctcaactcttgttatgccactgacacttagtggtatgaggtcctgtttaca

SEQ ID NO: 113384 - DNA, 82 bp, Homo sapiens
agtaggcgtgtgcatctcaactcttgttatgccactgacacttagtggtatgaggtcctgtttacatgagtgactgaggcca

SEQ ID NO: 113385 - DNA, 84 bp, Homo sapiens
atctcaactcttgttatgccactgacacttagtggtatgaggtcctgtttacatgagtgactgaggccactgcttgctatcaca

SEQ ID NO: 113386 - DNA, 84 bp, Homo sapiens
ttgttatgccactgacacttagtggtatgaggtcctgtttacatgagtgactgaggccactgcttgctatcacagctgaaacaa

SEQ ID NO: 113387 - DNA, 83 bp, Homo sapiens
actgacacttagtggtatgaggtcctgtttacatgagtgactgaggccactgcttgctatcacagctgaaacaactgcttctg

SEQ ID NO: 113388 - DNA, 83 bp, Homo sapiens
ttagtggtatgaggtcctgtttacatgagtgactgaggccactgcttgctatcacagctgaaacaactgcttctggctacgat

SEQ ID NO: 113389 - DNA, 80 bp, Homo sapiens
gtcctgtttacatgagtgactgaggccactgcttgctatcacagctgaaacaactgcttctggctacgatttttatttta

SEQ ID NO: 113390 - DNA, 81 bp, Homo sapiens
gtttacatgagtgactgaggccactgcttgctatcacagctgaaacaactgcttctggctacgatttttattttagcctca

SEQ ID NO: 113391 - DNA, 78 bp, Homo sapiens
actgaggccactgcttgctatcacagctgaaacaactgcttctggctacgatttttattttagcctcaggaataagtg

SEQ ID NO: 113392 - DNA, 79 bp, Homo sapiens
tgcttgctatcacagctgaaacaactgcttctggctacgatttttattttagcctcaggaataagtggatgagaagtgt

SEQ ID NO: 113393 - DNA, 76 bp, Homo sapiens
ctatcacagctgaaacaactgcttctggctacgatttttattttagcctcaggaataagtggatgagaagtgtttg

SEQ ID NO: 113394 - DNA, 70 bp, Homo sapiens
tttttattttagcctcaggaataagtggatgagaagtgtttggggcaagcttcacggaaaaccctggcta

SEQ ID NO: 113395 - DNA, 68 bp, Homo sapiens
tgtttggggcaagcttcacggaaaaccctggctagggtcagtcagggttggggtggtccacccctgaa

SEQ ID NO: 113396 - DNA, 66 bp, Homo sapiens
aagcttcacggaaaaccctggctagggtcagtcagggttggggtggtccacccctgaaggagggac

SEQ ID NO: 113397 - DNA, 68 bp, Homo sapiens
aaaaccctggctagggtcagtcagggttggggtggtccacccctgaaggagggactcaggtggcaggc

SEQ ID NO: 113398 - DNA, 72 bp, Homo sapiens
ggtcagtcagggttggggtggtccacccctgaaggagggactcaggtggcaggcccctgattgctgggtaca

SEQ ID NO: 113399 - DNA, 72 bp, Homo sapiens
agggttggggtggtccacccctgaaggagggactcaggtggcaggcccctgattgctgggtacatcactctg

SEQ ID NO: 113400 - DNA, 76 bp, Homo sapiens
tggtccacccctgaaggagggactcaggtggcaggcccctgattgctgggtacatcactctgtggtttcttctgta

SEQ ID NO: 113401 - DNA, 79 bp, Homo sapiens
ctgaaggagggactcaggtggcaggcccctgattgctgggtacatcactctgtggtttcttctgtacatgtgttccatg

SEQ ID NO: 113402 - DNA, 79 bp, Homo sapiens
agggactcaggtggcaggcccctgattgctgggtacatcactctgtggtttcttctgtacatgtgttccatggcctgga

SEQ ID NO: 113403 - DNA, 78 bp, Homo sapiens
aggcccctgattgctgggtacatcactctgtggtttcttctgtacatgtgttccatggcctggactgggacagggcaa

SEQ ID NO: 113404 - DNA, 79 bp, Homo sapiens
attgctgggtacatcactctgtggtttcttctgtacatgtgttccatggcctggactgggacagggcaagagatatacc

SEQ ID NO: 113405 - DNA, 77 bp, Homo sapiens
tgtggtttcttctgtacatgtgttccatggcctggactgggacagggcaagagatatacctgggacacaaaattcaa

SEQ ID NO: 113406 - DNA, 78 bp, Homo sapiens
tcttctgtacatgtgttccatggcctggactgggacagggcaagagatatacctgggacacaaaattcaaggtggtgc

SEQ ID NO: 113407 - DNA, 78 bp, Homo sapiens
atgtgttccatggcctggactgggacagggcaagagatatacctgggacacaaaattcaaggtggtgcgctctcaagc

SEQ ID NO: 113408 - DNA, 78 bp, Homo sapiens
tggactgggacagggcaagagatatacctgggacacaaaattcaaggtggtgcgctctcaagcccatgtaaatgcaag

SEQ ID NO: 113409 - DNA, 77 bp, Homo sapiens
acagggcaagagatatacctgggacacaaaattcaaggtggtgcgctctcaagcccatgtaaatgcaaggtcagcct

SEQ ID NO: 113410 - DNA, 77 bp, Homo sapiens
agatatacctgggacacaaaattcaaggtggtgcgctctcaagcccatgtaaatgcaaggtcagccttgtacaacaa

SEQ ID NO: 113411 - DNA, 78 bp, Homo sapiens
ggacacaaaattcaaggtggtgcgctctcaagcccatgtaaatgcaaggtcagccttgtacaacaatgggagcaagtg

SEQ ID NO: 113412 - DNA, 80 bp, Homo sapiens
tggtgcgctctcaagcccatgtaaatgcaaggtcagccttgtacaacaatgggagcaagtgtcgccttaagtttgtcaca

SEQ ID NO: 113413 - DNA, 77 bp, Homo sapiens
tctcaagcccatgtaaatgcaaggtcagccttgtacaacaatgggagcaagtgtcgccttaagtttgtcacaggaag

SEQ ID NO: 113414 - DNA, 80 bp, Homo sapiens
tcagccttgtacaacaatgggagcaagtgtcgccttaagtttgtcacaggaagtgcctcatttatgtcaccctgatatca

SEQ ID NO: 113415 - DNA, 79 bp, Homo sapiens
agcaagtgtcgccttaagtttgtcacaggaagtgcctcatttatgtcaccctgatatcaccttcgatggattctcagat

SEQ ID NO: 113416 - DNA, 80 bp, Homo sapiens
gccttaagtttgtcacaggaagtgcctcatttatgtcaccctgatatcaccttcgatggattctcagattgataaatgaa

SEQ ID NO: 113417 - DNA, 79 bp, Homo sapiens
aagtttgtcacaggaagtgcctcatttatgtcaccctgatatcaccttcgatggattctcagattgataaatgaaaaca

SEQ ID NO: 113418 - DNA, 78 bp, Homo sapiens
aagtgcctcatttatgtcaccctgatatcaccttcgatggattctcagattgataaatgaaaacaactggtcggtcag

SEQ ID NO: 113419 - DNA, 76 bp, Homo sapiens
atttatgtcaccctgatatcaccttcgatggattctcagattgataaatgaaaacaactggtcggtcaggaagaag

SEQ ID NO: 113420 - DNA, 78 bp, Homo sapiens
ctgatatcaccttcgatggattctcagattgataaatgaaaacaactggtcggtcaggaagaaggcatagcagtggtt

SEQ ID NO: 113421 - DNA, 77 bp, Homo sapiens
atcaccttcgatggattctcagattgataaatgaaaacaactggtcggtcaggaagaaggcatagcagtggtttctc

SEQ ID NO: 113422 - DNA, 74 bp, Homo sapiens
atggattctcagattgataaatgaaaacaactggtcggtcaggaagaaggcatagcagtggtttctccccaccc

SEQ ID NO: 113423 - DNA, 75 bp, Homo sapiens
attgataaatgaaaacaactggtcggtcaggaagaaggcatagcagtggtttctccccaccccagcatgtcacca

SEQ ID NO: 113424 - DNA, 75 bp, Homo sapiens
atgaaaacaactggtcggtcaggaagaaggcatagcagtggtttctccccaccccagcatgtcaccatcgtcttg

SEQ ID NO: 113425 - DNA, 73 bp, Homo sapiens
atagcagtggtttctccccaccccagcatgtcaccatcgtcttgggaacaagtttgagcacccctggcttaaa

SEQ ID NO: 113426 - DNA, 73 bp, Homo sapiens
tcttgggaacaagtttgagcacccctggcttaaaggcgtgtttcttgtgggctgtctgggaactgcctgaaca

SEQ ID NO: 113427 - DNA, 76 bp, Homo sapiens
ccctggcttaaaggcgtgtttcttgtgggctgtctgggaactgcctgaacatctctctcagttctgatgggagaaa

SEQ ID NO: 113428 - DNA, 78 bp, Homo sapiens
taaaggcgtgtttcttgtgggctgtctgggaactgcctgaacatctctctcagttctgatgggagaaacacgtgggca

SEQ ID NO: 113429 - DNA, 79 bp, Homo sapiens
tttcttgtgggctgtctgggaactgcctgaacatctctctcagttctgatgggagaaacacgtgggcaggagaggtctg

SEQ ID NO: 113430 - DNA, 80 bp, Homo sapiens
tgtctgggaactgcctgaacatctctctcagttctgatgggagaaacacgtgggcaggagaggtctggataccagtggtg

SEQ ID NO: 113431 - DNA, 77 bp, Homo sapiens
cctgaacatctctctcagttctgatgggagaaacacgtgggcaggagaggtctggataccagtggtggggccataaa

SEQ ID NO: 113432 - DNA, 76 bp, Homo sapiens
tctctcagttctgatgggagaaacacgtgggcaggagaggtctggataccagtggtggggccataaagccaccaaa

SEQ ID NO: 113433 - DNA, 76 bp, Homo sapiens
agttctgatgggagaaacacgtgggcaggagaggtctggataccagtggtggggccataaagccaccaaatgcatc

SEQ ID NO: 113434 - DNA, 75 bp, Homo sapiens
aaacacgtgggcaggagaggtctggataccagtggtggggccataaagccaccaaatgcatccagagtcagaaaa

SEQ ID NO: 113435 - DNA, 78 bp, Homo sapiens
agaggtctggataccagtggtggggccataaagccaccaaatgcatccagagtcagaaaagcagtccaggatggtggc

SEQ ID NO: 113436 - DNA, 78 bp, Homo sapiens
ataccagtggtggggccataaagccaccaaatgcatccagagtcagaaaagcagtccaggatggtggccagtgcccca

SEQ ID NO: 113437 - DNA, 79 bp, Homo sapiens
ggccataaagccaccaaatgcatccagagtcagaaaagcagtccaggatggtggccagtgccccagcttggtgccaccc

SEQ ID NO: 113438 - DNA, 79 bp, Homo sapiens
atccagagtcagaaaagcagtccaggatggtggccagtgccccagcttggtgccaccccacagcgtcgcctcctgtcca

SEQ ID NO: 113439 - DNA, 77 bp, Homo sapiens
agtcagaaaagcagtccaggatggtggccagtgccccagcttggtgccaccccacagcgtcgcctcctgtccatggg

SEQ ID NO: 113440 - DNA, 75 bp, Homo sapiens
ccagcttggtgccaccccacagcgtcgcctcctgtccatggggccttggcaagcctttcgctctgtaaggctaaa

SEQ ID NO: 113441 - DNA, 76 bp, Homo sapiens
tgccaccccacagcgtcgcctcctgtccatggggccttggcaagcctttcgctctgtaaggctaaactccctcatg

SEQ ID NO: 113442 - DNA, 76 bp, Homo sapiens
acagcgtcgcctcctgtccatggggccttggcaagcctttcgctctgtaaggctaaactccctcatgtgccaaaca

SEQ ID NO: 113443 - DNA, 75 bp, Homo sapiens
gggccttggcaagcctttcgctctgtaaggctaaactccctcatgtgccaaacagatattctcaacaccgacctg

SEQ ID NO: 113444 - DNA, 74 bp, Homo sapiens
aagcctttcgctctgtaaggctaaactccctcatgtgccaaacagatattctcaacaccgacctgtcccctcca

SEQ ID NO: 113445 - DNA, 75 bp, Homo sapiens
tttcgctctgtaaggctaaactccctcatgtgccaaacagatattctcaacaccgacctgtcccctccacgggca

SEQ ID NO: 113446 - DNA, 76 bp, Homo sapiens
taaggctaaactccctcatgtgccaaacagatattctcaacaccgacctgtcccctccacgggcagacagacagtg

SEQ ID NO: 113447 - DNA, 81 bp, Homo sapiens
tccctcatgtgccaaacagatattctcaacaccgacctgtcccctccacgggcagacagacagtgggctctgctgcaggaa

SEQ ID NO: 113448 - DNA, 78 bp, Homo sapiens
aacagatattctcaacaccgacctgtcccctccacgggcagacagacagtgggctctgctgcaggaactgcctctgtt

SEQ ID NO: 113449 - DNA, 78 bp, Homo sapiens
atattctcaacaccgacctgtcccctccacgggcagacagacagtgggctctgctgcaggaactgcctctgtttggac

SEQ ID NO: 113450 - DNA, 76 bp, Homo sapiens
acctgtcccctccacgggcagacagacagtgggctctgctgcaggaactgcctctgtttggaccgcacctccacct

SEQ ID NO: 113451 - DNA, 80 bp, Homo sapiens
tccacgggcagacagacagtgggctctgctgcaggaactgcctctgtttggaccgcacctccacctttcccagcagccta

SEQ ID NO: 113452 - DNA, 78 bp, Homo sapiens
agacagacagtgggctctgctgcaggaactgcctctgtttggaccgcacctccacctttcccagcagcctaaccacaa

SEQ ID NO: 113453 - DNA, 78 bp, Homo sapiens
agtgggctctgctgcaggaactgcctctgtttggaccgcacctccacctttcccagcagcctaaccacaagcaggtca

SEQ ID NO: 113454 - DNA, 73 bp, Homo sapiens
aactgcctctgtttggaccgcacctccacctttcccagcagcctaaccacaagcaggtcacgtaaccttggca

SEQ ID NO: 113455 - DNA, 78 bp, Homo sapiens
cagcagcctaaccacaagcaggtcacgtaaccttggcaggccatgcttccccttcactcagtgggattaataatgaga

SEQ ID NO: 113456 - DNA, 77 bp, Homo sapiens
taaccacaagcaggtcacgtaaccttggcaggccatgcttccccttcactcagtgggattaataatgagagcaccta

SEQ ID NO: 113457 - DNA, 77 bp, Homo sapiens
taaccttggcaggccatgcttccccttcactcagtgggattaataatgagagcacctactcacagggttgtgccaaa

SEQ ID NO: 113458 - DNA, 75 bp, Homo sapiens
ccatgcttccccttcactcagtgggattaataatgagagcacctactcacagggttgtgccaaaattttaataca

SEQ ID NO: 113459 - DNA, 74 bp, Homo sapiens
ccttcactcagtgggattaataatgagagcacctactcacagggttgtgccaaaattttaatacagtaaggcaa

SEQ ID NO: 113460 - DNA, 73 bp, Homo sapiens
actcagtgggattaataatgagagcacctactcacagggttgtgccaaaattttaatacagtaaggcaagaaa

SEQ ID NO: 113461 - DNA, 73 bp, Homo sapiens
attaataatgagagcacctactcacagggttgtgccaaaattttaatacagtaaggcaagaaaatgcttggaa

SEQ ID NO: 113462 - DNA, 72 bp, Homo sapiens
agagcacctactcacagggttgtgccaaaattttaatacagtaaggcaagaaaatgcttggaacggtgcaag

SEQ ID NO: 113463 - DNA, 75 bp, Homo sapiens
agggttgtgccaaaattttaatacagtaaggcaagaaaatgcttggaacggtgcaagtgccttgcgcatagcata

SEQ ID NO: 113464 - DNA, 77 bp, Homo sapiens
ccaaaattttaatacagtaaggcaagaaaatgcttggaacggtgcaagtgccttgcgcatagcatatgctcaataaa

SEQ ID NO: 113465 - DNA, 83 bp, Homo sapiens
taatacagtaaggcaagaaaatgcttggaacggtgcaagtgccttgcgcatagcatatgctcaataaatgctagctgttatta

SEQ ID NO: 113466 - DNA, 81 bp, Homo sapiens
gcaagaaaatgcttggaacggtgcaagtgccttgcgcatagcatatgctcaataaatgctagctgttattactatcggttt

SEQ ID NO: 113467 - DNA, 79 bp, Homo sapiens
aaatgcttggaacggtgcaagtgccttgcgcatagcatatgctcaataaatgctagctgttattactatcggttttaaa

SEQ ID NO: 113468 - DNA, 78 bp, Homo sapiens
aacggtgcaagtgccttgcgcatagcatatgctcaataaatgctagctgttattactatcggttttaaagttcataaa

SEQ ID NO: 113469 - DNA, 80 bp, Homo sapiens
cttgcgcatagcatatgctcaataaatgctagctgttattactatcggttttaaagttcataaactcagccttctgccaa

SEQ ID NO: 113470 - DNA, 75 bp, Homo sapiens
aataaatgctagctgttattactatcggttttaaagttcataaactcagccttctgccaaagagcaccaagatca

SEQ ID NO: 113471 - DNA, 78 bp, Homo sapiens
atgctagctgttattactatcggttttaaagttcataaactcagccttctgccaaagagcaccaagatcacttctgca

SEQ ID NO: 113472 - DNA, 79 bp, Homo sapiens
ttattactatcggttttaaagttcataaactcagccttctgccaaagagcaccaagatcacttctgcactgctacatga

SEQ ID NO: 113473 - DNA, 84 bp, Homo sapiens
ttaaagttcataaactcagccttctgccaaagagcaccaagatcacttctgcactgctacatgatgagagaggcagacatttct

SEQ ID NO: 113474 - DNA, 69 bp, Homo sapiens
tttttttttttatcttcatacatgcccagttcctggaacagcttcggggccacgttcttgaggttggcg

SEQ ID NO: 113475 - DNA, 74 bp, Homo sapiens
ttttatcttcatacatgcccagttcctggaacagcttcggggccacgttcttgaggttggcggagatggctttc

SEQ ID NO: 113476 - DNA, 73 bp, Homo sapiens
atacatgcccagttcctggaacagcttcggggccacgttcttgaggttggcggagatggctttcctgtcccta

SEQ ID NO: 113477 - DNA, 70 bp, Homo sapiens
ttcctggaacagcttcggggccacgttcttgaggttggcggagatggctttcctgtccctagcctccctt

SEQ ID NO: 113478 - DNA, 70 bp, Homo sapiens
agcttcggggccacgttcttgaggttggcggagatggctttcctgtccctagcctccctttggtggcatt

SEQ ID NO: 113479 - DNA, 71 bp, Homo sapiens
ccacgttcttgaggttggcggagatggctttcctgtccctagcctccctttggtggcattttcagagttac

SEQ ID NO: 113480 - DNA, 70 bp, Homo sapiens
aggttggcggagatggctttcctgtccctagcctccctttggtggcattttcagagttaccttgtactta

SEQ ID NO: 113481 - DNA, 71 bp, Homo sapiens
agatggctttcctgtccctagcctccctttggtggcattttcagagttaccttgtacttattgacttcctc

SEQ ID NO: 113482 - DNA, 72 bp, Homo sapiens
tttcctgtccctagcctccctttggtggcattttcagagttaccttgtacttattgacttcctctgcgtgtc

SEQ ID NO: 113483 - DNA, 75 bp, Homo sapiens
attttcagagttaccttgtacttattgacttcctctgcgtgtccattgctttatacatattgtctcaaatcctct

SEQ ID NO: 113484 - DNA, 78 bp, Homo sapiens
taccttgtacttattgacttcctctgcgtgtccattgctttatacatattgtctcaaatcctcttgacaaccatacaa

SEQ ID NO: 113485 - DNA, 76 bp, Homo sapiens
acttattgacttcctctgcgtgtccattgctttatacatattgtctcaaatcctcttgacaaccatacaaagtagg

SEQ ID NO: 113486 - DNA, 77 bp, Homo sapiens
tctgcgtgtccattgctttatacatattgtctcaaatcctcttgacaaccatacaaagtagggctcattccccttgt

SEQ ID NO: 113487 - DNA, 76 bp, Homo sapiens
tccattgctttatacatattgtctcaaatcctcttgacaaccatacaaagtagggctcattccccttgtttacaga

SEQ ID NO: 113488 - DNA, 73 bp, Homo sapiens
ttgtctcaaatcctcttgacaaccatacaaagtagggctcattccccttgtttacagatgagaaacttggggc

SEQ ID NO: 113489 - DNA, 72 bp, Homo sapiens
ttgacaaccatacaaagtagggctcattccccttgtttacagatgagaaacttggggctccgtgaggttcga

SEQ ID NO: 113490 - DNA, 70 bp, Homo sapiens
aaccatacaaagtagggctcattccccttgtttacagatgagaaacttggggctccgtgaggttcgataa

SEQ ID NO: 113491 - DNA, 71 bp, Homo sapiens
aaagtagggctcattccccttgtttacagatgagaaacttggggctccgtgaggttcgataaatggctcaa

SEQ ID NO: 113492 - DNA, 72 bp, Homo sapiens
attccccttgtttacagatgagaaacttggggctccgtgaggttcgataaatggctcaagttcacacaggtg

SEQ ID NO: 113493 - DNA, 75 bp, Homo sapiens
ccttgtttacagatgagaaacttggggctccgtgaggttcgataaatggctcaagttcacacaggtggtggatga

SEQ ID NO: 113494 - DNA, 76 bp, Homo sapiens
ttgtttacagatgagaaacttggggctccgtgaggttcgataaatggctcaagttcacacaggtggtggatgatgg

SEQ ID NO: 113495 - DNA, 77 bp, Homo sapiens
agatgagaaacttggggctccgtgaggttcgataaatggctcaagttcacacaggtggtggatgatggtgacaggga

SEQ ID NO: 113496 - DNA, 75 bp, Homo sapiens
agaaacttggggctccgtgaggttcgataaatggctcaagttcacacaggtggtggatgatggtgacagggagaa

SEQ ID NO: 113497 - DNA, 74 bp, Homo sapiens
aaacttggggctccgtgaggttcgataaatggctcaagttcacacaggtggtggatgatggtgacagggagaaa

SEQ ID NO: 113498 - DNA, 76 bp, Homo sapiens
ggctccgtgaggttcgataaatggctcaagttcacacaggtggtggatgatggtgacagggagaaaccaatacctc

SEQ ID NO: 113499 - DNA, 75 bp, Homo sapiens
aggttcgataaatggctcaagttcacacaggtggtggatgatggtgacagggagaaaccaatacctcgattctaa

SEQ ID NO: 113500 - DNA, 76 bp, Homo sapiens
ataaatggctcaagttcacacaggtggtggatgatggtgacagggagaaaccaatacctcgattctaaagcccaca

SEQ ID NO: 113501 - DNA, 75 bp, Homo sapiens
aagttcacacaggtggtggatgatggtgacagggagaaaccaatacctcgattctaaagcccacaggcttcctgc

SEQ ID NO: 113502 - DNA, 71 bp, Homo sapiens
acagggagaaaccaatacctcgattctaaagcccacaggcttcctgctccccgatcccacccctgagcttg

SEQ ID NO: 113503 - DNA, 72 bp, Homo sapiens
accaatacctcgattctaaagcccacaggcttcctgctccccgatcccacccctgagcttgggcctatcttc

SEQ ID NO: 113504 - DNA, 72 bp, Homo sapiens
attctaaagcccacaggcttcctgctccccgatcccacccctgagcttgggcctatcttcctcctggcctcc

SEQ ID NO: 113505 - DNA, 74 bp, Homo sapiens
tgctccccgatcccacccctgagcttgggcctatcttcctcctggcctccctatcaaaggcaactcgtagaaga

SEQ ID NO: 113506 - DNA, 72 bp, Homo sapiens
cgatcccacccctgagcttgggcctatcttcctcctggcctccctatcaaaggcaactcgtagaagaagccc

SEQ ID NO: 113507 - DNA, 72 bp, Homo sapiens
agcttgggcctatcttcctcctggcctccctatcaaaggcaactcgtagaagaagcccctggtgataaagaa

SEQ ID NO: 113508 - DNA, 72 bp, Homo sapiens
tatcttcctcctggcctccctatcaaaggcaactcgtagaagaagcccctggtgataaagaaaacacgattc

SEQ ID NO: 113509 - DNA, 72 bp, Homo sapiens
tcctggcctccctatcaaaggcaactcgtagaagaagcccctggtgataaagaaaacacgattcctcctgga

SEQ ID NO: 113510 - DNA, 73 bp, Homo sapiens
tatcaaaggcaactcgtagaagaagcccctggtgataaagaaaacacgattcctcctggagctgagtggagtt

SEQ ID NO: 113511 - DNA, 72 bp, Homo sapiens
aactcgtagaagaagcccctggtgataaagaaaacacgattcctcctggagctgagtggagtttacacttca

SEQ ID NO: 113512 - DNA, 76 bp, Homo sapiens
tggtgataaagaaaacacgattcctcctggagctgagtggagtttacacttcaacatggactgaagcctccaggga

SEQ ID NO: 113513 - DNA, 74 bp, Homo sapiens
taaagaaaacacgattcctcctggagctgagtggagtttacacttcaacatggactgaagcctccagggaaaga

SEQ ID NO: 113514 - DNA, 72 bp, Homo sapiens
acgattcctcctggagctgagtggagtttacacttcaacatggactgaagcctccagggaaagaaataaagg

SEQ ID NO: 113515 - DNA, 72 bp, Homo sapiens
agtttacacttcaacatggactgaagcctccagggaaagaaataaaggtctgtagagagaagctacgtcctg

SEQ ID NO: 113516 - DNA, 76 bp, Homo sapiens
acttcaacatggactgaagcctccagggaaagaaataaaggtctgtagagagaagctacgtcctggtgagcagaga

SEQ ID NO: 113517 - DNA, 80 bp, Homo sapiens
tgaagcctccagggaaagaaataaaggtctgtagagagaagctacgtcctggtgagcagagacatgacagcagcagtttc

SEQ ID NO: 113518 - DNA, 81 bp, Homo sapiens
agaaataaaggtctgtagagagaagctacgtcctggtgagcagagacatgacagcagcagtttctgctacacctagagaaa

SEQ ID NO: 113519 - DNA, 83 bp, Homo sapiens
agaagctacgtcctggtgagcagagacatgacagcagcagtttctgctacacctagagaaagcttccttgaattcagtacatc

SEQ ID NO: 113520 - DNA, 83 bp, Homo sapiens
tggtgagcagagacatgacagcagcagtttctgctacacctagagaaagcttccttgaattcagtacatcctggggagaagtc

SEQ ID NO: 113521 - DNA, 75 bp, Homo sapiens
cagcagtttctgctacacctagagaaagcttccttgaattcagtacatcctggggagaagtcccaatggattccc

SEQ ID NO: 113522 - DNA, 73 bp, Homo sapiens
gtttctgctacacctagagaaagcttccttgaattcagtacatcctggggagaagtcccaatggattccctaa

SEQ ID NO: 113523 - DNA, 74 bp, Homo sapiens
tagagaaagcttccttgaattcagtacatcctggggagaagtcccaatggattccctaagcatgggaattttga

SEQ ID NO: 113524 - DNA, 74 bp, Homo sapiens
aagcttccttgaattcagtacatcctggggagaagtcccaatggattccctaagcatgggaattttgaatgctg

SEQ ID NO: 113525 - DNA, 76 bp, Homo sapiens
aattcagtacatcctggggagaagtcccaatggattccctaagcatgggaattttgaatgctggcctctctctctc

SEQ ID NO: 113526 - DNA, 82 bp, Homo sapiens
agagagagagacctttatttctcctgagaggccacttctgagctttgaatcaggagtgatgtgagcatatatatccctaatg

SEQ ID NO: 113527 - DNA, 79 bp, Homo sapiens
acctttatttctcctgagaggccacttctgagctttgaatcaggagtgatgtgagcatatatatccctaatgggaatta

SEQ ID NO: 113528 - DNA, 81 bp, Homo sapiens
tatttctcctgagaggccacttctgagctttgaatcaggagtgatgtgagcatatatatccctaatgggaattatagtttg

SEQ ID NO: 113529 - DNA, 77 bp, Homo sapiens
gccacttctgagctttgaatcaggagtgatgtgagcatatatatccctaatgggaattatagtttgggttccaattt

SEQ ID NO: 113530 - DNA, 77 bp, Homo sapiens
ttctgagctttgaatcaggagtgatgtgagcatatatatccctaatgggaattatagtttgggttccaatttttata

SEQ ID NO: 113531 - DNA, 76 bp, Homo sapiens
gaatcaggagtgatgtgagcatatatatccctaatgggaattatagtttgggttccaatttttatacaaagatctc

SEQ ID NO: 113532 - DNA, 74 bp, Homo sapiens
gtgatgtgagcatatatatccctaatgggaattatagtttgggttccaatttttatacaaagatctcccacttc

SEQ ID NO: 113533 - DNA, 69 bp, Homo sapiens
catatatatccctaatgggaattatagtttgggttccaatttttatacaaagatctcccacttcccagg

SEQ ID NO: 113534 - DNA, 69 bp, Homo sapiens
taatgggaattatagtttgggttccaatttttatacaaagatctcccacttcccagggctccttccaga

SEQ ID NO: 113535 - DNA, 70 bp, Homo sapiens
attatagtttgggttccaatttttatacaaagatctcccacttcccagggctccttccagagctgaagcc

SEQ ID NO: 113536 - DNA, 85 bp, Homo sapiens
cagggctccttccagagctgaagcctggcagccttggccgaggccatctctgaaccctctgcatggatgtgcacattggctgttg

SEQ ID NO: 113537 - DNA, 86 bp, Homo sapiens
tccagagctgaagcctggcagccttggccgaggccatctctgaaccctctgcatggatgtgcacattggctgttgtggtggttcaa

SEQ ID NO: 113538 - DNA, 80 bp, Homo sapiens
aggccatctctgaaccctctgcatggatgtgcacattggctgttgtggtggttcaaattttgccctagaccctcatcaaa

SEQ ID NO: 113539 - DNA, 79 bp, Homo sapiens
atctctgaaccctctgcatggatgtgcacattggctgttgtggtggttcaaattttgccctagaccctcatcaaaacca

SEQ ID NO: 113540 - DNA, 76 bp, Homo sapiens
tgcatggatgtgcacattggctgttgtggtggttcaaattttgccctagaccctcatcaaaaccaacctggttaat

SEQ ID NO: 113541 - DNA, 73 bp, Homo sapiens
tgtgcacattggctgttgtggtggttcaaattttgccctagaccctcatcaaaaccaacctggttaattgtaa

SEQ ID NO: 113542 - DNA, 70 bp, Homo sapiens
tgttgtggtggttcaaattttgccctagaccctcatcaaaaccaacctggttaattgtaacattgcctaa

SEQ ID NO: 113543 - DNA, 70 bp, Homo sapiens
aattttgccctagaccctcatcaaaaccaacctggttaattgtaacattgcctaaggagccaggtgggca

SEQ ID NO: 113544 - DNA, 73 bp, Homo sapiens
tagaccctcatcaaaaccaacctggttaattgtaacattgcctaaggagccaggtgggcaggcacatggtggg

SEQ ID NO: 113545 - DNA, 71 bp, Homo sapiens
aaaccaacctggttaattgtaacattgcctaaggagccaggtgggcaggcacatggtgggtgcttaaccaa

SEQ ID NO: 113546 - DNA, 74 bp, Homo sapiens
ttaattgtaacattgcctaaggagccaggtgggcaggcacatggtgggtgcttaaccaaggtggtgctggattt

SEQ ID NO: 113547 - DNA, 74 bp, Homo sapiens
taacattgcctaaggagccaggtgggcaggcacatggtgggtgcttaaccaaggtggtgctggattttggggaa

SEQ ID NO: 113548 - DNA, 75 bp, Homo sapiens
taaggagccaggtgggcaggcacatggtgggtgcttaaccaaggtggtgctggattttggggaagagagaacatc

SEQ ID NO: 113549 - DNA, 75 bp, Homo sapiens
aggtgggcaggcacatggtgggtgcttaaccaaggtggtgctggattttggggaagagagaacatccaaatgaca

SEQ ID NO: 113550 - DNA, 71 bp, Homo sapiens
cttaaccaaggtggtgctggattttggggaagagagaacatccaaatgacagcaggggccggttactccta

SEQ ID NO: 113551 - DNA, 76 bp, Homo sapiens
gtggtgctggattttggggaagagagaacatccaaatgacagcaggggccggttactcctatggcaactgcatttc

SEQ ID NO: 113552 - DNA, 75 bp, Homo sapiens
ctggattttggggaagagagaacatccaaatgacagcaggggccggttactcctatggcaactgcatttctaaca

SEQ ID NO: 113553 - DNA, 75 bp, Homo sapiens
agagagaacatccaaatgacagcaggggccggttactcctatggcaactgcatttctaacacagcctaaggacgt

SEQ ID NO: 113554 - DNA, 73 bp, Homo sapiens
atccaaatgacagcaggggccggttactcctatggcaactgcatttctaacacagcctaaggacgttcttaag

SEQ ID NO: 113555 - DNA, 74 bp, Homo sapiens
atgacagcaggggccggttactcctatggcaactgcatttctaacacagcctaaggacgttcttaaggactcag

SEQ ID NO: 113556 - DNA, 74 bp, Homo sapiens
cggttactcctatggcaactgcatttctaacacagcctaaggacgttcttaaggactcagggattcatatacat

SEQ ID NO: 113557 - DNA, 79 bp, Homo sapiens
tatggcaactgcatttctaacacagcctaaggacgttcttaaggactcagggattcatatacattgccctgcctaatga

SEQ ID NO: 113558 - DNA, 76 bp, Homo sapiens
catttctaacacagcctaaggacgttcttaaggactcagggattcatatacattgccctgcctaatgagttcacaa

SEQ ID NO: 113559 - DNA, 76 bp, Homo sapiens
taacacagcctaaggacgttcttaaggactcagggattcatatacattgccctgcctaatgagttcacaaggtgaa

SEQ ID NO: 113560 - DNA, 74 bp, Homo sapiens
taaggacgttcttaaggactcagggattcatatacattgccctgcctaatgagttcacaaggtgaagggattta

SEQ ID NO: 113561 - DNA, 75 bp, Homo sapiens
taaggactcagggattcatatacattgccctgcctaatgagttcacaaggtgaagggatttaacctgcaaaggat

SEQ ID NO: 113562 - DNA, 79 bp, Homo sapiens
gattcatatacattgccctgcctaatgagttcacaaggtgaagggatttaacctgcaaaggattgtggtatctgagcaa

SEQ ID NO: 113563 - DNA, 79 bp, Homo sapiens
atatacattgccctgcctaatgagttcacaaggtgaagggatttaacctgcaaaggattgtggtatctgagcaatgcaa

SEQ ID NO: 113564 - DNA, 75 bp, Homo sapiens
cctaatgagttcacaaggtgaagggatttaacctgcaaaggattgtggtatctgagcaatgcaaaggggaattga

SEQ ID NO: 113565 - DNA, 77 bp, Homo sapiens
ttaacctgcaaaggattgtggtatctgagcaatgcaaaggggaattgaggaggattaggagaagtgtctgctagtta

SEQ ID NO: 113566 - DNA, 81 bp, Homo sapiens
aaaggattgtggtatctgagcaatgcaaaggggaattgaggaggattaggagaagtgtctgctagttatgtgcatgcttga

SEQ ID NO: 113567 - DNA, 79 bp, Homo sapiens
atgcaaaggggaattgaggaggattaggagaagtgtctgctagttatgtgcatgcttgaatggaatccacctcataaat

SEQ ID NO: 113568 - DNA, 82 bp, Homo sapiens
aattgaggaggattaggagaagtgtctgctagttatgtgcatgcttgaatggaatccacctcataaattcagtgtctgcaaa

SEQ ID NO: 113569 - DNA, 81 bp, Homo sapiens
aggattaggagaagtgtctgctagttatgtgcatgcttgaatggaatccacctcataaattcagtgtctgcaaaactgtgg

SEQ ID NO: 113570 - DNA, 84 bp, Homo sapiens
aagtgtctgctagttatgtgcatgcttgaatggaatccacctcataaattcagtgtctgcaaaactgtgggtgacaggagctga

SEQ ID NO: 113571 - DNA, 83 bp, Homo sapiens
tagttatgtgcatgcttgaatggaatccacctcataaattcagtgtctgcaaaactgtgggtgacaggagctgagaagacctg

SEQ ID NO: 113572 - DNA, 79 bp, Homo sapiens
atgcttgaatggaatccacctcataaattcagtgtctgcaaaactgtgggtgacaggagctgagaagacctggtttctc

SEQ ID NO: 113573 - DNA, 76 bp, Homo sapiens
aatggaatccacctcataaattcagtgtctgcaaaactgtgggtgacaggagctgagaagacctggtttctcgttc

SEQ ID NO: 113574 - DNA, 77 bp, Homo sapiens
agtgtctgcaaaactgtgggtgacaggagctgagaagacctggtttctcgttcggactctggcaccaaccagctatg

SEQ ID NO: 113575 - DNA, 76 bp, Homo sapiens
tgacaggagctgagaagacctggtttctcgttcggactctggcaccaaccagctatggaaccctgggcaagtgaac

SEQ ID NO: 113576 - DNA, 74 bp, Homo sapiens
ctgagaagacctggtttctcgttcggactctggcaccaaccagctatggaaccctgggcaagtgaacctctctg

SEQ ID NO: 113577 - DNA, 73 bp, Homo sapiens
ctggtttctcgttcggactctggcaccaaccagctatggaaccctgggcaagtgaacctctctggtgccctaa

SEQ ID NO: 113578 - DNA, 74 bp, Homo sapiens
ttcggactctggcaccaaccagctatggaaccctgggcaagtgaacctctctggtgccctaaggtagagaaatg

SEQ ID NO: 113579 - DNA, 73 bp, Homo sapiens
tggcaccaaccagctatggaaccctgggcaagtgaacctctctggtgccctaaggtagagaaatgtctaaaaa

SEQ ID NO: 113580 - DNA, 72 bp, Homo sapiens
aaccagctatggaaccctgggcaagtgaacctctctggtgccctaaggtagagaaatgtctaaaaatcactc

SEQ ID NO: 113581 - DNA, 71 bp, Homo sapiens
aaccctgggcaagtgaacctctctggtgccctaaggtagagaaatgtctaaaaatcactccagccaaatat

SEQ ID NO: 113582 - DNA, 73 bp, Homo sapiens
tgaacctctctggtgccctaaggtagagaaatgtctaaaaatcactccagccaaatattcggctcttcctttc

SEQ ID NO: 113583 - DNA, 73 bp, Homo sapiens
tggtgccctaaggtagagaaatgtctaaaaatcactccagccaaatattcggctcttcctttctagcagttta

SEQ ID NO: 113584 - DNA, 70 bp, Homo sapiens
taaaaatcactccagccaaatattcggctcttcctttctagcagtttaaaaatatttataattatagatt

SEQ ID NO: 113585 - DNA, 77 bp, Homo sapiens
aagttatataatttttagatgccaactgaaactatacagaactatatatatacataactctatataactctatgaca

SEQ ID NO: 113586 - DNA, 80 bp, Homo sapiens
taatttttagatgccaactgaaactatacagaactatatatatacataactctatataactctatgacacagcacataaa

SEQ ID NO: 113587 - DNA, 80 bp, Homo sapiens
gccaactgaaactatacagaactatatatatacataactctatataactctatgacacagcacataaaacttacaaagca

SEQ ID NO: 113588 - DNA, 82 bp, Homo sapiens
gaaactatacagaactatatatatacataactctatataactctatgacacagcacataaaacttacaaagcatcatataga

SEQ ID NO: 113589 - DNA, 84 bp, Homo sapiens
cagaactatatatatacataactctatataactctatgacacagcacataaaacttacaaagcatcatatagaacaatgtctca

SEQ ID NO: 113590 - DNA, 83 bp, Homo sapiens
aactctatataactctatgacacagcacataaaacttacaaagcatcatatagaacaatgtctcatagttcatatgtctcagg

SEQ ID NO: 113591 - DNA, 84 bp, Homo sapiens
tatataactctatgacacagcacataaaacttacaaagcatcatatagaacaatgtctcatagttcatatgtctcagggttcac

SEQ ID NO: 113592 - DNA, 82 bp, Homo sapiens
tctatgacacagcacataaaacttacaaagcatcatatagaacaatgtctcatagttcatatgtctcagggttcacttattt

SEQ ID NO: 113593 - DNA, 79 bp, Homo sapiens
gacacagcacataaaacttacaaagcatcatatagaacaatgtctcatagttcatatgtctcagggttcacttattttt

SEQ ID NO: 113594 - DNA, 75 bp, Homo sapiens
aaaacttacaaagcatcatatagaacaatgtctcatagttcatatgtctcagggttcacttattttttaaacaga

SEQ ID NO: 113595 - DNA, 79 bp, Homo sapiens
caaagcatcatatagaacaatgtctcatagttcatatgtctcagggttcacttattttttaaacagatttattcacatc

SEQ ID NO: 113596 - DNA, 79 bp, Homo sapiens
aagcatcatatagaacaatgtctcatagttcatatgtctcagggttcacttattttttaaacagatttattcacatctg

SEQ ID NO: 113597 - DNA, 78 bp, Homo sapiens
catatagaacaatgtctcatagttcatatgtctcagggttcacttattttttaaacagatttattcacatctgtaata

SEQ ID NO: 113598 - DNA, 76 bp, Homo sapiens
caatgtctcatagttcatatgtctcagggttcacttattttttaaacagatttattcacatctgtaatacaattat

SEQ ID NO: 113599 - DNA, 72 bp, Homo sapiens
agttcatatgtctcagggttcacttattttttaaacagatttattcacatctgtaatacaattatttctttg

SEQ ID NO: 113600 - DNA, 70 bp, Homo sapiens
gtctcagggttcacttattttttaaacagatttattcacatctgtaatacaattatttctttgttttgaa

SEQ ID NO: 113601 - DNA, 70 bp, Homo sapiens
tattttttaaacagatttattcacatctgtaatacaattatttctttgttttgaatacaacctggaggga

SEQ ID NO: 113602 - DNA, 75 bp, Homo sapiens
acagatttattcacatctgtaatacaattatttctttgttttgaatacaacctggagggaagcatatgggagaca

SEQ ID NO: 113603 - DNA, 75 bp, Homo sapiens
tcacatctgtaatacaattatttctttgttttgaatacaacctggagggaagcatatgggagacacagcctttat

SEQ ID NO: 113604 - DNA, 75 bp, Homo sapiens
gagacacagcctttatttaaaaaaatgaagtaatgatatggaatgattgacagttggatagaattttcattgtcg

SEQ ID NO: 113605 - DNA, 74 bp, Homo sapiens
gcctttatttaaaaaaatgaagtaatgatatggaatgattgacagttggatagaattttcattgtcggcacttc

SEQ ID NO: 113606 - DNA, 77 bp, Homo sapiens
aaaatgaagtaatgatatggaatgattgacagttggatagaattttcattgtcggcacttctacttctttatatgac

SEQ ID NO: 113607 - DNA, 78 bp, Homo sapiens
taatgatatggaatgattgacagttggatagaattttcattgtcggcacttctacttctttatatgaccctgcacctt

SEQ ID NO: 113608 - DNA, 78 bp, Homo sapiens
tatggaatgattgacagttggatagaattttcattgtcggcacttctacttctttatatgaccctgcacctttcacag

SEQ ID NO: 113609 - DNA, 75 bp, Homo sapiens
acagttggatagaattttcattgtcggcacttctacttctttatatgaccctgcacctttcacagtgctaatatt

SEQ ID NO: 113610 - DNA, 75 bp, Homo sapiens
gatagaattttcattgtcggcacttctacttctttatatgaccctgcacctttcacagtgctaatatttgtttaa

SEQ ID NO: 113611 - DNA, 73 bp, Homo sapiens
attgtcggcacttctacttctttatatgaccctgcacctttcacagtgctaatatttgtttaaggttgcttaa

SEQ ID NO: 113612 - DNA, 70 bp, Homo sapiens
acttctacttctttatatgaccctgcacctttcacagtgctaatatttgtttaaggttgcttaacgttgt

SEQ ID NO: 113613 - DNA, 73 bp, Homo sapiens
tctttatatgaccctgcacctttcacagtgctaatatttgtttaaggttgcttaacgttgttcctctcctcta

SEQ ID NO: 113614 - DNA, 71 bp, Homo sapiens
ctgcacctttcacagtgctaatatttgtttaaggttgcttaacgttgttcctctcctctagaactttggaa

SEQ ID NO: 113615 - DNA, 68 bp, Homo sapiens
acagtgctaatatttgtttaaggttgcttaacgttgttcctctcctctagaactttggaagtaaaagc

SEQ ID NO: 113616 - DNA, 68 bp, Homo sapiens
atttgtttaaggttgcttaacgttgttcctctcctctagaactttggaagtaaaagccattctcatct

SEQ ID NO: 113617 - DNA, 69 bp, Homo sapiens
tttaaggttgcttaacgttgttcctctcctctagaactttggaagtaaaagccattctcatctttagaa

SEQ ID NO: 113618 - DNA, 71 bp, Homo sapiens
ttaacgttgttcctctcctctagaactttggaagtaaaagccattctcatctttagaaacagtagattcaa

SEQ ID NO: 113619 - DNA, 72 bp, Homo sapiens
ttcctctcctctagaactttggaagtaaaagccattctcatctttagaaacagtagattcaataataataaa

SEQ ID NO: 113620 - DNA, 72 bp, Homo sapiens
taataaataataataaactagaagcctgagtttctgttcctacctgtcagtcaatgcctaaataatttcatt

SEQ ID NO: 113621 - DNA, 73 bp, Homo sapiens
aactagaagcctgagtttctgttcctacctgtcagtcaatgcctaaataatttcattttcacccattcaccca

SEQ ID NO: 113622 - DNA, 74 bp, Homo sapiens
agtttctgttcctacctgtcagtcaatgcctaaataatttcattttcacccattcacccattcattacatgaaa

SEQ ID NO: 113623 - DNA, 75 bp, Homo sapiens
tacctgtcagtcaatgcctaaataatttcattttcacccattcacccattcattacatgaaaggggctgggataa

SEQ ID NO: 113624 - DNA, 74 bp, Homo sapiens
agtcaatgcctaaataatttcattttcacccattcacccattcattacatgaaaggggctgggataagagagaa

SEQ ID NO: 113625 - DNA, 73 bp, Homo sapiens
aaataatttcattttcacccattcacccattcattacatgaaaggggctgggataagagagaacactcctgaa

SEQ ID NO: 113626 - DNA, 73 bp, Homo sapiens
tttcattttcacccattcacccattcattacatgaaaggggctgggataagagagaacactcctgaaggggag

SEQ ID NO: 113627 - DNA, 72 bp, Homo sapiens
ttcacccattcattacatgaaaggggctgggataagagagaacactcctgaaggggaggactactttttctc

SEQ ID NO: 113628 - DNA, 67 bp, Homo sapiens
atgaaaggggctgggataagagagaacactcctgaaggggaggactactttttctcctccttttagt

SEQ ID NO: 113629 - DNA, 67 bp, Homo sapiens
ggataagagagaacactcctgaaggggaggactactttttctcctccttttagttcctacccactct

SEQ ID NO: 113630 - DNA, 66 bp, Homo sapiens
aacactcctgaaggggaggactactttttctcctccttttagttcctacccactcttgcatgggtt

SEQ ID NO: 113631 - DNA, 67 bp, Homo sapiens
aaggggaggactactttttctcctccttttagttcctacccactcttgcatgggttttatacacata

SEQ ID NO: 113632 - DNA, 72 bp, Homo sapiens
ttctcctccttttagttcctacccactcttgcatgggttttatacacatatgtggtttcagattttatgaat

SEQ ID NO: 113633 - DNA, 72 bp, Homo sapiens
cttttagttcctacccactcttgcatgggttttatacacatatgtggtttcagattttatgaattctatact

SEQ ID NO: 113634 - DNA, 75 bp, Homo sapiens
tacccactcttgcatgggttttatacacatatgtggtttcagattttatgaattctatactttcaaagtgggtga

SEQ ID NO: 113635 - DNA, 78 bp, Homo sapiens
atacacatatgtggtttcagattttatgaattctatactttcaaagtgggtgaatgtcaagttcagctgtgactgtta

SEQ ID NO: 113636 - DNA, 77 bp, Homo sapiens
tatgtggtttcagattttatgaattctatactttcaaagtgggtgaatgtcaagttcagctgtgactgttaccgagc

SEQ ID NO: 113637 - DNA, 78 bp, Homo sapiens
attttatgaattctatactttcaaagtgggtgaatgtcaagttcagctgtgactgttaccgagctggatgaagctgcc

SEQ ID NO: 113638 - DNA, 81 bp, Homo sapiens
aattctatactttcaaagtgggtgaatgtcaagttcagctgtgactgttaccgagctggatgaagctgcccagatgcagcc

SEQ ID NO: 113639 - DNA, 86 bp, Homo sapiens
tttcaaagtgggtgaatgtcaagttcagctgtgactgttaccgagctggatgaagctgcccagatgcagcctgcagatggtgtgga

SEQ ID NO: 113640 - DNA, 89 bp, Homo sapiens
aatgtcaagttcagctgtgactgttaccgagctggatgaagctgcccagatgcagcctgcagatggtgtggaatgaggggctcagtgca

SEQ ID NO: 113641 - DNA, 90 bp, Homo sapiens
tcagctgtgactgttaccgagctggatgaagctgcccagatgcagcctgcagatggtgtggaatgaggggctcagtgcacagagttcaaa

SEQ ID NO: 113642 - DNA, 87 bp, Homo sapiens
actgttaccgagctggatgaagctgcccagatgcagcctgcagatggtgtggaatgaggggctcagtgcacagagttcaaagtgcaa

SEQ ID NO: 113643 - DNA, 87 bp, Homo sapiens
accgagctggatgaagctgcccagatgcagcctgcagatggtgtggaatgaggggctcagtgcacagagttcaaagtgcaaacagaa

SEQ ID NO: 113644 - DNA, 86 bp, Homo sapiens
aagctgcccagatgcagcctgcagatggtgtggaatgaggggctcagtgcacagagttcaaagtgcaaacagaagctgtgtaagaa

SEQ ID NO: 113645 - DNA, 86 bp, Homo sapiens
atgcagcctgcagatggtgtggaatgaggggctcagtgcacagagttcaaagtgcaaacagaagctgtgtaagaaagtgcagcaaa

SEQ ID NO: 113646 - DNA, 80 bp, Homo sapiens
gaatgaggggctcagtgcacagagttcaaagtgcaaacagaagctgtgtaagaaagtgcagcaaactgtggttggtgtta

SEQ ID NO: 113647 - DNA, 79 bp, Homo sapiens
ctcagtgcacagagttcaaagtgcaaacagaagctgtgtaagaaagtgcagcaaactgtggttggtgttaaaactgctc

SEQ ID NO: 113648 - DNA, 75 bp, Homo sapiens
agagttcaaagtgcaaacagaagctgtgtaagaaagtgcagcaaactgtggttggtgttaaaactgctcctgaaa

SEQ ID NO: 113649 - DNA, 74 bp, Homo sapiens
aacagaagctgtgtaagaaagtgcagcaaactgtggttggtgttaaaactgctcctgaaaaaaatggcactcaa

SEQ ID NO: 113650 - DNA, 73 bp, Homo sapiens
taagaaagtgcagcaaactgtggttggtgttaaaactgctcctgaaaaaaatggcactcaaaccaatgtatct

SEQ ID NO: 113651 - DNA, 72 bp, Homo sapiens
gcaaactgtggttggtgttaaaactgctcctgaaaaaaatggcactcaaaccaatgtatcttagttgaccta

SEQ ID NO: 113652 - DNA, 73 bp, Homo sapiens
tgttaaaactgctcctgaaaaaaatggcactcaaaccaatgtatcttagttgacctaaactctcttttgcaca

SEQ ID NO: 113653 - DNA, 74 bp, Homo sapiens
tgaaaaaaatggcactcaaaccaatgtatcttagttgacctaaactctcttttgcacattctggggcagtaata

SEQ ID NO: 113654 - DNA, 73 bp, Homo sapiens
aaatggcactcaaaccaatgtatcttagttgacctaaactctcttttgcacattctggggcagtaataagaaa

SEQ ID NO: 113655 - DNA, 74 bp, Homo sapiens
tcaaaccaatgtatcttagttgacctaaactctcttttgcacattctggggcagtaataagaaacaaacattga

SEQ ID NO: 113656 - DNA, 76 bp, Homo sapiens
gtatcttagttgacctaaactctcttttgcacattctggggcagtaataagaaacaaacattgatagctatacata

SEQ ID NO: 113657 - DNA, 75 bp, Homo sapiens
tgacctaaactctcttttgcacattctggggcagtaataagaaacaaacattgatagctatacatattataaaat

SEQ ID NO: 113658 - DNA, 77 bp, Homo sapiens
tctcttttgcacattctggggcagtaataagaaacaaacattgatagctatacatattataaaattttgcacagtaa

SEQ ID NO: 113659 - DNA, 72 bp, Homo sapiens
acattctggggcagtaataagaaacaaacattgatagctatacatattataaaattttgcacagtaaaaggg

SEQ ID NO: 113660 - DNA, 74 bp, Homo sapiens
gcagtaataagaaacaaacattgatagctatacatattataaaattttgcacagtaaaaggggaagtgcttctc

SEQ ID NO: 113661 - DNA, 78 bp, Homo sapiens
acaaacattgatagctatacatattataaaattttgcacagtaaaaggggaagtgcttctctcttgagcaatgagtgc

SEQ ID NO: 113662 - DNA, 79 bp, Homo sapiens
tagctatacatattataaaattttgcacagtaaaaggggaagtgcttctctcttgagcaatgagtgccactctgacatt

SEQ ID NO: 113663 - DNA, 75 bp, Homo sapiens
acatattataaaattttgcacagtaaaaggggaagtgcttctctcttgagcaatgagtgccactctgacattttt

SEQ ID NO: 113664 - DNA, 75 bp, Homo sapiens
tttgcacagtaaaaggggaagtgcttctctcttgagcaatgagtgccactctgacattttttgtctcccttaaaa

SEQ ID NO: 113665 - DNA, 72 bp, Homo sapiens
acagtaaaaggggaagtgcttctctcttgagcaatgagtgccactctgacattttttgtctcccttaaaaaa

SEQ ID NO: 113666 - DNA, 75 bp, Homo sapiens
aagtgcttctctcttgagcaatgagtgccactctgacattttttgtctcccttaaaaaactcacctaggatgggc

SEQ ID NO: 113667 - DNA, 76 bp, Homo sapiens
tctctcttgagcaatgagtgccactctgacattttttgtctcccttaaaaaactcacctaggatgggccgggtgca

SEQ ID NO: 113668 - DNA, 70 bp, Homo sapiens
aaaaaaaaccaacaacaaaaactcacccacaatggaatgtgactatggaataccctgcggtgtgttcaga

SEQ ID NO: 113669 - DNA, 75 bp, Homo sapiens
aacaacaaaaactcacccacaatggaatgtgactatggaataccctgcggtgtgttcagagctctgacttctgtt

SEQ ID NO: 113670 - DNA, 76 bp, Homo sapiens
aaaaactcacccacaatggaatgtgactatggaataccctgcggtgtgttcagagctctgacttctgtttgctctt

SEQ ID NO: 113671 - DNA, 76 bp, Homo sapiens
acaatggaatgtgactatggaataccctgcggtgtgttcagagctctgacttctgtttgctctttttaacataacc

SEQ ID NO: 113672 - DNA, 75 bp, Homo sapiens
aatgtgactatggaataccctgcggtgtgttcagagctctgacttctgtttgctctttttaacataacccccatc

SEQ ID NO: 113673 - DNA, 77 bp, Homo sapiens
tggaataccctgcggtgtgttcagagctctgacttctgtttgctctttttaacataacccccatctggcaagctgac

SEQ ID NO: 113674 - DNA, 80 bp, Homo sapiens
tgtgttcagagctctgacttctgtttgctctttttaacataacccccatctggcaagctgactgctgcaagattttctgg

SEQ ID NO: 113675 - DNA, 76 bp, Homo sapiens
agctctgacttctgtttgctctttttaacataacccccatctggcaagctgactgctgcaagattttctgggtctt

SEQ ID NO: 113676 - DNA, 74 bp, Homo sapiens
ttctgtttgctctttttaacataacccccatctggcaagctgactgctgcaagattttctgggtctttctttag

SEQ ID NO: 113677 - DNA, 75 bp, Homo sapiens
aacataacccccatctggcaagctgactgctgcaagattttctgggtctttctttaggatctactaacaatgaaa

SEQ ID NO: 113678 - DNA, 78 bp, Homo sapiens
atctggcaagctgactgctgcaagattttctgggtctttctttaggatctactaacaatgaaaaacatatatatgaaa

SEQ ID NO: 113679 - DNA, 76 bp, Homo sapiens
gctgactgctgcaagattttctgggtctttctttaggatctactaacaatgaaaaacatatatatgaaaacctaca

SEQ ID NO: 113680 - DNA, 74 bp, Homo sapiens
actgctgcaagattttctgggtctttctttaggatctactaacaatgaaaaacatatatatgaaaacctacaca

SEQ ID NO: 113681 - DNA, 71 bp, Homo sapiens
gcaagattttctgggtctttctttaggatctactaacaatgaaaaacatatatatgaaaacctacacattt

SEQ ID NO: 113682 - DNA, 76 bp, Homo sapiens
tctgggtctttctttaggatctactaacaatgaaaaacatatatatgaaaacctacacattttcagaagcacatga

SEQ ID NO: 113683 - DNA, 80 bp, Homo sapiens
ttaggatctactaacaatgaaaaacatatatatgaaaacctacacattttcagaagcacatgagagctgatcaagaccca

SEQ ID NO: 113684 - DNA, 79 bp, Homo sapiens
atctactaacaatgaaaaacatatatatgaaaacctacacattttcagaagcacatgagagctgatcaagacccacgta

SEQ ID NO: 113685 - DNA, 78 bp, Homo sapiens
tactaacaatgaaaaacatatatatgaaaacctacacattttcagaagcacatgagagctgatcaagacccacgtacc

SEQ ID NO: 113686 - DNA, 77 bp, Homo sapiens
aatgaaaaacatatatatgaaaacctacacattttcagaagcacatgagagctgatcaagacccacgtacctcccaa

SEQ ID NO: 113687 - DNA, 76 bp, Homo sapiens
aaaaacatatatatgaaaacctacacattttcagaagcacatgagagctgatcaagacccacgtacctcccaagga

SEQ ID NO: 113688 - DNA, 80 bp, Homo sapiens
atatatatgaaaacctacacattttcagaagcacatgagagctgatcaagacccacgtacctcccaaggagaggagatga

SEQ ID NO: 113689 - DNA, 82 bp, Homo sapiens
acattttcagaagcacatgagagctgatcaagacccacgtacctcccaaggagaggagatgacagaggctgctctgtggtgt

SEQ ID NO: 113690 - DNA, 84 bp, Homo sapiens
acatgagagctgatcaagacccacgtacctcccaaggagaggagatgacagaggctgctctgtggtgttgctctcaggctatat

SEQ ID NO: 113691 - DNA, 82 bp, Homo sapiens
tgatcaagacccacgtacctcccaaggagaggagatgacagaggctgctctgtggtgttgctctcaggctatatttgattta

SEQ ID NO: 113692 - DNA, 78 bp, Homo sapiens
aagacccacgtacctcccaaggagaggagatgacagaggctgctctgtggtgttgctctcaggctatatttgatttat

SEQ ID NO: 113693 - DNA, 82 bp, Homo sapiens
tcccaaggagaggagatgacagaggctgctctgtggtgttgctctcaggctatatttgatttattgctcaaatcttattatt

SEQ ID NO: 113694 - DNA, 83 bp, Homo sapiens
aggagatgacagaggctgctctgtggtgttgctctcaggctatatttgatttattgctcaaatcttattatttcattctccat

SEQ ID NO: 113695 - DNA, 82 bp, Homo sapiens
agaggctgctctgtggtgttgctctcaggctatatttgatttattgctcaaatcttattatttcattctccattcgagacta

SEQ ID NO: 113696 - DNA, 79 bp, Homo sapiens
tgtggtgttgctctcaggctatatttgatttattgctcaaatcttattatttcattctccattcgagactagcaaagtt

SEQ ID NO: 113697 - DNA, 77 bp, Homo sapiens
gttgctctcaggctatatttgatttattgctcaaatcttattatttcattctccattcgagactagcaaagtttctt

SEQ ID NO: 113698 - DNA, 75 bp, Homo sapiens
ggctatatttgatttattgctcaaatcttattatttcattctccattcgagactagcaaagtttcttttgagaag

SEQ ID NO: 113699 - DNA, 76 bp, Homo sapiens
ttattgctcaaatcttattatttcattctccattcgagactagcaaagtttcttttgagaagtcacagtctctacg

SEQ ID NO: 113700 - DNA, 73 bp, Homo sapiens
attatttcattctccattcgagactagcaaagtttcttttgagaagtcacagtctctacggagggtattctaa

SEQ ID NO: 113701 - DNA, 71 bp, Homo sapiens
attcgagactagcaaagtttcttttgagaagtcacagtctctacggagggtattctaacgcccagaagtaa

SEQ ID NO: 113702 - DNA, 68 bp, Homo sapiens
actagcaaagtttcttttgagaagtcacagtctctacggagggtattctaacgcccagaagtaaaagt

SEQ ID NO: 113703 - DNA, 71 bp, Homo sapiens
cttttgagaagtcacagtctctacggagggtattctaacgcccagaagtaaaagttggatgttggcaaaga

SEQ ID NO: 113704 - DNA, 70 bp, Homo sapiens
aagtcacagtctctacggagggtattctaacgcccagaagtaaaagttggatgttggcaaagaaagcaaa

SEQ ID NO: 113705 - DNA, 69 bp, Homo sapiens
tctacggagggtattctaacgcccagaagtaaaagttggatgttggcaaagaaagcaaagtagaatctt

SEQ ID NO: 113706 - DNA, 69 bp, Homo sapiens
agggtattctaacgcccagaagtaaaagttggatgttggcaaagaaagcaaagtagaatctttgcaaaa

SEQ ID NO: 113707 - DNA, 75 bp, Homo sapiens
taacgcccagaagtaaaagttggatgttggcaaagaaagcaaagtagaatctttgcaaaatgttggagctgcata

SEQ ID NO: 113708 - DNA, 75 bp, Homo sapiens
aagtaaaagttggatgttggcaaagaaagcaaagtagaatctttgcaaaatgttggagctgcatagttctctctc

SEQ ID NO: 113709 - DNA, 78 bp, Homo sapiens
aaagcaaagtagaatctttgcaaaatgttggagctgcatagttctctctcccaatggacatgtttcaagactgaatac

SEQ ID NO: 113710 - DNA, 79 bp, Homo sapiens
tttgcaaaatgttggagctgcatagttctctctcccaatggacatgtttcaagactgaatacgttgagtatttgattta

SEQ ID NO: 113711 - DNA, 79 bp, Homo sapiens
ttggagctgcatagttctctctcccaatggacatgtttcaagactgaatacgttgagtatttgatttagaatcaattta

SEQ ID NO: 113712 - DNA, 76 bp, Homo sapiens
ctctcccaatggacatgtttcaagactgaatacgttgagtatttgatttagaatcaatttaacatgaacttcgcat

SEQ ID NO: 113713 - DNA, 80 bp, Homo sapiens
aagactgaatacgttgagtatttgatttagaatcaatttaacatgaacttcgcatttatgcaaagcagcatcagtcctga

SEQ ID NO: 113714 - DNA, 86 bp, Homo sapiens
gttgagtatttgatttagaatcaatttaacatgaacttcgcatttatgcaaagcagcatcagtcctgagatcagcagagcgattga

SEQ ID NO: 113715 - DNA, 86 bp, Homo sapiens
atttgatttagaatcaatttaacatgaacttcgcatttatgcaaagcagcatcagtcctgagatcagcagagcgattgagcaagcc

SEQ ID NO: 113716 - DNA, 86 bp, Homo sapiens
aatcaatttaacatgaacttcgcatttatgcaaagcagcatcagtcctgagatcagcagagcgattgagcaagcccaactagcaaa

SEQ ID NO: 113717 - DNA, 87 bp, Homo sapiens
atgaacttcgcatttatgcaaagcagcatcagtcctgagatcagcagagcgattgagcaagcccaactagcaaactgagatttctat

SEQ ID NO: 113718 - DNA, 87 bp, Homo sapiens
tttatgcaaagcagcatcagtcctgagatcagcagagcgattgagcaagcccaactagcaaactgagatttctatttgtgatgacct

SEQ ID NO: 113719 - DNA, 84 bp, Homo sapiens
aaagcagcatcagtcctgagatcagcagagcgattgagcaagcccaactagcaaactgagatttctatttgtgatgacctttcc

SEQ ID NO: 113720 - DNA, 83 bp, Homo sapiens
atcagtcctgagatcagcagagcgattgagcaagcccaactagcaaactgagatttctatttgtgatgacctttcccatttga

SEQ ID NO: 113721 - DNA, 77 bp, Homo sapiens
agcagagcgattgagcaagcccaactagcaaactgagatttctatttgtgatgacctttcccatttgaggccccaaa

SEQ ID NO: 113722 - DNA, 74 bp, Homo sapiens
attgagcaagcccaactagcaaactgagatttctatttgtgatgacctttcccatttgaggccccaaaaatgtc

SEQ ID NO: 113723 - DNA, 70 bp, Homo sapiens
aactgagatttctatttgtgatgacctttcccatttgaggccccaaaaatgtcttggggaactcattgtt

SEQ ID NO: 113724 - DNA, 68 bp, Homo sapiens
atttctatttgtgatgacctttcccatttgaggccccaaaaatgtcttggggaactcattgtttaaaa

SEQ ID NO: 113725 - DNA, 68 bp, Homo sapiens
atgacctttcccatttgaggccccaaaaatgtcttggggaactcattgtttaaaaagaagtccatcaa

SEQ ID NO: 113726 - DNA, 66 bp, Homo sapiens
ctttcccatttgaggccccaaaaatgtcttggggaactcattgtttaaaaagaagtccatcaaaaa

SEQ ID NO: 113727 - DNA, 69 bp, Homo sapiens
ccccaaaaatgtcttggggaactcattgtttaaaaagaagtccatcaaaaaatggacacatatggacca

SEQ ID NO: 113728 - DNA, 78 bp, Homo sapiens
actcattgtttaaaaagaagtccatcaaaaaatggacacatatggaccatggcatgggagggcagtgctgcatacaaa

SEQ ID NO: 113729 - DNA, 78 bp, Homo sapiens
ttgtttaaaaagaagtccatcaaaaaatggacacatatggaccatggcatgggagggcagtgctgcatacaaaatcaa

SEQ ID NO: 113730 - DNA, 80 bp, Homo sapiens
aaaatggacacatatggaccatggcatgggagggcagtgctgcatacaaaatcaacaattctctaaatgaacaccgatct

SEQ ID NO: 113731 - DNA, 81 bp, Homo sapiens
acatatggaccatggcatgggagggcagtgctgcatacaaaatcaacaattctctaaatgaacaccgatcttgcagaaaaa

SEQ ID NO: 113732 - DNA, 78 bp, Homo sapiens
accatggcatgggagggcagtgctgcatacaaaatcaacaattctctaaatgaacaccgatcttgcagaaaaacaaaa

SEQ ID NO: 113733 - DNA, 76 bp, Homo sapiens
agggcagtgctgcatacaaaatcaacaattctctaaatgaacaccgatcttgcagaaaaacaaaatgaaagcaaaa

SEQ ID NO: 113734 - DNA, 75 bp, Homo sapiens
tgctgcatacaaaatcaacaattctctaaatgaacaccgatcttgcagaaaaacaaaatgaaagcaaaacaaaaa

SEQ ID NO: 113735 - DNA, 67 bp, Homo sapiens
aagaaatttctaatttcaagagaaaaactgaataacaactttcttttcattcatcctttctttcttc

SEQ ID NO: 113736 - DNA, 73 bp, Homo sapiens
tttttttttttaacgaagcaatgactttctcagggagaaagatttgcatccatgctgaggaaatagacagggc

SEQ ID NO: 113737 - DNA, 78 bp, Homo sapiens
tttttaacgaagcaatgactttctcagggagaaagatttgcatccatgctgaggaaatagacagggccagtaatcaca

SEQ ID NO: 113738 - DNA, 83 bp, Homo sapiens
atgactttctcagggagaaagatttgcatccatgctgaggaaatagacagggccagtaatcacacagcaacaatcatctgtaa

SEQ ID NO: 113739 - DNA, 84 bp, Homo sapiens
tcagggagaaagatttgcatccatgctgaggaaatagacagggccagtaatcacacagcaacaatcatctgtaacttgcagaaa

SEQ ID NO: 113740 - DNA, 84 bp, Homo sapiens
aagatttgcatccatgctgaggaaatagacagggccagtaatcacacagcaacaatcatctgtaacttgcagaaattcaatgta

SEQ ID NO: 113741 - DNA, 85 bp, Homo sapiens
atttgcatccatgctgaggaaatagacagggccagtaatcacacagcaacaatcatctgtaacttgcagaaattcaatgtatgaa

SEQ ID NO: 113742 - DNA, 83 bp, Homo sapiens
atccatgctgaggaaatagacagggccagtaatcacacagcaacaatcatctgtaacttgcagaaattcaatgtatgaataag

SEQ ID NO: 113743 - DNA, 81 bp, Homo sapiens
tgaggaaatagacagggccagtaatcacacagcaacaatcatctgtaacttgcagaaattcaatgtatgaataagtgttta

SEQ ID NO: 113744 - DNA, 78 bp, Homo sapiens
aaatagacagggccagtaatcacacagcaacaatcatctgtaacttgcagaaattcaatgtatgaataagtgtttaaa

SEQ ID NO: 113745 - DNA, 79 bp, Homo sapiens
agggccagtaatcacacagcaacaatcatctgtaacttgcagaaattcaatgtatgaataagtgtttaaagcctagata

SEQ ID NO: 113746 - DNA, 80 bp, Homo sapiens
gtaatcacacagcaacaatcatctgtaacttgcagaaattcaatgtatgaataagtgtttaaagcctagatagagggcaa

SEQ ID NO: 113747 - DNA, 80 bp, Homo sapiens
atcacacagcaacaatcatctgtaacttgcagaaattcaatgtatgaataagtgtttaaagcctagatagagggcaatta

SEQ ID NO: 113748 - DNA, 78 bp, Homo sapiens
agcaacaatcatctgtaacttgcagaaattcaatgtatgaataagtgtttaaagcctagatagagggcaattatctgg

SEQ ID NO: 113749 - DNA, 77 bp, Homo sapiens
caacaatcatctgtaacttgcagaaattcaatgtatgaataagtgtttaaagcctagatagagggcaattatctggt

SEQ ID NO: 113750 - DNA, 78 bp, Homo sapiens
caatcatctgtaacttgcagaaattcaatgtatgaataagtgtttaaagcctagatagagggcaattatctggttatc

SEQ ID NO: 113751 - DNA, 77 bp, Homo sapiens
caatgtatgaataagtgtttaaagcctagatagagggcaattatctggttatctgtttttcatatttctatcagaga

SEQ ID NO: 113752 - DNA, 74 bp, Homo sapiens
gaataagtgtttaaagcctagatagagggcaattatctggttatctgtttttcatatttctatcagagataaaa

SEQ ID NO: 113753 - DNA, 72 bp, Homo sapiens
ctagatagagggcaattatctggttatctgtttttcatatttctatcagagataaaaacctctttagggaaa

SEQ ID NO: 113754 - DNA, 71 bp, Homo sapiens
tggttatctgtttttcatatttctatcagagataaaaacctctttagggaaatttatgaagggccatttga

SEQ ID NO: 113755 - DNA, 68 bp, Homo sapiens
catatttctatcagagataaaaacctctttagggaaatttatgaagggccatttgaaagaaggtttcc

SEQ ID NO: 113756 - DNA, 66 bp, Homo sapiens
ctatcagagataaaaacctctttagggaaatttatgaagggccatttgaaagaaggtttccctctt

SEQ ID NO: 113757 - DNA, 65 bp, Homo sapiens
gataaaaacctctttagggaaatttatgaagggccatttgaaagaaggtttccctcttttgtaga

SEQ ID NO: 113758 - DNA, 65 bp, Homo sapiens
ctttagggaaatttatgaagggccatttgaaagaaggtttccctcttttgtagaaaagaattctc

SEQ ID NO: 113759 - DNA, 64 bp, Homo sapiens
aatttatgaagggccatttgaaagaaggtttccctcttttgtagaaaagaattctcttaaaaat

SEQ ID NO: 113760 - DNA, 64 bp, Homo sapiens
aaaattaaaacaaatttgggaggctgggggatttttgagagtttaaaagagtgaggaagatggg

SEQ ID NO: 113761 - DNA, 64 bp, Homo sapiens
aaaacaaatttgggaggctgggggatttttgagagtttaaaagagtgaggaagatggggggcgg

SEQ ID NO: 113762 - DNA, 68 bp, Homo sapiens
aggctgggggatttttgagagtttaaaagagtgaggaagatggggggcgggaagcaactatttccagc

SEQ ID NO: 113763 - DNA, 69 bp, Homo sapiens
atttttgagagtttaaaagagtgaggaagatggggggcgggaagcaactatttccagctgcgagaaacc

SEQ ID NO: 113764 - DNA, 71 bp, Homo sapiens
agtttaaaagagtgaggaagatggggggcgggaagcaactatttccagctgcgagaaaccgatcaacctca

SEQ ID NO: 113765 - DNA, 74 bp, Homo sapiens
agtgaggaagatggggggcgggaagcaactatttccagctgcgagaaaccgatcaacctcacagcaaggtgtgg

SEQ ID NO: 113766 - DNA, 76 bp, Homo sapiens
aagatggggggcgggaagcaactatttccagctgcgagaaaccgatcaacctcacagcaaggtgtggtggctctga

SEQ ID NO: 113767 - DNA, 82 bp, Homo sapiens
aagcaactatttccagctgcgagaaaccgatcaacctcacagcaaggtgtggtggctctgatgcaagcaacattcccataga

SEQ ID NO: 113768 - DNA, 82 bp, Homo sapiens
actatttccagctgcgagaaaccgatcaacctcacagcaaggtgtggtggctctgatgcaagcaacattcccatagatacag

SEQ ID NO: 113769 - DNA, 83 bp, Homo sapiens
atcaacctcacagcaaggtgtggtggctctgatgcaagcaacattcccatagatacagggctgtctggttttctattgctcat

SEQ ID NO: 113770 - DNA, 84 bp, Homo sapiens
tggtggctctgatgcaagcaacattcccatagatacagggctgtctggttttctattgctcattctaacttgaggagacgctca

SEQ ID NO: 113771 - DNA, 81 bp, Homo sapiens
atgcaagcaacattcccatagatacagggctgtctggttttctattgctcattctaacttgaggagacgctcaagtgtgat

SEQ ID NO: 113772 - DNA, 77 bp, Homo sapiens
aacattcccatagatacagggctgtctggttttctattgctcattctaacttgaggagacgctcaagtgtgatttgg

SEQ ID NO: 113773 - DNA, 78 bp, Homo sapiens
atagatacagggctgtctggttttctattgctcattctaacttgaggagacgctcaagtgtgatttggggctttgaca

SEQ ID NO: 113774 - DNA, 76 bp, Homo sapiens
tgtctggttttctattgctcattctaacttgaggagacgctcaagtgtgatttggggctttgacactgaaaatagg

SEQ ID NO: 113775 - DNA, 76 bp, Homo sapiens
tttctattgctcattctaacttgaggagacgctcaagtgtgatttggggctttgacactgaaaataggtgtgaact

SEQ ID NO: 113776 - DNA, 78 bp, Homo sapiens
tattgctcattctaacttgaggagacgctcaagtgtgatttggggctttgacactgaaaataggtgtgaacttggatc

SEQ ID NO: 113777 - DNA, 74 bp, Homo sapiens
attctaacttgaggagacgctcaagtgtgatttggggctttgacactgaaaataggtgtgaacttggatccatt

SEQ ID NO: 113778 - DNA, 75 bp, Homo sapiens
ttctaacttgaggagacgctcaagtgtgatttggggctttgacactgaaaataggtgtgaacttggatccattta

SEQ ID NO: 113779 - DNA, 73 bp, Homo sapiens
aacttgaggagacgctcaagtgtgatttggggctttgacactgaaaataggtgtgaacttggatccatttaac

SEQ ID NO: 113780 - DNA, 73 bp, Homo sapiens
aggagacgctcaagtgtgatttggggctttgacactgaaaataggtgtgaacttggatccatttaacctagcc

SEQ ID NO: 113781 - DNA, 71 bp, Homo sapiens
acgctcaagtgtgatttggggctttgacactgaaaataggtgtgaacttggatccatttaacctagcccct

SEQ ID NO: 113782 - DNA, 69 bp, Homo sapiens
aagtgtgatttggggctttgacactgaaaataggtgtgaacttggatccatttaacctagccccttccc

SEQ ID NO: 113783 - DNA, 69 bp, Homo sapiens
ggctttgacactgaaaataggtgtgaacttggatccatttaacctagccccttcccccacctcatccct

SEQ ID NO: 113784 - DNA, 70 bp, Homo sapiens
tttgacactgaaaataggtgtgaacttggatccatttaacctagccccttcccccacctcatcccttctc

SEQ ID NO: 113785 - DNA, 69 bp, Homo sapiens
acactgaaaataggtgtgaacttggatccatttaacctagccccttcccccacctcatcccttctcctg

SEQ ID NO: 113786 - DNA, 68 bp, Homo sapiens
aataggtgtgaacttggatccatttaacctagccccttcccccacctcatcccttctcctgtccagtt

SEQ ID NO: 113787 - DNA, 72 bp, Homo sapiens
cttcccccacctcatcccttctcctgtccagtttgctttcaatgggtcaacaataaatattcacccttggca

SEQ ID NO: 113788 - DNA, 77 bp, Homo sapiens
ctcatcccttctcctgtccagtttgctttcaatgggtcaacaataaatattcacccttggcatccatctgcaacttc

SEQ ID NO: 113789 - DNA, 75 bp, Homo sapiens
agtttgctttcaatgggtcaacaataaatattcacccttggcatccatctgcaacttccaagagggaatgaagga

SEQ ID NO: 113790 - DNA, 76 bp, Homo sapiens
tttcaatgggtcaacaataaatattcacccttggcatccatctgcaacttccaagagggaatgaaggaagaacata

SEQ ID NO: 113791 - DNA, 75 bp, Homo sapiens
aatattcacccttggcatccatctgcaacttccaagagggaatgaaggaagaacataaagtttctctgcatttgt

SEQ ID NO: 113792 - DNA, 72 bp, Homo sapiens
aagagggaatgaaggaagaacataaagtttctctgcatttgtttccaaagcccagctggcacagaaaacaaa

SEQ ID NO: 113793 - DNA, 76 bp, Homo sapiens
atgaaggaagaacataaagtttctctgcatttgtttccaaagcccagctggcacagaaaacaaatgatacaagata

SEQ ID NO: 113794 - DNA, 76 bp, Homo sapiens
aacataaagtttctctgcatttgtttccaaagcccagctggcacagaaaacaaatgatacaagatatgactgggaa

SEQ ID NO: 113795 - DNA, 79 bp, Homo sapiens
tttgtttccaaagcccagctggcacagaaaacaaatgatacaagatatgactgggaaggcacacagcctgtctttgtca

SEQ ID NO: 113796 - DNA, 83 bp, Homo sapiens
ccagctggcacagaaaacaaatgatacaagatatgactgggaaggcacacagcctgtctttgtcaccaggtctggcagatgtg

SEQ ID NO: 113797 - DNA, 80 bp, Homo sapiens
agaaaacaaatgatacaagatatgactgggaaggcacacagcctgtctttgtcaccaggtctggcagatgtggctctggg

SEQ ID NO: 113798 - DNA, 82 bp, Homo sapiens
aaatgatacaagatatgactgggaaggcacacagcctgtctttgtcaccaggtctggcagatgtggctctgggttcacgaga

SEQ ID NO: 113799 - DNA, 83 bp, Homo sapiens
aagatatgactgggaaggcacacagcctgtctttgtcaccaggtctggcagatgtggctctgggttcacgagacatctgctcc

SEQ ID NO: 113800 - DNA, 81 bp, Homo sapiens
aaggcacacagcctgtctttgtcaccaggtctggcagatgtggctctgggttcacgagacatctgctcccagctaccttcc

SEQ ID NO: 113801 - DNA, 82 bp, Homo sapiens
acagcctgtctttgtcaccaggtctggcagatgtggctctgggttcacgagacatctgctcccagctaccttcctctctgct

SEQ ID NO: 113802 - DNA, 82 bp, Homo sapiens
tctttgtcaccaggtctggcagatgtggctctgggttcacgagacatctgctcccagctaccttcctctctgcttccctcca

SEQ ID NO: 113803 - DNA, 83 bp, Homo sapiens
tctggcagatgtggctctgggttcacgagacatctgctcccagctaccttcctctctgcttccctccactctccaggctggaa

SEQ ID NO: 113804 - DNA, 80 bp, Homo sapiens
tggctctgggttcacgagacatctgctcccagctaccttcctctctgcttccctccactctccaggctggaaagtgacaa

SEQ ID NO: 113805 - DNA, 80 bp, Homo sapiens
ttcacgagacatctgctcccagctaccttcctctctgcttccctccactctccaggctggaaagtgacaactccattgtc

SEQ ID NO: 113806 - DNA, 78 bp, Homo sapiens
atctgctcccagctaccttcctctctgcttccctccactctccaggctggaaagtgacaactccattgtcctcagttc

SEQ ID NO: 113807 - DNA, 76 bp, Homo sapiens
tccctccactctccaggctggaaagtgacaactccattgtcctcagttccctccagccagaggcctgtgacctagt

SEQ ID NO: 113808 - DNA, 79 bp, Homo sapiens
tggaaagtgacaactccattgtcctcagttccctccagccagaggcctgtgacctagttgtggcctaagcaatatgtca

SEQ ID NO: 113809 - DNA, 76 bp, Homo sapiens
actccattgtcctcagttccctccagccagaggcctgtgacctagttgtggcctaagcaatatgtcagcgaaagtt

SEQ ID NO: 113810 - DNA, 79 bp, Homo sapiens
ttgtcctcagttccctccagccagaggcctgtgacctagttgtggcctaagcaatatgtcagcgaaagtttgcagagaa

SEQ ID NO: 113811 - DNA, 77 bp, Homo sapiens
tccagccagaggcctgtgacctagttgtggcctaagcaatatgtcagcgaaagtttgcagagaagggcttcccttcc

SEQ ID NO: 113812 - DNA, 75 bp, Homo sapiens
aggcctgtgacctagttgtggcctaagcaatatgtcagcgaaagtttgcagagaagggcttcccttcctgaataa

SEQ ID NO: 113813 - DNA, 72 bp, Homo sapiens
acctagttgtggcctaagcaatatgtcagcgaaagtttgcagagaagggcttcccttcctgaataaaaatac

SEQ ID NO: 113814 - DNA, 72 bp, Homo sapiens
cctaagcaatatgtcagcgaaagtttgcagagaagggcttcccttcctgaataaaaataccaggacccacaa

SEQ ID NO: 113815 - DNA, 70 bp, Homo sapiens
aatatgtcagcgaaagtttgcagagaagggcttcccttcctgaataaaaataccaggacccacaagaagg

SEQ ID NO: 113816 - DNA, 68 bp, Homo sapiens
agcgaaagtttgcagagaagggcttcccttcctgaataaaaataccaggacccacaagaaggggttga

SEQ ID NO: 113817 - DNA, 71 bp, Homo sapiens
aataaaaataccaggacccacaagaaggggttgaggcctcccatgtcctttctgcctggacagatcagagg

SEQ ID NO: 113818 - DNA, 76 bp, Homo sapiens
aataccaggacccacaagaaggggttgaggcctcccatgtcctttctgcctggacagatcagaggtgcaggccatc

SEQ ID NO: 113819 - DNA, 77 bp, Homo sapiens
cccacaagaaggggttgaggcctcccatgtcctttctgcctggacagatcagaggtgcaggccatctctccctggcc

SEQ ID NO: 113820 - DNA, 82 bp, Homo sapiens
ttgaggcctcccatgtcctttctgcctggacagatcagaggtgcaggccatctctccctggcctcagcatggtgggaccaaa

SEQ ID NO: 113821 - DNA, 82 bp, Homo sapiens
catgtcctttctgcctggacagatcagaggtgcaggccatctctccctggcctcagcatggtgggaccaaaacataggagtg

SEQ ID NO: 113822 - DNA, 79 bp, Homo sapiens
agaggtgcaggccatctctccctggcctcagcatggtgggaccaaaacataggagtgtcctgcaccccaccgtatcagc

SEQ ID NO: 113823 - DNA, 79 bp, Homo sapiens
atctctccctggcctcagcatggtgggaccaaaacataggagtgtcctgcaccccaccgtatcagcctggactgctcac

SEQ ID NO: 113824 - DNA, 76 bp, Homo sapiens
atggtgggaccaaaacataggagtgtcctgcaccccaccgtatcagcctggactgctcactctggaactcctgccc

SEQ ID NO: 113825 - DNA, 78 bp, Homo sapiens
accaaaacataggagtgtcctgcaccccaccgtatcagcctggactgctcactctggaactcctgcccgtctgctcaa

SEQ ID NO: 113826 - DNA, 81 bp, Homo sapiens
tgtcctgcaccccaccgtatcagcctggactgctcactctggaactcctgcccgtctgctcaagccactgtggtcagcttt

SEQ ID NO: 113827 - DNA, 79 bp, Homo sapiens
cccaccgtatcagcctggactgctcactctggaactcctgcccgtctgctcaagccactgtggtcagcttttctctacg

SEQ ID NO: 113828 - DNA, 84 bp, Homo sapiens
tcagcctggactgctcactctggaactcctgcccgtctgctcaagccactgtggtcagcttttctctacgtgcagccaaacata

SEQ ID NO: 113829 - DNA, 79 bp, Homo sapiens
actgctcactctggaactcctgcccgtctgctcaagccactgtggtcagcttttctctacgtgcagccaaacataattt

SEQ ID NO: 113830 - DNA, 78 bp, Homo sapiens
tggaactcctgcccgtctgctcaagccactgtggtcagcttttctctacgtgcagccaaacataattttcatgggtaa

SEQ ID NO: 113831 - DNA, 77 bp, Homo sapiens
cccgtctgctcaagccactgtggtcagcttttctctacgtgcagccaaacataattttcatgggtaaacctgagcaa

SEQ ID NO: 113832 - DNA, 76 bp, Homo sapiens
tcaagccactgtggtcagcttttctctacgtgcagccaaacataattttcatgggtaaacctgagcaagggcctta

SEQ ID NO: 113833 - DNA, 73 bp, Homo sapiens
agcttttctctacgtgcagccaaacataattttcatgggtaaacctgagcaagggccttactctttctgtcac

SEQ ID NO: 113834 - DNA, 76 bp, Homo sapiens
tgcagccaaacataattttcatgggtaaacctgagcaagggccttactctttctgtcactgcaataaaatacataa

SEQ ID NO: 113835 - DNA, 73 bp, Homo sapiens
tttcatgggtaaacctgagcaagggccttactctttctgtcactgcaataaaatacataatttccgtcatgtt

SEQ ID NO: 113836 - DNA, 71 bp, Homo sapiens
agggccttactctttctgtcactgcaataaaatacataatttccgtcatgtttcggatttagtgtttattc

SEQ ID NO: 113837 - DNA, 72 bp, Homo sapiens
aaatacataatttccgtcatgtttcggatttagtgtttattcctccaccttggctcctttctggcatcatta

SEQ ID NO: 113838 - DNA, 73 bp, Homo sapiens
tttccgtcatgtttcggatttagtgtttattcctccaccttggctcctttctggcatcattactcagtgttat

SEQ ID NO: 113839 - DNA, 76 bp, Homo sapiens
tttcggatttagtgtttattcctccaccttggctcctttctggcatcattactcagtgttattgcaagatgaggga

SEQ ID NO: 113840 - DNA, 77 bp, Homo sapiens
tagtgtttattcctccaccttggctcctttctggcatcattactcagtgttattgcaagatgagggagggagagaaa

SEQ ID NO: 113841 - DNA, 83 bp, Homo sapiens
ttcagagagccaagagagtataacacgtgtctccccaacaaagagtgaagcctgcgcaagtgagagcagtgtgtctgagctta

SEQ ID NO: 113842 - DNA, 81 bp, Homo sapiens
caagagagtataacacgtgtctccccaacaaagagtgaagcctgcgcaagtgagagcagtgtgtctgagcttatcctccca

SEQ ID NO: 113843 - DNA, 83 bp, Homo sapiens
tataacacgtgtctccccaacaaagagtgaagcctgcgcaagtgagagcagtgtgtctgagcttatcctcccagcatgttgaa

SEQ ID NO: 113844 - DNA, 84 bp, Homo sapiens
tgtctccccaacaaagagtgaagcctgcgcaagtgagagcagtgtgtctgagcttatcctcccagcatgttgaaggtgacagga

SEQ ID NO: 113845 - DNA, 80 bp, Homo sapiens
aacaaagagtgaagcctgcgcaagtgagagcagtgtgtctgagcttatcctcccagcatgttgaaggtgacaggaggttt

SEQ ID NO: 113846 - DNA, 80 bp, Homo sapiens
aagcctgcgcaagtgagagcagtgtgtctgagcttatcctcccagcatgttgaaggtgacaggaggttttgagccctgtt

SEQ ID NO: 113847 - DNA, 74 bp, Homo sapiens
agcatgttgaaggtgacaggaggttttgagccctgttttgtgttcaagagccagcctgtgttctcgtaaagtac

SEQ ID NO: 113848 - DNA, 72 bp, Homo sapiens
aggtgacaggaggttttgagccctgttttgtgttcaagagccagcctgtgttctcgtaaagtactccctgat

SEQ ID NO: 113849 - DNA, 75 bp, Homo sapiens
ccctgttttgtgttcaagagccagcctgtgttctcgtaaagtactccctgattgtgttcacggtcagcaaagatc

SEQ ID NO: 113850 - DNA, 76 bp, Homo sapiens
ttttgtgttcaagagccagcctgtgttctcgtaaagtactccctgattgtgttcacggtcagcaaagatctcaaag

SEQ ID NO: 113851 - DNA, 74 bp, Homo sapiens
ccagcctgtgttctcgtaaagtactccctgattgtgttcacggtcagcaaagatctcaaaggaaatgctccctt

SEQ ID NO: 113852 - DNA, 73 bp, Homo sapiens
ctgtgttctcgtaaagtactccctgattgtgttcacggtcagcaaagatctcaaaggaaatgctcccttttta

SEQ ID NO: 113853 - DNA, 73 bp, Homo sapiens
taaagtactccctgattgtgttcacggtcagcaaagatctcaaaggaaatgctccctttttaccactccagga

SEQ ID NO: 113854 - DNA, 73 bp, Homo sapiens
attgtgttcacggtcagcaaagatctcaaaggaaatgctccctttttaccactccaggacatcctagttatta

SEQ ID NO: 113855 - DNA, 71 bp, Homo sapiens
acggtcagcaaagatctcaaaggaaatgctccctttttaccactccaggacatcctagttattatatttta

SEQ ID NO: 113856 - DNA, 71 bp, Homo sapiens
aagatctcaaaggaaatgctccctttttaccactccaggacatcctagttattatattttatgagagggaa

SEQ ID NO: 113857 - DNA, 70 bp, Homo sapiens
aaggaaatgctccctttttaccactccaggacatcctagttattatattttatgagagggaagaggtcaa

SEQ ID NO: 113858 - DNA, 71 bp, Homo sapiens
ctccctttttaccactccaggacatcctagttattatattttatgagagggaagaggtcaagaaagacata

SEQ ID NO: 113859 - DNA, 73 bp, Homo sapiens
aggacatcctagttattatattttatgagagggaagaggtcaagaaagacatacctctttgccttggctggag

SEQ ID NO: 113860 - DNA, 74 bp, Homo sapiens
ttattatattttatgagagggaagaggtcaagaaagacatacctctttgccttggctggaggctcagcaaaaag

SEQ ID NO: 113861 - DNA, 74 bp, Homo sapiens
ttttatgagagggaagaggtcaagaaagacatacctctttgccttggctggaggctcagcaaaaaggctaaaga

SEQ ID NO: 113862 - DNA, 71 bp, Homo sapiens
aagaggtcaagaaagacatacctctttgccttggctggaggctcagcaaaaaggctaaagaaggggactgg

SEQ ID NO: 113863 - DNA, 75 bp, Homo sapiens
aagaaagacatacctctttgccttggctggaggctcagcaaaaaggctaaagaaggggactggtggcatctgatg

SEQ ID NO: 113864 - DNA, 76 bp, Homo sapiens
atacctctttgccttggctggaggctcagcaaaaaggctaaagaaggggactggtggcatctgatggggaggagca

SEQ ID NO: 113865 - DNA, 76 bp, Homo sapiens
tggctggaggctcagcaaaaaggctaaagaaggggactggtggcatctgatggggaggagcaggggaggccgagaa

SEQ ID NO: 113866 - DNA, 70 bp, Homo sapiens
aaaaaggctaaagaaggggactggtggcatctgatggggaggagcaggggaggccgagaaacaagagttg

SEQ ID NO: 113867 - DNA, 71 bp, Homo sapiens
aaggggactggtggcatctgatggggaggagcaggggaggccgagaaacaagagttgtgggaaaagtgctt

SEQ ID NO: 113868 - DNA, 74 bp, Homo sapiens
tggcatctgatggggaggagcaggggaggccgagaaacaagagttgtgggaaaagtgctttgaacattttaata

SEQ ID NO: 113869 - DNA, 70 bp, Homo sapiens
atggggaggagcaggggaggccgagaaacaagagttgtgggaaaagtgctttgaacattttaatatctgt

SEQ ID NO: 113870 - DNA, 71 bp, Homo sapiens
aggggaggccgagaaacaagagttgtgggaaaagtgctttgaacattttaatatctgttcaggcaccagtg

SEQ ID NO: 113871 - DNA, 75 bp, Homo sapiens
gagaaacaagagttgtgggaaaagtgctttgaacattttaatatctgttcaggcaccagtgtagcttctgaagat

SEQ ID NO: 113872 - DNA, 73 bp, Homo sapiens
aaaagtgctttgaacattttaatatctgttcaggcaccagtgtagcttctgaagatttcttgaaaaatgggag

SEQ ID NO: 113873 - DNA, 74 bp, Homo sapiens
tttgaacattttaatatctgttcaggcaccagtgtagcttctgaagatttcttgaaaaatgggagttggagaaa

SEQ ID NO: 113874 - DNA, 74 bp, Homo sapiens
ttttaatatctgttcaggcaccagtgtagcttctgaagatttcttgaaaaatgggagttggagaaagcaattac

SEQ ID NO: 113875 - DNA, 72 bp, Homo sapiens
aggcaccagtgtagcttctgaagatttcttgaaaaatgggagttggagaaagcaattacgaaaatgagggaa

SEQ ID NO: 113876 - DNA, 71 bp, Homo sapiens
agtgtagcttctgaagatttcttgaaaaatgggagttggagaaagcaattacgaaaatgagggaaaatatc

SEQ ID NO: 113877 - DNA, 73 bp, Homo sapiens
ctgaagatttcttgaaaaatgggagttggagaaagcaattacgaaaatgagggaaaatatcttgcatttgtga

SEQ ID NO: 113878 - DNA, 74 bp, Homo sapiens
ttgaaaaatgggagttggagaaagcaattacgaaaatgagggaaaatatcttgcatttgtgaaatgatgggaga

SEQ ID NO: 113879 - DNA, 73 bp, Homo sapiens
ggagttggagaaagcaattacgaaaatgagggaaaatatcttgcatttgtgaaatgatgggagaactattttc

SEQ ID NO: 113880 - DNA, 74 bp, Homo sapiens
gagaaagcaattacgaaaatgagggaaaatatcttgcatttgtgaaatgatgggagaactattttctaaacaga

SEQ ID NO: 113881 - DNA, 69 bp, Homo sapiens
aataaaatatttttaagtggctttgtgttattaagctaagaagatttgtgatgtgttttatggtacctc

SEQ ID NO: 113882 - DNA, 75 bp, Homo sapiens
ttttaagtggctttgtgttattaagctaagaagatttgtgatgtgttttatggtacctctttctgatgcatgtaa

SEQ ID NO: 113883 - DNA, 76 bp, Homo sapiens
gctttgtgttattaagctaagaagatttgtgatgtgttttatggtacctctttctgatgcatgtaaagacttccaa

SEQ ID NO: 113884 - DNA, 76 bp, Homo sapiens
tgttattaagctaagaagatttgtgatgtgttttatggtacctctttctgatgcatgtaaagacttccaacaggaa

SEQ ID NO: 113885 - DNA, 75 bp, Homo sapiens
atgtgttttatggtacctctttctgatgcatgtaaagacttccaacaggaacttggtaatttagatgcaagcttg

SEQ ID NO: 113886 - DNA, 77 bp, Homo sapiens
tttctgatgcatgtaaagacttccaacaggaacttggtaatttagatgcaagcttgtctagaatattattagcccat

SEQ ID NO: 113887 - DNA, 74 bp, Homo sapiens
acttccaacaggaacttggtaatttagatgcaagcttgtctagaatattattagcccattttgcagaactcaaa

SEQ ID NO: 113888 - DNA, 76 bp, Homo sapiens
aggaacttggtaatttagatgcaagcttgtctagaatattattagcccattttgcagaactcaaatgagacacaaa

SEQ ID NO: 113889 - DNA, 82 bp, Homo sapiens
taatttagatgcaagcttgtctagaatattattagcccattttgcagaactcaaatgagacacaaagacatctattgactca

SEQ ID NO: 113890 - DNA, 81 bp, Homo sapiens
agcttgtctagaatattattagcccattttgcagaactcaaatgagacacaaagacatctattgactcatctaggtcacta

SEQ ID NO: 113891 - DNA, 78 bp, Homo sapiens
aatattattagcccattttgcagaactcaaatgagacacaaagacatctattgactcatctaggtcactaggaagtta

SEQ ID NO: 113892 - DNA, 80 bp, Homo sapiens
tattagcccattttgcagaactcaaatgagacacaaagacatctattgactcatctaggtcactaggaagttacctgaga

SEQ ID NO: 113893 - DNA, 78 bp, Homo sapiens
ttttgcagaactcaaatgagacacaaagacatctattgactcatctaggtcactaggaagttacctgagaaactgaaa

SEQ ID NO: 113894 - DNA, 76 bp, Homo sapiens
aatgagacacaaagacatctattgactcatctaggtcactaggaagttacctgagaaactgaaaatttgcttgagt

SEQ ID NO: 113895 - DNA, 74 bp, Homo sapiens
acaaagacatctattgactcatctaggtcactaggaagttacctgagaaactgaaaatttgcttgagtttcctg

SEQ ID NO: 113896 - DNA, 74 bp, Homo sapiens
atctattgactcatctaggtcactaggaagttacctgagaaactgaaaatttgcttgagtttcctgtgtgggcc

SEQ ID NO: 113897 - DNA, 74 bp, Homo sapiens
atctaggtcactaggaagttacctgagaaactgaaaatttgcttgagtttcctgtgtgggcctcctctgctgcc

SEQ ID NO: 113898 - DNA, 73 bp, Homo sapiens
actaggaagttacctgagaaactgaaaatttgcttgagtttcctgtgtgggcctcctctgctgcctccaacaa

SEQ ID NO: 113899 - DNA, 77 bp, Homo sapiens
tacctgagaaactgaaaatttgcttgagtttcctgtgtgggcctcctctgctgcctccaacaagacaagccatcaaa

SEQ ID NO: 113900 - DNA, 77 bp, Homo sapiens
aaaatttgcttgagtttcctgtgtgggcctcctctgctgcctccaacaagacaagccatcaaagctaccttcatgtc

SEQ ID NO: 113901 - DNA, 80 bp, Homo sapiens
tgagtttcctgtgtgggcctcctctgctgcctccaacaagacaagccatcaaagctaccttcatgtctgggctttgacaa

SEQ ID NO: 113902 - DNA, 81 bp, Homo sapiens
tgtgtgggcctcctctgctgcctccaacaagacaagccatcaaagctaccttcatgtctgggctttgacaaagtacatgat

SEQ ID NO: 113903 - DNA, 79 bp, Homo sapiens
cctctgctgcctccaacaagacaagccatcaaagctaccttcatgtctgggctttgacaaagtacatgattacaaatgt

SEQ ID NO: 113904 - DNA, 76 bp, Homo sapiens
cctccaacaagacaagccatcaaagctaccttcatgtctgggctttgacaaagtacatgattacaaatgttcccaa

SEQ ID NO: 113905 - DNA, 77 bp, Homo sapiens
acaagacaagccatcaaagctaccttcatgtctgggctttgacaaagtacatgattacaaatgttcccaaggagcag

SEQ ID NO: 113906 - DNA, 74 bp, Homo sapiens
atcaaagctaccttcatgtctgggctttgacaaagtacatgattacaaatgttcccaaggagcagggaaaatgg

SEQ ID NO: 113907 - DNA, 76 bp, Homo sapiens
taccttcatgtctgggctttgacaaagtacatgattacaaatgttcccaaggagcagggaaaatgggagtctctca

SEQ ID NO: 113908 - DNA, 75 bp, Homo sapiens
aagtacatgattacaaatgttcccaaggagcagggaaaatgggagtctctcagaggcccagagaacctgctcaaa

SEQ ID NO: 113909 - DNA, 75 bp, Homo sapiens
atgattacaaatgttcccaaggagcagggaaaatgggagtctctcagaggcccagagaacctgctcaaaggtata

SEQ ID NO: 113910 - DNA, 71 bp, Homo sapiens
agaggcccagagaacctgctcaaaggtatacaggcaaaatggccttttccttaagaagagccttggagaaa

SEQ ID NO: 113911 - DNA, 70 bp, Homo sapiens
ccagagaacctgctcaaaggtatacaggcaaaatggccttttccttaagaagagccttggagaaaataaa

SEQ ID NO: 113912 - DNA, 72 bp, Homo sapiens
tcaaaggtatacaggcaaaatggccttttccttaagaagagccttggagaaaataaagctacaccagcagtc

SEQ ID NO: 113913 - DNA, 74 bp, Homo sapiens
tatacaggcaaaatggccttttccttaagaagagccttggagaaaataaagctacaccagcagtctcaatgaaa

SEQ ID NO: 113914 - DNA, 72 bp, Homo sapiens
aaaatggccttttccttaagaagagccttggagaaaataaagctacaccagcagtctcaatgaaaagagaca

SEQ ID NO: 113915 - DNA, 75 bp, Homo sapiens
tttccttaagaagagccttggagaaaataaagctacaccagcagtctcaatgaaaagagacatctctgttgtcct

SEQ ID NO: 113916 - DNA, 79 bp, Homo sapiens
ccttggagaaaataaagctacaccagcagtctcaatgaaaagagacatctctgttgtccttgtgtgttcagatcaaaga

SEQ ID NO: 113917 - DNA, 81 bp, Homo sapiens
aaaataaagctacaccagcagtctcaatgaaaagagacatctctgttgtccttgtgtgttcagatcaaagacttagcatga

SEQ ID NO: 113918 - DNA, 81 bp, Homo sapiens
agtctcaatgaaaagagacatctctgttgtccttgtgtgttcagatcaaagacttagcatgacatcctgccccaactagcc

SEQ ID NO: 113919 - DNA, 79 bp, Homo sapiens
atctctgttgtccttgtgtgttcagatcaaagacttagcatgacatcctgccccaactagcctccatatttaaaatcaa

SEQ ID NO: 113920 - DNA, 73 bp, Homo sapiens
agatcaaagacttagcatgacatcctgccccaactagcctccatatttaaaatcaaaacttgttaagttgaat

SEQ ID NO: 113921 - DNA, 73 bp, Homo sapiens
aagacttagcatgacatcctgccccaactagcctccatatttaaaatcaaaacttgttaagttgaatttcata

SEQ ID NO: 113922 - DNA, 68 bp, Homo sapiens
gcctccatatttaaaatcaaaacttgttaagttgaatttcataaagggctctcgttctttttccacaa

SEQ ID NO: 113923 - DNA, 66 bp, Homo sapiens
aatcaaaacttgttaagttgaatttcataaagggctctcgttctttttccacaagggaaggaaggc

SEQ ID NO: 113924 - DNA, 68 bp, Homo sapiens
aacttgttaagttgaatttcataaagggctctcgttctttttccacaagggaaggaaggctgacctgc

SEQ ID NO: 113925 - DNA, 69 bp, Homo sapiens
atttcataaagggctctcgttctttttccacaagggaaggaaggctgacctgctggtgaaaagccctta

SEQ ID NO: 113926 - DNA, 67 bp, Homo sapiens
ataaagggctctcgttctttttccacaagggaaggaaggctgacctgctggtgaaaagcccttaggg

SEQ ID NO: 113927 - DNA, 69 bp, Homo sapiens
ttctttttccacaagggaaggaaggctgacctgctggtgaaaagcccttagggtggactgagttaccca

SEQ ID NO: 113928 - DNA, 73 bp, Homo sapiens
ttccacaagggaaggaaggctgacctgctggtgaaaagcccttagggtggactgagttacccactgctgtcca

SEQ ID NO: 113929 - DNA, 75 bp, Homo sapiens
aaggaaggctgacctgctggtgaaaagcccttagggtggactgagttacccactgctgtccatgcccatgtggga

SEQ ID NO: 113930 - DNA, 78 bp, Homo sapiens
tgctggtgaaaagcccttagggtggactgagttacccactgctgtccatgcccatgtgggatcctgcagctctaactt

SEQ ID NO: 113931 - DNA, 76 bp, Homo sapiens
aaaagcccttagggtggactgagttacccactgctgtccatgcccatgtgggatcctgcagctctaactttgccca

SEQ ID NO: 113932 - DNA, 80 bp, Homo sapiens
ttagggtggactgagttacccactgctgtccatgcccatgtgggatcctgcagctctaactttgcccaggctgtactctc

SEQ ID NO: 113933 - DNA, 80 bp, Homo sapiens
actgagttacccactgctgtccatgcccatgtgggatcctgcagctctaactttgcccaggctgtactctcggcctagac

SEQ ID NO: 113934 - DNA, 80 bp, Homo sapiens
tgctgtccatgcccatgtgggatcctgcagctctaactttgcccaggctgtactctcggcctagaccactcttccttctt

SEQ ID NO: 113935 - DNA, 77 bp, Homo sapiens
ccatgcccatgtgggatcctgcagctctaactttgcccaggctgtactctcggcctagaccactcttccttctttcc

SEQ ID NO: 113936 - DNA, 67 bp, Homo sapiens
ttccttctttcctttgttcccaacttcccctcccccaactcctgtgtccctctctccagggagcctc

SEQ ID NO: 113937 - DNA, 68 bp, Homo sapiens
tttcctttgttcccaacttcccctcccccaactcctgtgtccctctctccagggagcctcctgtaatg

SEQ ID NO: 113938 - DNA, 73 bp, Homo sapiens
caacttcccctcccccaactcctgtgtccctctctccagggagcctcctgtaatgtcctccagggcattgtga

SEQ ID NO: 113939 - DNA, 74 bp, Homo sapiens
tcccccaactcctgtgtccctctctccagggagcctcctgtaatgtcctccagggcattgtgacctctccctcc

SEQ ID NO: 113940 - DNA, 76 bp, Homo sapiens
aactcctgtgtccctctctccagggagcctcctgtaatgtcctccagggcattgtgacctctccctccctagagca

SEQ ID NO: 113941 - DNA, 78 bp, Homo sapiens
ctctctccagggagcctcctgtaatgtcctccagggcattgtgacctctccctccctagagcagacagcggttgactg

SEQ ID NO: 113942 - DNA, 79 bp, Homo sapiens
gagcctcctgtaatgtcctccagggcattgtgacctctccctccctagagcagacagcggttgactggctgccttctta

SEQ ID NO: 113943 - DNA, 79 bp, Homo sapiens
taatgtcctccagggcattgtgacctctccctccctagagcagacagcggttgactggctgccttcttagataactgaa

SEQ ID NO: 113944 - DNA, 80 bp, Homo sapiens
ctccagggcattgtgacctctccctccctagagcagacagcggttgactggctgccttcttagataactgaacattgata

SEQ ID NO: 113945 - DNA, 81 bp, Homo sapiens
tgacctctccctccctagagcagacagcggttgactggctgccttcttagataactgaacattgatagccaccattcagat

SEQ ID NO: 113946 - DNA, 81 bp, Homo sapiens
ctccctagagcagacagcggttgactggctgccttcttagataactgaacattgatagccaccattcagatttattgctta

SEQ ID NO: 113947 - DNA, 80 bp, Homo sapiens
agcagacagcggttgactggctgccttcttagataactgaacattgatagccaccattcagatttattgcttactttata

SEQ ID NO: 113948 - DNA, 80 bp, Homo sapiens
ttgactggctgccttcttagataactgaacattgatagccaccattcagatttattgcttactttatatggctgggcaaa

SEQ ID NO: 113949 - DNA, 79 bp, Homo sapiens
tgccttcttagataactgaacattgatagccaccattcagatttattgcttactttatatggctgggcaaagcacctta

SEQ ID NO: 113950 - DNA, 78 bp, Homo sapiens
ataactgaacattgatagccaccattcagatttattgcttactttatatggctgggcaaagcaccttacacagattaa

SEQ ID NO: 113951 - DNA, 76 bp, Homo sapiens
aacattgatagccaccattcagatttattgcttactttatatggctgggcaaagcaccttacacagattaattcgg

SEQ ID NO: 113952 - DNA, 76 bp, Homo sapiens
accattcagatttattgcttactttatatggctgggcaaagcaccttacacagattaattcggtccacacagctac

SEQ ID NO: 113953 - DNA, 74 bp, Homo sapiens
tactttatatggctgggcaaagcaccttacacagattaattcggtccacacagctaccttaataacaggtacta

SEQ ID NO: 113954 - DNA, 75 bp, Homo sapiens
gctgggcaaagcaccttacacagattaattcggtccacacagctaccttaataacaggtactattgcaatcctta

SEQ ID NO: 113955 - DNA, 75 bp, Homo sapiens
aaagcaccttacacagattaattcggtccacacagctaccttaataacaggtactattgcaatccttactctgca

SEQ ID NO: 113956 - DNA, 77 bp, Homo sapiens
ttacacagattaattcggtccacacagctaccttaataacaggtactattgcaatccttactctgcagatgaggaaa

SEQ ID NO: 113957 - DNA, 81 bp, Homo sapiens
aaaagaaagaaaaggccatcactgtgtcatctgagcacattccctgcacagacctcctgccattgctttctctaatagcag

SEQ ID NO: 113958 - DNA, 84 bp, Homo sapiens
aagaaaaggccatcactgtgtcatctgagcacattccctgcacagacctcctgccattgctttctctaatagcaggtgctctta

SEQ ID NO: 113959 - DNA, 87 bp, Homo sapiens
atcactgtgtcatctgagcacattccctgcacagacctcctgccattgctttctctaatagcaggtgctcttatgcctccagactct

SEQ ID NO: 113960 - DNA, 85 bp, Homo sapiens
atctgagcacattccctgcacagacctcctgccattgctttctctaatagcaggtgctcttatgcctccagactcttctctctag

SEQ ID NO: 113961 - DNA, 81 bp, Homo sapiens
acattccctgcacagacctcctgccattgctttctctaatagcaggtgctcttatgcctccagactcttctctctaggcct

SEQ ID NO: 113962 - DNA, 78 bp, Homo sapiens
cattgctttctctaatagcaggtgctcttatgcctccagactcttctctctaggccttgggctccttattaaagtctg

SEQ ID NO: 113963 - DNA, 77 bp, Homo sapiens
ctttctctaatagcaggtgctcttatgcctccagactcttctctctaggccttgggctccttattaaagtctgtgtg

SEQ ID NO: 113964 - DNA, 84 bp, Homo sapiens
tagcaggtgctcttatgcctccagactcttctctctaggccttgggctccttattaaagtctgtgtgtgcacagcggctgtgca

SEQ ID NO: 113965 - DNA, 81 bp, Homo sapiens
ttatgcctccagactcttctctctaggccttgggctccttattaaagtctgtgtgtgcacagcggctgtgcagccgtcctc

SEQ ID NO: 113966 - DNA, 81 bp, Homo sapiens
agactcttctctctaggccttgggctccttattaaagtctgtgtgtgcacagcggctgtgcagccgtcctctgtcccagca

SEQ ID NO: 113967 - DNA, 83 bp, Homo sapiens
taggccttgggctccttattaaagtctgtgtgtgcacagcggctgtgcagccgtcctctgtcccagcatctcaccaggcttga

SEQ ID NO: 113968 - DNA, 84 bp, Homo sapiens
gctccttattaaagtctgtgtgtgcacagcggctgtgcagccgtcctctgtcccagcatctcaccaggcttgatttctcagtaa

SEQ ID NO: 113969 - DNA, 82 bp, Homo sapiens
ttattaaagtctgtgtgtgcacagcggctgtgcagccgtcctctgtcccagcatctcaccaggcttgatttctcagtaaagg

SEQ ID NO: 113970 - DNA, 83 bp, Homo sapiens
ctgtgtgtgcacagcggctgtgcagccgtcctctgtcccagcatctcaccaggcttgatttctcagtaaagggctacatattt

SEQ ID NO: 113971 - DNA, 84 bp, Homo sapiens
tgtgtgtgcacagcggctgtgcagccgtcctctgtcccagcatctcaccaggcttgatttctcagtaaagggctacatattttc

SEQ ID NO: 113972 - DNA, 86 bp, Homo sapiens
tgtgcacagcggctgtgcagccgtcctctgtcccagcatctcaccaggcttgatttctcagtaaagggctacatattttctgagca

SEQ ID NO: 113973 - DNA, 82 bp, Homo sapiens
ggctgtgcagccgtcctctgtcccagcatctcaccaggcttgatttctcagtaaagggctacatattttctgagcacatctt

SEQ ID NO: 113974 - DNA, 82 bp, Homo sapiens
tgcagccgtcctctgtcccagcatctcaccaggcttgatttctcagtaaagggctacatattttctgagcacatctttcgga

SEQ ID NO: 113975 - DNA, 79 bp, Homo sapiens
ccgtcctctgtcccagcatctcaccaggcttgatttctcagtaaagggctacatattttctgagcacatctttcggatc

SEQ ID NO: 113976 - DNA, 79 bp, Homo sapiens
ctctgtcccagcatctcaccaggcttgatttctcagtaaagggctacatattttctgagcacatctttcggatctattt

SEQ ID NO: 113977 - DNA, 81 bp, Homo sapiens
gcatctcaccaggcttgatttctcagtaaagggctacatattttctgagcacatctttcggatctattttgagagaatgta

SEQ ID NO: 113978 - DNA, 79 bp, Homo sapiens
atctcaccaggcttgatttctcagtaaagggctacatattttctgagcacatctttcggatctattttgagagaatgta

SEQ ID NO: 113979 - DNA, 78 bp, Homo sapiens
tttctcagtaaagggctacatattttctgagcacatctttcggatctattttgagagaatgtaggaacgtctcagcta

SEQ ID NO: 113980 - DNA, 78 bp, Homo sapiens
acatattttctgagcacatctttcggatctattttgagagaatgtaggaacgtctcagctactcatttgctttcaaaa

SEQ ID NO: 113981 - DNA, 76 bp, Homo sapiens
acatctttcggatctattttgagagaatgtaggaacgtctcagctactcatttgctttcaaaagctcagaaaggct

SEQ ID NO: 113982 - DNA, 76 bp, Homo sapiens
aatgtaggaacgtctcagctactcatttgctttcaaaagctcagaaaggcttcttgccattcagaatcgggtcagt

SEQ ID NO: 113983 - DNA, 77 bp, Homo sapiens
tttgctttcaaaagctcagaaaggcttcttgccattcagaatcgggtcagttgctgtttccaaaggtgcttctgcta

SEQ ID NO: 113984 - DNA, 76 bp, Homo sapiens
ttcaaaagctcagaaaggcttcttgccattcagaatcgggtcagttgctgtttccaaaggtgcttctgctactggt

SEQ ID NO: 113985 - DNA, 77 bp, Homo sapiens
agaaaggcttcttgccattcagaatcgggtcagttgctgtttccaaaggtgcttctgctactggttgctccatgccc

SEQ ID NO: 113986 - DNA, 78 bp, Homo sapiens
ttcttgccattcagaatcgggtcagttgctgtttccaaaggtgcttctgctactggttgctccatgcccctgtactcg

SEQ ID NO: 113987 - DNA, 79 bp, Homo sapiens
agaatcgggtcagttgctgtttccaaaggtgcttctgctactggttgctccatgcccctgtactcggtgtgtgagcagc

SEQ ID NO: 113988 - DNA, 80 bp, Homo sapiens
ttgctgtttccaaaggtgcttctgctactggttgctccatgcccctgtactcggtgtgtgagcagctgtggggcctccta

SEQ ID NO: 113989 - DNA, 79 bp, Homo sapiens
tttccaaaggtgcttctgctactggttgctccatgcccctgtactcggtgtgtgagcagctgtggggcctcctacagcc

SEQ ID NO: 113990 - DNA, 76 bp, Homo sapiens
cttctgctactggttgctccatgcccctgtactcggtgtgtgagcagctgtggggcctcctacagccccctaaacc

SEQ ID NO: 113991 - DNA, 74 bp, Homo sapiens
gttgctccatgcccctgtactcggtgtgtgagcagctgtggggcctcctacagccccctaaaccccactaataa

SEQ ID NO: 113992 - DNA, 72 bp, Homo sapiens
atgcccctgtactcggtgtgtgagcagctgtggggcctcctacagccccctaaaccccactaataaagtcag

SEQ ID NO: 113993 - DNA, 73 bp, Homo sapiens
tcggtgtgtgagcagctgtggggcctcctacagccccctaaaccccactaataaagtcagtctgaagtacaaa

SEQ ID NO: 113994 - DNA, 71 bp, Homo sapiens
agcagctgtggggcctcctacagccccctaaaccccactaataaagtcagtctgaagtacaaagacaatcc

SEQ ID NO: 113995 - DNA, 68 bp, Homo sapiens
gggcctcctacagccccctaaaccccactaataaagtcagtctgaagtacaaagacaatcctccccaa

SEQ ID NO: 113996 - DNA, 70 bp, Homo sapiens
tcctacagccccctaaaccccactaataaagtcagtctgaagtacaaagacaatcctccccaagaaagca

SEQ ID NO: 113997 - DNA, 72 bp, Homo sapiens
gtctgaagtacaaagacaatcctccccaagaaagcagagccaagaggaggtttctttggggcggctgccatt

SEQ ID NO: 113998 - DNA, 71 bp, Homo sapiens
aaagacaatcctccccaagaaagcagagccaagaggaggtttctttggggcggctgccatttgctctttta

SEQ ID NO: 113999 - DNA, 70 bp, Homo sapiens
ctccccaagaaagcagagccaagaggaggtttctttggggcggctgccatttgctcttttaacacttaaa

SEQ ID NO: 114000 - DNA, 70 bp, Homo sapiens
aaagcagagccaagaggaggtttctttggggcggctgccatttgctcttttaacacttaaacatttcaaa

SEQ ID NO: 114001 - DNA, 67 bp, Homo sapiens
aagaggaggtttctttggggcggctgccatttgctcttttaacacttaaacatttcaaaattactcg

SEQ ID NO: 114002 - DNA, 71 bp, Homo sapiens
gccatttgctcttttaacacttaaacatttcaaaattactcgtcattttctacagtttcttagcgtgcaaa

SEQ ID NO: 114003 - DNA, 73 bp, Homo sapiens
acatttcaaaattactcgtcattttctacagtttcttagcgtgcaaaaagtctaaatggcaaaggcatgattg

SEQ ID NO: 114004 - DNA, 72 bp, Homo sapiens
aaaattactcgtcattttctacagtttcttagcgtgcaaaaagtctaaatggcaaaggcatgattgtgagtt

SEQ ID NO: 114005 - DNA, 75 bp, Homo sapiens
ttttctacagtttcttagcgtgcaaaaagtctaaatggcaaaggcatgattgtgagtttagatagttttatcaca

SEQ ID NO: 114006 - DNA, 74 bp, Homo sapiens
tacagtttcttagcgtgcaaaaagtctaaatggcaaaggcatgattgtgagtttagatagttttatcacacctt

SEQ ID NO: 114007 - DNA, 70 bp, Homo sapiens
agcgtgcaaaaagtctaaatggcaaaggcatgattgtgagtttagatagttttatcacaccttttttttt

SEQ ID NO: 114008 - DNA, 70 bp, Homo sapiens
aagtctaaatggcaaaggcatgattgtgagtttagatagttttatcacaccttttttttttatagtttca

SEQ ID NO: 114009 - DNA, 72 bp, Homo sapiens
gcaaaggcatgattgtgagtttagatagttttatcacaccttttttttttatagtttcaaaatgtgtgggca

SEQ ID NO: 114010 - DNA, 72 bp, Homo sapiens
tgtgagtttagatagttttatcacaccttttttttttatagtttcaaaatgtgtgggcagtttcagatgtga

SEQ ID NO: 114011 - DNA, 75 bp, Homo sapiens
aaaggaggaactacagtctgattctttaacatccaagagagcagccaggatgccccatcccacagtttccttgtg

SEQ ID NO: 114012 - DNA, 76 bp, Homo sapiens
ctacagtctgattctttaacatccaagagagcagccaggatgccccatcccacagtttccttgtgggccagggtgg

SEQ ID NO: 114013 - DNA, 74 bp, Homo sapiens
attctttaacatccaagagagcagccaggatgccccatcccacagtttccttgtgggccagggtgggtcagatt

SEQ ID NO: 114014 - DNA, 75 bp, Homo sapiens
agagagcagccaggatgccccatcccacagtttccttgtgggccagggtgggtcagatttgctaagacccactgt

SEQ ID NO: 114015 - DNA, 72 bp, Homo sapiens
caggatgccccatcccacagtttccttgtgggccagggtgggtcagatttgctaagacccactgttagggac

SEQ ID NO: 114016 - DNA, 75 bp, Homo sapiens
catcccacagtttccttgtgggccagggtgggtcagatttgctaagacccactgttagggactgcagtatgtctc

SEQ ID NO: 114017 - DNA, 73 bp, Homo sapiens
tttccttgtgggccagggtgggtcagatttgctaagacccactgttagggactgcagtatgtctccctagaat

SEQ ID NO: 114018 - DNA, 75 bp, Homo sapiens
ggccagggtgggtcagatttgctaagacccactgttagggactgcagtatgtctccctagaattaatacattgaa

SEQ ID NO: 114019 - DNA, 75 bp, Homo sapiens
gtgggtcagatttgctaagacccactgttagggactgcagtatgtctccctagaattaatacattgaagtcctaa

SEQ ID NO: 114020 - DNA, 72 bp, Homo sapiens
atttgctaagacccactgttagggactgcagtatgtctccctagaattaatacattgaagtcctaaccccaa

SEQ ID NO: 114021 - DNA, 74 bp, Homo sapiens
actgttagggactgcagtatgtctccctagaattaatacattgaagtcctaaccccaaggtgctcataatttga

SEQ ID NO: 114022 - DNA, 75 bp, Homo sapiens
actgcagtatgtctccctagaattaatacattgaagtcctaaccccaaggtgctcataatttgacactatttgga

SEQ ID NO: 114023 - DNA, 74 bp, Homo sapiens
agtatgtctccctagaattaatacattgaagtcctaaccccaaggtgctcataatttgacactatttggacata

SEQ ID NO: 114024 - DNA, 71 bp, Homo sapiens
ctagaattaatacattgaagtcctaaccccaaggtgctcataatttgacactatttggacatagggtttta

SEQ ID NO: 114025 - DNA, 71 bp, Homo sapiens
ttgaagtcctaaccccaaggtgctcataatttgacactatttggacatagggttttaaaatgacgtcatta

SEQ ID NO: 114026 - DNA, 71 bp, Homo sapiens
gtcctaaccccaaggtgctcataatttgacactatttggacatagggttttaaaatgacgtcattaggcta

SEQ ID NO: 114027 - DNA, 72 bp, Homo sapiens
aaggtgctcataatttgacactatttggacatagggttttaaaatgacgtcattaggctagccccaatacaa

SEQ ID NO: 114028 - DNA, 72 bp, Homo sapiens
actatttggacatagggttttaaaatgacgtcattaggctagccccaatacaatgcaattggtatccttata

SEQ ID NO: 114029 - DNA, 78 bp, Homo sapiens
taaaatgacgtcattaggctagccccaatacaatgcaattggtatccttataagaagagattaggatacagacacaca

SEQ ID NO: 114030 - DNA, 80 bp, Homo sapiens
tataagaagagattaggatacagacacacacagagggataaccatgtgatgaaacagggagaagggagctgtctgcaaaa

SEQ ID NO: 114031 - DNA, 78 bp, Homo sapiens
aagagattaggatacagacacacacagagggataaccatgtgatgaaacagggagaagggagctgtctgcaaaaccaa

SEQ ID NO: 114032 - DNA, 78 bp, Homo sapiens
attaggatacagacacacacagagggataaccatgtgatgaaacagggagaagggagctgtctgcaaaaccaaggaga

SEQ ID NO: 114033 - DNA, 79 bp, Homo sapiens
ttaggatacagacacacacagagggataaccatgtgatgaaacagggagaagggagctgtctgcaaaaccaaggagaga

SEQ ID NO: 114034 - DNA, 78 bp, Homo sapiens
agacacacacagagggataaccatgtgatgaaacagggagaagggagctgtctgcaaaaccaaggagagaggcctcac

SEQ ID NO: 114035 - DNA, 78 bp, Homo sapiens
acacacagagggataaccatgtgatgaaacagggagaagggagctgtctgcaaaaccaaggagagaggcctcaccaga

SEQ ID NO: 114036 - DNA, 77 bp, Homo sapiens
acacagagggataaccatgtgatgaaacagggagaagggagctgtctgcaaaaccaaggagagaggcctcaccagaa

SEQ ID NO: 114037 - DNA, 79 bp, Homo sapiens
gataaccatgtgatgaaacagggagaagggagctgtctgcaaaaccaaggagagaggcctcaccagaaatcagccttgc

SEQ ID NO: 114038 - DNA, 79 bp, Homo sapiens
ccatgtgatgaaacagggagaagggagctgtctgcaaaaccaaggagagaggcctcaccagaaatcagccttgccgaca

SEQ ID NO: 114039 - DNA, 79 bp, Homo sapiens
catgtgatgaaacagggagaagggagctgtctgcaaaaccaaggagagaggcctcaccagaaatcagccttgccgacac

SEQ ID NO: 114040 - DNA, 79 bp, Homo sapiens
aaggagagaggcctcaccagaaatcagccttgccgacaccttgatctcacacctccagtctccctccagaactgtgtga

SEQ ID NO: 114041 - DNA, 77 bp, Homo sapiens
gcctcaccagaaatcagccttgccgacaccttgatctcacacctccagtctccctccagaactgtgtgaaaataaat

SEQ ID NO: 114042 - DNA, 75 bp, Homo sapiens
accagaaatcagccttgccgacaccttgatctcacacctccagtctccctccagaactgtgtgaaaataaatttc

SEQ ID NO: 114043 - DNA, 76 bp, Homo sapiens
tccagaactgtgtgaaaataaatttctgtggcttaagcctgaagtcttaagatcttaagtgttcagtcaagccaga

SEQ ID NO: 114044 - DNA, 74 bp, Homo sapiens
atttctgtggcttaagcctgaagtcttaagatcttaagtgttcagtcaagccagaagaagtgtcttaataaata

SEQ ID NO: 114045 - DNA, 75 bp, Homo sapiens
gcttaagcctgaagtcttaagatcttaagtgttcagtcaagccagaagaagtgtcttaataaatattcttctgaa

SEQ ID NO: 114046 - DNA, 74 bp, Homo sapiens
aagtcttaagatcttaagtgttcagtcaagccagaagaagtgtcttaataaatattcttctgaaaagagcggca

SEQ ID NO: 114047 - DNA, 76 bp, Homo sapiens
atcttaagtgttcagtcaagccagaagaagtgtcttaataaatattcttctgaaaagagcggcaagccgatgctta

SEQ ID NO: 114048 - DNA, 76 bp, Homo sapiens
aagtgttcagtcaagccagaagaagtgtcttaataaatattcttctgaaaagagcggcaagccgatgcttagagaa

SEQ ID NO: 114049 - DNA, 75 bp, Homo sapiens
ccagaagaagtgtcttaataaatattcttctgaaaagagcggcaagccgatgcttagagaagaacatactttata

SEQ ID NO: 114050 - DNA, 79 bp, Homo sapiens
tgtcttaataaatattcttctgaaaagagcggcaagccgatgcttagagaagaacatactttatacatgcagctttgta

SEQ ID NO: 114051 - DNA, 78 bp, Homo sapiens
taataaatattcttctgaaaagagcggcaagccgatgcttagagaagaacatactttatacatgcagctttgtacttg

SEQ ID NO: 114052 - DNA, 78 bp, Homo sapiens
tgaaaagagcggcaagccgatgcttagagaagaacatactttatacatgcagctttgtacttggcaattccctttgaa

SEQ ID NO: 114053 - DNA, 79 bp, Homo sapiens
ggcaagccgatgcttagagaagaacatactttatacatgcagctttgtacttggcaattccctttgaaagactgcttca

SEQ ID NO: 114054 - DNA, 77 bp, Homo sapiens
ccgatgcttagagaagaacatactttatacatgcagctttgtacttggcaattccctttgaaagactgcttcagtgg

SEQ ID NO: 114055 - DNA, 72 bp, Homo sapiens
aagaacatactttatacatgcagctttgtacttggcaattccctttgaaagactgcttcagtggggtaaact

SEQ ID NO: 114056 - DNA, 72 bp, Homo sapiens
atactttatacatgcagctttgtacttggcaattccctttgaaagactgcttcagtggggtaaacttgaacc

SEQ ID NO: 114057 - DNA, 74 bp, Homo sapiens
atgcagctttgtacttggcaattccctttgaaagactgcttcagtggggtaaacttgaaccgctgagaagacaa

SEQ ID NO: 114058 - DNA, 73 bp, Homo sapiens
tgtacttggcaattccctttgaaagactgcttcagtggggtaaacttgaaccgctgagaagacaagcagggag

SEQ ID NO: 114059 - DNA, 71 bp, Homo sapiens
aattccctttgaaagactgcttcagtggggtaaacttgaaccgctgagaagacaagcagggagtcggtctc

SEQ ID NO: 114060 - DNA, 72 bp, Homo sapiens
ttcagtggggtaaacttgaaccgctgagaagacaagcagggagtcggtctcgctgagatttttacctgtggt

SEQ ID NO: 114061 - DNA, 74 bp, Homo sapiens
taaacttgaaccgctgagaagacaagcagggagtcggtctcgctgagatttttacctgtggttctaggaacgca

SEQ ID NO: 114062 - DNA, 76 bp, Homo sapiens
acaagcagggagtcggtctcgctgagatttttacctgtggttctaggaacgcagaggcatgtgagtgttcaggctt

SEQ ID NO: 114063 - DNA, 79 bp, Homo sapiens
tcggtctcgctgagatttttacctgtggttctaggaacgcagaggcatgtgagtgttcaggctttgcatagaccactaa

SEQ ID NO: 114064 - DNA, 77 bp, Homo sapiens
agatttttacctgtggttctaggaacgcagaggcatgtgagtgttcaggctttgcatagaccactaagccacttcta

SEQ ID NO: 114065 - DNA, 78 bp, Homo sapiens
ttacctgtggttctaggaacgcagaggcatgtgagtgttcaggctttgcatagaccactaagccacttctaagaacaa

SEQ ID NO: 114066 - DNA, 79 bp, Homo sapiens
gttctaggaacgcagaggcatgtgagtgttcaggctttgcatagaccactaagccacttctaagaacaaggctacctga

SEQ ID NO: 114067 - DNA, 78 bp, Homo sapiens
aggcatgtgagtgttcaggctttgcatagaccactaagccacttctaagaacaaggctacctgagccattttgcaaaa

SEQ ID NO: 114068 - DNA, 76 bp, Homo sapiens
agtgttcaggctttgcatagaccactaagccacttctaagaacaaggctacctgagccattttgcaaaaatatgta

SEQ ID NO: 114069 - DNA, 75 bp, Homo sapiens
ctttgcatagaccactaagccacttctaagaacaaggctacctgagccattttgcaaaaatatgtacgtgccgag

SEQ ID NO: 114070 - DNA, 73 bp, Homo sapiens
tagaccactaagccacttctaagaacaaggctacctgagccattttgcaaaaatatgtacgtgccgaggcttt

SEQ ID NO: 114071 - DNA, 71 bp, Homo sapiens
taagaacaaggctacctgagccattttgcaaaaatatgtacgtgccgaggcttttcctccccacacctacc

SEQ ID NO: 114072 - DNA, 71 bp, Homo sapiens
ctacctgagccattttgcaaaaatatgtacgtgccgaggcttttcctccccacacctacctcaactctttc

SEQ ID NO: 114073 - DNA, 74 bp, Homo sapiens
ttttgcaaaaatatgtacgtgccgaggcttttcctccccacacctacctcaactctttctgccgacacactgca

SEQ ID NO: 114074 - DNA, 71 bp, Homo sapiens
aaaatatgtacgtgccgaggcttttcctccccacacctacctcaactctttctgccgacacactgcacttt

SEQ ID NO: 114075 - DNA, 70 bp, Homo sapiens
cgaggcttttcctccccacacctacctcaactctttctgccgacacactgcacttttcaagggaacccaa

SEQ ID NO: 114076 - DNA, 69 bp, Homo sapiens
ttttcctccccacacctacctcaactctttctgccgacacactgcacttttcaagggaacccaagtttg

SEQ ID NO: 114077 - DNA, 70 bp, Homo sapiens
cacttttcaagggaacccaagtttgggttcggcaagaattgtacgttgcacaccgtgtgtgataattcca

SEQ ID NO: 114078 - DNA, 68 bp, Homo sapiens
agggaacccaagtttgggttcggcaagaattgtacgttgcacaccgtgtgtgataattccagggaatt

SEQ ID NO: 114079 - DNA, 74 bp, Homo sapiens
aattgtacgttgcacaccgtgtgtgataattccagggaatttcaatcgcatcttgtcttccttcctaagcaaat

SEQ ID NO: 114080 - DNA, 72 bp, Homo sapiens
acaccgtgtgtgataattccagggaatttcaatcgcatcttgtcttccttcctaagcaaattcggtgggaac

SEQ ID NO: 114081 - DNA, 74 bp, Homo sapiens
tgtgtgataattccagggaatttcaatcgcatcttgtcttccttcctaagcaaattcggtgggaacctggtgtg

SEQ ID NO: 114082 - DNA, 72 bp, Homo sapiens
agggaatttcaatcgcatcttgtcttccttcctaagcaaattcggtgggaacctggtgtggtgtgatagaaa

SEQ ID NO: 114083 - DNA, 72 bp, Homo sapiens
tttcaatcgcatcttgtcttccttcctaagcaaattcggtgggaacctggtgtggtgtgatagaaaaagccc

SEQ ID NO: 114084 - DNA, 70 bp, Homo sapiens
ttgtcttccttcctaagcaaattcggtgggaacctggtgtggtgtgatagaaaaagccccgagttctctg

SEQ ID NO: 114085 - DNA, 71 bp, Homo sapiens
ttcctaagcaaattcggtgggaacctggtgtggtgtgatagaaaaagccccgagttctctgtggtagacca

SEQ ID NO: 114086 - DNA, 78 bp, Homo sapiens
aacctggtgtggtgtgatagaaaaagccccgagttctctgtggtagaccacatcaatttcatgtgccagtctctcaga

SEQ ID NO: 114087 - DNA, 80 bp, Homo sapiens
tgtgatagaaaaagccccgagttctctgtggtagaccacatcaatttcatgtgccagtctctcagactccggcttgcctc

SEQ ID NO: 114088 - DNA, 78 bp, Homo sapiens
aaaaagccccgagttctctgtggtagaccacatcaatttcatgtgccagtctctcagactccggcttgcctctctcaa

SEQ ID NO: 114089 - DNA, 79 bp, Homo sapiens
agttctctgtggtagaccacatcaatttcatgtgccagtctctcagactccggcttgcctctctcaaggaagggaacaa

SEQ ID NO: 114090 - DNA, 79 bp, Homo sapiens
tggtagaccacatcaatttcatgtgccagtctctcagactccggcttgcctctctcaaggaagggaacaatggtttgct

SEQ ID NO: 114091 - DNA, 79 bp, Homo sapiens
acatcaatttcatgtgccagtctctcagactccggcttgcctctctcaaggaagggaacaatggtttgcttggcttcac

SEQ ID NO: 114092 - DNA, 74 bp, Homo sapiens
agtctctcagactccggcttgcctctctcaaggaagggaacaatggtttgcttggcttcactcctctctttccc

SEQ ID NO: 114093 - DNA, 72 bp, Homo sapiens
ggcttgcctctctcaaggaagggaacaatggtttgcttggcttcactcctctctttccccccaatttccaca

SEQ ID NO: 114094 - DNA, 72 bp, Homo sapiens
tctcaaggaagggaacaatggtttgcttggcttcactcctctctttccccccaatttccacatgggtatctg

SEQ ID NO: 114095 - DNA, 70 bp, Homo sapiens
gggaacaatggtttgcttggcttcactcctctctttccccccaatttccacatgggtatctggctaaaaa

SEQ ID NO: 114096 - DNA, 71 bp, Homo sapiens
aatggtttgcttggcttcactcctctctttccccccaatttccacatgggtatctggctaaaaatgagtta

SEQ ID NO: 114097 - DNA, 69 bp, Homo sapiens
cttcactcctctctttccccccaatttccacatgggtatctggctaaaaatgagttacaggtttccttc

SEQ ID NO: 114098 - DNA, 73 bp, Homo sapiens
tctctttccccccaatttccacatgggtatctggctaaaaatgagttacaggtttccttctgtgagaattgca

SEQ ID NO: 114099 - DNA, 75 bp, Homo sapiens
ccaatttccacatgggtatctggctaaaaatgagttacaggtttccttctgtgagaattgcatggactgataaag

SEQ ID NO: 114100 - DNA, 77 bp, Homo sapiens
ttccacatgggtatctggctaaaaatgagttacaggtttccttctgtgagaattgcatggactgataaagtaccatc

SEQ ID NO: 114101 - DNA, 74 bp, Homo sapiens
tggctaaaaatgagttacaggtttccttctgtgagaattgcatggactgataaagtaccatcccaggaagaaaa

SEQ ID NO: 114102 - DNA, 72 bp, Homo sapiens
aaaaatgagttacaggtttccttctgtgagaattgcatggactgataaagtaccatcccaggaagaaaacaa

SEQ ID NO: 114103 - DNA, 74 bp, Homo sapiens
gtttccttctgtgagaattgcatggactgataaagtaccatcccaggaagaaaacaaagatgctgtcttccctt

SEQ ID NO: 114104 - DNA, 78 bp, Homo sapiens
ttctgtgagaattgcatggactgataaagtaccatcccaggaagaaaacaaagatgctgtcttccctttcggctcaca

SEQ ID NO: 114105 - DNA, 75 bp, Homo sapiens
aattgcatggactgataaagtaccatcccaggaagaaaacaaagatgctgtcttccctttcggctcacagttgcc

SEQ ID NO: 114106 - DNA, 71 bp, Homo sapiens
aaaacaaagatgctgtcttccctttcggctcacagttgccgttggggagggaacacacgctgtaaattata

SEQ ID NO: 114107 - DNA, 78 bp, Homo sapiens
tcacagttgccgttggggagggaacacacgctgtaaattataggcagccagaagtgaccgcattgaccactgcgagtg

SEQ ID NO: 114108 - DNA, 80 bp, Homo sapiens
ggagggaacacacgctgtaaattataggcagccagaagtgaccgcattgaccactgcgagtggcccagctatggcaacag

SEQ ID NO: 114109 - DNA, 82 bp, Homo sapiens
acgctgtaaattataggcagccagaagtgaccgcattgaccactgcgagtggcccagctatggcaacaggctgagaactctg

SEQ ID NO: 114110 - DNA, 82 bp, Homo sapiens
attataggcagccagaagtgaccgcattgaccactgcgagtggcccagctatggcaacaggctgagaactctgggggagagc

SEQ ID NO: 114111 - DNA, 81 bp, Homo sapiens
agaagtgaccgcattgaccactgcgagtggcccagctatggcaacaggctgagaactctgggggagagccatttgttggca

SEQ ID NO: 114112 - DNA, 80 bp, Homo sapiens
actgcgagtggcccagctatggcaacaggctgagaactctgggggagagccatttgttggcagggatggtgattcttcta

SEQ ID NO: 114113 - DNA, 83 bp, Homo sapiens
cagctatggcaacaggctgagaactctgggggagagccatttgttggcagggatggtgattcttctagcatcaagctctaaga

SEQ ID NO: 114114 - DNA, 82 bp, Homo sapiens
aacaggctgagaactctgggggagagccatttgttggcagggatggtgattcttctagcatcaagctctaagatgatgacca

SEQ ID NO: 114115 - DNA, 79 bp, Homo sapiens
gaactctgggggagagccatttgttggcagggatggtgattcttctagcatcaagctctaagatgatgaccaaacggta

SEQ ID NO: 114116 - DNA, 79 bp, Homo sapiens
ggagagccatttgttggcagggatggtgattcttctagcatcaagctctaagatgatgaccaaacggtatcaaaagaaa

SEQ ID NO: 114117 - DNA, 78 bp, Homo sapiens
atttgttggcagggatggtgattcttctagcatcaagctctaagatgatgaccaaacggtatcaaaagaaatgatatt

SEQ ID NO: 114118 - DNA, 77 bp, Homo sapiens
attcttctagcatcaagctctaagatgatgaccaaacggtatcaaaagaaatgatattttgctacctctccggcttg

SEQ ID NO: 114119 - DNA, 77 bp, Homo sapiens
atcaagctctaagatgatgaccaaacggtatcaaaagaaatgatattttgctacctctccggcttgggtgaatgatg

SEQ ID NO: 114120 - DNA, 76 bp, Homo sapiens
agatgatgaccaaacggtatcaaaagaaatgatattttgctacctctccggcttgggtgaatgatgtggacagtta

SEQ ID NO: 114121 - DNA, 73 bp, Homo sapiens
tcaaaagaaatgatattttgctacctctccggcttgggtgaatgatgtggacagttaacctggacaatttaaa

SEQ ID NO: 114122 - DNA, 71 bp, Homo sapiens
aatgatattttgctacctctccggcttgggtgaatgatgtggacagttaacctggacaatttaaaccttta

SEQ ID NO: 114123 - DNA, 73 bp, Homo sapiens
tttgctacctctccggcttgggtgaatgatgtggacagttaacctggacaatttaaacctttatgttgatgga

SEQ ID NO: 114124 - DNA, 75 bp, Homo sapiens
gcttgggtgaatgatgtggacagttaacctggacaatttaaacctttatgttgatggatcacttggatgaaatta

SEQ ID NO: 114125 - DNA, 70 bp, Homo sapiens
gtggacagttaacctggacaatttaaacctttatgttgatggatcacttggatgaaattaaccaggaaat

SEQ ID NO: 114126 - DNA, 72 bp, Homo sapiens
acctggacaatttaaacctttatgttgatggatcacttggatgaaattaaccaggaaattgccaagatttca

SEQ ID NO: 114127 - DNA, 71 bp, Homo sapiens
atttaaacctttatgttgatggatcacttggatgaaattaaccaggaaattgccaagatttcacttggccc

SEQ ID NO: 114128 - DNA, 79 bp, Homo sapiens
ttgatggatcacttggatgaaattaaccaggaaattgccaagatttcacttggccctctgacatcaaatctcaatatta

SEQ ID NO: 114129 - DNA, 77 bp, Homo sapiens
atcacttggatgaaattaaccaggaaattgccaagatttcacttggccctctgacatcaaatctcaatattatatta

SEQ ID NO: 114130 - DNA, 75 bp, Homo sapiens
gatgaaattaaccaggaaattgccaagatttcacttggccctctgacatcaaatctcaatattatattaccaaat

SEQ ID NO: 114131 - DNA, 76 bp, Homo sapiens
accaggaaattgccaagatttcacttggccctctgacatcaaatctcaatattatattaccaaattagagattcta

SEQ ID NO: 114132 - DNA, 75 bp, Homo sapiens
caagatttcacttggccctctgacatcaaatctcaatattatattaccaaattagagattctaaagaaccctgag

SEQ ID NO: 114133 - DNA, 74 bp, Homo sapiens
tcacttggccctctgacatcaaatctcaatattatattaccaaattagagattctaaagaaccctgagttcctt

SEQ ID NO: 114134 - DNA, 74 bp, Homo sapiens
ctctgacatcaaatctcaatattatattaccaaattagagattctaaagaaccctgagttcctttcactgaaag

SEQ ID NO: 114135 - DNA, 71 bp, Homo sapiens
ctcaatattatattaccaaattagagattctaaagaaccctgagttcctttcactgaaaggaaggagtgga

SEQ ID NO: 114136 - DNA, 67 bp, Homo sapiens
tattaccaaattagagattctaaagaaccctgagttcctttcactgaaaggaaggagtggaaaaacc

SEQ ID NO: 114137 - DNA, 66 bp, Homo sapiens
aaattagagattctaaagaaccctgagttcctttcactgaaaggaaggagtggaaaaacctttcca

SEQ ID NO: 114138 - DNA, 68 bp, Homo sapiens
taaagaaccctgagttcctttcactgaaaggaaggagtggaaaaacctttccagatgatcccttttga

SEQ ID NO: 114139 - DNA, 68 bp, Homo sapiens
accctgagttcctttcactgaaaggaaggagtggaaaaacctttccagatgatcccttttgagtcttg

SEQ ID NO: 114140 - DNA, 72 bp, Homo sapiens
tttcactgaaaggaaggagtggaaaaacctttccagatgatcccttttgagtcttggtgcgagctcaggccc

SEQ ID NO: 114141 - DNA, 70 bp, Homo sapiens
aaaggaaggagtggaaaaacctttccagatgatcccttttgagtcttggtgcgagctcaggccctcccta

SEQ ID NO: 114142 - DNA, 72 bp, Homo sapiens
aaaaacctttccagatgatcccttttgagtcttggtgcgagctcaggccctccctacactgcctccgtgaaa

SEQ ID NO: 114143 - DNA, 75 bp, Homo sapiens
tttccagatgatcccttttgagtcttggtgcgagctcaggccctccctacactgcctccgtgaaagctaaccgac

SEQ ID NO: 114144 - DNA, 72 bp, Homo sapiens
cttttgagtcttggtgcgagctcaggccctccctacactgcctccgtgaaagctaaccgacccttgttccta

SEQ ID NO: 114145 - DNA, 71 bp, Homo sapiens
agtcttggtgcgagctcaggccctccctacactgcctccgtgaaagctaaccgacccttgttcctaaccta

SEQ ID NO: 114146 - DNA, 73 bp, Homo sapiens
ctcaggccctccctacactgcctccgtgaaagctaaccgacccttgttcctaacctagcgcaggtcagctgag

SEQ ID NO: 114147 - DNA, 74 bp, Homo sapiens
tccctacactgcctccgtgaaagctaaccgacccttgttcctaacctagcgcaggtcagctgagtgtccatcgg

SEQ ID NO: 114148 - DNA, 75 bp, Homo sapiens
actgcctccgtgaaagctaaccgacccttgttcctaacctagcgcaggtcagctgagtgtccatcgggcacagga

SEQ ID NO: 114149 - DNA, 73 bp, Homo sapiens
aaagctaaccgacccttgttcctaacctagcgcaggtcagctgagtgtccatcgggcacaggagccctgggct

SEQ ID NO: 114150 - DNA, 75 bp, Homo sapiens
acccttgttcctaacctagcgcaggtcagctgagtgtccatcgggcacaggagccctgggcttgtccgggagata

SEQ ID NO: 114151 - DNA, 80 bp, Homo sapiens
taacctagcgcaggtcagctgagtgtccatcgggcacaggagccctgggcttgtccgggagatagccagactcctgctat

SEQ ID NO: 114152 - DNA, 82 bp, Homo sapiens
tagcgcaggtcagctgagtgtccatcgggcacaggagccctgggcttgtccgggagatagccagactcctgctatttcctga

SEQ ID NO: 114153 - DNA, 84 bp, Homo sapiens
ctgagtgtccatcgggcacaggagccctgggcttgtccgggagatagccagactcctgctatttcctgatgtctgcatagctca

SEQ ID NO: 114154 - DNA, 82 bp, Homo sapiens
atcgggcacaggagccctgggcttgtccgggagatagccagactcctgctatttcctgatgtctgcatagctcagcgtgtcc

SEQ ID NO: 114155 - DNA, 83 bp, Homo sapiens
ttgtccgggagatagccagactcctgctatttcctgatgtctgcatagctcagcgtgtccctcaccatctttgccgttggcca

SEQ ID NO: 114156 - DNA, 83 bp, Homo sapiens
agatagccagactcctgctatttcctgatgtctgcatagctcagcgtgtccctcaccatctttgccgttggccagtaaggaga

SEQ ID NO: 114157 - DNA, 81 bp, Homo sapiens
ccagactcctgctatttcctgatgtctgcatagctcagcgtgtccctcaccatctttgccgttggccagtaaggagagccc

SEQ ID NO: 114158 - DNA, 79 bp, Homo sapiens
ctatttcctgatgtctgcatagctcagcgtgtccctcaccatctttgccgttggccagtaaggagagccccaggggcca

SEQ ID NO: 114159 - DNA, 77 bp, Homo sapiens
tcagcgtgtccctcaccatctttgccgttggccagtaaggagagccccaggggccagcactgcacactgaaacccaa

SEQ ID NO: 114160 - DNA, 74 bp, Homo sapiens
ccagtaaggagagccccaggggccagcactgcacactgaaacccaacctattgctcaatggaatgcttaaaaat

SEQ ID NO: 114161 - DNA, 73 bp, Homo sapiens
aaggagagccccaggggccagcactgcacactgaaacccaacctattgctcaatggaatgcttaaaaatttcc

SEQ ID NO: 114162 - DNA, 77 bp, Homo sapiens
ggccagcactgcacactgaaacccaacctattgctcaatggaatgcttaaaaatttcctgaatctgccttcctgagt

SEQ ID NO: 114163 - DNA, 76 bp, Homo sapiens
tgcacactgaaacccaacctattgctcaatggaatgcttaaaaatttcctgaatctgccttcctgagttgataaaa

SEQ ID NO: 114164 - DNA, 72 bp, Homo sapiens
aaacccaacctattgctcaatggaatgcttaaaaatttcctgaatctgccttcctgagttgataaaatagga

SEQ ID NO: 114165 - DNA, 72 bp, Homo sapiens
aatggaatgcttaaaaatttcctgaatctgccttcctgagttgataaaataggaaacaatacacgttctgag

SEQ ID NO: 114166 - DNA, 73 bp, Homo sapiens
ctgaatctgccttcctgagttgataaaataggaaacaatacacgttctgagggggtactgaaagcagagtaaa

SEQ ID NO: 114167 - DNA, 72 bp, Homo sapiens
ttcctgagttgataaaataggaaacaatacacgttctgagggggtactgaaagcagagtaaagccaggaaga

SEQ ID NO: 114168 - DNA, 69 bp, Homo sapiens
taggaaacaatacacgttctgagggggtactgaaagcagagtaaagccaggaagatcttttttttctgt

SEQ ID NO: 114169 - DNA, 70 bp, Homo sapiens
gttctgagggggtactgaaagcagagtaaagccaggaagatcttttttttctgttattctatacaaatat

SEQ ID NO: 114170 - DNA, 73 bp, Homo sapiens
ggtactgaaagcagagtaaagccaggaagatcttttttttctgttattctatacaaatattgcttcctctgct

SEQ ID NO: 114171 - DNA, 76 bp, Homo sapiens
tgaaagcagagtaaagccaggaagatcttttttttctgttattctatacaaatattgcttcctctgcttgttagca

SEQ ID NO: 114172 - DNA, 76 bp, Homo sapiens
aagatcttttttttctgttattctatacaaatattgcttcctctgcttgttagcagcccagaggaaatgcagccag

SEQ ID NO: 114173 - DNA, 79 bp, Homo sapiens
attctatacaaatattgcttcctctgcttgttagcagcccagaggaaatgcagccagggagccgtttgcagcttttcac

SEQ ID NO: 114174 - DNA, 78 bp, Homo sapiens
aatattgcttcctctgcttgttagcagcccagaggaaatgcagccagggagccgtttgcagcttttcaccagtggccg

SEQ ID NO: 114175 - DNA, 80 bp, Homo sapiens
tctgcttgttagcagcccagaggaaatgcagccagggagccgtttgcagcttttcaccagtggccggtgtctctgtgtta

SEQ ID NO: 114176 - DNA, 75 bp, Homo sapiens
agcccagaggaaatgcagccagggagccgtttgcagcttttcaccagtggccggtgtctctgtgttaccaaccaa

SEQ ID NO: 114177 - DNA, 76 bp, Homo sapiens
aaatgcagccagggagccgtttgcagcttttcaccagtggccggtgtctctgtgttaccaaccaaacgacgctgca

SEQ ID NO: 114178 - DNA, 78 bp, Homo sapiens
tttcaccagtggccggtgtctctgtgttaccaaccaaacgacgctgcaagactagtgactaacgcacgtctgcatgat

SEQ ID NO: 114179 - DNA, 78 bp, Homo sapiens
ccggtgtctctgtgttaccaaccaaacgacgctgcaagactagtgactaacgcacgtctgcatgattcaacttcacta

SEQ ID NO: 114180 - DNA, 77 bp, Homo sapiens
gtctctgtgttaccaaccaaacgacgctgcaagactagtgactaacgcacgtctgcatgattcaacttcactaaaat

SEQ ID NO: 114181 - DNA, 79 bp, Homo sapiens
taccaaccaaacgacgctgcaagactagtgactaacgcacgtctgcatgattcaacttcactaaaattccctctgctgc

SEQ ID NO: 114182 - DNA, 79 bp, Homo sapiens
acgacgctgcaagactagtgactaacgcacgtctgcatgattcaacttcactaaaattccctctgctgccagtaaagaa

SEQ ID NO: 114183 - DNA, 77 bp, Homo sapiens
actagtgactaacgcacgtctgcatgattcaacttcactaaaattccctctgctgccagtaaagaagcacttgaaaa

SEQ ID NO: 114184 - DNA, 76 bp, Homo sapiens
taacgcacgtctgcatgattcaacttcactaaaattccctctgctgccagtaaagaagcacttgaaaactctttaa

SEQ ID NO: 114185 - DNA, 74 bp, Homo sapiens
tgcatgattcaacttcactaaaattccctctgctgccagtaaagaagcacttgaaaactctttaatttgaaact

SEQ ID NO: 114186 - DNA, 70 bp, Homo sapiens
aacttcactaaaattccctctgctgccagtaaagaagcacttgaaaactctttaatttgaaacttgagct

SEQ ID NO: 114187 - DNA, 70 bp, Homo sapiens
ctaaaattccctctgctgccagtaaagaagcacttgaaaactctttaatttgaaacttgagcttggttaa

SEQ ID NO: 114188 - DNA, 71 bp, Homo sapiens
ctgctgccagtaaagaagcacttgaaaactctttaatttgaaacttgagcttggttaatgacttgttttct

SEQ ID NO: 114189 - DNA, 67 bp, Homo sapiens
cttgaaaactctttaatttgaaacttgagcttggttaatgacttgttttcttctctttctctttaac

SEQ ID NO: 114190 - DNA, 73 bp, Homo sapiens
taatttgaaacttgagcttggttaatgacttgttttcttctctttctctttaacttctctcttgccatctcca

SEQ ID NO: 114191 - DNA, 73 bp, Homo sapiens
aaacttgagcttggttaatgacttgttttcttctctttctctttaacttctctcttgccatctccaacacaca

SEQ ID NO: 114192 - DNA, 76 bp, Homo sapiens
tctctctctctcatcaagttttttaatttcagggacccggaaacatacagccccgtgcattcacaatagcatttgc

SEQ ID NO: 114193 - DNA, 75 bp, Homo sapiens
tcatcaagttttttaatttcagggacccggaaacatacagccccgtgcattcacaatagcatttgctgtgataaa

SEQ ID NO: 114194 - DNA, 73 bp, Homo sapiens
tttttaatttcagggacccggaaacatacagccccgtgcattcacaatagcatttgctgtgataaagtggccg

SEQ ID NO: 114195 - DNA, 75 bp, Homo sapiens
atttcagggacccggaaacatacagccccgtgcattcacaatagcatttgctgtgataaagtggccggcaagccc

SEQ ID NO: 114196 - DNA, 80 bp, Homo sapiens
aaacatacagccccgtgcattcacaatagcatttgctgtgataaagtggccggcaagccctctgcattcccctgctcact

SEQ ID NO: 114197 - DNA, 82 bp, Homo sapiens
ccccgtgcattcacaatagcatttgctgtgataaagtggccggcaagccctctgcattcccctgctcacttagctgtatgaa

SEQ ID NO: 114198 - DNA, 81 bp, Homo sapiens
attcacaatagcatttgctgtgataaagtggccggcaagccctctgcattcccctgctcacttagctgtatgaataaataa

SEQ ID NO: 114199 - DNA, 82 bp, Homo sapiens
atttgctgtgataaagtggccggcaagccctctgcattcccctgctcacttagctgtatgaataaataatgagtcacagata

SEQ ID NO: 114200 - DNA, 79 bp, Homo sapiens
ataaagtggccggcaagccctctgcattcccctgctcacttagctgtatgaataaataatgagtcacagatacaatttg

SEQ ID NO: 114201 - DNA, 82 bp, Homo sapiens
cggcaagccctctgcattcccctgctcacttagctgtatgaataaataatgagtcacagatacaatttgggtgctcaagaga

SEQ ID NO: 114202 - DNA, 81 bp, Homo sapiens
cctctgcattcccctgctcacttagctgtatgaataaataatgagtcacagatacaatttgggtgctcaagagagtttgta

SEQ ID NO: 114203 - DNA, 79 bp, Homo sapiens
cctgctcacttagctgtatgaataaataatgagtcacagatacaatttgggtgctcaagagagtttgtagccagaaaat

SEQ ID NO: 114204 - DNA, 78 bp, Homo sapiens
tcacttagctgtatgaataaataatgagtcacagatacaatttgggtgctcaagagagtttgtagccagaaaattaat

SEQ ID NO: 114205 - DNA, 78 bp, Homo sapiens
gctgtatgaataaataatgagtcacagatacaatttgggtgctcaagagagtttgtagccagaaaattaattattctc

SEQ ID NO: 114206 - DNA, 76 bp, Homo sapiens
gaataaataatgagtcacagatacaatttgggtgctcaagagagtttgtagccagaaaattaattattctcccatc

SEQ ID NO: 114207 - DNA, 75 bp, Homo sapiens
ataaataatgagtcacagatacaatttgggtgctcaagagagtttgtagccagaaaattaattattctcccatcc

SEQ ID NO: 114208 - DNA, 75 bp, Homo sapiens
agtcacagatacaatttgggtgctcaagagagtttgtagccagaaaattaattattctcccatcccagcccactc

SEQ ID NO: 114209 - DNA, 76 bp, Homo sapiens
agatacaatttgggtgctcaagagagtttgtagccagaaaattaattattctcccatcccagcccactccatctca

SEQ ID NO: 114210 - DNA, 74 bp, Homo sapiens
aatttgggtgctcaagagagtttgtagccagaaaattaattattctcccatcccagcccactccatctcagctt

SEQ ID NO: 114211 - DNA, 77 bp, Homo sapiens
tcaagagagtttgtagccagaaaattaattattctcccatcccagcccactccatctcagctttgccaaaccatcaa

SEQ ID NO: 114212 - DNA, 76 bp, Homo sapiens
agagtttgtagccagaaaattaattattctcccatcccagcccactccatctcagctttgccaaaccatcaagata

SEQ ID NO: 114213 - DNA, 76 bp, Homo sapiens
ttgtagccagaaaattaattattctcccatcccagcccactccatctcagctttgccaaaccatcaagatacactt

SEQ ID NO: 114214 - DNA, 77 bp, Homo sapiens
aaaattaattattctcccatcccagcccactccatctcagctttgccaaaccatcaagatacactttgcaggcactg

SEQ ID NO: 114215 - DNA, 81 bp, Homo sapiens
aattattctcccatcccagcccactccatctcagctttgccaaaccatcaagatacactttgcaggcactggtcagagtgc

SEQ ID NO: 114216 - DNA, 82 bp, Homo sapiens
atcccagcccactccatctcagctttgccaaaccatcaagatacactttgcaggcactggtcagagtgcgtgccccgacgca

SEQ ID NO: 114217 - DNA, 83 bp, Homo sapiens
tccatctcagctttgccaaaccatcaagatacactttgcaggcactggtcagagtgcgtgccccgacgcacacggcaatgcct

SEQ ID NO: 114218 - DNA, 81 bp, Homo sapiens
tttgccaaaccatcaagatacactttgcaggcactggtcagagtgcgtgccccgacgcacacggcaatgcctttgagacat

SEQ ID NO: 114219 - DNA, 79 bp, Homo sapiens
agatacactttgcaggcactggtcagagtgcgtgccccgacgcacacggcaatgcctttgagacattttatgttattat

SEQ ID NO: 114220 - DNA, 75 bp, Homo sapiens
aggcactggtcagagtgcgtgccccgacgcacacggcaatgcctttgagacattttatgttattatttttgtttg

SEQ ID NO: 114221 - DNA, 83 bp, Homo sapiens
cacatgcacacacatactcacacactcacagctcaaccacagctttgtccatttcaagaggctggtttcaaaaatggagacag

SEQ ID NO: 114222 - DNA, 77 bp, Homo sapiens
cacatactcacacactcacagctcaaccacagctttgtccatttcaagaggctggtttcaaaaatggagacaggttt

SEQ ID NO: 114223 - DNA, 74 bp, Homo sapiens
acacactcacagctcaaccacagctttgtccatttcaagaggctggtttcaaaaatggagacaggttttccacc

SEQ ID NO: 114224 - DNA, 72 bp, Homo sapiens
agctcaaccacagctttgtccatttcaagaggctggtttcaaaaatggagacaggttttccaccctggctgt

SEQ ID NO: 114225 - DNA, 72 bp, Homo sapiens
agctttgtccatttcaagaggctggtttcaaaaatggagacaggttttccaccctggctgttcctattcata

SEQ ID NO: 114226 - DNA, 71 bp, Homo sapiens
atttcaagaggctggtttcaaaaatggagacaggttttccaccctggctgttcctattcataagcctgtaa

SEQ ID NO: 114227 - DNA, 71 bp, Homo sapiens
gctggtttcaaaaatggagacaggttttccaccctggctgttcctattcataagcctgtaatctaacgact

SEQ ID NO: 114228 - DNA, 71 bp, Homo sapiens
tttcaaaaatggagacaggttttccaccctggctgttcctattcataagcctgtaatctaacgacttaagc

SEQ ID NO: 114229 - DNA, 72 bp, Homo sapiens
accctggctgttcctattcataagcctgtaatctaacgacttaagctgcgagaatgcttaactcgggaaact

SEQ ID NO: 114230 - DNA, 75 bp, Homo sapiens
tgttcctattcataagcctgtaatctaacgacttaagctgcgagaatgcttaactcgggaaacttctctattgcc

SEQ ID NO: 114231 - DNA, 72 bp, Homo sapiens
ataagcctgtaatctaacgacttaagctgcgagaatgcttaactcgggaaacttctctattgcccttttcca

SEQ ID NO: 114232 - DNA, 73 bp, Homo sapiens
ctgtaatctaacgacttaagctgcgagaatgcttaactcgggaaacttctctattgcccttttccagagagac

SEQ ID NO: 114233 - DNA, 72 bp, Homo sapiens
agaatgcttaactcgggaaacttctctattgcccttttccagagagacctcggtatgccacaatttgcttcc

SEQ ID NO: 114234 - DNA, 70 bp, Homo sapiens
cttaactcgggaaacttctctattgcccttttccagagagacctcggtatgccacaatttgcttcctttc

SEQ ID NO: 114235 - DNA, 71 bp, Homo sapiens
actcgggaaacttctctattgcccttttccagagagacctcggtatgccacaatttgcttcctttctctct

SEQ ID NO: 114236 - DNA, 74 bp, Homo sapiens
aaacttctctattgcccttttccagagagacctcggtatgccacaatttgcttcctttctctcttgaaagatgc

SEQ ID NO: 114237 - DNA, 76 bp, Homo sapiens
ttctctattgcccttttccagagagacctcggtatgccacaatttgcttcctttctctcttgaaagatgctggttg

SEQ ID NO: 114238 - DNA, 79 bp, Homo sapiens
agagagacctcggtatgccacaatttgcttcctttctctcttgaaagatgctggttgtctctttgcattgaggctacaa

SEQ ID NO: 114239 - DNA, 78 bp, Homo sapiens
ccacaatttgcttcctttctctcttgaaagatgctggttgtctctttgcattgaggctacaaggaaaaacacagcaca

SEQ ID NO: 114240 - DNA, 77 bp, Homo sapiens
aatttgcttcctttctctcttgaaagatgctggttgtctctttgcattgaggctacaaggaaaaacacagcacagcc

SEQ ID NO: 114241 - DNA, 82 bp, Homo sapiens
tctctcttgaaagatgctggttgtctctttgcattgaggctacaaggaaaaacacagcacagccccatgctgatgattttaa

SEQ ID NO: 114242 - DNA, 78 bp, Homo sapiens
aaagatgctggttgtctctttgcattgaggctacaaggaaaaacacagcacagccccatgctgatgattttaacctaa

SEQ ID NO: 114243 - DNA, 79 bp, Homo sapiens
ttgtctctttgcattgaggctacaaggaaaaacacagcacagccccatgctgatgattttaacctaaccaagtctgtca

SEQ ID NO: 114244 - DNA, 78 bp, Homo sapiens
ctttgcattgaggctacaaggaaaaacacagcacagccccatgctgatgattttaacctaaccaagtctgtcagtctc

SEQ ID NO: 114245 - DNA, 78 bp, Homo sapiens
aaaaacacagcacagccccatgctgatgattttaacctaaccaagtctgtcagtctcctgtactctctgccttataga

SEQ ID NO: 114246 - DNA, 81 bp, Homo sapiens
acagccccatgctgatgattttaacctaaccaagtctgtcagtctcctgtactctctgccttatagagacagctgccttgc

SEQ ID NO: 114247 - DNA, 77 bp, Homo sapiens
tttaacctaaccaagtctgtcagtctcctgtactctctgccttatagagacagctgccttgccactttggccctgaa

SEQ ID NO: 114248 - DNA, 82 bp, Homo sapiens
tctcctgtactctctgccttatagagacagctgccttgccactttggccctgaagtccccaggctggtgcaaggctatctga

SEQ ID NO: 114249 - DNA, 82 bp, Homo sapiens
tactctctgccttatagagacagctgccttgccactttggccctgaagtccccaggctggtgcaaggctatctgagagcctc

SEQ ID NO: 114250 - DNA, 79 bp, Homo sapiens
ccttatagagacagctgccttgccactttggccctgaagtccccaggctggtgcaaggctatctgagagcctccgcctc

SEQ ID NO: 114251 - DNA, 77 bp, Homo sapiens
actttggccctgaagtccccaggctggtgcaaggctatctgagagcctccgcctcctgccccacactggcaccagcc

SEQ ID NO: 114252 - DNA, 79 bp, Homo sapiens
cctgaagtccccaggctggtgcaaggctatctgagagcctccgcctcctgccccacactggcaccagccctcctggctg

SEQ ID NO: 114253 - DNA, 87 bp, Homo sapiens
ggctggtgcaaggctatctgagagcctccgcctcctgccccacactggcaccagccctcctggctggctctgtgcatgtgcctgcta

SEQ ID NO: 114254 - DNA, 83 bp, Homo sapiens
aaggctatctgagagcctccgcctcctgccccacactggcaccagccctcctggctggctctgtgcatgtgcctgctaagccc

SEQ ID NO: 114255 - DNA, 84 bp, Homo sapiens
atctgagagcctccgcctcctgccccacactggcaccagccctcctggctggctctgtgcatgtgcctgctaagccccagggca

SEQ ID NO: 114256 - DNA, 85 bp, Homo sapiens
tccgcctcctgccccacactggcaccagccctcctggctggctctgtgcatgtgcctgctaagccccagggcaggctgcattctg

SEQ ID NO: 114257 - DNA, 85 bp, Homo sapiens
accagccctcctggctggctctgtgcatgtgcctgctaagccccagggcaggctgcattctgggccacacagcatgccgagttaa

SEQ ID NO: 114258 - DNA, 88 bp, Homo sapiens
tggctggctctgtgcatgtgcctgctaagccccagggcaggctgcattctgggccacacagcatgccgagttaaggataactcagaca

SEQ ID NO: 114259 - DNA, 87 bp, Homo sapiens
tgtgcatgtgcctgctaagccccagggcaggctgcattctgggccacacagcatgccgagttaaggataactcagacacaggcattc

SEQ ID NO: 114260 - DNA, 80 bp, Homo sapiens
cccagggcaggctgcattctgggccacacagcatgccgagttaaggataactcagacacaggcattccgggcaagggaca

SEQ ID NO: 114261 - DNA, 80 bp, Homo sapiens
gctgcattctgggccacacagcatgccgagttaaggataactcagacacaggcattccgggcaagggacagcaaaataaa

SEQ ID NO: 114262 - DNA, 76 bp, Homo sapiens
tgggccacacagcatgccgagttaaggataactcagacacaggcattccgggcaagggacagcaaaataaaaccca

SEQ ID NO: 114263 - DNA, 74 bp, Homo sapiens
acacagcatgccgagttaaggataactcagacacaggcattccgggcaagggacagcaaaataaaacccaggga

SEQ ID NO: 114264 - DNA, 73 bp, Homo sapiens
ggcattccgggcaagggacagcaaaataaaacccagggagcttcgtgcaagcttcataatctctaagccttta

SEQ ID NO: 114265 - DNA, 73 bp, Homo sapiens
gcaagggacagcaaaataaaacccagggagcttcgtgcaagcttcataatctctaagcctttaaacaagacca

SEQ ID NO: 114266 - DNA, 74 bp, Homo sapiens
ataaaacccagggagcttcgtgcaagcttcataatctctaagcctttaaacaagaccagcacaacttactcgca

SEQ ID NO: 114267 - DNA, 77 bp, Homo sapiens
agcttcgtgcaagcttcataatctctaagcctttaaacaagaccagcacaacttactcgcacttgacaaagttctca

SEQ ID NO: 114268 - DNA, 75 bp, Homo sapiens
aagcttcataatctctaagcctttaaacaagaccagcacaacttactcgcacttgacaaagttctcacgcaccga

SEQ ID NO: 114269 - DNA, 75 bp, Homo sapiens
ataatctctaagcctttaaacaagaccagcacaacttactcgcacttgacaaagttctcacgcaccgactgaaca

SEQ ID NO: 114270 - DNA, 77 bp, Homo sapiens
ttaaacaagaccagcacaacttactcgcacttgacaaagttctcacgcaccgactgaacactccaacagcataacta

SEQ ID NO: 114271 - DNA, 76 bp, Homo sapiens
accagcacaacttactcgcacttgacaaagttctcacgcaccgactgaacactccaacagcataactaagtattta

SEQ ID NO: 114272 - DNA, 74 bp, Homo sapiens
acaacttactcgcacttgacaaagttctcacgcaccgactgaacactccaacagcataactaagtatttattaa

SEQ ID NO: 114273 - DNA, 73 bp, Homo sapiens
acttgacaaagttctcacgcaccgactgaacactccaacagcataactaagtatttattaaaacatttctgaa

SEQ ID NO: 114274 - DNA, 73 bp, Homo sapiens
aaagttctcacgcaccgactgaacactccaacagcataactaagtatttattaaaacatttctgaagagcttc

SEQ ID NO: 114275 - DNA, 75 bp, Homo sapiens
caccgactgaacactccaacagcataactaagtatttattaaaacatttctgaagagcttccatctgattagtaa

SEQ ID NO: 114276 - DNA, 75 bp, Homo sapiens
gaacactccaacagcataactaagtatttattaaaacatttctgaagagcttccatctgattagtaagtaatcca

SEQ ID NO: 114277 - DNA, 77 bp, Homo sapiens
aaacatttctgaagagcttccatctgattagtaagtaatccaatagacttgtaatcatatgcctcagtttgaattcc

SEQ ID NO: 114278 - DNA, 77 bp, Homo sapiens
atctgattagtaagtaatccaatagacttgtaatcatatgcctcagtttgaattcctctcacaaacaagacagggaa

SEQ ID NO: 114279 - DNA, 77 bp, Homo sapiens
ttagtaagtaatccaatagacttgtaatcatatgcctcagtttgaattcctctcacaaacaagacagggaactggca

SEQ ID NO: 114280 - DNA, 79 bp, Homo sapiens
atccaatagacttgtaatcatatgcctcagtttgaattcctctcacaaacaagacagggaactggcaggcaccgaggca

SEQ ID NO: 114281 - DNA, 81 bp, Homo sapiens
cttgtaatcatatgcctcagtttgaattcctctcacaaacaagacagggaactggcaggcaccgaggcatctctgcaccga

SEQ ID NO: 114282 - DNA, 77 bp, Homo sapiens
cctcagtttgaattcctctcacaaacaagacagggaactggcaggcaccgaggcatctctgcaccgaggtgaaacaa

SEQ ID NO: 114283 - DNA, 79 bp, Homo sapiens
aattcctctcacaaacaagacagggaactggcaggcaccgaggcatctctgcaccgaggtgaaacaagctgccatttca

SEQ ID NO: 114284 - DNA, 79 bp, Homo sapiens
acaaacaagacagggaactggcaggcaccgaggcatctctgcaccgaggtgaaacaagctgccatttcattacaggcaa

SEQ ID NO: 114285 - DNA, 80 bp, Homo sapiens
agggaactggcaggcaccgaggcatctctgcaccgaggtgaaacaagctgccatttcattacaggcaaagctgagcaaaa

SEQ ID NO: 114286 - DNA, 83 bp, Homo sapiens
tggcaggcaccgaggcatctctgcaccgaggtgaaacaagctgccatttcattacaggcaaagctgagcaaaagtagatatta

SEQ ID NO: 114287 - DNA, 80 bp, Homo sapiens
accgaggcatctctgcaccgaggtgaaacaagctgccatttcattacaggcaaagctgagcaaaagtagatattacaaga

SEQ ID NO: 114288 - DNA, 80 bp, Homo sapiens
caccgaggtgaaacaagctgccatttcattacaggcaaagctgagcaaaagtagatattacaagaccagcatgtactcac

SEQ ID NO: 114289 - DNA, 83 bp, Homo sapiens
aaacaagctgccatttcattacaggcaaagctgagcaaaagtagatattacaagaccagcatgtactcacctctcatgaagca

SEQ ID NO: 114290 - DNA, 82 bp, Homo sapiens
ccatttcattacaggcaaagctgagcaaaagtagatattacaagaccagcatgtactcacctctcatgaagcactgtgggta

SEQ ID NO: 114291 - DNA, 80 bp, Homo sapiens
attacaggcaaagctgagcaaaagtagatattacaagaccagcatgtactcacctctcatgaagcactgtgggtacgaag

SEQ ID NO: 114292 - DNA, 79 bp, Homo sapiens
aaagctgagcaaaagtagatattacaagaccagcatgtactcacctctcatgaagcactgtgggtacgaaggaaatgac

SEQ ID NO: 114293 - DNA, 84 bp, Homo sapiens
tattacaagaccagcatgtactcacctctcatgaagcactgtgggtacgaaggaaatgactcaaatatgctgtctgaagccatc

SEQ ID NO: 114294 - DNA, 82 bp, Homo sapiens
atgtactcacctctcatgaagcactgtgggtacgaaggaaatgactcaaatatgctgtctgaagccatcgcttcctcctgaa

SEQ ID NO: 114295 - DNA, 81 bp, Homo sapiens
acctctcatgaagcactgtgggtacgaaggaaatgactcaaatatgctgtctgaagccatcgcttcctcctgaaaatgcac

SEQ ID NO: 114296 - DNA, 79 bp, Homo sapiens
atgaagcactgtgggtacgaaggaaatgactcaaatatgctgtctgaagccatcgcttcctcctgaaaatgcaccctct

SEQ ID NO: 114297 - DNA, 78 bp, Homo sapiens
gtgggtacgaaggaaatgactcaaatatgctgtctgaagccatcgcttcctcctgaaaatgcaccctcttctgaaggc

SEQ ID NO: 114298 - DNA, 79 bp, Homo sapiens
atgactcaaatatgctgtctgaagccatcgcttcctcctgaaaatgcaccctcttctgaaggcgggggactcaatgatt

SEQ ID NO: 114299 - DNA, 76 bp, Homo sapiens
aaatatgctgtctgaagccatcgcttcctcctgaaaatgcaccctcttctgaaggcgggggactcaatgatttctt

SEQ ID NO: 114300 - DNA, 70 bp, Homo sapiens
cttcctcctgaaaatgcaccctcttctgaaggcgggggactcaatgatttcttttaccttcggagcgaaa

SEQ ID NO: 114301 - DNA, 69 bp, Homo sapiens
aaaatgcaccctcttctgaaggcgggggactcaatgatttcttttaccttcggagcgaaaaccaagaca

SEQ ID NO: 114302 - DNA, 69 bp, Homo sapiens
ctcttctgaaggcgggggactcaatgatttcttttaccttcggagcgaaaaccaagacaggtcactgtt

SEQ ID NO: 114303 - DNA, 70 bp, Homo sapiens
aaggcgggggactcaatgatttcttttaccttcggagcgaaaaccaagacaggtcactgtttcagcctca

SEQ ID NO: 114304 - DNA, 72 bp, Homo sapiens
tcaatgatttcttttaccttcggagcgaaaaccaagacaggtcactgtttcagcctcacccctctagcccta

SEQ ID NO: 114305 - DNA, 70 bp, Homo sapiens
atttcttttaccttcggagcgaaaaccaagacaggtcactgtttcagcctcacccctctagccctacatc

SEQ ID NO: 114306 - DNA, 72 bp, Homo sapiens
accttcggagcgaaaaccaagacaggtcactgtttcagcctcacccctctagccctacatctctctttcttc

SEQ ID NO: 114307 - DNA, 75 bp, Homo sapiens
aaaccaagacaggtcactgtttcagcctcacccctctagccctacatctctctttcttctcccctctgctggata

SEQ ID NO: 114308 - DNA, 76 bp, Homo sapiens
acaggtcactgtttcagcctcacccctctagccctacatctctctttcttctcccctctgctggatacctctggga

SEQ ID NO: 114309 - DNA, 75 bp, Homo sapiens
tgtttcagcctcacccctctagccctacatctctctttcttctcccctctgctggatacctctgggactccccaa

SEQ ID NO: 114310 - DNA, 72 bp, Homo sapiens
tacatctctctttcttctcccctctgctggatacctctgggactccccaagccctattaaaaaatgcacctt

SEQ ID NO: 114311 - DNA, 69 bp, Homo sapiens
tttcttctcccctctgctggatacctctgggactccccaagccctattaaaaaatgcacctttgtaaaa

SEQ ID NO: 114312 - DNA, 68 bp, Homo sapiens
ccctctgctggatacctctgggactccccaagccctattaaaaaatgcacctttgtaaaaacaaatat

SEQ ID NO: 114313 - DNA, 67 bp, Homo sapiens
ctggatacctctgggactccccaagccctattaaaaaatgcacctttgtaaaaacaaatattcaaat

SEQ ID NO: 114314 - DNA, 66 bp, Homo sapiens
ctgggactccccaagccctattaaaaaatgcacctttgtaaaaacaaatattcaaattgttaaaga

SEQ ID NO: 114315 - DNA, 64 bp, Homo sapiens
cccaagccctattaaaaaatgcacctttgtaaaaacaaatattcaaattgttaaagattaaaaa

SEQ ID NO: 114316 - DNA, 73 bp, Homo sapiens
aaaaaaaaagccagcgccgccttggctgtgggttggtgatgctcaccacgctgcgaaaccctgtggtttgcat

SEQ ID NO: 114317 - DNA, 82 bp, Homo sapiens
cttggctgtgggttggtgatgctcaccacgctgcgaaaccctgtggtttgcattcagtgtgattcgtcctgcctgctgacca

SEQ ID NO: 114318 - DNA, 84 bp, Homo sapiens
tgtgggttggtgatgctcaccacgctgcgaaaccctgtggtttgcattcagtgtgattcgtcctgcctgctgaccactatgctg

SEQ ID NO: 114319 - DNA, 82 bp, Homo sapiens
atgctcaccacgctgcgaaaccctgtggtttgcattcagtgtgattcgtcctgcctgctgaccactatgctgggttcagact

SEQ ID NO: 114320 - DNA, 81 bp, Homo sapiens
acgctgcgaaaccctgtggtttgcattcagtgtgattcgtcctgcctgctgaccactatgctgggttcagacttctgacac

SEQ ID NO: 114321 - DNA, 82 bp, Homo sapiens
aaccctgtggtttgcattcagtgtgattcgtcctgcctgctgaccactatgctgggttcagacttctgacactgccaggcta

SEQ ID NO: 114322 - DNA, 83 bp, Homo sapiens
tttgcattcagtgtgattcgtcctgcctgctgaccactatgctgggttcagacttctgacactgccaggctacccaacttgtg

SEQ ID NO: 114323 - DNA, 80 bp, Homo sapiens
agtgtgattcgtcctgcctgctgaccactatgctgggttcagacttctgacactgccaggctacccaacttgtggttctg

SEQ ID NO: 114324 - DNA, 76 bp, Homo sapiens
cactatgctgggttcagacttctgacactgccaggctacccaacttgtggttctgtggttgtttatgaggcccaaa

SEQ ID NO: 114325 - DNA, 68 bp, Homo sapiens
caacttgtggttctgtggttgtttatgaggcccaaagaagttttcacacaacccaaattacaaattta

SEQ ID NO: 114326 - DNA, 71 bp, Homo sapiens
aacaatggcaaaagggatcatttaccttgttttctccatgcgggactcacctgctttcgggtccaggcgaa

SEQ ID NO: 114327 - DNA, 73 bp, Homo sapiens
ggatcatttaccttgttttctccatgcgggactcacctgctttcgggtccaggcgaactcgctgtggtattgt

SEQ ID NO: 114328 - DNA, 71 bp, Homo sapiens
atttaccttgttttctccatgcgggactcacctgctttcgggtccaggcgaactcgctgtggtattgttct

SEQ ID NO: 114329 - DNA, 74 bp, Homo sapiens
ttttctccatgcgggactcacctgctttcgggtccaggcgaactcgctgtggtattgttcttctctgctcggtt

SEQ ID NO: 114330 - DNA, 73 bp, Homo sapiens
gggactcacctgctttcgggtccaggcgaactcgctgtggtattgttcttctctgctcggtttccaaaggaga

SEQ ID NO: 114331 - DNA, 72 bp, Homo sapiens
tttcgggtccaggcgaactcgctgtggtattgttcttctctgctcggtttccaaaggagagcccaggcgcgt

SEQ ID NO: 114332 - DNA, 73 bp, Homo sapiens
aggcgaactcgctgtggtattgttcttctctgctcggtttccaaaggagagcccaggcgcgttaattgctggg

SEQ ID NO: 114333 - DNA, 77 bp, Homo sapiens
gctgtggtattgttcttctctgctcggtttccaaaggagagcccaggcgcgttaattgctgggtggcagctacacta

SEQ ID NO: 114334 - DNA, 77 bp, Homo sapiens
tattgttcttctctgctcggtttccaaaggagagcccaggcgcgttaattgctgggtggcagctacactaaatgcaa

SEQ ID NO: 114335 - DNA, 77 bp, Homo sapiens
ttctctgctcggtttccaaaggagagcccaggcgcgttaattgctgggtggcagctacactaaatgcaagtggacga

SEQ ID NO: 114336 - DNA, 77 bp, Homo sapiens
tttccaaaggagagcccaggcgcgttaattgctgggtggcagctacactaaatgcaagtggacgacagctgggtgcc

SEQ ID NO: 114337 - DNA, 80 bp, Homo sapiens
agcccaggcgcgttaattgctgggtggcagctacactaaatgcaagtggacgacagctgggtgccgggctcgctctgcaa

SEQ ID NO: 114338 - DNA, 78 bp, Homo sapiens
gttaattgctgggtggcagctacactaaatgcaagtggacgacagctgggtgccgggctcgctctgcaagagaaggtt

SEQ ID NO: 114339 - DNA, 77 bp, Homo sapiens
tgggtggcagctacactaaatgcaagtggacgacagctgggtgccgggctcgctctgcaagagaaggtttgggtttc

SEQ ID NO: 114340 - DNA, 76 bp, Homo sapiens
agctacactaaatgcaagtggacgacagctgggtgccgggctcgctctgcaagagaaggtttgggtttccattgta

SEQ ID NO: 114341 - DNA, 68 bp, Homo sapiens
aaagaaaaaatagaccttagttttcttaccactttgccgtgtgctcttggaattcagaagccaggtta

SEQ ID NO: 114342 - DNA, 68 bp, Homo sapiens
aaaaatagaccttagttttcttaccactttgccgtgtgctcttggaattcagaagccaggttaagctt

SEQ ID NO: 114343 - DNA, 70 bp, Homo sapiens
cttagttttcttaccactttgccgtgtgctcttggaattcagaagccaggttaagctttcttctttcacc

SEQ ID NO: 114344 - DNA, 71 bp, Homo sapiens
actttgccgtgtgctcttggaattcagaagccaggttaagctttcttctttcacctggagacctctaaaag

SEQ ID NO: 114345 - DNA, 72 bp, Homo sapiens
tgtgctcttggaattcagaagccaggttaagctttcttctttcacctggagacctctaaaagggaagaaata

SEQ ID NO: 114346 - DNA, 67 bp, Homo sapiens
aattcagaagccaggttaagctttcttctttcacctggagacctctaaaagggaagaaatagtaaaa

SEQ ID NO: 114347 - DNA, 66 bp, Homo sapiens
ccaggttaagctttcttctttcacctggagacctctaaaagggaagaaatagtaaaacaactgaaa

SEQ ID NO: 114348 - DNA, 70 bp, Homo sapiens
gctttcttctttcacctggagacctctaaaagggaagaaatagtaaaacaactgaaatcatgttgcttaa

SEQ ID NO: 114349 - DNA, 80 bp, Homo sapiens
aatccataatcattgtcagctgagaccaaactagctgctaaactacttaccaatgtattcagtctccacggcatcgatcc

SEQ ID NO: 114350 - DNA, 82 bp, Homo sapiens
attgtcagctgagaccaaactagctgctaaactacttaccaatgtattcagtctccacggcatcgatcccagcagaaatgca

SEQ ID NO: 114351 - DNA, 78 bp, Homo sapiens
accaaactagctgctaaactacttaccaatgtattcagtctccacggcatcgatcccagcagaaatgcaaatcagctt

SEQ ID NO: 114352 - DNA, 79 bp, Homo sapiens
actagctgctaaactacttaccaatgtattcagtctccacggcatcgatcccagcagaaatgcaaatcagcttttccag

SEQ ID NO: 114353 - DNA, 76 bp, Homo sapiens
aaactacttaccaatgtattcagtctccacggcatcgatcccagcagaaatgcaaatcagcttttccagggcgaac

SEQ ID NO: 114354 - DNA, 78 bp, Homo sapiens
aatgtattcagtctccacggcatcgatcccagcagaaatgcaaatcagcttttccagggcgaacctccctcctgaaga

SEQ ID NO: 114355 - DNA, 78 bp, Homo sapiens
gtctccacggcatcgatcccagcagaaatgcaaatcagcttttccagggcgaacctccctcctgaagaagtgagtcta

SEQ ID NO: 114356 - DNA, 77 bp, Homo sapiens
atcgatcccagcagaaatgcaaatcagcttttccagggcgaacctccctcctgaagaagtgagtctaggccagcaac

SEQ ID NO: 114357 - DNA, 76 bp, Homo sapiens
agaaatgcaaatcagcttttccagggcgaacctccctcctgaagaagtgagtctaggccagcaactgccgcctgga

SEQ ID NO: 114358 - DNA, 74 bp, Homo sapiens
aaatcagcttttccagggcgaacctccctcctgaagaagtgagtctaggccagcaactgccgcctggaggaatc

SEQ ID NO: 114359 - DNA, 73 bp, Homo sapiens
cttttccagggcgaacctccctcctgaagaagtgagtctaggccagcaactgccgcctggaggaatcctgaag

SEQ ID NO: 114360 - DNA, 76 bp, Homo sapiens
acctccctcctgaagaagtgagtctaggccagcaactgccgcctggaggaatcctgaagtgccccccagatgtgta

SEQ ID NO: 114361 - DNA, 76 bp, Homo sapiens
tgaagaagtgagtctaggccagcaactgccgcctggaggaatcctgaagtgccccccagatgtgtagggtcttggt

SEQ ID NO: 114362 - DNA, 77 bp, Homo sapiens
agtgagtctaggccagcaactgccgcctggaggaatcctgaagtgccccccagatgtgtagggtcttggttgtcaca

SEQ ID NO: 114363 - DNA, 79 bp, Homo sapiens
agcaactgccgcctggaggaatcctgaagtgccccccagatgtgtagggtcttggttgtcacacagtgcatttgacaca

SEQ ID NO: 114364 - DNA, 79 bp, Homo sapiens
cctggaggaatcctgaagtgccccccagatgtgtagggtcttggttgtcacacagtgcatttgacacatcacagtcagg

SEQ ID NO: 114365 - DNA, 78 bp, Homo sapiens
tcctgaagtgccccccagatgtgtagggtcttggttgtcacacagtgcatttgacacatcacagtcaggggtccgtaa

SEQ ID NO: 114366 - DNA, 78 bp, Homo sapiens
aagtgccccccagatgtgtagggtcttggttgtcacacagtgcatttgacacatcacagtcaggggtccgtaatctgc

SEQ ID NO: 114367 - DNA, 83 bp, Homo sapiens
tgtgtagggtcttggttgtcacacagtgcatttgacacatcacagtcaggggtccgtaatctgctgcctccagcagtaagata

SEQ ID NO: 114368 - DNA, 85 bp, Homo sapiens
tcttggttgtcacacagtgcatttgacacatcacagtcaggggtccgtaatctgctgcctccagcagtaagataatgatgttgta

SEQ ID NO: 114369 - DNA, 82 bp, Homo sapiens
acacagtgcatttgacacatcacagtcaggggtccgtaatctgctgcctccagcagtaagataatgatgttgtagtttctct

SEQ ID NO: 114370 - DNA, 80 bp, Homo sapiens
atttgacacatcacagtcaggggtccgtaatctgctgcctccagcagtaagataatgatgttgtagtttctcttctcttc

SEQ ID NO: 114371 - DNA, 80 bp, Homo sapiens
acatcacagtcaggggtccgtaatctgctgcctccagcagtaagataatgatgttgtagtttctcttctcttcctcttgc

SEQ ID NO: 114372 - DNA, 78 bp, Homo sapiens
gtccgtaatctgctgcctccagcagtaagataatgatgttgtagtttctcttctcttcctcttgcccactagaattta

SEQ ID NO: 114373 - DNA, 79 bp, Homo sapiens
taatctgctgcctccagcagtaagataatgatgttgtagtttctcttctcttcctcttgcccactagaatttacttgga

SEQ ID NO: 114374 - DNA, 76 bp, Homo sapiens
agcagtaagataatgatgttgtagtttctcttctcttcctcttgcccactagaatttacttggatcctagcgaata

SEQ ID NO: 114375 - DNA, 73 bp, Homo sapiens
atgttgtagtttctcttctcttcctcttgcccactagaatttacttggatcctagcgaataaagatgggagaa

SEQ ID NO: 114376 - DNA, 72 bp, Homo sapiens
gtgggggtgggggaatggcagaacttacaggaaagatggatgtgcctgagttttaacttgctgatacccaaa

SEQ ID NO: 114377 - DNA, 75 bp, Homo sapiens
gggaatggcagaacttacaggaaagatggatgtgcctgagttttaacttgctgatacccaaatcaagctttggcc

SEQ ID NO: 114378 - DNA, 75 bp, Homo sapiens
gaacttacaggaaagatggatgtgcctgagttttaacttgctgatacccaaatcaagctttggcctatagagaaa

SEQ ID NO: 114379 - DNA, 74 bp, Homo sapiens
aggaaagatggatgtgcctgagttttaacttgctgatacccaaatcaagctttggcctatagagaaaataacaa

SEQ ID NO: 114380 - DNA, 73 bp, Homo sapiens
tgtgcctgagttttaacttgctgatacccaaatcaagctttggcctatagagaaaataacaaagacccaatta

SEQ ID NO: 114381 - DNA, 71 bp, Homo sapiens
gttttaacttgctgatacccaaatcaagctttggcctatagagaaaataacaaagacccaattaatagtgc

SEQ ID NO: 114382 - DNA, 73 bp, Homo sapiens
ctgatacccaaatcaagctttggcctatagagaaaataacaaagacccaattaatagtgctgtacactggaaa

SEQ ID NO: 114383 - DNA, 72 bp, Homo sapiens
ccaaatcaagctttggcctatagagaaaataacaaagacccaattaatagtgctgtacactggaaacattat

SEQ ID NO: 114384 - DNA, 77 bp, Homo sapiens
aacatcaaaaacaaggagccaacaggcatgtgaaagaacacagactcacctacaatccgccagcccaggaggctgaa

SEQ ID NO: 114385 - DNA, 77 bp, Homo sapiens
aaacaaggagccaacaggcatgtgaaagaacacagactcacctacaatccgccagcccaggaggctgaacctgaggc

SEQ ID NO: 114386 - DNA, 79 bp, Homo sapiens
aacaggcatgtgaaagaacacagactcacctacaatccgccagcccaggaggctgaacctgaggctgttgaagcttctg

SEQ ID NO: 114387 - DNA, 80 bp, Homo sapiens
aagaacacagactcacctacaatccgccagcccaggaggctgaacctgaggctgttgaagcttctggatccagctgccaa

SEQ ID NO: 114388 - DNA, 80 bp, Homo sapiens
acagactcacctacaatccgccagcccaggaggctgaacctgaggctgttgaagcttctggatccagctgccaacttcta

SEQ ID NO: 114389 - DNA, 80 bp, Homo sapiens
tacaatccgccagcccaggaggctgaacctgaggctgttgaagcttctggatccagctgccaacttctaggaggtcagaa

SEQ ID NO: 114390 - DNA, 76 bp, Homo sapiens
cccaggaggctgaacctgaggctgttgaagcttctggatccagctgccaacttctaggaggtcagaaaaccgagga

SEQ ID NO: 114391 - DNA, 77 bp, Homo sapiens
tgaacctgaggctgttgaagcttctggatccagctgccaacttctaggaggtcagaaaaccgaggagcatgttaacc

SEQ ID NO: 114392 - DNA, 79 bp, Homo sapiens
aggctgttgaagcttctggatccagctgccaacttctaggaggtcagaaaaccgaggagcatgttaacctgcaacatga

SEQ ID NO: 114393 - DNA, 78 bp, Homo sapiens
aagcttctggatccagctgccaacttctaggaggtcagaaaaccgaggagcatgttaacctgcaacatgagtgcccaa

SEQ ID NO: 114394 - DNA, 79 bp, Homo sapiens
atccagctgccaacttctaggaggtcagaaaaccgaggagcatgttaacctgcaacatgagtgcccaatcagccaaatc

SEQ ID NO: 114395 - DNA, 78 bp, Homo sapiens
aacttctaggaggtcagaaaaccgaggagcatgttaacctgcaacatgagtgcccaatcagccaaatccagattgaga

SEQ ID NO: 114396 - DNA, 78 bp, Homo sapiens
aggaggtcagaaaaccgaggagcatgttaacctgcaacatgagtgcccaatcagccaaatccagattgagaaccactc

SEQ ID NO: 114397 - DNA, 77 bp, Homo sapiens
aaccgaggagcatgttaacctgcaacatgagtgcccaatcagccaaatccagattgagaaccactccgtgggtcaaa

SEQ ID NO: 114398 - DNA, 75 bp, Homo sapiens
tgttaacctgcaacatgagtgcccaatcagccaaatccagattgagaaccactccgtgggtcaaacggcccaggt

SEQ ID NO: 114399 - DNA, 75 bp, Homo sapiens
aacatgagtgcccaatcagccaaatccagattgagaaccactccgtgggtcaaacggcccaggttcttcaataca

SEQ ID NO: 114400 - DNA, 73 bp, Homo sapiens
agtgcccaatcagccaaatccagattgagaaccactccgtgggtcaaacggcccaggttcttcaatacataaa

SEQ ID NO: 114401 - DNA, 70 bp, Homo sapiens
caaatccagattgagaaccactccgtgggtcaaacggcccaggttcttcaatacataaactgtaagaaaa

SEQ ID NO: 114402 - DNA, 70 bp, Homo sapiens
agattgagaaccactccgtgggtcaaacggcccaggttcttcaatacataaactgtaagaaaaatagatg

SEQ ID NO: 114403 - DNA, 67 bp, Homo sapiens
actccgtgggtcaaacggcccaggttcttcaatacataaactgtaagaaaaatagatggaggaaaac

SEQ ID NO: 114404 - DNA, 75 bp, Homo sapiens
attaatagagaccgtgctgcggtgtttacccaaatggttctcatgcttacccattagcgtcctcaatccttgatc

SEQ ID NO: 114405 - DNA, 74 bp, Homo sapiens
accgtgctgcggtgtttacccaaatggttctcatgcttacccattagcgtcctcaatccttgatctcattcccc

SEQ ID NO: 114406 - DNA, 71 bp, Homo sapiens
ggtgtttacccaaatggttctcatgcttacccattagcgtcctcaatccttgatctcattccccctccttt

SEQ ID NO: 114407 - DNA, 74 bp, Homo sapiens
aaatggttctcatgcttacccattagcgtcctcaatccttgatctcattccccctccttttcccatagatgaac

SEQ ID NO: 114408 - DNA, 73 bp, Homo sapiens
atgcttacccattagcgtcctcaatccttgatctcattccccctccttttcccatagatgaaccggtggatcc

SEQ ID NO: 114409 - DNA, 73 bp, Homo sapiens
attagcgtcctcaatccttgatctcattccccctccttttcccatagatgaaccggtggatcctgctttccag

SEQ ID NO: 114410 - DNA, 72 bp, Homo sapiens
aatccttgatctcattccccctccttttcccatagatgaaccggtggatcctgctttccagtctgtcaccct

SEQ ID NO: 114411 - DNA, 74 bp, Homo sapiens
ttgatctcattccccctccttttcccatagatgaaccggtggatcctgctttccagtctgtcacccttggcgta

SEQ ID NO: 114412 - DNA, 73 bp, Homo sapiens
ctccttttcccatagatgaaccggtggatcctgctttccagtctgtcacccttggcgtacaggctaccacgag

SEQ ID NO: 114413 - DNA, 74 bp, Homo sapiens
tttcccatagatgaaccggtggatcctgctttccagtctgtcacccttggcgtacaggctaccacgagttgaag

SEQ ID NO: 114414 - DNA, 73 bp, Homo sapiens
atgaaccggtggatcctgctttccagtctgtcacccttggcgtacaggctaccacgagttgaaggagggtcta

SEQ ID NO: 114415 - DNA, 75 bp, Homo sapiens
atcctgctttccagtctgtcacccttggcgtacaggctaccacgagttgaaggagggtctattgctggagaagac

SEQ ID NO: 114416 - DNA, 75 bp, Homo sapiens
agtctgtcacccttggcgtacaggctaccacgagttgaaggagggtctattgctggagaagactggttcatagga

SEQ ID NO: 114417 - DNA, 73 bp, Homo sapiens
acccttggcgtacaggctaccacgagttgaaggagggtctattgctggagaagactggttcataggagtccgc

SEQ ID NO: 114418 - DNA, 79 bp, Homo sapiens
aggctaccacgagttgaaggagggtctattgctggagaagactggttcataggagtccgctcaggctcgcagctgccaa

SEQ ID NO: 114419 - DNA, 79 bp, Homo sapiens
acgagttgaaggagggtctattgctggagaagactggttcataggagtccgctcaggctcgcagctgccaacatgaaaa

SEQ ID NO: 114420 - DNA, 76 bp, Homo sapiens
aaggagggtctattgctggagaagactggttcataggagtccgctcaggctcgcagctgccaacatgaaaaaaaaa

SEQ ID NO: 114421 - DNA, 80 bp, Homo sapiens
tattgctggagaagactggttcataggagtccgctcaggctcgcagctgccaacatgaaaaaaaaaatcatctcagaaaa

SEQ ID NO: 114422 - DNA, 85 bp, Homo sapiens
tttgagatgctaatgtaccggagaggtatagaaatattgcactcacctgcctattcactcaaggatcacacatgataagtcatga

SEQ ID NO: 114423 - DNA, 84 bp, Homo sapiens
atgctaatgtaccggagaggtatagaaatattgcactcacctgcctattcactcaaggatcacacatgataagtcatgacatat

SEQ ID NO: 114424 - DNA, 86 bp, Homo sapiens
gagaggtatagaaatattgcactcacctgcctattcactcaaggatcacacatgataagtcatgacatattgcagccaacagtaaa

SEQ ID NO: 114425 - DNA, 85 bp, Homo sapiens
atagaaatattgcactcacctgcctattcactcaaggatcacacatgataagtcatgacatattgcagccaacagtaaaacacaa

SEQ ID NO: 114426 - DNA, 86 bp, Homo sapiens
attgcactcacctgcctattcactcaaggatcacacatgataagtcatgacatattgcagccaacagtaaaacacaatcgtcgtga

SEQ ID NO: 114427 - DNA, 83 bp, Homo sapiens
cctattcactcaaggatcacacatgataagtcatgacatattgcagccaacagtaaaacacaatcgtcgtgagcacccatggg

SEQ ID NO: 114428 - DNA, 82 bp, Homo sapiens
actcaaggatcacacatgataagtcatgacatattgcagccaacagtaaaacacaatcgtcgtgagcacccatgggtgccgg

SEQ ID NO: 114429 - DNA, 82 bp, Homo sapiens
acatgataagtcatgacatattgcagccaacagtaaaacacaatcgtcgtgagcacccatgggtgccgggcaggagcgtcca

SEQ ID NO: 114430 - DNA, 81 bp, Homo sapiens
tcatgacatattgcagccaacagtaaaacacaatcgtcgtgagcacccatgggtgccgggcaggagcgtccaccgttcatc

SEQ ID NO: 114431 - DNA, 78 bp, Homo sapiens
atattgcagccaacagtaaaacacaatcgtcgtgagcacccatgggtgccgggcaggagcgtccaccgttcatccaca

SEQ ID NO: 114432 - DNA, 75 bp, Homo sapiens
agtaaaacacaatcgtcgtgagcacccatgggtgccgggcaggagcgtccaccgttcatccacaccctcagccat

SEQ ID NO: 114433 - DNA, 78 bp, Homo sapiens
aacacaatcgtcgtgagcacccatgggtgccgggcaggagcgtccaccgttcatccacaccctcagccattctgtgaa

SEQ ID NO: 114434 - DNA, 77 bp, Homo sapiens
agcacccatgggtgccgggcaggagcgtccaccgttcatccacaccctcagccattctgtgaagtgggcatttccac

SEQ ID NO: 114435 - DNA, 79 bp, Homo sapiens
atgggtgccgggcaggagcgtccaccgttcatccacaccctcagccattctgtgaagtgggcatttccactctgcaaga

SEQ ID NO: 114436 - DNA, 79 bp, Homo sapiens
aggagcgtccaccgttcatccacaccctcagccattctgtgaagtgggcatttccactctgcaagaacctgaggcacag

SEQ ID NO: 114437 - DNA, 78 bp, Homo sapiens
cgtccaccgttcatccacaccctcagccattctgtgaagtgggcatttccactctgcaagaacctgaggcacagggag

SEQ ID NO: 114438 - DNA, 80 bp, Homo sapiens
atccacaccctcagccattctgtgaagtgggcatttccactctgcaagaacctgaggcacagggaggtcacgtgccttgc

SEQ ID NO: 114439 - DNA, 78 bp, Homo sapiens
cctcagccattctgtgaagtgggcatttccactctgcaagaacctgaggcacagggaggtcacgtgccttgccgaggg

SEQ ID NO: 114440 - DNA, 76 bp, Homo sapiens
tgtgaagtgggcatttccactctgcaagaacctgaggcacagggaggtcacgtgccttgccgaggggaagagtttg

SEQ ID NO: 114441 - DNA, 66 bp, Homo sapiens
aaaagaaatttaaagaacttccacaagaaataagttacaccaagaatactgttatcactacaaatt

SEQ ID NO: 114442 - DNA, 69 bp, Homo sapiens
taaagaacttccacaagaaataagttacaccaagaatactgttatcactacaaattttattcagaaacc

SEQ ID NO: 114443 - DNA, 71 bp, Homo sapiens
ccacaagaaataagttacaccaagaatactgttatcactacaaattttattcagaaacccatctttgtatg

SEQ ID NO: 114444 - DNA, 69 bp, Homo sapiens
agaaataagttacaccaagaatactgttatcactacaaattttattcagaaacccatctttgtatgttt

SEQ ID NO: 114445 - DNA, 67 bp, Homo sapiens
acaccaagaatactgttatcactacaaattttattcagaaacccatctttgtatgtttttttttttg

SEQ ID NO: 114446 - DNA, 69 bp, Homo sapiens
ttaaaaaaaattccccttatgaactggtttggtcaatcaactacaacactttctagcagacataaggta

SEQ ID NO: 114447 - DNA, 69 bp, Homo sapiens
aaaattccccttatgaactggtttggtcaatcaactacaacactttctagcagacataaggtaaaaatg

SEQ ID NO: 114448 - DNA, 77 bp, Homo sapiens
ttatgaactggtttggtcaatcaactacaacactttctagcagacataaggtaaaaatggcatggctcagaatcgcc

SEQ ID NO: 114449 - DNA, 78 bp, Homo sapiens
gtttggtcaatcaactacaacactttctagcagacataaggtaaaaatggcatggctcagaatcgcccagatctttca

SEQ ID NO: 114450 - DNA, 80 bp, Homo sapiens
atcaactacaacactttctagcagacataaggtaaaaatggcatggctcagaatcgcccagatctttcacgatctctcga

SEQ ID NO: 114451 - DNA, 78 bp, Homo sapiens
actttctagcagacataaggtaaaaatggcatggctcagaatcgcccagatctttcacgatctctcgaccgcctcctg

SEQ ID NO: 114452 - DNA, 77 bp, Homo sapiens
acataaggtaaaaatggcatggctcagaatcgcccagatctttcacgatctctcgaccgcctcctgtcacgctcccg

SEQ ID NO: 114453 - DNA, 79 bp, Homo sapiens
taaaaatggcatggctcagaatcgcccagatctttcacgatctctcgaccgcctcctgtcacgctcccgtccgccgcca

SEQ ID NO: 114454 - DNA, 78 bp, Homo sapiens
atggctcagaatcgcccagatctttcacgatctctcgaccgcctcctgtcacgctcccgtccgccgccacctccacca

SEQ ID NO: 114455 - DNA, 75 bp, Homo sapiens
aatcgcccagatctttcacgatctctcgaccgcctcctgtcacgctcccgtccgccgccacctccaccaccgcca

SEQ ID NO: 114456 - DNA, 73 bp, Homo sapiens
atctttcacgatctctcgaccgcctcctgtcacgctcccgtccgccgccacctccaccaccgccaccgccacc

SEQ ID NO: 114457 - DNA, 73 bp, Homo sapiens
atctctcgaccgcctcctgtcacgctcccgtccgccgccacctccaccaccgccaccgccaccgccacgacca

SEQ ID NO: 114458 - DNA, 72 bp, Homo sapiens
tcctgtcacgctcccgtccgccgccacctccaccaccgccaccgccaccgccacgaccacggtctctagacc

SEQ ID NO: 114459 - DNA, 72 bp, Homo sapiens
tcacgctcccgtccgccgccacctccaccaccgccaccgccaccgccacgaccacggtctctagaccgagaa

SEQ ID NO: 114460 - DNA, 69 bp, Homo sapiens
ccgccacctccaccaccgccaccgccaccgccacgaccacggtctctagaccgagaacgacgctcccgg

SEQ ID NO: 114461 - DNA, 75 bp, Homo sapiens
accgccaccgccacgaccacggtctctagaccgagaacgacgctcccgggatcgggatcttgatctatgcctgca

SEQ ID NO: 114462 - DNA, 74 bp, Homo sapiens
ccacgaccacggtctctagaccgagaacgacgctcccgggatcgggatcttgatctatgcctgcaaccaaggaa

SEQ ID NO: 114463 - DNA, 70 bp, Homo sapiens
agaccgagaacgacgctcccgggatcgggatcttgatctatgcctgcaaccaaggaaaataaagaaaacc

SEQ ID NO: 114464 - DNA, 71 bp, Homo sapiens
acgctcccgggatcgggatcttgatctatgcctgcaaccaaggaaaataaagaaaaccgtgccatccaaac

SEQ ID NO: 114465 - DNA, 74 bp, Homo sapiens
tatgcctgcaaccaaggaaaataaagaaaaccgtgccatccaaaccacggcacgcagcacagaaccacacccac

SEQ ID NO: 114466 - DNA, 75 bp, Homo sapiens
ggaaaataaagaaaaccgtgccatccaaaccacggcacgcagcacagaaccacacccactctctcaacacgcgca

SEQ ID NO: 114467 - DNA, 78 bp, Homo sapiens
taaagaaaaccgtgccatccaaaccacggcacgcagcacagaaccacacccactctctcaacacgcgcagctcctcaa

SEQ ID NO: 114468 - DNA, 81 bp, Homo sapiens
ccatccaaaccacggcacgcagcacagaaccacacccactctctcaacacgcgcagctcctcaagccaacggcactgataa

SEQ ID NO: 114469 - DNA, 79 bp, Homo sapiens
aaaccacggcacgcagcacagaaccacacccactctctcaacacgcgcagctcctcaagccaacggcactgataaggaa

SEQ ID NO: 114470 - DNA, 81 bp, Homo sapiens
acgcagcacagaaccacacccactctctcaacacgcgcagctcctcaagccaacggcactgataaggaaaaacactgctga

SEQ ID NO: 114471 - DNA, 78 bp, Homo sapiens
agaaccacacccactctctcaacacgcgcagctcctcaagccaacggcactgataaggaaaaacactgctgaagagac

SEQ ID NO: 114472 - DNA, 82 bp, Homo sapiens
actctctcaacacgcgcagctcctcaagccaacggcactgataaggaaaaacactgctgaagagactgcacgccgtgactga

SEQ ID NO: 114473 - DNA, 81 bp, Homo sapiens
aacacgcgcagctcctcaagccaacggcactgataaggaaaaacactgctgaagagactgcacgccgtgactgagacacac

SEQ ID NO: 114474 - DNA, 80 bp, Homo sapiens
ctcctcaagccaacggcactgataaggaaaaacactgctgaagagactgcacgccgtgactgagacacaccctgatttca

SEQ ID NO: 114475 - DNA, 78 bp, Homo sapiens
aacggcactgataaggaaaaacactgctgaagagactgcacgccgtgactgagacacaccctgatttcaggtgtgaaa

SEQ ID NO: 114476 - DNA, 76 bp, Homo sapiens
ataaggaaaaacactgctgaagagactgcacgccgtgactgagacacaccctgatttcaggtgtgaaaagtttcag

SEQ ID NO: 114477 - DNA, 76 bp, Homo sapiens
aaacactgctgaagagactgcacgccgtgactgagacacaccctgatttcaggtgtgaaaagtttcaggagaaaaa

SEQ ID NO: 114478 - DNA, 75 bp, Homo sapiens
agactgcacgccgtgactgagacacaccctgatttcaggtgtgaaaagtttcaggagaaaaaaatgtgcaactta

SEQ ID NO: 114479 - DNA, 74 bp, Homo sapiens
cgtgactgagacacaccctgatttcaggtgtgaaaagtttcaggagaaaaaaatgtgcaacttagaagtgaaca

SEQ ID NO: 114480 - DNA, 74 bp, Homo sapiens
caggagaaaaaaatgtgcaacttagaagtgaacaggtgtaataccttgcatcttctgtcttcttctagaaccaa

SEQ ID NO: 114481 - DNA, 74 bp, Homo sapiens
aacttagaagtgaacaggtgtaataccttgcatcttctgtcttcttctagaaccaactcaaatggtcacaggaa

SEQ ID NO: 114482 - DNA, 80 bp, Homo sapiens
tcttctgtcttcttctagaaccaactcaaatggtcacaggaaatcataatcaaaatgagctggacacataccatcttcaa

SEQ ID NO: 114483 - DNA, 79 bp, Homo sapiens
tcttcttctagaaccaactcaaatggtcacaggaaatcataatcaaaatgagctggacacataccatcttcaaccctca

SEQ ID NO: 114484 - DNA, 78 bp, Homo sapiens
tagaaccaactcaaatggtcacaggaaatcataatcaaaatgagctggacacataccatcttcaaccctcactgaccc

SEQ ID NO: 114485 - DNA, 78 bp, Homo sapiens
aaatggtcacaggaaatcataatcaaaatgagctggacacataccatcttcaaccctcactgaccccacgcttcaggc

SEQ ID NO: 114486 - DNA, 81 bp, Homo sapiens
aaatcataatcaaaatgagctggacacataccatcttcaaccctcactgaccccacgcttcaggcgctcatagctactgtg

SEQ ID NO: 114487 - DNA, 83 bp, Homo sapiens
ataatcaaaatgagctggacacataccatcttcaaccctcactgaccccacgcttcaggcgctcatagctactgtgtccatca

SEQ ID NO: 114488 - DNA, 79 bp, Homo sapiens
agctggacacataccatcttcaaccctcactgaccccacgcttcaggcgctcatagctactgtgtccatcaggtttttg

SEQ ID NO: 114489 - DNA, 77 bp, Homo sapiens
acataccatcttcaaccctcactgaccccacgcttcaggcgctcatagctactgtgtccatcaggtttttgggctgg

SEQ ID NO: 114490 - DNA, 78 bp, Homo sapiens
ttcaaccctcactgaccccacgcttcaggcgctcatagctactgtgtccatcaggtttttgggctggggagagcaggc

SEQ ID NO: 114491 - DNA, 75 bp, Homo sapiens
actgaccccacgcttcaggcgctcatagctactgtgtccatcaggtttttgggctggggagagcaggcctgtttt

SEQ ID NO: 114492 - DNA, 79 bp, Homo sapiens
tagctactgtgtccatcaggtttttgggctggggagagcaggcctgtttttctcttatgcttcttgaatgctgacaata

SEQ ID NO: 114493 - DNA, 76 bp, Homo sapiens
tgtccatcaggtttttgggctggggagagcaggcctgtttttctcttatgcttcttgaatgctgacaataaaacaa

SEQ ID NO: 114494 - DNA, 77 bp, Homo sapiens
tggggagagcaggcctgtttttctcttatgcttcttgaatgctgacaataaaacaatcgccacccatctatttacta

SEQ ID NO: 114495 - DNA, 76 bp, Homo sapiens
cttcttgaatgctgacaataaaacaatcgccacccatctatttactagtccatgtttaacagaagagggatgagaa

SEQ ID NO: 114496 - DNA, 75 bp, Homo sapiens
aatgctgacaataaaacaatcgccacccatctatttactagtccatgtttaacagaagagggatgagaacctctc

SEQ ID NO: 114497 - DNA, 77 bp, Homo sapiens
tctatttactagtccatgtttaacagaagagggatgagaacctctccagactcagaactcaatcggttcgattctga

SEQ ID NO: 114498 - DNA, 75 bp, Homo sapiens
atgtttaacagaagagggatgagaacctctccagactcagaactcaatcggttcgattctgacgtcttgattttc

SEQ ID NO: 114499 - DNA, 79 bp, Homo sapiens
taacagaagagggatgagaacctctccagactcagaactcaatcggttcgattctgacgtcttgattttctctgctctg

SEQ ID NO: 114500 - DNA, 80 bp, Homo sapiens
tgagaacctctccagactcagaactcaatcggttcgattctgacgtcttgattttctctgctctgtgacctgtcgtacat

SEQ ID NO: 114501 - DNA, 79 bp, Homo sapiens
tccagactcagaactcaatcggttcgattctgacgtcttgattttctctgctctgtgacctgtcgtacatttaaatgta

SEQ ID NO: 114502 - DNA, 80 bp, Homo sapiens
aatcggttcgattctgacgtcttgattttctctgctctgtgacctgtcgtacatttaaatgtaggatcagagagatgtga

SEQ ID NO: 114503 - DNA, 80 bp, Homo sapiens
attctgacgtcttgattttctctgctctgtgacctgtcgtacatttaaatgtaggatcagagagatgtgaccgctgggcc

SEQ ID NO: 114504 - DNA, 82 bp, Homo sapiens
attttctctgctctgtgacctgtcgtacatttaaatgtaggatcagagagatgtgaccgctgggcctgattctgccagtgtc

SEQ ID NO: 114505 - DNA, 80 bp, Homo sapiens
tctgtgacctgtcgtacatttaaatgtaggatcagagagatgtgaccgctgggcctgattctgccagtgtcccgaaggga

SEQ ID NO: 114506 - DNA, 77 bp, Homo sapiens
acctgtcgtacatttaaatgtaggatcagagagatgtgaccgctgggcctgattctgccagtgtcccgaagggagga

SEQ ID NO: 114507 - DNA, 80 bp, Homo sapiens
tttaaatgtaggatcagagagatgtgaccgctgggcctgattctgccagtgtcccgaagggaggatgccagcgatcccaa

SEQ ID NO: 114508 - DNA, 83 bp, Homo sapiens
taggatcagagagatgtgaccgctgggcctgattctgccagtgtcccgaagggaggatgccagcgatcccaagacataatgaa

SEQ ID NO: 114509 - DNA, 77 bp, Homo sapiens
tgggcctgattctgccagtgtcccgaagggaggatgccagcgatcccaagacataatgaaatgccctaaaaccaaca

SEQ ID NO: 114510 - DNA, 75 bp, Homo sapiens
attctgccagtgtcccgaagggaggatgccagcgatcccaagacataatgaaatgccctaaaaccaacaagcaaa

SEQ ID NO: 114511 - DNA, 72 bp, Homo sapiens
tgtcccgaagggaggatgccagcgatcccaagacataatgaaatgccctaaaaccaacaagcaaaaccaaaa

SEQ ID NO: 114512 - DNA, 70 bp, Homo sapiens
agggaggatgccagcgatcccaagacataatgaaatgccctaaaaccaacaagcaaaaccaaaagaaacc

SEQ ID NO: 114513 - DNA, 71 bp, Homo sapiens
gatcccaagacataatgaaatgccctaaaaccaacaagcaaaaccaaaagaaaccccagtggacatgtgaa

SEQ ID NO: 114514 - DNA, 70 bp, Homo sapiens
acataatgaaatgccctaaaaccaacaagcaaaaccaaaagaaaccccagtggacatgtgaaatatgtaa

SEQ ID NO: 114515 - DNA, 68 bp, Homo sapiens
aaatgccctaaaaccaacaagcaaaaccaaaagaaaccccagtggacatgtgaaatatgtaaagcaaa

SEQ ID NO: 114516 - DNA, 70 bp, Homo sapiens
taaaaccaacaagcaaaaccaaaagaaaccccagtggacatgtgaaatatgtaaagcaaaagcttgtcca

SEQ ID NO: 114517 - DNA, 71 bp, Homo sapiens
aaaaccaaaagaaaccccagtggacatgtgaaatatgtaaagcaaaagcttgtccaacctgcagcccaaca

SEQ ID NO: 114518 - DNA, 74 bp, Homo sapiens
gacaattcttcttccaatgtgtcccagggaagccatccctgatctaaaggaggttacaacatctattcttcttc

SEQ ID NO: 114519 - DNA, 74 bp, Homo sapiens
tcttccaatgtgtcccagggaagccatccctgatctaaaggaggttacaacatctattcttcttcttcgtaata

SEQ ID NO: 114520 - DNA, 74 bp, Homo sapiens
tgtcccagggaagccatccctgatctaaaggaggttacaacatctattcttcttcttcgtaatatctgggagaa

SEQ ID NO: 114521 - DNA, 76 bp, Homo sapiens
aagccatccctgatctaaaggaggttacaacatctattcttcttcttcgtaatatctgggagaataaactgcatgc

SEQ ID NO: 114522 - DNA, 75 bp, Homo sapiens
tccctgatctaaaggaggttacaacatctattcttcttcttcgtaatatctgggagaataaactgcatgcccact

SEQ ID NO: 114523 - DNA, 76 bp, Homo sapiens
ctgatctaaaggaggttacaacatctattcttcttcttcgtaatatctgggagaataaactgcatgcccactttca

SEQ ID NO: 114524 - DNA, 74 bp, Homo sapiens
atctaaaggaggttacaacatctattcttcttcttcgtaatatctgggagaataaactgcatgcccactttcac

SEQ ID NO: 114525 - DNA, 73 bp, Homo sapiens
aaaggaggttacaacatctattcttcttcttcgtaatatctgggagaataaactgcatgcccactttcaccac

SEQ ID NO: 114526 - DNA, 79 bp, Homo sapiens
atctattcttcttcttcgtaatatctgggagaataaactgcatgcccactttcaccacgagcctcatgtccgcggctgc

SEQ ID NO: 114527 - DNA, 79 bp, Homo sapiens
ttcttcttcgtaatatctgggagaataaactgcatgcccactttcaccacgagcctcatgtccgcggctgcccagctaa

SEQ ID NO: 114528 - DNA, 78 bp, Homo sapiens
cttcttcgtaatatctgggagaataaactgcatgcccactttcaccacgagcctcatgtccgcggctgcccagctaac

SEQ ID NO: 114529 - DNA, 79 bp, Homo sapiens
tgggagaataaactgcatgcccactttcaccacgagcctcatgtccgcggctgcccagctaaccgccctcttgcttgat

SEQ ID NO: 114530 - DNA, 78 bp, Homo sapiens
ataaactgcatgcccactttcaccacgagcctcatgtccgcggctgcccagctaaccgccctcttgcttgattactaa

SEQ ID NO: 114531 - DNA, 79 bp, Homo sapiens
atgtccgcggctgcccagctaaccgccctcttgcttgattactaagatctgatctctacttgagaagttggataatgaa

SEQ ID NO: 114532 - DNA, 77 bp, Homo sapiens
ctgcccagctaaccgccctcttgcttgattactaagatctgatctctacttgagaagttggataatgaagttacctg

SEQ ID NO: 114533 - DNA, 78 bp, Homo sapiens
agctaaccgccctcttgcttgattactaagatctgatctctacttgagaagttggataatgaagttacctgtgtgcag

SEQ ID NO: 114534 - DNA, 81 bp, Homo sapiens
tcttgcttgattactaagatctgatctctacttgagaagttggataatgaagttacctgtgtgcaggtgaatattcttctc

SEQ ID NO: 114535 - DNA, 78 bp, Homo sapiens
attactaagatctgatctctacttgagaagttggataatgaagttacctgtgtgcaggtgaatattcttctccaaaga

SEQ ID NO: 114536 - DNA, 78 bp, Homo sapiens
atctgatctctacttgagaagttggataatgaagttacctgtgtgcaggtgaatattcttctccaaagaggacatttg

SEQ ID NO: 114537 - DNA, 75 bp, Homo sapiens
ttgagaagttggataatgaagttacctgtgtgcaggtgaatattcttctccaaagaggacatttggatatttaaa

SEQ ID NO: 114538 - DNA, 73 bp, Homo sapiens
agttggataatgaagttacctgtgtgcaggtgaatattcttctccaaagaggacatttggatatttaaaaata

SEQ ID NO: 114539 - DNA, 75 bp, Homo sapiens
tgaagttacctgtgtgcaggtgaatattcttctccaaagaggacatttggatatttaaaaatatgtactatgttc

SEQ ID NO: 114540 - DNA, 76 bp, Homo sapiens
tgtgcaggtgaatattcttctccaaagaggacatttggatatttaaaaatatgtactatgttctaagcactgcctt

SEQ ID NO: 114541 - DNA, 73 bp, Homo sapiens
tgaatattcttctccaaagaggacatttggatatttaaaaatatgtactatgttctaagcactgccttttaaa

SEQ ID NO: 114542 - DNA, 71 bp, Homo sapiens
tctccaaagaggacatttggatatttaaaaatatgtactatgttctaagcactgccttttaaaaaacagaa

SEQ ID NO: 114543 - DNA, 71 bp, Homo sapiens
tttggatatttaaaaatatgtactatgttctaagcactgccttttaaaaaacagaaacgacacctatgcca

SEQ ID NO: 114544 - DNA, 68 bp, Homo sapiens
taaaaatatgtactatgttctaagcactgccttttaaaaaacagaaacgacacctatgccaaaatttt

SEQ ID NO: 114545 - DNA, 67 bp, Homo sapiens
atatgtactatgttctaagcactgccttttaaaaaacagaaacgacacctatgccaaaatttttttt

SEQ ID NO: 114546 - DNA, 62 bp, Homo sapiens
taaaaaacagaaacgacacctatgccaaaattttttttttggaagggggagggttgtgaggg

SEQ ID NO: 114547 - DNA, 64 bp, Homo sapiens
acagaaacgacacctatgccaaaattttttttttggaagggggagggttgtgaggggagaaaga

SEQ ID NO: 114548 - DNA, 66 bp, Homo sapiens
tttttttttggaagggggagggttgtgaggggagaaagaagccactgagcttaacaacgggcacag

SEQ ID NO: 114549 - DNA, 70 bp, Homo sapiens
ttttggaagggggagggttgtgaggggagaaagaagccactgagcttaacaacgggcacaggaatactca

SEQ ID NO: 114550 - DNA, 72 bp, Homo sapiens
agggttgtgaggggagaaagaagccactgagcttaacaacgggcacaggaatactcacttcttgcgacggcg

SEQ ID NO: 114551 - DNA, 76 bp, Homo sapiens
ggagaaagaagccactgagcttaacaacgggcacaggaatactcacttcttgcgacggcggccatacagctcccgc

SEQ ID NO: 114552 - DNA, 78 bp, Homo sapiens
aagccactgagcttaacaacgggcacaggaatactcacttcttgcgacggcggccatacagctcccgccgcagctctc

SEQ ID NO: 114553 - DNA, 77 bp, Homo sapiens
agcttaacaacgggcacaggaatactcacttcttgcgacggcggccatacagctcccgccgcagctctctggaaatg

SEQ ID NO: 114554 - DNA, 77 bp, Homo sapiens
aacgggcacaggaatactcacttcttgcgacggcggccatacagctcccgccgcagctctctggaaatgggcttcaa

SEQ ID NO: 114555 - DNA, 82 bp, Homo sapiens
aatactcacttcttgcgacggcggccatacagctcccgccgcagctctctggaaatgggcttcaaatgcatgaagttgcaga

SEQ ID NO: 114556 - DNA, 82 bp, Homo sapiens
ttcttgcgacggcggccatacagctcccgccgcagctctctggaaatgggcttcaaatgcatgaagttgcagaagccgcctc

SEQ ID NO: 114557 - DNA, 83 bp, Homo sapiens
acagctcccgccgcagctctctggaaatgggcttcaaatgcatgaagttgcagaagccgcctcgtgtgcattctctgtgggtg

SEQ ID NO: 114558 - DNA, 80 bp, Homo sapiens
agctctctggaaatgggcttcaaatgcatgaagttgcagaagccgcctcgtgtgcattctctgtgggtgggttggaagga

SEQ ID NO: 114559 - DNA, 78 bp, Homo sapiens
aaatgggcttcaaatgcatgaagttgcagaagccgcctcgtgtgcattctctgtgggtgggttggaaggagacattta

SEQ ID NO: 114560 - DNA, 81 bp, Homo sapiens
acacggccccgaactgtgctcagtcacgtcactggccactcctcactcaccccatctcatactgacggcagcaggcttctc

SEQ ID NO: 114561 - DNA, 83 bp, Homo sapiens
aactgtgctcagtcacgtcactggccactcctcactcaccccatctcatactgacggcagcaggcttctctgaagtccgtcac

SEQ ID NO: 114562 - DNA, 81 bp, Homo sapiens
agtcacgtcactggccactcctcactcaccccatctcatactgacggcagcaggcttctctgaagtccgtcacgggtgaca

SEQ ID NO: 114563 - DNA, 82 bp, Homo sapiens
gccactcctcactcaccccatctcatactgacggcagcaggcttctctgaagtccgtcacgggtgacagctcggcgtggatc

SEQ ID NO: 114564 - DNA, 81 bp, Homo sapiens
actcaccccatctcatactgacggcagcaggcttctctgaagtccgtcacgggtgacagctcggcgtggatcggctgtcca

SEQ ID NO: 114565 - DNA, 80 bp, Homo sapiens
atctcatactgacggcagcaggcttctctgaagtccgtcacgggtgacagctcggcgtggatcggctgtccattaaacca

SEQ ID NO: 114566 - DNA, 77 bp, Homo sapiens
tactgacggcagcaggcttctctgaagtccgtcacgggtgacagctcggcgtggatcggctgtccattaaaccaacg

SEQ ID NO: 114567 - DNA, 75 bp, Homo sapiens
gcttctctgaagtccgtcacgggtgacagctcggcgtggatcggctgtccattaaaccaacggttattcaagtca

SEQ ID NO: 114568 - DNA, 76 bp, Homo sapiens
tctgaagtccgtcacgggtgacagctcggcgtggatcggctgtccattaaaccaacggttattcaagtcaatcaca

SEQ ID NO: 114569 - DNA, 74 bp, Homo sapiens
gtcacgggtgacagctcggcgtggatcggctgtccattaaaccaacggttattcaagtcaatcacagccttttc

SEQ ID NO: 114570 - DNA, 75 bp, Homo sapiens
agctcggcgtggatcggctgtccattaaaccaacggttattcaagtcaatcacagccttttccgcatcttcctca

SEQ ID NO: 114571 - DNA, 72 bp, Homo sapiens
atcggctgtccattaaaccaacggttattcaagtcaatcacagccttttccgcatcttcctcacggcgaaac

SEQ ID NO: 114572 - DNA, 72 bp, Homo sapiens
tccattaaaccaacggttattcaagtcaatcacagccttttccgcatcttcctcacggcgaaactgaaaaga

SEQ ID NO: 114573 - DNA, 70 bp, Homo sapiens
accaacggttattcaagtcaatcacagccttttccgcatcttcctcacggcgaaactgaaaagacaaaaa

SEQ ID NO: 114574 - DNA, 75 bp, Homo sapiens
aagtcaatcacagccttttccgcatcttcctcacggcgaaactgaaaagacaaaaacagaagtgcttgccatcca

SEQ ID NO: 114575 - DNA, 72 bp, Homo sapiens
ttggccctggcacactaagcggccacgccgccgtctcgccctggctcctaccttgacgtacacgttccccac

SEQ ID NO: 114576 - DNA, 70 bp, Homo sapiens
acactaagcggccacgccgccgtctcgccctggctcctaccttgacgtacacgttccccaccaggtggtc

SEQ ID NO: 114577 - DNA, 70 bp, Homo sapiens
acgccgccgtctcgccctggctcctaccttgacgtacacgttccccaccaggtggtctcccaggttgtca

SEQ ID NO: 114578 - DNA, 73 bp, Homo sapiens
tcgccctggctcctaccttgacgtacacgttccccaccaggtggtctcccaggttgtcacagacgttcatctc

SEQ ID NO: 114579 - DNA, 71 bp, Homo sapiens
ctcctaccttgacgtacacgttccccaccaggtggtctcccaggttgtcacagacgttcatctcctctact

SEQ ID NO: 114580 - DNA, 70 bp, Homo sapiens
acgtacacgttccccaccaggtggtctcccaggttgtcacagacgttcatctcctctacttccccatact

SEQ ID NO: 114581 - DNA, 72 bp, Homo sapiens
ttccccaccaggtggtctcccaggttgtcacagacgttcatctcctctacttccccatacttctcctccatt

SEQ ID NO: 114582 - DNA, 72 bp, Homo sapiens
aggtggtctcccaggttgtcacagacgttcatctcctctacttccccatacttctcctccatttctgtaaaa

SEQ ID NO: 114583 - DNA, 71 bp, Homo sapiens
aggttgtcacagacgttcatctcctctacttccccatacttctcctccatttctgtaaaaacctcctgaag

SEQ ID NO: 114584 - DNA, 71 bp, Homo sapiens
acagacgttcatctcctctacttccccatacttctcctccatttctgtaaaaacctcctgaagggagacca

SEQ ID NO: 114585 - DNA, 70 bp, Homo sapiens
tctcctctacttccccatacttctcctccatttctgtaaaaacctcctgaagggagaccacagtggttta

SEQ ID NO: 114586 - DNA, 69 bp, Homo sapiens
tccccatacttctcctccatttctgtaaaaacctcctgaagggagaccacagtggtttaagactcgtta

SEQ ID NO: 114587 - DNA, 77 bp, Homo sapiens
acattttaaatccttccaaacagatacagaagatcaacaggtctatcagtcacagagttcagttctctcacctcaaa

SEQ ID NO: 114588 - DNA, 76 bp, Homo sapiens
ttaaatccttccaaacagatacagaagatcaacaggtctatcagtcacagagttcagttctctcacctcaaaaaac

SEQ ID NO: 114589 - DNA, 79 bp, Homo sapiens
aaacagatacagaagatcaacaggtctatcagtcacagagttcagttctctcacctcaaaaaactcatcatagtgttcc

SEQ ID NO: 114590 - DNA, 83 bp, Homo sapiens
acagaagatcaacaggtctatcagtcacagagttcagttctctcacctcaaaaaactcatcatagtgttcctgcatctccaca

SEQ ID NO: 114591 - DNA, 82 bp, Homo sapiens
aacaggtctatcagtcacagagttcagttctctcacctcaaaaaactcatcatagtgttcctgcatctccacatcgctcacg

SEQ ID NO: 114592 - DNA, 84 bp, Homo sapiens
tcacagagttcagttctctcacctcaaaaaactcatcatagtgttcctgcatctccacatcgctcacggcacctgcaaacaaca

SEQ ID NO: 114593 - DNA, 81 bp, Homo sapiens
agttcagttctctcacctcaaaaaactcatcatagtgttcctgcatctccacatcgctcacggcacctgcaaacaacagaa

SEQ ID NO: 114594 - DNA, 80 bp, Homo sapiens
acctcaaaaaactcatcatagtgttcctgcatctccacatcgctcacggcacctgcaaacaacagaaatcttgctggtta

SEQ ID NO: 114595 - DNA, 82 bp, Homo sapiens
aaactcatcatagtgttcctgcatctccacatcgctcacggcacctgcaaacaacagaaatcttgctggttagaacatgtta

SEQ ID NO: 114596 - DNA, 79 bp, Homo sapiens
atagtgttcctgcatctccacatcgctcacggcacctgcaaacaacagaaatcttgctggttagaacatgttaaccgag

SEQ ID NO: 114597 - DNA, 78 bp, Homo sapiens
atctccacatcgctcacggcacctgcaaacaacagaaatcttgctggttagaacatgttaaccgagtgaactcttgtg

SEQ ID NO: 114598 - DNA, 75 bp, Homo sapiens
atcgctcacggcacctgcaaacaacagaaatcttgctggttagaacatgttaaccgagtgaactcttgtgtttaa

SEQ ID NO: 114599 - DNA, 67 bp, Homo sapiens
cgtgcccggccccctttttatctttgaagataaaaaataacttcttattttctaattctgagaatga

SEQ ID NO: 114600 - DNA, 67 bp, Homo sapiens
cccctttttatctttgaagataaaaaataacttcttattttctaattctgagaatgatttaagttca

SEQ ID NO: 114601 - DNA, 69 bp, Homo sapiens
tctttgaagataaaaaataacttcttattttctaattctgagaatgatttaagttcactttctaaccta

SEQ ID NO: 114602 - DNA, 67 bp, Homo sapiens
gataaaaaataacttcttattttctaattctgagaatgatttaagttcactttctaacctatccggg

SEQ ID NO: 114603 - DNA, 68 bp, Homo sapiens
cttcttattttctaattctgagaatgatttaagttcactttctaacctatccggggctgttttagtta

SEQ ID NO: 114604 - DNA, 68 bp, Homo sapiens
tctaattctgagaatgatttaagttcactttctaacctatccggggctgttttagttatttttgaact

SEQ ID NO: 114605 - DNA, 69 bp, Homo sapiens
tctgagaatgatttaagttcactttctaacctatccggggctgttttagttatttttgaacttccagga

SEQ ID NO: 114606 - DNA, 67 bp, Homo sapiens
gatttaagttcactttctaacctatccggggctgttttagttatttttgaacttccaggaatctgct

SEQ ID NO: 114607 - DNA, 66 bp, Homo sapiens
tttctaacctatccggggctgttttagttatttttgaacttccaggaatctgctttcgaacccaaa

SEQ ID NO: 114608 - DNA, 66 bp, Homo sapiens
ctatccggggctgttttagttatttttgaacttccaggaatctgctttcgaacccaaattttatta

SEQ ID NO: 114609 - DNA, 66 bp, Homo sapiens
tttagttatttttgaacttccaggaatctgctttcgaacccaaattttattaagtgtaactactcg

SEQ ID NO: 114610 - DNA, 68 bp, Homo sapiens
ttatttttgaacttccaggaatctgctttcgaacccaaattttattaagtgtaactactcggacagcc

SEQ ID NO: 114611 - DNA, 76 bp, Homo sapiens
caggaatctgctttcgaacccaaattttattaagtgtaactactcggacagcctgccaatcatatcacaggatatc

SEQ ID NO: 114612 - DNA, 73 bp, Homo sapiens
ctttcgaacccaaattttattaagtgtaactactcggacagcctgccaatcatatcacaggatatcccaattg

SEQ ID NO: 114613 - DNA, 75 bp, Homo sapiens
caaattttattaagtgtaactactcggacagcctgccaatcatatcacaggatatcccaattggaaagctattgg

SEQ ID NO: 114614 - DNA, 77 bp, Homo sapiens
tttattaagtgtaactactcggacagcctgccaatcatatcacaggatatcccaattggaaagctattgggaatgta

SEQ ID NO: 114615 - DNA, 76 bp, Homo sapiens
gcctgccaatcatatcacaggatatcccaattggaaagctattgggaatgtaccttcctccccgagtagaaatcaa

SEQ ID NO: 114616 - DNA, 73 bp, Homo sapiens
aatcatatcacaggatatcccaattggaaagctattgggaatgtaccttcctccccgagtagaaatcaagtta

SEQ ID NO: 114617 - DNA, 69 bp, Homo sapiens
acaggatatcccaattggaaagctattgggaatgtaccttcctccccgagtagaaatcaagttataaac

SEQ ID NO: 114618 - DNA, 67 bp, Homo sapiens
aattggaaagctattgggaatgtaccttcctccccgagtagaaatcaagttataaacggccaaagta

SEQ ID NO: 114619 - DNA, 68 bp, Homo sapiens
tattgggaatgtaccttcctccccgagtagaaatcaagttataaacggccaaagtagcctattccaaa

SEQ ID NO: 114620 - DNA, 67 bp, Homo sapiens
taccttcctccccgagtagaaatcaagttataaacggccaaagtagcctattccaaagggcagattt

SEQ ID NO: 114621 - DNA, 68 bp, Homo sapiens
cccgagtagaaatcaagttataaacggccaaagtagcctattccaaagggcagattttaatatttcaa

SEQ ID NO: 114622 - DNA, 70 bp, Homo sapiens
tataaacggccaaagtagcctattccaaagggcagattttaatatttcaaattcacttccttcccacata

SEQ ID NO: 114623 - DNA, 70 bp, Homo sapiens
ccaaagtagcctattccaaagggcagattttaatatttcaaattcacttccttcccacataagaagaatg

SEQ ID NO: 114624 - DNA, 72 bp, Homo sapiens
ctattccaaagggcagattttaatatttcaaattcacttccttcccacataagaagaatgtgaagaggagaa

SEQ ID NO: 114625 - DNA, 75 bp, Homo sapiens
ggcagattttaatatttcaaattcacttccttcccacataagaagaatgtgaagaggagaaaattattcacatgc

SEQ ID NO: 114626 - DNA, 73 bp, Homo sapiens
atatttcaaattcacttccttcccacataagaagaatgtgaagaggagaaaattattcacatgctcaaagttt

SEQ ID NO: 114627 - DNA, 73 bp, Homo sapiens
attcacttccttcccacataagaagaatgtgaagaggagaaaattattcacatgctcaaagttttagcaggtt

SEQ ID NO: 114628 - DNA, 71 bp, Homo sapiens
gtgaagaggagaaaattattcacatgctcaaagttttagcaggtttgagaaatggttttggggtgattatt

SEQ ID NO: 114629 - DNA, 68 bp, Homo sapiens
agaaaattattcacatgctcaaagttttagcaggtttgagaaatggttttggggtgattattttaaat

SEQ ID NO: 114630 - DNA, 71 bp, Homo sapiens
tcacatgctcaaagttttagcaggtttgagaaatggttttggggtgattattttaaattattggctatatt

SEQ ID NO: 114631 - DNA, 68 bp, Homo sapiens
aagttttagcaggtttgagaaatggttttggggtgattattttaaattattggctatatttgttctgc

SEQ ID NO: 114632 - DNA, 68 bp, Homo sapiens
caggtttgagaaatggttttggggtgattattttaaattattggctatatttgttctgcttaaaatgt

SEQ ID NO: 114633 - DNA, 69 bp, Homo sapiens
ggttttggggtgattattttaaattattggctatatttgttctgcttaaaatgtttcaatcaaagtgac

SEQ ID NO: 114634 - DNA, 74 bp, Homo sapiens
gattattttaaattattggctatatttgttctgcttaaaatgtttcaatcaaagtgacttgaaaggcagagaca

SEQ ID NO: 114635 - DNA, 76 bp, Homo sapiens
aattattggctatatttgttctgcttaaaatgtttcaatcaaagtgacttgaaaggcagagacaactgcattaaga

SEQ ID NO: 114636 - DNA, 77 bp, Homo sapiens
ttggctatatttgttctgcttaaaatgtttcaatcaaagtgacttgaaaggcagagacaactgcattaagatacaat

SEQ ID NO: 114637 - DNA, 73 bp, Homo sapiens
gttctgcttaaaatgtttcaatcaaagtgacttgaaaggcagagacaactgcattaagatacaattaaaaact

SEQ ID NO: 114638 - DNA, 76 bp, Homo sapiens
tgtttcaatcaaagtgacttgaaaggcagagacaactgcattaagatacaattaaaaacttatttgtgactcagcc

SEQ ID NO: 114639 - DNA, 76 bp, Homo sapiens
caatcaaagtgacttgaaaggcagagacaactgcattaagatacaattaaaaacttatttgtgactcagcctatgt

SEQ ID NO: 114640 - DNA, 74 bp, Homo sapiens
gaaaggcagagacaactgcattaagatacaattaaaaacttatttgtgactcagcctatgttaaatactacaac

SEQ ID NO: 114641 - DNA, 75 bp, Homo sapiens
gcagagacaactgcattaagatacaattaaaaacttatttgtgactcagcctatgttaaatactacaacttggaa

SEQ ID NO: 114642 - DNA, 72 bp, Homo sapiens
gcattaagatacaattaaaaacttatttgtgactcagcctatgttaaatactacaacttggaaaataaagca

SEQ ID NO: 114643 - DNA, 68 bp, Homo sapiens
caattaaaaacttatttgtgactcagcctatgttaaatactacaacttggaaaataaagcagttttct

SEQ ID NO: 114644 - DNA, 71 bp, Homo sapiens
gactcagcctatgttaaatactacaacttggaaaataaagcagttttcttacagaaatatcattcttaaac

SEQ ID NO: 114645 - DNA, 70 bp, Homo sapiens
gttaaatactacaacttggaaaataaagcagttttcttacagaaatatcattcttaaactgggattgata

SEQ ID NO: 114646 - DNA, 69 bp, Homo sapiens
ctacaacttggaaaataaagcagttttcttacagaaatatcattcttaaactgggattgatagttaact

SEQ ID NO: 114647 - DNA, 69 bp, Homo sapiens
aataaagcagttttcttacagaaatatcattcttaaactgggattgatagttaactttaacccacgcat

SEQ ID NO: 114648 - DNA, 71 bp, Homo sapiens
gcagttttcttacagaaatatcattcttaaactgggattgatagttaactttaacccacgcatttgaagct

SEQ ID NO: 114649 - DNA, 69 bp, Homo sapiens
atcattcttaaactgggattgatagttaactttaacccacgcatttgaagcttatttttttacatacta

SEQ ID NO: 114650 - DNA, 67 bp, Homo sapiens
gttaactttaacccacgcatttgaagcttatttttttacatactaaagggtatgttgaaaagagcca

SEQ ID NO: 114651 - DNA, 67 bp, Homo sapiens
cccacgcatttgaagcttatttttttacatactaaagggtatgttgaaaagagccagtaattttagg

SEQ ID NO: 114652 - DNA, 66 bp, Homo sapiens
ttttttacatactaaagggtatgttgaaaagagccagtaattttaggtaattgatttcttcctaaa

SEQ ID NO: 114653 - DNA, 69 bp, Homo sapiens
tacatactaaagggtatgttgaaaagagccagtaattttaggtaattgatttcttcctaaaatgacgaa

SEQ ID NO: 114654 - DNA, 69 bp, Homo sapiens
gggtatgttgaaaagagccagtaattttaggtaattgatttcttcctaaaatgacgaattagaatttca

SEQ ID NO: 114655 - DNA, 71 bp, Homo sapiens
gagccagtaattttaggtaattgatttcttcctaaaatgacgaattagaatttcatctaatttgtacaatc

SEQ ID NO: 114656 - DNA, 72 bp, Homo sapiens
ttttaggtaattgatttcttcctaaaatgacgaattagaatttcatctaatttgtacaatctggactccaga

SEQ ID NO: 114657 - DNA, 73 bp, Homo sapiens
ggtaattgatttcttcctaaaatgacgaattagaatttcatctaatttgtacaatctggactccagaattgga

SEQ ID NO: 114658 - DNA, 74 bp, Homo sapiens
ctaatttgtacaatctggactccagaattggaatataacgtaattgctaaacttttagtttgtagcatatgcaa

SEQ ID NO: 114659 - DNA, 73 bp, Homo sapiens
ctggactccagaattggaatataacgtaattgctaaacttttagtttgtagcatatgcaaaacaaaagtgctg

SEQ ID NO: 114660 - DNA, 75 bp, Homo sapiens
ccagaattggaatataacgtaattgctaaacttttagtttgtagcatatgcaaaacaaaagtgctgtgaactgca

SEQ ID NO: 114661 - DNA, 73 bp, Homo sapiens
ggaatataacgtaattgctaaacttttagtttgtagcatatgcaaaacaaaagtgctgtgaactgcaaataaa

SEQ ID NO: 114662 - DNA, 75 bp, Homo sapiens
gtaattgctaaacttttagtttgtagcatatgcaaaacaaaagtgctgtgaactgcaaataaagacacaatgaaa

SEQ ID NO: 114663 - DNA, 75 bp, Homo sapiens
cttttagtttgtagcatatgcaaaacaaaagtgctgtgaactgcaaataaagacacaatgaaaactaatacaaca

SEQ ID NO: 114664 - DNA, 80 bp, Homo sapiens
gcatatgcaaaacaaaagtgctgtgaactgcaaataaagacacaatgaaaactaatacaacattctattgtcagtcaaga

SEQ ID NO: 114665 - DNA, 77 bp, Homo sapiens
aacaaaagtgctgtgaactgcaaataaagacacaatgaaaactaatacaacattctattgtcagtcaagaaagcata

SEQ ID NO: 114666 - DNA, 79 bp, Homo sapiens
aagtgctgtgaactgcaaataaagacacaatgaaaactaatacaacattctattgtcagtcaagaaagcatatacagtc

SEQ ID NO: 114667 - DNA, 76 bp, Homo sapiens
ctgcaaataaagacacaatgaaaactaatacaacattctattgtcagtcaagaaagcatatacagtccccaaataa

SEQ ID NO: 114668 - DNA, 75 bp, Homo sapiens
agacacaatgaaaactaatacaacattctattgtcagtcaagaaagcatatacagtccccaaataaacgatcagg

SEQ ID NO: 114669 - DNA, 74 bp, Homo sapiens
actaatacaacattctattgtcagtcaagaaagcatatacagtccccaaataaacgatcagggcaaagaattaa

SEQ ID NO: 114670 - DNA, 75 bp, Homo sapiens
tacaacattctattgtcagtcaagaaagcatatacagtccccaaataaacgatcagggcaaagaattaattactg

SEQ ID NO: 114671 - DNA, 76 bp, Homo sapiens
tattgtcagtcaagaaagcatatacagtccccaaataaacgatcagggcaaagaattaattactgttactcagtca

SEQ ID NO: 114672 - DNA, 73 bp, Homo sapiens
aaagcatatacagtccccaaataaacgatcagggcaaagaattaattactgttactcagtcatgtacttccat

SEQ ID NO: 114673 - DNA, 73 bp, Homo sapiens
tatacagtccccaaataaacgatcagggcaaagaattaattactgttactcagtcatgtacttccattcactt

SEQ ID NO: 114674 - DNA, 71 bp, Homo sapiens
gggcaaagaattaattactgttactcagtcatgtacttccattcacttttatcccagggcagggttgttaa

SEQ ID NO: 114675 - DNA, 70 bp, Homo sapiens
gaattaattactgttactcagtcatgtacttccattcacttttatcccagggcagggttgttaacaaaaa

SEQ ID NO: 114676 - DNA, 72 bp, Homo sapiens
cagtcatgtacttccattcacttttatcccagggcagggttgttaacaaaaattatttaataagtgcatata

SEQ ID NO: 114677 - DNA, 69 bp, Homo sapiens
tatcccagggcagggttgttaacaaaaattatttaataagtgcatatagaaacaatttccctccgccta

SEQ ID NO: 114678 - DNA, 69 bp, Homo sapiens
gttaacaaaaattatttaataagtgcatatagaaacaatttccctccgcctattgatcttatttcctta

SEQ ID NO: 114679 - DNA, 68 bp, Homo sapiens
aattatttaataagtgcatatagaaacaatttccctccgcctattgatcttatttccttaaaaaacaa

SEQ ID NO: 114680 - DNA, 65 bp, Homo sapiens
caaacaaaaaaacaggtattttaaaccaagggttaccaagtaaatcctgctaccatccgactcag

SEQ ID NO: 114681 - DNA, 64 bp, Homo sapiens
aaacaaaaaaacaggtattttaaaccaagggttaccaagtaaatcctgctaccatccgactcag

SEQ ID NO: 114682 - DNA, 65 bp, Homo sapiens
aaacaggtattttaaaccaagggttaccaagtaaatcctgctaccatccgactcagggaaagaaa

SEQ ID NO: 114683 - DNA, 70 bp, Homo sapiens
tattttaaaccaagggttaccaagtaaatcctgctaccatccgactcagggaaagaaatctctactatca

SEQ ID NO: 114684 - DNA, 75 bp, Homo sapiens
gttaccaagtaaatcctgctaccatccgactcagggaaagaaatctctactatcaggtcagtattagcactgaaa

SEQ ID NO: 114685 - DNA, 75 bp, Homo sapiens
aagtaaatcctgctaccatccgactcagggaaagaaatctctactatcaggtcagtattagcactgaaaagcatt

SEQ ID NO: 114686 - DNA, 78 bp, Homo sapiens
taccatccgactcagggaaagaaatctctactatcaggtcagtattagcactgaaaagcatttagtgtcttggcagga

SEQ ID NO: 114687 - DNA, 77 bp, Homo sapiens
tcagggaaagaaatctctactatcaggtcagtattagcactgaaaagcatttagtgtcttggcaggaaaagttgaca

SEQ ID NO: 114688 - DNA, 75 bp, Homo sapiens
aaagaaatctctactatcaggtcagtattagcactgaaaagcatttagtgtcttggcaggaaaagttgacaagaa

SEQ ID NO: 114689 - DNA, 79 bp, Homo sapiens
tctactatcaggtcagtattagcactgaaaagcatttagtgtcttggcaggaaaagttgacaagaaaatctcatccaca

SEQ ID NO: 114690 - DNA, 79 bp, Homo sapiens
agcactgaaaagcatttagtgtcttggcaggaaaagttgacaagaaaatctcatccacacatagaaatgtgcaccactg

SEQ ID NO: 114691 - DNA, 80 bp, Homo sapiens
atttagtgtcttggcaggaaaagttgacaagaaaatctcatccacacatagaaatgtgcaccactgtgcaaggaagcaca

SEQ ID NO: 114692 - DNA, 80 bp, Homo sapiens
tcttggcaggaaaagttgacaagaaaatctcatccacacatagaaatgtgcaccactgtgcaaggaagcacaatccccag

SEQ ID NO: 114693 - DNA, 78 bp, Homo sapiens
aaaagttgacaagaaaatctcatccacacatagaaatgtgcaccactgtgcaaggaagcacaatccccaggccaccca

SEQ ID NO: 114694 - DNA, 81 bp, Homo sapiens
aagaaaatctcatccacacatagaaatgtgcaccactgtgcaaggaagcacaatccccaggccacccagtgcagggccagc

SEQ ID NO: 114695 - DNA, 81 bp, Homo sapiens
tccacacatagaaatgtgcaccactgtgcaaggaagcacaatccccaggccacccagtgcagggccagctcgagaggggaa

SEQ ID NO: 114696 - DNA, 81 bp, Homo sapiens
acacatagaaatgtgcaccactgtgcaaggaagcacaatccccaggccacccagtgcagggccagctcgagaggggaatgc

SEQ ID NO: 114697 - DNA, 79 bp, Homo sapiens
atagaaatgtgcaccactgtgcaaggaagcacaatccccaggccacccagtgcagggccagctcgagaggggaatgccc

SEQ ID NO: 114698 - DNA, 80 bp, Homo sapiens
tgcaccactgtgcaaggaagcacaatccccaggccacccagtgcagggccagctcgagaggggaatgccccctgggatca

SEQ ID NO: 114699 - DNA, 78 bp, Homo sapiens
actgtgcaaggaagcacaatccccaggccacccagtgcagggccagctcgagaggggaatgccccctgggatcagcta

SEQ ID NO: 114700 - DNA, 74 bp, Homo sapiens
aaggaagcacaatccccaggccacccagtgcagggccagctcgagaggggaatgccccctgggatcagctaccc

SEQ ID NO: 114701 - DNA, 76 bp, Homo sapiens
aagcacaatccccaggccacccagtgcagggccagctcgagaggggaatgccccctgggatcagctaccccatgtc

SEQ ID NO: 114702 - DNA, 74 bp, Homo sapiens
cccaggccacccagtgcagggccagctcgagaggggaatgccccctgggatcagctaccccatgtcggtcaccc

SEQ ID NO: 114703 - DNA, 74 bp, Homo sapiens
agtgcagggccagctcgagaggggaatgccccctgggatcagctaccccatgtcggtcaccccattaactgagg

SEQ ID NO: 114704 - DNA, 72 bp, Homo sapiens
ggaatgccccctgggatcagctaccccatgtcggtcaccccattaactgaggggctctggttcaagggtgta

SEQ ID NO: 114705 - DNA, 72 bp, Homo sapiens
cattaactgaggggctctggttcaagggtgtactcaatttaggcttgtggatatccaagggcacctcaattt

SEQ ID NO: 114706 - DNA, 71 bp, Homo sapiens
actgaggggctctggttcaagggtgtactcaatttaggcttgtggatatccaagggcacctcaatttttac

SEQ ID NO: 114707 - DNA, 71 bp, Homo sapiens
tctggttcaagggtgtactcaatttaggcttgtggatatccaagggcacctcaatttttactgctttaaaa

SEQ ID NO: 114708 - DNA, 73 bp, Homo sapiens
gtgtactcaatttaggcttgtggatatccaagggcacctcaatttttactgctttaaaacagaatggtgaatg

SEQ ID NO: 114709 - DNA, 70 bp, Homo sapiens
aatttaggcttgtggatatccaagggcacctcaatttttactgctttaaaacagaatggtgaatgggaag

SEQ ID NO: 114710 - DNA, 72 bp, Homo sapiens
gcacctcaatttttactgctttaaaacagaatggtgaatgggaagtgcctatctttggtttggactttctga

SEQ ID NO: 114711 - DNA, 69 bp, Homo sapiens
caatttttactgctttaaaacagaatggtgaatgggaagtgcctatctttggtttggactttctgattt

SEQ ID NO: 114712 - DNA, 70 bp, Homo sapiens
tttaaaacagaatggtgaatgggaagtgcctatctttggtttggactttctgattttaacaagagtccag

SEQ ID NO: 114713 - DNA, 69 bp, Homo sapiens
gaatgggaagtgcctatctttggtttggactttctgattttaacaagagtccaggtgttcattttaatt

SEQ ID NO: 114714 - DNA, 72 bp, Homo sapiens
tgcctatctttggtttggactttctgattttaacaagagtccaggtgttcattttaatttatccataaatga

SEQ ID NO: 114715 - DNA, 69 bp, Homo sapiens
ggtttggactttctgattttaacaagagtccaggtgttcattttaatttatccataaatgactaaattc

SEQ ID NO: 114716 - DNA, 72 bp, Homo sapiens
gattttaacaagagtccaggtgttcattttaatttatccataaatgactaaattctaatgattctatagttg

SEQ ID NO: 114717 - DNA, 75 bp, Homo sapiens
caagagtccaggtgttcattttaatttatccataaatgactaaattctaatgattctatagttggatggctgtaa

SEQ ID NO: 114718 - DNA, 74 bp, Homo sapiens
ccaggtgttcattttaatttatccataaatgactaaattctaatgattctatagttggatggctgtaaaaatca

SEQ ID NO: 114719 - DNA, 72 bp, Homo sapiens
atccataaatgactaaattctaatgattctatagttggatggctgtaaaaatcaaattttagttttctgaac

SEQ ID NO: 114720 - DNA, 73 bp, Homo sapiens
aattctaatgattctatagttggatggctgtaaaaatcaaattttagttttctgaacttcccaatcatactca

SEQ ID NO: 114721 - DNA, 75 bp, Homo sapiens
agttggatggctgtaaaaatcaaattttagttttctgaacttcccaatcatactcatctatgatatctccttctc

SEQ ID NO: 114722 - DNA, 74 bp, Homo sapiens
caaattttagttttctgaacttcccaatcatactcatctatgatatctccttctctaaaaattatcattaggta

SEQ ID NO: 114723 - DNA, 76 bp, Homo sapiens
gttttctgaacttcccaatcatactcatctatgatatctccttctctaaaaattatcattaggtaaatattcacaa

SEQ ID NO: 114724 - DNA, 75 bp, Homo sapiens
acttcccaatcatactcatctatgatatctccttctctaaaaattatcattaggtaaatattcacaatctaaatt

SEQ ID NO: 114725 - DNA, 74 bp, Homo sapiens
ctcatctatgatatctccttctctaaaaattatcattaggtaaatattcacaatctaaatttagtatttcccag

SEQ ID NO: 114726 - DNA, 70 bp, Homo sapiens
ctctaaaaattatcattaggtaaatattcacaatctaaatttagtatttcccagtacaggaagatattgg

SEQ ID NO: 114727 - DNA, 73 bp, Homo sapiens
atcattaggtaaatattcacaatctaaatttagtatttcccagtacaggaagatattggtaccatctactgaa

SEQ ID NO: 114728 - DNA, 73 bp, Homo sapiens
gtaaatattcacaatctaaatttagtatttcccagtacaggaagatattggtaccatctactgaatgcccagt

SEQ ID NO: 114729 - DNA, 73 bp, Homo sapiens
caatctaaatttagtatttcccagtacaggaagatattggtaccatctactgaatgcccagttttgatctatt

SEQ ID NO: 114730 - DNA, 74 bp, Homo sapiens
tttagtatttcccagtacaggaagatattggtaccatctactgaatgcccagttttgatctatttctaaatgga

SEQ ID NO: 114731 - DNA, 75 bp, Homo sapiens
ccagtacaggaagatattggtaccatctactgaatgcccagttttgatctatttctaaatggagcaaaccaattc

SEQ ID NO: 114732 - DNA, 76 bp, Homo sapiens
aagatattggtaccatctactgaatgcccagttttgatctatttctaaatggagcaaaccaattccatctcctaga

SEQ ID NO: 114733 - DNA, 78 bp, Homo sapiens
ctactgaatgcccagttttgatctatttctaaatggagcaaaccaattccatctcctagagctggagactgtatccag

SEQ ID NO: 114734 - DNA, 80 bp, Homo sapiens
ttttgatctatttctaaatggagcaaaccaattccatctcctagagctggagactgtatccaggcagtgtgtggacagaa

SEQ ID NO: 114735 - DNA, 78 bp, Homo sapiens
atttctaaatggagcaaaccaattccatctcctagagctggagactgtatccaggcagtgtgtggacagaacggacaa

SEQ ID NO: 114736 - DNA, 77 bp, Homo sapiens
aaatggagcaaaccaattccatctcctagagctggagactgtatccaggcagtgtgtggacagaacggacaatcttt

SEQ ID NO: 114737 - DNA, 77 bp, Homo sapiens
aaccaattccatctcctagagctggagactgtatccaggcagtgtgtggacagaacggacaatcttttctgccaagg

SEQ ID NO: 114738 - DNA, 78 bp, Homo sapiens
atctcctagagctggagactgtatccaggcagtgtgtggacagaacggacaatcttttctgccaagggcctatttgag

SEQ ID NO: 114739 - DNA, 77 bp, Homo sapiens
ctggagactgtatccaggcagtgtgtggacagaacggacaatcttttctgccaagggcctatttgagtggagcaccc

SEQ ID NO: 114740 - DNA, 75 bp, Homo sapiens
tatccaggcagtgtgtggacagaacggacaatcttttctgccaagggcctatttgagtggagcacccccacacgg

SEQ ID NO: 114741 - DNA, 72 bp, Homo sapiens
agtgtgtggacagaacggacaatcttttctgccaagggcctatttgagtggagcacccccacacgggttaga

SEQ ID NO: 114742 - DNA, 68 bp, Homo sapiens
agaacggacaatcttttctgccaagggcctatttgagtggagcacccccacacgggttagacgggtcg

SEQ ID NO: 114743 - DNA, 68 bp, Homo sapiens
aatcttttctgccaagggcctatttgagtggagcacccccacacgggttagacgggtcggcacggggc

SEQ ID NO: 114744 - DNA, 68 bp, Homo sapiens
aagggcctatttgagtggagcacccccacacgggttagacgggtcggcacggggctggtgggtgagga

SEQ ID NO: 114745 - DNA, 69 bp, Homo sapiens
tatttgagtggagcacccccacacgggttagacgggtcggcacggggctggtgggtgaggaactcaggg

SEQ ID NO: 114746 - DNA, 71 bp, Homo sapiens
acccccacacgggttagacgggtcggcacggggctggtgggtgaggaactcaggggtcagtgcaagctgca

SEQ ID NO: 114747 - DNA, 73 bp, Homo sapiens
gggttagacgggtcggcacggggctggtgggtgaggaactcaggggtcagtgcaagctgcagaccctcatttg

SEQ ID NO: 114748 - DNA, 76 bp, Homo sapiens
ggtcggcacggggctggtgggtgaggaactcaggggtcagtgcaagctgcagaccctcatttggggaacgctctca

SEQ ID NO: 114749 - DNA, 81 bp, Homo sapiens
ggctggtgggtgaggaactcaggggtcagtgcaagctgcagaccctcatttggggaacgctctcagcacaatgctcttaca

SEQ ID NO: 114750 - DNA, 81 bp, Homo sapiens
tgggtgaggaactcaggggtcagtgcaagctgcagaccctcatttggggaacgctctcagcacaatgctcttacaactaca

SEQ ID NO: 114751 - DNA, 80 bp, Homo sapiens
aggggtcagtgcaagctgcagaccctcatttggggaacgctctcagcacaatgctcttacaactacagggtgcactccaa

SEQ ID NO: 114752 - DNA, 76 bp, Homo sapiens
agaccctcatttggggaacgctctcagcacaatgctcttacaactacagggtgcactccaaaatggagttcaagga

SEQ ID NO: 114753 - DNA, 76 bp, Homo sapiens
tctcagcacaatgctcttacaactacagggtgcactccaaaatggagttcaaggaaaaaaggctaatgagaaataa

SEQ ID NO: 114754 - DNA, 70 bp, Homo sapiens
cttacaactacagggtgcactccaaaatggagttcaaggaaaaaaggctaatgagaaataaaatctgaaa

SEQ ID NO: 114755 - DNA, 68 bp, Homo sapiens
cagggtgcactccaaaatggagttcaaggaaaaaaggctaatgagaaataaaatctgaaaaaataact

SEQ ID NO: 114756 - DNA, 65 bp, Homo sapiens
tccaaaatggagttcaaggaaaaaaggctaatgagaaataaaatctgaaaaaataacttaaaaag

SEQ ID NO: 114757 - DNA, 63 bp, Homo sapiens
agttcaaggaaaaaaggctaatgagaaataaaatctgaaaaaataacttaaaaagtttgcttt

SEQ ID NO: 114758 - DNA, 71 bp, Homo sapiens
tttgctttttaaaaattccagaaagtgagagaaacattcaaattttgttgctctaagagggaagaatatga

SEQ ID NO: 114759 - DNA, 70 bp, Homo sapiens
aaaaattccagaaagtgagagaaacattcaaattttgttgctctaagagggaagaatatgactcgacgtt

SEQ ID NO: 114760 - DNA, 73 bp, Homo sapiens
gaaagtgagagaaacattcaaattttgttgctctaagagggaagaatatgactcgacgtttaattccagtaca

SEQ ID NO: 114761 - DNA, 72 bp, Homo sapiens
gaaacattcaaattttgttgctctaagagggaagaatatgactcgacgtttaattccagtacattccctcta

SEQ ID NO: 114762 - DNA, 73 bp, Homo sapiens
attcaaattttgttgctctaagagggaagaatatgactcgacgtttaattccagtacattccctctaggatga

SEQ ID NO: 114763 - DNA, 71 bp, Homo sapiens
ctctaagagggaagaatatgactcgacgtttaattccagtacattccctctaggatgacggccaaagtaaa

SEQ ID NO: 114764 - DNA, 70 bp, Homo sapiens
agagggaagaatatgactcgacgtttaattccagtacattccctctaggatgacggccaaagtaaaggaa

SEQ ID NO: 114765 - DNA, 72 bp, Homo sapiens
atatgactcgacgtttaattccagtacattccctctaggatgacggccaaagtaaaggaagaaggggcagca

SEQ ID NO: 114766 - DNA, 74 bp, Homo sapiens
ttaattccagtacattccctctaggatgacggccaaagtaaaggaagaaggggcagcagcagctccagactgtt

SEQ ID NO: 114767 - DNA, 72 bp, Homo sapiens
ccagtacattccctctaggatgacggccaaagtaaaggaagaaggggcagcagcagctccagactgtttttt

SEQ ID NO: 114768 - DNA, 63 bp, Homo sapiens
accgcgcccggcccagctctagactgttttaaagggcaccctttccagttactttttcccttt

SEQ ID NO: 114769 - DNA, 65 bp, Homo sapiens
gcccagctctagactgttttaaagggcaccctttccagttactttttcccttttaacacacggtg

SEQ ID NO: 114770 - DNA, 64 bp, Homo sapiens
tagactgttttaaagggcaccctttccagttactttttcccttttaacacacggtgggagttca

SEQ ID NO: 114771 - DNA, 63 bp, Homo sapiens
ttttaaagggcaccctttccagttactttttcccttttaacacacggtgggagttcaaatctc

SEQ ID NO: 114772 - DNA, 64 bp, Homo sapiens
ctttccagttactttttcccttttaacacacggtgggagttcaaatctccaaaagaggtttcca

SEQ ID NO: 114773 - DNA, 63 bp, Homo sapiens
agttactttttcccttttaacacacggtgggagttcaaatctccaaaagaggtttccatgggg

SEQ ID NO: 114774 - DNA, 67 bp, Homo sapiens
tcccttttaacacacggtgggagttcaaatctccaaaagaggtttccatggggtcagtgggacgaaa

SEQ ID NO: 114775 - DNA, 70 bp, Homo sapiens
acacacggtgggagttcaaatctccaaaagaggtttccatggggtcagtgggacgaaagctccttgccac

SEQ ID NO: 114776 - DNA, 70 bp, Homo sapiens
aaaagaggtttccatggggtcagtgggacgaaagctccttgccacctctagtgaaacgcggtccttgaca

SEQ ID NO: 114777 - DNA, 72 bp, Homo sapiens
aggtttccatggggtcagtgggacgaaagctccttgccacctctagtgaaacgcggtccttgacactagcac

SEQ ID NO: 114778 - DNA, 78 bp, Homo sapiens
tcagtgggacgaaagctccttgccacctctagtgaaacgcggtccttgacactagcacggcagaccagatggagtgga

SEQ ID NO: 114779 - DNA, 78 bp, Homo sapiens
ggacgaaagctccttgccacctctagtgaaacgcggtccttgacactagcacggcagaccagatggagtggacactga

SEQ ID NO: 114780 - DNA, 82 bp, Homo sapiens
tccttgccacctctagtgaaacgcggtccttgacactagcacggcagaccagatggagtggacactgagctctgacacgcaa

SEQ ID NO: 114781 - DNA, 81 bp, Homo sapiens
tctagtgaaacgcggtccttgacactagcacggcagaccagatggagtggacactgagctctgacacgcaagcccagggaa

SEQ ID NO: 114782 - DNA, 77 bp, Homo sapiens
acgcggtccttgacactagcacggcagaccagatggagtggacactgagctctgacacgcaagcccagggaaccggg

SEQ ID NO: 114783 - DNA, 76 bp, Homo sapiens
actagcacggcagaccagatggagtggacactgagctctgacacgcaagcccagggaaccggggaaggaacttgta

SEQ ID NO: 114784 - DNA, 75 bp, Homo sapiens
agaccagatggagtggacactgagctctgacacgcaagcccagggaaccggggaaggaacttgtatgaacttaca

SEQ ID NO: 114785 - DNA, 75 bp, Homo sapiens
atggagtggacactgagctctgacacgcaagcccagggaaccggggaaggaacttgtatgaacttacagcgcaaa

SEQ ID NO: 114786 - DNA, 75 bp, Homo sapiens
tggacactgagctctgacacgcaagcccagggaaccggggaaggaacttgtatgaacttacagcgcaaaccgtca

SEQ ID NO: 114787 - DNA, 75 bp, Homo sapiens
actgagctctgacacgcaagcccagggaaccggggaaggaacttgtatgaacttacagcgcaaaccgtcagcaga

SEQ ID NO: 114788 - DNA, 74 bp, Homo sapiens
agctctgacacgcaagcccagggaaccggggaaggaacttgtatgaacttacagcgcaaaccgtcagcagactg

SEQ ID NO: 114789 - DNA, 71 bp, Homo sapiens
acacgcaagcccagggaaccggggaaggaacttgtatgaacttacagcgcaaaccgtcagcagactgggaa

SEQ ID NO: 114790 - DNA, 68 bp, Homo sapiens
cccagggaaccggggaaggaacttgtatgaacttacagcgcaaaccgtcagcagactgggaagagttt

SEQ ID NO: 114791 - DNA, 69 bp, Homo sapiens
agggaaccggggaaggaacttgtatgaacttacagcgcaaaccgtcagcagactgggaagagttttgag

SEQ ID NO: 114792 - DNA, 70 bp, Homo sapiens
gggaaggaacttgtatgaacttacagcgcaaaccgtcagcagactgggaagagttttgagggttacggta

SEQ ID NO: 114793 - DNA, 69 bp, Homo sapiens
aaggaacttgtatgaacttacagcgcaaaccgtcagcagactgggaagagttttgagggttacggtaaa

SEQ ID NO: 114794 - DNA, 72 bp, Homo sapiens
ttgtatgaacttacagcgcaaaccgtcagcagactgggaagagttttgagggttacggtaaatgttcaagag

SEQ ID NO: 114795 - DNA, 72 bp, Homo sapiens
ttacagcgcaaaccgtcagcagactgggaagagttttgagggttacggtaaatgttcaagagggcaatggtc

SEQ ID NO: 114796 - DNA, 69 bp, Homo sapiens
tgggaagagttttgagggttacggtaaatgttcaagagggcaatggtctgaaatacaaaacgcaacaac

SEQ ID NO: 114797 - DNA, 71 bp, Homo sapiens
ttgagggttacggtaaatgttcaagagggcaatggtctgaaatacaaaacgcaacaactttatattatgga

SEQ ID NO: 114798 - DNA, 67 bp, Homo sapiens
gcaatggtctgaaatacaaaacgcaacaactttatattatggaaaattaaaggtaaacacttaaccg

SEQ ID NO: 114799 - DNA, 68 bp, Homo sapiens
aatacaaaacgcaacaactttatattatggaaaattaaaggtaaacacttaaccggctgcctctggca

SEQ ID NO: 114800 - DNA, 68 bp, Homo sapiens
aaaacgcaacaactttatattatggaaaattaaaggtaaacacttaaccggctgcctctggcaagtgc

SEQ ID NO: 114801 - DNA, 70 bp, Homo sapiens
aactttatattatggaaaattaaaggtaaacacttaaccggctgcctctggcaagtgcttcagttgagat

SEQ ID NO: 114802 - DNA, 75 bp, Homo sapiens
tatggaaaattaaaggtaaacacttaaccggctgcctctggcaagtgcttcagttgagattcagtgctgaaaaga

SEQ ID NO: 114803 - DNA, 76 bp, Homo sapiens
taaaggtaaacacttaaccggctgcctctggcaagtgcttcagttgagattcagtgctgaaaagagagcaagttat

SEQ ID NO: 114804 - DNA, 79 bp, Homo sapiens
acttaaccggctgcctctggcaagtgcttcagttgagattcagtgctgaaaagagagcaagttattttctggagaagca

SEQ ID NO: 114805 - DNA, 80 bp, Homo sapiens
ctctggcaagtgcttcagttgagattcagtgctgaaaagagagcaagttattttctggagaagcagaggcgttttctcag

SEQ ID NO: 114806 - DNA, 78 bp, Homo sapiens
aagtgcttcagttgagattcagtgctgaaaagagagcaagttattttctggagaagcagaggcgttttctcagttggc

SEQ ID NO: 114807 - DNA, 79 bp, Homo sapiens
ttgagattcagtgctgaaaagagagcaagttattttctggagaagcagaggcgttttctcagttggcggctgccttgaa

SEQ ID NO: 114808 - DNA, 77 bp, Homo sapiens
tgctgaaaagagagcaagttattttctggagaagcagaggcgttttctcagttggcggctgccttgaatccctaaca

SEQ ID NO: 114809 - DNA, 75 bp, Homo sapiens
aaagagagcaagttattttctggagaagcagaggcgttttctcagttggcggctgccttgaatccctaacactgc

SEQ ID NO: 114810 - DNA, 73 bp, Homo sapiens
agttattttctggagaagcagaggcgttttctcagttggcggctgccttgaatccctaacactgcggtgtaac

SEQ ID NO: 114811 - DNA, 78 bp, Homo sapiens
agaagcagaggcgttttctcagttggcggctgccttgaatccctaacactgcggtgtaacggaggtctcatgatatgc

SEQ ID NO: 114812 - DNA, 77 bp, Homo sapiens
cgttttctcagttggcggctgccttgaatccctaacactgcggtgtaacggaggtctcatgatatgcccatcttgta

SEQ ID NO: 114813 - DNA, 77 bp, Homo sapiens
ccttgaatccctaacactgcggtgtaacggaggtctcatgatatgcccatcttgtacttctgcttacagaacgtgaa

SEQ ID NO: 114814 - DNA, 75 bp, Homo sapiens
aatccctaacactgcggtgtaacggaggtctcatgatatgcccatcttgtacttctgcttacagaacgtgaaaac

SEQ ID NO: 114815 - DNA, 74 bp, Homo sapiens
ggtgtaacggaggtctcatgatatgcccatcttgtacttctgcttacagaacgtgaaaactctccttttcaaaa

SEQ ID NO: 114816 - DNA, 71 bp, Homo sapiens
atatgcccatcttgtacttctgcttacagaacgtgaaaactctccttttcaaaattccaattcaggtaaaa

SEQ ID NO: 114817 - DNA, 71 bp, Homo sapiens
catcttgtacttctgcttacagaacgtgaaaactctccttttcaaaattccaattcaggtaaaagcacaaa

SEQ ID NO: 114818 - DNA, 70 bp, Homo sapiens
cttctgcttacagaacgtgaaaactctccttttcaaaattccaattcaggtaaaagcacaaatagtttgc

SEQ ID NO: 114819 - DNA, 73 bp, Homo sapiens
aaaattccaattcaggtaaaagcacaaatagtttgccaggctagcaccaaaatgttcttagatgtggcagaaa

SEQ ID NO: 114820 - DNA, 73 bp, Homo sapiens
tccaattcaggtaaaagcacaaatagtttgccaggctagcaccaaaatgttcttagatgtggcagaaaatttt

SEQ ID NO: 114821 - DNA, 73 bp, Homo sapiens
taaaagcacaaatagtttgccaggctagcaccaaaatgttcttagatgtggcagaaaatttttaatgaactcg

SEQ ID NO: 114822 - DNA, 71 bp, Homo sapiens
aaatagtttgccaggctagcaccaaaatgttcttagatgtggcagaaaatttttaatgaactcggaaagaa

SEQ ID NO: 114823 - DNA, 74 bp, Homo sapiens
ccaggctagcaccaaaatgttcttagatgtggcagaaaatttttaatgaactcggaaagaataatgcttacata

SEQ ID NO: 114824 - DNA, 73 bp, Homo sapiens
ccaaaatgttcttagatgtggcagaaaatttttaatgaactcggaaagaataatgcttacataaactgatgga

SEQ ID NO: 114825 - DNA, 70 bp, Homo sapiens
ggcagaaaatttttaatgaactcggaaagaataatgcttacataaactgatggaaaaaattactgtatta

SEQ ID NO: 114826 - DNA, 72 bp, Homo sapiens
ttaatgaactcggaaagaataatgcttacataaactgatggaaaaaattactgtattagagaaatacaattg

SEQ ID NO: 114827 - DNA, 74 bp, Homo sapiens
ctcggaaagaataatgcttacataaactgatggaaaaaattactgtattagagaaatacaattgttacatatca

SEQ ID NO: 114828 - DNA, 76 bp, Homo sapiens
tgcttacataaactgatggaaaaaattactgtattagagaaatacaattgttacatatcatgaaatctccacttcc

SEQ ID NO: 114829 - DNA, 74 bp, Homo sapiens
actgatggaaaaaattactgtattagagaaatacaattgttacatatcatgaaatctccacttcctggaggaaa

SEQ ID NO: 114830 - DNA, 72 bp, Homo sapiens
aaaattactgtattagagaaatacaattgttacatatcatgaaatctccacttcctggaggaaaaattataa

SEQ ID NO: 114831 - DNA, 74 bp, Homo sapiens
actgtattagagaaatacaattgttacatatcatgaaatctccacttcctggaggaaaaattataatggtgaaa

SEQ ID NO: 114832 - DNA, 69 bp, Homo sapiens
atgaaatctccacttcctggaggaaaaattataatggtgaaataaaacccacacttactgggcaactta

SEQ ID NO: 114833 - DNA, 68 bp, Homo sapiens
cacttcctggaggaaaaattataatggtgaaataaaacccacacttactgggcaacttaccttattga

SEQ ID NO: 114834 - DNA, 67 bp, Homo sapiens
aatggtgaaataaaacccacacttactgggcaacttaccttattgattccttaatattcctaagagt

SEQ ID NO: 114835 - DNA, 66 bp, Homo sapiens
gaaataaaacccacacttactgggcaacttaccttattgattccttaatattcctaagagttttaa

SEQ ID NO: 114836 - DNA, 67 bp, Homo sapiens
cccacacttactgggcaacttaccttattgattccttaatattcctaagagttttaattttacacaa

SEQ ID NO: 114837 - DNA, 66 bp, Homo sapiens
ctgggcaacttaccttattgattccttaatattcctaagagttttaattttacacaaagaacttaa

SEQ ID NO: 114838 - DNA, 65 bp, Homo sapiens
ccttattgattccttaatattcctaagagttttaattttacacaaagaacttaataaaggccagg

SEQ ID NO: 114839 - DNA, 66 bp, Homo sapiens
cttaatattcctaagagttttaattttacacaaagaacttaataaaggccaggggttcagtcactg

SEQ ID NO: 114840 - DNA, 66 bp, Homo sapiens
cctaagagttttaattttacacaaagaacttaataaaggccaggggttcagtcactgtaaagacca

SEQ ID NO: 114841 - DNA, 70 bp, Homo sapiens
taattttacacaaagaacttaataaaggccaggggttcagtcactgtaaagaccaatgaatggctcaaaa

SEQ ID NO: 114842 - DNA, 72 bp, Homo sapiens
tacacaaagaacttaataaaggccaggggttcagtcactgtaaagaccaatgaatggctcaaaatgttgaaa

SEQ ID NO: 114843 - DNA, 80 bp, Homo sapiens
tcactgtaaagaccaatgaatggctcaaaatgttgaaatccgtttcacatggacggacctgctctcatgacaaatgtcaa

SEQ ID NO: 114844 - DNA, 80 bp, Homo sapiens
taaagaccaatgaatggctcaaaatgttgaaatccgtttcacatggacggacctgctctcatgacaaatgtcaatcaatg

SEQ ID NO: 114845 - DNA, 78 bp, Homo sapiens
aatggctcaaaatgttgaaatccgtttcacatggacggacctgctctcatgacaaatgtcaatcaatggaggtggccg

SEQ ID NO: 114846 - DNA, 78 bp, Homo sapiens
aaatgttgaaatccgtttcacatggacggacctgctctcatgacaaatgtcaatcaatggaggtggccgggccagtga

SEQ ID NO: 114847 - DNA, 77 bp, Homo sapiens
atccgtttcacatggacggacctgctctcatgacaaatgtcaatcaatggaggtggccgggccagtgaccctcccta

SEQ ID NO: 114848 - DNA, 75 bp, Homo sapiens
ctctcatgacaaatgtcaatcaatggaggtggccgggccagtgaccctccctagaagggataagcctcctgaacg

SEQ ID NO: 114849 - DNA, 72 bp, Homo sapiens
aaatgtcaatcaatggaggtggccgggccagtgaccctccctagaagggataagcctcctgaacgtggccaa

SEQ ID NO: 114850 - DNA, 72 bp, Homo sapiens
aatcaatggaggtggccgggccagtgaccctccctagaagggataagcctcctgaacgtggccaagtatcaa

SEQ ID NO: 114851 - DNA, 71 bp, Homo sapiens
aggtggccgggccagtgaccctccctagaagggataagcctcctgaacgtggccaagtatcaagttcttgc

SEQ ID NO: 114852 - DNA, 74 bp, Homo sapiens
gtgaccctccctagaagggataagcctcctgaacgtggccaagtatcaagttcttgctgtgtgcgccaaggagt

SEQ ID NO: 114853 - DNA, 76 bp, Homo sapiens
ctagaagggataagcctcctgaacgtggccaagtatcaagttcttgctgtgtgcgccaaggagttccagcaccttg

SEQ ID NO: 114854 - DNA, 78 bp, Homo sapiens
ataagcctcctgaacgtggccaagtatcaagttcttgctgtgtgcgccaaggagttccagcaccttgtcctgtttgca

SEQ ID NO: 114855 - DNA, 82 bp, Homo sapiens
tgaacgtggccaagtatcaagttcttgctgtgtgcgccaaggagttccagcaccttgtcctgtttgcaacagctctatgtca

SEQ ID NO: 114856 - DNA, 84 bp, Homo sapiens
ccaagtatcaagttcttgctgtgtgcgccaaggagttccagcaccttgtcctgtttgcaacagctctatgtcagcagctcagaa

SEQ ID NO: 114857 - DNA, 84 bp, Homo sapiens
ttcttgctgtgtgcgccaaggagttccagcaccttgtcctgtttgcaacagctctatgtcagcagctcagaagccaacattatt

SEQ ID NO: 114858 - DNA, 84 bp, Homo sapiens
tgtgcgccaaggagttccagcaccttgtcctgtttgcaacagctctatgtcagcagctcagaagccaacattatttgtctcaat

SEQ ID NO: 114859 - DNA, 81 bp, Homo sapiens
aaggagttccagcaccttgtcctgtttgcaacagctctatgtcagcagctcagaagccaacattatttgtctcaattaaga

SEQ ID NO: 114860 - DNA, 81 bp, Homo sapiens
tgtttgcaacagctctatgtcagcagctcagaagccaacattatttgtctcaattaagagtgggctctttaacaccattgt

SEQ ID NO: 114861 - DNA, 77 bp, Homo sapiens
agctctatgtcagcagctcagaagccaacattatttgtctcaattaagagtgggctctttaacaccattgttttaaa

SEQ ID NO: 114862 - DNA, 74 bp, Homo sapiens
atgtcagcagctcagaagccaacattatttgtctcaattaagagtgggctctttaacaccattgttttaaaaaa

SEQ ID NO: 114863 - DNA, 69 bp, Homo sapiens
ctcagaagccaacattatttgtctcaattaagagtgggctctttaacaccattgttttaaaaaaatttc

SEQ ID NO: 114864 - DNA, 68 bp, Homo sapiens
tatttgtctcaattaagagtgggctctttaacaccattgttttaaaaaaatttctccaactgtgggac

SEQ ID NO: 114865 - DNA, 67 bp, Homo sapiens
ctcaattaagagtgggctctttaacaccattgttttaaaaaaatttctccaactgtgggacttacag

SEQ ID NO: 114866 - DNA, 69 bp, Homo sapiens
agtgggctctttaacaccattgttttaaaaaaatttctccaactgtgggacttacagtgtgagccgtca

SEQ ID NO: 114867 - DNA, 69 bp, Homo sapiens
ctttaacaccattgttttaaaaaaatttctccaactgtgggacttacagtgtgagccgtcagccgtctg

SEQ ID NO: 114868 - DNA, 71 bp, Homo sapiens
attgttttaaaaaaatttctccaactgtgggacttacagtgtgagccgtcagccgtctgtgcactgttttg

SEQ ID NO: 114869 - DNA, 75 bp, Homo sapiens
tttctccaactgtgggacttacagtgtgagccgtcagccgtctgtgcactgttttggggattacgatagatgttt

SEQ ID NO: 114870 - DNA, 78 bp, Homo sapiens
acttacagtgtgagccgtcagccgtctgtgcactgttttggggattacgatagatgttttgaatcaagatggtctgcg

SEQ ID NO: 114871 - DNA, 74 bp, Homo sapiens
agccgtcagccgtctgtgcactgttttggggattacgatagatgttttgaatcaagatggtctgcggggaaaaa

SEQ ID NO: 114872 - DNA, 71 bp, Homo sapiens
agccgtctgtgcactgttttggggattacgatagatgttttgaatcaagatggtctgcggggaaaaaaaaa

SEQ ID NO: 114873 - DNA, 65 bp, Homo sapiens
gaaaagaacatgaagtttttataatttacatgaaaaaaaggcaaacaaacctggctaaacgtcgg

SEQ ID NO: 114874 - DNA, 65 bp, Homo sapiens
gtttttataatttacatgaaaaaaaggcaaacaaacctggctaaacgtcggtttattgtgcaacc

SEQ ID NO: 114875 - DNA, 69 bp, Homo sapiens
tataatttacatgaaaaaaaggcaaacaaacctggctaaacgtcggtttattgtgcaaccgagagcacc

SEQ ID NO: 114876 - DNA, 73 bp, Homo sapiens
aaaaaggcaaacaaacctggctaaacgtcggtttattgtgcaaccgagagcacctgtctccatgacgacatgc

SEQ ID NO: 114877 - DNA, 73 bp, Homo sapiens
aaacaaacctggctaaacgtcggtttattgtgcaaccgagagcacctgtctccatgacgacatgctccaattt

SEQ ID NO: 114878 - DNA, 75 bp, Homo sapiens
cctggctaaacgtcggtttattgtgcaaccgagagcacctgtctccatgacgacatgctccaattttgaaataaa

SEQ ID NO: 114879 - DNA, 79 bp, Homo sapiens
gtttattgtgcaaccgagagcacctgtctccatgacgacatgctccaattttgaaataaaatgaacagttgactctgta

SEQ ID NO: 114880 - DNA, 76 bp, Homo sapiens
caaccgagagcacctgtctccatgacgacatgctccaattttgaaataaaatgaacagttgactctgtaagggaaa

SEQ ID NO: 114881 - DNA, 78 bp, Homo sapiens
cacctgtctccatgacgacatgctccaattttgaaataaaatgaacagttgactctgtaagggaaaatgagagctgat

SEQ ID NO: 114882 - DNA, 77 bp, Homo sapiens
tctccatgacgacatgctccaattttgaaataaaatgaacagttgactctgtaagggaaaatgagagctgattattt

SEQ ID NO: 114883 - DNA, 76 bp, Homo sapiens
tgctccaattttgaaataaaatgaacagttgactctgtaagggaaaatgagagctgattattttgctgggaagata

SEQ ID NO: 114884 - DNA, 77 bp, Homo sapiens
ttgaaataaaatgaacagttgactctgtaagggaaaatgagagctgattattttgctgggaagatatcaaacacatg

SEQ ID NO: 114885 - DNA, 84 bp, Homo sapiens
agttgactctgtaagggaaaatgagagctgattattttgctgggaagatatcaaacacatggaatatgtcagcagcatgacata

SEQ ID NO: 114886 - DNA, 84 bp, Homo sapiens
agggaaaatgagagctgattattttgctgggaagatatcaaacacatggaatatgtcagcagcatgacatacactatcaaatta

SEQ ID NO: 114887 - DNA, 84 bp, Homo sapiens
aatgagagctgattattttgctgggaagatatcaaacacatggaatatgtcagcagcatgacatacactatcaaattactttta

SEQ ID NO: 114888 - DNA, 81 bp, Homo sapiens
attattttgctgggaagatatcaaacacatggaatatgtcagcagcatgacatacactatcaaattacttttaacctcaca

SEQ ID NO: 114889 - DNA, 83 bp, Homo sapiens
aagatatcaaacacatggaatatgtcagcagcatgacatacactatcaaattacttttaacctcacagaaacatgacacagac

SEQ ID NO: 114890 - DNA, 79 bp, Homo sapiens
aacacatggaatatgtcagcagcatgacatacactatcaaattacttttaacctcacagaaacatgacacagacttttt

SEQ ID NO: 114891 - DNA, 78 bp, Homo sapiens
atatgtcagcagcatgacatacactatcaaattacttttaacctcacagaaacatgacacagacttttttccgtggta

SEQ ID NO: 114892 - DNA, 75 bp, Homo sapiens
agcatgacatacactatcaaattacttttaacctcacagaaacatgacacagacttttttccgtggtattaagca

SEQ ID NO: 114893 - DNA, 71 bp, Homo sapiens
atacactatcaaattacttttaacctcacagaaacatgacacagacttttttccgtggtattaagcacctc

SEQ ID NO: 114894 - DNA, 68 bp, Homo sapiens
aaattacttttaacctcacagaaacatgacacagacttttttccgtggtattaagcacctcctcttcc

SEQ ID NO: 114895 - DNA, 72 bp, Homo sapiens
ttaacctcacagaaacatgacacagacttttttccgtggtattaagcacctcctcttccttgctgtatttta

SEQ ID NO: 114896 - DNA, 70 bp, Homo sapiens
aacatgacacagacttttttccgtggtattaagcacctcctcttccttgctgtattttaggacaacgtaa

SEQ ID NO: 114897 - DNA, 68 bp, Homo sapiens
acagacttttttccgtggtattaagcacctcctcttccttgctgtattttaggacaacgtaacttcaa

SEQ ID NO: 114898 - DNA, 67 bp, Homo sapiens
ttttccgtggtattaagcacctcctcttccttgctgtattttaggacaacgtaacttcaacttccct

SEQ ID NO: 114899 - DNA, 71 bp, Homo sapiens
ttaagcacctcctcttccttgctgtattttaggacaacgtaacttcaacttccctttctgcaaacacacta

SEQ ID NO: 114900 - DNA, 69 bp, Homo sapiens
acaacgtaacttcaacttccctttctgcaaacacactacttgttcagcaaagacggttctaactctaac

SEQ ID NO: 114901 - DNA, 70 bp, Homo sapiens
taacttcaacttccctttctgcaaacacactacttgttcagcaaagacggttctaactctaacccgcctc

SEQ ID NO: 114902 - DNA, 70 bp, Homo sapiens
aaagacggttctaactctaacccgcctcctcctcattcaaatcccctccactttcctaactgcacagctg

SEQ ID NO: 114903 - DNA, 72 bp, Homo sapiens
ttctaactctaacccgcctcctcctcattcaaatcccctccactttcctaactgcacagctgttctgtttgt

SEQ ID NO: 114904 - DNA, 71 bp, Homo sapiens
taacccgcctcctcctcattcaaatcccctccactttcctaactgcacagctgttctgtttgtttcttaaa

SEQ ID NO: 114905 - DNA, 72 bp, Homo sapiens
ctcattcaaatcccctccactttcctaactgcacagctgttctgtttgtttcttaaatggagtattaaatta

SEQ ID NO: 114906 - DNA, 70 bp, Homo sapiens
aaatcccctccactttcctaactgcacagctgttctgtttgtttcttaaatggagtattaaattagtcta

SEQ ID NO: 114907 - DNA, 69 bp, Homo sapiens
ccactttcctaactgcacagctgttctgtttgtttcttaaatggagtattaaattagtctaaaactaaa

SEQ ID NO: 114908 - DNA, 71 bp, Homo sapiens
ctgcacagctgttctgtttgtttcttaaatggagtattaaattagtctaaaactaaatgtaacttaggcag

SEQ ID NO: 114909 - DNA, 69 bp, Homo sapiens
ctgtttgtttcttaaatggagtattaaattagtctaaaactaaatgtaacttaggcagtatctgttctc

SEQ ID NO: 114910 - DNA, 70 bp, Homo sapiens
cttaaatggagtattaaattagtctaaaactaaatgtaacttaggcagtatctgttctccagttctccac

SEQ ID NO: 114911 - DNA, 70 bp, Homo sapiens
gtattaaattagtctaaaactaaatgtaacttaggcagtatctgttctccagttctccacgaccaagttc

SEQ ID NO: 114912 - DNA, 70 bp, Homo sapiens
aaattagtctaaaactaaatgtaacttaggcagtatctgttctccagttctccacgaccaagttctctct

SEQ ID NO: 114913 - DNA, 72 bp, Homo sapiens
ttaggcagtatctgttctccagttctccacgaccaagttctctcttgaaaacaccggtgtggtgagggttaa

SEQ ID NO: 114914 - DNA, 72 bp, Homo sapiens
tatctgttctccagttctccacgaccaagttctctcttgaaaacaccggtgtggtgagggttaagatcccaa

SEQ ID NO: 114915 - DNA, 73 bp, Homo sapiens
tctccagttctccacgaccaagttctctcttgaaaacaccggtgtggtgagggttaagatcccaactctgcta

SEQ ID NO: 114916 - DNA, 72 bp, Homo sapiens
acgaccaagttctctcttgaaaacaccggtgtggtgagggttaagatcccaactctgctaccagctgcttgg

SEQ ID NO: 114917 - DNA, 74 bp, Homo sapiens
ttctctcttgaaaacaccggtgtggtgagggttaagatcccaactctgctaccagctgcttgggcttgggcaag

SEQ ID NO: 114918 - DNA, 83 bp, Homo sapiens
gttaagatcccaactctgctaccagctgcttgggcttgggcaagtcaccctagctctcagatgtcatctgtaaatgatgacaa

SEQ ID NO: 114919 - DNA, 88 bp, Homo sapiens
agctgcttgggcttgggcaagtcaccctagctctcagatgtcatctgtaaatgatgacaatgccaatgtggcactgttctgagagtca

SEQ ID NO: 114920 - DNA, 88 bp, Homo sapiens
ttgggcttgggcaagtcaccctagctctcagatgtcatctgtaaatgatgacaatgccaatgtggcactgttctgagagtcagacaga

SEQ ID NO: 114921 - DNA, 88 bp, Homo sapiens
agtcaccctagctctcagatgtcatctgtaaatgatgacaatgccaatgtggcactgttctgagagtcagacagaacgtatgtgtgct

SEQ ID NO: 114922 - DNA, 91 bp, Homo sapiens
ctagctctcagatgtcatctgtaaatgatgacaatgccaatgtggcactgttctgagagtcagacagaacgtatgtgtgcttcacatatgg

SEQ ID NO: 114923 - DNA, 93 bp, Homo sapiens
tcatctgtaaatgatgacaatgccaatgtggcactgttctgagagtcagacagaacgtatgtgtgcttcacatatggtgctcatgaagtgcta

SEQ ID NO: 114924 - DNA, 92 bp, Homo sapiens
taaatgatgacaatgccaatgtggcactgttctgagagtcagacagaacgtatgtgtgcttcacatatggtgctcatgaagtgctatcatta

SEQ ID NO: 114925 - DNA, 89 bp, Homo sapiens
acaatgccaatgtggcactgttctgagagtcagacagaacgtatgtgtgcttcacatatggtgctcatgaagtgctatcattatctaag

SEQ ID NO: 114926 - DNA, 87 bp, Homo sapiens
atgtggcactgttctgagagtcagacagaacgtatgtgtgcttcacatatggtgctcatgaagtgctatcattatctaaggaaaaca

SEQ ID NO: 114927 - DNA, 84 bp, Homo sapiens
ttctgagagtcagacagaacgtatgtgtgcttcacatatggtgctcatgaagtgctatcattatctaaggaaaacagaaaacga

SEQ ID NO: 114928 - DNA, 81 bp, Homo sapiens
agacagaacgtatgtgtgcttcacatatggtgctcatgaagtgctatcattatctaaggaaaacagaaaacgaagttcaga

SEQ ID NO: 114929 - DNA, 82 bp, Homo sapiens
ttcacatatggtgctcatgaagtgctatcattatctaaggaaaacagaaaacgaagttcagagtctctctaaacgcatgaca

SEQ ID NO: 114930 - DNA, 79 bp, Homo sapiens
tcatgaagtgctatcattatctaaggaaaacagaaaacgaagttcagagtctctctaaacgcatgacaccagaccaaca

SEQ ID NO: 114931 - DNA, 75 bp, Homo sapiens
aagtgctatcattatctaaggaaaacagaaaacgaagttcagagtctctctaaacgcatgacaccagaccaacag

SEQ ID NO: 114932 - DNA, 71 bp, Homo sapiens
attatctaaggaaaacagaaaacgaagttcagagtctctctaaacgcatgacaccagaccaacagggagtt

SEQ ID NO: 114933 - DNA, 70 bp, Homo sapiens
aaaacagaaaacgaagttcagagtctctctaaacgcatgacaccagaccaacagggagtttcaaaaaata

SEQ ID NO: 114934 - DNA, 73 bp, Homo sapiens
aagttcagagtctctctaaacgcatgacaccagaccaacagggagtttcaaaaaataggtctgaagtaaatca

SEQ ID NO: 114935 - DNA, 73 bp, Homo sapiens
agagtctctctaaacgcatgacaccagaccaacagggagtttcaaaaaataggtctgaagtaaatcaattctc

SEQ ID NO: 114936 - DNA, 73 bp, Homo sapiens
taaacgcatgacaccagaccaacagggagtttcaaaaaataggtctgaagtaaatcaattctcctggtctcaa

SEQ ID NO: 114937 - DNA, 71 bp, Homo sapiens
agaccaacagggagtttcaaaaaataggtctgaagtaaatcaattctcctggtctcaatacactgaaaaca

SEQ ID NO: 114938 - DNA, 69 bp, Homo sapiens
aacagggagtttcaaaaaataggtctgaagtaaatcaattctcctggtctcaatacactgaaaacaaac

SEQ ID NO: 114939 - DNA, 70 bp, Homo sapiens
aaaaataggtctgaagtaaatcaattctcctggtctcaatacactgaaaacaaactattaggggactgac

SEQ ID NO: 114940 - DNA, 70 bp, Homo sapiens
tgaagtaaatcaattctcctggtctcaatacactgaaaacaaactattaggggactgaccgaacccacct

SEQ ID NO: 114941 - DNA, 69 bp, Homo sapiens
aatcaattctcctggtctcaatacactgaaaacaaactattaggggactgaccgaacccaccttaggaa

SEQ ID NO: 114942 - DNA, 68 bp, Homo sapiens
tcctggtctcaatacactgaaaacaaactattaggggactgaccgaacccaccttaggaaccacctta

SEQ ID NO: 114943 - DNA, 65 bp, Homo sapiens
acactgaaaacaaactattaggggactgaccgaacccaccttaggaaccaccttacgtcaccttc

SEQ ID NO: 114944 - DNA, 65 bp, Homo sapiens
aaaacaaactattaggggactgaccgaacccaccttaggaaccaccttacgtcaccttctgtctc

SEQ ID NO: 114945 - DNA, 67 bp, Homo sapiens
gaacccaccttaggaaccaccttacgtcaccttctgtctctactgcaaaaccctcccttaatactgt

SEQ ID NO: 114946 - DNA, 68 bp, Homo sapiens
accttaggaaccaccttacgtcaccttctgtctctactgcaaaaccctcccttaatactgttcaaata

SEQ ID NO: 114947 - DNA, 75 bp, Homo sapiens
cttacgtcaccttctgtctctactgcaaaaccctcccttaatactgttcaaatacgctgacaatccagatccata

SEQ ID NO: 114948 - DNA, 76 bp, Homo sapiens
cttctgtctctactgcaaaaccctcccttaatactgttcaaatacgctgacaatccagatccatatccaatggaac

SEQ ID NO: 114949 - DNA, 79 bp, Homo sapiens
tctctactgcaaaaccctcccttaatactgttcaaatacgctgacaatccagatccatatccaatggaaccagcaatca

SEQ ID NO: 114950 - DNA, 77 bp, Homo sapiens
aaaaccctcccttaatactgttcaaatacgctgacaatccagatccatatccaatggaaccagcaatcatgcctgtg

SEQ ID NO: 114951 - DNA, 85 bp, Homo sapiens
cttaatactgttcaaatacgctgacaatccagatccatatccaatggaaccagcaatcatgcctgtgtgccagcaatgtcaggga

SEQ ID NO: 114952 - DNA, 85 bp, Homo sapiens
ttcaaatacgctgacaatccagatccatatccaatggaaccagcaatcatgcctgtgtgccagcaatgtcagggagggaagccga

SEQ ID NO: 114953 - DNA, 86 bp, Homo sapiens
tccatatccaatggaaccagcaatcatgcctgtgtgccagcaatgtcagggagggaagccgatctctgatgaattaggacatctta

SEQ ID NO: 114954 - DNA, 84 bp, Homo sapiens
aatggaaccagcaatcatgcctgtgtgccagcaatgtcagggagggaagccgatctctgatgaattaggacatcttaccagaca

SEQ ID NO: 114955 - DNA, 70 bp, Homo sapiens
ctgcgccccgatcgcgcccaacccccggcggggggctcccactcacttgtctttctcggtgccgaagatg

SEQ ID NO: 114956 - DNA, 70 bp, Homo sapiens
ccgatcgcgcccaacccccggcggggggctcccactcacttgtctttctcggtgccgaagatggaggcca

SEQ ID NO: 114957 - DNA, 70 bp, Homo sapiens
aacccccggcggggggctcccactcacttgtctttctcggtgccgaagatggaggccagatactccgcca

SEQ ID NO: 114958 - DNA, 72 bp, Homo sapiens
gggggctcccactcacttgtctttctcggtgccgaagatggaggccagatactccgccatttcccacccgcc

SEQ ID NO: 114959 - DNA, 73 bp, Homo sapiens
ctcccactcacttgtctttctcggtgccgaagatggaggccagatactccgccatttcccacccgccgccgcc

SEQ ID NO: 114960 - DNA, 75 bp, Homo sapiens
ttgtctttctcggtgccgaagatggaggccagatactccgccatttcccacccgccgccgccgctgccgtcgaca

SEQ ID NO: 114961 - DNA, 77 bp, Homo sapiens
tcggtgccgaagatggaggccagatactccgccatttcccacccgccgccgccgctgccgtcgacactgctgccgac

SEQ ID NO: 114962 - DNA, 76 bp, Homo sapiens
agatggaggccagatactccgccatttcccacccgccgccgccgctgccgtcgacactgctgccgacgccgccgac

SEQ ID NO: 114963 - DNA, 74 bp, Homo sapiens
agatactccgccatttcccacccgccgccgccgctgccgtcgacactgctgccgacgccgccgaccctgccgac

SEQ ID NO: 114964 - DNA, 72 bp, Homo sapiens
atttcccacccgccgccgccgctgccgtcgacactgctgccgacgccgccgaccctgccgacgccctcggga

SEQ ID NO: 114965 - DNA, 73 bp, Homo sapiens
ccgccgccgctgccgtcgacactgctgccgacgccgccgaccctgccgacgccctcgggagacgtcacccgga

SEQ ID NO: 114966 - DNA, 73 bp, Homo sapiens
ctgccgtcgacactgctgccgacgccgccgaccctgccgacgccctcgggagacgtcacccggacgcgacgac

SEQ ID NO: 114967 - DNA, 72 bp, Homo sapiens
acactgctgccgacgccgccgaccctgccgacgccctcgggagacgtcacccggacgcgacgacgctcttcc

SEQ ID NO: 114968 - DNA, 68 bp, Homo sapiens
ccgacgccgccgaccctgccgacgccctcgggagacgtcacccggacgcgacgacgctcttccccgcc

SEQ ID NO: 114969 - DNA, 69 bp, Homo sapiens
cgaccctgccgacgccctcgggagacgtcacccggacgcgacgacgctcttccccgccccgacgtggca

SEQ ID NO: 114970 - DNA, 79 bp, Homo sapiens
agcctgagcccactggatgaccctaatcaccaaacatctgcttccttctctgtagctgtgaccctgataccgcgtggtg

SEQ ID NO: 114971 - DNA, 79 bp, Homo sapiens
actggatgaccctaatcaccaaacatctgcttccttctctgtagctgtgaccctgataccgcgtggtgtgctccgaaca

SEQ ID NO: 114972 - DNA, 79 bp, Homo sapiens
atgaccctaatcaccaaacatctgcttccttctctgtagctgtgaccctgataccgcgtggtgtgctccgaacacatgg

SEQ ID NO: 114973 - DNA, 78 bp, Homo sapiens
aaacatctgcttccttctctgtagctgtgaccctgataccgcgtggtgtgctccgaacacatggtgcccagaacgaag

SEQ ID NO: 114974 - DNA, 78 bp, Homo sapiens
ttccttctctgtagctgtgaccctgataccgcgtggtgtgctccgaacacatggtgcccagaacgaaggcggcgtcca

SEQ ID NO: 114975 - DNA, 78 bp, Homo sapiens
tgtagctgtgaccctgataccgcgtggtgtgctccgaacacatggtgcccagaacgaaggcggcgtccagaagcccta

SEQ ID NO: 114976 - DNA, 76 bp, Homo sapiens
tgtgaccctgataccgcgtggtgtgctccgaacacatggtgcccagaacgaaggcggcgtccagaagccctaggtc

SEQ ID NO: 114977 - DNA, 73 bp, Homo sapiens
ataccgcgtggtgtgctccgaacacatggtgcccagaacgaaggcggcgtccagaagccctaggtcccagagg

SEQ ID NO: 114978 - DNA, 77 bp, Homo sapiens
gtgtgctccgaacacatggtgcccagaacgaaggcggcgtccagaagccctaggtcccagaggtccgctcagcggca

SEQ ID NO: 114979 - DNA, 76 bp, Homo sapiens
aacacatggtgcccagaacgaaggcggcgtccagaagccctaggtcccagaggtccgctcagcggcaggcgcataa

SEQ ID NO: 114980 - DNA, 72 bp, Homo sapiens
agaacgaaggcggcgtccagaagccctaggtcccagaggtccgctcagcggcaggcgcataaggcggggccg

SEQ ID NO: 114981 - DNA, 72 bp, Homo sapiens
aaggcggcgtccagaagccctaggtcccagaggtccgctcagcggcaggcgcataaggcggggccggcgcgg

SEQ ID NO: 114982 - DNA, 71 bp, Homo sapiens
agaagccctaggtcccagaggtccgctcagcggcaggcgcataaggcggggccggcgcgggcctttccttc

SEQ ID NO: 114983 - DNA, 72 bp, Homo sapiens
taggtcccagaggtccgctcagcggcaggcgcataaggcggggccggcgcgggcctttccttccatcggaac

SEQ ID NO: 114984 - DNA, 70 bp, Homo sapiens
aggtccgctcagcggcaggcgcataaggcggggccggcgcgggcctttccttccatcggaaccgttctcc

SEQ ID NO: 114985 - DNA, 68 bp, Homo sapiens
caggcgcataaggcggggccggcgcgggcctttccttccatcggaaccgttctcccggggctgagtcc

SEQ ID NO: 114986 - DNA, 66 bp, Homo sapiens
ataaggcggggccggcgcgggcctttccttccatcggaaccgttctcccggggctgagtccctgcc

SEQ ID NO: 114987 - DNA, 66 bp, Homo sapiens
cggcgcgggcctttccttccatcggaaccgttctcccggggctgagtccctgcccggactccgaac

SEQ ID NO: 114988 - DNA, 67 bp, Homo sapiens
tttccttccatcggaaccgttctcccggggctgagtccctgcccggactccgaacgccgaagaccag

SEQ ID NO: 114989 - DNA, 67 bp, Homo sapiens
ttccatcggaaccgttctcccggggctgagtccctgcccggactccgaacgccgaagaccaggggcc

SEQ ID NO: 114990 - DNA, 67 bp, Homo sapiens
accgttctcccggggctgagtccctgcccggactccgaacgccgaagaccaggggccggaagcgcgc

SEQ ID NO: 114991 - DNA, 72 bp, Homo sapiens
ctgagtccctgcccggactccgaacgccgaagaccaggggccggaagcgcgcgccgccactgccacgccgtg

SEQ ID NO: 114992 - DNA, 73 bp, Homo sapiens
tgcccggactccgaacgccgaagaccaggggccggaagcgcgcgccgccactgccacgccgtgtcagtcggga

SEQ ID NO: 114993 - DNA, 71 bp, Homo sapiens
actccgaacgccgaagaccaggggccggaagcgcgcgccgccactgccacgccgtgtcagtcgggagggag

SEQ ID NO: 114994 - DNA, 74 bp, Homo sapiens
aagaccaggggccggaagcgcgcgccgccactgccacgccgtgtcagtcgggagggagggagcgagcaggcgaa

SEQ ID NO: 114995 - DNA, 75 bp, Homo sapiens
ccggaagcgcgcgccgccactgccacgccgtgtcagtcgggagggagggagcgagcaggcgaagccgcggaggac

SEQ ID NO: 114996 - DNA, 75 bp, Homo sapiens
gcgccgccactgccacgccgtgtcagtcgggagggagggagcgagcaggcgaagccgcggaggacggggtgaaga

SEQ ID NO: 114997 - DNA, 74 bp, Homo sapiens
ccactgccacgccgtgtcagtcgggagggagggagcgagcaggcgaagccgcggaggacggggtgaagatggcg

SEQ ID NO: 114998 - DNA, 74 bp, Homo sapiens
tgtcagtcgggagggagggagcgagcaggcgaagccgcggaggacggggtgaagatggcggccttctccggtgc

SEQ ID NO: 114999 - DNA, 73 bp, Homo sapiens
gagggagggagcgagcaggcgaagccgcggaggacggggtgaagatggcggccttctccggtgcgtttgtgga

SEQ ID NO: 115000 - DNA, 68 bp, Homo sapiens
aggcgaagccgcggaggacggggtgaagatggcggccttctccggtgcgtttgtggaaactctggggg

SEQ ID NO: 115001 - DNA, 75 bp, Homo sapiens
tttttaaaattaatttttactttcagagatgggtgtaatgcctgagattgcacaagctgtggaagagatggattg

SEQ ID NO: 115002 - DNA, 79 bp, Homo sapiens
aatttttactttcagagatgggtgtaatgcctgagattgcacaagctgtggaagagatggattggctgtaagtacataa

SEQ ID NO: 115003 - DNA, 82 bp, Homo sapiens
tttcagagatgggtgtaatgcctgagattgcacaagctgtggaagagatggattggctgtaagtacataaagcctaaatgta

SEQ ID NO: 115004 - DNA, 80 bp, Homo sapiens
agatgggtgtaatgcctgagattgcacaagctgtggaagagatggattggctgtaagtacataaagcctaaatgtacctg

SEQ ID NO: 115005 - DNA, 78 bp, Homo sapiens
ctgagattgcacaagctgtggaagagatggattggctgtaagtacataaagcctaaatgtacctgggagaggatgttt

SEQ ID NO: 115006 - DNA, 74 bp, Homo sapiens
acaagctgtggaagagatggattggctgtaagtacataaagcctaaatgtacctgggagaggatgttttataat

SEQ ID NO: 115007 - DNA, 73 bp, Homo sapiens
tgtggaagagatggattggctgtaagtacataaagcctaaatgtacctgggagaggatgttttataatttaaa

SEQ ID NO: 115008 - DNA, 71 bp, Homo sapiens
gatggattggctgtaagtacataaagcctaaatgtacctgggagaggatgttttataatttaaacagttgt

SEQ ID NO: 115009 - DNA, 67 bp, Homo sapiens
gacttaatttgcttaggcgatttttttccccagtaactaaaattcttcaaatatgattcttttagcc

SEQ ID NO: 115010 - DNA, 69 bp, Homo sapiens
ttgcttaggcgatttttttccccagtaactaaaattcttcaaatatgattcttttagcctcccaactga

SEQ ID NO: 115011 - DNA, 71 bp, Homo sapiens
ttttttccccagtaactaaaattcttcaaatatgattcttttagcctcccaactgatatccaggctgaatc

SEQ ID NO: 115012 - DNA, 75 bp, Homo sapiens
agtaactaaaattcttcaaatatgattcttttagcctcccaactgatatccaggctgaatctatcccattgatct

SEQ ID NO: 115013 - DNA, 76 bp, Homo sapiens
aaaattcttcaaatatgattcttttagcctcccaactgatatccaggctgaatctatcccattgatcttaggagga

SEQ ID NO: 115014 - DNA, 78 bp, Homo sapiens
aatatgattcttttagcctcccaactgatatccaggctgaatctatcccattgatcttaggaggaggtgatgtactta

SEQ ID NO: 115015 - DNA, 77 bp, Homo sapiens
ttagcctcccaactgatatccaggctgaatctatcccattgatcttaggaggaggtgatgtacttatggtaagttta

SEQ ID NO: 115016 - DNA, 74 bp, Homo sapiens
aactgatatccaggctgaatctatcccattgatcttaggaggaggtgatgtacttatggtaagtttaaatttgg

SEQ ID NO: 115017 - DNA, 74 bp, Homo sapiens
atatccaggctgaatctatcccattgatcttaggaggaggtgatgtacttatggtaagtttaaatttggtgagg

SEQ ID NO: 115018 - DNA, 73 bp, Homo sapiens
aatctatcccattgatcttaggaggaggtgatgtacttatggtaagtttaaatttggtgaggtgattggtagc

SEQ ID NO: 115019 - DNA, 73 bp, Homo sapiens
attgatcttaggaggaggtgatgtacttatggtaagtttaaatttggtgaggtgattggtagctggggacaca

SEQ ID NO: 115020 - DNA, 71 bp, Homo sapiens
aggaggtgatgtacttatggtaagtttaaatttggtgaggtgattggtagctggggacacactctaagaat

SEQ ID NO: 115021 - DNA, 69 bp, Homo sapiens
aaagatttctacatactatggtgttagtttgatttctttaatagacaacttaatctgtaaaatcaactt

SEQ ID NO: 115022 - DNA, 69 bp, Homo sapiens
catactatggtgttagtttgatttctttaatagacaacttaatctgtaaaatcaacttttttcccctca

SEQ ID NO: 115023 - DNA, 72 bp, Homo sapiens
tgttagtttgatttctttaatagacaacttaatctgtaaaatcaacttttttcccctcattcaggctgcaga

SEQ ID NO: 115024 - DNA, 71 bp, Homo sapiens
ttctttaatagacaacttaatctgtaaaatcaacttttttcccctcattcaggctgcagaaacaggaagtg

SEQ ID NO: 115025 - DNA, 71 bp, Homo sapiens
aatagacaacttaatctgtaaaatcaacttttttcccctcattcaggctgcagaaacaggaagtggcaaaa

SEQ ID NO: 115026 - DNA, 72 bp, Homo sapiens
tctgtaaaatcaacttttttcccctcattcaggctgcagaaacaggaagtggcaaaactggtgtaagtaata

SEQ ID NO: 115027 - DNA, 69 bp, Homo sapiens
aacttttttcccctcattcaggctgcagaaacaggaagtggcaaaactggtgtaagtaataaattatat

SEQ ID NO: 115028 - DNA, 73 bp, Homo sapiens
ccctcattcaggctgcagaaacaggaagtggcaaaactggtgtaagtaataaattatatttactttctctcta

SEQ ID NO: 115029 - DNA, 70 bp, Homo sapiens
caggctgcagaaacaggaagtggcaaaactggtgtaagtaataaattatatttactttctctctaaaagt

SEQ ID NO: 115030 - DNA, 68 bp, Homo sapiens
cagaaacaggaagtggcaaaactggtgtaagtaataaattatatttactttctctctaaaagttgaat

SEQ ID NO: 115031 - DNA, 65 bp, Homo sapiens
aagtggcaaaactggtgtaagtaataaattatatttactttctctctaaaagttgaattttaaaa

SEQ ID NO: 115032 - DNA, 73 bp, Homo sapiens
tgtcgttaatatgtgaatactaatatagataccttttgtttctttgataggcttttagtattccagttatcca

SEQ ID NO: 115033 - DNA, 73 bp, Homo sapiens
gtgaatactaatatagataccttttgtttctttgataggcttttagtattccagttatccagatagtttatga

SEQ ID NO: 115034 - DNA, 71 bp, Homo sapiens
ctaatatagataccttttgtttctttgataggcttttagtattccagttatccagatagtttatgaaactc

SEQ ID NO: 115035 - DNA, 71 bp, Homo sapiens
cttttgtttctttgataggcttttagtattccagttatccagatagtttatgaaactctgaaagaccaaca

SEQ ID NO: 115036 - DNA, 71 bp, Homo sapiens
gtttctttgataggcttttagtattccagttatccagatagtttatgaaactctgaaagaccaacaggaag

SEQ ID NO: 115037 - DNA, 70 bp, Homo sapiens
taggcttttagtattccagttatccagatagtttatgaaactctgaaagaccaacaggaaggcaaaaaag

SEQ ID NO: 115038 - DNA, 69 bp, Homo sapiens
gtattccagttatccagatagtttatgaaactctgaaagaccaacaggaaggcaaaaaaggaaaaacaa

SEQ ID NO: 115039 - DNA, 66 bp, Homo sapiens
ccagatagtttatgaaactctgaaagaccaacaggaaggcaaaaaaggaaaaacaacaattaaaac

SEQ ID NO: 115040 - DNA, 68 bp, Homo sapiens
tgaaactctgaaagaccaacaggaaggcaaaaaaggaaaaacaacaattaaaactggtgcttcaggta

SEQ ID NO: 115041 - DNA, 66 bp, Homo sapiens
ctctgaaagaccaacaggaaggcaaaaaaggaaaaacaacaattaaaactggtgcttcaggtaatt

SEQ ID NO: 115042 - DNA, 63 bp, Homo sapiens
aaaaggaaaaacaacaattaaaactggtgcttcaggtaatttttgtaaattgatatttccttt

SEQ ID NO: 115043 - DNA, 70 bp, Homo sapiens
gcattttaaattttatatatctgtgggtaacttttcttattttaatttgtttagtgctgaacaaatggca

SEQ ID NO: 115044 - DNA, 75 bp, Homo sapiens
ttatatatctgtgggtaacttttcttattttaatttgtttagtgctgaacaaatggcagatgaacccatatgaca

SEQ ID NO: 115045 - DNA, 75 bp, Homo sapiens
tatctgtgggtaacttttcttattttaatttgtttagtgctgaacaaatggcagatgaacccatatgacagagga

SEQ ID NO: 115046 - DNA, 75 bp, Homo sapiens
tttcttattttaatttgtttagtgctgaacaaatggcagatgaacccatatgacagaggatctgcttttggtaag

SEQ ID NO: 115047 - DNA, 77 bp, Homo sapiens
ttaatttgtttagtgctgaacaaatggcagatgaacccatatgacagaggatctgcttttggtaagtggatagactt

SEQ ID NO: 115048 - DNA, 82 bp, Homo sapiens
tttagtgctgaacaaatggcagatgaacccatatgacagaggatctgcttttggtaagtggatagactttccatcagctcat

SEQ ID NO: 115049 - DNA, 79 bp, Homo sapiens
aacaaatggcagatgaacccatatgacagaggatctgcttttggtaagtggatagactttccatcagctcatttgtaat

SEQ ID NO: 115050 - DNA, 77 bp, Homo sapiens
atgaacccatatgacagaggatctgcttttggtaagtggatagactttccatcagctcatttgtaattcagaaactt

SEQ ID NO: 115051 - DNA, 76 bp, Homo sapiens
catatgacagaggatctgcttttggtaagtggatagactttccatcagctcatttgtaattcagaaactttaaaaa

SEQ ID NO: 115052 - DNA, 73 bp, Homo sapiens
gaggatctgcttttggtaagtggatagactttccatcagctcatttgtaattcagaaactttaaaaaataata

SEQ ID NO: 115053 - DNA, 74 bp, Homo sapiens
atgtatgatttataaaacctgtactgacgtgtttttctgtgttttcttctcaaatccagcaattgggtcagatg

SEQ ID NO: 115054 - DNA, 72 bp, Homo sapiens
tataaaacctgtactgacgtgtttttctgtgttttcttctcaaatccagcaattgggtcagatggtctttgt

SEQ ID NO: 115055 - DNA, 76 bp, Homo sapiens
tactgacgtgtttttctgtgttttcttctcaaatccagcaattgggtcagatggtctttgttgtcaaagcagagaa

SEQ ID NO: 115056 - DNA, 74 bp, Homo sapiens
ttttctgtgttttcttctcaaatccagcaattgggtcagatggtctttgttgtcaaagcagagaagtaaaggaa

SEQ ID NO: 115057 - DNA, 77 bp, Homo sapiens
tttcttctcaaatccagcaattgggtcagatggtctttgttgtcaaagcagagaagtaaaggaatggcatgggtgta

SEQ ID NO: 115058 - DNA, 77 bp, Homo sapiens
atccagcaattgggtcagatggtctttgttgtcaaagcagagaagtaaaggaatggcatgggtgtagagctactaaa

SEQ ID NO: 115059 - DNA, 75 bp, Homo sapiens
attgggtcagatggtctttgttgtcaaagcagagaagtaaaggaatggcatgggtgtagagctactaaaggatta

SEQ ID NO: 115060 - DNA, 73 bp, Homo sapiens
tctttgttgtcaaagcagagaagtaaaggaatggcatgggtgtagagctactaaaggattaatgaaaggtatt

SEQ ID NO: 115061 - DNA, 74 bp, Homo sapiens
gttgtcaaagcagagaagtaaaggaatggcatgggtgtagagctactaaaggattaatgaaaggtatttgaaca

SEQ ID NO: 115062 - DNA, 76 bp, Homo sapiens
aagtaaaggaatggcatgggtgtagagctactaaaggattaatgaaaggtatttgaacagcatctgcacttgtata

SEQ ID NO: 115063 - DNA, 76 bp, Homo sapiens
aatggcatgggtgtagagctactaaaggattaatgaaaggtatttgaacagcatctgcacttgtataaacttttga

SEQ ID NO: 115064 - DNA, 75 bp, Homo sapiens
catggtaaatgaatcgtgtgtgtgatttatataaatctcaatgtattttacccttgtagggaaacactactatga

SEQ ID NO: 115065 - DNA, 76 bp, Homo sapiens
gtgtgtgtgatttatataaatctcaatgtattttacccttgtagggaaacactactatgaagtatcctgtcatgac

SEQ ID NO: 115066 - DNA, 72 bp, Homo sapiens
tttatataaatctcaatgtattttacccttgtagggaaacactactatgaagtatcctgtcatgaccaaggg

SEQ ID NO: 115067 - DNA, 74 bp, Homo sapiens
ataaatctcaatgtattttacccttgtagggaaacactactatgaagtatcctgtcatgaccaagggttatgca

SEQ ID NO: 115068 - DNA, 71 bp, Homo sapiens
tattttacccttgtagggaaacactactatgaagtatcctgtcatgaccaagggttatgcagggtcgggtg

SEQ ID NO: 115069 - DNA, 75 bp, Homo sapiens
ccttgtagggaaacactactatgaagtatcctgtcatgaccaagggttatgcagggtcgggtggtctaccatgca

SEQ ID NO: 115070 - DNA, 75 bp, Homo sapiens
aaacactactatgaagtatcctgtcatgaccaagggttatgcagggtcgggtggtctaccatgcaggcctctttg

SEQ ID NO: 115071 - DNA, 73 bp, Homo sapiens
aagtatcctgtcatgaccaagggttatgcagggtcgggtggtctaccatgcaggcctctttggacctaggtaa

SEQ ID NO: 115072 - DNA, 73 bp, Homo sapiens
tcatgaccaagggttatgcagggtcgggtggtctaccatgcaggcctctttggacctaggtaagtgtttctaa

SEQ ID NO: 115073 - DNA, 69 bp, Homo sapiens
aagggttatgcagggtcgggtggtctaccatgcaggcctctttggacctaggtaagtgtttctaaaata

SEQ ID NO: 115074 - DNA, 71 bp, Homo sapiens
ggtcgggtggtctaccatgcaggcctctttggacctaggtaagtgtttctaaaataactgaattgattgat

SEQ ID NO: 115075 - DNA, 73 bp, Homo sapiens
tggtctaccatgcaggcctctttggacctaggtaagtgtttctaaaataactgaattgattgatttacatttg

SEQ ID NO: 115076 - DNA, 67 bp, Homo sapiens
aatattttttaaatctaggtactgacaagtttggatttggctttggtggaacaggaaagaaatccca

SEQ ID NO: 115077 - DNA, 69 bp, Homo sapiens
tttaaatctaggtactgacaagtttggatttggctttggtggaacaggaaagaaatcccataacaaaca

SEQ ID NO: 115078 - DNA, 70 bp, Homo sapiens
taggtactgacaagtttggatttggctttggtggaacaggaaagaaatcccataacaaacaatttgataa

SEQ ID NO: 115079 - DNA, 70 bp, Homo sapiens
gtttggatttggctttggtggaacaggaaagaaatcccataacaaacaatttgataattatggagaggta

SEQ ID NO: 115080 - DNA, 72 bp, Homo sapiens
gctttggtggaacaggaaagaaatcccataacaaacaatttgataattatggagaggtaagcgattatgtta

SEQ ID NO: 115081 - DNA, 74 bp, Homo sapiens
gtggaacaggaaagaaatcccataacaaacaatttgataattatggagaggtaagcgattatgttatgacttca

SEQ ID NO: 115082 - DNA, 75 bp, Homo sapiens
aatcccataacaaacaatttgataattatggagaggtaagcgattatgttatgacttcaacatagcataagtaag

SEQ ID NO: 115083 - DNA, 68 bp, Homo sapiens
ttttaactttatttaagaatttactttctattaatagcatttgactttctggtgttctaggaattcac

SEQ ID NO: 115084 - DNA, 75 bp, Homo sapiens
atttaagaatttactttctattaatagcatttgactttctggtgttctaggaattcactatgcatgataccattg

SEQ ID NO: 115085 - DNA, 77 bp, Homo sapiens
tttactttctattaatagcatttgactttctggtgttctaggaattcactatgcatgataccattggatgttacctg

SEQ ID NO: 115086 - DNA, 80 bp, Homo sapiens
tattaatagcatttgactttctggtgttctaggaattcactatgcatgataccattggatgttacctggatatagataag

SEQ ID NO: 115087 - DNA, 80 bp, Homo sapiens
tttgactttctggtgttctaggaattcactatgcatgataccattggatgttacctggatatagataagggacatgtcaa

SEQ ID NO: 115088 - DNA, 80 bp, Homo sapiens
tttctggtgttctaggaattcactatgcatgataccattggatgttacctggatatagataagggacatgtcaagttctc

SEQ ID NO: 115089 - DNA, 79 bp, Homo sapiens
taggaattcactatgcatgataccattggatgttacctggatatagataagggacatgtcaagttctccaaaaatggta

SEQ ID NO: 115090 - DNA, 79 bp, Homo sapiens
actatgcatgataccattggatgttacctggatatagataagggacatgtcaagttctccaaaaatggtaagctctata

SEQ ID NO: 115091 - DNA, 77 bp, Homo sapiens
taccattggatgttacctggatatagataagggacatgtcaagttctccaaaaatggtaagctctatatggatctta

SEQ ID NO: 115092 - DNA, 75 bp, Homo sapiens
ttacctggatatagataagggacatgtcaagttctccaaaaatggtaagctctatatggatcttagtagtgaaaa

SEQ ID NO: 115093 - DNA, 78 bp, Homo sapiens
ggatatagataagggacatgtcaagttctccaaaaatggtaagctctatatggatcttagtagtgaaaagatacatga

SEQ ID NO: 115094 - DNA, 77 bp, Homo sapiens
aagggacatgtcaagttctccaaaaatggtaagctctatatggatcttagtagtgaaaagatacatgatattcaata

SEQ ID NO: 115095 - DNA, 72 bp, Homo sapiens
ctctctctctcttgttttttaaggaaaagatcttggtctggcatttgaaataccaccacatatgaaaaacca

SEQ ID NO: 115096 - DNA, 70 bp, Homo sapiens
tcttgttttttaaggaaaagatcttggtctggcatttgaaataccaccacatatgaaaaaccaagccctc

SEQ ID NO: 115097 - DNA, 69 bp, Homo sapiens
tttttaaggaaaagatcttggtctggcatttgaaataccaccacatatgaaaaaccaagccctctttcc

SEQ ID NO: 115098 - DNA, 73 bp, Homo sapiens
aaagatcttggtctggcatttgaaataccaccacatatgaaaaaccaagccctctttcctgcctgtgttttga

SEQ ID NO: 115099 - DNA, 71 bp, Homo sapiens
gcatttgaaataccaccacatatgaaaaaccaagccctctttcctgcctgtgttttgaaggtaattaggaa

SEQ ID NO: 115100 - DNA, 70 bp, Homo sapiens
ataccaccacatatgaaaaaccaagccctctttcctgcctgtgttttgaaggtaattaggaatctagtta

SEQ ID NO: 115101 - DNA, 69 bp, Homo sapiens
cacatatgaaaaaccaagccctctttcctgcctgtgttttgaaggtaattaggaatctagttagaaaaa

SEQ ID NO: 115102 - DNA, 66 bp, Homo sapiens
aaaaccaagccctctttcctgcctgtgttttgaaggtaattaggaatctagttagaaaaaatttgc

SEQ ID NO: 115103 - DNA, 70 bp, Homo sapiens
tggttttcaattagggtaggaattttaattttctgttttattcaatgctagaatgctgaactgaaattta

SEQ ID NO: 115104 - DNA, 71 bp, Homo sapiens
gtaggaattttaattttctgttttattcaatgctagaatgctgaactgaaatttaacttcggtgaagagga

SEQ ID NO: 115105 - DNA, 70 bp, Homo sapiens
taattttctgttttattcaatgctagaatgctgaactgaaatttaacttcggtgaagaggaatttaagtt

SEQ ID NO: 115106 - DNA, 71 bp, Homo sapiens
ctgttttattcaatgctagaatgctgaactgaaatttaacttcggtgaagaggaatttaagtttccaccaa

SEQ ID NO: 115107 - DNA, 70 bp, Homo sapiens
aatgctagaatgctgaactgaaatttaacttcggtgaagaggaatttaagtttccaccaaaagatggctt

SEQ ID NO: 115108 - DNA, 68 bp, Homo sapiens
ctgaactgaaatttaacttcggtgaagaggaatttaagtttccaccaaaagatggctttgttgctctt

SEQ ID NO: 115109 - DNA, 68 bp, Homo sapiens
tgaaatttaacttcggtgaagaggaatttaagtttccaccaaaagatggctttgttgctctttccaag

SEQ ID NO: 115110 - DNA, 70 bp, Homo sapiens
tcggtgaagaggaatttaagtttccaccaaaagatggctttgttgctctttccaaggcaccggatggtta

SEQ ID NO: 115111 - DNA, 71 bp, Homo sapiens
aatttaagtttccaccaaaagatggctttgttgctctttccaaggcaccggatggttacattgtcaaatca

SEQ ID NO: 115112 - DNA, 75 bp, Homo sapiens
aagtttccaccaaaagatggctttgttgctctttccaaggcaccggatggttacattgtcaaatcacagcactca

SEQ ID NO: 115113 - DNA, 75 bp, Homo sapiens
aaaagatggctttgttgctctttccaaggcaccggatggttacattgtcaaatcacagcactcaggtattatacc

SEQ ID NO: 115114 - DNA, 76 bp, Homo sapiens
tttgttgctctttccaaggcaccggatggttacattgtcaaatcacagcactcaggtattatacctgcaagggtaa

SEQ ID NO: 115115 - DNA, 75 bp, Homo sapiens
tttccaaggcaccggatggttacattgtcaaatcacagcactcaggtattatacctgcaagggtaaggatttcta

SEQ ID NO: 115116 - DNA, 74 bp, Homo sapiens
agtattataaagtgtgctttgaatgtgttctcatcttttttattccctaaggtaatgcacaggtgacacaaaca

SEQ ID NO: 115117 - DNA, 73 bp, Homo sapiens
agtgtgctttgaatgtgttctcatcttttttattccctaaggtaatgcacaggtgacacaaacaaagtttctc

SEQ ID NO: 115118 - DNA, 72 bp, Homo sapiens
tgttctcatcttttttattccctaaggtaatgcacaggtgacacaaacaaagtttctccccaatgctccgaa

SEQ ID NO: 115119 - DNA, 71 bp, Homo sapiens
ttttttattccctaaggtaatgcacaggtgacacaaacaaagtttctccccaatgctccgaaagctctcat

SEQ ID NO: 115120 - DNA, 74 bp, Homo sapiens
tattccctaaggtaatgcacaggtgacacaaacaaagtttctccccaatgctccgaaagctctcattgttgaac

SEQ ID NO: 115121 - DNA, 73 bp, Homo sapiens
tgcacaggtgacacaaacaaagtttctccccaatgctccgaaagctctcattgttgaaccttcccgggagtta

SEQ ID NO: 115122 - DNA, 71 bp, Homo sapiens
acacaaacaaagtttctccccaatgctccgaaagctctcattgttgaaccttcccgggagttagctgaaca

SEQ ID NO: 115123 - DNA, 68 bp, Homo sapiens
aaagtttctccccaatgctccgaaagctctcattgttgaaccttcccgggagttagctgaacaaactt

SEQ ID NO: 115124 - DNA, 74 bp, Homo sapiens
caatgctccgaaagctctcattgttgaaccttcccgggagttagctgaacaaactttgaacaacatcaagcagt

SEQ ID NO: 115125 - DNA, 71 bp, Homo sapiens
aaagctctcattgttgaaccttcccgggagttagctgaacaaactttgaacaacatcaagcagtttaagaa

SEQ ID NO: 115126 - DNA, 72 bp, Homo sapiens
tctcattgttgaaccttcccgggagttagctgaacaaactttgaacaacatcaagcagtttaagaaatacat

SEQ ID NO: 115127 - DNA, 71 bp, Homo sapiens
cttcccgggagttagctgaacaaactttgaacaacatcaagcagtttaagaaatacattgataatcctaaa

SEQ ID NO: 115128 - DNA, 71 bp, Homo sapiens
gggagttagctgaacaaactttgaacaacatcaagcagtttaagaaatacattgataatcctaaattaagg

SEQ ID NO: 115129 - DNA, 71 bp, Homo sapiens
tgaacaaactttgaacaacatcaagcagtttaagaaatacattgataatcctaaattaaggtaaatcttcc

SEQ ID NO: 115130 - DNA, 73 bp, Homo sapiens
caacatcaagcagtttaagaaatacattgataatcctaaattaaggtaaatcttccttttgtgctgaaatgct

SEQ ID NO: 115131 - DNA, 73 bp, Homo sapiens
tcaagcagtttaagaaatacattgataatcctaaattaaggtaaatcttccttttgtgctgaaatgcttattg

SEQ ID NO: 115132 - DNA, 75 bp, Homo sapiens
tttttttttatattatcatcttgatatttatttcagggagcttctgataattggaggtgttgcagcccgggatca

SEQ ID NO: 115133 - DNA, 79 bp, Homo sapiens
ttatattatcatcttgatatttatttcagggagcttctgataattggaggtgttgcagcccgggatcagctctctgttt

SEQ ID NO: 115134 - DNA, 76 bp, Homo sapiens
atcttgatatttatttcagggagcttctgataattggaggtgttgcagcccgggatcagctctctgttttggaaaa

SEQ ID NO: 115135 - DNA, 75 bp, Homo sapiens
atttatttcagggagcttctgataattggaggtgttgcagcccgggatcagctctctgttttggaaaatggagta

SEQ ID NO: 115136 - DNA, 73 bp, Homo sapiens
cttctgataattggaggtgttgcagcccgggatcagctctctgttttggaaaatggagtaagttgtagtttta

SEQ ID NO: 115137 - DNA, 70 bp, Homo sapiens
ataattggaggtgttgcagcccgggatcagctctctgttttggaaaatggagtaagttgtagttttaatt

SEQ ID NO: 115138 - DNA, 66 bp, Homo sapiens
actgtttctttagttttcattaagtggttggtttgctttttttcaggtagatatagttgtaggtac

SEQ ID NO: 115139 - DNA, 67 bp, Homo sapiens
tagttttcattaagtggttggtttgctttttttcaggtagatatagttgtaggtactccgggaagac

SEQ ID NO: 115140 - DNA, 68 bp, Homo sapiens
attaagtggttggtttgctttttttcaggtagatatagttgtaggtactccgggaagactagatgact

SEQ ID NO: 115141 - DNA, 71 bp, Homo sapiens
gtttgctttttttcaggtagatatagttgtaggtactccgggaagactagatgacttggtgtcaactggaa

SEQ ID NO: 115142 - DNA, 72 bp, Homo sapiens
tttttcaggtagatatagttgtaggtactccgggaagactagatgacttggtgtcaactggaaagctgaact

SEQ ID NO: 115143 - DNA, 75 bp, Homo sapiens
tagatatagttgtaggtactccgggaagactagatgacttggtgtcaactggaaagctgaacttatctcaagtta

SEQ ID NO: 115144 - DNA, 74 bp, Homo sapiens
ttgtaggtactccgggaagactagatgacttggtgtcaactggaaagctgaacttatctcaagttagattcctg

SEQ ID NO: 115145 - DNA, 76 bp, Homo sapiens
tccgggaagactagatgacttggtgtcaactggaaagctgaacttatctcaagttagattcctggtcctggatgaa

SEQ ID NO: 115146 - DNA, 78 bp, Homo sapiens
atgacttggtgtcaactggaaagctgaacttatctcaagttagattcctggtcctggatgaagctgtatgttgaaata

SEQ ID NO: 115147 - DNA, 79 bp, Homo sapiens
tgtcaactggaaagctgaacttatctcaagttagattcctggtcctggatgaagctgtatgttgaaatataatcatact

SEQ ID NO: 115148 - DNA, 76 bp, Homo sapiens
ggaaagctgaacttatctcaagttagattcctggtcctggatgaagctgtatgttgaaatataatcatacttttta

SEQ ID NO: 115149 - DNA, 73 bp, Homo sapiens
gaacttatctcaagttagattcctggtcctggatgaagctgtatgttgaaatataatcatactttttaaaaag

SEQ ID NO: 115150 - DNA, 70 bp, Homo sapiens
cgtttttttccatactgattaaaaacttaatttattctttgtttctcatgcaggatgggcttctttctca

SEQ ID NO: 115151 - DNA, 73 bp, Homo sapiens
ccatactgattaaaaacttaatttattctttgtttctcatgcaggatgggcttctttctcaaggttattctga

SEQ ID NO: 115152 - DNA, 70 bp, Homo sapiens
aaaaacttaatttattctttgtttctcatgcaggatgggcttctttctcaaggttattctgattttataa

SEQ ID NO: 115153 - DNA, 79 bp, Homo sapiens
tattctttgtttctcatgcaggatgggcttctttctcaaggttattctgattttataaataggatgcacaatcagattc

SEQ ID NO: 115154 - DNA, 79 bp, Homo sapiens
tttctcatgcaggatgggcttctttctcaaggttattctgattttataaataggatgcacaatcagattcctcaggtta

SEQ ID NO: 115155 - DNA, 76 bp, Homo sapiens
aggatgggcttctttctcaaggttattctgattttataaataggatgcacaatcagattcctcaggttacctctga

SEQ ID NO: 115156 - DNA, 76 bp, Homo sapiens
tctttctcaaggttattctgattttataaataggatgcacaatcagattcctcaggttacctctgatggaaaaaga

SEQ ID NO: 115157 - DNA, 76 bp, Homo sapiens
gttattctgattttataaataggatgcacaatcagattcctcaggttacctctgatggaaaaagacttcaggtata

SEQ ID NO: 115158 - DNA, 74 bp, Homo sapiens
ctgattttataaataggatgcacaatcagattcctcaggttacctctgatggaaaaagacttcaggtataaaat

SEQ ID NO: 115159 - DNA, 78 bp, Homo sapiens
taaataggatgcacaatcagattcctcaggttacctctgatggaaaaagacttcaggtataaaatttatcaatgcatc

SEQ ID NO: 115160 - DNA, 77 bp, Homo sapiens
cacaatcagattcctcaggttacctctgatggaaaaagacttcaggtataaaatttatcaatgcatcttaaaatgca

SEQ ID NO: 115161 - DNA, 74 bp, Homo sapiens
cctcaggttacctctgatggaaaaagacttcaggtataaaatttatcaatgcatcttaaaatgcatgtaaacaa

SEQ ID NO: 115162 - DNA, 73 bp, Homo sapiens
ttattattataaaagttcatctcaatttggggtttcctcttcttaggtgattgtttgctctgccactttgcat

SEQ ID NO: 115163 - DNA, 72 bp, Homo sapiens
attataaaagttcatctcaatttggggtttcctcttcttaggtgattgtttgctctgccactttgcattctt

SEQ ID NO: 115164 - DNA, 73 bp, Homo sapiens
atctcaatttggggtttcctcttcttaggtgattgtttgctctgccactttgcattctttcgatgtaaagaaa

SEQ ID NO: 115165 - DNA, 74 bp, Homo sapiens
ggtttcctcttcttaggtgattgtttgctctgccactttgcattctttcgatgtaaagaaactgtccgagaaga

SEQ ID NO: 115166 - DNA, 77 bp, Homo sapiens
tcttcttaggtgattgtttgctctgccactttgcattctttcgatgtaaagaaactgtccgagaagataatgcattt

SEQ ID NO: 115167 - DNA, 76 bp, Homo sapiens
ttgtttgctctgccactttgcattctttcgatgtaaagaaactgtccgagaagataatgcattttcctacatgggt

SEQ ID NO: 115168 - DNA, 75 bp, Homo sapiens
tgccactttgcattctttcgatgtaaagaaactgtccgagaagataatgcattttcctacatgggttgacttaaa

SEQ ID NO: 115169 - DNA, 73 bp, Homo sapiens
tttgcattctttcgatgtaaagaaactgtccgagaagataatgcattttcctacatgggttgacttaaaagga

SEQ ID NO: 115170 - DNA, 72 bp, Homo sapiens
atgtaaagaaactgtccgagaagataatgcattttcctacatgggttgacttaaaaggagaagactctgttc

SEQ ID NO: 115171 - DNA, 73 bp, Homo sapiens
aagaaactgtccgagaagataatgcattttcctacatgggttgacttaaaaggagaagactctgttccagata

SEQ ID NO: 115172 - DNA, 74 bp, Homo sapiens
aagataatgcattttcctacatgggttgacttaaaaggagaagactctgttccagatactgtacaccatgttgt

SEQ ID NO: 115173 - DNA, 72 bp, Homo sapiens
attttcctacatgggttgacttaaaaggagaagactctgttccagatactgtacaccatgttgttgtcccag

SEQ ID NO: 115174 - DNA, 72 bp, Homo sapiens
atgggttgacttaaaaggagaagactctgttccagatactgtacaccatgttgttgtcccagtaaatcccaa

SEQ ID NO: 115175 - DNA, 72 bp, Homo sapiens
acttaaaaggagaagactctgttccagatactgtacaccatgttgttgtcccagtaaatcccaaaactgaca

SEQ ID NO: 115176 - DNA, 74 bp, Homo sapiens
agaagactctgttccagatactgtacaccatgttgttgtcccagtaaatcccaaaactgacagactctgggaaa

SEQ ID NO: 115177 - DNA, 73 bp, Homo sapiens
ttccagatactgtacaccatgttgttgtcccagtaaatcccaaaactgacagactctgggaaaggcttggaaa

SEQ ID NO: 115178 - DNA, 73 bp, Homo sapiens
atactgtacaccatgttgttgtcccagtaaatcccaaaactgacagactctgggaaaggcttggaaagagcca

SEQ ID NO: 115179 - DNA, 72 bp, Homo sapiens
atgttgttgtcccagtaaatcccaaaactgacagactctgggaaaggcttggaaagagccacattagagtaa

SEQ ID NO: 115180 - DNA, 70 bp, Homo sapiens
agtaaatcccaaaactgacagactctgggaaaggcttggaaagagccacattagagtaagtggtttataa

SEQ ID NO: 115181 - DNA, 70 bp, Homo sapiens
aaaactgacagactctgggaaaggcttggaaagagccacattagagtaagtggtttataatattaacatt

SEQ ID NO: 115182 - DNA, 74 bp, Homo sapiens
tgacagactctgggaaaggcttggaaagagccacattagagtaagtggtttataatattaacatttatgtagaa

SEQ ID NO: 115183 - DNA, 78 bp, Homo sapiens
aacatgacatatattctgaatcattatttaaccactcctctatcctgtttttattccttgcttttgatagactgatga

SEQ ID NO: 115184 - DNA, 81 bp, Homo sapiens
catatattctgaatcattatttaaccactcctctatcctgtttttattccttgcttttgatagactgatgatgtacatgca

SEQ ID NO: 115185 - DNA, 78 bp, Homo sapiens
ctgaatcattatttaaccactcctctatcctgtttttattccttgcttttgatagactgatgatgtacatgcaaaaga

SEQ ID NO: 115186 - DNA, 77 bp, Homo sapiens
tttaaccactcctctatcctgtttttattccttgcttttgatagactgatgatgtacatgcaaaagataacacaaga

SEQ ID NO: 115187 - DNA, 79 bp, Homo sapiens
tatcctgtttttattccttgcttttgatagactgatgatgtacatgcaaaagataacacaagacctggtgctaatagtc

SEQ ID NO: 115188 - DNA, 80 bp, Homo sapiens
ttattccttgcttttgatagactgatgatgtacatgcaaaagataacacaagacctggtgctaatagtccaggtgagtta

SEQ ID NO: 115189 - DNA, 79 bp, Homo sapiens
cttttgatagactgatgatgtacatgcaaaagataacacaagacctggtgctaatagtccaggtgagttaaaagagtca

SEQ ID NO: 115190 - DNA, 79 bp, Homo sapiens
atagactgatgatgtacatgcaaaagataacacaagacctggtgctaatagtccaggtgagttaaaagagtcaaatgtg

SEQ ID NO: 115191 - DNA, 75 bp, Homo sapiens
tacatgcaaaagataacacaagacctggtgctaatagtccaggtgagttaaaagagtcaaatgtgttgaaagatt

SEQ ID NO: 115192 - DNA, 72 bp, Homo sapiens
aaaagataacacaagacctggtgctaatagtccaggtgagttaaaagagtcaaatgtgttgaaagattttga

SEQ ID NO: 115193 - DNA, 72 bp, Homo sapiens
acacaagacctggtgctaatagtccaggtgagttaaaagagtcaaatgtgttgaaagattttgaaaatgaaa

SEQ ID NO: 115194 - DNA, 71 bp, Homo sapiens
tggtgctaatagtccaggtgagttaaaagagtcaaatgtgttgaaagattttgaaaatgaaatttatacct

SEQ ID NO: 115195 - DNA, 75 bp, Homo sapiens
tttttgttgttgttatgatattcaagagatgtggtctgaagctattaaaatcctgaaaggggagtatgctgtccg

SEQ ID NO: 115196 - DNA, 78 bp, Homo sapiens
ttgttgttatgatattcaagagatgtggtctgaagctattaaaatcctgaaaggggagtatgctgtccgggcaatcaa

SEQ ID NO: 115197 - DNA, 76 bp, Homo sapiens
atattcaagagatgtggtctgaagctattaaaatcctgaaaggggagtatgctgtccgggcaatcaaggaacataa

SEQ ID NO: 115198 - DNA, 77 bp, Homo sapiens
agatgtggtctgaagctattaaaatcctgaaaggggagtatgctgtccgggcaatcaaggaacataagatggatcaa

SEQ ID NO: 115199 - DNA, 75 bp, Homo sapiens
aagctattaaaatcctgaaaggggagtatgctgtccgggcaatcaaggaacataagatggatcaagcaattatct

SEQ ID NO: 115200 - DNA, 77 bp, Homo sapiens
taaaatcctgaaaggggagtatgctgtccgggcaatcaaggaacataagatggatcaagcaattatcttctgtagaa

SEQ ID NO: 115201 - DNA, 80 bp, Homo sapiens
ggagtatgctgtccgggcaatcaaggaacataagatggatcaagcaattatcttctgtagaaccaaaattgactgtgata

SEQ ID NO: 115202 - DNA, 78 bp, Homo sapiens
atgctgtccgggcaatcaaggaacataagatggatcaagcaattatcttctgtagaaccaaaattgactgtgataact

SEQ ID NO: 115203 - DNA, 78 bp, Homo sapiens
tcaaggaacataagatggatcaagcaattatcttctgtagaaccaaaattgactgtgataacttggagcagtacttta

SEQ ID NO: 115204 - DNA, 78 bp, Homo sapiens
gaacataagatggatcaagcaattatcttctgtagaaccaaaattgactgtgataacttggagcagtactttatacaa

SEQ ID NO: 115205 - DNA, 74 bp, Homo sapiens
caagcaattatcttctgtagaaccaaaattgactgtgataacttggagcagtactttatacaacaaggaggagg

SEQ ID NO: 115206 - DNA, 72 bp, Homo sapiens
aattatcttctgtagaaccaaaattgactgtgataacttggagcagtactttatacaacaaggaggaggtaa

SEQ ID NO: 115207 - DNA, 70 bp, Homo sapiens
agaaccaaaattgactgtgataacttggagcagtactttatacaacaaggaggaggtaattttttctcac

SEQ ID NO: 115208 - DNA, 71 bp, Homo sapiens
gactgtgataacttggagcagtactttatacaacaaggaggaggtaattttttctcacttgaaataaattg

SEQ ID NO: 115209 - DNA, 69 bp, Homo sapiens
gataacttggagcagtactttatacaacaaggaggaggtaattttttctcacttgaaataaattgtgtt

SEQ ID NO: 115210 - DNA, 70 bp, Homo sapiens
agtcttaggcagaagattttccaaggttaaatgcttaatgtgcttttcactaggacctgataaaaaagga

SEQ ID NO: 115211 - DNA, 70 bp, Homo sapiens
aagattttccaaggttaaatgcttaatgtgcttttcactaggacctgataaaaaaggacaccagttctca

SEQ ID NO: 115212 - DNA, 71 bp, Homo sapiens
aaggttaaatgcttaatgtgcttttcactaggacctgataaaaaaggacaccagttctcatgtgtttgtct

SEQ ID NO: 115213 - DNA, 76 bp, Homo sapiens
aaatgcttaatgtgcttttcactaggacctgataaaaaaggacaccagttctcatgtgtttgtcttcatggtgaca

SEQ ID NO: 115214 - DNA, 78 bp, Homo sapiens
ttttcactaggacctgataaaaaaggacaccagttctcatgtgtttgtcttcatggtgacagaaagcctcatgagaga

SEQ ID NO: 115215 - DNA, 78 bp, Homo sapiens
taggacctgataaaaaaggacaccagttctcatgtgtttgtcttcatggtgacagaaagcctcatgagagaaagcaaa

SEQ ID NO: 115216 - DNA, 75 bp, Homo sapiens
aaaaaggacaccagttctcatgtgtttgtcttcatggtgacagaaagcctcatgagagaaagcaaaacttggaaa

SEQ ID NO: 115217 - DNA, 76 bp, Homo sapiens
acaccagttctcatgtgtttgtcttcatggtgacagaaagcctcatgagagaaagcaaaacttggaaagatttaag

SEQ ID NO: 115218 - DNA, 77 bp, Homo sapiens
atgtgtttgtcttcatggtgacagaaagcctcatgagagaaagcaaaacttggaaagatttaaggtactgatacata

SEQ ID NO: 115219 - DNA, 76 bp, Homo sapiens
ttcatggtgacagaaagcctcatgagagaaagcaaaacttggaaagatttaaggtactgatacatagttgattgtt

SEQ ID NO: 115220 - DNA, 74 bp, Homo sapiens
gtgacagaaagcctcatgagagaaagcaaaacttggaaagatttaaggtactgatacatagttgattgtttcct

SEQ ID NO: 115221 - DNA, 73 bp, Homo sapiens
gcctcatgagagaaagcaaaacttggaaagatttaaggtactgatacatagttgattgtttccttaatactta

SEQ ID NO: 115222 - DNA, 72 bp, Homo sapiens
gtttttattgtttagtatatgtgctaacaaactcctttctctcttcactgttctctttagaaaggagatgta

SEQ ID NO: 115223 - DNA, 75 bp, Homo sapiens
tgtttagtatatgtgctaacaaactcctttctctcttcactgttctctttagaaaggagatgtaagattcttgat

SEQ ID NO: 115224 - DNA, 79 bp, Homo sapiens
tatatgtgctaacaaactcctttctctcttcactgttctctttagaaaggagatgtaagattcttgatttgcacagatg

SEQ ID NO: 115225 - DNA, 78 bp, Homo sapiens
aacaaactcctttctctcttcactgttctctttagaaaggagatgtaagattcttgatttgcacagatgtagctgcta

SEQ ID NO: 115226 - DNA, 82 bp, Homo sapiens
tttctctcttcactgttctctttagaaaggagatgtaagattcttgatttgcacagatgtagctgctagaggaattgatatc

SEQ ID NO: 115227 - DNA, 79 bp, Homo sapiens
ttctctttagaaaggagatgtaagattcttgatttgcacagatgtagctgctagaggaattgatatccacggtgttcct

SEQ ID NO: 115228 - DNA, 78 bp, Homo sapiens
aaaggagatgtaagattcttgatttgcacagatgtagctgctagaggaattgatatccacggtgttccttatggtaaa

SEQ ID NO: 115229 - DNA, 77 bp, Homo sapiens
taagattcttgatttgcacagatgtagctgctagaggaattgatatccacggtgttccttatggtaaaaagcaactt

SEQ ID NO: 115230 - DNA, 76 bp, Homo sapiens
ttcttgatttgcacagatgtagctgctagaggaattgatatccacggtgttccttatggtaaaaagcaacttttta

SEQ ID NO: 115231 - DNA, 76 bp, Homo sapiens
agatgtagctgctagaggaattgatatccacggtgttccttatggtaaaaagcaactttttatgcctgtagtgtga

SEQ ID NO: 115232 - DNA, 72 bp, Homo sapiens
ctagaggaattgatatccacggtgttccttatggtaaaaagcaactttttatgcctgtagtgtgattgttac

SEQ ID NO: 115233 - DNA, 72 bp, Homo sapiens
attgatatccacggtgttccttatggtaaaaagcaactttttatgcctgtagtgtgattgttacggaatcta

SEQ ID NO: 115234 - DNA, 66 bp, Homo sapiens
ccttctaatatgtttgaaaaatttagaaactactggcaattgttaataatggtttttatttatagt

SEQ ID NO: 115235 - DNA, 69 bp, Homo sapiens
gaaaaatttagaaactactggcaattgttaataatggtttttatttatagttataaatgtcactctgcc

SEQ ID NO: 115236 - DNA, 72 bp, Homo sapiens
gaaactactggcaattgttaataatggtttttatttatagttataaatgtcactctgcccgatgaaaagcaa

SEQ ID NO: 115237 - DNA, 71 bp, Homo sapiens
ctggcaattgttaataatggtttttatttatagttataaatgtcactctgcccgatgaaaagcaaaactac

SEQ ID NO: 115238 - DNA, 71 bp, Homo sapiens
ataatggtttttatttatagttataaatgtcactctgcccgatgaaaagcaaaactacgtacatcgaattg

SEQ ID NO: 115239 - DNA, 74 bp, Homo sapiens
tttatttatagttataaatgtcactctgcccgatgaaaagcaaaactacgtacatcgaattggcagagtaggaa

SEQ ID NO: 115240 - DNA, 76 bp, Homo sapiens
atagttataaatgtcactctgcccgatgaaaagcaaaactacgtacatcgaattggcagagtaggaagagctgaaa

SEQ ID NO: 115241 - DNA, 75 bp, Homo sapiens
aatgtcactctgcccgatgaaaagcaaaactacgtacatcgaattggcagagtaggaagagctgaaaggtacttc

SEQ ID NO: 115242 - DNA, 72 bp, Homo sapiens
ccgatgaaaagcaaaactacgtacatcgaattggcagagtaggaagagctgaaaggtacttctgcaattttt

SEQ ID NO: 115243 - DNA, 70 bp, Homo sapiens
aaagcaaaactacgtacatcgaattggcagagtaggaagagctgaaaggtacttctgcaattttttttcc

SEQ ID NO: 115244 - DNA, 70 bp, Homo sapiens
tacgtacatcgaattggcagagtaggaagagctgaaaggtacttctgcaattttttttcccccattttta

SEQ ID NO: 115245 - DNA, 71 bp, Homo sapiens
tggcagagtaggaagagctgaaaggtacttctgcaattttttttcccccatttttaagcttgtatgcttta

SEQ ID NO: 115246 - DNA, 68 bp, Homo sapiens
gtaggaagagctgaaaggtacttctgcaattttttttcccccatttttaagcttgtatgctttaggaa

SEQ ID NO: 115247 - DNA, 68 bp, Homo sapiens
gctgaaaggtacttctgcaattttttttcccccatttttaagcttgtatgctttaggaataaagtcta

SEQ ID NO: 115248 - DNA, 67 bp, Homo sapiens
cttctgcaattttttttcccccatttttaagcttgtatgctttaggaataaagtctaatagaaggct

SEQ ID NO: 115249 - DNA, 66 bp, Homo sapiens
ctgcaattttttttcccccatttttaagcttgtatgctttaggaataaagtctaatagaaggcttt

SEQ ID NO: 115250 - DNA, 65 bp, Homo sapiens
tttttttcccccatttttaagcttgtatgctttaggaataaagtctaatagaaggcttttaacca

SEQ ID NO: 115251 - DNA, 69 bp, Homo sapiens
ccccatttttaagcttgtatgctttaggaataaagtctaatagaaggcttttaaccatctttcaggatg

SEQ ID NO: 115252 - DNA, 72 bp, Homo sapiens
tttaagcttgtatgctttaggaataaagtctaatagaaggcttttaaccatctttcaggatgggtctggcaa

SEQ ID NO: 115253 - DNA, 71 bp, Homo sapiens
aataaagtctaatagaaggcttttaaccatctttcaggatgggtctggcaatttccctggtggcaacagaa

SEQ ID NO: 115254 - DNA, 71 bp, Homo sapiens
tctaatagaaggcttttaaccatctttcaggatgggtctggcaatttccctggtggcaacagaaaaagaaa

SEQ ID NO: 115255 - DNA, 68 bp, Homo sapiens
ttttaaccatctttcaggatgggtctggcaatttccctggtggcaacagaaaaagaaaaggtaatctt

SEQ ID NO: 115256 - DNA, 71 bp, Homo sapiens
ttcaggatgggtctggcaatttccctggtggcaacagaaaaagaaaaggtaatctttgtagggctctatta

SEQ ID NO: 115257 - DNA, 71 bp, Homo sapiens
atgggtctggcaatttccctggtggcaacagaaaaagaaaaggtaatctttgtagggctctattatattca

SEQ ID NO: 115258 - DNA, 70 bp, Homo sapiens
aatttccctggtggcaacagaaaaagaaaaggtaatctttgtagggctctattatattcattgtgtgtgt

SEQ ID NO: 115259 - DNA, 73 bp, Homo sapiens
ggtggcaacagaaaaagaaaaggtaatctttgtagggctctattatattcattgtgtgtgttgtgattttaga

SEQ ID NO: 115260 - DNA, 72 bp, Homo sapiens
aaagaaaaggtaatctttgtagggctctattatattcattgtgtgtgttgtgattttagatgttggaaataa

SEQ ID NO: 115261 - DNA, 66 bp, Homo sapiens
tattttttcctttttaaatttaggtttggtaccatgtatgtagcagccgtggaaaagggtgttata

SEQ ID NO: 115262 - DNA, 69 bp, Homo sapiens
tttttaaatttaggtttggtaccatgtatgtagcagccgtggaaaagggtgttataacacaagactcaa

SEQ ID NO: 115263 - DNA, 70 bp, Homo sapiens
aaatttaggtttggtaccatgtatgtagcagccgtggaaaagggtgttataacacaagactcaaggaaga

SEQ ID NO: 115264 - DNA, 76 bp, Homo sapiens
ttggtaccatgtatgtagcagccgtggaaaagggtgttataacacaagactcaaggaagatggaggctgtaccata

SEQ ID NO: 115265 - DNA, 76 bp, Homo sapiens
tatgtagcagccgtggaaaagggtgttataacacaagactcaaggaagatggaggctgtaccatatggtacaacga

SEQ ID NO: 115266 - DNA, 76 bp, Homo sapiens
tggaaaagggtgttataacacaagactcaaggaagatggaggctgtaccatatggtacaacgagatgcaggtaaga

SEQ ID NO: 115267 - DNA, 77 bp, Homo sapiens
gtgttataacacaagactcaaggaagatggaggctgtaccatatggtacaacgagatgcaggtaagacttcgagtta

SEQ ID NO: 115268 - DNA, 77 bp, Homo sapiens
aagactcaaggaagatggaggctgtaccatatggtacaacgagatgcaggtaagacttcgagttaggctcacaaata

SEQ ID NO: 115269 - DNA, 76 bp, Homo sapiens
aaggaagatggaggctgtaccatatggtacaacgagatgcaggtaagacttcgagttaggctcacaaataatgtat

SEQ ID NO: 115270 - DNA, 70 bp, Homo sapiens
tttctaaatgaaatttttatttggaaattttctctccattacttagttactatctgagatagaagaacac

SEQ ID NO: 115271 - DNA, 71 bp, Homo sapiens
gaaatttttatttggaaattttctctccattacttagttactatctgagatagaagaacacctgaactgta

SEQ ID NO: 115272 - DNA, 73 bp, Homo sapiens
ttggaaattttctctccattacttagttactatctgagatagaagaacacctgaactgtaccatttctcaggt

SEQ ID NO: 115273 - DNA, 77 bp, Homo sapiens
tctctccattacttagttactatctgagatagaagaacacctgaactgtaccatttctcaggttgagccggatataa

SEQ ID NO: 115274 - DNA, 74 bp, Homo sapiens
ttacttagttactatctgagatagaagaacacctgaactgtaccatttctcaggttgagccggatataaaggta

SEQ ID NO: 115275 - DNA, 76 bp, Homo sapiens
tatctgagatagaagaacacctgaactgtaccatttctcaggttgagccggatataaaggtaccagtggatgaatt

SEQ ID NO: 115276 - DNA, 75 bp, Homo sapiens
agatagaagaacacctgaactgtaccatttctcaggttgagccggatataaaggtaccagtggatgaatttgatg

SEQ ID NO: 115277 - DNA, 72 bp, Homo sapiens
acctgaactgtaccatttctcaggttgagccggatataaaggtaccagtggatgaatttgatgggaaagtta

SEQ ID NO: 115278 - DNA, 72 bp, Homo sapiens
taccatttctcaggttgagccggatataaaggtaccagtggatgaatttgatgggaaagttacctacggtca

SEQ ID NO: 115279 - DNA, 71 bp, Homo sapiens
tctcaggttgagccggatataaaggtaccagtggatgaatttgatgggaaagttacctacggtcagaaaag

SEQ ID NO: 115280 - DNA, 71 bp, Homo sapiens
gatataaaggtaccagtggatgaatttgatgggaaagttacctacggtcagaaaagggctgctggtggtaa

SEQ ID NO: 115281 - DNA, 72 bp, Homo sapiens
taccagtggatgaatttgatgggaaagttacctacggtcagaaaagggctgctggtggtaagctttgaatta

SEQ ID NO: 115282 - DNA, 70 bp, Homo sapiens
gtggatgaatttgatgggaaagttacctacggtcagaaaagggctgctggtggtaagctttgaattattt

SEQ ID NO: 115283 - DNA, 67 bp, Homo sapiens
atgggaaagttacctacggtcagaaaagggctgctggtggtaagctttgaattattttaaatacaat

SEQ ID NO: 115284 - DNA, 79 bp, Homo sapiens
ttatttcaagcatgtcatttacattactttgttatttgtgtgtgatgcaggtggaagctataaaggccatgtggatatt

SEQ ID NO: 115285 - DNA, 78 bp, Homo sapiens
atgtcatttacattactttgttatttgtgtgtgatgcaggtggaagctataaaggccatgtggatattttggcaccta

SEQ ID NO: 115286 - DNA, 77 bp, Homo sapiens
attactttgttatttgtgtgtgatgcaggtggaagctataaaggccatgtggatattttggcacctactgttcaaga

SEQ ID NO: 115287 - DNA, 79 bp, Homo sapiens
tatttgtgtgtgatgcaggtggaagctataaaggccatgtggatattttggcacctactgttcaagagttggctgccct

SEQ ID NO: 115288 - DNA, 76 bp, Homo sapiens
atgcaggtggaagctataaaggccatgtggatattttggcacctactgttcaagagttggctgcccttgaaaagga

SEQ ID NO: 115289 - DNA, 76 bp, Homo sapiens
aagctataaaggccatgtggatattttggcacctactgttcaagagttggctgcccttgaaaaggaggcgcagaca

SEQ ID NO: 115290 - DNA, 75 bp, Homo sapiens
ataaaggccatgtggatattttggcacctactgttcaagagttggctgcccttgaaaaggaggcgcagacatctt

SEQ ID NO: 115291 - DNA, 77 bp, Homo sapiens
atattttggcacctactgttcaagagttggctgcccttgaaaaggaggcgcagacatctttcctgcatcttggctac

SEQ ID NO: 115292 - DNA, 75 bp, Homo sapiens
acctactgttcaagagttggctgcccttgaaaaggaggcgcagacatctttcctgcatcttggctaccttcctaa

SEQ ID NO: 115293 - DNA, 78 bp, Homo sapiens
ttcaagagttggctgcccttgaaaaggaggcgcagacatctttcctgcatcttggctaccttcctaaccagctgttca

SEQ ID NO: 115294 - DNA, 77 bp, Homo sapiens
ctgcccttgaaaaggaggcgcagacatctttcctgcatcttggctaccttcctaaccagctgttcagaaccttctga

SEQ ID NO: 115295 - DNA, 75 bp, Homo sapiens
ttgaaaaggaggcgcagacatctttcctgcatcttggctaccttcctaaccagctgttcagaaccttctgatttt

SEQ ID NO: 115296 - DNA, 76 bp, Homo sapiens
cagacatctttcctgcatcttggctaccttcctaaccagctgttcagaaccttctgatttttacatttactgaata

SEQ ID NO: 115297 - DNA, 73 bp, Homo sapiens
tttcctgcatcttggctaccttcctaaccagctgttcagaaccttctgatttttacatttactgaataagatt

SEQ ID NO: 115298 - DNA, 74 bp, Homo sapiens
tcttggctaccttcctaaccagctgttcagaaccttctgatttttacatttactgaataagatttgagtaatga

SEQ ID NO: 115299 - DNA, 72 bp, Homo sapiens
ccttcctaaccagctgttcagaaccttctgatttttacatttactgaataagatttgagtaatgaaagtctg

SEQ ID NO: 115300 - DNA, 73 bp, Homo sapiens
ccagctgttcagaaccttctgatttttacatttactgaataagatttgagtaatgaaagtctgtagtcttaaa

SEQ ID NO: 115301 - DNA, 70 bp, Homo sapiens
agaaccttctgatttttacatttactgaataagatttgagtaatgaaagtctgtagtcttaaaactctaa

SEQ ID NO: 115302 - DNA, 72 bp, Homo sapiens
ttacatttactgaataagatttgagtaatgaaagtctgtagtcttaaaactctaaaacagttgtactgcttc

SEQ ID NO: 115303 - DNA, 75 bp, Homo sapiens
ctgaataagatttgagtaatgaaagtctgtagtcttaaaactctaaaacagttgtactgcttccaagcagcagta

SEQ ID NO: 115304 - DNA, 74 bp, Homo sapiens
gatttgagtaatgaaagtctgtagtcttaaaactctaaaacagttgtactgcttccaagcagcagtatttatag

SEQ ID NO: 115305 - DNA, 71 bp, Homo sapiens
aaagtctgtagtcttaaaactctaaaacagttgtactgcttccaagcagcagtatttatagtaacgtaagc

SEQ ID NO: 115306 - DNA, 73 bp, Homo sapiens
gtagtcttaaaactctaaaacagttgtactgcttccaagcagcagtatttatagtaacgtaagctattaatgc

SEQ ID NO: 115307 - DNA, 75 bp, Homo sapiens
aaactctaaaacagttgtactgcttccaagcagcagtatttatagtaacgtaagctattaatgctaactcttgca

SEQ ID NO: 115308 - DNA, 78 bp, Homo sapiens
agttgtactgcttccaagcagcagtatttatagtaacgtaagctattaatgctaactcttgcatgtcaagaaacatta

SEQ ID NO: 115309 - DNA, 77 bp, Homo sapiens
ttccaagcagcagtatttatagtaacgtaagctattaatgctaactcttgcatgtcaagaaacattagtcttaggaa

SEQ ID NO: 115310 - DNA, 75 bp, Homo sapiens
gtaacgtaagctattaatgctaactcttgcatgtcaagaaacattagtcttaggaattcttcaaaaaatggcatc

SEQ ID NO: 115311 - DNA, 77 bp, Homo sapiens
gtaagctattaatgctaactcttgcatgtcaagaaacattagtcttaggaattcttcaaaaaatggcatcccaatga

SEQ ID NO: 115312 - DNA, 74 bp, Homo sapiens
aatgctaactcttgcatgtcaagaaacattagtcttaggaattcttcaaaaaatggcatcccaatgaaaataaa

SEQ ID NO: 115313 - DNA, 75 bp, Homo sapiens
cttgcatgtcaagaaacattagtcttaggaattcttcaaaaaatggcatcccaatgaaaataaatttgatgacta

SEQ ID NO: 115314 - DNA, 74 bp, Homo sapiens
gaaacattagtcttaggaattcttcaaaaaatggcatcccaatgaaaataaatttgatgactatattttcatga

SEQ ID NO: 115315 - DNA, 73 bp, Homo sapiens
tcttaggaattcttcaaaaaatggcatcccaatgaaaataaatttgatgactatattttcatgaaggtttgtg

SEQ ID NO: 115316 - DNA, 71 bp, Homo sapiens
aaatggcatcccaatgaaaataaatttgatgactatattttcatgaaggtttgtgtcttattttaaagtta

SEQ ID NO: 115317 - DNA, 73 bp, Homo sapiens
atacttccccaccccagaatttcacagaaaacaaccagccacacattttgaggtgcagatagcttgctttatt

SEQ ID NO: 115318 - DNA, 73 bp, Homo sapiens
accccagaatttcacagaaaacaaccagccacacattttgaggtgcagatagcttgctttattttgttgttac

SEQ ID NO: 115319 - DNA, 75 bp, Homo sapiens
aatttcacagaaaacaaccagccacacattttgaggtgcagatagcttgctttattttgttgttactatctcaag

SEQ ID NO: 115320 - DNA, 74 bp, Homo sapiens
aaaacaaccagccacacattttgaggtgcagatagcttgctttattttgttgttactatctcaaggaggtccaa

SEQ ID NO: 115321 - DNA, 75 bp, Homo sapiens
cacattttgaggtgcagatagcttgctttattttgttgttactatctcaaggaggtccaacaattataactaaca

SEQ ID NO: 115322 - DNA, 75 bp, Homo sapiens
tttgaggtgcagatagcttgctttattttgttgttactatctcaaggaggtccaacaattataactaacaattga

SEQ ID NO: 115323 - DNA, 73 bp, Homo sapiens
gcttgctttattttgttgttactatctcaaggaggtccaacaattataactaacaattgaatttatacttgca

SEQ ID NO: 115324 - DNA, 72 bp, Homo sapiens
ttttgttgttactatctcaaggaggtccaacaattataactaacaattgaatttatacttgcatgaaaagaa

SEQ ID NO: 115325 - DNA, 74 bp, Homo sapiens
gttactatctcaaggaggtccaacaattataactaacaattgaatttatacttgcatgaaaagaactacatcaa

SEQ ID NO: 115326 - DNA, 74 bp, Homo sapiens
ctcaaggaggtccaacaattataactaacaattgaatttatacttgcatgaaaagaactacatcaaattgacat

SEQ ID NO: 115327 - DNA, 74 bp, Homo sapiens
tccaacaattataactaacaattgaatttatacttgcatgaaaagaactacatcaaattgacattttgggcaat

SEQ ID NO: 115328 - DNA, 74 bp, Homo sapiens
taactaacaattgaatttatacttgcatgaaaagaactacatcaaattgacattttgggcaattagtaatattg

SEQ ID NO: 115329 - DNA, 72 bp, Homo sapiens
attgaatttatacttgcatgaaaagaactacatcaaattgacattttgggcaattagtaatattgtttaaaa

SEQ ID NO: 115330 - DNA, 72 bp, Homo sapiens
cttgcatgaaaagaactacatcaaattgacattttgggcaattagtaatattgtttaaaatttaacaacagc

SEQ ID NO: 115331 - DNA, 69 bp, Homo sapiens
gaactacatcaaattgacattttgggcaattagtaatattgtttaaaatttaacaacagctttattttg

SEQ ID NO: 115332 - DNA, 69 bp, Homo sapiens
catcaaattgacattttgggcaattagtaatattgtttaaaatttaacaacagctttattttgttgttg

SEQ ID NO: 115333 - DNA, 72 bp, Homo sapiens
ttattttgttgttgttctttactttttgctgtggctcattgcttaggtgcccaggtttttcaggtgcaatta

SEQ ID NO: 115334 - DNA, 71 bp, Homo sapiens
ttgttgttctttactttttgctgtggctcattgcttaggtgcccaggtttttcaggtgcaattaaaattta

SEQ ID NO: 115335 - DNA, 71 bp, Homo sapiens
tttactttttgctgtggctcattgcttaggtgcccaggtttttcaggtgcaattaaaatttagaactacca

SEQ ID NO: 115336 - DNA, 74 bp, Homo sapiens
ttgctgtggctcattgcttaggtgcccaggtttttcaggtgcaattaaaatttagaactaccacacaaaggcat

SEQ ID NO: 115337 - DNA, 73 bp, Homo sapiens
attgcttaggtgcccaggtttttcaggtgcaattaaaatttagaactaccacacaaaggcattggctgcactc

SEQ ID NO: 115338 - DNA, 73 bp, Homo sapiens
tttttcaggtgcaattaaaatttagaactaccacacaaaggcattggctgcactctgggacctccaagagttg

SEQ ID NO: 115339 - DNA, 78 bp, Homo sapiens
taaaatttagaactaccacacaaaggcattggctgcactctgggacctccaagagttggcactgctctggcataggaa

SEQ ID NO: 115340 - DNA, 81 bp, Homo sapiens
tagaactaccacacaaaggcattggctgcactctgggacctccaagagttggcactgctctggcataggaatacttgaata

SEQ ID NO: 115341 - DNA, 79 bp, Homo sapiens
caaaggcattggctgcactctgggacctccaagagttggcactgctctggcataggaatacttgaatagcttggttaaa

SEQ ID NO: 115342 - DNA, 78 bp, Homo sapiens
attggctgcactctgggacctccaagagttggcactgctctggcataggaatacttgaatagcttggttaaatgaagg

SEQ ID NO: 115343 - DNA, 76 bp, Homo sapiens
aagagttggcactgctctggcataggaatacttgaatagcttggttaaatgaagggatggccaggagatgttactt

SEQ ID NO: 115344 - DNA, 76 bp, Homo sapiens
actgctctggcataggaatacttgaatagcttggttaaatgaagggatggccaggagatgttacttttccaagcta

SEQ ID NO: 115345 - DNA, 76 bp, Homo sapiens
tctggcataggaatacttgaatagcttggttaaatgaagggatggccaggagatgttacttttccaagctattcag

SEQ ID NO: 115346 - DNA, 74 bp, Homo sapiens
atacttgaatagcttggttaaatgaagggatggccaggagatgttacttttccaagctattcaggcactcctta

SEQ ID NO: 115347 - DNA, 77 bp, Homo sapiens
atagcttggttaaatgaagggatggccaggagatgttacttttccaagctattcaggcactccttatgtcagagaca

SEQ ID NO: 115348 - DNA, 77 bp, Homo sapiens
aaatgaagggatggccaggagatgttacttttccaagctattcaggcactccttatgtcagagacagcgtaaaatga

SEQ ID NO: 115349 - DNA, 75 bp, Homo sapiens
ttacttttccaagctattcaggcactccttatgtcagagacagcgtaaaatgagcgaacaaagtgttggccgtta

SEQ ID NO: 115350 - DNA, 77 bp, Homo sapiens
aagctattcaggcactccttatgtcagagacagcgtaaaatgagcgaacaaagtgttggccgttacactttgctctg

SEQ ID NO: 115351 - DNA, 75 bp, Homo sapiens
aggcactccttatgtcagagacagcgtaaaatgagcgaacaaagtgttggccgttacactttgctctggtaatat

SEQ ID NO: 115352 - DNA, 78 bp, Homo sapiens
ttatgtcagagacagcgtaaaatgagcgaacaaagtgttggccgttacactttgctctggtaatatttgtcatgataa

SEQ ID NO: 115353 - DNA, 74 bp, Homo sapiens
agagacagcgtaaaatgagcgaacaaagtgttggccgttacactttgctctggtaatatttgtcatgataattt

SEQ ID NO: 115354 - DNA, 79 bp, Homo sapiens
taaaatgagcgaacaaagtgttggccgttacactttgctctggtaatatttgtcatgataattttgtgtgacatcatca

SEQ ID NO: 115355 - DNA, 77 bp, Homo sapiens
aaagtgttggccgttacactttgctctggtaatatttgtcatgataattttgtgtgacatcatcagagaaaatgtaa

SEQ ID NO: 115356 - DNA, 77 bp, Homo sapiens
gccgttacactttgctctggtaatatttgtcatgataattttgtgtgacatcatcagagaaaatgtaagacgttaaa

SEQ ID NO: 115357 - DNA, 76 bp, Homo sapiens
gtaatatttgtcatgataattttgtgtgacatcatcagagaaaatgtaagacgttaaagtgttgcttacaggaggg

SEQ ID NO: 115358 - DNA, 76 bp, Homo sapiens
atgataattttgtgtgacatcatcagagaaaatgtaagacgttaaagtgttgcttacaggagggtaaatgcaaaca

SEQ ID NO: 115359 - DNA, 76 bp, Homo sapiens
attttgtgtgacatcatcagagaaaatgtaagacgttaaagtgttgcttacaggagggtaaatgcaaacatcacca

SEQ ID NO: 115360 - DNA, 73 bp, Homo sapiens
atcagagaaaatgtaagacgttaaagtgttgcttacaggagggtaaatgcaaacatcaccaatgccttacatt

SEQ ID NO: 115361 - DNA, 72 bp, Homo sapiens
aaaatgtaagacgttaaagtgttgcttacaggagggtaaatgcaaacatcaccaatgccttacatttctgat

SEQ ID NO: 115362 - DNA, 73 bp, Homo sapiens
acgttaaagtgttgcttacaggagggtaaatgcaaacatcaccaatgccttacatttctgattcagtaggtat

SEQ ID NO: 115363 - DNA, 82 bp, Homo sapiens
tgcttacaggagggtaaatgcaaacatcaccaatgccttacatttctgattcagtaggtattggtgcacatatcaagtgata

SEQ ID NO: 115364 - DNA, 85 bp, Homo sapiens
agggtaaatgcaaacatcaccaatgccttacatttctgattcagtaggtattggtgcacatatcaagtgatatgcacagcatcat

SEQ ID NO: 115365 - DNA, 84 bp, Homo sapiens
aatgccttacatttctgattcagtaggtattggtgcacatatcaagtgatatgcacagcatcattctcttttaggtggacagga

SEQ ID NO: 115366 - DNA, 86 bp, Homo sapiens
tacatttctgattcagtaggtattggtgcacatatcaagtgatatgcacagcatcattctcttttaggtggacaggacatcttcaa

SEQ ID NO: 115367 - DNA, 83 bp, Homo sapiens
tcagtaggtattggtgcacatatcaagtgatatgcacagcatcattctcttttaggtggacaggacatcttcaatggggattt

SEQ ID NO: 115368 - DNA, 83 bp, Homo sapiens
ggtattggtgcacatatcaagtgatatgcacagcatcattctcttttaggtggacaggacatcttcaatggggattttctcaa

SEQ ID NO: 115369 - DNA, 81 bp, Homo sapiens
acatatcaagtgatatgcacagcatcattctcttttaggtggacaggacatcttcaatggggattttctcaacccactgag

SEQ ID NO: 115370 - DNA, 80 bp, Homo sapiens
atatgcacagcatcattctcttttaggtggacaggacatcttcaatggggattttctcaacccactgaggcatacttaga

SEQ ID NO: 115371 - DNA, 77 bp, Homo sapiens
atcattctcttttaggtggacaggacatcttcaatggggattttctcaacccactgaggcatacttagacatcaaca

SEQ ID NO: 115372 - DNA, 77 bp, Homo sapiens
ttttaggtggacaggacatcttcaatggggattttctcaacccactgaggcatacttagacatcaacagtatgttga

SEQ ID NO: 115373 - DNA, 79 bp, Homo sapiens
aggacatcttcaatggggattttctcaacccactgaggcatacttagacatcaacagtatgttgaggcacaaagattga

SEQ ID NO: 115374 - DNA, 78 bp, Homo sapiens
atcttcaatggggattttctcaacccactgaggcatacttagacatcaacagtatgttgaggcacaaagattgattaa

SEQ ID NO: 115375 - DNA, 79 bp, Homo sapiens
tttctcaacccactgaggcatacttagacatcaacagtatgttgaggcacaaagattgattaaatgttgagcagggtat

SEQ ID NO: 115376 - DNA, 80 bp, Homo sapiens
cactgaggcatacttagacatcaacagtatgttgaggcacaaagattgattaaatgttgagcagggtattcgttccataa

SEQ ID NO: 115377 - DNA, 76 bp, Homo sapiens
tacttagacatcaacagtatgttgaggcacaaagattgattaaatgttgagcagggtattcgttccataagaaact

SEQ ID NO: 115378 - DNA, 73 bp, Homo sapiens
agtatgttgaggcacaaagattgattaaatgttgagcagggtattcgttccataagaaactttctcctaccaa

SEQ ID NO: 115379 - DNA, 70 bp, Homo sapiens
cacaaagattgattaaatgttgagcagggtattcgttccataagaaactttctcctaccaacagttagtt

SEQ ID NO: 115380 - DNA, 69 bp, Homo sapiens
gttgagcagggtattcgttccataagaaactttctcctaccaacagttagtttcaaaacttacattgta

SEQ ID NO: 115381 - DNA, 67 bp, Homo sapiens
tttctcctaccaacagttagtttcaaaacttacattgtaaaatgtcataaaataaatggtacaaaac

SEQ ID NO: 115382 - DNA, 65 bp, Homo sapiens
cagttagtttcaaaacttacattgtaaaatgtcataaaataaatggtacaaaactttataaccgt

SEQ ID NO: 115383 - DNA, 67 bp, Homo sapiens
tcaaaacttacattgtaaaatgtcataaaataaatggtacaaaactttataaccgttaatccggcta

SEQ ID NO: 115384 - DNA, 71 bp, Homo sapiens
tgtaaaatgtcataaaataaatggtacaaaactttataaccgttaatccggctatatacagtatgtacatg

SEQ ID NO: 115385 - DNA, 73 bp, Homo sapiens
gtcataaaataaatggtacaaaactttataaccgttaatccggctatatacagtatgtacatgtcactagcaa

SEQ ID NO: 115386 - DNA, 72 bp, Homo sapiens
aataaatggtacaaaactttataaccgttaatccggctatatacagtatgtacatgtcactagcaaatgtat

SEQ ID NO: 115387 - DNA, 75 bp, Homo sapiens
actttataaccgttaatccggctatatacagtatgtacatgtcactagcaaatgtattatattcttaggtcaaca

SEQ ID NO: 115388 - DNA, 77 bp, Homo sapiens
ataaccgttaatccggctatatacagtatgtacatgtcactagcaaatgtattatattcttaggtcaacaattatga

SEQ ID NO: 115389 - DNA, 77 bp, Homo sapiens
atacagtatgtacatgtcactagcaaatgtattatattcttaggtcaacaattatgaaaagattgaaatgaatattt

SEQ ID NO: 115390 - DNA, 76 bp, Homo sapiens
catgtcactagcaaatgtattatattcttaggtcaacaattatgaaaagattgaaatgaatatttttgaactttga

SEQ ID NO: 115391 - DNA, 74 bp, Homo sapiens
gcaaatgtattatattcttaggtcaacaattatgaaaagattgaaatgaatatttttgaactttgactcattta

SEQ ID NO: 115392 - DNA, 74 bp, Homo sapiens
tatattcttaggtcaacaattatgaaaagattgaaatgaatatttttgaactttgactcatttaggttgataca

SEQ ID NO: 115393 - DNA, 71 bp, Homo sapiens
ggtcaacaattatgaaaagattgaaatgaatatttttgaactttgactcatttaggttgatacaaaactac

SEQ ID NO: 115394 - DNA, 68 bp, Homo sapiens
attatgaaaagattgaaatgaatatttttgaactttgactcatttaggttgatacaaaactacttttt

SEQ ID NO: 115395 - DNA, 66 bp, Homo sapiens
ttttttctttaaatatttacagttcagaaagattagtccgtgtgaaacgtttgcgaaaagttaaga

SEQ ID NO: 115396 - DNA, 70 bp, Homo sapiens
aaatatttacagttcagaaagattagtccgtgtgaaacgtttgcgaaaagttaagaatgagtgtagagta

SEQ ID NO: 115397 - DNA, 70 bp, Homo sapiens
tttacagttcagaaagattagtccgtgtgaaacgtttgcgaaaagttaagaatgagtgtagagtataagg

SEQ ID NO: 115398 - DNA, 70 bp, Homo sapiens
agaaagattagtccgtgtgaaacgtttgcgaaaagttaagaatgagtgtagagtataagggcacaggccc

SEQ ID NO: 115399 - DNA, 73 bp, Homo sapiens
tgtgaaacgtttgcgaaaagttaagaatgagtgtagagtataagggcacaggccctcttaaatggatcgaata

SEQ ID NO: 115400 - DNA, 73 bp, Homo sapiens
acgtttgcgaaaagttaagaatgagtgtagagtataagggcacaggccctcttaaatggatcgaatatgtata

SEQ ID NO: 115401 - DNA, 76 bp, Homo sapiens
aaaagttaagaatgagtgtagagtataagggcacaggccctcttaaatggatcgaatatgtatattcacagtggca

SEQ ID NO: 115402 - DNA, 80 bp, Homo sapiens
aatgagtgtagagtataagggcacaggccctcttaaatggatcgaatatgtatattcacagtggcagagtcagatccaaa

SEQ ID NO: 115403 - DNA, 79 bp, Homo sapiens
tataagggcacaggccctcttaaatggatcgaatatgtatattcacagtggcagagtcagatccaaattcattccctaa

SEQ ID NO: 115404 - DNA, 77 bp, Homo sapiens
acaggccctcttaaatggatcgaatatgtatattcacagtggcagagtcagatccaaattcattccctaaactcagg

SEQ ID NO: 115405 - DNA, 77 bp, Homo sapiens
tcttaaatggatcgaatatgtatattcacagtggcagagtcagatccaaattcattccctaaactcagggtataaag

SEQ ID NO: 115406 - DNA, 77 bp, Homo sapiens
tatattcacagtggcagagtcagatccaaattcattccctaaactcagggtataaagtccaccatcttgtttctgta

SEQ ID NO: 115407 - DNA, 77 bp, Homo sapiens
agagtcagatccaaattcattccctaaactcagggtataaagtccaccatcttgtttctgtacgtccatgatgatca

SEQ ID NO: 115408 - DNA, 73 bp, Homo sapiens
atccaaattcattccctaaactcagggtataaagtccaccatcttgtttctgtacgtccatgatgatcagggt

SEQ ID NO: 115409 - DNA, 76 bp, Homo sapiens
ttcattccctaaactcagggtataaagtccaccatcttgtttctgtacgtccatgatgatcagggttgtcaggtca

SEQ ID NO: 115410 - DNA, 75 bp, Homo sapiens
aaactcagggtataaagtccaccatcttgtttctgtacgtccatgatgatcagggttgtcaggtcatctgtgttt

SEQ ID NO: 115411 - DNA, 76 bp, Homo sapiens
atcttgtttctgtacgtccatgatgatcagggttgtcaggtcatctgtgttttcaatgtggaacctcccctgttct

SEQ ID NO: 115412 - DNA, 77 bp, Homo sapiens
tacgtccatgatgatcagggttgtcaggtcatctgtgttttcaatgtggaacctcccctgttcttgactgtggattt

SEQ ID NO: 115413 - DNA, 76 bp, Homo sapiens
atgatgatcagggttgtcaggtcatctgtgttttcaatgtggaacctcccctgttcttgactgtggatttttcttc

SEQ ID NO: 115414 - DNA, 72 bp, Homo sapiens
agggttgtcaggtcatctgtgttttcaatgtggaacctcccctgttcttgactgtggatttttcttccacca

SEQ ID NO: 115415 - DNA, 72 bp, Homo sapiens
atctgtgttttcaatgtggaacctcccctgttcttgactgtggatttttcttccaccacaggaccatgttac

SEQ ID NO: 115416 - DNA, 71 bp, Homo sapiens
ttttcaatgtggaacctcccctgttcttgactgtggatttttcttccaccacaggaccatgttacttctgg

SEQ ID NO: 115417 - DNA, 70 bp, Homo sapiens
aacctcccctgttcttgactgtggatttttcttccaccacaggaccatgttacttctggggtaggctcac

SEQ ID NO: 115418 - DNA, 72 bp, Homo sapiens
ttcttccaccacaggaccatgttacttctggggtaggctcacccgtgaaagcacaggctactgttagaactt

SEQ ID NO: 115419 - DNA, 74 bp, Homo sapiens
acaggaccatgttacttctggggtaggctcacccgtgaaagcacaggctactgttagaactttgccttcatcaa

SEQ ID NO: 115420 - DNA, 79 bp, Homo sapiens
atgttacttctggggtaggctcacccgtgaaagcacaggctactgttagaactttgccttcatcaatgctgatatcaga

SEQ ID NO: 115421 - DNA, 78 bp, Homo sapiens
tactgttagaactttgccttcatcaatgctgatatcagatggaagagcttcaattttaggcggaattcctttatggaa

SEQ ID NO: 115422 - DNA, 74 bp, Homo sapiens
accatgttacttggcttgtctacctctaccagtaattttattgctcacctcttatgcctgctttaagcatttta

SEQ ID NO: 115423 - DNA, 75 bp, Homo sapiens
tacttggcttgtctacctctaccagtaattttattgctcacctcttatgcctgctttaagcattttactagttga

SEQ ID NO: 115424 - DNA, 74 bp, Homo sapiens
tctacctctaccagtaattttattgctcacctcttatgcctgctttaagcattttactagttgagctttccagt

SEQ ID NO: 115425 - DNA, 79 bp, Homo sapiens
ttattgctcacctcttatgcctgctttaagcattttactagttgagctttccagttgtgtcatattagatattcccata

SEQ ID NO: 115426 - DNA, 78 bp, Homo sapiens
cttatgcctgctttaagcattttactagttgagctttccagttgtgtcatattagatattcccataaagctgctggaa

SEQ ID NO: 115427 - DNA, 77 bp, Homo sapiens
tttaagcattttactagttgagctttccagttgtgtcatattagatattcccataaagctgctggaactcatttcta

SEQ ID NO: 115428 - DNA, 75 bp, Homo sapiens
attttactagttgagctttccagttgtgtcatattagatattcccataaagctgctggaactcatttctacaaag

SEQ ID NO: 115429 - DNA, 80 bp, Homo sapiens
ttgagctttccagttgtgtcatattagatattcccataaagctgctggaactcatttctacaaaggactcttgcatggag

SEQ ID NO: 115430 - DNA, 80 bp, Homo sapiens
agttgtgtcatattagatattcccataaagctgctggaactcatttctacaaaggactcttgcatggaggacatgctttg

SEQ ID NO: 115431 - DNA, 82 bp, Homo sapiens
tattagatattcccataaagctgctggaactcatttctacaaaggactcttgcatggaggacatgctttgggcagacatgct

SEQ ID NO: 115432 - DNA, 81 bp, Homo sapiens
ttcccataaagctgctggaactcatttctacaaaggactcttgcatggaggacatgctttgggcagacatgcttgcaaatt

SEQ ID NO: 115433 - DNA, 87 bp, Homo sapiens
ctggaactcatttctacaaaggactcttgcatggaggacatgctttgggcagacatgcttgcaaatttcatctcagtcatgctgcta

SEQ ID NO: 115434 - DNA, 89 bp, Homo sapiens
actcatttctacaaaggactcttgcatggaggacatgctttgggcagacatgcttgcaaatttcatctcagtcatgctgctagcactgc

SEQ ID NO: 115435 - DNA, 91 bp, Homo sapiens
acaaaggactcttgcatggaggacatgctttgggcagacatgcttgcaaatttcatctcagtcatgctgctagcactgctgctgctgaaac

SEQ ID NO: 115436 - DNA, 92 bp, Homo sapiens
atggaggacatgctttgggcagacatgcttgcaaatttcatctcagtcatgctgctagcactgctgctgctgaaactgctgaaggaggcctc

SEQ ID NO: 115437 - DNA, 92 bp, Homo sapiens
acatgctttgggcagacatgcttgcaaatttcatctcagtcatgctgctagcactgctgctgctgaaactgctgaaggaggcctcctgcttg

SEQ ID NO: 115438 - DNA, 91 bp, Homo sapiens
agacatgcttgcaaatttcatctcagtcatgctgctagcactgctgctgctgaaactgctgaaggaggcctcctgcttggaggcagacatt

SEQ ID NO: 115439 - DNA, 91 bp, Homo sapiens
ttgcaaatttcatctcagtcatgctgctagcactgctgctgctgaaactgctgaaggaggcctcctgcttggaggcagacatttggactga

SEQ ID NO: 115440 - DNA, 91 bp, Homo sapiens
tttcatctcagtcatgctgctagcactgctgctgctgaaactgctgaaggaggcctcctgcttggaggcagacatttggactgactgagac

SEQ ID NO: 115441 - DNA, 88 bp, Homo sapiens
atgctgctagcactgctgctgctgaaactgctgaaggaggcctcctgcttggaggcagacatttggactgactgagacgagaagcttc

SEQ ID NO: 115442 - DNA, 83 bp, Homo sapiens
tgaaactgctgaaggaggcctcctgcttggaggcagacatttggactgactgagacgagaagcttccttgcaagcttgtgtca

SEQ ID NO: 115443 - DNA, 81 bp, Homo sapiens
tgaaggaggcctcctgcttggaggcagacatttggactgactgagacgagaagcttccttgcaagcttgtgtcaccacttg

SEQ ID NO: 115444 - DNA, 82 bp, Homo sapiens
tcctgcttggaggcagacatttggactgactgagacgagaagcttccttgcaagcttgtgtcaccacttgttctcaatacta

SEQ ID NO: 115445 - DNA, 80 bp, Homo sapiens
aggcagacatttggactgactgagacgagaagcttccttgcaagcttgtgtcaccacttgttctcaatactacctctctg

SEQ ID NO: 115446 - DNA, 78 bp, Homo sapiens
acatttggactgactgagacgagaagcttccttgcaagcttgtgtcaccacttgttctcaatactacctctctggaag

SEQ ID NO: 115447 - DNA, 77 bp, Homo sapiens
aagcttccttgcaagcttgtgtcaccacttgttctcaatactacctctctggaaggttcttcaactagagctgtgga

SEQ ID NO: 115448 - DNA, 83 bp, Homo sapiens
ttgcaagcttgtgtcaccacttgttctcaatactacctctctggaaggttcttcaactagagctgtggagcatagcagataca

SEQ ID NO: 115449 - DNA, 82 bp, Homo sapiens
ttgtgtcaccacttgttctcaatactacctctctggaaggttcttcaactagagctgtggagcatagcagatacacagtgaa

SEQ ID NO: 115450 - DNA, 83 bp, Homo sapiens
acttgttctcaatactacctctctggaaggttcttcaactagagctgtggagcatagcagatacacagtgaacatcaatgaca

SEQ ID NO: 115451 - DNA, 68 bp, Homo sapiens
acgatctaaaggccttaaacatgtaaggaagaagggtgaggagatacttacgaaggaccattaaggaa

SEQ ID NO: 115452 - DNA, 72 bp, Homo sapiens
cttaaacatgtaaggaagaagggtgaggagatacttacgaaggaccattaaggaagctgtagctgaacactg

SEQ ID NO: 115453 - DNA, 71 bp, Homo sapiens
aggaagaagggtgaggagatacttacgaaggaccattaaggaagctgtagctgaacactggccacggaaat

SEQ ID NO: 115454 - DNA, 70 bp, Homo sapiens
aagggtgaggagatacttacgaaggaccattaaggaagctgtagctgaacactggccacggaaatttttg

SEQ ID NO: 115455 - DNA, 70 bp, Homo sapiens
agatacttacgaaggaccattaaggaagctgtagctgaacactggccacggaaatttttggccttaattg

SEQ ID NO: 115456 - DNA, 70 bp, Homo sapiens
aaggaccattaaggaagctgtagctgaacactggccacggaaatttttggccttaattgtgtactttcca

SEQ ID NO: 115457 - DNA, 73 bp, Homo sapiens
ttaaggaagctgtagctgaacactggccacggaaatttttggccttaattgtgtactttccactgtcgctgac

SEQ ID NO: 115458 - DNA, 74 bp, Homo sapiens
ctgaacactggccacggaaatttttggccttaattgtgtactttccactgtcgctgactgatgcatttcggatt

SEQ ID NO: 115459 - DNA, 73 bp, Homo sapiens
actggccacggaaatttttggccttaattgtgtactttccactgtcgctgactgatgcatttcggatttcaag

SEQ ID NO: 115460 - DNA, 73 bp, Homo sapiens
aatttttggccttaattgtgtactttccactgtcgctgactgatgcatttcggatttcaagggagtatacatt

SEQ ID NO: 115461 - DNA, 81 bp, Homo sapiens
taattgtgtactttccactgtcgctgactgatgcatttcggatttcaagggagtatacatttctggagcggcttatgctga

SEQ ID NO: 115462 - DNA, 81 bp, Homo sapiens
tactttccactgtcgctgactgatgcatttcggatttcaagggagtatacatttctggagcggcttatgctgacatttgaa

SEQ ID NO: 115463 - DNA, 81 bp, Homo sapiens
actgtcgctgactgatgcatttcggatttcaagggagtatacatttctggagcggcttatgctgacatttgaagaaataga

SEQ ID NO: 115464 - DNA, 78 bp, Homo sapiens
actgatgcatttcggatttcaagggagtatacatttctggagcggcttatgctgacatttgaagaaatagaaatctaa

SEQ ID NO: 115465 - DNA, 75 bp, Homo sapiens
tttcggatttcaagggagtatacatttctggagcggcttatgctgacatttgaagaaatagaaatctaagacaaa

SEQ ID NO: 115466 - DNA, 73 bp, Homo sapiens
aagggagtatacatttctggagcggcttatgctgacatttgaagaaatagaaatctaagacaaaggaaaaaga

SEQ ID NO: 115467 - DNA, 68 bp, Homo sapiens
agacatggtattttagtttttcttcaataatatattcataattaaacttactggcaggttgtttttaa

SEQ ID NO: 115468 - DNA, 68 bp, Homo sapiens
gtttttcttcaataatatattcataattaaacttactggcaggttgtttttaaaccattcgatttcag

SEQ ID NO: 115469 - DNA, 71 bp, Homo sapiens
caataatatattcataattaaacttactggcaggttgtttttaaaccattcgatttcaggggatggctcgc

SEQ ID NO: 115470 - DNA, 71 bp, Homo sapiens
tattcataattaaacttactggcaggttgtttttaaaccattcgatttcaggggatggctcgccactgatt

SEQ ID NO: 115471 - DNA, 71 bp, Homo sapiens
ttaaacttactggcaggttgtttttaaaccattcgatttcaggggatggctcgccactgatttcacaagta

SEQ ID NO: 115472 - DNA, 69 bp, Homo sapiens
aggttgtttttaaaccattcgatttcaggggatggctcgccactgatttcacaagtaaagagaacattt

SEQ ID NO: 115473 - DNA, 70 bp, Homo sapiens
gtttttaaaccattcgatttcaggggatggctcgccactgatttcacaagtaaagagaacattttgtcct

SEQ ID NO: 115474 - DNA, 74 bp, Homo sapiens
attcgatttcaggggatggctcgccactgatttcacaagtaaagagaacattttgtccttcattaatattttga

SEQ ID NO: 115475 - DNA, 80 bp, Homo sapiens
gatggctcgccactgatttcacaagtaaagagaacattttgtccttcattaatattttgagatctaggctgtgagatgaa

SEQ ID NO: 115476 - DNA, 78 bp, Homo sapiens
ccactgatttcacaagtaaagagaacattttgtccttcattaatattttgagatctaggctgtgagatgaaggctgga

SEQ ID NO: 115477 - DNA, 80 bp, Homo sapiens
atttcacaagtaaagagaacattttgtccttcattaatattttgagatctaggctgtgagatgaaggctggagcatctga

SEQ ID NO: 115478 - DNA, 81 bp, Homo sapiens
taaagagaacattttgtccttcattaatattttgagatctaggctgtgagatgaaggctggagcatctgagagttctttgc

SEQ ID NO: 115479 - DNA, 86 bp, Homo sapiens
attaatattttgagatctaggctgtgagatgaaggctggagcatctgagagttctttgctcagtgtcaaatcatactgacacttga

SEQ ID NO: 115480 - DNA, 86 bp, Homo sapiens
tttgagatctaggctgtgagatgaaggctggagcatctgagagttctttgctcagtgtcaaatcatactgacacttgacgattcct

SEQ ID NO: 115481 - DNA, 82 bp, Homo sapiens
tgtgagatgaaggctggagcatctgagagttctttgctcagtgtcaaatcatactgacacttgacgattccttccttggttt

SEQ ID NO: 115482 - DNA, 79 bp, Homo sapiens
aaggctggagcatctgagagttctttgctcagtgtcaaatcatactgacacttgacgattccttccttggttttgctta

SEQ ID NO: 115483 - DNA, 80 bp, Homo sapiens
tctgagagttctttgctcagtgtcaaatcatactgacacttgacgattccttccttggttttgcttatgcaggtgaggat

SEQ ID NO: 115484 - DNA, 79 bp, Homo sapiens
ttctttgctcagtgtcaaatcatactgacacttgacgattccttccttggttttgcttatgcaggtgaggattccttca

SEQ ID NO: 115485 - DNA, 79 bp, Homo sapiens
agtgtcaaatcatactgacacttgacgattccttccttggttttgcttatgcaggtgaggattccttcatctctgtgac

SEQ ID NO: 115486 - DNA, 80 bp, Homo sapiens
aatcatactgacacttgacgattccttccttggttttgcttatgcaggtgaggattccttcatctctgtgactggcttgc

SEQ ID NO: 115487 - DNA, 78 bp, Homo sapiens
attccttccttggttttgcttatgcaggtgaggattccttcatctctgtgactggcttgcttgatggttagggtctga

SEQ ID NO: 115488 - DNA, 85 bp, Homo sapiens
ttttgcttatgcaggtgaggattccttcatctctgtgactggcttgcttgatggttagggtctgatcgctgcctgagacaccata

SEQ ID NO: 115489 - DNA, 82 bp, Homo sapiens
aggtgaggattccttcatctctgtgactggcttgcttgatggttagggtctgatcgctgcctgagacaccatatcggtactc

SEQ ID NO: 115490 - DNA, 82 bp, Homo sapiens
attccttcatctctgtgactggcttgcttgatggttagggtctgatcgctgcctgagacaccatatcggtactcctcagagt

SEQ ID NO: 115491 - DNA, 82 bp, Homo sapiens
ctgtgactggcttgcttgatggttagggtctgatcgctgcctgagacaccatatcggtactcctcagagttggtaagctcta

SEQ ID NO: 115492 - DNA, 82 bp, Homo sapiens
ggtctgatcgctgcctgagacaccatatcggtactcctcagagttggtaagctctacgccattcagtacccatttcacatca

SEQ ID NO: 115493 - DNA, 81 bp, Homo sapiens
ctgagacaccatatcggtactcctcagagttggtaagctctacgccattcagtacccatttcacatcagtggcaccagcaa

SEQ ID NO: 115494 - DNA, 79 bp, Homo sapiens
acaccatatcggtactcctcagagttggtaagctctacgccattcagtacccatttcacatcagtggcaccagcaatgt

SEQ ID NO: 115495 - DNA, 78 bp, Homo sapiens
tactcctcagagttggtaagctctacgccattcagtacccatttcacatcagtggcaccagcaatgttggcttttaaa

SEQ ID NO: 115496 - DNA, 75 bp, Homo sapiens
ttggtaagctctacgccattcagtacccatttcacatcagtggcaccagcaatgttggcttttaaaaccagtctt

SEQ ID NO: 115497 - DNA, 74 bp, Homo sapiens
tacgccattcagtacccatttcacatcagtggcaccagcaatgttggcttttaaaaccagtctttgaccttcgt

SEQ ID NO: 115498 - DNA, 74 bp, Homo sapiens
attcagtacccatttcacatcagtggcaccagcaatgttggcttttaaaaccagtctttgaccttcgtttatgc

SEQ ID NO: 115499 - DNA, 77 bp, Homo sapiens
tttcacatcagtggcaccagcaatgttggcttttaaaaccagtctttgaccttcgtttatgctcatctgagtagaaa

SEQ ID NO: 115500 - DNA, 75 bp, Homo sapiens
tggcaccagcaatgttggcttttaaaaccagtctttgaccttcgtttatgctcatctgagtagaaaatgctttaa

SEQ ID NO: 115501 - DNA, 76 bp, Homo sapiens
aatgttggcttttaaaaccagtctttgaccttcgtttatgctcatctgagtagaaaatgctttaatctcagcatga

SEQ ID NO: 115502 - DNA, 76 bp, Homo sapiens
ttttaaaaccagtctttgaccttcgtttatgctcatctgagtagaaaatgctttaatctcagcatgagttctgact

SEQ ID NO: 115503 - DNA, 84 bp, Homo sapiens
tctttgaccttcgtttatgctcatctgagtagaaaatgctttaatctcagcatgagttctgacttcttctgatgcctgtgatgt

SEQ ID NO: 115504 - DNA, 84 bp, Homo sapiens
ttcgtttatgctcatctgagtagaaaatgctttaatctcagcatgagttctgacttcttctgatgcctgtgatgttttagtgat

SEQ ID NO: 115505 - DNA, 87 bp, Homo sapiens
tatgctcatctgagtagaaaatgctttaatctcagcatgagttctgacttcttctgatgcctgtgatgttttagtgatttcctcatg

SEQ ID NO: 115506 - DNA, 82 bp, Homo sapiens
agaaaatgctttaatctcagcatgagttctgacttcttctgatgcctgtgatgttttagtgatttcctcatggacaatggat

SEQ ID NO: 115507 - DNA, 82 bp, Homo sapiens
atgctttaatctcagcatgagttctgacttcttctgatgcctgtgatgttttagtgatttcctcatggacaatggatttttc

SEQ ID NO: 115508 - DNA, 78 bp, Homo sapiens
agcatgagttctgacttcttctgatgcctgtgatgttttagtgatttcctcatggacaatggatttttccagggaggt

SEQ ID NO: 115509 - DNA, 80 bp, Homo sapiens
tgacttcttctgatgcctgtgatgttttagtgatttcctcatggacaatggatttttccagggaggttgctgctgatttc

SEQ ID NO: 115510 - DNA, 79 bp, Homo sapiens
ttctgatgcctgtgatgttttagtgatttcctcatggacaatggatttttccagggaggttgctgctgatttcttgact

SEQ ID NO: 115511 - DNA, 75 bp, Homo sapiens
atgttttagtgatttcctcatggacaatggatttttccagggaggttgctgctgatttcttgacttcttcagaaa

SEQ ID NO: 115512 - DNA, 77 bp, Homo sapiens
ttagtgatttcctcatggacaatggatttttccagggaggttgctgctgatttcttgacttcttcagaaatcagaac

SEQ ID NO: 115513 - DNA, 75 bp, Homo sapiens
atggacaatggatttttccagggaggttgctgctgatttcttgacttcttcagaaatcagaacctttgaagcttc

SEQ ID NO: 115514 - DNA, 73 bp, Homo sapiens
aatggatttttccagggaggttgctgctgatttcttgacttcttcagaaatcagaacctttgaagcttcctct

SEQ ID NO: 115515 - DNA, 73 bp, Homo sapiens
ggaggttgctgctgatttcttgacttcttcagaaatcagaacctttgaagcttcctctttgagggctaacttt

SEQ ID NO: 115516 - DNA, 74 bp, Homo sapiens
tgctgatttcttgacttcttcagaaatcagaacctttgaagcttcctctttgagggctaacttttcttgagatt

SEQ ID NO: 115517 - DNA, 72 bp, Homo sapiens
agaaatcagaacctttgaagcttcctctttgagggctaacttttcttgagattttgcctctgacatcttaat

SEQ ID NO: 115518 - DNA, 72 bp, Homo sapiens
agaacctttgaagcttcctctttgagggctaacttttcttgagattttgcctctgacatcttaatttcttca

SEQ ID NO: 115519 - DNA, 71 bp, Homo sapiens
aagcttcctctttgagggctaacttttcttgagattttgcctctgacatcttaatttcttcagaccttagg

SEQ ID NO: 115520 - DNA, 71 bp, Homo sapiens
tctttgagggctaacttttcttgagattttgcctctgacatcttaatttcttcagaccttagggctttttg

SEQ ID NO: 115521 - DNA, 69 bp, Homo sapiens
ttttcttgagattttgcctctgacatcttaatttcttcagaccttagggctttttgggaaatttcctct

SEQ ID NO: 115522 - DNA, 71 bp, Homo sapiens
ttgagattttgcctctgacatcttaatttcttcagaccttagggctttttgggaaatttcctcttggacaa

SEQ ID NO: 115523 - DNA, 72 bp, Homo sapiens
tctgacatcttaatttcttcagaccttagggctttttgggaaatttcctcttggacaacagctttcttctga

SEQ ID NO: 115524 - DNA, 70 bp, Homo sapiens
ttcagaccttagggctttttgggaaatttcctcttggacaacagctttcttctgaggtgtaatttcagaa

SEQ ID NO: 115525 - DNA, 71 bp, Homo sapiens
tttttgggaaatttcctcttggacaacagctttcttctgaggtgtaatttcagaagtcttttgtgtagaga

SEQ ID NO: 115526 - DNA, 73 bp, Homo sapiens
aaatttcctcttggacaacagctttcttctgaggtgtaatttcagaagtcttttgtgtagagactttctgtgc

SEQ ID NO: 115527 - DNA, 76 bp, Homo sapiens
tggacaacagctttcttctgaggtgtaatttcagaagtcttttgtgtagagactttctgtgcctcagtatctttta

SEQ ID NO: 115528 - DNA, 74 bp, Homo sapiens
ctttcttctgaggtgtaatttcagaagtcttttgtgtagagactttctgtgcctcagtatcttttatagctaaa

SEQ ID NO: 115529 - DNA, 73 bp, Homo sapiens
ctgaggtgtaatttcagaagtcttttgtgtagagactttctgtgcctcagtatcttttatagctaaaaaagaa

SEQ ID NO: 115530 - DNA, 70 bp, Homo sapiens
cttttgtgtagagactttctgtgcctcagtatcttttatagctaaaaaagaaacctctgtaaggcaaact

SEQ ID NO: 115531 - DNA, 69 bp, Homo sapiens
atattatcttctgaagaaatgtgggtaaaaacaaaagccaacctaccttttattgttaatttgcagcta

SEQ ID NO: 115532 - DNA, 70 bp, Homo sapiens
ttctgaagaaatgtgggtaaaaacaaaagccaacctaccttttattgttaatttgcagctagaggacaca

SEQ ID NO: 115533 - DNA, 70 bp, Homo sapiens
aaatgtgggtaaaaacaaaagccaacctaccttttattgttaatttgcagctagaggacacagatccagc

SEQ ID NO: 115534 - DNA, 69 bp, Homo sapiens
aaaaacaaaagccaacctaccttttattgttaatttgcagctagaggacacagatccagctgaattttt

SEQ ID NO: 115535 - DNA, 73 bp, Homo sapiens
ccaacctaccttttattgttaatttgcagctagaggacacagatccagctgaattttttactgtacaagtata

SEQ ID NO: 115536 - DNA, 77 bp, Homo sapiens
ttattgttaatttgcagctagaggacacagatccagctgaattttttactgtacaagtataaagtccactgtcagaa

SEQ ID NO: 115537 - DNA, 78 bp, Homo sapiens
ttaatttgcagctagaggacacagatccagctgaattttttactgtacaagtataaagtccactgtcagaagtatcag

SEQ ID NO: 115538 - DNA, 76 bp, Homo sapiens
aggacacagatccagctgaattttttactgtacaagtataaagtccactgtcagaagtatcagtcttatgaatttc

SEQ ID NO: 115539 - DNA, 76 bp, Homo sapiens
acagatccagctgaattttttactgtacaagtataaagtccactgtcagaagtatcagtcttatgaatttctaaga

SEQ ID NO: 115540 - DNA, 71 bp, Homo sapiens
ttttttactgtacaagtataaagtccactgtcagaagtatcagtcttatgaatttctaagaagaaccctcc

SEQ ID NO: 115541 - DNA, 73 bp, Homo sapiens
tactgtacaagtataaagtccactgtcagaagtatcagtcttatgaatttctaagaagaaccctcccttgtct

SEQ ID NO: 115542 - DNA, 72 bp, Homo sapiens
actgtcagaagtatcagtcttatgaatttctaagaagaaccctcccttgtcttcagagagtttatatttacc

SEQ ID NO: 115543 - DNA, 71 bp, Homo sapiens
atcagtcttatgaatttctaagaagaaccctcccttgtcttcagagagtttatatttacctccttgtgtaa

SEQ ID NO: 115544 - DNA, 70 bp, Homo sapiens
aatttctaagaagaaccctcccttgtcttcagagagtttatatttacctccttgtgtaatggcctgtaga

SEQ ID NO: 115545 - DNA, 72 bp, Homo sapiens
aagaaccctcccttgtcttcagagagtttatatttacctccttgtgtaatggcctgtagaatgcaaatgatt

SEQ ID NO: 115546 - DNA, 74 bp, Homo sapiens
tcccttgtcttcagagagtttatatttacctccttgtgtaatggcctgtagaatgcaaatgatttgtgttttaa

SEQ ID NO: 115547 - DNA, 73 bp, Homo sapiens
cttcagagagtttatatttacctccttgtgtaatggcctgtagaatgcaaatgatttgtgttttaaaaagtga

SEQ ID NO: 115548 - DNA, 71 bp, Homo sapiens
tttagaagataaaagaaagagacatttaagaactggttacctttccatcttttgtccagatggcagttggc

SEQ ID NO: 115549 - DNA, 67 bp, Homo sapiens
aaaagaaagagacatttaagaactggttacctttccatcttttgtccagatggcagttggccggggt

SEQ ID NO: 115550 - DNA, 69 bp, Homo sapiens
tttaagaactggttacctttccatcttttgtccagatggcagttggccggggttctccagtagccttaa

SEQ ID NO: 115551 - DNA, 71 bp, Homo sapiens
tggttacctttccatcttttgtccagatggcagttggccggggttctccagtagccttaactgcaaattta

SEQ ID NO: 115552 - DNA, 74 bp, Homo sapiens
ttttgtccagatggcagttggccggggttctccagtagccttaactgcaaatttagcaacactgtctgaagaaa

SEQ ID NO: 115553 - DNA, 74 bp, Homo sapiens
atggcagttggccggggttctccagtagccttaactgcaaatttagcaacactgtctgaagaaacagttgtatc

SEQ ID NO: 115554 - DNA, 75 bp, Homo sapiens
ggttctccagtagccttaactgcaaatttagcaacactgtctgaagaaacagttgtatcctgcaacccagtaaca

SEQ ID NO: 115555 - DNA, 74 bp, Homo sapiens
tagccttaactgcaaatttagcaacactgtctgaagaaacagttgtatcctgcaacccagtaacaattactggt

SEQ ID NO: 115556 - DNA, 74 bp, Homo sapiens
ttaactgcaaatttagcaacactgtctgaagaaacagttgtatcctgcaacccagtaacaattactggttttga

SEQ ID NO: 115557 - DNA, 72 bp, Homo sapiens
atttagcaacactgtctgaagaaacagttgtatcctgcaacccagtaacaattactggttttgaggaaattg

SEQ ID NO: 115558 - DNA, 71 bp, Homo sapiens
tctgaagaaacagttgtatcctgcaacccagtaacaattactggttttgaggaaattggttcaggagcttt

SEQ ID NO: 115559 - DNA, 68 bp, Homo sapiens
aaacagttgtatcctgcaacccagtaacaattactggttttgaggaaattggttcaggagcttttggt

SEQ ID NO: 115560 - DNA, 69 bp, Homo sapiens
tatcctgcaacccagtaacaattactggttttgaggaaattggttcaggagcttttggttcagtttttc

SEQ ID NO: 115561 - DNA, 68 bp, Homo sapiens
gtaacaattactggttttgaggaaattggttcaggagcttttggttcagtttttctggttactgttga

SEQ ID NO: 115562 - DNA, 71 bp, Homo sapiens
gttcaggagcttttggttcagtttttctggttactgttgactcagtggttttctgatctgatttcttagtt

SEQ ID NO: 115563 - DNA, 72 bp, Homo sapiens
gcttttggttcagtttttctggttactgttgactcagtggttttctgatctgatttcttagtttctgatatt

SEQ ID NO: 115564 - DNA, 76 bp, Homo sapiens
tttctggttactgttgactcagtggttttctgatctgatttcttagtttctgatatttttgataccttctcatgga

SEQ ID NO: 115565 - DNA, 76 bp, Homo sapiens
gttactgttgactcagtggttttctgatctgatttcttagtttctgatatttttgataccttctcatggatactct

SEQ ID NO: 115566 - DNA, 74 bp, Homo sapiens
agtggttttctgatctgatttcttagtttctgatatttttgataccttctcatggatactcttaaaggcttgcc

SEQ ID NO: 115567 - DNA, 76 bp, Homo sapiens
tctgatctgatttcttagtttctgatatttttgataccttctcatggatactcttaaaggcttgccccataaattg

SEQ ID NO: 115568 - DNA, 72 bp, Homo sapiens
tcttagtttctgatatttttgataccttctcatggatactcttaaaggcttgccccataaattgtaagttgg

SEQ ID NO: 115569 - DNA, 71 bp, Homo sapiens
tgatatttttgataccttctcatggatactcttaaaggcttgccccataaattgtaagttggttttagacg

SEQ ID NO: 115570 - DNA, 70 bp, Homo sapiens
tcatggatactcttaaaggcttgccccataaattgtaagttggttttagacgttccaccttcaccagaaa

SEQ ID NO: 115571 - DNA, 70 bp, Homo sapiens
ttgccccataaattgtaagttggttttagacgttccaccttcaccagaaatctcacaaacatattctcct

SEQ ID NO: 115572 - DNA, 79 bp, Homo sapiens
acgttccaccttcaccagaaatctcacaaacatattctccttgatcagattcagtgaggttattgattttgagctcata

SEQ ID NO: 115573 - DNA, 79 bp, Homo sapiens
accttcaccagaaatctcacaaacatattctccttgatcagattcagtgaggttattgattttgagctcataggtacca

SEQ ID NO: 115574 - DNA, 83 bp, Homo sapiens
atctcacaaacatattctccttgatcagattcagtgaggttattgattttgagctcataggtaccatctgctgaataatgaaa

SEQ ID NO: 115575 - DNA, 81 bp, Homo sapiens
aacatattctccttgatcagattcagtgaggttattgattttgagctcataggtaccatctgctgaataatgaaactggaa

SEQ ID NO: 115576 - DNA, 81 bp, Homo sapiens
ttgatcagattcagtgaggttattgattttgagctcataggtaccatctgctgaataatgaaactggaaatgcccattttc

SEQ ID NO: 115577 - DNA, 78 bp, Homo sapiens
attcagtgaggttattgattttgagctcataggtaccatctgctgaataatgaaactggaaatgcccattttccttca

SEQ ID NO: 115578 - DNA, 75 bp, Homo sapiens
ggttattgattttgagctcataggtaccatctgctgaataatgaaactggaaatgcccattttccttcagtttct

SEQ ID NO: 115579 - DNA, 78 bp, Homo sapiens
tttgagctcataggtaccatctgctgaataatgaaactggaaatgcccattttccttcagtttcttgccatctttata

SEQ ID NO: 115580 - DNA, 76 bp, Homo sapiens
taggtaccatctgctgaataatgaaactggaaatgcccattttccttcagtttcttgccatctttataccaggtga

SEQ ID NO: 115581 - DNA, 73 bp, Homo sapiens
tgaataatgaaactggaaatgcccattttccttcagtttcttgccatctttataccaggtgacctcttttgcc

SEQ ID NO: 115582 - DNA, 70 bp, Homo sapiens
aactggaaatgcccattttccttcagtttcttgccatctttataccaggtgacctcttttgcccttaata

SEQ ID NO: 115583 - DNA, 71 bp, Homo sapiens
cccattttccttcagtttcttgccatctttataccaggtgacctcttttgcccttaatacactgctttcaa

SEQ ID NO: 115584 - DNA, 74 bp, Homo sapiens
ttcagtttcttgccatctttataccaggtgacctcttttgcccttaatacactgctttcaaccacacaggtcag

SEQ ID NO: 115585 - DNA, 73 bp, Homo sapiens
tttataccaggtgacctcttttgcccttaatacactgctttcaaccacacaggtcagttttgcaatctcttta

SEQ ID NO: 115586 - DNA, 73 bp, Homo sapiens
acctcttttgcccttaatacactgctttcaaccacacaggtcagttttgcaatctctttagaagcttctgctt

SEQ ID NO: 115587 - DNA, 75 bp, Homo sapiens
ttttgcccttaatacactgctttcaaccacacaggtcagttttgcaatctctttagaagcttctgctttcaggaa

SEQ ID NO: 115588 - DNA, 76 bp, Homo sapiens
atacactgctttcaaccacacaggtcagttttgcaatctctttagaagcttctgctttcaggaactgagtaatctt

SEQ ID NO: 115589 - DNA, 74 bp, Homo sapiens
tttcaaccacacaggtcagttttgcaatctctttagaagcttctgctttcaggaactgagtaatctttggtggg

SEQ ID NO: 115590 - DNA, 75 bp, Homo sapiens
tttagaagcttctgctttcaggaactgagtaatctttggtggggcagagactgggaggtgctgaactttctctgt

SEQ ID NO: 115591 - DNA, 72 bp, Homo sapiens
ctttcaggaactgagtaatctttggtggggcagagactgggaggtgctgaactttctctgttggtgttggtt

SEQ ID NO: 115592 - DNA, 72 bp, Homo sapiens
aggaactgagtaatctttggtggggcagagactgggaggtgctgaactttctctgttggtgttggttttgtc

SEQ ID NO: 115593 - DNA, 75 bp, Homo sapiens
taatctttggtggggcagagactgggaggtgctgaactttctctgttggtgttggttttgtctctgtgggtgata

SEQ ID NO: 115594 - DNA, 74 bp, Homo sapiens
cagagactgggaggtgctgaactttctctgttggtgttggttttgtctctgtgggtgatacggctttcgggtga

SEQ ID NO: 115595 - DNA, 72 bp, Homo sapiens
gaggtgctgaactttctctgttggtgttggttttgtctctgtgggtgatacggctttcgggtgagaaggttc

SEQ ID NO: 115596 - DNA, 70 bp, Homo sapiens
aactttctctgttggtgttggttttgtctctgtgggtgatacggctttcgggtgagaaggttctggagat

SEQ ID NO: 115597 - DNA, 70 bp, Homo sapiens
ttggtgttggttttgtctctgtgggtgatacggctttcgggtgagaaggttctggagatttcactcgttt

SEQ ID NO: 115598 - DNA, 73 bp, Homo sapiens
tctgtgggtgatacggctttcgggtgagaaggttctggagatttcactcgttttggagacttaactgcttctg

SEQ ID NO: 115599 - DNA, 70 bp, Homo sapiens
ttcgggtgagaaggttctggagatttcactcgttttggagacttaactgcttctggggatttcacccgag

SEQ ID NO: 115600 - DNA, 72 bp, Homo sapiens
ttctggagatttcactcgttttggagacttaactgcttctggggatttcacccgaggctctggggatttgac

SEQ ID NO: 115601 - DNA, 71 bp, Homo sapiens
agatttcactcgttttggagacttaactgcttctggggatttcacccgaggctctggggatttgactcttg

SEQ ID NO: 115602 - DNA, 75 bp, Homo sapiens
taactgcttctggggatttcacccgaggctctggggatttgactcttggtggtgatgtcacagccttttcagtta

SEQ ID NO: 115603 - DNA, 72 bp, Homo sapiens
gggatttcacccgaggctctggggatttgactcttggtggtgatgtcacagccttttcagttaccctggcct

SEQ ID NO: 115604 - DNA, 72 bp, Homo sapiens
acccgaggctctggggatttgactcttggtggtgatgtcacagccttttcagttaccctggccttttgaata

SEQ ID NO: 115605 - DNA, 74 bp, Homo sapiens
gtggtgatgtcacagccttttcagttaccctggccttttgaatagtcagagtgaactctgcttcttgtttccct

SEQ ID NO: 115606 - DNA, 72 bp, Homo sapiens
ttcagttaccctggccttttgaatagtcagagtgaactctgcttcttgtttcccttcactgttttctaccac

SEQ ID NO: 115607 - DNA, 73 bp, Homo sapiens
cttttgaatagtcagagtgaactctgcttcttgtttcccttcactgttttctaccaccacgctgtaattgccc

SEQ ID NO: 115608 - DNA, 75 bp, Homo sapiens
atagtcagagtgaactctgcttcttgtttcccttcactgttttctaccaccacgctgtaattgccctcatcggaa

SEQ ID NO: 115609 - DNA, 74 bp, Homo sapiens
aactctgcttcttgtttcccttcactgttttctaccaccacgctgtaattgccctcatcggaagcctggactga

SEQ ID NO: 115610 - DNA, 75 bp, Homo sapiens
ttgtttcccttcactgttttctaccaccacgctgtaattgccctcatcggaagcctggactgaagagatctcaaa

SEQ ID NO: 115611 - DNA, 77 bp, Homo sapiens
tcactgttttctaccaccacgctgtaattgccctcatcggaagcctggactgaagagatctcaaaggttgatttgta

SEQ ID NO: 115612 - DNA, 74 bp, Homo sapiens
ttttctaccaccacgctgtaattgccctcatcggaagcctggactgaagagatctcaaaggttgatttgtactt

SEQ ID NO: 115613 - DNA, 75 bp, Homo sapiens
acgctgtaattgccctcatcggaagcctggactgaagagatctcaaaggttgatttgtactttgtggtggtcact

SEQ ID NO: 115614 - DNA, 75 bp, Homo sapiens
aattgccctcatcggaagcctggactgaagagatctcaaaggttgatttgtactttgtggtggtcacttggtggc

SEQ ID NO: 115615 - DNA, 73 bp, Homo sapiens
aagcctggactgaagagatctcaaaggttgatttgtactttgtggtggtcacttggtggcgggcagaagtact

SEQ ID NO: 115616 - DNA, 72 bp, Homo sapiens
atctcaaaggttgatttgtactttgtggtggtcacttggtggcgggcagaagtacttagcacttgtccttta

SEQ ID NO: 115617 - DNA, 74 bp, Homo sapiens
atttgtactttgtggtggtcacttggtggcgggcagaagtacttagcacttgtcctttacgcagccaggtcaca

SEQ ID NO: 115618 - DNA, 74 bp, Homo sapiens
tactttgtggtggtcacttggtggcgggcagaagtacttagcacttgtcctttacgcagccaggtcacagttgg

SEQ ID NO: 115619 - DNA, 73 bp, Homo sapiens
aagtacttagcacttgtcctttacgcagccaggtcacagttggtaccggctcaccatcggtgtcacaagaaaa

SEQ ID NO: 115620 - DNA, 74 bp, Homo sapiens
acttgtcctttacgcagccaggtcacagttggtaccggctcaccatcggtgtcacaagaaaaccttgcagactc

SEQ ID NO: 115621 - DNA, 75 bp, Homo sapiens
tttacgcagccaggtcacagttggtaccggctcaccatcggtgtcacaagaaaaccttgcagactcgccctcgta

SEQ ID NO: 115622 - DNA, 74 bp, Homo sapiens
taccggctcaccatcggtgtcacaagaaaaccttgcagactcgccctcgtagacggtcatggaccgtggctttg

SEQ ID NO: 115623 - DNA, 72 bp, Homo sapiens
accatcggtgtcacaagaaaaccttgcagactcgccctcgtagacggtcatggaccgtggctttgttagaat

SEQ ID NO: 115624 - DNA, 73 bp, Homo sapiens
acaagaaaaccttgcagactcgccctcgtagacggtcatggaccgtggctttgttagaattcttgctgccaaa

SEQ ID NO: 115625 - DNA, 72 bp, Homo sapiens
aaaaccttgcagactcgccctcgtagacggtcatggaccgtggctttgttagaattcttgctgccaaagtcg

SEQ ID NO: 115626 - DNA, 74 bp, Homo sapiens
agactcgccctcgtagacggtcatggaccgtggctttgttagaattcttgctgccaaagtcgtcttgatctttc

SEQ ID NO: 115627 - DNA, 74 bp, Homo sapiens
tagacggtcatggaccgtggctttgttagaattcttgctgccaaagtcgtcttgatctttctggttgtggattt

SEQ ID NO: 115628 - DNA, 73 bp, Homo sapiens
atggaccgtggctttgttagaattcttgctgccaaagtcgtcttgatctttctggttgtggatttttcttcca

SEQ ID NO: 115629 - DNA, 72 bp, Homo sapiens
tttgttagaattcttgctgccaaagtcgtcttgatctttctggttgtggatttttcttccagtgacttttct

SEQ ID NO: 115630 - DNA, 75 bp, Homo sapiens
agaattcttgctgccaaagtcgtcttgatctttctggttgtggatttttcttccagtgacttttcttctaatgca

SEQ ID NO: 115631 - DNA, 72 bp, Homo sapiens
aaagtcgtcttgatctttctggttgtggatttttcttccagtgacttttcttctaatgcagcacttttcatt

SEQ ID NO: 115632 - DNA, 80 bp, Homo sapiens
tttctggttgtggatttttcttccagtgacttttcttctaatgcagcacttttcatttctgcagatgcagagtgttcata

SEQ ID NO: 115633 - DNA, 80 bp, Homo sapiens
atttttcttccagtgacttttcttctaatgcagcacttttcatttctgcagatgcagagtgttcatatgaggagagactt

SEQ ID NO: 115634 - DNA, 81 bp, Homo sapiens
agtgacttttcttctaatgcagcacttttcatttctgcagatgcagagtgttcatatgaggagagactttcccttgtctcc

SEQ ID NO: 115635 - DNA, 85 bp, Homo sapiens
tcttctaatgcagcacttttcatttctgcagatgcagagtgttcatatgaggagagactttcccttgtctccgtcatctgtgatt

SEQ ID NO: 115636 - DNA, 82 bp, Homo sapiens
agcacttttcatttctgcagatgcagagtgttcatatgaggagagactttcccttgtctccgtcatctgtgatttcacttcc

SEQ ID NO: 115637 - DNA, 84 bp, Homo sapiens
ttcatttctgcagatgcagagtgttcatatgaggagagactttcccttgtctccgtcatctgtgatttcacttccctgacagaa

SEQ ID NO: 115638 - DNA, 80 bp, Homo sapiens
atgcagagtgttcatatgaggagagactttcccttgtctccgtcatctgtgatttcacttccctgacagaagacgaagct

SEQ ID NO: 115639 - DNA, 77 bp, Homo sapiens
agagactttcccttgtctccgtcatctgtgatttcacttccctgacagaagacgaagcttccatctcagatgttttc

SEQ ID NO: 115640 - DNA, 76 bp, Homo sapiens
tttcccttgtctccgtcatctgtgatttcacttccctgacagaagacgaagcttccatctcagatgttttcttaaa

SEQ ID NO: 115641 - DNA, 82 bp, Homo sapiens
tctccgtcatctgtgatttcacttccctgacagaagacgaagcttccatctcagatgttttcttaaatgatgaaacagcata

SEQ ID NO: 115642 - DNA, 78 bp, Homo sapiens
atttcacttccctgacagaagacgaagcttccatctcagatgttttcttaaatgatgaaacagcatacgcctctgttc

SEQ ID NO: 115643 - DNA, 79 bp, Homo sapiens
acttccctgacagaagacgaagcttccatctcagatgttttcttaaatgatgaaacagcatacgcctctgttcttgtca

SEQ ID NO: 115644 - DNA, 78 bp, Homo sapiens
aagacgaagcttccatctcagatgttttcttaaatgatgaaacagcatacgcctctgttcttgtcagctcagggaaaa

SEQ ID NO: 115645 - DNA, 80 bp, Homo sapiens
agcttccatctcagatgttttcttaaatgatgaaacagcatacgcctctgttcttgtcagctcagggaaaacagatctgg

SEQ ID NO: 115646 - DNA, 77 bp, Homo sapiens
atgttttcttaaatgatgaaacagcatacgcctctgttcttgtcagctcagggaaaacagatctggggacctcttca

SEQ ID NO: 115647 - DNA, 80 bp, Homo sapiens
ttaaatgatgaaacagcatacgcctctgttcttgtcagctcagggaaaacagatctggggacctcttcatctctgcgttg

SEQ ID NO: 115648 - DNA, 78 bp, Homo sapiens
ctctgttcttgtcagctcagggaaaacagatctggggacctcttcatctctgcgttgggaagcataggtggtataatc

SEQ ID NO: 115649 - DNA, 76 bp, Homo sapiens
ttcttgtcagctcagggaaaacagatctggggacctcttcatctctgcgttgggaagcataggtggtataatcccc

SEQ ID NO: 115650 - DNA, 78 bp, Homo sapiens
ctcttcatctctgcgttgggaagcataggtggtataatcccctcctgtcacgtccaacgttgcatagtcagaagcttc

SEQ ID NO: 115651 - DNA, 76 bp, Homo sapiens
tgcgttgggaagcataggtggtataatcccctcctgtcacgtccaacgttgcatagtcagaagcttcgcccttgta

SEQ ID NO: 115652 - DNA, 76 bp, Homo sapiens
aagcataggtggtataatcccctcctgtcacgtccaacgttgcatagtcagaagcttcgcccttgtagttggtgca

SEQ ID NO: 115653 - DNA, 77 bp, Homo sapiens
ctcctgtcacgtccaacgttgcatagtcagaagcttcgcccttgtagttggtgcacacagcacggtaggttccactg

SEQ ID NO: 115654 - DNA, 78 bp, Homo sapiens
acgtccaacgttgcatagtcagaagcttcgcccttgtagttggtgcacacagcacggtaggttccactgtcatcagta

SEQ ID NO: 115655 - DNA, 80 bp, Homo sapiens
gtcagaagcttcgcccttgtagttggtgcacacagcacggtaggttccactgtcatcagtatgacagtccagaatttcca

SEQ ID NO: 115656 - DNA, 79 bp, Homo sapiens
cttgtagttggtgcacacagcacggtaggttccactgtcatcagtatgacagtccagaatttccagggtgaggactcca

SEQ ID NO: 115657 - DNA, 79 bp, Homo sapiens
ttggtgcacacagcacggtaggttccactgtcatcagtatgacagtccagaatttccagggtgaggactccactcgtgt

SEQ ID NO: 115658 - DNA, 77 bp, Homo sapiens
cacggtaggttccactgtcatcagtatgacagtccagaatttccagggtgaggactccactcgtgttggtgtaatga

SEQ ID NO: 115659 - DNA, 78 bp, Homo sapiens
taggttccactgtcatcagtatgacagtccagaatttccagggtgaggactccactcgtgttggtgtaatgaatctta

SEQ ID NO: 115660 - DNA, 77 bp, Homo sapiens
atcagtatgacagtccagaatttccagggtgaggactccactcgtgttggtgtaatgaatcttactgctttcttgga

SEQ ID NO: 115661 - DNA, 75 bp, Homo sapiens
atgacagtccagaatttccagggtgaggactccactcgtgttggtgtaatgaatcttactgctttcttggagttc

SEQ ID NO: 115662 - DNA, 73 bp, Homo sapiens
aatttccagggtgaggactccactcgtgttggtgtaatgaatcttactgctttcttggagttccacaccattg

SEQ ID NO: 115663 - DNA, 73 bp, Homo sapiens
aggactccactcgtgttggtgtaatgaatcttactgctttcttggagttccacaccattgtggtaccatttaa

SEQ ID NO: 115664 - DNA, 73 bp, Homo sapiens
tccactcgtgttggtgtaatgaatcttactgctttcttggagttccacaccattgtggtaccatttaacctcg

SEQ ID NO: 115665 - DNA, 74 bp, Homo sapiens
tgtaatgaatcttactgctttcttggagttccacaccattgtggtaccatttaacctcggcagttggcttagac

SEQ ID NO: 115666 - DNA, 73 bp, Homo sapiens
ttactgctttcttggagttccacaccattgtggtaccatttaacctcggcagttggcttagactgaacattta

SEQ ID NO: 115667 - DNA, 70 bp, Homo sapiens
ctttcttggagttccacaccattgtggtaccatttaacctcggcagttggcttagactgaacatttaaaa

SEQ ID NO: 115668 - DNA, 69 bp, Homo sapiens
cacaccattgtggtaccatttaacctcggcagttggcttagactgaacatttaaaataaaacgtgtatt

SEQ ID NO: 115669 - DNA, 68 bp, Homo sapiens
atttaacctcggcagttggcttagactgaacatttaaaataaaacgtgtattttggccacatggtacc

SEQ ID NO: 115670 - DNA, 74 bp, Homo sapiens
agttggcttagactgaacatttaaaataaaacgtgtattttggccacatggtaccctgtgcgagcgcattctca

SEQ ID NO: 115671 - DNA, 78 bp, Homo sapiens
aaacgtgtattttggccacatggtaccctgtgcgagcgcattctcagtgtgattcgaggggcatggtccagtgtgaaa

SEQ ID NO: 115672 - DNA, 83 bp, Homo sapiens
ttggccacatggtaccctgtgcgagcgcattctcagtgtgattcgaggggcatggtccagtgtgaaaggctgctgactcaaaa

SEQ ID NO: 115673 - DNA, 82 bp, Homo sapiens
atggtaccctgtgcgagcgcattctcagtgtgattcgaggggcatggtccagtgtgaaaggctgctgactcaaaacttcata

SEQ ID NO: 115674 - DNA, 81 bp, Homo sapiens
ctgtgcgagcgcattctcagtgtgattcgaggggcatggtccagtgtgaaaggctgctgactcaaaacttcatacttcctt

SEQ ID NO: 115675 - DNA, 79 bp, Homo sapiens
attctcagtgtgattcgaggggcatggtccagtgtgaaaggctgctgactcaaaacttcatacttcctttctgatgtct

SEQ ID NO: 115676 - DNA, 76 bp, Homo sapiens
atggtccagtgtgaaaggctgctgactcaaaacttcatacttcctttctgatgtcttctgagtttttaaagcagct

SEQ ID NO: 115677 - DNA, 77 bp, Homo sapiens
agtgtgaaaggctgctgactcaaaacttcatacttcctttctgatgtcttctgagtttttaaagcagctttcatgga

SEQ ID NO: 115678 - DNA, 78 bp, Homo sapiens
tgctgactcaaaacttcatacttcctttctgatgtcttctgagtttttaaagcagctttcatggactcatacctggaa

SEQ ID NO: 115679 - DNA, 74 bp, Homo sapiens
aaacttcatacttcctttctgatgtcttctgagtttttaaagcagctttcatggactcatacctggaaaagata

SEQ ID NO: 115680 - DNA, 75 bp, Homo sapiens
atacttcctttctgatgtcttctgagtttttaaagcagctttcatggactcatacctggaaaagatatcaaatct

SEQ ID NO: 115681 - DNA, 78 bp, Homo sapiens
agtttttaaagcagctttcatggactcatacctggaaaagatatcaaatcttgcagacctctcaaatctcgagagtga

SEQ ID NO: 115682 - DNA, 80 bp, Homo sapiens
atacctggaaaagatatcaaatcttgcagacctctcaaatctcgagagtgatctctcactagacacagggctgggggatc

SEQ ID NO: 115683 - DNA, 80 bp, Homo sapiens
aaaagatatcaaatcttgcagacctctcaaatctcgagagtgatctctcactagacacagggctgggggatcgtgggcga

SEQ ID NO: 115684 - DNA, 79 bp, Homo sapiens
acctctcaaatctcgagagtgatctctcactagacacagggctgggggatcgtgggcgagttctctctggagtaggtga

SEQ ID NO: 115685 - DNA, 77 bp, Homo sapiens
atctctcactagacacagggctgggggatcgtgggcgagttctctctggagtaggtgaccttctttctgtgtcatct

SEQ ID NO: 115686 - DNA, 74 bp, Homo sapiens
ggggatcgtgggcgagttctctctggagtaggtgaccttctttctgtgtcatcttcgtattcctcagccggttg

SEQ ID NO: 115687 - DNA, 76 bp, Homo sapiens
gtgggcgagttctctctggagtaggtgaccttctttctgtgtcatcttcgtattcctcagccggttgtggacgtga

SEQ ID NO: 115688 - DNA, 76 bp, Homo sapiens
gttctctctggagtaggtgaccttctttctgtgtcatcttcgtattcctcagccggttgtggacgtgaccggatca

SEQ ID NO: 115689 - DNA, 77 bp, Homo sapiens
agtaggtgaccttctttctgtgtcatcttcgtattcctcagccggttgtggacgtgaccggatcagctcagacactg

SEQ ID NO: 115690 - DNA, 80 bp, Homo sapiens
tttctgtgtcatcttcgtattcctcagccggttgtggacgtgaccggatcagctcagacactggcctcattaactcaata

SEQ ID NO: 115691 - DNA, 77 bp, Homo sapiens
atcttcgtattcctcagccggttgtggacgtgaccggatcagctcagacactggcctcattaactcaatataagttg

SEQ ID NO: 115692 - DNA, 78 bp, Homo sapiens
gttgtggacgtgaccggatcagctcagacactggcctcattaactcaatataagttggagacagggagcgccgtcgtc

SEQ ID NO: 115693 - DNA, 81 bp, Homo sapiens
tgaccggatcagctcagacactggcctcattaactcaatataagttggagacagggagcgccgtcgtctcagtagtctaga

SEQ ID NO: 115694 - DNA, 80 bp, Homo sapiens
actggcctcattaactcaatataagttggagacagggagcgccgtcgtctcagtagtctagacgcagatgaggatgattc

SEQ ID NO: 115695 - DNA, 81 bp, Homo sapiens
aatataagttggagacagggagcgccgtcgtctcagtagtctagacgcagatgaggatgattctctttgagcatgttttga

SEQ ID NO: 115696 - DNA, 80 bp, Homo sapiens
acagggagcgccgtcgtctcagtagtctagacgcagatgaggatgattctctttgagcatgttttgagatttcgtattct

SEQ ID NO: 115697 - DNA, 79 bp, Homo sapiens
ccgtcgtctcagtagtctagacgcagatgaggatgattctctttgagcatgttttgagatttcgtattcttcctcaatt

SEQ ID NO: 115698 - DNA, 80 bp, Homo sapiens
tagacgcagatgaggatgattctctttgagcatgttttgagatttcgtattcttcctcaatttctgttatttctgtcact

SEQ ID NO: 115699 - DNA, 77 bp, Homo sapiens
atgaggatgattctctttgagcatgttttgagatttcgtattcttcctcaatttctgttatttctgtcacttctctt

SEQ ID NO: 115700 - DNA, 76 bp, Homo sapiens
tctttgagcatgttttgagatttcgtattcttcctcaatttctgttatttctgtcacttctctttgtcgccttgat

SEQ ID NO: 115701 - DNA, 74 bp, Homo sapiens
gcatgttttgagatttcgtattcttcctcaatttctgttatttctgtcacttctctttgtcgccttgatttctt

SEQ ID NO: 115702 - DNA, 72 bp, Homo sapiens
ttcctcaatttctgttatttctgtcacttctctttgtcgccttgatttctttctagacttttcctcctttga

SEQ ID NO: 115703 - DNA, 74 bp, Homo sapiens
ttctgttatttctgtcacttctctttgtcgccttgatttctttctagacttttcctcctttgacatgaagtcaa

SEQ ID NO: 115704 - DNA, 73 bp, Homo sapiens
tgtcacttctctttgtcgccttgatttctttctagacttttcctcctttgacatgaagtcaagttcgcttttg

SEQ ID NO: 115705 - DNA, 72 bp, Homo sapiens
ttctctttgtcgccttgatttctttctagacttttcctcctttgacatgaagtcaagttcgcttttgtattc

SEQ ID NO: 115706 - DNA, 75 bp, Homo sapiens
ttgatttctttctagacttttcctcctttgacatgaagtcaagttcgcttttgtattctgagagatgctgggtgg

SEQ ID NO: 115707 - DNA, 75 bp, Homo sapiens
tctttctagacttttcctcctttgacatgaagtcaagttcgcttttgtattctgagagatgctgggtggtcgtaa

SEQ ID NO: 115708 - DNA, 76 bp, Homo sapiens
tttcctcctttgacatgaagtcaagttcgcttttgtattctgagagatgctgggtggtcgtaactgggcgaagcaa

SEQ ID NO: 115709 - DNA, 78 bp, Homo sapiens
ctttgacatgaagtcaagttcgcttttgtattctgagagatgctgggtggtcgtaactgggcgaagcaactcttcatc

SEQ ID NO: 115710 - DNA, 75 bp, Homo sapiens
aagtcaagttcgcttttgtattctgagagatgctgggtggtcgtaactgggcgaagcaactcttcatcctccctc

SEQ ID NO: 115711 - DNA, 80 bp, Homo sapiens
tttgtattctgagagatgctgggtggtcgtaactgggcgaagcaactcttcatcctccctctcagccatgattctttgcc

SEQ ID NO: 115712 - DNA, 78 bp, Homo sapiens
ggtggtcgtaactgggcgaagcaactcttcatcctccctctcagccatgattctttgccgttgctttggctgtctgta

SEQ ID NO: 115713 - DNA, 80 bp, Homo sapiens
tcgtaactgggcgaagcaactcttcatcctccctctcagccatgattctttgccgttgctttggctgtctgtacgcagcc

SEQ ID NO: 115714 - DNA, 81 bp, Homo sapiens
aagcaactcttcatcctccctctcagccatgattctttgccgttgctttggctgtctgtacgcagcctgggcatgccgttc

SEQ ID NO: 115715 - DNA, 81 bp, Homo sapiens
ttcatcctccctctcagccatgattctttgccgttgctttggctgtctgtacgcagcctgggcatgccgttccctcagttc

SEQ ID NO: 115716 - DNA, 78 bp, Homo sapiens
attctttgccgttgctttggctgtctgtacgcagcctgggcatgccgttccctcagttctgcataacttgtactagct

SEQ ID NO: 115717 - DNA, 80 bp, Homo sapiens
ttgctttggctgtctgtacgcagcctgggcatgccgttccctcagttctgcataacttgtactagcttcagccttcgttg

SEQ ID NO: 115718 - DNA, 79 bp, Homo sapiens
cagcctgggcatgccgttccctcagttctgcataacttgtactagcttcagccttcgttgggatgtgataggttgaata

SEQ ID NO: 115719 - DNA, 76 bp, Homo sapiens
atgccgttccctcagttctgcataacttgtactagcttcagccttcgttgggatgtgataggttgaatacctgaag

SEQ ID NO: 115720 - DNA, 75 bp, Homo sapiens
ttccctcagttctgcataacttgtactagcttcagccttcgttgggatgtgataggttgaatacctgaagtcttt

SEQ ID NO: 115721 - DNA, 75 bp, Homo sapiens
ttctgcataacttgtactagcttcagccttcgttgggatgtgataggttgaatacctgaagtcttttcttgtttc

SEQ ID NO: 115722 - DNA, 72 bp, Homo sapiens
ttgtactagcttcagccttcgttgggatgtgataggttgaatacctgaagtcttttcttgtttcctccacct

SEQ ID NO: 115723 - DNA, 75 bp, Homo sapiens
ttcagccttcgttgggatgtgataggttgaatacctgaagtcttttcttgtttcctccaccttgacatgagcttg

SEQ ID NO: 115724 - DNA, 76 bp, Homo sapiens
ttgggatgtgataggttgaatacctgaagtcttttcttgtttcctccaccttgacatgagcttgtggtgaagagta

SEQ ID NO: 115725 - DNA, 72 bp, Homo sapiens
ataggttgaatacctgaagtcttttcttgtttcctccaccttgacatgagcttgtggtgaagagtaacgtag

SEQ ID NO: 115726 - DNA, 72 bp, Homo sapiens
aatacctgaagtcttttcttgtttcctccaccttgacatgagcttgtggtgaagagtaacgtaggctagaaa

SEQ ID NO: 115727 - DNA, 75 bp, Homo sapiens
ttcctccaccttgacatgagcttgtggtgaagagtaacgtaggctagaaagctcaaagtgtggagggcttcgact

SEQ ID NO: 115728 - DNA, 72 bp, Homo sapiens
ttgtggtgaagagtaacgtaggctagaaagctcaaagtgtggagggcttcgacttgggggtgaagctgaaaa

SEQ ID NO: 115729 - DNA, 69 bp, Homo sapiens
aagagtaacgtaggctagaaagctcaaagtgtggagggcttcgacttgggggtgaagctgaaaaaccta

SEQ ID NO: 115730 - DNA, 72 bp, Homo sapiens
ctagaaagctcaaagtgtggagggcttcgacttgggggtgaagctgaaaaacctaactcaagctcttcttca

SEQ ID NO: 115731 - DNA, 71 bp, Homo sapiens
aagctcaaagtgtggagggcttcgacttgggggtgaagctgaaaaacctaactcaagctcttcttcaagac

SEQ ID NO: 115732 - DNA, 71 bp, Homo sapiens
acttgggggtgaagctgaaaaacctaactcaagctcttcttcaagacgcagcctctcttcctctgttcttt

SEQ ID NO: 115733 - DNA, 74 bp, Homo sapiens
aagctgaaaaacctaactcaagctcttcttcaagacgcagcctctcttcctctgttcttttcattgctaagtag

SEQ ID NO: 115734 - DNA, 76 bp, Homo sapiens
aagctcttcttcaagacgcagcctctcttcctctgttcttttcattgctaagtagtcatcaatggggaggagtaat

SEQ ID NO: 115735 - DNA, 79 bp, Homo sapiens
ttcttcaagacgcagcctctcttcctctgttcttttcattgctaagtagtcatcaatggggaggagtaattcttcatca

SEQ ID NO: 115736 - DNA, 79 bp, Homo sapiens
cgcagcctctcttcctctgttcttttcattgctaagtagtcatcaatggggaggagtaattcttcatcagagatgtccc

SEQ ID NO: 115737 - DNA, 77 bp, Homo sapiens
tctgttcttttcattgctaagtagtcatcaatggggaggagtaattcttcatcagagatgtccccaagagaacgtct

SEQ ID NO: 115738 - DNA, 76 bp, Homo sapiens
ttttcattgctaagtagtcatcaatggggaggagtaattcttcatcagagatgtccccaagagaacgtcttctagg

SEQ ID NO: 115739 - DNA, 75 bp, Homo sapiens
taagtagtcatcaatggggaggagtaattcttcatcagagatgtccccaagagaacgtcttctaggtcggtagta

SEQ ID NO: 115740 - DNA, 72 bp, Homo sapiens
aatggggaggagtaattcttcatcagagatgtccccaagagaacgtcttctaggtcggtagtaaaagtcata

SEQ ID NO: 115741 - DNA, 74 bp, Homo sapiens
ttcatcagagatgtccccaagagaacgtcttctaggtcggtagtaaaagtcataatcaggagaaggtgtacgcc

SEQ ID NO: 115742 - DNA, 70 bp, Homo sapiens
agatgtccccaagagaacgtcttctaggtcggtagtaaaagtcataatcaggagaaggtgtacgccggcg

SEQ ID NO: 115743 - DNA, 71 bp, Homo sapiens
aagagaacgtcttctaggtcggtagtaaaagtcataatcaggagaaggtgtacgccggcgggctggtctca

SEQ ID NO: 115744 - DNA, 76 bp, Homo sapiens
ttctaggtcggtagtaaaagtcataatcaggagaaggtgtacgccggcgggctggtctcactatctcaagatcatc

SEQ ID NO: 115745 - DNA, 76 bp, Homo sapiens
gtaaaagtcataatcaggagaaggtgtacgccggcgggctggtctcactatctcaagatcatcttgggacagttta

SEQ ID NO: 115746 - DNA, 77 bp, Homo sapiens
gtcataatcaggagaaggtgtacgccggcgggctggtctcactatctcaagatcatcttgggacagtttaggaatac

SEQ ID NO: 115747 - DNA, 78 bp, Homo sapiens
cggcgggctggtctcactatctcaagatcatcttgggacagtttaggaatacgccatttaggtctgtattgatctgta

SEQ ID NO: 115748 - DNA, 80 bp, Homo sapiens
gtctcactatctcaagatcatcttgggacagtttaggaatacgccatttaggtctgtattgatctgtaatgcgtggaaga

SEQ ID NO: 115749 - DNA, 79 bp, Homo sapiens
atcatcttgggacagtttaggaatacgccatttaggtctgtattgatctgtaatgcgtggaagaggcatcacatagaac

SEQ ID NO: 115750 - DNA, 78 bp, Homo sapiens
aatacgccatttaggtctgtattgatctgtaatgcgtggaagaggcatcacatagaactgttcccatcttgaaaggcg

SEQ ID NO: 115751 - DNA, 80 bp, Homo sapiens
atttaggtctgtattgatctgtaatgcgtggaagaggcatcacatagaactgttcccatcttgaaaggcggatgcgcttg

SEQ ID NO: 115752 - DNA, 80 bp, Homo sapiens
ttgatctgtaatgcgtggaagaggcatcacatagaactgttcccatcttgaaaggcggatgcgcttgggtcgtttctgta

SEQ ID NO: 115753 - DNA, 78 bp, Homo sapiens
taatgcgtggaagaggcatcacatagaactgttcccatcttgaaaggcggatgcgcttgggtcgtttctgtacaactc

SEQ ID NO: 115754 - DNA, 76 bp, Homo sapiens
agaggcatcacatagaactgttcccatcttgaaaggcggatgcgcttgggtcgtttctgtacaactctgtcaagtt

SEQ ID NO: 115755 - DNA, 73 bp, Homo sapiens
acatagaactgttcccatcttgaaaggcggatgcgcttgggtcgtttctgtacaactctgtcaagtttcccag

SEQ ID NO: 115756 - DNA, 76 bp, Homo sapiens
ttcccatcttgaaaggcggatgcgcttgggtcgtttctgtacaactctgtcaagtttcccaggcatttcatactga

SEQ ID NO: 115757 - DNA, 75 bp, Homo sapiens
aaaggcggatgcgcttgggtcgtttctgtacaactctgtcaagtttcccaggcatttcatactgatcacgtatct

SEQ ID NO: 115758 - DNA, 75 bp, Homo sapiens
atgcgcttgggtcgtttctgtacaactctgtcaagtttcccaggcatttcatactgatcacgtatctttttatac

SEQ ID NO: 115759 - DNA, 79 bp, Homo sapiens
tttctgtacaactctgtcaagtttcccaggcatttcatactgatcacgtatctttttataccacttcatgtcagacatg

SEQ ID NO: 115760 - DNA, 78 bp, Homo sapiens
aactctgtcaagtttcccaggcatttcatactgatcacgtatctttttataccacttcatgtcagacatgggcacgaa

SEQ ID NO: 115761 - DNA, 80 bp, Homo sapiens
atctttttataccacttcatgtcagacatgggcacgaactgcttgatgcgttggtcttcttctatggtagtctgcttata

SEQ ID NO: 115762 - DNA, 84 bp, Homo sapiens
tcagacatgggcacgaactgcttgatgcgttggtcttcttctatggtagtctgcttatacttgcgtggctctggtacatcataa

SEQ ID NO: 115763 - DNA, 82 bp, Homo sapiens
atgggcacgaactgcttgatgcgttggtcttcttctatggtagtctgcttatacttgcgtggctctggtacatcataaggca

SEQ ID NO: 115764 - DNA, 78 bp, Homo sapiens
cttgatgcgttggtcttcttctatggtagtctgcttatacttgcgtggctctggtacatcataaggcatccggagttt

SEQ ID NO: 115765 - DNA, 77 bp, Homo sapiens
cgttggtcttcttctatggtagtctgcttatacttgcgtggctctggtacatcataaggcatccggagttttctctc

SEQ ID NO: 115766 - DNA, 77 bp, Homo sapiens
ttcttctatggtagtctgcttatacttgcgtggctctggtacatcataaggcatccggagttttctctcctccttct

SEQ ID NO: 115767 - DNA, 76 bp, Homo sapiens
gtagtctgcttatacttgcgtggctctggtacatcataaggcatccggagttttctctcctccttcttttcttcta

SEQ ID NO: 115768 - DNA, 73 bp, Homo sapiens
tctggtacatcataaggcatccggagttttctctcctccttcttttcttctatctcaagtctgaattcccctt

SEQ ID NO: 115769 - DNA, 72 bp, Homo sapiens
acatcataaggcatccggagttttctctcctccttcttttcttctatctcaagtctgaattccccttttaca

SEQ ID NO: 115770 - DNA, 70 bp, Homo sapiens
cggagttttctctcctccttcttttcttctatctcaagtctgaattccccttttacagtcttggtgctta

SEQ ID NO: 115771 - DNA, 71 bp, Homo sapiens
tctcctccttcttttcttctatctcaagtctgaattccccttttacagtcttggtgcttacagccggttta

SEQ ID NO: 115772 - DNA, 70 bp, Homo sapiens
cttttcttctatctcaagtctgaattccccttttacagtcttggtgcttacagccggtttataaaggaca

SEQ ID NO: 115773 - DNA, 74 bp, Homo sapiens
ttctatctcaagtctgaattccccttttacagtcttggtgcttacagccggtttataaaggacagcagcttctc

SEQ ID NO: 115774 - DNA, 74 bp, Homo sapiens
tgaattccccttttacagtcttggtgcttacagccggtttataaaggacagcagcttctctcagagcctcttta

SEQ ID NO: 115775 - DNA, 77 bp, Homo sapiens
ttttacagtcttggtgcttacagccggtttataaaggacagcagcttctctcagagcctctttagctacctgtgtca

SEQ ID NO: 115776 - DNA, 77 bp, Homo sapiens
ttggtgcttacagccggtttataaaggacagcagcttctctcagagcctctttagctacctgtgtcagtggtacact

SEQ ID NO: 115777 - DNA, 76 bp, Homo sapiens
ttacagccggtttataaaggacagcagcttctctcagagcctctttagctacctgtgtcagtggtacactttcagt

SEQ ID NO: 115778 - DNA, 77 bp, Homo sapiens
tttataaaggacagcagcttctctcagagcctctttagctacctgtgtcagtggtacactttcagttccagaaagaa

SEQ ID NO: 115779 - DNA, 73 bp, Homo sapiens
tttagctacctgtgtcagtggtacactttcagttccagaaagaatttcagccattctgagggttttgtcaatt

SEQ ID NO: 115780 - DNA, 73 bp, Homo sapiens
tgtgtcagtggtacactttcagttccagaaagaatttcagccattctgagggttttgtcaatttgtttttgta

SEQ ID NO: 115781 - DNA, 69 bp, Homo sapiens
agtggtacactttcagttccagaaagaatttcagccattctgagggttttgtcaatttgtttttgtacg

SEQ ID NO: 115782 - DNA, 72 bp, Homo sapiens
aaagaatttcagccattctgagggttttgtcaatttgtttttgtacgtgtcgctcatgctcctccttactct

SEQ ID NO: 115783 - DNA, 72 bp, Homo sapiens
ccattctgagggttttgtcaatttgtttttgtacgtgtcgctcatgctcctccttactcttgaattcctgtt

SEQ ID NO: 115784 - DNA, 72 bp, Homo sapiens
aatttgtttttgtacgtgtcgctcatgctcctccttactcttgaattcctgtttcttgtacctcaggcgttc

SEQ ID NO: 115785 - DNA, 74 bp, Homo sapiens
tttttgtacgtgtcgctcatgctcctccttactcttgaattcctgtttcttgtacctcaggcgttccacttgta

SEQ ID NO: 115786 - DNA, 79 bp, Homo sapiens
tgtcgctcatgctcctccttactcttgaattcctgtttcttgtacctcaggcgttccacttgtaggtgagcctggcagc

SEQ ID NO: 115787 - DNA, 75 bp, Homo sapiens
tccttactcttgaattcctgtttcttgtacctcaggcgttccacttgtaggtgagcctggcagctggtggaccca

SEQ ID NO: 115788 - DNA, 77 bp, Homo sapiens
tcttgaattcctgtttcttgtacctcaggcgttccacttgtaggtgagcctggcagctggtggacccagctgtgtta

SEQ ID NO: 115789 - DNA, 79 bp, Homo sapiens
tttcttgtacctcaggcgttccacttgtaggtgagcctggcagctggtggacccagctgtgttagtggctgtgactcta

SEQ ID NO: 115790 - DNA, 80 bp, Homo sapiens
tgtacctcaggcgttccacttgtaggtgagcctggcagctggtggacccagctgtgttagtggctgtgactctataataa

SEQ ID NO: 115791 - DNA, 79 bp, Homo sapiens
tgtaggtgagcctggcagctggtggacccagctgtgttagtggctgtgactctataataacccgtgtcttcaggcaaag

SEQ ID NO: 115792 - DNA, 80 bp, Homo sapiens
acccagctgtgttagtggctgtgactctataataacccgtgtcttcaggcaaagtgtccctgatgtgcagagcataataa

SEQ ID NO: 115793 - DNA, 81 bp, Homo sapiens
tgtgactctataataacccgtgtcttcaggcaaagtgtccctgatgtgcagagcataataatccaagccttcatggataat

SEQ ID NO: 115794 - DNA, 80 bp, Homo sapiens
tgtcttcaggcaaagtgtccctgatgtgcagagcataataatccaagccttcatggataatttcaatgttaggcccgagg

SEQ ID NO: 115795 - DNA, 78 bp, Homo sapiens
aaagtgtccctgatgtgcagagcataataatccaagccttcatggataatttcaatgttaggcccgagggacagtggc

SEQ ID NO: 115796 - DNA, 81 bp, Homo sapiens
ctgatgtgcagagcataataatccaagccttcatggataatttcaatgttaggcccgagggacagtggctgaccatctttc

SEQ ID NO: 115797 - DNA, 77 bp, Homo sapiens
agagcataataatccaagccttcatggataatttcaatgttaggcccgagggacagtggctgaccatctttctccca

SEQ ID NO: 115798 - DNA, 73 bp, Homo sapiens
aataatccaagccttcatggataatttcaatgttaggcccgagggacagtggctgaccatctttctcccattt

SEQ ID NO: 115799 - DNA, 70 bp, Homo sapiens
ataatttcaatgttaggcccgagggacagtggctgaccatctttctcccattttaatgttggtgggggga

SEQ ID NO: 115800 - DNA, 75 bp, Homo sapiens
tgttaggcccgagggacagtggctgaccatctttctcccattttaatgttggtggggggatgccagacactctga

SEQ ID NO: 115801 - DNA, 77 bp, Homo sapiens
acagtggctgaccatctttctcccattttaatgttggtggggggatgccagacactctgatctcaaagcagacactt

SEQ ID NO: 115802 - DNA, 80 bp, Homo sapiens
ttttaatgttggtggggggatgccagacactctgatctcaaagcagacactttggccttcttggcattctgcatttgcca

SEQ ID NO: 115803 - DNA, 80 bp, Homo sapiens
ggggatgccagacactctgatctcaaagcagacactttggccttcttggcattctgcatttgccagtaaccttttgaaca

SEQ ID NO: 115804 - DNA, 79 bp, Homo sapiens
gacactctgatctcaaagcagacactttggccttcttggcattctgcatttgccagtaaccttttgaacatgggtctta

SEQ ID NO: 115805 - DNA, 75 bp, Homo sapiens
atctcaaagcagacactttggccttcttggcattctgcatttgccagtaaccttttgaacatgggtcttaaggta

SEQ ID NO: 115806 - DNA, 73 bp, Homo sapiens
agacactttggccttcttggcattctgcatttgccagtaaccttttgaacatgggtcttaaggtactatctgt

SEQ ID NO: 115807 - DNA, 70 bp, Homo sapiens
attctgcatttgccagtaaccttttgaacatgggtcttaaggtactatctgttggaggtgggtgtagggt

SEQ ID NO: 115808 - DNA, 68 bp, Homo sapiens
atttgccagtaaccttttgaacatgggtcttaaggtactatctgttggaggtgggtgtagggttactg

SEQ ID NO: 115809 - DNA, 71 bp, Homo sapiens
cttttgaacatgggtcttaaggtactatctgttggaggtgggtgtagggttactgtcagctttgctttaca

SEQ ID NO: 115810 - DNA, 72 bp, Homo sapiens
aacatgggtcttaaggtactatctgttggaggtgggtgtagggttactgtcagctttgctttacagctgtct

SEQ ID NO: 115811 - DNA, 77 bp, Homo sapiens
tatctgttggaggtgggtgtagggttactgtcagctttgctttacagctgtcttcaccatatttgttccttgccaca

SEQ ID NO: 115812 - DNA, 77 bp, Homo sapiens
gtgggtgtagggttactgtcagctttgctttacagctgtcttcaccatatttgttccttgccacaacagtatattca

SEQ ID NO: 115813 - DNA, 84 bp, Homo sapiens
ttactgtcagctttgctttacagctgtcttcaccatatttgttccttgccacaacagtatattcagcgtcatcatctgtagtga

SEQ ID NO: 115814 - DNA, 83 bp, Homo sapiens
tttgctttacagctgtcttcaccatatttgttccttgccacaacagtatattcagcgtcatcatctgtagtgacactgttgat

SEQ ID NO: 115815 - DNA, 83 bp, Homo sapiens
tacagctgtcttcaccatatttgttccttgccacaacagtatattcagcgtcatcatctgtagtgacactgttgattgttaat

SEQ ID NO: 115816 - DNA, 79 bp, Homo sapiens
accatatttgttccttgccacaacagtatattcagcgtcatcatctgtagtgacactgttgattgttaattggtaaaga

SEQ ID NO: 115817 - DNA, 77 bp, Homo sapiens
tttgttccttgccacaacagtatattcagcgtcatcatctgtagtgacactgttgattgttaattggtaaagaccct

SEQ ID NO: 115818 - DNA, 79 bp, Homo sapiens
acaacagtatattcagcgtcatcatctgtagtgacactgttgattgttaattggtaaagacccttgtctgactcaaatg

SEQ ID NO: 115819 - DNA, 79 bp, Homo sapiens
gtatattcagcgtcatcatctgtagtgacactgttgattgttaattggtaaagacccttgtctgactcaaatgtgtact

SEQ ID NO: 115820 - DNA, 79 bp, Homo sapiens
atcatctgtagtgacactgttgattgttaattggtaaagacccttgtctgactcaaatgtgtacttcttgtcattgtca

SEQ ID NO: 115821 - DNA, 73 bp, Homo sapiens
ttgattgttaattggtaaagacccttgtctgactcaaatgtgtacttcttgtcattgtcacctggtttgattt

SEQ ID NO: 115822 - DNA, 73 bp, Homo sapiens
ttaattggtaaagacccttgtctgactcaaatgtgtacttcttgtcattgtcacctggtttgattttctgacc

SEQ ID NO: 115823 - DNA, 78 bp, Homo sapiens
actcaaatgtgtacttcttgtcattgtcacctggtttgattttctgacctgatttataccatgttacatgaggctctg

SEQ ID NO: 115824 - DNA, 78 bp, Homo sapiens
atgtgtacttcttgtcattgtcacctggtttgattttctgacctgatttataccatgttacatgaggctctgggtgga

SEQ ID NO: 115825 - DNA, 78 bp, Homo sapiens
tgtcattgtcacctggtttgattttctgacctgatttataccatgttacatgaggctctgggtggacagttatagtta

SEQ ID NO: 115826 - DNA, 74 bp, Homo sapiens
tggtttgattttctgacctgatttataccatgttacatgaggctctgggtggacagttatagttactccaaacc

SEQ ID NO: 115827 - DNA, 73 bp, Homo sapiens
tttctgacctgatttataccatgttacatgaggctctgggtggacagttatagttactccaaaccggacattt

SEQ ID NO: 115828 - DNA, 73 bp, Homo sapiens
atttataccatgttacatgaggctctgggtggacagttatagttactccaaaccggacattttcacctacata

SEQ ID NO: 115829 - DNA, 73 bp, Homo sapiens
aggctctgggtggacagttatagttactccaaaccggacattttcacctacataagctgtcttattatagaga

SEQ ID NO: 115830 - DNA, 73 bp, Homo sapiens
tggacagttatagttactccaaaccggacattttcacctacataagctgtcttattatagagaggcagggtaa

SEQ ID NO: 115831 - DNA, 71 bp, Homo sapiens
aaaccggacattttcacctacataagctgtcttattatagagaggcagggtaaattctggtggcctttcca

SEQ ID NO: 115832 - DNA, 74 bp, Homo sapiens
attttcacctacataagctgtcttattatagagaggcagggtaaattctggtggcctttccaggagtctcattg

SEQ ID NO: 115833 - DNA, 76 bp, Homo sapiens
cctacataagctgtcttattatagagaggcagggtaaattctggtggcctttccaggagtctcattgtgtctgttc

SEQ ID NO: 115834 - DNA, 75 bp, Homo sapiens
ttattatagagaggcagggtaaattctggtggcctttccaggagtctcattgtgtctgttctgcgcttaattttc

SEQ ID NO: 115835 - DNA, 76 bp, Homo sapiens
atagagaggcagggtaaattctggtggcctttccaggagtctcattgtgtctgttctgcgcttaattttcttcatg

SEQ ID NO: 115836 - DNA, 76 bp, Homo sapiens
taaattctggtggcctttccaggagtctcattgtgtctgttctgcgcttaattttcttcatggttctacggcagta

SEQ ID NO: 115837 - DNA, 78 bp, Homo sapiens
tggcctttccaggagtctcattgtgtctgttctgcgcttaattttcttcatggttctacggcagtaatagtcatagac

SEQ ID NO: 115838 - DNA, 80 bp, Homo sapiens
ttccaggagtctcattgtgtctgttctgcgcttaattttcttcatggttctacggcagtaatagtcatagacttctctca

SEQ ID NO: 115839 - DNA, 76 bp, Homo sapiens
attgtgtctgttctgcgcttaattttcttcatggttctacggcagtaatagtcatagacttctctcacacctttaa

SEQ ID NO: 115840 - DNA, 75 bp, Homo sapiens
ctgttctgcgcttaattttcttcatggttctacggcagtaatagtcatagacttctctcacacctttaacaaata

SEQ ID NO: 115841 - DNA, 76 bp, Homo sapiens
aattttcttcatggttctacggcagtaatagtcatagacttctctcacacctttaacaaatagctctgcataagaa

SEQ ID NO: 115842 - DNA, 79 bp, Homo sapiens
ttcatggttctacggcagtaatagtcatagacttctctcacacctttaacaaatagctctgcataagaactgtcttcac

SEQ ID NO: 115843 - DNA, 80 bp, Homo sapiens
cagtaatagtcatagacttctctcacacctttaacaaatagctctgcataagaactgtcttcaccatagtcattgactac

SEQ ID NO: 115844 - DNA, 81 bp, Homo sapiens
atagtcatagacttctctcacacctttaacaaatagctctgcataagaactgtcttcaccatagtcattgactactttgca

SEQ ID NO: 115845 - DNA, 80 bp, Homo sapiens
tttaacaaatagctctgcataagaactgtcttcaccatagtcattgactactttgcatctgtaggtaccatcatctaatt

SEQ ID NO: 115846 - DNA, 80 bp, Homo sapiens
aaatagctctgcataagaactgtcttcaccatagtcattgactactttgcatctgtaggtaccatcatctaatttggtaa

SEQ ID NO: 115847 - DNA, 80 bp, Homo sapiens
taagaactgtcttcaccatagtcattgactactttgcatctgtaggtaccatcatctaatttggtaatgtctttgacata

SEQ ID NO: 115848 - DNA, 82 bp, Homo sapiens
tcttcaccatagtcattgactactttgcatctgtaggtaccatcatctaatttggtaatgtctttgacatagaggatggcca

SEQ ID NO: 115849 - DNA, 81 bp, Homo sapiens
atagtcattgactactttgcatctgtaggtaccatcatctaatttggtaatgtctttgacatagaggatggccactccatc

SEQ ID NO: 115850 - DNA, 79 bp, Homo sapiens
tttgcatctgtaggtaccatcatctaatttggtaatgtctttgacatagaggatggccactccatcttcgtaggtgatt

SEQ ID NO: 115851 - DNA, 76 bp, Homo sapiens
taggtaccatcatctaatttggtaatgtctttgacatagaggatggccactccatcttcgtaggtgatttcgtatt

SEQ ID NO: 115852 - DNA, 77 bp, Homo sapiens
atcatctaatttggtaatgtctttgacatagaggatggccactccatcttcgtaggtgatttcgtatttctcactgt

SEQ ID NO: 115853 - DNA, 76 bp, Homo sapiens
aatttggtaatgtctttgacatagaggatggccactccatcttcgtaggtgatttcgtatttctcactgttctcca

SEQ ID NO: 115854 - DNA, 78 bp, Homo sapiens
tttgacatagaggatggccactccatcttcgtaggtgatttcgtatttctcactgttctccagctgtcggacgccaaa

SEQ ID NO: 115855 - DNA, 76 bp, Homo sapiens
atagaggatggccactccatcttcgtaggtgatttcgtatttctcactgttctccagctgtcggacgccaaagtac

SEQ ID NO: 115856 - DNA, 74 bp, Homo sapiens
actccatcttcgtaggtgatttcgtatttctcactgttctccagctgtcggacgccaaagtaccaagtcacttg

SEQ ID NO: 115857 - DNA, 77 bp, Homo sapiens
taggtgatttcgtatttctcactgttctccagctgtcggacgccaaagtaccaagtcacttgggtagactgatcata

SEQ ID NO: 115858 - DNA, 74 bp, Homo sapiens
tttcgtatttctcactgttctccagctgtcggacgccaaagtaccaagtcacttgggtagactgatcataattt

SEQ ID NO: 115859 - DNA, 76 bp, Homo sapiens
actgttctccagctgtcggacgccaaagtaccaagtcacttgggtagactgatcataattttcaattttgcataca

SEQ ID NO: 115860 - DNA, 77 bp, Homo sapiens
agctgtcggacgccaaagtaccaagtcacttgggtagactgatcataattttcaattttgcatacatatttgacatg

SEQ ID NO: 115861 - DNA, 75 bp, Homo sapiens
acgccaaagtaccaagtcacttgggtagactgatcataattttcaattttgcatacatatttgacatgtcctcct

SEQ ID NO: 115862 - DNA, 76 bp, Homo sapiens
aagtaccaagtcacttgggtagactgatcataattttcaattttgcatacatatttgacatgtcctccttcttcac

SEQ ID NO: 115863 - DNA, 81 bp, Homo sapiens
acttgggtagactgatcataattttcaattttgcatacatatttgacatgtcctccttcttcaccaactgcatgcattatc

SEQ ID NO: 115864 - DNA, 82 bp, Homo sapiens
ttttgcatacatatttgacatgtcctccttcttcaccaactgcatgcattatctgcccagaaactgggccaatttcaatgga

SEQ ID NO: 115865 - DNA, 81 bp, Homo sapiens
tatttgacatgtcctccttcttcaccaactgcatgcattatctgcccagaaactgggccaatttcaatggatgccacttta

SEQ ID NO: 115866 - DNA, 79 bp, Homo sapiens
tccttcttcaccaactgcatgcattatctgcccagaaactgggccaatttcaatggatgccactttaactttagcaaca

SEQ ID NO: 115867 - DNA, 80 bp, Homo sapiens
ttcaccaactgcatgcattatctgcccagaaactgggccaatttcaatggatgccactttaactttagcaacactcactc

SEQ ID NO: 115868 - DNA, 78 bp, Homo sapiens
atgcattatctgcccagaaactgggccaatttcaatggatgccactttaactttagcaacactcactcccttctgaga

SEQ ID NO: 115869 - DNA, 76 bp, Homo sapiens
cccagaaactgggccaatttcaatggatgccactttaactttagcaacactcactcccttctgagatcgaattgca

SEQ ID NO: 115870 - DNA, 75 bp, Homo sapiens
aaactgggccaatttcaatggatgccactttaactttagcaacactcactcccttctgagatcgaattgcaccac

SEQ ID NO: 115871 - DNA, 77 bp, Homo sapiens
aatttcaatggatgccactttaactttagcaacactcactcccttctgagatcgaattgcaccaccacaggagatcc

SEQ ID NO: 115872 - DNA, 78 bp, Homo sapiens
cactttaactttagcaacactcactcccttctgagatcgaattgcaccaccacaggagatccgggctgctgacacaac

SEQ ID NO: 115873 - DNA, 81 bp, Homo sapiens
taactttagcaacactcactcccttctgagatcgaattgcaccaccacaggagatccgggctgctgacacaaccatgttga

SEQ ID NO: 115874 - DNA, 80 bp, Homo sapiens
actcactcccttctgagatcgaattgcaccaccacaggagatccgggctgctgacacaaccatgttgaggtctttcttga

SEQ ID NO: 115875 - DNA, 77 bp, Homo sapiens
aattgcaccaccacaggagatccgggctgctgacacaaccatgttgaggtctttcttgatcagggtgtggtaataac

SEQ ID NO: 115876 - DNA, 75 bp, Homo sapiens
cacaggagatccgggctgctgacacaaccatgttgaggtctttcttgatcagggtgtggtaataacgccggtgtt

SEQ ID NO: 115877 - DNA, 73 bp, Homo sapiens
tccgggctgctgacacaaccatgttgaggtctttcttgatcagggtgtggtaataacgccggtgttttaatgt

SEQ ID NO: 115878 - DNA, 73 bp, Homo sapiens
tgacacaaccatgttgaggtctttcttgatcagggtgtggtaataacgccggtgttttaatgttctgataact

SEQ ID NO: 115879 - DNA, 71 bp, Homo sapiens
tttcttgatcagggtgtggtaataacgccggtgttttaatgttctgataactttagtactgactctttcta

SEQ ID NO: 115880 - DNA, 70 bp, Homo sapiens
agggtgtggtaataacgccggtgttttaatgttctgataactttagtactgactctttctatcttctgct

SEQ ID NO: 115881 - DNA, 73 bp, Homo sapiens
tggtaataacgccggtgttttaatgttctgataactttagtactgactctttctatcttctgcttcaaccatg

SEQ ID NO: 115882 - DNA, 75 bp, Homo sapiens
cgccggtgttttaatgttctgataactttagtactgactctttctatcttctgcttcaaccatgggtgctggaga

SEQ ID NO: 115883 - DNA, 81 bp, Homo sapiens
ttaatgttctgataactttagtactgactctttctatcttctgcttcaaccatgggtgctggagagcctccgatgctgtca

SEQ ID NO: 115884 - DNA, 81 bp, Homo sapiens
ataactttagtactgactctttctatcttctgcttcaaccatgggtgctggagagcctccgatgctgtcatgcgagatttc

SEQ ID NO: 115885 - DNA, 84 bp, Homo sapiens
tactgactctttctatcttctgcttcaaccatgggtgctggagagcctccgatgctgtcatgcgagatttcctctctttcacta

SEQ ID NO: 115886 - DNA, 81 bp, Homo sapiens
tttctatcttctgcttcaaccatgggtgctggagagcctccgatgctgtcatgcgagatttcctctctttcactaacaacc

SEQ ID NO: 115887 - DNA, 78 bp, Homo sapiens
ttcaaccatgggtgctggagagcctccgatgctgtcatgcgagatttcctctctttcactaacaaccggtcaacaaaa

SEQ ID NO: 115888 - DNA, 80 bp, Homo sapiens
gtgctggagagcctccgatgctgtcatgcgagatttcctctctttcactaacaaccggtcaacaaaatccatggcttcaa

SEQ ID NO: 115889 - DNA, 79 bp, Homo sapiens
agagcctccgatgctgtcatgcgagatttcctctctttcactaacaaccggtcaacaaaatccatggcttcaatgctaa

SEQ ID NO: 115890 - DNA, 76 bp, Homo sapiens
agatttcctctctttcactaacaaccggtcaacaaaatccatggcttcaatgctaatctctttgaatgcttcctca

SEQ ID NO: 115891 - DNA, 80 bp, Homo sapiens
taacaaccggtcaacaaaatccatggcttcaatgctaatctctttgaatgcttcctcatcgaaagtatattcagcattca

SEQ ID NO: 115892 - DNA, 85 bp, Homo sapiens
aacaaaatccatggcttcaatgctaatctctttgaatgcttcctcatcgaaagtatattcagcattcatgatattctcaatgatc

SEQ ID NO: 115893 - DNA, 85 bp, Homo sapiens
atggcttcaatgctaatctctttgaatgcttcctcatcgaaagtatattcagcattcatgatattctcaatgatctgttggttag

SEQ ID NO: 115894 - DNA, 85 bp, Homo sapiens
ttcaatgctaatctctttgaatgcttcctcatcgaaagtatattcagcattcatgatattctcaatgatctgttggttagtttca

SEQ ID NO: 115895 - DNA, 83 bp, Homo sapiens
atctctttgaatgcttcctcatcgaaagtatattcagcattcatgatattctcaatgatctgttggttagtttcagccaggaa

SEQ ID NO: 115896 - DNA, 83 bp, Homo sapiens
atgcttcctcatcgaaagtatattcagcattcatgatattctcaatgatctgttggttagtttcagccaggaatgggttgata

SEQ ID NO: 115897 - DNA, 78 bp, Homo sapiens
aatgatctgttggttagtttcagccaggaatgggttgataccactcaatagcacatataccagtgttccaagtgacca

SEQ ID NO: 115898 - DNA, 86 bp, Homo sapiens
aatgggttgataccactcaatagcacatataccagtgttccaagtgaccacatgtctgtggctgtgctgacaacatcatgctggtg

SEQ ID NO: 115899 - DNA, 86 bp, Homo sapiens
ataccactcaatagcacatataccagtgttccaagtgaccacatgtctgtggctgtgctgacaacatcatgctggtggacttcagg

SEQ ID NO: 115900 - DNA, 88 bp, Homo sapiens
atagcacatataccagtgttccaagtgaccacatgtctgtggctgtgctgacaacatcatgctggtggacttcaggtgcatagtattc

SEQ ID NO: 115901 - DNA, 87 bp, Homo sapiens
gtgttccaagtgaccacatgtctgtggctgtgctgacaacatcatgctggtggacttcaggtgcatagtattctggggcagtgaata

SEQ ID NO: 115902 - DNA, 86 bp, Homo sapiens
aagtgaccacatgtctgtggctgtgctgacaacatcatgctggtggacttcaggtgcatagtattctggggcagtgaatagaagcc

SEQ ID NO: 115903 - DNA, 86 bp, Homo sapiens
atgtctgtggctgtgctgacaacatcatgctggtggacttcaggtgcatagtattctggggcagtgaatagaagcctgaagttgtc

SEQ ID NO: 115904 - DNA, 81 bp, Homo sapiens
tgctgacaacatcatgctggtggacttcaggtgcatagtattctggggcagtgaatagaagcctgaagttgtcccctggtt

SEQ ID NO: 115905 - DNA, 78 bp, Homo sapiens
tggacttcaggtgcatagtattctggggcagtgaatagaagcctgaagttgtcccctggtttcagctgacgggcttga

SEQ ID NO: 115906 - DNA, 75 bp, Homo sapiens
tattctggggcagtgaatagaagcctgaagttgtcccctggtttcagctgacgggcttgaccaaattctatgatt

SEQ ID NO: 115907 - DNA, 72 bp, Homo sapiens
aagcctgaagttgtcccctggtttcagctgacgggcttgaccaaattctatgattttaatggtagagcttct

SEQ ID NO: 115908 - DNA, 71 bp, Homo sapiens
aagttgtcccctggtttcagctgacgggcttgaccaaattctatgattttaatggtagagcttcttctggt

SEQ ID NO: 115909 - DNA, 72 bp, Homo sapiens
gggcttgaccaaattctatgattttaatggtagagcttcttctggtttggtaaatgatattttctggtctaa

SEQ ID NO: 115910 - DNA, 72 bp, Homo sapiens
ccaaattctatgattttaatggtagagcttcttctggtttggtaaatgatattttctggtctaatgtcaaag

SEQ ID NO: 115911 - DNA, 74 bp, Homo sapiens
ctatgattttaatggtagagcttcttctggtttggtaaatgatattttctggtctaatgtcaaagtgtccaata

SEQ ID NO: 115912 - DNA, 76 bp, Homo sapiens
atggtagagcttcttctggtttggtaaatgatattttctggtctaatgtcaaagtgtccaatattatgactgtgta

SEQ ID NO: 115913 - DNA, 75 bp, Homo sapiens
tctggtttggtaaatgatattttctggtctaatgtcaaagtgtccaatattatgactgtgtaaaaactgaagtgc

SEQ ID NO: 115914 - DNA, 76 bp, Homo sapiens
gtaaatgatattttctggtctaatgtcaaagtgtccaatattatgactgtgtaaaaactgaagtgcttcacagacc

SEQ ID NO: 115915 - DNA, 77 bp, Homo sapiens
tttctggtctaatgtcaaagtgtccaatattatgactgtgtaaaaactgaagtgcttcacagacctggtgaacataa

SEQ ID NO: 115916 - DNA, 76 bp, Homo sapiens
taatgtcaaagtgtccaatattatgactgtgtaaaaactgaagtgcttcacagacctggtgaacataacttacaat

SEQ ID NO: 115917 - DNA, 74 bp, Homo sapiens
aaagtgtccaatattatgactgtgtaaaaactgaagtgcttcacagacctggtgaacataacttacaatttctc

SEQ ID NO: 115918 - DNA, 75 bp, Homo sapiens
ttatgactgtgtaaaaactgaagtgcttcacagacctggtgaacataacttacaatttctctttcattaagttca

SEQ ID NO: 115919 - DNA, 72 bp, Homo sapiens
gtaaaaactgaagtgcttcacagacctggtgaacataacttacaatttctctttcattaagttcaaaagcac

SEQ ID NO: 115920 - DNA, 74 bp, Homo sapiens
aagtgcttcacagacctggtgaacataacttacaatttctctttcattaagttcaaaagcacttgtgttaatgc

SEQ ID NO: 115921 - DNA, 75 bp, Homo sapiens
ggtgaacataacttacaatttctctttcattaagttcaaaagcacttgtgttaatgcgctcaaatatgtcaagtc

SEQ ID NO: 115922 - DNA, 76 bp, Homo sapiens
acaatttctctttcattaagttcaaaagcacttgtgttaatgcgctcaaatatgtcaagtcctgatataaactcaa

SEQ ID NO: 115923 - DNA, 77 bp, Homo sapiens
ctttcattaagttcaaaagcacttgtgttaatgcgctcaaatatgtcaagtcctgatataaactcaaagatcataac

SEQ ID NO: 115924 - DNA, 78 bp, Homo sapiens
gttcaaaagcacttgtgttaatgcgctcaaatatgtcaagtcctgatataaactcaaagatcataactaattcttcca

SEQ ID NO: 115925 - DNA, 80 bp, Homo sapiens
tatgtcaagtcctgatataaactcaaagatcataactaattcttccatgctttcaaatgattcatggaggtgtaagatgt

SEQ ID NO: 115926 - DNA, 81 bp, Homo sapiens
actcaaagatcataactaattcttccatgctttcaaatgattcatggaggtgtaagatgtttctatgcctagcaatattca

SEQ ID NO: 115927 - DNA, 81 bp, Homo sapiens
aagatcataactaattcttccatgctttcaaatgattcatggaggtgtaagatgtttctatgcctagcaatattcagaatg

SEQ ID NO: 115928 - DNA, 79 bp, Homo sapiens
ctaattcttccatgctttcaaatgattcatggaggtgtaagatgtttctatgcctagcaatattcagaatggaaatttc

SEQ ID NO: 115929 - DNA, 76 bp, Homo sapiens
ctttcaaatgattcatggaggtgtaagatgtttctatgcctagcaatattcagaatggaaatttccttctttacca

SEQ ID NO: 115930 - DNA, 74 bp, Homo sapiens
atgattcatggaggtgtaagatgtttctatgcctagcaatattcagaatggaaatttccttctttaccaaaacc

SEQ ID NO: 115931 - DNA, 73 bp, Homo sapiens
tgtaagatgtttctatgcctagcaatattcagaatggaaatttccttctttaccaaaacctgatcagtccctt

SEQ ID NO: 115932 - DNA, 72 bp, Homo sapiens
tttctatgcctagcaatattcagaatggaaatttccttctttaccaaaacctgatcagtccctttgacttta

SEQ ID NO: 115933 - DNA, 70 bp, Homo sapiens
gcctagcaatattcagaatggaaatttccttctttaccaaaacctgatcagtccctttgactttaacaaa

SEQ ID NO: 115934 - DNA, 70 bp, Homo sapiens
tcagaatggaaatttccttctttaccaaaacctgatcagtccctttgactttaacaaatttggccatgta

SEQ ID NO: 115935 - DNA, 69 bp, Homo sapiens
gaaatttccttctttaccaaaacctgatcagtccctttgactttaacaaatttggccatgtatgtcttc

SEQ ID NO: 115936 - DNA, 78 bp, Homo sapiens
ttggccatgtatgtcttctttgaggatgtttcaacacaacgatggacaattccaaactcaccacgcccaagatcttca

SEQ ID NO: 115937 - DNA, 78 bp, Homo sapiens
tcttctttgaggatgtttcaacacaacgatggacaattccaaactcaccacgcccaagatcttcagcaatcatatatt

SEQ ID NO: 115938 - DNA, 80 bp, Homo sapiens
tttgaggatgtttcaacacaacgatggacaattccaaactcaccacgcccaagatcttcagcaatcatatatttctcata

SEQ ID NO: 115939 - DNA, 78 bp, Homo sapiens
tttcaacacaacgatggacaattccaaactcaccacgcccaagatcttcagcaatcatatatttctcatagagttcct

SEQ ID NO: 115940 - DNA, 80 bp, Homo sapiens
ttccaaactcaccacgcccaagatcttcagcaatcatatatttctcatagagttccttggttgaagagtgagatgcttta

SEQ ID NO: 115941 - DNA, 81 bp, Homo sapiens
acgcccaagatcttcagcaatcatatatttctcatagagttccttggttgaagagtgagatgctttagtcatggagacttc

SEQ ID NO: 115942 - DNA, 77 bp, Homo sapiens
atttctcatagagttccttggttgaagagtgagatgctttagtcatggagacttccctggtttcatctacctcttca

SEQ ID NO: 115943 - DNA, 78 bp, Homo sapiens
agttccttggttgaagagtgagatgctttagtcatggagacttccctggtttcatctacctcttcatcatagttcata

SEQ ID NO: 115944 - DNA, 80 bp, Homo sapiens
aagagtgagatgctttagtcatggagacttccctggtttcatctacctcttcatcatagttcatagctctggtcttatct

SEQ ID NO: 115945 - DNA, 79 bp, Homo sapiens
agatgctttagtcatggagacttccctggtttcatctacctcttcatcatagttcatagctctggtcttatcttctttg

SEQ ID NO: 115946 - DNA, 76 bp, Homo sapiens
atggagacttccctggtttcatctacctcttcatcatagttcatagctctggtcttatcttctttggttatggttg

SEQ ID NO: 115947 - DNA, 78 bp, Homo sapiens
tttcatctacctcttcatcatagttcatagctctggtcttatcttctttggttatggttggttctgaaggctctgaag

SEQ ID NO: 115948 - DNA, 80 bp, Homo sapiens
tcatcatagttcatagctctggtcttatcttctttggttatggttggttctgaaggctctgaaggcttgctcagaccaaa

SEQ ID NO: 115949 - DNA, 76 bp, Homo sapiens
ttcatagctctggtcttatcttctttggttatggttggttctgaaggctctgaaggcttgctcagaccaaatttat

SEQ ID NO: 115950 - DNA, 73 bp, Homo sapiens
atcttctttggttatggttggttctgaaggctctgaaggcttgctcagaccaaatttattttcagctattacc

SEQ ID NO: 115951 - DNA, 73 bp, Homo sapiens
tatggttggttctgaaggctctgaaggcttgctcagaccaaatttattttcagctattacccggaactggtaa

SEQ ID NO: 115952 - DNA, 70 bp, Homo sapiens
tgctcagaccaaatttattttcagctattacccggaactggtaacttgtttttccaaataagttgatcac

SEQ ID NO: 115953 - DNA, 68 bp, Homo sapiens
ttcagctattacccggaactggtaacttgtttttccaaataagttgatcacggtataacgtgtttctc

SEQ ID NO: 115954 - DNA, 68 bp, Homo sapiens
gaactggtaacttgtttttccaaataagttgatcacggtataacgtgtttctcgggcctgtcctacac

SEQ ID NO: 115955 - DNA, 69 bp, Homo sapiens
cttgtttttccaaataagttgatcacggtataacgtgtttctcgggcctgtcctacacggagccatctt

SEQ ID NO: 115956 - DNA, 73 bp, Homo sapiens
ttccaaataagttgatcacggtataacgtgtttctcgggcctgtcctacacggagccatctttctgcagtagt

SEQ ID NO: 115957 - DNA, 74 bp, Homo sapiens
aagttgatcacggtataacgtgtttctcgggcctgtcctacacggagccatctttctgcagtagttgcacattt

SEQ ID NO: 115958 - DNA, 75 bp, Homo sapiens
tataacgtgtttctcgggcctgtcctacacggagccatctttctgcagtagttgcacatttttcaacaatgtagt

SEQ ID NO: 115959 - DNA, 75 bp, Homo sapiens
tttctcgggcctgtcctacacggagccatctttctgcagtagttgcacatttttcaacaatgtagttggtgattt

SEQ ID NO: 115960 - DNA, 81 bp, Homo sapiens
ctgtcctacacggagccatctttctgcagtagttgcacatttttcaacaatgtagttggtgattttgctgccaccatcaga

SEQ ID NO: 115961 - DNA, 83 bp, Homo sapiens
agccatctttctgcagtagttgcacatttttcaacaatgtagttggtgattttgctgccaccatcagaggctggctcagtcca

SEQ ID NO: 115962 - DNA, 82 bp, Homo sapiens
tttctgcagtagttgcacatttttcaacaatgtagttggtgattttgctgccaccatcagaggctggctcagtccatgttaa

SEQ ID NO: 115963 - DNA, 82 bp, Homo sapiens
ttgcacatttttcaacaatgtagttggtgattttgctgccaccatcagaggctggctcagtccatgttaagttgacagaatc

SEQ ID NO: 115964 - DNA, 79 bp, Homo sapiens
atttttcaacaatgtagttggtgattttgctgccaccatcagaggctggctcagtccatgttaagttgacagaatctcg

SEQ ID NO: 115965 - DNA, 82 bp, Homo sapiens
attttgctgccaccatcagaggctggctcagtccatgttaagttgacagaatctcgtgagacatcactaactttgactcctc

SEQ ID NO: 115966 - DNA, 79 bp, Homo sapiens
agtccatgttaagttgacagaatctcgtgagacatcactaactttgactcctctgggtgggtcaggaacatcagccaca

SEQ ID NO: 115967 - DNA, 80 bp, Homo sapiens
taagttgacagaatctcgtgagacatcactaactttgactcctctgggtgggtcaggaacatcagccacatccagttcaa

SEQ ID NO: 115968 - DNA, 78 bp, Homo sapiens
atcactaactttgactcctctgggtgggtcaggaacatcagccacatccagttcaactgtcttctgatcaattccaaa

SEQ ID NO: 115969 - DNA, 77 bp, Homo sapiens
tttgactcctctgggtgggtcaggaacatcagccacatccagttcaactgtcttctgatcaattccaaatctgtttt

SEQ ID NO: 115970 - DNA, 80 bp, Homo sapiens
tgggtgggtcaggaacatcagccacatccagttcaactgtcttctgatcaattccaaatctgtttttagcacagaccaca

SEQ ID NO: 115971 - DNA, 79 bp, Homo sapiens
aggaacatcagccacatccagttcaactgtcttctgatcaattccaaatctgtttttagcacagaccacatagaaacca

SEQ ID NO: 115972 - DNA, 78 bp, Homo sapiens
agccacatccagttcaactgtcttctgatcaattccaaatctgtttttagcacagaccacatagaaaccagcatcttt

SEQ ID NO: 115973 - DNA, 77 bp, Homo sapiens
agttcaactgtcttctgatcaattccaaatctgtttttagcacagaccacatagaaaccagcatcttttctctctac

SEQ ID NO: 115974 - DNA, 76 bp, Homo sapiens
actgtcttctgatcaattccaaatctgtttttagcacagaccacatagaaaccagcatcttttctctctaccccat

SEQ ID NO: 115975 - DNA, 71 bp, Homo sapiens
aattccaaatctgtttttagcacagaccacatagaaaccagcatcttttctctctaccccattggggaaaa

SEQ ID NO: 115976 - DNA, 72 bp, Homo sapiens
aaatctgtttttagcacagaccacatagaaaccagcatcttttctctctaccccattggggaaaacaagtga

SEQ ID NO: 115977 - DNA, 76 bp, Homo sapiens
ttagcacagaccacatagaaaccagcatcttttctctctaccccattggggaaaacaagtgatgtgaaggatcttg

SEQ ID NO: 115978 - DNA, 73 bp, Homo sapiens
atagaaaccagcatcttttctctctaccccattggggaaaacaagtgatgtgaaggatcttgtgacaataact

SEQ ID NO: 115979 - DNA, 74 bp, Homo sapiens
catcttttctctctaccccattggggaaaacaagtgatgtgaaggatcttgtgacaataacttggtagtggcca

SEQ ID NO: 115980 - DNA, 75 bp, Homo sapiens
tctctaccccattggggaaaacaagtgatgtgaaggatcttgtgacaataacttggtagtggccattattgtcaa

SEQ ID NO: 115981 - DNA, 77 bp, Homo sapiens
attggggaaaacaagtgatgtgaaggatcttgtgacaataacttggtagtggccattattgtcaatgagatcttgtc

SEQ ID NO: 115982 - DNA, 78 bp, Homo sapiens
aaaacaagtgatgtgaaggatcttgtgacaataacttggtagtggccattattgtcaatgagatcttgtcctttctgc

SEQ ID NO: 115983 - DNA, 81 bp, Homo sapiens
atgtgaaggatcttgtgacaataacttggtagtggccattattgtcaatgagatcttgtcctttctgccaggtgatcacag

SEQ ID NO: 115984 - DNA, 80 bp, Homo sapiens
atcttgtgacaataacttggtagtggccattattgtcaatgagatcttgtcctttctgccaggtgatcacaggatctggt

SEQ ID NO: 115985 - DNA, 80 bp, Homo sapiens
aataacttggtagtggccattattgtcaatgagatcttgtcctttctgccaggtgatcacaggatctggtttgccactga

SEQ ID NO: 115986 - DNA, 82 bp, Homo sapiens
tagtggccattattgtcaatgagatcttgtcctttctgccaggtgatcacaggatctggtttgccactgaaaggaatcttga

SEQ ID NO: 115987 - DNA, 83 bp, Homo sapiens
tattgtcaatgagatcttgtcctttctgccaggtgatcacaggatctggtttgccactgaaaggaatcttgatgctgaccact

SEQ ID NO: 115988 - DNA, 80 bp, Homo sapiens
atcttgtcctttctgccaggtgatcacaggatctggtttgccactgaaaggaatcttgatgctgaccacttcacctcgga

SEQ ID NO: 115989 - DNA, 82 bp, Homo sapiens
ctttctgccaggtgatcacaggatctggtttgccactgaaaggaatcttgatgctgaccacttcacctcggagagcatgaac

SEQ ID NO: 115990 - DNA, 84 bp, Homo sapiens
atcacaggatctggtttgccactgaaaggaatcttgatgctgaccacttcacctcggagagcatgaactgctcccatgccttca

SEQ ID NO: 115991 - DNA, 78 bp, Homo sapiens
actgaaaggaatcttgatgctgaccacttcacctcggagagcatgaactgctcccatgccttcaagagttttaggtaa

SEQ ID NO: 115992 - DNA, 79 bp, Homo sapiens
atgctgaccacttcacctcggagagcatgaactgctcccatgccttcaagagttttaggtaagtgtatcttagctggaa

SEQ ID NO: 115993 - DNA, 76 bp, Homo sapiens
ggagagcatgaactgctcccatgccttcaagagttttaggtaagtgtatcttagctggaactgtatcagaaaaaaa

SEQ ID NO: 115994 - DNA, 72 bp, Homo sapiens
tttatttttaccttccacttccaaggaggcagtgccagacacagatcccccttggttggtagctctgacttg

SEQ ID NO: 115995 - DNA, 72 bp, Homo sapiens
ttttaccttccacttccaaggaggcagtgccagacacagatcccccttggttggtagctctgacttggtaaa

SEQ ID NO: 115996 - DNA, 82 bp, Homo sapiens
ttccaaggaggcagtgccagacacagatcccccttggttggtagctctgacttggtaaactgtggcatcatcatctgtgaca

SEQ ID NO: 115997 - DNA, 85 bp, Homo sapiens
agtgccagacacagatcccccttggttggtagctctgacttggtaaactgtggcatcatcatctgtgacacttgcaatgatgagc

SEQ ID NO: 115998 - DNA, 83 bp, Homo sapiens
acagatcccccttggttggtagctctgacttggtaaactgtggcatcatcatctgtgacacttgcaatgatgagctggtggta

SEQ ID NO: 115999 - DNA, 83 bp, Homo sapiens
cttggttggtagctctgacttggtaaactgtggcatcatcatctgtgacacttgcaatgatgagctggtggtagccaccctta

SEQ ID NO: 116000 - DNA, 84 bp, Homo sapiens
tagctctgacttggtaaactgtggcatcatcatctgtgacacttgcaatgatgagctggtggtagccacccttaaattcttgaa

SEQ ID NO: 116001 - DNA, 82 bp, Homo sapiens
tggtaaactgtggcatcatcatctgtgacacttgcaatgatgagctggtggtagccacccttaaattcttgaatcctatatt

SEQ ID NO: 116002 - DNA, 81 bp, Homo sapiens
aactgtggcatcatcatctgtgacacttgcaatgatgagctggtggtagccacccttaaattcttgaatcctatattttaa

SEQ ID NO: 116003 - DNA, 81 bp, Homo sapiens
atctgtgacacttgcaatgatgagctggtggtagccacccttaaattcttgaatcctatattttaatccatctgcaatgat

SEQ ID NO: 116004 - DNA, 74 bp, Homo sapiens
gtagccacccttaaattcttgaatcctatattttaatccatctgcaatgatttctttgccttgtctgtaccatt

SEQ ID NO: 116005 - DNA, 75 bp, Homo sapiens
cacccttaaattcttgaatcctatattttaatccatctgcaatgatttctttgccttgtctgtaccatttgacga

SEQ ID NO: 116006 - DNA, 76 bp, Homo sapiens
ttcttgaatcctatattttaatccatctgcaatgatttctttgccttgtctgtaccatttgacgataggttttgga

SEQ ID NO: 116007 - DNA, 76 bp, Homo sapiens
tattttaatccatctgcaatgatttctttgccttgtctgtaccatttgacgataggttttggatgaccagtcactt

SEQ ID NO: 116008 - DNA, 79 bp, Homo sapiens
atccatctgcaatgatttctttgccttgtctgtaccatttgacgataggttttggatgaccagtcactttgcagaccaa

SEQ ID NO: 116009 - DNA, 76 bp, Homo sapiens
aatgatttctttgccttgtctgtaccatttgacgataggttttggatgaccagtcactttgcagaccaaggtagca

SEQ ID NO: 116010 - DNA, 76 bp, Homo sapiens
atttctttgccttgtctgtaccatttgacgataggttttggatgaccagtcactttgcagaccaaggtagcattgc

SEQ ID NO: 116011 - DNA, 81 bp, Homo sapiens
ttgtctgtaccatttgacgataggttttggatgaccagtcactttgcagaccaaggtagcattgctctgatatctgacatt

SEQ ID NO: 116012 - DNA, 81 bp, Homo sapiens
tgtaccatttgacgataggttttggatgaccagtcactttgcagaccaaggtagcattgctctgatatctgacatttagat

SEQ ID NO: 116013 - DNA, 80 bp, Homo sapiens
taccatttgacgataggttttggatgaccagtcactttgcagaccaaggtagcattgctctgatatctgacatttagatt

SEQ ID NO: 116014 - DNA, 81 bp, Homo sapiens
atttgacgataggttttggatgaccagtcactttgcagaccaaggtagcattgctctgatatctgacatttagatttctca

SEQ ID NO: 116015 - DNA, 80 bp, Homo sapiens
acgataggttttggatgaccagtcactttgcagaccaaggtagcattgctctgatatctgacatttagatttctcagttc

SEQ ID NO: 116016 - DNA, 80 bp, Homo sapiens
ttttggatgaccagtcactttgcagaccaaggtagcattgctctgatatctgacatttagatttctcagttcctctttaa

SEQ ID NO: 116017 - DNA, 80 bp, Homo sapiens
tttgcagaccaaggtagcattgctctgatatctgacatttagatttctcagttcctctttaaagtgtggtgcctgaattg

SEQ ID NO: 116018 - DNA, 79 bp, Homo sapiens
attgctctgatatctgacatttagatttctcagttcctctttaaagtgtggtgcctgaattgggacatcagatttggga

SEQ ID NO: 116019 - DNA, 77 bp, Homo sapiens
tatctgacatttagatttctcagttcctctttaaagtgtggtgcctgaattgggacatcagatttgggagtgatggg

SEQ ID NO: 116020 - DNA, 76 bp, Homo sapiens
atttctcagttcctctttaaagtgtggtgcctgaattgggacatcagatttgggagtgatgggttctgatatttca

SEQ ID NO: 116021 - DNA, 76 bp, Homo sapiens
ttaaagtgtggtgcctgaattgggacatcagatttgggagtgatgggttctgatatttcactccattcactttccc

SEQ ID NO: 116022 - DNA, 77 bp, Homo sapiens
tgaattgggacatcagatttgggagtgatgggttctgatatttcactccattcactttccccacctagattttcaca

SEQ ID NO: 116023 - DNA, 76 bp, Homo sapiens
acatcagatttgggagtgatgggttctgatatttcactccattcactttccccacctagattttcacatttcacac

SEQ ID NO: 116024 - DNA, 73 bp, Homo sapiens
atttgggagtgatgggttctgatatttcactccattcactttccccacctagattttcacatttcacacgaaa

SEQ ID NO: 116025 - DNA, 73 bp, Homo sapiens
atgggttctgatatttcactccattcactttccccacctagattttcacatttcacacgaaactcgtattcaa

SEQ ID NO: 116026 - DNA, 72 bp, Homo sapiens
tttcactccattcactttccccacctagattttcacatttcacacgaaactcgtattcaagaccttcaataa

SEQ ID NO: 116027 - DNA, 68 bp, Homo sapiens
attcactttccccacctagattttcacatttcacacgaaactcgtattcaagaccttcaataaggttt

SEQ ID NO: 116028 - DNA, 69 bp, Homo sapiens
cccacctagattttcacatttcacacgaaactcgtattcaagaccttcaataaggtttttcactgaaaa

SEQ ID NO: 116029 - DNA, 71 bp, Homo sapiens
tttcacatttcacacgaaactcgtattcaagaccttcaataaggtttttcactgaaaagacagtttctcga

SEQ ID NO: 116030 - DNA, 70 bp, Homo sapiens
tcacacgaaactcgtattcaagaccttcaataaggtttttcactgaaaagacagtttctcgaatttcttc

SEQ ID NO: 116031 - DNA, 69 bp, Homo sapiens
gaaactcgtattcaagaccttcaataaggtttttcactgaaaagacagtttctcgaatttcttctgttg

SEQ ID NO: 116032 - DNA, 71 bp, Homo sapiens
caagaccttcaataaggtttttcactgaaaagacagtttctcgaatttcttctgttgtcacagaaatccat

SEQ ID NO: 116033 - DNA, 73 bp, Homo sapiens
tcaataaggtttttcactgaaaagacagtttctcgaatttcttctgttgtcacagaaatccatttattctgct

SEQ ID NO: 116034 - DNA, 75 bp, Homo sapiens
ttttcactgaaaagacagtttctcgaatttcttctgttgtcacagaaatccatttattctgcttcttctcacgct

SEQ ID NO: 116035 - DNA, 75 bp, Homo sapiens
aaagacagtttctcgaatttcttctgttgtcacagaaatccatttattctgcttcttctcacgcttctcaaggta

SEQ ID NO: 116036 - DNA, 75 bp, Homo sapiens
gaatttcttctgttgtcacagaaatccatttattctgcttcttctcacgcttctcaaggtagtaatttctaatct

SEQ ID NO: 116037 - DNA, 77 bp, Homo sapiens
atttattctgcttcttctcacgcttctcaaggtagtaatttctaatctttgcacctccatcactggcaggtggcttc

SEQ ID NO: 116038 - DNA, 78 bp, Homo sapiens
ttcttctcacgcttctcaaggtagtaatttctaatctttgcacctccatcactggcaggtggcttccaggccacaaca

SEQ ID NO: 116039 - DNA, 76 bp, Homo sapiens
tctcaaggtagtaatttctaatctttgcacctccatcactggcaggtggcttccaggccacaacacaagaatcttt

SEQ ID NO: 116040 - DNA, 76 bp, Homo sapiens
aggtagtaatttctaatctttgcacctccatcactggcaggtggcttccaggccacaacacaagaatcttttgtga

SEQ ID NO: 116041 - DNA, 79 bp, Homo sapiens
ttctaatctttgcacctccatcactggcaggtggcttccaggccacaacacaagaatcttttgtgacagcagtaatagt

SEQ ID NO: 116042 - DNA, 77 bp, Homo sapiens
actggcaggtggcttccaggccacaacacaagaatcttttgtgacagcagtaatagttggtttgccaggagcacctg

SEQ ID NO: 116043 - DNA, 73 bp, Homo sapiens
acaacacaagaatcttttgtgacagcagtaatagttggtttgccaggagcacctggcttttctattaaacaaa

SEQ ID NO: 116044 - DNA, 70 bp, Homo sapiens
aagaatcttttgtgacagcagtaatagttggtttgccaggagcacctggcttttctattaaacaaaaaaa

SEQ ID NO: 116045 - DNA, 73 bp, Homo sapiens
ttgtgacagcagtaatagttggtttgccaggagcacctggcttttctattaaacaaaaaaaagatttgagtca

SEQ ID NO: 116046 - DNA, 74 bp, Homo sapiens
aaagatggaactttaccataggaagatacagaaatcaagttgtactcaccaaatggactcttaatgatcacaac

SEQ ID NO: 116047 - DNA, 77 bp, Homo sapiens
tttaccataggaagatacagaaatcaagttgtactcaccaaatggactcttaatgatcacaactgaggacacttcta

SEQ ID NO: 116048 - DNA, 78 bp, Homo sapiens
aagatacagaaatcaagttgtactcaccaaatggactcttaatgatcacaactgaggacacttctagagggtcactga

SEQ ID NO: 116049 - DNA, 77 bp, Homo sapiens
aaatcaagttgtactcaccaaatggactcttaatgatcacaactgaggacacttctagagggtcactgatgccgaaa

SEQ ID NO: 116050 - DNA, 77 bp, Homo sapiens
aaatggactcttaatgatcacaactgaggacacttctagagggtcactgatgccgaaagtgttctgagctgaaaccc

SEQ ID NO: 116051 - DNA, 77 bp, Homo sapiens
ttaatgatcacaactgaggacacttctagagggtcactgatgccgaaagtgttctgagctgaaacccggaagtaata

SEQ ID NO: 116052 - DNA, 75 bp, Homo sapiens
aactgaggacacttctagagggtcactgatgccgaaagtgttctgagctgaaacccggaagtaatagccagcatt

SEQ ID NO: 116053 - DNA, 76 bp, Homo sapiens
acacttctagagggtcactgatgccgaaagtgttctgagctgaaacccggaagtaatagccagcattttctgtgag

SEQ ID NO: 116054 - DNA, 78 bp, Homo sapiens
gtcactgatgccgaaagtgttctgagctgaaacccggaagtaatagccagcattttctgtgaggttcacaattctaca

SEQ ID NO: 116055 - DNA, 74 bp, Homo sapiens
atgccgaaagtgttctgagctgaaacccggaagtaatagccagcattttctgtgaggttcacaattctacaggt

SEQ ID NO: 116056 - DNA, 78 bp, Homo sapiens
gtgttctgagctgaaacccggaagtaatagccagcattttctgtgaggttcacaattctacaggttgtcactgagatg

SEQ ID NO: 116057 - DNA, 76 bp, Homo sapiens
aaacccggaagtaatagccagcattttctgtgaggttcacaattctacaggttgtcactgagatggctgaagacac

SEQ ID NO: 116058 - DNA, 81 bp, Homo sapiens
aagtaatagccagcattttctgtgaggttcacaattctacaggttgtcactgagatggctgaagacaccaattgccattca

SEQ ID NO: 116059 - DNA, 77 bp, Homo sapiens
attttctgtgaggttcacaattctacaggttgtcactgagatggctgaagacaccaattgccattcagccccctcct

SEQ ID NO: 116060 - DNA, 78 bp, Homo sapiens
aggttcacaattctacaggttgtcactgagatggctgaagacaccaattgccattcagccccctccttggcctcacat

SEQ ID NO: 116061 - DNA, 77 bp, Homo sapiens
acaattctacaggttgtcactgagatggctgaagacaccaattgccattcagccccctccttggcctcacatttttc

SEQ ID NO: 116062 - DNA, 78 bp, Homo sapiens
ttgtcactgagatggctgaagacaccaattgccattcagccccctccttggcctcacatttttccaccacatagttgg

SEQ ID NO: 116063 - DNA, 77 bp, Homo sapiens
atggctgaagacaccaattgccattcagccccctccttggcctcacatttttccaccacatagttggtgatccagga

SEQ ID NO: 116064 - DNA, 75 bp, Homo sapiens
aagacaccaattgccattcagccccctccttggcctcacatttttccaccacatagttggtgatccaggagcctc

SEQ ID NO: 116065 - DNA, 77 bp, Homo sapiens
aattgccattcagccccctccttggcctcacatttttccaccacatagttggtgatccaggagcctccgtcatctgc

SEQ ID NO: 116066 - DNA, 74 bp, Homo sapiens
ccctccttggcctcacatttttccaccacatagttggtgatccaggagcctccgtcatctgcgggtggtttcca

SEQ ID NO: 116067 - DNA, 79 bp, Homo sapiens
cctcacatttttccaccacatagttggtgatccaggagcctccgtcatctgcgggtggtttccagctgatcactgcgga

SEQ ID NO: 116068 - DNA, 80 bp, Homo sapiens
ttccaccacatagttggtgatccaggagcctccgtcatctgcgggtggtttccagctgatcactgcggagttcttcaata

SEQ ID NO: 116069 - DNA, 80 bp, Homo sapiens
atccaggagcctccgtcatctgcgggtggtttccagctgatcactgcggagttcttcaatagagcttcgatcacaattgg

SEQ ID NO: 116070 - DNA, 79 bp, Homo sapiens
tccgtcatctgcgggtggtttccagctgatcactgcggagttcttcaatagagcttcgatcacaattggtcctgtaggt

SEQ ID NO: 116071 - DNA, 78 bp, Homo sapiens
atctgcgggtggtttccagctgatcactgcggagttcttcaatagagcttcgatcacaattggtcctgtaggtttgtc

SEQ ID NO: 116072 - DNA, 78 bp, Homo sapiens
tttccagctgatcactgcggagttcttcaatagagcttcgatcacaattggtcctgtaggtttgtctggtttatctgt

SEQ ID NO: 116073 - DNA, 76 bp, Homo sapiens
ctgatcactgcggagttcttcaatagagcttcgatcacaattggtcctgtaggtttgtctggtttatctgttgggg

SEQ ID NO: 116074 - DNA, 72 bp, Homo sapiens
ttcttcaatagagcttcgatcacaattggtcctgtaggtttgtctggtttatctgttgggggaaaatacaat

SEQ ID NO: 116075 - DNA, 71 bp, Homo sapiens
aatagagcttcgatcacaattggtcctgtaggtttgtctggtttatctgttgggggaaaatacaattgtgg

SEQ ID NO: 116076 - DNA, 75 bp, Homo sapiens
aaataaaataccttgtatttccacatcaaggatggcatcaactgttccaaaaacattgctgagctggactttgta

SEQ ID NO: 116077 - DNA, 75 bp, Homo sapiens
aaataccttgtatttccacatcaaggatggcatcaactgttccaaaaacattgctgagctggactttgtatttcc

SEQ ID NO: 116078 - DNA, 80 bp, Homo sapiens
tatttccacatcaaggatggcatcaactgttccaaaaacattgctgagctggactttgtatttcccagcatgagtcttac

SEQ ID NO: 116079 - DNA, 80 bp, Homo sapiens
gatggcatcaactgttccaaaaacattgctgagctggactttgtatttcccagcatgagtcttacgttggacattcttca

SEQ ID NO: 116080 - DNA, 77 bp, Homo sapiens
aactgttccaaaaacattgctgagctggactttgtatttcccagcatgagtcttacgttggacattcttcatgacaa

SEQ ID NO: 116081 - DNA, 79 bp, Homo sapiens
aaaaacattgctgagctggactttgtatttcccagcatgagtcttacgttggacattcttcatgacaagatgagtatag

SEQ ID NO: 116082 - DNA, 83 bp, Homo sapiens
tgagctggactttgtatttcccagcatgagtcttacgttggacattcttcatgacaagatgagtatagtgctcagtgttttca

SEQ ID NO: 116083 - DNA, 80 bp, Homo sapiens
tttgtatttcccagcatgagtcttacgttggacattcttcatgacaagatgagtatagtgctcagtgttttcaatagtaa

SEQ ID NO: 116084 - DNA, 79 bp, Homo sapiens
tttcccagcatgagtcttacgttggacattcttcatgacaagatgagtatagtgctcagtgttttcaatagtaatgttt

SEQ ID NO: 116085 - DNA, 76 bp, Homo sapiens
agtcttacgttggacattcttcatgacaagatgagtatagtgctcagtgttttcaatagtaatgttttctgagttt

SEQ ID NO: 116086 - DNA, 77 bp, Homo sapiens
gttggacattcttcatgacaagatgagtatagtgctcagtgttttcaatagtaatgttttctgagttttgcaaaagt

SEQ ID NO: 116087 - DNA, 77 bp, Homo sapiens
atgacaagatgagtatagtgctcagtgttttcaatagtaatgttttctgagttttgcaaaagtttctgaccatggaa

SEQ ID NO: 116088 - DNA, 75 bp, Homo sapiens
agatgagtatagtgctcagtgttttcaatagtaatgttttctgagttttgcaaaagtttctgaccatggaaccaa

SEQ ID NO: 116089 - DNA, 74 bp, Homo sapiens
tcagtgttttcaatagtaatgttttctgagttttgcaaaagtttctgaccatggaaccaagtcatggcaggtac

SEQ ID NO: 116090 - DNA, 73 bp, Homo sapiens
ttttcaatagtaatgttttctgagttttgcaaaagtttctgaccatggaaccaagtcatggcaggtactggac

SEQ ID NO: 116091 - DNA, 74 bp, Homo sapiens
gttttctgagttttgcaaaagtttctgaccatggaaccaagtcatggcaggtactggacgaccaatgtacataa

SEQ ID NO: 116092 - DNA, 76 bp, Homo sapiens
ttttgcaaaagtttctgaccatggaaccaagtcatggcaggtactggacgaccaatgtacataacatgaagccgaa

SEQ ID NO: 116093 - DNA, 75 bp, Homo sapiens
aaaagtttctgaccatggaaccaagtcatggcaggtactggacgaccaatgtacataacatgaagccgaagtgtg

SEQ ID NO: 116094 - DNA, 77 bp, Homo sapiens
tttctgaccatggaaccaagtcatggcaggtactggacgaccaatgtacataacatgaagccgaagtgtggaaccca

SEQ ID NO: 116095 - DNA, 77 bp, Homo sapiens
accaagtcatggcaggtactggacgaccaatgtacataacatgaagccgaagtgtggaacccacagctccataatat

SEQ ID NO: 116096 - DNA, 77 bp, Homo sapiens
aagtcatggcaggtactggacgaccaatgtacataacatgaagccgaagtgtggaacccacagctccataatatttc

SEQ ID NO: 116097 - DNA, 76 bp, Homo sapiens
atggcaggtactggacgaccaatgtacataacatgaagccgaagtgtggaacccacagctccataatatttctctt

SEQ ID NO: 116098 - DNA, 75 bp, Homo sapiens
aggtactggacgaccaatgtacataacatgaagccgaagtgtggaacccacagctccataatatttctctttcag

SEQ ID NO: 116099 - DNA, 76 bp, Homo sapiens
tggacgaccaatgtacataacatgaagccgaagtgtggaacccacagctccataatatttctctttcagtgggtaa

SEQ ID NO: 116100 - DNA, 75 bp, Homo sapiens
ataacatgaagccgaagtgtggaacccacagctccataatatttctctttcagtgggtaaccaggatggaactgc

SEQ ID NO: 116101 - DNA, 75 bp, Homo sapiens
aagtgtggaacccacagctccataatatttctctttcagtgggtaaccaggatggaactgcggtgttgcttgcag

SEQ ID NO: 116102 - DNA, 77 bp, Homo sapiens
ccacagctccataatatttctctttcagtgggtaaccaggatggaactgcggtgttgcttgcaggagaagcttacta

SEQ ID NO: 116103 - DNA, 73 bp, Homo sapiens
ataatatttctctttcagtgggtaaccaggatggaactgcggtgttgcttgcaggagaagcttactactggtt

SEQ ID NO: 116104 - DNA, 73 bp, Homo sapiens
tttctctttcagtgggtaaccaggatggaactgcggtgttgcttgcaggagaagcttactactggtttctact

SEQ ID NO: 116105 - DNA, 72 bp, Homo sapiens
agtgggtaaccaggatggaactgcggtgttgcttgcaggagaagcttactactggtttctacttctccaacc

SEQ ID NO: 116106 - DNA, 78 bp, Homo sapiens
aggatggaactgcggtgttgcttgcaggagaagcttactactggtttctacttctccaacctcattggtggctatgca

SEQ ID NO: 116107 - DNA, 76 bp, Homo sapiens
cggtgttgcttgcaggagaagcttactactggtttctacttctccaacctcattggtggctatgcaggtataaaca

SEQ ID NO: 116108 - DNA, 73 bp, Homo sapiens
aagcttactactggtttctacttctccaacctcattggtggctatgcaggtataaacaccttcatcttcctgt

SEQ ID NO: 116109 - DNA, 76 bp, Homo sapiens
gtttctacttctccaacctcattggtggctatgcaggtataaacaccttcatcttcctgttcctctgtcattactg

SEQ ID NO: 116110 - DNA, 77 bp, Homo sapiens
tacttctccaacctcattggtggctatgcaggtataaacaccttcatcttcctgttcctctgtcattactgtaagag

SEQ ID NO: 116111 - DNA, 80 bp, Homo sapiens
tatgcaggtataaacaccttcatcttcctgttcctctgtcattactgtaagagtgtgtgtgcgtccatctgaagacattt

SEQ ID NO: 116112 - DNA, 77 bp, Homo sapiens
atcttcctgttcctctgtcattactgtaagagtgtgtgtgcgtccatctgaagacattttgtatttccggctttgta

SEQ ID NO: 116113 - DNA, 76 bp, Homo sapiens
attactgtaagagtgtgtgtgcgtccatctgaagacattttgtatttccggctttgtatgagctctttaccaaatc

SEQ ID NO: 116114 - DNA, 76 bp, Homo sapiens
agtgtgtgtgcgtccatctgaagacattttgtatttccggctttgtatgagctctttaccaaatctgtaccattta

SEQ ID NO: 116115 - DNA, 75 bp, Homo sapiens
cgtccatctgaagacattttgtatttccggctttgtatgagctctttaccaaatctgtaccatttaatgtcagga

SEQ ID NO: 116116 - DNA, 72 bp, Homo sapiens
aagacattttgtatttccggctttgtatgagctctttaccaaatctgtaccatttaatgtcaggaagaggcc

SEQ ID NO: 116117 - DNA, 72 bp, Homo sapiens
attttgtatttccggctttgtatgagctctttaccaaatctgtaccatttaatgtcaggaagaggccttcca

SEQ ID NO: 116118 - DNA, 78 bp, Homo sapiens
ctttgtatgagctctttaccaaatctgtaccatttaatgtcaggaagaggccttccaacaatctggcatgagagttga

SEQ ID NO: 116119 - DNA, 82 bp, Homo sapiens
tatgagctctttaccaaatctgtaccatttaatgtcaggaagaggccttccaacaatctggcatgagagttgagcagcttca

SEQ ID NO: 116120 - DNA, 77 bp, Homo sapiens
aaatctgtaccatttaatgtcaggaagaggccttccaacaatctggcatgagagttgagcagcttcacccaattttg

SEQ ID NO: 116121 - DNA, 78 bp, Homo sapiens
tgtaccatttaatgtcaggaagaggccttccaacaatctggcatgagagttgagcagcttcacccaattttgtggtaa

SEQ ID NO: 116122 - DNA, 78 bp, Homo sapiens
atgtcaggaagaggccttccaacaatctggcatgagagttgagcagcttcacccaattttgtggtaacatccttcatt

SEQ ID NO: 116123 - DNA, 77 bp, Homo sapiens
ccttccaacaatctggcatgagagttgagcagcttcacccaattttgtggtaacatccttcatttctttgcgtattc

SEQ ID NO: 116124 - DNA, 76 bp, Homo sapiens
aacaatctggcatgagagttgagcagcttcacccaattttgtggtaacatccttcatttctttgcgtattcctggg

SEQ ID NO: 116125 - DNA, 76 bp, Homo sapiens
atgagagttgagcagcttcacccaattttgtggtaacatccttcatttctttgcgtattcctggggcctctccagc

SEQ ID NO: 116126 - DNA, 75 bp, Homo sapiens
agcttcacccaattttgtggtaacatccttcatttctttgcgtattcctggggcctctccagctgaacaatatga

SEQ ID NO: 116127 - DNA, 76 bp, Homo sapiens
taacatccttcatttctttgcgtattcctggggcctctccagctgaacaatatgaaagataatattaagtgactgt

SEQ ID NO: 116128 - DNA, 76 bp, Homo sapiens
tagtttgtaaatcataagtagagaaccaaaggctacttacatgtgagtttagtctttatagacatagcagttctgc

SEQ ID NO: 116129 - DNA, 79 bp, Homo sapiens
aatcataagtagagaaccaaaggctacttacatgtgagtttagtctttatagacatagcagttctgcgaggtctgctca

SEQ ID NO: 116130 - DNA, 82 bp, Homo sapiens
tgagtttagtctttatagacatagcagttctgcgaggtctgctcagcccagtctcattctcagcaaaaaccctgaattcata

SEQ ID NO: 116131 - DNA, 83 bp, Homo sapiens
tagtctttatagacatagcagttctgcgaggtctgctcagcccagtctcattctcagcaaaaaccctgaattcatactcagta

SEQ ID NO: 116132 - DNA, 83 bp, Homo sapiens
acatagcagttctgcgaggtctgctcagcccagtctcattctcagcaaaaaccctgaattcatactcagtagcttccagcaaa

SEQ ID NO: 116133 - DNA, 81 bp, Homo sapiens
ttctgcgaggtctgctcagcccagtctcattctcagcaaaaaccctgaattcatactcagtagcttccagcaaacctccta

SEQ ID NO: 116134 - DNA, 79 bp, Homo sapiens
ctcagcccagtctcattctcagcaaaaaccctgaattcatactcagtagcttccagcaaacctcctattgtgaattgct

SEQ ID NO: 116135 - DNA, 78 bp, Homo sapiens
tctcattctcagcaaaaaccctgaattcatactcagtagcttccagcaaacctcctattgtgaattgcttgtccttaa

SEQ ID NO: 116136 - DNA, 73 bp, Homo sapiens
agcaaaaaccctgaattcatactcagtagcttccagcaaacctcctattgtgaattgcttgtccttaatacgt

SEQ ID NO: 116137 - DNA, 76 bp, Homo sapiens
ctgaattcatactcagtagcttccagcaaacctcctattgtgaattgcttgtccttaatacgttccttattgctct

SEQ ID NO: 116138 - DNA, 76 bp, Homo sapiens
ttcatactcagtagcttccagcaaacctcctattgtgaattgcttgtccttaatacgttccttattgctcttcttc

SEQ ID NO: 116139 - DNA, 75 bp, Homo sapiens
gtagcttccagcaaacctcctattgtgaattgcttgtccttaatacgttccttattgctcttcttccaggcactg

SEQ ID NO: 116140 - DNA, 74 bp, Homo sapiens
aaacctcctattgtgaattgcttgtccttaatacgttccttattgctcttcttccaggcactgtctccagactg

SEQ ID NO: 116141 - DNA, 78 bp, Homo sapiens
tattgtgaattgcttgtccttaatacgttccttattgctcttcttccaggcactgtctccagactgtctatattcaac

SEQ ID NO: 116142 - DNA, 76 bp, Homo sapiens
ttgtccttaatacgttccttattgctcttcttccaggcactgtctccagactgtctatattcaacccagtatccaa

SEQ ID NO: 116143 - DNA, 76 bp, Homo sapiens
taatacgttccttattgctcttcttccaggcactgtctccagactgtctatattcaacccagtatccaagaatttc

SEQ ID NO: 116144 - DNA, 78 bp, Homo sapiens
ttattgctcttcttccaggcactgtctccagactgtctatattcaacccagtatccaagaatttctttaccaccatca

SEQ ID NO: 116145 - DNA, 76 bp, Homo sapiens
ttccaggcactgtctccagactgtctatattcaacccagtatccaagaatttctttaccaccatcacattcaggtt

SEQ ID NO: 116146 - DNA, 75 bp, Homo sapiens
actgtctatattcaacccagtatccaagaatttctttaccaccatcacattcaggtttctcccactgtagagtga

SEQ ID NO: 116147 - DNA, 74 bp, Homo sapiens
ttcaacccagtatccaagaatttctttaccaccatcacattcaggtttctcccactgtagagtgacactatctt

SEQ ID NO: 116148 - DNA, 76 bp, Homo sapiens
tatccaagaatttctttaccaccatcacattcaggtttctcccactgtagagtgacactatctttggatattgaaa

SEQ ID NO: 116149 - DNA, 76 bp, Homo sapiens
aatttctttaccaccatcacattcaggtttctcccactgtagagtgacactatctttggatattgaaagaatctca

SEQ ID NO: 116150 - DNA, 76 bp, Homo sapiens
accatcacattcaggtttctcccactgtagagtgacactatctttggatattgaaagaatctcaagttctcctggt

SEQ ID NO: 116151 - DNA, 75 bp, Homo sapiens
attcaggtttctcccactgtagagtgacactatctttggatattgaaagaatctcaagttctcctggttggcttg

SEQ ID NO: 116152 - DNA, 75 bp, Homo sapiens
actgtagagtgacactatctttggatattgaaagaatctcaagttctcctggttggcttggtttatctgaaatat

SEQ ID NO: 116153 - DNA, 74 bp, Homo sapiens
agagtgacactatctttggatattgaaagaatctcaagttctcctggttggcttggtttatctgaaatatttta

SEQ ID NO: 116154 - DNA, 70 bp, Homo sapiens
caaacatggcttgcttctttaatttaaccccttcttctgaattccttaccaaatggatctttgcaaacaa

SEQ ID NO: 116155 - DNA, 69 bp, Homo sapiens
gcttctttaatttaaccccttcttctgaattccttaccaaatggatctttgcaaacaactggttcagaa

SEQ ID NO: 116156 - DNA, 70 bp, Homo sapiens
ttaatttaaccccttcttctgaattccttaccaaatggatctttgcaaacaactggttcagaagcagggc

SEQ ID NO: 116157 - DNA, 77 bp, Homo sapiens
ttcttctgaattccttaccaaatggatctttgcaaacaactggttcagaagcagggctggtctcactcaggccaaca

SEQ ID NO: 116158 - DNA, 77 bp, Homo sapiens
aattccttaccaaatggatctttgcaaacaactggttcagaagcagggctggtctcactcaggccaacatcattctg

SEQ ID NO: 116159 - DNA, 87 bp, Homo sapiens
tttgcaaacaactggttcagaagcagggctggtctcactcaggccaacatcattctgtgcgatgatgcggaactgatactcagcatc

SEQ ID NO: 116160 - DNA, 85 bp, Homo sapiens
actggttcagaagcagggctggtctcactcaggccaacatcattctgtgcgatgatgcggaactgatactcagcatcgggaacaa

SEQ ID NO: 116161 - DNA, 85 bp, Homo sapiens
agggctggtctcactcaggccaacatcattctgtgcgatgatgcggaactgatactcagcatcgggaacaagccctgtgacagtg

SEQ ID NO: 116162 - DNA, 87 bp, Homo sapiens
tcactcaggccaacatcattctgtgcgatgatgcggaactgatactcagcatcgggaacaagccctgtgacagtgtacattgtggtg

SEQ ID NO: 116163 - DNA, 87 bp, Homo sapiens
caacatcattctgtgcgatgatgcggaactgatactcagcatcgggaacaagccctgtgacagtgtacattgtggtggtgatctgag

SEQ ID NO: 116164 - DNA, 85 bp, Homo sapiens
attctgtgcgatgatgcggaactgatactcagcatcgggaacaagccctgtgacagtgtacattgtggtggtgatctgagtcttg

SEQ ID NO: 116165 - DNA, 85 bp, Homo sapiens
atgatgcggaactgatactcagcatcgggaacaagccctgtgacagtgtacattgtggtggtgatctgagtcttgttgtgtctga

SEQ ID NO: 116166 - DNA, 81 bp, Homo sapiens
actgatactcagcatcgggaacaagccctgtgacagtgtacattgtggtggtgatctgagtcttgttgtgtctgacccact

SEQ ID NO: 116167 - DNA, 80 bp, Homo sapiens
atcgggaacaagccctgtgacagtgtacattgtggtggtgatctgagtcttgttgtgtctgacccacttgtcagtggatg

SEQ ID NO: 116168 - DNA, 80 bp, Homo sapiens
aacaagccctgtgacagtgtacattgtggtggtgatctgagtcttgttgtgtctgacccacttgtcagtggatgtctctt

SEQ ID NO: 116169 - DNA, 82 bp, Homo sapiens
cagtgtacattgtggtggtgatctgagtcttgttgtgtctgacccacttgtcagtggatgtctctttgcgttcgatgtagta

SEQ ID NO: 116170 - DNA, 82 bp, Homo sapiens
attgtggtggtgatctgagtcttgttgtgtctgacccacttgtcagtggatgtctctttgcgttcgatgtagtagcctgtga

SEQ ID NO: 116171 - DNA, 81 bp, Homo sapiens
atctgagtcttgttgtgtctgacccacttgtcagtggatgtctctttgcgttcgatgtagtagcctgtgactctagaacca

SEQ ID NO: 116172 - DNA, 81 bp, Homo sapiens
ttgttgtgtctgacccacttgtcagtggatgtctctttgcgttcgatgtagtagcctgtgactctagaaccaccatcatct

SEQ ID NO: 116173 - DNA, 81 bp, Homo sapiens
tgtctgacccacttgtcagtggatgtctctttgcgttcgatgtagtagcctgtgactctagaaccaccatcatctttgggc

SEQ ID NO: 116174 - DNA, 77 bp, Homo sapiens
acttgtcagtggatgtctctttgcgttcgatgtagtagcctgtgactctagaaccaccatcatctttgggccgggac

SEQ ID NO: 116175 - DNA, 77 bp, Homo sapiens
atgtctctttgcgttcgatgtagtagcctgtgactctagaaccaccatcatctttgggccgggaccaggacaagcta

SEQ ID NO: 116176 - DNA, 76 bp, Homo sapiens
ttcgatgtagtagcctgtgactctagaaccaccatcatctttgggccgggaccaggacaagctaacagaactcttg

SEQ ID NO: 116177 - DNA, 75 bp, Homo sapiens
tgtagtagcctgtgactctagaaccaccatcatctttgggccgggaccaggacaagctaacagaactcttggtta

SEQ ID NO: 116178 - DNA, 72 bp, Homo sapiens
actctagaaccaccatcatctttgggccgggaccaggacaagctaacagaactcttggttacatcgagtact

SEQ ID NO: 116179 - DNA, 74 bp, Homo sapiens
accatcatctttgggccgggaccaggacaagctaacagaactcttggttacatcgagtacttctggaggattgc

SEQ ID NO: 116180 - DNA, 73 bp, Homo sapiens
atctttgggccgggaccaggacaagctaacagaactcttggttacatcgagtacttctggaggattgcttgga

SEQ ID NO: 116181 - DNA, 73 bp, Homo sapiens
ccgggaccaggacaagctaacagaactcttggttacatcgagtacttctggaggattgcttggaggttctgga

SEQ ID NO: 116182 - DNA, 78 bp, Homo sapiens
ttacatcgagtacttctggaggattgcttggaggttctggaggatctgtaaatataagtggaaagcacacatgtatta

SEQ ID NO: 116183 - DNA, 71 bp, Homo sapiens
aagtgctgaaataatgtttataattttgtggttgaaagggcacttactcaatggtgtttttggtgtgactg

SEQ ID NO: 116184 - DNA, 71 bp, Homo sapiens
taatgtttataattttgtggttgaaagggcacttactcaatggtgtttttggtgtgactggttcctcagat

SEQ ID NO: 116185 - DNA, 71 bp, Homo sapiens
tttataattttgtggttgaaagggcacttactcaatggtgtttttggtgtgactggttcctcagatttcaa

SEQ ID NO: 116186 - DNA, 73 bp, Homo sapiens
ttgaaagggcacttactcaatggtgtttttggtgtgactggttcctcagatttcaagggtttgcttatgccaa

SEQ ID NO: 116187 - DNA, 70 bp, Homo sapiens
acttactcaatggtgtttttggtgtgactggttcctcagatttcaagggtttgcttatgccaaactggtt

SEQ ID NO: 116188 - DNA, 72 bp, Homo sapiens
aatggtgtttttggtgtgactggttcctcagatttcaagggtttgcttatgccaaactggttttctgctgaa

SEQ ID NO: 116189 - DNA, 72 bp, Homo sapiens
tttggtgtgactggttcctcagatttcaagggtttgcttatgccaaactggttttctgctgaaacacggaaa

SEQ ID NO: 116190 - DNA, 72 bp, Homo sapiens
gttcctcagatttcaagggtttgcttatgccaaactggttttctgctgaaacacggaaatggtattctacat

SEQ ID NO: 116191 - DNA, 71 bp, Homo sapiens
agatttcaagggtttgcttatgccaaactggttttctgctgaaacacggaaatggtattctacattctctt

SEQ ID NO: 116192 - DNA, 72 bp, Homo sapiens
caaactggttttctgctgaaacacggaaatggtattctacattctctttgaggccttttaccaccagagatg

SEQ ID NO: 116193 - DNA, 73 bp, Homo sapiens
ttttctgctgaaacacggaaatggtattctacattctctttgaggccttttaccaccagagatgtacctcgga

SEQ ID NO: 116194 - DNA, 71 bp, Homo sapiens
aaacacggaaatggtattctacattctctttgaggccttttaccaccagagatgtacctcggactctggaa

SEQ ID NO: 116195 - DNA, 74 bp, Homo sapiens
aaatggtattctacattctctttgaggccttttaccaccagagatgtacctcggactctggaatcaatggtata

SEQ ID NO: 116196 - DNA, 73 bp, Homo sapiens
attctctttgaggccttttaccaccagagatgtacctcggactctggaatcaatggtataccaggcggcttta

SEQ ID NO: 116197 - DNA, 73 bp, Homo sapiens
tttgaggccttttaccaccagagatgtacctcggactctggaatcaatggtataccaggcggctttaggcact

SEQ ID NO: 116198 - DNA, 75 bp, Homo sapiens
ttttaccaccagagatgtacctcggactctggaatcaatggtataccaggcggctttaggcacttctcgtctctc

SEQ ID NO: 116199 - DNA, 76 bp, Homo sapiens
atgtacctcggactctggaatcaatggtataccaggcggctttaggcacttctcgtctctcgaggatgtagcctaa

SEQ ID NO: 116200 - DNA, 79 bp, Homo sapiens
actctggaatcaatggtataccaggcggctttaggcacttctcgtctctcgaggatgtagcctaagatgtcagcaccac

SEQ ID NO: 116201 - DNA, 82 bp, Homo sapiens
ggaatcaatggtataccaggcggctttaggcacttctcgtctctcgaggatgtagcctaagatgtcagcaccaccatcatca

SEQ ID NO: 116202 - DNA, 83 bp, Homo sapiens
tataccaggcggctttaggcacttctcgtctctcgaggatgtagcctaagatgtcagcaccaccatcatcagcaggaggtctc

SEQ ID NO: 116203 - DNA, 85 bp, Homo sapiens
tttaggcacttctcgtctctcgaggatgtagcctaagatgtcagcaccaccatcatcagcaggaggtctccagctgaccctcaca

SEQ ID NO: 116204 - DNA, 85 bp, Homo sapiens
acttctcgtctctcgaggatgtagcctaagatgtcagcaccaccatcatcagcaggaggtctccagctgaccctcacagagcgga

SEQ ID NO: 116205 - DNA, 88 bp, Homo sapiens
gaggatgtagcctaagatgtcagcaccaccatcatcagcaggaggtctccagctgaccctcacagagcggacttggatgtcatcatat

SEQ ID NO: 116206 - DNA, 88 bp, Homo sapiens
tgtagcctaagatgtcagcaccaccatcatcagcaggaggtctccagctgaccctcacagagcggacttggatgtcatcatattccag

SEQ ID NO: 116207 - DNA, 86 bp, Homo sapiens
atgtcagcaccaccatcatcagcaggaggtctccagctgaccctcacagagcggacttggatgtcatcatattccagtggcccttc

SEQ ID NO: 116208 - DNA, 83 bp, Homo sapiens
atcatcagcaggaggtctccagctgaccctcacagagcggacttggatgtcatcatattccagtggcccttctggactgttgg

SEQ ID NO: 116209 - DNA, 78 bp, Homo sapiens
aggaggtctccagctgaccctcacagagcggacttggatgtcatcatattccagtggcccttctggactgttgggact

SEQ ID NO: 116210 - DNA, 78 bp, Homo sapiens
agctgaccctcacagagcggacttggatgtcatcatattccagtggcccttctggactgttgggacttcctatcaccc

SEQ ID NO: 116211 - DNA, 80 bp, Homo sapiens
tcacagagcggacttggatgtcatcatattccagtggcccttctggactgttgggacttcctatcaccctgaccttgatg

SEQ ID NO: 116212 - DNA, 79 bp, Homo sapiens
atgtcatcatattccagtggcccttctggactgttgggacttcctatcaccctgaccttgatgtagacagccttcttgc

SEQ ID NO: 116213 - DNA, 75 bp, Homo sapiens
cagtggcccttctggactgttgggacttcctatcaccctgaccttgatgtagacagccttcttgccacatttatt

SEQ ID NO: 116214 - DNA, 74 bp, Homo sapiens
cccttctggactgttgggacttcctatcaccctgaccttgatgtagacagccttcttgccacatttattttcca

SEQ ID NO: 116215 - DNA, 75 bp, Homo sapiens
ttgggacttcctatcaccctgaccttgatgtagacagccttcttgccacatttattttccagaaccaggtcataa

SEQ ID NO: 116216 - DNA, 77 bp, Homo sapiens
ttcctatcaccctgaccttgatgtagacagccttcttgccacatttattttccagaaccaggtcataagtgccagaa

SEQ ID NO: 116217 - DNA, 79 bp, Homo sapiens
ttcttgccacatttattttccagaaccaggtcataagtgccagaatcacccctgtctgcttctttgatcacaagctcag

SEQ ID NO: 116218 - DNA, 79 bp, Homo sapiens
tttattttccagaaccaggtcataagtgccagaatcacccctgtctgcttctttgatcacaagctcagtgtgtgtttca

SEQ ID NO: 116219 - DNA, 83 bp, Homo sapiens
ttccagaaccaggtcataagtgccagaatcacccctgtctgcttctttgatcacaagctcagtgtgtgtttcagatgttgcaa

SEQ ID NO: 116220 - DNA, 84 bp, Homo sapiens
agaatcacccctgtctgcttctttgatcacaagctcagtgtgtgtttcagatgttgcaatcatggcacgcttactaatatcctg

SEQ ID NO: 116221 - DNA, 84 bp, Homo sapiens
ctgtctgcttctttgatcacaagctcagtgtgtgtttcagatgttgcaatcatggcacgcttactaatatcctggccttccttg

SEQ ID NO: 116222 - DNA, 78 bp, Homo sapiens
tgtgtttcagatgttgcaatcatggcacgcttactaatatcctggccttccttggtccatttacatattgggaatggt

SEQ ID NO: 116223 - DNA, 74 bp, Homo sapiens
atgttgcaatcatggcacgcttactaatatcctggccttccttggtccatttacatattgggaatggttttcct

SEQ ID NO: 116224 - DNA, 70 bp, Homo sapiens
ttactaatatcctggccttccttggtccatttacatattgggaatggttttcctttgattggtatggtaa

SEQ ID NO: 116225 - DNA, 73 bp, Homo sapiens
atatcctggccttccttggtccatttacatattgggaatggttttcctttgattggtatggtaagtctgatga

SEQ ID NO: 116226 - DNA, 73 bp, Homo sapiens
tttacatattgggaatggttttcctttgattggtatggtaagtctgatgacgccaccttgccttacaaagata

SEQ ID NO: 116227 - DNA, 72 bp, Homo sapiens
gaatggttttcctttgattggtatggtaagtctgatgacgccaccttgccttacaaagataccttcttggta

SEQ ID NO: 116228 - DNA, 71 bp, Homo sapiens
gttttcctttgattggtatggtaagtctgatgacgccaccttgccttacaaagataccttcttggtatctt

SEQ ID NO: 116229 - DNA, 75 bp, Homo sapiens
attggtatggtaagtctgatgacgccaccttgccttacaaagataccttcttggtatctttcatcaagttcataa

SEQ ID NO: 116230 - DNA, 78 bp, Homo sapiens
taagtctgatgacgccaccttgccttacaaagataccttcttggtatctttcatcaagttcataatcaggatattctg

SEQ ID NO: 116231 - DNA, 82 bp, Homo sapiens
aataagtctatggcaattattgcagaaagcaaatgatcatatgtctcaccaagcatttcagtgactttgactgttcctggta

SEQ ID NO: 116232 - DNA, 85 bp, Homo sapiens
tatggcaattattgcagaaagcaaatgatcatatgtctcaccaagcatttcagtgactttgactgttcctggtacctcagcaggc

SEQ ID NO: 116233 - DNA, 82 bp, Homo sapiens
agaaagcaaatgatcatatgtctcaccaagcatttcagtgactttgactgttcctggtacctcagcaggctcaccaggtcca

SEQ ID NO: 116234 - DNA, 83 bp, Homo sapiens
aatgatcatatgtctcaccaagcatttcagtgactttgactgttcctggtacctcagcaggctcaccaggtccaccagcatta

SEQ ID NO: 116235 - DNA, 82 bp, Homo sapiens
tatgtctcaccaagcatttcagtgactttgactgttcctggtacctcagcaggctcaccaggtccaccagcattacaagcta

SEQ ID NO: 116236 - DNA, 78 bp, Homo sapiens
catttcagtgactttgactgttcctggtacctcagcaggctcaccaggtccaccagcattacaagctaggacgcggaa

SEQ ID NO: 116237 - DNA, 75 bp, Homo sapiens
actttgactgttcctggtacctcagcaggctcaccaggtccaccagcattacaagctaggacgcggaacctgtat

SEQ ID NO: 116238 - DNA, 77 bp, Homo sapiens
actgttcctggtacctcagcaggctcaccaggtccaccagcattacaagctaggacgcggaacctgtattctgcacc

SEQ ID NO: 116239 - DNA, 78 bp, Homo sapiens
tacctcagcaggctcaccaggtccaccagcattacaagctaggacgcggaacctgtattctgcaccctgaggtaggtg

SEQ ID NO: 116240 - DNA, 77 bp, Homo sapiens
tcaccaggtccaccagcattacaagctaggacgcggaacctgtattctgcaccctgaggtaggtgtgttagagtata

SEQ ID NO: 116241 - DNA, 77 bp, Homo sapiens
caccagcattacaagctaggacgcggaacctgtattctgcaccctgaggtaggtgtgttagagtatactctcgaatc

SEQ ID NO: 116242 - DNA, 74 bp, Homo sapiens
attacaagctaggacgcggaacctgtattctgcaccctgaggtaggtgtgttagagtatactctcgaatcttgg

SEQ ID NO: 116243 - DNA, 73 bp, Homo sapiens
acgcggaacctgtattctgcaccctgaggtaggtgtgttagagtatactctcgaatcttggttggagtggtgt

SEQ ID NO: 116244 - DNA, 73 bp, Homo sapiens
aacctgtattctgcaccctgaggtaggtgtgttagagtatactctcgaatcttggttggagtggtgttacact

SEQ ID NO: 116245 - DNA, 73 bp, Homo sapiens
accctgaggtaggtgtgttagagtatactctcgaatcttggttggagtggtgttacacttggtccattcatgt

SEQ ID NO: 116246 - DNA, 75 bp, Homo sapiens
taggtgtgttagagtatactctcgaatcttggttggagtggtgttacacttggtccattcatgttgatctacttt

SEQ ID NO: 116247 - DNA, 76 bp, Homo sapiens
tgttagagtatactctcgaatcttggttggagtggtgttacacttggtccattcatgttgatctactttttgcatt

SEQ ID NO: 116248 - DNA, 77 bp, Homo sapiens
tggttggagtggtgttacacttggtccattcatgttgatctactttttgcatttcaatcaagtagcctgtgacttta

SEQ ID NO: 116249 - DNA, 79 bp, Homo sapiens
tgttacacttggtccattcatgttgatctactttttgcatttcaatcaagtagcctgtgactttagatcctccttcatc

SEQ ID NO: 116250 - DNA, 78 bp, Homo sapiens
acttggtccattcatgttgatctactttttgcatttcaatcaagtagcctgtgactttagatcctccttcatcttctg

SEQ ID NO: 116251 - DNA, 79 bp, Homo sapiens
attcatgttgatctactttttgcatttcaatcaagtagcctgtgactttagatcctccttcatcttctggaacactcca

SEQ ID NO: 116252 - DNA, 77 bp, Homo sapiens
atttcaatcaagtagcctgtgactttagatcctccttcatcttctggaacactccaggccagggagactgatgtcct

SEQ ID NO: 116253 - DNA, 79 bp, Homo sapiens
tagcctgtgactttagatcctccttcatcttctggaacactccaggccagggagactgatgtccttgttgtatcagtaa

SEQ ID NO: 116254 - DNA, 76 bp, Homo sapiens
actttagatcctccttcatcttctggaacactccaggccagggagactgatgtccttgttgtatcagtaactcttg

SEQ ID NO: 116255 - DNA, 75 bp, Homo sapiens
ctccttcatcttctggaacactccaggccagggagactgatgtccttgttgtatcagtaactcttgggttttgtg

SEQ ID NO: 116256 - DNA, 74 bp, Homo sapiens
atcttctggaacactccaggccagggagactgatgtccttgttgtatcagtaactcttgggttttgtggctttc

SEQ ID NO: 116257 - DNA, 73 bp, Homo sapiens
aacactccaggccagggagactgatgtccttgttgtatcagtaactcttgggttttgtggctttcctggagga

SEQ ID NO: 116258 - DNA, 75 bp, Homo sapiens
ggagactgatgtccttgttgtatcagtaactcttgggttttgtggctttcctggaggagctgagaataagaataa

SEQ ID NO: 116259 - DNA, 74 bp, Homo sapiens
atgtccttgttgtatcagtaactcttgggttttgtggctttcctggaggagctgagaataagaataagaatata

SEQ ID NO: 116260 - DNA, 75 bp, Homo sapiens
tataaattgtaactcaatcaatttgactgatacaaaatgtccttaccaattggatccatggcaacgatgggtttg

SEQ ID NO: 116261 - DNA, 74 bp, Homo sapiens
attgtaactcaatcaatttgactgatacaaaatgtccttaccaattggatccatggcaacgatgggtttggaag

SEQ ID NO: 116262 - DNA, 71 bp, Homo sapiens
atttgactgatacaaaatgtccttaccaattggatccatggcaacgatgggtttggaaggacgacttggtt

SEQ ID NO: 116263 - DNA, 71 bp, Homo sapiens
actgatacaaaatgtccttaccaattggatccatggcaacgatgggtttggaaggacgacttggtttccca

SEQ ID NO: 116264 - DNA, 69 bp, Homo sapiens
aatgtccttaccaattggatccatggcaacgatgggtttggaaggacgacttggtttcccagaccctct

SEQ ID NO: 116265 - DNA, 74 bp, Homo sapiens
aattggatccatggcaacgatgggtttggaaggacgacttggtttcccagaccctcttgcattaatggctgtga

SEQ ID NO: 116266 - DNA, 74 bp, Homo sapiens
gcaacgatgggtttggaaggacgacttggtttcccagaccctcttgcattaatggctgtgacacggtgttcata

SEQ ID NO: 116267 - DNA, 73 bp, Homo sapiens
tgggtttggaaggacgacttggtttcccagaccctcttgcattaatggctgtgacacggtgttcatattctaa

SEQ ID NO: 116268 - DNA, 74 bp, Homo sapiens
aaggacgacttggtttcccagaccctcttgcattaatggctgtgacacggtgttcatattctaagccttcagta

SEQ ID NO: 116269 - DNA, 76 bp, Homo sapiens
ttggtttcccagaccctcttgcattaatggctgtgacacggtgttcatattctaagccttcagtaaggccagtgga

SEQ ID NO: 116270 - DNA, 78 bp, Homo sapiens
ctcttgcattaatggctgtgacacggtgttcatattctaagccttcagtaaggccagtggagcggtaccgtgtcattg

SEQ ID NO: 116271 - DNA, 77 bp, Homo sapiens
attaatggctgtgacacggtgttcatattctaagccttcagtaaggccagtggagcggtaccgtgtcattgtcacag

SEQ ID NO: 116272 - DNA, 73 bp, Homo sapiens
acacggtgttcatattctaagccttcagtaaggccagtggagcggtaccgtgtcattgtcacaggtactttat

SEQ ID NO: 116273 - DNA, 74 bp, Homo sapiens
ttcatattctaagccttcagtaaggccagtggagcggtaccgtgtcattgtcacaggtactttatttacacgga

SEQ ID NO: 116274 - DNA, 73 bp, Homo sapiens
taagccttcagtaaggccagtggagcggtaccgtgtcattgtcacaggtactttatttacacggacccatcga

SEQ ID NO: 116275 - DNA, 76 bp, Homo sapiens
taaggccagtggagcggtaccgtgtcattgtcacaggtactttatttacacggacccatcgatctgctctcacttc

SEQ ID NO: 116276 - DNA, 77 bp, Homo sapiens
agcggtaccgtgtcattgtcacaggtactttatttacacggacccatcgatctgctctcacttctttgcgctccaca

SEQ ID NO: 116277 - DNA, 79 bp, Homo sapiens
taccgtgtcattgtcacaggtactttatttacacggacccatcgatctgctctcacttctttgcgctccacaatatatc

SEQ ID NO: 116278 - DNA, 79 bp, Homo sapiens
ttgtcacaggtactttatttacacggacccatcgatctgctctcacttctttgcgctccacaatatatccagtcacttg

SEQ ID NO: 116279 - DNA, 78 bp, Homo sapiens
tactttatttacacggacccatcgatctgctctcacttctttgcgctccacaatatatccagtcacttgggagccacc

SEQ ID NO: 116280 - DNA, 80 bp, Homo sapiens
acacggacccatcgatctgctctcacttctttgcgctccacaatatatccagtcacttgggagccaccgtcatcctctgg

SEQ ID NO: 116281 - DNA, 79 bp, Homo sapiens
tctgctctcacttctttgcgctccacaatatatccagtcacttgggagccaccgtcatcctctggtgggtaccaagtaa

SEQ ID NO: 116282 - DNA, 76 bp, Homo sapiens
acttctttgcgctccacaatatatccagtcacttgggagccaccgtcatcctctggtgggtaccaagtaagtgtca

SEQ ID NO: 116283 - DNA, 78 bp, Homo sapiens
ctccacaatatatccagtcacttgggagccaccgtcatcctctggtgggtaccaagtaagtgtcatgccatcacggga

SEQ ID NO: 116284 - DNA, 76 bp, Homo sapiens
aatatatccagtcacttgggagccaccgtcatcctctggtgggtaccaagtaagtgtcatgccatcacgggaaaca

SEQ ID NO: 116285 - DNA, 76 bp, Homo sapiens
acttgggagccaccgtcatcctctggtgggtaccaagtaagtgtcatgccatcacgggaaacatcaaatatctgta

SEQ ID NO: 116286 - DNA, 75 bp, Homo sapiens
accgtcatcctctggtgggtaccaagtaagtgtcatgccatcacgggaaacatcaaatatctgtaatgtttctgg

SEQ ID NO: 116287 - DNA, 74 bp, Homo sapiens
atcctctggtgggtaccaagtaagtgtcatgccatcacgggaaacatcaaatatctgtaatgtttctgggggtc

SEQ ID NO: 116288 - DNA, 74 bp, Homo sapiens
tgggtaccaagtaagtgtcatgccatcacgggaaacatcaaatatctgtaatgtttctgggggtccaggaatac

SEQ ID NO: 116289 - DNA, 79 bp, Homo sapiens
gtaagtgtcatgccatcacgggaaacatcaaatatctgtaatgtttctgggggtccaggaatacctgcagcaagacaga

SEQ ID NO: 116290 - DNA, 74 bp, Homo sapiens
atcacgggaaacatcaaatatctgtaatgtttctgggggtccaggaatacctgcagcaagacagaggttaacac

SEQ ID NO: 116291 - DNA, 77 bp, Homo sapiens
aacatcaaatatctgtaatgtttctgggggtccaggaatacctgcagcaagacagaggttaacacgatatggcaata

SEQ ID NO: 116292 - DNA, 79 bp, Homo sapiens
aggtggggagagtggtggaagggcctgtggacttacggatgctgctgcgacactctatgacctcagactgcaagtaaga

SEQ ID NO: 116293 - DNA, 80 bp, Homo sapiens
agtggtggaagggcctgtggacttacggatgctgctgcgacactctatgacctcagactgcaagtaagagccaatcccga

SEQ ID NO: 116294 - DNA, 78 bp, Homo sapiens
agggcctgtggacttacggatgctgctgcgacactctatgacctcagactgcaagtaagagccaatcccgaagcggtt

SEQ ID NO: 116295 - DNA, 83 bp, Homo sapiens
tgtggacttacggatgctgctgcgacactctatgacctcagactgcaagtaagagccaatcccgaagcggtttgttgcagcca

SEQ ID NO: 116296 - DNA, 83 bp, Homo sapiens
atgctgctgcgacactctatgacctcagactgcaagtaagagccaatcccgaagcggtttgttgcagccacacggaacacata

SEQ ID NO: 116297 - DNA, 78 bp, Homo sapiens
acactctatgacctcagactgcaagtaagagccaatcccgaagcggtttgttgcagccacacggaacacatactcatt

SEQ ID NO: 116298 - DNA, 78 bp, Homo sapiens
tatgacctcagactgcaagtaagagccaatcccgaagcggtttgttgcagccacacggaacacatactcatttccttc

SEQ ID NO: 116299 - DNA, 74 bp, Homo sapiens
caagtaagagccaatcccgaagcggtttgttgcagccacacggaacacatactcatttccttcggtgagtctgg

SEQ ID NO: 116300 - DNA, 72 bp, Homo sapiens
ccaatcccgaagcggtttgttgcagccacacggaacacatactcatttccttcggtgagtctggtaaactta

SEQ ID NO: 116301 - DNA, 71 bp, Homo sapiens
aagcggtttgttgcagccacacggaacacatactcatttccttcggtgagtctggtaaacttaaacgtgga

SEQ ID NO: 116302 - DNA, 73 bp, Homo sapiens
tttgttgcagccacacggaacacatactcatttccttcggtgagtctggtaaacttaaacgtggacctagtca

SEQ ID NO: 116303 - DNA, 71 bp, Homo sapiens
acggaacacatactcatttccttcggtgagtctggtaaacttaaacgtggacctagtcactgattcagaaa

SEQ ID NO: 116304 - DNA, 72 bp, Homo sapiens
atactcatttccttcggtgagtctggtaaacttaaacgtggacctagtcactgattcagaaacgggcagcca

SEQ ID NO: 116305 - DNA, 72 bp, Homo sapiens
tttccttcggtgagtctggtaaacttaaacgtggacctagtcactgattcagaaacgggcagccatcctgga

SEQ ID NO: 116306 - DNA, 75 bp, Homo sapiens
tctggtaaacttaaacgtggacctagtcactgattcagaaacgggcagccatcctggacgatgagcgtcacgttg

SEQ ID NO: 116307 - DNA, 74 bp, Homo sapiens
aaacttaaacgtggacctagtcactgattcagaaacgggcagccatcctggacgatgagcgtcacgttgttcta

SEQ ID NO: 116308 - DNA, 78 bp, Homo sapiens
acctagtcactgattcagaaacgggcagccatcctggacgatgagcgtcacgttgttctaccacataaccactcagtg

SEQ ID NO: 116309 - DNA, 79 bp, Homo sapiens
actgattcagaaacgggcagccatcctggacgatgagcgtcacgttgttctaccacataaccactcagtggagcaccac

SEQ ID NO: 116310 - DNA, 76 bp, Homo sapiens
aacgggcagccatcctggacgatgagcgtcacgttgttctaccacataaccactcagtggagcaccaccgtccaat

SEQ ID NO: 116311 - DNA, 76 bp, Homo sapiens
atcctggacgatgagcgtcacgttgttctaccacataaccactcagtggagcaccaccgtccaattcaggtggttc

SEQ ID NO: 116312 - DNA, 74 bp, Homo sapiens
atgagcgtcacgttgttctaccacataaccactcagtggagcaccaccgtccaattcaggtggttcccaggaaa

SEQ ID NO: 116313 - DNA, 73 bp, Homo sapiens
gttgttctaccacataaccactcagtggagcaccaccgtccaattcaggtggttcccaggaaatggtaattga

SEQ ID NO: 116314 - DNA, 76 bp, Homo sapiens
cacataaccactcagtggagcaccaccgtccaattcaggtggttcccaggaaatggtaattgatgtagcatcaatt

SEQ ID NO: 116315 - DNA, 74 bp, Homo sapiens
aggtggttcccaggaaatggtaattgatgtagcatcaatttcatcaatcttaataggtcctgttggtggaccag

SEQ ID NO: 116316 - DNA, 78 bp, Homo sapiens
aaatggtaattgatgtagcatcaatttcatcaatcttaataggtcctgttggtggaccaggcttgtctatgaaagaga

SEQ ID NO: 116317 - DNA, 78 bp, Homo sapiens
gtaattgatgtagcatcaatttcatcaatcttaataggtcctgttggtggaccaggcttgtctatgaaagagaagaaa

SEQ ID NO: 116318 - DNA, 74 bp, Homo sapiens
atcaatttcatcaatcttaataggtcctgttggtggaccaggcttgtctatgaaagagaagaaatacaggaaat

SEQ ID NO: 116319 - DNA, 71 bp, Homo sapiens
atcaatcttaataggtcctgttggtggaccaggcttgtctatgaaagagaagaaatacaggaaattaattt

SEQ ID NO: 116320 - DNA, 74 bp, Homo sapiens
aattgggtgactgaacatcaacttgcttgtatctttgtcacacatccttaccaagaatgataactttaatggtt

SEQ ID NO: 116321 - DNA, 75 bp, Homo sapiens
ctgaacatcaacttgcttgtatctttgtcacacatccttaccaagaatgataactttaatggtttctgaagtagt

SEQ ID NO: 116322 - DNA, 71 bp, Homo sapiens
cttgtatctttgtcacacatccttaccaagaatgataactttaatggtttctgaagtagttccggtaacat

SEQ ID NO: 116323 - DNA, 71 bp, Homo sapiens
ctttgtcacacatccttaccaagaatgataactttaatggtttctgaagtagttccggtaacattcttcaa

SEQ ID NO: 116324 - DNA, 71 bp, Homo sapiens
catccttaccaagaatgataactttaatggtttctgaagtagttccggtaacattcttcaattcaagtgtg

SEQ ID NO: 116325 - DNA, 73 bp, Homo sapiens
gaatgataactttaatggtttctgaagtagttccggtaacattcttcaattcaagtgtgtattctccagtatc

SEQ ID NO: 116326 - DNA, 73 bp, Homo sapiens
actttaatggtttctgaagtagttccggtaacattcttcaattcaagtgtgtattctccagtatctctgatag

SEQ ID NO: 116327 - DNA, 75 bp, Homo sapiens
tttctgaagtagttccggtaacattcttcaattcaagtgtgtattctccagtatctctgatagtggtttcacgga

SEQ ID NO: 116328 - DNA, 74 bp, Homo sapiens
ttccggtaacattcttcaattcaagtgtgtattctccagtatctctgatagtggtttcacggatggttaattta

SEQ ID NO: 116329 - DNA, 75 bp, Homo sapiens
acattcttcaattcaagtgtgtattctccagtatctctgatagtggtttcacggatggttaatttagctacttta

SEQ ID NO: 116330 - DNA, 74 bp, Homo sapiens
attcaagtgtgtattctccagtatctctgatagtggtttcacggatggttaatttagctactttagtgtgagtt

SEQ ID NO: 116331 - DNA, 77 bp, Homo sapiens
tgtattctccagtatctctgatagtggtttcacggatggttaatttagctactttagtgtgagtttcaactgtgaca

SEQ ID NO: 116332 - DNA, 76 bp, Homo sapiens
agtatctctgatagtggtttcacggatggttaatttagctactttagtgtgagtttcaactgtgacacgctctgat

SEQ ID NO: 116333 - DNA, 75 bp, Homo sapiens
atagtggtttcacggatggttaatttagctactttagtgtgagtttcaactgtgacacgctctgattctctcagt

SEQ ID NO: 116334 - DNA, 77 bp, Homo sapiens
gatggttaatttagctactttagtgtgagtttcaactgtgacacgctctgattctctcagtttagaaccagcaaaga

SEQ ID NO: 116335 - DNA, 76 bp, Homo sapiens
ttaatttagctactttagtgtgagtttcaactgtgacacgctctgattctctcagtttagaaccagcaaagaacca

SEQ ID NO: 116336 - DNA, 79 bp, Homo sapiens
tactttagtgtgagtttcaactgtgacacgctctgattctctcagtttagaaccagcaaagaaccaggaagcagcagga

SEQ ID NO: 116337 - DNA, 77 bp, Homo sapiens
agtttcaactgtgacacgctctgattctctcagtttagaaccagcaaagaaccaggaagcagcaggaggtggacggc

SEQ ID NO: 116338 - DNA, 79 bp, Homo sapiens
acacgctctgattctctcagtttagaaccagcaaagaaccaggaagcagcaggaggtggacggccagcaataggtatca

SEQ ID NO: 116339 - DNA, 78 bp, Homo sapiens
attctctcagtttagaaccagcaaagaaccaggaagcagcaggaggtggacggccagcaataggtatcaccagctcta

SEQ ID NO: 116340 - DNA, 76 bp, Homo sapiens
agtttagaaccagcaaagaaccaggaagcagcaggaggtggacggccagcaataggtatcaccagctctactggtc

SEQ ID NO: 116341 - DNA, 79 bp, Homo sapiens
aaccagcaaagaaccaggaagcagcaggaggtggacggccagcaataggtatcaccagctctactggtctgccagctgg

SEQ ID NO: 116342 - DNA, 82 bp, Homo sapiens
aggaggtggacggccagcaataggtatcaccagctctactggtctgccagctgggacatggatggtcttctgaggcattgta

SEQ ID NO: 116343 - DNA, 83 bp, Homo sapiens
ataggtatcaccagctctactggtctgccagctgggacatggatggtcttctgaggcattgtagaaagatcgattgttggcaa

SEQ ID NO: 116344 - DNA, 84 bp, Homo sapiens
atcaccagctctactggtctgccagctgggacatggatggtcttctgaggcattgtagaaagatcgattgttggcaacactatg

SEQ ID NO: 116345 - DNA, 81 bp, Homo sapiens
tactggtctgccagctgggacatggatggtcttctgaggcattgtagaaagatcgattgttggcaacactatgggaaagaa

SEQ ID NO: 116346 - DNA, 79 bp, Homo sapiens
ctgggacatggatggtcttctgaggcattgtagaaagatcgattgttggcaacactatgggaaagaaatcaggcattta

SEQ ID NO: 116347 - DNA, 75 bp, Homo sapiens
tttttttttggctatttggtacatacctctgaggtcttgtacagtcacggctgtgacagtctctcttggttctga

SEQ ID NO: 116348 - DNA, 78 bp, Homo sapiens
ttggtacatacctctgaggtcttgtacagtcacggctgtgacagtctctcttggttctgacacacctttctcattttg

SEQ ID NO: 116349 - DNA, 76 bp, Homo sapiens
tacagtcacggctgtgacagtctctcttggttctgacacacctttctcattttgtgcccttattctaaataagtat

SEQ ID NO: 116350 - DNA, 74 bp, Homo sapiens
ctgtgacagtctctcttggttctgacacacctttctcattttgtgcccttattctaaataagtattgttcacct

SEQ ID NO: 116351 - DNA, 72 bp, Homo sapiens
ctctcttggttctgacacacctttctcattttgtgcccttattctaaataagtattgttcaccttcatttaa

SEQ ID NO: 116352 - DNA, 70 bp, Homo sapiens
ggttctgacacacctttctcattttgtgcccttattctaaataagtattgttcaccttcatttaaggaag

SEQ ID NO: 116353 - DNA, 71 bp, Homo sapiens
cctttctcattttgtgcccttattctaaataagtattgttcaccttcatttaaggaagtaacagtgtgctc

SEQ ID NO: 116354 - DNA, 71 bp, Homo sapiens
attttgtgcccttattctaaataagtattgttcaccttcatttaaggaagtaacagtgtgctctaggactg

SEQ ID NO: 116355 - DNA, 69 bp, Homo sapiens
ccttattctaaataagtattgttcaccttcatttaaggaagtaacagtgtgctctaggactgtgggttt

SEQ ID NO: 116356 - DNA, 70 bp, Homo sapiens
aataagtattgttcaccttcatttaaggaagtaacagtgtgctctaggactgtgggttttaaggtgacaa

SEQ ID NO: 116357 - DNA, 73 bp, Homo sapiens
ttcaccttcatttaaggaagtaacagtgtgctctaggactgtgggttttaaggtgacaaccttcatccatctc

SEQ ID NO: 116358 - DNA, 75 bp, Homo sapiens
atttaaggaagtaacagtgtgctctaggactgtgggttttaaggtgacaaccttcatccatctctctgtgccagc

SEQ ID NO: 116359 - DNA, 78 bp, Homo sapiens
agtaacagtgtgctctaggactgtgggttttaaggtgacaaccttcatccatctctctgtgccagctttgcaggcctc

SEQ ID NO: 116360 - DNA, 80 bp, Homo sapiens
taggactgtgggttttaaggtgacaaccttcatccatctctctgtgccagctttgcaggcctcgagaacatatccagtga

SEQ ID NO: 116361 - DNA, 80 bp, Homo sapiens
tgggttttaaggtgacaaccttcatccatctctctgtgccagctttgcaggcctcgagaacatatccagtgagtcggcta

SEQ ID NO: 116362 - DNA, 84 bp, Homo sapiens
tgacaaccttcatccatctctctgtgccagctttgcaggcctcgagaacatatccagtgagtcggctaccaccatcgtagagtg

SEQ ID NO: 116363 - DNA, 81 bp, Homo sapiens
ttcatccatctctctgtgccagctttgcaggcctcgagaacatatccagtgagtcggctaccaccatcgtagagtggtttt

SEQ ID NO: 116364 - DNA, 79 bp, Homo sapiens
atctctctgtgccagctttgcaggcctcgagaacatatccagtgagtcggctaccaccatcgtagagtggtttttccca

SEQ ID NO: 116365 - DNA, 74 bp, Homo sapiens
ctttgcaggcctcgagaacatatccagtgagtcggctaccaccatcgtagagtggtttttcccaggcaagggta

SEQ ID NO: 116366 - DNA, 73 bp, Homo sapiens
ctcgagaacatatccagtgagtcggctaccaccatcgtagagtggtttttcccaggcaagggtaacagtggat

SEQ ID NO: 116367 - DNA, 71 bp, Homo sapiens
aacatatccagtgagtcggctaccaccatcgtagagtggtttttcccaggcaagggtaacagtggatttgg

SEQ ID NO: 116368 - DNA, 72 bp, Homo sapiens
agtgagtcggctaccaccatcgtagagtggtttttcccaggcaagggtaacagtggatttggtgacatcgac

SEQ ID NO: 116369 - DNA, 72 bp, Homo sapiens
taccaccatcgtagagtggtttttcccaggcaagggtaacagtggatttggtgacatcgaccacttctagct

SEQ ID NO: 116370 - DNA, 72 bp, Homo sapiens
agtggtttttcccaggcaagggtaacagtggatttggtgacatcgaccacttctagctttgcaggcaccaaa

SEQ ID NO: 116371 - DNA, 73 bp, Homo sapiens
tttttcccaggcaagggtaacagtggatttggtgacatcgaccacttctagctttgcaggcaccaaaggcact

SEQ ID NO: 116372 - DNA, 75 bp, Homo sapiens
aagggtaacagtggatttggtgacatcgaccacttctagctttgcaggcaccaaaggcacttctgagaccagtac

SEQ ID NO: 116373 - DNA, 81 bp, Homo sapiens
acatcgaccacttctagctttgcaggcaccaaaggcacttctgagaccagtactgcatcagatgtttcacaaggttctcca

SEQ ID NO: 116374 - DNA, 82 bp, Homo sapiens
ttctagctttgcaggcaccaaaggcacttctgagaccagtactgcatcagatgtttcacaaggttctccaatgccataaata

SEQ ID NO: 116375 - DNA, 82 bp, Homo sapiens
aaggcacttctgagaccagtactgcatcagatgtttcacaaggttctccaatgccataaatattttctggcagcactctgaa

SEQ ID NO: 116376 - DNA, 83 bp, Homo sapiens
ttctgagaccagtactgcatcagatgtttcacaaggttctccaatgccataaatattttctggcagcactctgaaatagtaca

SEQ ID NO: 116377 - DNA, 81 bp, Homo sapiens
tactgcatcagatgtttcacaaggttctccaatgccataaatattttctggcagcactctgaaatagtacatggttccttc

SEQ ID NO: 116378 - DNA, 77 bp, Homo sapiens
agatgtttcacaaggttctccaatgccataaatattttctggcagcactctgaaatagtacatggttccttctacaa

SEQ ID NO: 116379 - DNA, 75 bp, Homo sapiens
aaggttctccaatgccataaatattttctggcagcactctgaaatagtacatggttccttctacaagtccagaaa

SEQ ID NO: 116380 - DNA, 75 bp, Homo sapiens
aatgccataaatattttctggcagcactctgaaatagtacatggttccttctacaagtccagaaattctgtaaag

SEQ ID NO: 116381 - DNA, 74 bp, Homo sapiens
ataaatattttctggcagcactctgaaatagtacatggttccttctacaagtccagaaattctgtaaagtgtct

SEQ ID NO: 116382 - DNA, 77 bp, Homo sapiens
cagcactctgaaatagtacatggttccttctacaagtccagaaattctgtaaagtgtcttgctgcatttggtagtta

SEQ ID NO: 116383 - DNA, 72 bp, Homo sapiens
aaatagtacatggttccttctacaagtccagaaattctgtaaagtgtcttgctgcatttggtagttactgtt

SEQ ID NO: 116384 - DNA, 80 bp, Homo sapiens
ttctacaagtccagaaattctgtaaagtgtcttgctgcatttggtagttactgttttgaatgctctcatagcagcttcac

SEQ ID NO: 116385 - DNA, 80 bp, Homo sapiens
agaaattctgtaaagtgtcttgctgcatttggtagttactgttttgaatgctctcatagcagcttcacgcttctcaacga

SEQ ID NO: 116386 - DNA, 82 bp, Homo sapiens
taaagtgtcttgctgcatttggtagttactgttttgaatgctctcatagcagcttcacgcttctcaacgatgtaattgttga

SEQ ID NO: 116387 - DNA, 84 bp, Homo sapiens
ttgctgcatttggtagttactgttttgaatgctctcatagcagcttcacgcttctcaacgatgtaattgttgactggagctcca

SEQ ID NO: 116388 - DNA, 80 bp, Homo sapiens
atttggtagttactgttttgaatgctctcatagcagcttcacgcttctcaacgatgtaattgttgactggagctccacca

SEQ ID NO: 116389 - DNA, 82 bp, Homo sapiens
ttttgaatgctctcatagcagcttcacgcttctcaacgatgtaattgttgactggagctccaccatcaatcgtgggaatttc

SEQ ID NO: 116390 - DNA, 80 bp, Homo sapiens
tctcatagcagcttcacgcttctcaacgatgtaattgttgactggagctccaccatcaatcgtgggaatttcccaagtta

SEQ ID NO: 116391 - DNA, 77 bp, Homo sapiens
agcttcacgcttctcaacgatgtaattgttgactggagctccaccatcaatcgtgggaatttcccaagttatagtca

SEQ ID NO: 116392 - DNA, 74 bp, Homo sapiens
ctccaccatcaatcgtgggaatttcccaagttatagtcacagaatctcttgatacttccttaactttcactgaa

SEQ ID NO: 116393 - DNA, 71 bp, Homo sapiens
aatcgtgggaatttcccaagttatagtcacagaatctcttgatacttccttaactttcactgaaggacagg

SEQ ID NO: 116394 - DNA, 73 bp, Homo sapiens
acagaatctcttgatacttccttaactttcactgaaggacagggaccaggagtatctgaaaaacagaatgaaa

SEQ ID NO: 116395 - DNA, 73 bp, Homo sapiens
ttgatacttccttaactttcactgaaggacagggaccaggagtatctgaaaaacagaatgaaagattcatatt

SEQ ID NO: 116396 - DNA, 75 bp, Homo sapiens
tagaggatctactcattgtatagccaattttaagtaaaatgcttaccatagactttaacaaggactgttgctgat

SEQ ID NO: 116397 - DNA, 75 bp, Homo sapiens
tctactcattgtatagccaattttaagtaaaatgcttaccatagactttaacaaggactgttgctgatttcttgc

SEQ ID NO: 116398 - DNA, 74 bp, Homo sapiens
tgtatagccaattttaagtaaaatgcttaccatagactttaacaaggactgttgctgatttcttgccagattgg

SEQ ID NO: 116399 - DNA, 72 bp, Homo sapiens
ttttaagtaaaatgcttaccatagactttaacaaggactgttgctgatttcttgccagattggttttcagct

SEQ ID NO: 116400 - DNA, 75 bp, Homo sapiens
aatgcttaccatagactttaacaaggactgttgctgatttcttgccagattggttttcagcttcaattgtgtatt

SEQ ID NO: 116401 - DNA, 77 bp, Homo sapiens
tagactttaacaaggactgttgctgatttcttgccagattggttttcagcttcaattgtgtattttccagcatcgta

SEQ ID NO: 116402 - DNA, 77 bp, Homo sapiens
taacaaggactgttgctgatttcttgccagattggttttcagcttcaattgtgtattttccagcatcgtaccgatta

SEQ ID NO: 116403 - DNA, 75 bp, Homo sapiens
ctgatttcttgccagattggttttcagcttcaattgtgtattttccagcatcgtaccgattaactttgtccacta

SEQ ID NO: 116404 - DNA, 77 bp, Homo sapiens
ttgccagattggttttcagcttcaattgtgtattttccagcatcgtaccgattaactttgtccactattagcaatga

SEQ ID NO: 116405 - DNA, 78 bp, Homo sapiens
caattgtgtattttccagcatcgtaccgattaactttgtccactattagcaatgagtagctctcagtggtgtcaataa

SEQ ID NO: 116406 - DNA, 77 bp, Homo sapiens
tattttccagcatcgtaccgattaactttgtccactattagcaatgagtagctctcagtggtgtcaataattgcccg

SEQ ID NO: 116407 - DNA, 76 bp, Homo sapiens
atcgtaccgattaactttgtccactattagcaatgagtagctctcagtggtgtcaataattgcccggcttgcaagg

SEQ ID NO: 116408 - DNA, 79 bp, Homo sapiens
ttaactttgtccactattagcaatgagtagctctcagtggtgtcaataattgcccggcttgcaaggtcaatgccctgct

SEQ ID NO: 116409 - DNA, 83 bp, Homo sapiens
cactattagcaatgagtagctctcagtggtgtcaataattgcccggcttgcaaggtcaatgccctgcttgctccacgttatga

SEQ ID NO: 116410 - DNA, 83 bp, Homo sapiens
ttagcaatgagtagctctcagtggtgtcaataattgcccggcttgcaaggtcaatgccctgcttgctccacgttatgacagga

SEQ ID NO: 116411 - DNA, 80 bp, Homo sapiens
tctcagtggtgtcaataattgcccggcttgcaaggtcaatgccctgcttgctccacgttatgacaggaggtggtcttcca

SEQ ID NO: 116412 - DNA, 80 bp, Homo sapiens
tggtgtcaataattgcccggcttgcaaggtcaatgccctgcttgctccacgttatgacaggaggtggtcttccagataca

SEQ ID NO: 116413 - DNA, 81 bp, Homo sapiens
taattgcccggcttgcaaggtcaatgccctgcttgctccacgttatgacaggaggtggtcttccagatacagacaccatca

SEQ ID NO: 116414 - DNA, 81 bp, Homo sapiens
cttgcaaggtcaatgccctgcttgctccacgttatgacaggaggtggtcttccagatacagacaccatcaagcgcaaggag

SEQ ID NO: 116415 - DNA, 79 bp, Homo sapiens
aatgccctgcttgctccacgttatgacaggaggtggtcttccagatacagacaccatcaagcgcaaggaggccccagcc

SEQ ID NO: 116416 - DNA, 81 bp, Homo sapiens
ttgctccacgttatgacaggaggtggtcttccagatacagacaccatcaagcgcaaggaggccccagccctgatggtcaca

SEQ ID NO: 116417 - DNA, 80 bp, Homo sapiens
tatgacaggaggtggtcttccagatacagacaccatcaagcgcaaggaggccccagccctgatggtcacagtcttcttta

SEQ ID NO: 116418 - DNA, 85 bp, Homo sapiens
gatacagacaccatcaagcgcaaggaggccccagccctgatggtcacagtcttctttagatcatctgcaagctcaagatctggta

SEQ ID NO: 116419 - DNA, 79 bp, Homo sapiens
caaggaggccccagccctgatggtcacagtcttctttagatcatctgcaagctcaagatctggtatttctggaaagtta

SEQ ID NO: 116420 - DNA, 79 bp, Homo sapiens
ccagccctgatggtcacagtcttctttagatcatctgcaagctcaagatctggtatttctggaaagttaatgacaaaat

SEQ ID NO: 116421 - DNA, 77 bp, Homo sapiens
cagtcttctttagatcatctgcaagctcaagatctggtatttctggaaagttaatgacaaaatttaattaattcatg

SEQ ID NO: 116422 - DNA, 71 bp, Homo sapiens
tctggaaagttaatgacaaaatttaattaattcatggacaggtgtgagaagaaaataattcacctaaaagc

SEQ ID NO: 116423 - DNA, 70 bp, Homo sapiens
aggtgtgagaagaaaataattcacctaaaagcttctgtgataaatacctattctttccacgggctcaatt

SEQ ID NO: 116424 - DNA, 73 bp, Homo sapiens
gaaaataattcacctaaaagcttctgtgataaatacctattctttccacgggctcaatttcagcaattgattc

SEQ ID NO: 116425 - DNA, 76 bp, Homo sapiens
aaaagcttctgtgataaatacctattctttccacgggctcaatttcagcaattgattcgctgtattcgctcatacc

SEQ ID NO: 116426 - DNA, 75 bp, Homo sapiens
ataaatacctattctttccacgggctcaatttcagcaattgattcgctgtattcgctcatacccttcacgttcac

SEQ ID NO: 116427 - DNA, 80 bp, Homo sapiens
tattctttccacgggctcaatttcagcaattgattcgctgtattcgctcatacccttcacgttcacggcagcaactctga

SEQ ID NO: 116428 - DNA, 78 bp, Homo sapiens
acgggctcaatttcagcaattgattcgctgtattcgctcatacccttcacgttcacggcagcaactctgaaggaatat

SEQ ID NO: 116429 - DNA, 78 bp, Homo sapiens
aatttcagcaattgattcgctgtattcgctcatacccttcacgttcacggcagcaactctgaaggaatatttctggcc

SEQ ID NO: 116430 - DNA, 76 bp, Homo sapiens
attgattcgctgtattcgctcatacccttcacgttcacggcagcaactctgaaggaatatttctggcccattttaa

SEQ ID NO: 116431 - DNA, 77 bp, Homo sapiens
tgtattcgctcatacccttcacgttcacggcagcaactctgaaggaatatttctggcccattttaaggtctggcaca

SEQ ID NO: 116432 - DNA, 75 bp, Homo sapiens
atacccttcacgttcacggcagcaactctgaaggaatatttctggcccattttaaggtctggcacagtgaattca

SEQ ID NO: 116433 - DNA, 75 bp, Homo sapiens
gttcacggcagcaactctgaaggaatatttctggcccattttaaggtctggcacagtgaattcagtatttcttat

SEQ ID NO: 116434 - DNA, 75 bp, Homo sapiens
actctgaaggaatatttctggcccattttaaggtctggcacagtgaattcagtatttcttattgtggcattggta

SEQ ID NO: 116435 - DNA, 76 bp, Homo sapiens
aatatttctggcccattttaaggtctggcacagtgaattcagtatttcttattgtggcattggtatgcactcggta

SEQ ID NO: 116436 - DNA, 78 bp, Homo sapiens
ttctggcccattttaaggtctggcacagtgaattcagtatttcttattgtggcattggtatgcactcggtaccactga

SEQ ID NO: 116437 - DNA, 78 bp, Homo sapiens
ttttaaggtctggcacagtgaattcagtatttcttattgtggcattggtatgcactcggtaccactgatcagtgtcct

SEQ ID NO: 116438 - DNA, 81 bp, Homo sapiens
acagtgaattcagtatttcttattgtggcattggtatgcactcggtaccactgatcagtgtccttctcttgcatttccaga

SEQ ID NO: 116439 - DNA, 80 bp, Homo sapiens
agtatttcttattgtggcattggtatgcactcggtaccactgatcagtgtccttctcttgcatttccagaacatatccta

SEQ ID NO: 116440 - DNA, 83 bp, Homo sapiens
ttattgtggcattggtatgcactcggtaccactgatcagtgtccttctcttgcatttccagaacatatcctacaatgtcagta

SEQ ID NO: 116441 - DNA, 81 bp, Homo sapiens
attggtatgcactcggtaccactgatcagtgtccttctcttgcatttccagaacatatcctacaatgtcagtaccaccatc

SEQ ID NO: 116442 - DNA, 79 bp, Homo sapiens
tcggtaccactgatcagtgtccttctcttgcatttccagaacatatcctacaatgtcagtaccaccatcgtacatgggt

SEQ ID NO: 116443 - DNA, 79 bp, Homo sapiens
actgatcagtgtccttctcttgcatttccagaacatatcctacaatgtcagtaccaccatcgtacatgggtttggtcca

SEQ ID NO: 116444 - DNA, 78 bp, Homo sapiens
tccttctcttgcatttccagaacatatcctacaatgtcagtaccaccatcgtacatgggtttggtccatgccaaacta

SEQ ID NO: 116445 - DNA, 77 bp, Homo sapiens
catttccagaacatatcctacaatgtcagtaccaccatcgtacatgggtttggtccatgccaaactaatgctgtgtt

SEQ ID NO: 116446 - DNA, 76 bp, Homo sapiens
aacatatcctacaatgtcagtaccaccatcgtacatgggtttggtccatgccaaactaatgctgtgtttggtggta

SEQ ID NO: 116447 - DNA, 77 bp, Homo sapiens
tacaatgtcagtaccaccatcgtacatgggtttggtccatgccaaactaatgctgtgtttggtggtatccacaactc

SEQ ID NO: 116448 - DNA, 76 bp, Homo sapiens
agtaccaccatcgtacatgggtttggtccatgccaaactaatgctgtgtttggtggtatccacaactcttggagca

SEQ ID NO: 116449 - DNA, 75 bp, Homo sapiens
atcgtacatgggtttggtccatgccaaactaatgctgtgtttggtggtatccacaactcttggagcagaaggtgg

SEQ ID NO: 116450 - DNA, 73 bp, Homo sapiens
gggtttggtccatgccaaactaatgctgtgtttggtggtatccacaactcttggagcagaaggtggtccaggg

SEQ ID NO: 116451 - DNA, 74 bp, Homo sapiens
caaactaatgctgtgtttggtggtatccacaactcttggagcagaaggtggtccaggggtatctgtggaattta

SEQ ID NO: 116452 - DNA, 73 bp, Homo sapiens
taatgctgtgtttggtggtatccacaactcttggagcagaaggtggtccaggggtatctgtggaatttaaaaa

SEQ ID NO: 116453 - DNA, 76 bp, Homo sapiens
gtggtatccacaactcttggagcagaaggtggtccaggggtatctgtggaatttaaaaagtgagatgcagatatta

SEQ ID NO: 116454 - DNA, 85 bp, Homo sapiens
atatagttttgaggagcattgtatttatgtatgattcttggagctcacatgatggttctctgcatgagatgaagttggaagcttc

SEQ ID NO: 116455 - DNA, 88 bp, Homo sapiens
tttgaggagcattgtatttatgtatgattcttggagctcacatgatggttctctgcatgagatgaagttggaagcttcgctgggctca

SEQ ID NO: 116456 - DNA, 85 bp, Homo sapiens
attgtatttatgtatgattcttggagctcacatgatggttctctgcatgagatgaagttggaagcttcgctgggctcactgttac

SEQ ID NO: 116457 - DNA, 91 bp, Homo sapiens
tgtatgattcttggagctcacatgatggttctctgcatgagatgaagttggaagcttcgctgggctcactgttaccagctgcattcactgc

SEQ ID NO: 116458 - DNA, 88 bp, Homo sapiens
ttggagctcacatgatggttctctgcatgagatgaagttggaagcttcgctgggctcactgttaccagctgcattcactgcggtcacc

SEQ ID NO: 116459 - DNA, 83 bp, Homo sapiens
atgatggttctctgcatgagatgaagttggaagcttcgctgggctcactgttaccagctgcattcactgcggtcacccggaac

SEQ ID NO: 116460 - DNA, 81 bp, Homo sapiens
catgagatgaagttggaagcttcgctgggctcactgttaccagctgcattcactgcggtcacccggaactggtaatcacaa

SEQ ID NO: 116461 - DNA, 77 bp, Homo sapiens
atgaagttggaagcttcgctgggctcactgttaccagctgcattcactgcggtcacccggaactggtaatcacaacc

SEQ ID NO: 116462 - DNA, 78 bp, Homo sapiens
aagcttcgctgggctcactgttaccagctgcattcactgcggtcacccggaactggtaatcacaaccctccatcaggc

SEQ ID NO: 116463 - DNA, 79 bp, Homo sapiens
ggctcactgttaccagctgcattcactgcggtcacccggaactggtaatcacaaccctccatcaggctggtcaccttca

SEQ ID NO: 116464 - DNA, 81 bp, Homo sapiens
cagctgcattcactgcggtcacccggaactggtaatcacaaccctccatcaggctggtcaccttcagcctggtatcataca

SEQ ID NO: 116465 - DNA, 77 bp, Homo sapiens
attcactgcggtcacccggaactggtaatcacaaccctccatcaggctggtcaccttcagcctggtatcatacacca

SEQ ID NO: 116466 - DNA, 75 bp, Homo sapiens
acccggaactggtaatcacaaccctccatcaggctggtcaccttcagcctggtatcatacaccacatagtctttg

SEQ ID NO: 116467 - DNA, 77 bp, Homo sapiens
aactggtaatcacaaccctccatcaggctggtcaccttcagcctggtatcatacaccacatagtctttgttgacacg

SEQ ID NO: 116468 - DNA, 80 bp, Homo sapiens
aaccctccatcaggctggtcaccttcagcctggtatcatacaccacatagtctttgttgacacgtgtccagcgcaggctc

SEQ ID NO: 116469 - DNA, 82 bp, Homo sapiens
atcaggctggtcaccttcagcctggtatcatacaccacatagtctttgttgacacgtgtccagcgcaggctcttcttctcac

SEQ ID NO: 116470 - DNA, 79 bp, Homo sapiens
accttcagcctggtatcatacaccacatagtctttgttgacacgtgtccagcgcaggctcttcttctcacgtttgtcta

SEQ ID NO: 116471 - DNA, 78 bp, Homo sapiens
tggtatcatacaccacatagtctttgttgacacgtgtccagcgcaggctcttcttctcacgtttgtctactaggtagt

SEQ ID NO: 116472 - DNA, 78 bp, Homo sapiens
accacatagtctttgttgacacgtgtccagcgcaggctcttcttctcacgtttgtctactaggtagttgctgatttca

SEQ ID NO: 116473 - DNA, 79 bp, Homo sapiens
atagtctttgttgacacgtgtccagcgcaggctcttcttctcacgtttgtctactaggtagttgctgatttcattgcca

SEQ ID NO: 116474 - DNA, 82 bp, Homo sapiens
ttgacacgtgtccagcgcaggctcttcttctcacgtttgtctactaggtagttgctgatttcattgccaccatcagattcag

SEQ ID NO: 116475 - DNA, 79 bp, Homo sapiens
agcgcaggctcttcttctcacgtttgtctactaggtagttgctgatttcattgccaccatcagattcaggttttgtcca

SEQ ID NO: 116476 - DNA, 81 bp, Homo sapiens
ttcttctcacgtttgtctactaggtagttgctgatttcattgccaccatcagattcaggttttgtccactgaatgatgata

SEQ ID NO: 116477 - DNA, 80 bp, Homo sapiens
acgtttgtctactaggtagttgctgatttcattgccaccatcagattcaggttttgtccactgaatgatgatatgctctt

SEQ ID NO: 116478 - DNA, 83 bp, Homo sapiens
tactaggtagttgctgatttcattgccaccatcagattcaggttttgtccactgaatgatgatatgctctttgccagtcccaa

SEQ ID NO: 116479 - DNA, 82 bp, Homo sapiens
ctgatttcattgccaccatcagattcaggttttgtccactgaatgatgatatgctctttgccagtcccaacttcttcaggta

SEQ ID NO: 116480 - DNA, 80 bp, Homo sapiens
attgccaccatcagattcaggttttgtccactgaatgatgatatgctctttgccagtcccaacttcttcaggtatgccgg

SEQ ID NO: 116481 - DNA, 79 bp, Homo sapiens
gattcaggttttgtccactgaatgatgatatgctctttgccagtcccaacttcttcaggtatgccgggtggtgatggaa

SEQ ID NO: 116482 - DNA, 78 bp, Homo sapiens
aatgatgatatgctctttgccagtcccaacttcttcaggtatgccgggtggtgatggaatagctgtttatgaaaataa

SEQ ID NO: 116483 - DNA, 77 bp, Homo sapiens
atatgctctttgccagtcccaacttcttcaggtatgccgggtggtgatggaatagctgtttatgaaaataaggatga

SEQ ID NO: 116484 - DNA, 76 bp, Homo sapiens
tttgccagtcccaacttcttcaggtatgccgggtggtgatggaatagctgtttatgaaaataaggatgatgagaat

SEQ ID NO: 116485 - DNA, 75 bp, Homo sapiens
tcaactgtcaaattatttaaaagtgttaatacttactgaatgagtttctggctacaattggctctgattcaacag

SEQ ID NO: 116486 - DNA, 74 bp, Homo sapiens
aattatttaaaagtgttaatacttactgaatgagtttctggctacaattggctctgattcaacaggcacaccag

SEQ ID NO: 116487 - DNA, 76 bp, Homo sapiens
taaaagtgttaatacttactgaatgagtttctggctacaattggctctgattcaacaggcacaccagggccatatt

SEQ ID NO: 116488 - DNA, 78 bp, Homo sapiens
ttaatacttactgaatgagtttctggctacaattggctctgattcaacaggcacaccagggccatatttgtttactgc

SEQ ID NO: 116489 - DNA, 78 bp, Homo sapiens
atgagtttctggctacaattggctctgattcaacaggcacaccagggccatatttgtttactgccctcactcggaata

SEQ ID NO: 116490 - DNA, 79 bp, Homo sapiens
gctacaattggctctgattcaacaggcacaccagggccatatttgtttactgccctcactcggaatatgtactcattgt

SEQ ID NO: 116491 - DNA, 77 bp, Homo sapiens
aattggctctgattcaacaggcacaccagggccatatttgtttactgccctcactcggaatatgtactcattgttct

SEQ ID NO: 116492 - DNA, 77 bp, Homo sapiens
acaccagggccatatttgtttactgccctcactcggaatatgtactcattgttcttgatgagcctggtaacgacata

SEQ ID NO: 116493 - DNA, 75 bp, Homo sapiens
atatttgtttactgccctcactcggaatatgtactcattgttcttgatgagcctggtaacgacataggatagggt

SEQ ID NO: 116494 - DNA, 77 bp, Homo sapiens
tttactgccctcactcggaatatgtactcattgttcttgatgagcctggtaacgacataggatagggttgggcattc

SEQ ID NO: 116495 - DNA, 76 bp, Homo sapiens
actcggaatatgtactcattgttcttgatgagcctggtaacgacataggatagggttgggcattcgccttcaacaa

SEQ ID NO: 116496 - DNA, 76 bp, Homo sapiens
atgtactcattgttcttgatgagcctggtaacgacataggatagggttgggcattcgccttcaacaatcacccagt

SEQ ID NO: 116497 - DNA, 78 bp, Homo sapiens
ttgttcttgatgagcctggtaacgacataggatagggttgggcattcgccttcaacaatcacccagttgagcctgcta

SEQ ID NO: 116498 - DNA, 75 bp, Homo sapiens
ctggtaacgacataggatagggttgggcattcgccttcaacaatcacccagttgagcctgctagtctcgcgtctt

SEQ ID NO: 116499 - DNA, 77 bp, Homo sapiens
acataggatagggttgggcattcgccttcaacaatcacccagttgagcctgctagtctcgcgtctttccacgatgta

SEQ ID NO: 116500 - DNA, 78 bp, Homo sapiens
atagggttgggcattcgccttcaacaatcacccagttgagcctgctagtctcgcgtctttccacgatgtagtgagtga

SEQ ID NO: 116501 - DNA, 79 bp, Homo sapiens
attcgccttcaacaatcacccagttgagcctgctagtctcgcgtctttccacgatgtagtgagtgatttctgctcctcc

SEQ ID NO: 116502 - DNA, 79 bp, Homo sapiens
ttcaacaatcacccagttgagcctgctagtctcgcgtctttccacgatgtagtgagtgatttctgctcctccgtcttcc

SEQ ID NO: 116503 - DNA, 79 bp, Homo sapiens
agttgagcctgctagtctcgcgtctttccacgatgtagtgagtgatttctgctcctccgtcttcctgcggaaggctcca

SEQ ID NO: 116504 - DNA, 76 bp, Homo sapiens
ctagtctcgcgtctttccacgatgtagtgagtgatttctgctcctccgtcttcctgcggaaggctccaggctaaag

SEQ ID NO: 116505 - DNA, 77 bp, Homo sapiens
cgtctttccacgatgtagtgagtgatttctgctcctccgtcttcctgcggaaggctccaggctaaagtgcacttctc

SEQ ID NO: 116506 - DNA, 77 bp, Homo sapiens
acgatgtagtgagtgatttctgctcctccgtcttcctgcggaaggctccaggctaaagtgcacttctcctgtgttac

SEQ ID NO: 116507 - DNA, 79 bp, Homo sapiens
agtgagtgatttctgctcctccgtcttcctgcggaaggctccaggctaaagtgcacttctcctgtgttactctgctgac

SEQ ID NO: 116508 - DNA, 78 bp, Homo sapiens
ttctgctcctccgtcttcctgcggaaggctccaggctaaagtgcacttctcctgtgttactctgctgacggtgagctt

SEQ ID NO: 116509 - DNA, 77 bp, Homo sapiens
ccgtcttcctgcggaaggctccaggctaaagtgcacttctcctgtgttactctgctgacggtgagctttccacatgg

SEQ ID NO: 116510 - DNA, 78 bp, Homo sapiens
aaggctccaggctaaagtgcacttctcctgtgttactctgctgacggtgagctttccacatgggccaggggaatctga

SEQ ID NO: 116511 - DNA, 77 bp, Homo sapiens
acttctcctgtgttactctgctgacggtgagctttccacatgggccaggggaatctgaaacaggtgtaatgacaagc

SEQ ID NO: 116512 - DNA, 82 bp, Homo sapiens
tgttactctgctgacggtgagctttccacatgggccaggggaatctgaaacaggtgtaatgacaagccatgatgaagatcat

SEQ ID NO: 116513 - DNA, 78 bp, Homo sapiens
tataaatgtgagaacatttgacatgcttaccaagcactttgaccatgacagacacggccttggtcccgctggcatttt

SEQ ID NO: 116514 - DNA, 76 bp, Homo sapiens
aacatttgacatgcttaccaagcactttgaccatgacagacacggccttggtcccgctggcatttttcactgttaa

SEQ ID NO: 116515 - DNA, 74 bp, Homo sapiens
atgcttaccaagcactttgaccatgacagacacggccttggtcccgctggcatttttcactgttaaagtgtatt

SEQ ID NO: 116516 - DNA, 73 bp, Homo sapiens
aagcactttgaccatgacagacacggccttggtcccgctggcatttttcactgttaaagtgtattttccactg

SEQ ID NO: 116517 - DNA, 75 bp, Homo sapiens
accatgacagacacggccttggtcccgctggcatttttcactgttaaagtgtattttccactgtcacttctgtca

SEQ ID NO: 116518 - DNA, 73 bp, Homo sapiens
acggccttggtcccgctggcatttttcactgttaaagtgtattttccactgtcacttctgtcacagaacttga

SEQ ID NO: 116519 - DNA, 77 bp, Homo sapiens
ttggtcccgctggcatttttcactgttaaagtgtattttccactgtcacttctgtcacagaacttgatcacagcagt

SEQ ID NO: 116520 - DNA, 78 bp, Homo sapiens
tttttcactgttaaagtgtattttccactgtcacttctgtcacagaacttgatcacagcagttgctcgtttgccagta

SEQ ID NO: 116521 - DNA, 81 bp, Homo sapiens
ttaaagtgtattttccactgtcacttctgtcacagaacttgatcacagcagttgctcgtttgccagtatactgcaaagaga

SEQ ID NO: 116522 - DNA, 80 bp, Homo sapiens
tgtattttccactgtcacttctgtcacagaacttgatcacagcagttgctcgtttgccagtatactgcaaagagactttt

SEQ ID NO: 116523 - DNA, 83 bp, Homo sapiens
actgtcacttctgtcacagaacttgatcacagcagttgctcgtttgccagtatactgcaaagagactttttcacagagatcta

SEQ ID NO: 116524 - DNA, 77 bp, Homo sapiens
agttgctcgtttgccagtatactgcaaagagactttttcacagagatctagctccttgtctcctttggtccagataa

SEQ ID NO: 116525 - DNA, 76 bp, Homo sapiens
tcgtttgccagtatactgcaaagagactttttcacagagatctagctccttgtctcctttggtccagataattttg

SEQ ID NO: 116526 - DNA, 74 bp, Homo sapiens
tatactgcaaagagactttttcacagagatctagctccttgtctcctttggtccagataattttgggttcaggt

SEQ ID NO: 116527 - DNA, 72 bp, Homo sapiens
agactttttcacagagatctagctccttgtctcctttggtccagataattttgggttcaggtttgccaccaa

SEQ ID NO: 116528 - DNA, 77 bp, Homo sapiens
acagagatctagctccttgtctcctttggtccagataattttgggttcaggtttgccaccaactgcagcatccagaa

SEQ ID NO: 116529 - DNA, 76 bp, Homo sapiens
ctccttgtctcctttggtccagataattttgggttcaggtttgccaccaactgcagcatccagaacaagatcagaa

SEQ ID NO: 116530 - DNA, 79 bp, Homo sapiens
tcctttggtccagataattttgggttcaggtttgccaccaactgcagcatccagaacaagatcagaacctgctctgatg

SEQ ID NO: 116531 - DNA, 80 bp, Homo sapiens
agataattttgggttcaggtttgccaccaactgcagcatccagaacaagatcagaacctgctctgatggtaaccagatca

SEQ ID NO: 116532 - DNA, 80 bp, Homo sapiens
ttgggttcaggtttgccaccaactgcagcatccagaacaagatcagaacctgctctgatggtaaccagatcaccgtgtaa

SEQ ID NO: 116533 - DNA, 80 bp, Homo sapiens
aactgcagcatccagaacaagatcagaacctgctctgatggtaaccagatcaccgtgtaatcgggcatccagttcggctt

SEQ ID NO: 116534 - DNA, 77 bp, Homo sapiens
atccagaacaagatcagaacctgctctgatggtaaccagatcaccgtgtaatcgggcatccagttcggctttgggtg

SEQ ID NO: 116535 - DNA, 79 bp, Homo sapiens
agatcagaacctgctctgatggtaaccagatcaccgtgtaatcgggcatccagttcggctttgggtggagctgtcagta

SEQ ID NO: 116536 - DNA, 77 bp, Homo sapiens
ctctgatggtaaccagatcaccgtgtaatcgggcatccagttcggctttgggtggagctgtcagtaggcaaaacaga

SEQ ID NO: 116537 - DNA, 77 bp, Homo sapiens
atggtaaccagatcaccgtgtaatcgggcatccagttcggctttgggtggagctgtcagtaggcaaaacagatatga

SEQ ID NO: 116538 - DNA, 80 bp, Homo sapiens
atcaccgtgtaatcgggcatccagttcggctttgggtggagctgtcagtaggcaaaacagatatgaatgaatatctgaga

SEQ ID NO: 116539 - DNA, 72 bp, Homo sapiens
cataaattgagataattttaaaaaggagaatgttgactatttcctaccgtattcatctcggcaagtgacagg

SEQ ID NO: 116540 - DNA, 71 bp, Homo sapiens
ataattttaaaaaggagaatgttgactatttcctaccgtattcatctcggcaagtgacagggcctgtagat

SEQ ID NO: 116541 - DNA, 74 bp, Homo sapiens
aatgttgactatttcctaccgtattcatctcggcaagtgacagggcctgtagattcagaccctttgctaattac

SEQ ID NO: 116542 - DNA, 78 bp, Homo sapiens
tatttcctaccgtattcatctcggcaagtgacagggcctgtagattcagaccctttgctaattacgcctgctgcattc

SEQ ID NO: 116543 - DNA, 80 bp, Homo sapiens
cgtattcatctcggcaagtgacagggcctgtagattcagaccctttgctaattacgcctgctgcattcttggctaacaca

SEQ ID NO: 116544 - DNA, 78 bp, Homo sapiens
caagtgacagggcctgtagattcagaccctttgctaattacgcctgctgcattcttggctaacacacggaactcataa

SEQ ID NO: 116545 - DNA, 77 bp, Homo sapiens
acagggcctgtagattcagaccctttgctaattacgcctgctgcattcttggctaacacacggaactcataagtgtc

SEQ ID NO: 116546 - DNA, 80 bp, Homo sapiens
tagattcagaccctttgctaattacgcctgctgcattcttggctaacacacggaactcataagtgtctccttcactgaga

SEQ ID NO: 116547 - DNA, 81 bp, Homo sapiens
tttgctaattacgcctgctgcattcttggctaacacacggaactcataagtgtctccttcactgagagcagtcacggtgaa

SEQ ID NO: 116548 - DNA, 79 bp, Homo sapiens
aattacgcctgctgcattcttggctaacacacggaactcataagtgtctccttcactgagagcagtcacggtgaagaaa

SEQ ID NO: 116549 - DNA, 79 bp, Homo sapiens
attcttggctaacacacggaactcataagtgtctccttcactgagagcagtcacggtgaagaaattgtcagatacaatg

SEQ ID NO: 116550 - DNA, 78 bp, Homo sapiens
ctaacacacggaactcataagtgtctccttcactgagagcagtcacggtgaagaaattgtcagatacaatggtgtagt

SEQ ID NO: 116551 - DNA, 80 bp, Homo sapiens
acggaactcataagtgtctccttcactgagagcagtcacggtgaagaaattgtcagatacaatggtgtagttgcacttca

SEQ ID NO: 116552 - DNA, 83 bp, Homo sapiens
taagtgtctccttcactgagagcagtcacggtgaagaaattgtcagatacaatggtgtagttgcacttcagccagcgaccatc

SEQ ID NO: 116553 - DNA, 83 bp, Homo sapiens
cttcactgagagcagtcacggtgaagaaattgtcagatacaatggtgtagttgcacttcagccagcgaccatctcctacctca

SEQ ID NO: 116554 - DNA, 81 bp, Homo sapiens
tcacggtgaagaaattgtcagatacaatggtgtagttgcacttcagccagcgaccatctcctacctcactgactggcttac

SEQ ID NO: 116555 - DNA, 83 bp, Homo sapiens
agatacaatggtgtagttgcacttcagccagcgaccatctcctacctcactgactggcttacgctctatgatgtagcccacaa

SEQ ID NO: 116556 - DNA, 80 bp, Homo sapiens
aatggtgtagttgcacttcagccagcgaccatctcctacctcactgactggcttacgctctatgatgtagcccacaacct

SEQ ID NO: 116557 - DNA, 83 bp, Homo sapiens
acttcagccagcgaccatctcctacctcactgactggcttacgctctatgatgtagcccacaaccttgctgcctccatcatac

SEQ ID NO: 116558 - DNA, 82 bp, Homo sapiens
ccagcgaccatctcctacctcactgactggcttacgctctatgatgtagcccacaaccttgctgcctccatcatacgctggg

SEQ ID NO: 116559 - DNA, 82 bp, Homo sapiens
ctacctcactgactggcttacgctctatgatgtagcccacaaccttgctgcctccatcatacgctggggcagaccaaatcag

SEQ ID NO: 116560 - DNA, 85 bp, Homo sapiens
ttacgctctatgatgtagcccacaaccttgctgcctccatcatacgctggggcagaccaaatcagtgatactgttgatcttgtga

SEQ ID NO: 116561 - DNA, 87 bp, Homo sapiens
tatgatgtagcccacaaccttgctgcctccatcatacgctggggcagaccaaatcagtgatactgttgatcttgtgacatctgtcac

SEQ ID NO: 116562 - DNA, 85 bp, Homo sapiens
acaaccttgctgcctccatcatacgctggggcagaccaaatcagtgatactgttgatcttgtgacatctgtcacctctggtctgc

SEQ ID NO: 116563 - DNA, 85 bp, Homo sapiens
atcatacgctggggcagaccaaatcagtgatactgttgatcttgtgacatctgtcacctctggtctgcctggtgcatctggaagg

SEQ ID NO: 116564 - DNA, 83 bp, Homo sapiens
agaccaaatcagtgatactgttgatcttgtgacatctgtcacctctggtctgcctggtgcatctggaagggatgcaaaaataa

SEQ ID NO: 116565 - DNA, 82 bp, Homo sapiens
aatcagtgatactgttgatcttgtgacatctgtcacctctggtctgcctggtgcatctggaagggatgcaaaaataaggtta

SEQ ID NO: 116566 - DNA, 80 bp, Homo sapiens
tactgttgatcttgtgacatctgtcacctctggtctgcctggtgcatctggaagggatgcaaaaataaggttaaaatata

SEQ ID NO: 116567 - DNA, 74 bp, Homo sapiens
gaatcagtaataataaacaaatatgcccttaaattgtgatacataccaactggattttgagccattataggtct

SEQ ID NO: 116568 - DNA, 75 bp, Homo sapiens
taataaacaaatatgcccttaaattgtgatacataccaactggattttgagccattataggtcttgaagcttcgc

SEQ ID NO: 116569 - DNA, 77 bp, Homo sapiens
atatgcccttaaattgtgatacataccaactggattttgagccattataggtcttgaagcttcgctggccttgctaa

SEQ ID NO: 116570 - DNA, 79 bp, Homo sapiens
aaattgtgatacataccaactggattttgagccattataggtcttgaagcttcgctggccttgctaacacctgcagcat

SEQ ID NO: 116571 - DNA, 84 bp, Homo sapiens
tggattttgagccattataggtcttgaagcttcgctggccttgctaacacctgcagcattgagtgcataagttctgaactgata

SEQ ID NO: 116572 - DNA, 84 bp, Homo sapiens
tttgagccattataggtcttgaagcttcgctggccttgctaacacctgcagcattgagtgcataagttctgaactgatattcca

SEQ ID NO: 116573 - DNA, 78 bp, Homo sapiens
cttgctaacacctgcagcattgagtgcataagttctgaactgatattccagtccttctactaaaccagttactttgta

SEQ ID NO: 116574 - DNA, 77 bp, Homo sapiens
attgagtgcataagttctgaactgatattccagtccttctactaaaccagttactttgtagttgcactctaagcatg

SEQ ID NO: 116575 - DNA, 74 bp, Homo sapiens
ataagttctgaactgatattccagtccttctactaaaccagttactttgtagttgcactctaagcatggcactt

SEQ ID NO: 116576 - DNA, 72 bp, Homo sapiens
aactgatattccagtccttctactaaaccagttactttgtagttgcactctaagcatggcactttgttttct

SEQ ID NO: 116577 - DNA, 70 bp, Homo sapiens
agtccttctactaaaccagttactttgtagttgcactctaagcatggcactttgttttctttcacccaaa

SEQ ID NO: 116578 - DNA, 70 bp, Homo sapiens
actaaaccagttactttgtagttgcactctaagcatggcactttgttttctttcacccaaagaattgtat

SEQ ID NO: 116579 - DNA, 70 bp, Homo sapiens
actttgtagttgcactctaagcatggcactttgttttctttcacccaaagaattgtattacgttctttct

SEQ ID NO: 116580 - DNA, 72 bp, Homo sapiens
tagttgcactctaagcatggcactttgttttctttcacccaaagaattgtattacgttctttcttctcaacc

SEQ ID NO: 116581 - DNA, 71 bp, Homo sapiens
catggcactttgttttctttcacccaaagaattgtattacgttctttcttctcaacccagtagccaatgat

SEQ ID NO: 116582 - DNA, 70 bp, Homo sapiens
ttgttttctttcacccaaagaattgtattacgttctttcttctcaacccagtagccaatgattttactgc

SEQ ID NO: 116583 - DNA, 72 bp, Homo sapiens
tttcacccaaagaattgtattacgttctttcttctcaacccagtagccaatgattttactgccaccatcgtg

SEQ ID NO: 116584 - DNA, 70 bp, Homo sapiens
aattgtattacgttctttcttctcaacccagtagccaatgattttactgccaccatcgtggtagggttct

SEQ ID NO: 116585 - DNA, 70 bp, Homo sapiens
attacgttctttcttctcaacccagtagccaatgattttactgccaccatcgtggtagggttcttcccaa

SEQ ID NO: 116586 - DNA, 75 bp, Homo sapiens
tcttctcaacccagtagccaatgattttactgccaccatcgtggtagggttcttcccaacgaatagacatggcat

SEQ ID NO: 116587 - DNA, 79 bp, Homo sapiens
tagccaatgattttactgccaccatcgtggtagggttcttcccaacgaatagacatggcattggcagacacatggtaga

SEQ ID NO: 116588 - DNA, 76 bp, Homo sapiens
aatgattttactgccaccatcgtggtagggttcttcccaacgaatagacatggcattggcagacacatggtagacc

SEQ ID NO: 116589 - DNA, 76 bp, Homo sapiens
accatcgtggtagggttcttcccaacgaatagacatggcattggcagacacatggtagacctcaggtctggtagga

SEQ ID NO: 116590 - DNA, 77 bp, Homo sapiens
tagggttcttcccaacgaatagacatggcattggcagacacatggtagacctcaggtctggtaggagcgcttggtgg

SEQ ID NO: 116591 - DNA, 79 bp, Homo sapiens
tcccaacgaatagacatggcattggcagacacatggtagacctcaggtctggtaggagcgcttggtgggactaaatata

SEQ ID NO: 116592 - DNA, 77 bp, Homo sapiens
aatagacatggcattggcagacacatggtagacctcaggtctggtaggagcgcttggtgggactaaatataaacaaa

SEQ ID NO: 116593 - DNA, 72 bp, Homo sapiens
acatggtagacctcaggtctggtaggagcgcttggtgggactaaatataaacaaaggtattaagtatgaata

SEQ ID NO: 116594 - DNA, 74 bp, Homo sapiens
atagagactttgaaataggatttttatttttcttaccaaatggatgttcagcaattattggtgctgattctaga

SEQ ID NO: 116595 - DNA, 76 bp, Homo sapiens
tgaaataggatttttatttttcttaccaaatggatgttcagcaattattggtgctgattctagaggtttgctgaca

SEQ ID NO: 116596 - DNA, 78 bp, Homo sapiens
tttttcttaccaaatggatgttcagcaattattggtgctgattctagaggtttgctgacaccaaatctgttctctgaa

SEQ ID NO: 116597 - DNA, 79 bp, Homo sapiens
aaatggatgttcagcaattattggtgctgattctagaggtttgctgacaccaaatctgttctctgaactgacacggaaa

SEQ ID NO: 116598 - DNA, 79 bp, Homo sapiens
gttcagcaattattggtgctgattctagaggtttgctgacaccaaatctgttctctgaactgacacggaaagaatattc

SEQ ID NO: 116599 - DNA, 78 bp, Homo sapiens
tattggtgctgattctagaggtttgctgacaccaaatctgttctctgaactgacacggaaagaatattccatgtattt

SEQ ID NO: 116600 - DNA, 78 bp, Homo sapiens
attctagaggtttgctgacaccaaatctgttctctgaactgacacggaaagaatattccatgtattttgtgagatgag

SEQ ID NO: 116601 - DNA, 78 bp, Homo sapiens
tttgctgacaccaaatctgttctctgaactgacacggaaagaatattccatgtattttgtgagatgagtgactttaat

SEQ ID NO: 116602 - DNA, 77 bp, Homo sapiens
aaatctgttctctgaactgacacggaaagaatattccatgtattttgtgagatgagtgactttaatttgagtgcgct

SEQ ID NO: 116603 - DNA, 80 bp, Homo sapiens
tgaactgacacggaaagaatattccatgtattttgtgagatgagtgactttaatttgagtgcgcttgacactggaattga

SEQ ID NO: 116604 - DNA, 78 bp, Homo sapiens
acacggaaagaatattccatgtattttgtgagatgagtgactttaatttgagtgcgcttgacactggaattgacaagc

SEQ ID NO: 116605 - DNA, 82 bp, Homo sapiens
atattccatgtattttgtgagatgagtgactttaatttgagtgcgcttgacactggaattgacaagctgccaagctgttgta

SEQ ID NO: 116606 - DNA, 80 bp, Homo sapiens
attttgtgagatgagtgactttaatttgagtgcgcttgacactggaattgacaagctgccaagctgttgtacccgattca

SEQ ID NO: 116607 - DNA, 79 bp, Homo sapiens
tgagtgactttaatttgagtgcgcttgacactggaattgacaagctgccaagctgttgtacccgattcacgcttttcaa

SEQ ID NO: 116608 - DNA, 78 bp, Homo sapiens
tttaatttgagtgcgcttgacactggaattgacaagctgccaagctgttgtacccgattcacgcttttcaactatgta

SEQ ID NO: 116609 - DNA, 77 bp, Homo sapiens
tgcgcttgacactggaattgacaagctgccaagctgttgtacccgattcacgcttttcaactatgtaattagtaatt

SEQ ID NO: 116610 - DNA, 76 bp, Homo sapiens
acactggaattgacaagctgccaagctgttgtacccgattcacgcttttcaactatgtaattagtaatttcagtgc

SEQ ID NO: 116611 - DNA, 71 bp, Homo sapiens
aagctgttgtacccgattcacgcttttcaactatgtaattagtaatttcagtgcctcctccatctttaggt

SEQ ID NO: 116612 - DNA, 71 bp, Homo sapiens
ttgtacccgattcacgcttttcaactatgtaattagtaatttcagtgcctcctccatctttaggttctccc

SEQ ID NO: 116613 - DNA, 75 bp, Homo sapiens
ttcacgcttttcaactatgtaattagtaatttcagtgcctcctccatctttaggttctccccatgacaggacaca

SEQ ID NO: 116614 - DNA, 77 bp, Homo sapiens
aactatgtaattagtaatttcagtgcctcctccatctttaggttctccccatgacaggacacacgattcagctgaga

SEQ ID NO: 116615 - DNA, 79 bp, Homo sapiens
aattagtaatttcagtgcctcctccatctttaggttctccccatgacaggacacacgattcagctgagacagatgagac

SEQ ID NO: 116616 - DNA, 79 bp, Homo sapiens
tgcctcctccatctttaggttctccccatgacaggacacacgattcagctgagacagatgagacctcaatggggccggt

SEQ ID NO: 116617 - DNA, 77 bp, Homo sapiens
atctttaggttctccccatgacaggacacacgattcagctgagacagatgagacctcaatggggccggttactggac

SEQ ID NO: 116618 - DNA, 79 bp, Homo sapiens
ttctccccatgacaggacacacgattcagctgagacagatgagacctcaatggggccggttactggacctggccttcca

SEQ ID NO: 116619 - DNA, 79 bp, Homo sapiens
acacacgattcagctgagacagatgagacctcaatggggccggttactggacctggccttccaatgaccacaactgtga

SEQ ID NO: 116620 - DNA, 72 bp, Homo sapiens
atgagacctcaatggggccggttactggacctggccttccaatgaccacaactgtgacgctaaatgttttaa

SEQ ID NO: 116621 - DNA, 72 bp, Homo sapiens
atggggccggttactggacctggccttccaatgaccacaactgtgacgctaaatgttttaacaccagctgta

SEQ ID NO: 116622 - DNA, 72 bp, Homo sapiens
cggttactggacctggccttccaatgaccacaactgtgacgctaaatgttttaacaccagctgtattttcca

SEQ ID NO: 116623 - DNA, 73 bp, Homo sapiens
gccttccaatgaccacaactgtgacgctaaatgttttaacaccagctgtattttccagggtcaagaagtatct

SEQ ID NO: 116624 - DNA, 73 bp, Homo sapiens
aatgaccacaactgtgacgctaaatgttttaacaccagctgtattttccagggtcaagaagtatcttccagag

SEQ ID NO: 116625 - DNA, 74 bp, Homo sapiens
aactgtgacgctaaatgttttaacaccagctgtattttccagggtcaagaagtatcttccagagtcacctctca

SEQ ID NO: 116626 - DNA, 75 bp, Homo sapiens
taaatgttttaacaccagctgtattttccagggtcaagaagtatcttccagagtcacctctcatgctgtccttta

SEQ ID NO: 116627 - DNA, 78 bp, Homo sapiens
ttaacaccagctgtattttccagggtcaagaagtatcttccagagtcacctctcatgctgtcctttacagtcagtgtg

SEQ ID NO: 116628 - DNA, 76 bp, Homo sapiens
tattttccagggtcaagaagtatcttccagagtcacctctcatgctgtcctttacagtcagtgtggttctgtcttt

SEQ ID NO: 116629 - DNA, 76 bp, Homo sapiens
agggtcaagaagtatcttccagagtcacctctcatgctgtcctttacagtcagtgtggttctgtcttttgttgttg

SEQ ID NO: 116630 - DNA, 79 bp, Homo sapiens
aagtatcttccagagtcacctctcatgctgtcctttacagtcagtgtggttctgtcttttgttgttgtaatgctcactc

SEQ ID NO: 116631 - DNA, 80 bp, Homo sapiens
agtcacctctcatgctgtcctttacagtcagtgtggttctgtcttttgttgttgtaatgctcactcgatctgtctcttta

SEQ ID NO: 116632 - DNA, 78 bp, Homo sapiens
atgctgtcctttacagtcagtgtggttctgtcttttgttgttgtaatgctcactcgatctgtctctttaagtctcatt

SEQ ID NO: 116633 - DNA, 74 bp, Homo sapiens
tcttttgttgttgtaatgctcactcgatctgtctctttaagtctcatttcttccagtttccatgttactttggg

SEQ ID NO: 116634 - DNA, 75 bp, Homo sapiens
gttgttgtaatgctcactcgatctgtctctttaagtctcatttcttccagtttccatgttactttgggggcagga

SEQ ID NO: 116635 - DNA, 73 bp, Homo sapiens
actcgatctgtctctttaagtctcatttcttccagtttccatgttactttgggggcaggacgaccactgattg

SEQ ID NO: 116636 - DNA, 71 bp, Homo sapiens
agtctcatttcttccagtttccatgttactttgggggcaggacgaccactgattggtacgtcaatggtaaa

SEQ ID NO: 116637 - DNA, 71 bp, Homo sapiens
ttcttccagtttccatgttactttgggggcaggacgaccactgattggtacgtcaatggtaaatgggcttc

SEQ ID NO: 116638 - DNA, 72 bp, Homo sapiens
atgttactttgggggcaggacgaccactgattggtacgtcaatggtaaatgggcttcctgctttgcaagtta

SEQ ID NO: 116639 - DNA, 74 bp, Homo sapiens
tttgggggcaggacgaccactgattggtacgtcaatggtaaatgggcttcctgctttgcaagttataagctgat

SEQ ID NO: 116640 - DNA, 74 bp, Homo sapiens
aggacgaccactgattggtacgtcaatggtaaatgggcttcctgctttgcaagttataagctgattggtaattc

SEQ ID NO: 116641 - DNA, 76 bp, Homo sapiens
actgattggtacgtcaatggtaaatgggcttcctgctttgcaagttataagctgattggtaattccagtgaggtca

SEQ ID NO: 116642 - DNA, 76 bp, Homo sapiens
aatggtaaatgggcttcctgctttgcaagttataagctgattggtaattccagtgaggtcagcagtgggctcgatt

SEQ ID NO: 116643 - DNA, 79 bp, Homo sapiens
taaatgggcttcctgctttgcaagttataagctgattggtaattccagtgaggtcagcagtgggctcgatttgaggctc

SEQ ID NO: 116644 - DNA, 80 bp, Homo sapiens
ctttgcaagttataagctgattggtaattccagtgaggtcagcagtgggctcgatttgaggctccttaatgatgacagaa

SEQ ID NO: 116645 - DNA, 79 bp, Homo sapiens
aagttataagctgattggtaattccagtgaggtcagcagtgggctcgatttgaggctccttaatgatgacagaagagaa

SEQ ID NO: 116646 - DNA, 78 bp, Homo sapiens
attggtaattccagtgaggtcagcagtgggctcgatttgaggctccttaatgatgacagaagagaaggcttctctggg

SEQ ID NO: 116647 - DNA, 80 bp, Homo sapiens
attccagtgaggtcagcagtgggctcgatttgaggctccttaatgatgacagaagagaaggcttctctgggttcactata

SEQ ID NO: 116648 - DNA, 82 bp, Homo sapiens
agcagtgggctcgatttgaggctccttaatgatgacagaagagaaggcttctctgggttcactatagccagcatcattcttg

SEQ ID NO: 116649 - DNA, 82 bp, Homo sapiens
ctcgatttgaggctccttaatgatgacagaagagaaggcttctctgggttcactatagccagcatcattcttggccttcaca

SEQ ID NO: 116650 - DNA, 82 bp, Homo sapiens
gctccttaatgatgacagaagagaaggcttctctgggttcactatagccagcatcattcttggccttcacacggaattcata

SEQ ID NO: 116651 - DNA, 82 bp, Homo sapiens
taatgatgacagaagagaaggcttctctgggttcactatagccagcatcattcttggccttcacacggaattcatattcagt

SEQ ID NO: 116652 - DNA, 78 bp, Homo sapiens
aagagaaggcttctctgggttcactatagccagcatcattcttggccttcacacggaattcatattcagttttctcaa

SEQ ID NO: 116653 - DNA, 80 bp, Homo sapiens
ttctctgggttcactatagccagcatcattcttggccttcacacggaattcatattcagttttctcaacaagacgctcta

SEQ ID NO: 116654 - DNA, 78 bp, Homo sapiens
actatagccagcatcattcttggccttcacacggaattcatattcagttttctcaacaagacgctctactgtgaaagt

SEQ ID NO: 116655 - DNA, 77 bp, Homo sapiens
agcatcattcttggccttcacacggaattcatattcagttttctcaacaagacgctctactgtgaaagttagctgtt

SEQ ID NO: 116656 - DNA, 76 bp, Homo sapiens
acacggaattcatattcagttttctcaacaagacgctctactgtgaaagttagctgtttggtgtgaccagcttcaa

SEQ ID NO: 116657 - DNA, 76 bp, Homo sapiens
attcatattcagttttctcaacaagacgctctactgtgaaagttagctgtttggtgtgaccagcttcaacccagaa

SEQ ID NO: 116658 - DNA, 75 bp, Homo sapiens
tttctcaacaagacgctctactgtgaaagttagctgtttggtgtgaccagcttcaacccagaagtcagatccctt

SEQ ID NO: 116659 - DNA, 75 bp, Homo sapiens
aagacgctctactgtgaaagttagctgtttggtgtgaccagcttcaacccagaagtcagatcccttttgtctcat

SEQ ID NO: 116660 - DNA, 76 bp, Homo sapiens
ctactgtgaaagttagctgtttggtgtgaccagcttcaacccagaagtcagatcccttttgtctcatttcaagcag

SEQ ID NO: 116661 - DNA, 77 bp, Homo sapiens
agttagctgtttggtgtgaccagcttcaacccagaagtcagatcccttttgtctcatttcaagcaggtagccagtga

SEQ ID NO: 116662 - DNA, 79 bp, Homo sapiens
ttggtgtgaccagcttcaacccagaagtcagatcccttttgtctcatttcaagcaggtagccagtgatccggctgcctc

SEQ ID NO: 116663 - DNA, 78 bp, Homo sapiens
tcaacccagaagtcagatcccttttgtctcatttcaagcaggtagccagtgatccggctgcctccatcgtggtcaggt

SEQ ID NO: 116664 - DNA, 77 bp, Homo sapiens
aagtcagatcccttttgtctcatttcaagcaggtagccagtgatccggctgcctccatcgtggtcaggtttaagcca

SEQ ID NO: 116665 - DNA, 76 bp, Homo sapiens
atcccttttgtctcatttcaagcaggtagccagtgatccggctgcctccatcgtggtcaggtttaagccaagctaa

SEQ ID NO: 116666 - DNA, 76 bp, Homo sapiens
atttcaagcaggtagccagtgatccggctgcctccatcgtggtcaggtttaagccaagctaagactgcggaggatt

SEQ ID NO: 116667 - DNA, 78 bp, Homo sapiens
aggtagccagtgatccggctgcctccatcgtggtcaggtttaagccaagctaagactgcggaggatttgctagtatca

SEQ ID NO: 116668 - DNA, 78 bp, Homo sapiens
gatccggctgcctccatcgtggtcaggtttaagccaagctaagactgcggaggatttgctagtatcaacaacatcaag

SEQ ID NO: 116669 - DNA, 76 bp, Homo sapiens
cctccatcgtggtcaggtttaagccaagctaagactgcggaggatttgctagtatcaacaacatcaagtctcctag

SEQ ID NO: 116670 - DNA, 76 bp, Homo sapiens
atcgtggtcaggtttaagccaagctaagactgcggaggatttgctagtatcaacaacatcaagtctcctaggtgga

SEQ ID NO: 116671 - DNA, 79 bp, Homo sapiens
tttaagccaagctaagactgcggaggatttgctagtatcaacaacatcaagtctcctaggtggagcaggctgttctgtg

SEQ ID NO: 116672 - DNA, 80 bp, Homo sapiens
aggatttgctagtatcaacaacatcaagtctcctaggtggagcaggctgttctgtggctacaattggttctggcatttca

SEQ ID NO: 116673 - DNA, 81 bp, Homo sapiens
ctagtatcaacaacatcaagtctcctaggtggagcaggctgttctgtggctacaattggttctggcatttcatagggctca

SEQ ID NO: 116674 - DNA, 79 bp, Homo sapiens
aacaacatcaagtctcctaggtggagcaggctgttctgtggctacaattggttctggcatttcatagggctcaccaaca

SEQ ID NO: 116675 - DNA, 80 bp, Homo sapiens
tctcctaggtggagcaggctgttctgtggctacaattggttctggcatttcatagggctcaccaacaccatactcattta

SEQ ID NO: 116676 - DNA, 78 bp, Homo sapiens
ttctgtggctacaattggttctggcatttcatagggctcaccaacaccatactcatttactgcagaaacacggaaata

SEQ ID NO: 116677 - DNA, 76 bp, Homo sapiens
tacaattggttctggcatttcatagggctcaccaacaccatactcatttactgcagaaacacggaaatagtacgga

SEQ ID NO: 116678 - DNA, 75 bp, Homo sapiens
ttctggcatttcatagggctcaccaacaccatactcatttactgcagaaacacggaaatagtacggaacaccttc

SEQ ID NO: 116679 - DNA, 73 bp, Homo sapiens
caacaccatactcatttactgcagaaacacggaaatagtacggaacaccttcggccaggtcattgaccttgaa

SEQ ID NO: 116680 - DNA, 74 bp, Homo sapiens
atactcatttactgcagaaacacggaaatagtacggaacaccttcggccaggtcattgaccttgaagatctgac

SEQ ID NO: 116681 - DNA, 76 bp, Homo sapiens
tgcagaaacacggaaatagtacggaacaccttcggccaggtcattgaccttgaagatctgacgagtgcatttttca

SEQ ID NO: 116682 - DNA, 74 bp, Homo sapiens
aacacggaaatagtacggaacaccttcggccaggtcattgaccttgaagatctgacgagtgcatttttcactga

SEQ ID NO: 116683 - DNA, 76 bp, Homo sapiens
tagtacggaacaccttcggccaggtcattgaccttgaagatctgacgagtgcatttttcactgataacctgccaac

SEQ ID NO: 116684 - DNA, 75 bp, Homo sapiens
accttcggccaggtcattgaccttgaagatctgacgagtgcatttttcactgataacctgccaactacggcgact

SEQ ID NO: 116685 - DNA, 78 bp, Homo sapiens
ttgaagatctgacgagtgcatttttcactgataacctgccaactacggcgacttgcctctcgtttctctaccacataa

SEQ ID NO: 116686 - DNA, 73 bp, Homo sapiens
ccaactacggcgacttgcctctcgtttctctaccacataatgatggattcgggcaccaccgtcaagaagaggg

SEQ ID NO: 116687 - DNA, 78 bp, Homo sapiens
cttgcctctcgtttctctaccacataatgatggattcgggcaccaccgtcaagaagaggggcatcccacatcaatgta

SEQ ID NO: 116688 - DNA, 80 bp, Homo sapiens
tctcgtttctctaccacataatgatggattcgggcaccaccgtcaagaagaggggcatcccacatcaatgtagcagatcc

SEQ ID NO: 116689 - DNA, 78 bp, Homo sapiens
acataatgatggattcgggcaccaccgtcaagaagaggggcatcccacatcaatgtagcagatccccgggtcacatct

SEQ ID NO: 116690 - DNA, 78 bp, Homo sapiens
atgatggattcgggcaccaccgtcaagaagaggggcatcccacatcaatgtagcagatccccgggtcacatctttgaa

SEQ ID NO: 116691 - DNA, 78 bp, Homo sapiens
catcccacatcaatgtagcagatccccgggtcacatctttgaaggtaattgggccaggtgggcctggagtgtctagca

SEQ ID NO: 116692 - DNA, 76 bp, Homo sapiens
atcaatgtagcagatccccgggtcacatctttgaaggtaattgggccaggtgggcctggagtgtctagcactttca

SEQ ID NO: 116693 - DNA, 72 bp, Homo sapiens
agatccccgggtcacatctttgaaggtaattgggccaggtgggcctggagtgtctagcactttcacggtgaa

SEQ ID NO: 116694 - DNA, 77 bp, Homo sapiens
tcacatctttgaaggtaattgggccaggtgggcctggagtgtctagcactttcacggtgaatgtgattgacttacta

SEQ ID NO: 116695 - DNA, 73 bp, Homo sapiens
aattgggccaggtgggcctggagtgtctagcactttcacggtgaatgtgattgacttactaccactgttgttt

SEQ ID NO: 116696 - DNA, 74 bp, Homo sapiens
ggcctggagtgtctagcactttcacggtgaatgtgattgacttactaccactgttgttttccacagtaagggta

SEQ ID NO: 116697 - DNA, 73 bp, Homo sapiens
actttcacggtgaatgtgattgacttactaccactgttgttttccacagtaagggtatatttccctgcatcat

SEQ ID NO: 116698 - DNA, 74 bp, Homo sapiens
aatgtgattgacttactaccactgttgttttccacagtaagggtatatttccctgcatcatttctgttgcagtt

SEQ ID NO: 116699 - DNA, 75 bp, Homo sapiens
actgttgttttccacagtaagggtatatttccctgcatcatttctgttgcagttttccacagtgagggtgctgaa

SEQ ID NO: 116700 - DNA, 76 bp, Homo sapiens
tttccacagtaagggtatatttccctgcatcatttctgttgcagttttccacagtgagggtgctgaaggaatctgt

SEQ ID NO: 116701 - DNA, 79 bp, Homo sapiens
atttccctgcatcatttctgttgcagttttccacagtgagggtgctgaaggaatctgttgtatggatatcagcccgaag

SEQ ID NO: 116702 - DNA, 76 bp, Homo sapiens
atttctgttgcagttttccacagtgagggtgctgaaggaatctgttgtatggatatcagcccgaaggctaaggtta

SEQ ID NO: 116703 - DNA, 74 bp, Homo sapiens
gttttccacagtgagggtgctgaaggaatctgttgtatggatatcagcccgaaggctaaggttagagtctggtt

SEQ ID NO: 116704 - DNA, 78 bp, Homo sapiens
acagtgagggtgctgaaggaatctgttgtatggatatcagcccgaaggctaaggttagagtctggtttgctccacaca

SEQ ID NO: 116705 - DNA, 76 bp, Homo sapiens
tgttgtatggatatcagcccgaaggctaaggttagagtctggtttgctccacacagctgtaggagtaggtctacct

SEQ ID NO: 116706 - DNA, 76 bp, Homo sapiens
tatggatatcagcccgaaggctaaggttagagtctggtttgctccacacagctgtaggagtaggtctaccttggta

SEQ ID NO: 116707 - DNA, 74 bp, Homo sapiens
ccgaaggctaaggttagagtctggtttgctccacacagctgtaggagtaggtctaccttggtaggcaatgaaga

SEQ ID NO: 116708 - DNA, 75 bp, Homo sapiens
taaggttagagtctggtttgctccacacagctgtaggagtaggtctaccttggtaggcaatgaagaggcgaatac

SEQ ID NO: 116709 - DNA, 77 bp, Homo sapiens
tggtttgctccacacagctgtaggagtaggtctaccttggtaggcaatgaagaggcgaatactggccccagctctaa

SEQ ID NO: 116710 - DNA, 77 bp, Homo sapiens
acacagctgtaggagtaggtctaccttggtaggcaatgaagaggcgaatactggccccagctctaacaacatgagtc

SEQ ID NO: 116711 - DNA, 76 bp, Homo sapiens
taggagtaggtctaccttggtaggcaatgaagaggcgaatactggccccagctctaacaacatgagtctgtttgaa

SEQ ID NO: 116712 - DNA, 77 bp, Homo sapiens
taggtctaccttggtaggcaatgaagaggcgaatactggccccagctctaacaacatgagtctgtttgaagtttgca

SEQ ID NO: 116713 - DNA, 79 bp, Homo sapiens
ttggtaggcaatgaagaggcgaatactggccccagctctaacaacatgagtctgtttgaagtttgcatctatgtctaac

SEQ ID NO: 116714 - DNA, 79 bp, Homo sapiens
aagaggcgaatactggccccagctctaacaacatgagtctgtttgaagtttgcatctatgtctaactcaggagctgtta

SEQ ID NO: 116715 - DNA, 76 bp, Homo sapiens
aatactggccccagctctaacaacatgagtctgtttgaagtttgcatctatgtctaactcaggagctgttaaccgg

SEQ ID NO: 116716 - DNA, 76 bp, Homo sapiens
ctctaacaacatgagtctgtttgaagtttgcatctatgtctaactcaggagctgttaaccggtcaactgctttaat

SEQ ID NO: 116717 - DNA, 78 bp, Homo sapiens
acaacatgagtctgtttgaagtttgcatctatgtctaactcaggagctgttaaccggtcaactgctttaattgtgcca

SEQ ID NO: 116718 - DNA, 79 bp, Homo sapiens
tctgtttgaagtttgcatctatgtctaactcaggagctgttaaccggtcaactgctttaattgtgccagtcacttcaca

SEQ ID NO: 116719 - DNA, 79 bp, Homo sapiens
ttgcatctatgtctaactcaggagctgttaaccggtcaactgctttaattgtgccagtcacttcacagctgtcgccttt

SEQ ID NO: 116720 - DNA, 78 bp, Homo sapiens
atgtctaactcaggagctgttaaccggtcaactgctttaattgtgccagtcacttcacagctgtcgccttttccagca

SEQ ID NO: 116721 - DNA, 78 bp, Homo sapiens
ggtcaactgctttaattgtgccagtcacttcacagctgtcgccttttccagcaccattgatagcactaactcggaatt

SEQ ID NO: 116722 - DNA, 79 bp, Homo sapiens
ccagtcacttcacagctgtcgccttttccagcaccattgatagcactaactcggaatttgtattcttcacctgcttgta

SEQ ID NO: 116723 - DNA, 79 bp, Homo sapiens
acttcacagctgtcgccttttccagcaccattgatagcactaactcggaatttgtattcttcacctgcttgtagatcag

SEQ ID NO: 116724 - DNA, 80 bp, Homo sapiens
tcgccttttccagcaccattgatagcactaactcggaatttgtattcttcacctgcttgtagatcagtgactgtatatct

SEQ ID NO: 116725 - DNA, 81 bp, Homo sapiens
ttccagcaccattgatagcactaactcggaatttgtattcttcacctgcttgtagatcagtgactgtatatcttgttttca

SEQ ID NO: 116726 - DNA, 81 bp, Homo sapiens
attgatagcactaactcggaatttgtattcttcacctgcttgtagatcagtgactgtatatcttgttttcacacatgcctc

SEQ ID NO: 116727 - DNA, 81 bp, Homo sapiens
taactcggaatttgtattcttcacctgcttgtagatcagtgactgtatatcttgttttcacacatgcctctgcattcacct

SEQ ID NO: 116728 - DNA, 84 bp, Homo sapiens
atttgtattcttcacctgcttgtagatcagtgactgtatatcttgttttcacacatgcctctgcattcaccttgtgccagtctc

SEQ ID NO: 116729 - DNA, 83 bp, Homo sapiens
ctgcttgtagatcagtgactgtatatcttgttttcacacatgcctctgcattcaccttgtgccagtctcctaagtcggcctta

SEQ ID NO: 116730 - DNA, 82 bp, Homo sapiens
atcagtgactgtatatcttgttttcacacatgcctctgcattcaccttgtgccagtctcctaagtcggccttacacatttca

SEQ ID NO: 116731 - DNA, 80 bp, Homo sapiens
gtatatcttgttttcacacatgcctctgcattcaccttgtgccagtctcctaagtcggccttacacatttcaataatata

SEQ ID NO: 116732 - DNA, 78 bp, Homo sapiens
ttttcacacatgcctctgcattcaccttgtgccagtctcctaagtcggccttacacatttcaataatatacccaatta

SEQ ID NO: 116733 - DNA, 77 bp, Homo sapiens
acacatgcctctgcattcaccttgtgccagtctcctaagtcggccttacacatttcaataatatacccaattatttc

SEQ ID NO: 116734 - DNA, 76 bp, Homo sapiens
ttcaccttgtgccagtctcctaagtcggccttacacatttcaataatatacccaattatttccatgccaccatcaa

SEQ ID NO: 116735 - DNA, 76 bp, Homo sapiens
ttgtgccagtctcctaagtcggccttacacatttcaataatatacccaattatttccatgccaccatcaaacactg

SEQ ID NO: 116736 - DNA, 73 bp, Homo sapiens
taagtcggccttacacatttcaataatatacccaattatttccatgccaccatcaaacactggtttggaccat

SEQ ID NO: 116737 - DNA, 76 bp, Homo sapiens
ttacacatttcaataatatacccaattatttccatgccaccatcaaacactggtttggaccattctaagctcacag

SEQ ID NO: 116738 - DNA, 75 bp, Homo sapiens
ttcaataatatacccaattatttccatgccaccatcaaacactggtttggaccattctaagctcacagttgtctt

SEQ ID NO: 116739 - DNA, 77 bp, Homo sapiens
atatacccaattatttccatgccaccatcaaacactggtttggaccattctaagctcacagttgtctttgatgtgtc

SEQ ID NO: 116740 - DNA, 78 bp, Homo sapiens
ttatttccatgccaccatcaaacactggtttggaccattctaagctcacagttgtctttgatgtgtctgttactttga

SEQ ID NO: 116741 - DNA, 76 bp, Homo sapiens
accatcaaacactggtttggaccattctaagctcacagttgtctttgatgtgtctgttactttgaccactgtggga

SEQ ID NO: 116742 - DNA, 74 bp, Homo sapiens
aacactggtttggaccattctaagctcacagttgtctttgatgtgtctgttactttgaccactgtgggaggacc

SEQ ID NO: 116743 - DNA, 75 bp, Homo sapiens
tcacagttgtctttgatgtgtctgttactttgaccactgtgggaggacctggtgggttgacgggctctctacatt

SEQ ID NO: 116744 - DNA, 77 bp, Homo sapiens
tactttgaccactgtgggaggacctggtgggttgacgggctctctacatttaatgagtcttgagatgccacttgcag

SEQ ID NO: 116745 - DNA, 76 bp, Homo sapiens
actgtgggaggacctggtgggttgacgggctctctacatttaatgagtcttgagatgccacttgcaggtccaactc

SEQ ID NO: 116746 - DNA, 79 bp, Homo sapiens
acctggtgggttgacgggctctctacatttaatgagtcttgagatgccacttgcaggtccaactcctgcagcattttca

SEQ ID NO: 116747 - DNA, 84 bp, Homo sapiens
ttgacgggctctctacatttaatgagtcttgagatgccacttgcaggtccaactcctgcagcattttcagccatgacatggaat

SEQ ID NO: 116748 - DNA, 86 bp, Homo sapiens
tacatttaatgagtcttgagatgccacttgcaggtccaactcctgcagcattttcagccatgacatggaattcatactcattgcct

SEQ ID NO: 116749 - DNA, 89 bp, Homo sapiens
taatgagtcttgagatgccacttgcaggtccaactcctgcagcattttcagccatgacatggaattcatactcattgccttctgtcaga

SEQ ID NO: 116750 - DNA, 85 bp, Homo sapiens
atgccacttgcaggtccaactcctgcagcattttcagccatgacatggaattcatactcattgccttctgtcagaccagtgactt

SEQ ID NO: 116751 - DNA, 83 bp, Homo sapiens
aggtccaactcctgcagcattttcagccatgacatggaattcatactcattgccttctgtcagaccagtgactttgaatcttg

SEQ ID NO: 116752 - DNA, 84 bp, Homo sapiens
aactcctgcagcattttcagccatgacatggaattcatactcattgccttctgtcagaccagtgactttgaatcttgtttcaga

SEQ ID NO: 116753 - DNA, 81 bp, Homo sapiens
tttcagccatgacatggaattcatactcattgccttctgtcagaccagtgactttgaatcttgtttcagagattggtcgtt

SEQ ID NO: 116754 - DNA, 83 bp, Homo sapiens
tgacatggaattcatactcattgccttctgtcagaccagtgactttgaatcttgtttcagagattggtcgtttgctgatcact

SEQ ID NO: 116755 - DNA, 79 bp, Homo sapiens
aattcatactcattgccttctgtcagaccagtgactttgaatcttgtttcagagattggtcgtttgctgatcactttta

SEQ ID NO: 116756 - DNA, 77 bp, Homo sapiens
attgccttctgtcagaccagtgactttgaatcttgtttcagagattggtcgtttgctgatcacttttacccatcttg

SEQ ID NO: 116757 - DNA, 76 bp, Homo sapiens
tcagaccagtgactttgaatcttgtttcagagattggtcgtttgctgatcacttttacccatcttgtgcttttctt

SEQ ID NO: 116758 - DNA, 74 bp, Homo sapiens
agtgactttgaatcttgtttcagagattggtcgtttgctgatcacttttacccatcttgtgcttttcttttctc

SEQ ID NO: 116759 - DNA, 79 bp, Homo sapiens
tgcttttcttttctcttctttcaaggatatactgttgaatttcactgccaccatctgattctggccttgcccatgtcag

SEQ ID NO: 116760 - DNA, 80 bp, Homo sapiens
ttctcttctttcaaggatatactgttgaatttcactgccaccatctgattctggccttgcccatgtcagggtaatgctgt

SEQ ID NO: 116761 - DNA, 82 bp, Homo sapiens
atatactgttgaatttcactgccaccatctgattctggccttgcccatgtcagggtaatgctgttgcctgttatgttgctag

SEQ ID NO: 116762 - DNA, 80 bp, Homo sapiens
aatttcactgccaccatctgattctggccttgcccatgtcagggtaatgctgttgcctgttatgttgctaggttctggaa

SEQ ID NO: 116763 - DNA, 82 bp, Homo sapiens
accatctgattctggccttgcccatgtcagggtaatgctgttgcctgttatgttgctaggttctggaatgccaggggcatca

SEQ ID NO: 116764 - DNA, 80 bp, Homo sapiens
attctggccttgcccatgtcagggtaatgctgttgcctgttatgttgctaggttctggaatgccaggggcatcaggaaca

SEQ ID NO: 116765 - DNA, 79 bp, Homo sapiens
ccatgtcagggtaatgctgttgcctgttatgttgctaggttctggaatgccaggggcatcaggaacagctgtaaaacaa

SEQ ID NO: 116766 - DNA, 75 bp, Homo sapiens
agggtaatgctgttgcctgttatgttgctaggttctggaatgccaggggcatcaggaacagctgtaaaacaaaaa

SEQ ID NO: 116767 - DNA, 68 bp, Homo sapiens
ggttaaacttttgacatagtaccgcttagtaaaaacgcaaacttactatattgtatttgagcaaccac

SEQ ID NO: 116768 - DNA, 72 bp, Homo sapiens
acttttgacatagtaccgcttagtaaaaacgcaaacttactatattgtatttgagcaaccactggatcagaa

SEQ ID NO: 116769 - DNA, 73 bp, Homo sapiens
atagtaccgcttagtaaaaacgcaaacttactatattgtatttgagcaaccactggatcagaatcaagtggcc

SEQ ID NO: 116770 - DNA, 75 bp, Homo sapiens
ttagtaaaaacgcaaacttactatattgtatttgagcaaccactggatcagaatcaagtggcctgccaacaccaa

SEQ ID NO: 116771 - DNA, 76 bp, Homo sapiens
aaacttactatattgtatttgagcaaccactggatcagaatcaagtggcctgccaacaccaaacttgttaactgca

SEQ ID NO: 116772 - DNA, 78 bp, Homo sapiens
tatattgtatttgagcaaccactggatcagaatcaagtggcctgccaacaccaaacttgttaactgcagaaacacgga

SEQ ID NO: 116773 - DNA, 76 bp, Homo sapiens
agcaaccactggatcagaatcaagtggcctgccaacaccaaacttgttaactgcagaaacacggaattggtattca

SEQ ID NO: 116774 - DNA, 70 bp, Homo sapiens
ccaacaccaaacttgttaactgcagaaacacggaattggtattcattgccgtttattagtttaatggcag

SEQ ID NO: 116775 - DNA, 70 bp, Homo sapiens
acttgttaactgcagaaacacggaattggtattcattgccgtttattagtttaatggcagtgtaactttg

SEQ ID NO: 116776 - DNA, 72 bp, Homo sapiens
ttaactgcagaaacacggaattggtattcattgccgtttattagtttaatggcagtgtaactttgggcttca

SEQ ID NO: 116777 - DNA, 70 bp, Homo sapiens
aaacacggaattggtattcattgccgtttattagtttaatggcagtgtaactttgggcttcacatttatc

SEQ ID NO: 116778 - DNA, 73 bp, Homo sapiens
ttggtattcattgccgtttattagtttaatggcagtgtaactttgggcttcacatttatcctcaattagtgcc

SEQ ID NO: 116779 - DNA, 73 bp, Homo sapiens
ttgccgtttattagtttaatggcagtgtaactttgggcttcacatttatcctcaattagtgcccaggcaagtc

SEQ ID NO: 116780 - DNA, 74 bp, Homo sapiens
ttagtttaatggcagtgtaactttgggcttcacatttatcctcaattagtgcccaggcaagtctgctggtttcc

SEQ ID NO: 116781 - DNA, 71 bp, Homo sapiens
agtgtaactttgggcttcacatttatcctcaattagtgcccaggcaagtctgctggtttcccgtttttcaa

SEQ ID NO: 116782 - DNA, 74 bp, Homo sapiens
ggcttcacatttatcctcaattagtgcccaggcaagtctgctggtttcccgtttttcaatgatgtagtgggtta

SEQ ID NO: 116783 - DNA, 73 bp, Homo sapiens
acatttatcctcaattagtgcccaggcaagtctgctggtttcccgtttttcaatgatgtagtgggttatggga

SEQ ID NO: 116784 - DNA, 73 bp, Homo sapiens
attagtgcccaggcaagtctgctggtttcccgtttttcaatgatgtagtgggttatgggagcacaaccgtcat

SEQ ID NO: 116785 - DNA, 73 bp, Homo sapiens
ccaggcaagtctgctggtttcccgtttttcaatgatgtagtgggttatgggagcacaaccgtcattgagtggg

SEQ ID NO: 116786 - DNA, 75 bp, Homo sapiens
tctgctggtttcccgtttttcaatgatgtagtgggttatgggagcacaaccgtcattgagtggggcatcccacca

SEQ ID NO: 116787 - DNA, 76 bp, Homo sapiens
ttcccgtttttcaatgatgtagtgggttatgggagcacaaccgtcattgagtggggcatcccaccacagagtcatc

SEQ ID NO: 116788 - DNA, 78 bp, Homo sapiens
atgatgtagtgggttatgggagcacaaccgtcattgagtggggcatcccaccacagagtcatcttctccccagtaata

SEQ ID NO: 116789 - DNA, 77 bp, Homo sapiens
gttatgggagcacaaccgtcattgagtggggcatcccaccacagagtcatcttctccccagtaatattggtgaatct

SEQ ID NO: 116790 - DNA, 77 bp, Homo sapiens
gggagcacaaccgtcattgagtggggcatcccaccacagagtcatcttctccccagtaatattggtgaatcttattg

SEQ ID NO: 116791 - DNA, 74 bp, Homo sapiens
attgagtggggcatcccaccacagagtcatcttctccccagtaatattggtgaatcttattggcccaactactt

SEQ ID NO: 116792 - DNA, 75 bp, Homo sapiens
gcatcccaccacagagtcatcttctccccagtaatattggtgaatcttattggcccaactacttttcctggtgta

SEQ ID NO: 116793 - DNA, 74 bp, Homo sapiens
acagagtcatcttctccccagtaatattggtgaatcttattggcccaactacttttcctggtgtatctataaga

SEQ ID NO: 116794 - DNA, 70 bp, Homo sapiens
atcttctccccagtaatattggtgaatcttattggcccaactacttttcctggtgtatctataagaaaaa

SEQ ID NO: 116795 - DNA, 69 bp, Homo sapiens
cccagtaatattggtgaatcttattggcccaactacttttcctggtgtatctataagaaaaagtttcta

SEQ ID NO: 116796 - DNA, 69 bp, Homo sapiens
tggtgaatcttattggcccaactacttttcctggtgtatctataagaaaaagtttctagagttagtttc

SEQ ID NO: 116797 - DNA, 69 bp, Homo sapiens
ctctaatccaagttcataaattgtagcattaagaagctattttaaaagtaccttgtactttcactttaa

SEQ ID NO: 116798 - DNA, 72 bp, Homo sapiens
tcataaattgtagcattaagaagctattttaaaagtaccttgtactttcactttaatttctgcttttgcaga

SEQ ID NO: 116799 - DNA, 73 bp, Homo sapiens
gtagcattaagaagctattttaaaagtaccttgtactttcactttaatttctgcttttgcagaaccagatgca

SEQ ID NO: 116800 - DNA, 71 bp, Homo sapiens
gctattttaaaagtaccttgtactttcactttaatttctgcttttgcagaaccagatgcatttttggcttc

SEQ ID NO: 116801 - DNA, 71 bp, Homo sapiens
tttaaaagtaccttgtactttcactttaatttctgcttttgcagaaccagatgcatttttggcttccactg

SEQ ID NO: 116802 - DNA, 76 bp, Homo sapiens
ttgtactttcactttaatttctgcttttgcagaaccagatgcatttttggcttccactgtgtatacaccacgatgg

SEQ ID NO: 116803 - DNA, 75 bp, Homo sapiens
actttaatttctgcttttgcagaaccagatgcatttttggcttccactgtgtatacaccacgatggtcccgagta

SEQ ID NO: 116804 - DNA, 78 bp, Homo sapiens
cttttgcagaaccagatgcatttttggcttccactgtgtatacaccacgatggtcccgagtagcatctctaacaaata

SEQ ID NO: 116805 - DNA, 77 bp, Homo sapiens
aaccagatgcatttttggcttccactgtgtatacaccacgatggtcccgagtagcatctctaacaaataggctggtg

SEQ ID NO: 116806 - DNA, 76 bp, Homo sapiens
tttttggcttccactgtgtatacaccacgatggtcccgagtagcatctctaacaaataggctggtggatccaagta

SEQ ID NO: 116807 - DNA, 75 bp, Homo sapiens
ccactgtgtatacaccacgatggtcccgagtagcatctctaacaaataggctggtggatccaagtacgtcggtta

SEQ ID NO: 116808 - DNA, 75 bp, Homo sapiens
tatacaccacgatggtcccgagtagcatctctaacaaataggctggtggatccaagtacgtcggttatttccata

SEQ ID NO: 116809 - DNA, 74 bp, Homo sapiens
atggtcccgagtagcatctctaacaaataggctggtggatccaagtacgtcggttatttccatattcatcctct

SEQ ID NO: 116810 - DNA, 73 bp, Homo sapiens
agtagcatctctaacaaataggctggtggatccaagtacgtcggttatttccatattcatcctcttttcgatt

SEQ ID NO: 116811 - DNA, 72 bp, Homo sapiens
aacaaataggctggtggatccaagtacgtcggttatttccatattcatcctcttttcgatttccactccatc

SEQ ID NO: 116812 - DNA, 73 bp, Homo sapiens
ataggctggtggatccaagtacgtcggttatttccatattcatcctcttttcgatttccactccatctttgaa

SEQ ID NO: 116813 - DNA, 70 bp, Homo sapiens
atccaagtacgtcggttatttccatattcatcctcttttcgatttccactccatctttgaaccaagttac

SEQ ID NO: 116814 - DNA, 72 bp, Homo sapiens
ggttatttccatattcatcctcttttcgatttccactccatctttgaaccaagttactcgaggcactggtct

SEQ ID NO: 116815 - DNA, 73 bp, Homo sapiens
atattcatcctcttttcgatttccactccatctttgaaccaagttactcgaggcactggtcttccttgtacca

SEQ ID NO: 116816 - DNA, 71 bp, Homo sapiens
tcttttcgatttccactccatctttgaaccaagttactcgaggcactggtcttccttgtaccaaagcttta

SEQ ID NO: 116817 - DNA, 70 bp, Homo sapiens
atttccactccatctttgaaccaagttactcgaggcactggtcttccttgtaccaaagctttaattctaa

SEQ ID NO: 116818 - DNA, 70 bp, Homo sapiens
atctttgaaccaagttactcgaggcactggtcttccttgtaccaaagctttaattctaaggctctctccg

SEQ ID NO: 116819 - DNA, 69 bp, Homo sapiens
aagttactcgaggcactggtcttccttgtaccaaagctttaattctaaggctctctccggacttaataa

SEQ ID NO: 116820 - DNA, 72 bp, Homo sapiens
aggcactggtcttccttgtaccaaagctttaattctaaggctctctccggacttaataatgagaccatcaaa

SEQ ID NO: 116821 - DNA, 73 bp, Homo sapiens
tggtcttccttgtaccaaagctttaattctaaggctctctccggacttaataatgagaccatcaaagtattca

SEQ ID NO: 116822 - DNA, 72 bp, Homo sapiens
ttgtaccaaagctttaattctaaggctctctccggacttaataatgagaccatcaaagtattcagggccaaa

SEQ ID NO: 116823 - DNA, 72 bp, Homo sapiens
tttaattctaaggctctctccggacttaataatgagaccatcaaagtattcagggccaaactctactattgg

SEQ ID NO: 116824 - DNA, 72 bp, Homo sapiens
ctctctccggacttaataatgagaccatcaaagtattcagggccaaactctactattggtggaactataaaa

SEQ ID NO: 116825 - DNA, 71 bp, Homo sapiens
tccggacttaataatgagaccatcaaagtattcagggccaaactctactattggtggaactataaaagaaa

SEQ ID NO: 116826 - DNA, 72 bp, Homo sapiens
aatgagaccatcaaagtattcagggccaaactctactattggtggaactataaaagaaagagaaatactatg

SEQ ID NO: 116827 - DNA, 71 bp, Homo sapiens
catcaaagtattcagggccaaactctactattggtggaactataaaagaaagagaaatactatgtattagt

SEQ ID NO: 116828 - DNA, 80 bp, Homo sapiens
atgtgaatgctcttagtctcattggaaataagttgtaaatgcttaccattttcatctcttgtcataataatgccagaaga

SEQ ID NO: 116829 - DNA, 78 bp, Homo sapiens
aatgctcttagtctcattggaaataagttgtaaatgcttaccattttcatctcttgtcataataatgccagaagactg

SEQ ID NO: 116830 - DNA, 75 bp, Homo sapiens
attggaaataagttgtaaatgcttaccattttcatctcttgtcataataatgccagaagactgtgagggcgggct

SEQ ID NO: 116831 - DNA, 75 bp, Homo sapiens
aataagttgtaaatgcttaccattttcatctcttgtcataataatgccagaagactgtgagggcgggcttatagt

SEQ ID NO: 116832 - DNA, 78 bp, Homo sapiens
taaatgcttaccattttcatctcttgtcataataatgccagaagactgtgagggcgggcttatagttccaacagcatt

SEQ ID NO: 116833 - DNA, 78 bp, Homo sapiens
attttcatctcttgtcataataatgccagaagactgtgagggcgggcttatagttccaacagcatttcttgcaattat

SEQ ID NO: 116834 - DNA, 81 bp, Homo sapiens
tcttgtcataataatgccagaagactgtgagggcgggcttatagttccaacagcatttcttgcaattattctgaactcata

SEQ ID NO: 116835 - DNA, 79 bp, Homo sapiens
aataatgccagaagactgtgagggcgggcttatagttccaacagcatttcttgcaattattctgaactcatagcgatcc

SEQ ID NO: 116836 - DNA, 78 bp, Homo sapiens
aagactgtgagggcgggcttatagttccaacagcatttcttgcaattattctgaactcatagcgatccccaggactga

SEQ ID NO: 116837 - DNA, 78 bp, Homo sapiens
gggcttatagttccaacagcatttcttgcaattattctgaactcatagcgatccccaggactgagtcctgtaactgtg

SEQ ID NO: 116838 - DNA, 81 bp, Homo sapiens
tatagttccaacagcatttcttgcaattattctgaactcatagcgatccccaggactgagtcctgtaactgtgtactgaca

SEQ ID NO: 116839 - DNA, 80 bp, Homo sapiens
atttcttgcaattattctgaactcatagcgatccccaggactgagtcctgtaactgtgtactgacattcactgacgtcag

SEQ ID NO: 116840 - DNA, 77 bp, Homo sapiens
aattattctgaactcatagcgatccccaggactgagtcctgtaactgtgtactgacattcactgacgtcagtaaagt

SEQ ID NO: 116841 - DNA, 80 bp, Homo sapiens
aactcatagcgatccccaggactgagtcctgtaactgtgtactgacattcactgacgtcagtaaagttgcatctcaccca

SEQ ID NO: 116842 - DNA, 78 bp, Homo sapiens
atccccaggactgagtcctgtaactgtgtactgacattcactgacgtcagtaaagttgcatctcacccagcgttcatt

SEQ ID NO: 116843 - DNA, 79 bp, Homo sapiens
aggactgagtcctgtaactgtgtactgacattcactgacgtcagtaaagttgcatctcacccagcgttcatttccttgc

SEQ ID NO: 116844 - DNA, 80 bp, Homo sapiens
taactgtgtactgacattcactgacgtcagtaaagttgcatctcacccagcgttcatttccttgccgtttctcaatgcta

SEQ ID NO: 116845 - DNA, 80 bp, Homo sapiens
ctgacattcactgacgtcagtaaagttgcatctcacccagcgttcatttccttgccgtttctcaatgctatagcccacaa

SEQ ID NO: 116846 - DNA, 79 bp, Homo sapiens
ttcactgacgtcagtaaagttgcatctcacccagcgttcatttccttgccgtttctcaatgctatagcccacaatctta

SEQ ID NO: 116847 - DNA, 79 bp, Homo sapiens
agtaaagttgcatctcacccagcgttcatttccttgccgtttctcaatgctatagcccacaatcttactgcctccatca

SEQ ID NO: 116848 - DNA, 79 bp, Homo sapiens
atctcacccagcgttcatttccttgccgtttctcaatgctatagcccacaatcttactgcctccatcacgcaatggtgg

SEQ ID NO: 116849 - DNA, 76 bp, Homo sapiens
cgttcatttccttgccgtttctcaatgctatagcccacaatcttactgcctccatcacgcaatggtgggttccatt

SEQ ID NO: 116850 - DNA, 75 bp, Homo sapiens
atttccttgccgtttctcaatgctatagcccacaatcttactgcctccatcacgcaatggtgggttccatttaag

SEQ ID NO: 116851 - DNA, 77 bp, Homo sapiens
tatagcccacaatcttactgcctccatcacgcaatggtgggttccatttaagtgtgatggtttcccgggtgacatca

SEQ ID NO: 116852 - DNA, 76 bp, Homo sapiens
aatcttactgcctccatcacgcaatggtgggttccatttaagtgtgatggtttcccgggtgacatcaatgtagtca

SEQ ID NO: 116853 - DNA, 76 bp, Homo sapiens
cctccatcacgcaatggtgggttccatttaagtgtgatggtttcccgggtgacatcaatgtagtcaggagtgccag

SEQ ID NO: 116854 - DNA, 73 bp, Homo sapiens
aatggtgggttccatttaagtgtgatggtttcccgggtgacatcaatgtagtcaggagtgccaggtgggtcta

SEQ ID NO: 116855 - DNA, 72 bp, Homo sapiens
tgggttccatttaagtgtgatggtttcccgggtgacatcaatgtagtcaggagtgccaggtgggtctaaaaa

SEQ ID NO: 116856 - DNA, 72 bp, Homo sapiens
ttaagtgtgatggtttcccgggtgacatcaatgtagtcaggagtgccaggtgggtctaaaaaattataagga

SEQ ID NO: 116857 - DNA, 69 bp, Homo sapiens
tggtttcccgggtgacatcaatgtagtcaggagtgccaggtgggtctaaaaaattataaggaaggtaaa

SEQ ID NO: 116858 - DNA, 73 bp, Homo sapiens
ctaatatgttcaattgctaaactaaatgtatttgaataataatcacttacctactggagaaacagctaaggta

SEQ ID NO: 116859 - DNA, 71 bp, Homo sapiens
tgctaaactaaatgtatttgaataataatcacttacctactggagaaacagctaaggtaaatttgcttggg

SEQ ID NO: 116860 - DNA, 72 bp, Homo sapiens
aatgtatttgaataataatcacttacctactggagaaacagctaaggtaaatttgcttgggtcactaggtga

SEQ ID NO: 116861 - DNA, 72 bp, Homo sapiens
atttgaataataatcacttacctactggagaaacagctaaggtaaatttgcttgggtcactaggtgagctta

SEQ ID NO: 116862 - DNA, 71 bp, Homo sapiens
acttacctactggagaaacagctaaggtaaatttgcttgggtcactaggtgagcttaggccagcagaattt

SEQ ID NO: 116863 - DNA, 77 bp, Homo sapiens
tactggagaaacagctaaggtaaatttgcttgggtcactaggtgagcttaggccagcagaattttcagcatatacac

SEQ ID NO: 116864 - DNA, 74 bp, Homo sapiens
aaacagctaaggtaaatttgcttgggtcactaggtgagcttaggccagcagaattttcagcatatacacggaat

SEQ ID NO: 116865 - DNA, 76 bp, Homo sapiens
taaatttgcttgggtcactaggtgagcttaggccagcagaattttcagcatatacacggaattggtaatccagacc

SEQ ID NO: 116866 - DNA, 76 bp, Homo sapiens
ttgggtcactaggtgagcttaggccagcagaattttcagcatatacacggaattggtaatccagaccttctaccag

SEQ ID NO: 116867 - DNA, 79 bp, Homo sapiens
tgagcttaggccagcagaattttcagcatatacacggaattggtaatccagaccttctaccagtccagtggctctatat

SEQ ID NO: 116868 - DNA, 78 bp, Homo sapiens
taggccagcagaattttcagcatatacacggaattggtaatccagaccttctaccagtccagtggctctatattctct

SEQ ID NO: 116869 - DNA, 76 bp, Homo sapiens
aattttcagcatatacacggaattggtaatccagaccttctaccagtccagtggctctatattctcttccagagat

SEQ ID NO: 116870 - DNA, 78 bp, Homo sapiens
tatacacggaattggtaatccagaccttctaccagtccagtggctctatattctcttccagagattggtgatgtatta

SEQ ID NO: 116871 - DNA, 74 bp, Homo sapiens
aattggtaatccagaccttctaccagtccagtggctctatattctcttccagagattggtgatgtattaacttt

SEQ ID NO: 116872 - DNA, 77 bp, Homo sapiens
accttctaccagtccagtggctctatattctcttccagagattggtgatgtattaactttttgccagaggatgctat

SEQ ID NO: 116873 - DNA, 77 bp, Homo sapiens
ctaccagtccagtggctctatattctcttccagagattggtgatgtattaactttttgccagaggatgctatttctt

SEQ ID NO: 116874 - DNA, 75 bp, Homo sapiens
tttctttcttttcaacatggaatccagtaacttctgaaccaccatcataaactggagcatcccaagttagtgaca

SEQ ID NO: 116875 - DNA, 80 bp, Homo sapiens
tcttttcaacatggaatccagtaacttctgaaccaccatcataaactggagcatcccaagttagtgacatgccatcagaa

SEQ ID NO: 116876 - DNA, 81 bp, Homo sapiens
aatccagtaacttctgaaccaccatcataaactggagcatcccaagttagtgacatgccatcagaagtcacattgtatata

SEQ ID NO: 116877 - DNA, 80 bp, Homo sapiens
agtaacttctgaaccaccatcataaactggagcatcccaagttagtgacatgccatcagaagtcacattgtatataactg

SEQ ID NO: 116878 - DNA, 79 bp, Homo sapiens
aaccaccatcataaactggagcatcccaagttagtgacatgccatcagaagtcacattgtatataactggctttcctgg

SEQ ID NO: 116879 - DNA, 77 bp, Homo sapiens
ataaactggagcatcccaagttagtgacatgccatcagaagtcacattgtatataactggctttcctgggggaccag

SEQ ID NO: 116880 - DNA, 76 bp, Homo sapiens
atcccaagttagtgacatgccatcagaagtcacattgtatataactggctttcctgggggaccaggaatcctgaac

SEQ ID NO: 116881 - DNA, 76 bp, Homo sapiens
ttagtgacatgccatcagaagtcacattgtatataactggctttcctgggggaccaggaatcctgaactggtgttt

SEQ ID NO: 116882 - DNA, 74 bp, Homo sapiens
atcagaagtcacattgtatataactggctttcctgggggaccaggaatcctgaactggtgttttgccacaataa

SEQ ID NO: 116883 - DNA, 75 bp, Homo sapiens
cattgtatataactggctttcctgggggaccaggaatcctgaactggtgttttgccacaataatgcttgagacaa

SEQ ID NO: 116884 - DNA, 74 bp, Homo sapiens
tatataactggctttcctgggggaccaggaatcctgaactggtgttttgccacaataatgcttgagacaagtgg

SEQ ID NO: 116885 - DNA, 74 bp, Homo sapiens
tttcctgggggaccaggaatcctgaactggtgttttgccacaataatgcttgagacaagtggttggctgactcc

SEQ ID NO: 116886 - DNA, 75 bp, Homo sapiens
accaggaatcctgaactggtgttttgccacaataatgcttgagacaagtggttggctgactccgtatctgttttc

SEQ ID NO: 116887 - DNA, 79 bp, Homo sapiens
tgaactggtgttttgccacaataatgcttgagacaagtggttggctgactccgtatctgttttctgctctcactctaaa

SEQ ID NO: 116888 - DNA, 79 bp, Homo sapiens
ttttgccacaataatgcttgagacaagtggttggctgactccgtatctgttttctgctctcactctaaactggtactca

SEQ ID NO: 116889 - DNA, 80 bp, Homo sapiens
aataatgcttgagacaagtggttggctgactccgtatctgttttctgctctcactctaaactggtactcagcatctttga

SEQ ID NO: 116890 - DNA, 80 bp, Homo sapiens
ttgagacaagtggttggctgactccgtatctgttttctgctctcactctaaactggtactcagcatctttgactagatta

SEQ ID NO: 116891 - DNA, 78 bp, Homo sapiens
ttggctgactccgtatctgttttctgctctcactctaaactggtactcagcatctttgactagattaggaactttgaa

SEQ ID NO: 116892 - DNA, 75 bp, Homo sapiens
cgtatctgttttctgctctcactctaaactggtactcagcatctttgactagattaggaactttgaaagtcgttc

SEQ ID NO: 116893 - DNA, 74 bp, Homo sapiens
actctaaactggtactcagcatctttgactagattaggaactttgaaagtcgttctggcaacacttgaacacac

SEQ ID NO: 116894 - DNA, 74 bp, Homo sapiens
aaactggtactcagcatctttgactagattaggaactttgaaagtcgttctggcaacacttgaacacaccatct

SEQ ID NO: 116895 - DNA, 72 bp, Homo sapiens
atctttgactagattaggaactttgaaagtcgttctggcaacacttgaacacaccatcttccagttagtttg

SEQ ID NO: 116896 - DNA, 71 bp, Homo sapiens
actagattaggaactttgaaagtcgttctggcaacacttgaacacaccatcttccagttagtttgtgaagt

SEQ ID NO: 116897 - DNA, 74 bp, Homo sapiens
aaagtcgttctggcaacacttgaacacaccatcttccagttagtttgtgaagtttcccgcttctcgatgctgta

SEQ ID NO: 116898 - DNA, 72 bp, Homo sapiens
aacacttgaacacaccatcttccagttagtttgtgaagtttcccgcttctcgatgctgtaacaagtaatttc

SEQ ID NO: 116899 - DNA, 72 bp, Homo sapiens
aacacaccatcttccagttagtttgtgaagtttcccgcttctcgatgctgtaacaagtaatttctcctcctc

SEQ ID NO: 116900 - DNA, 74 bp, Homo sapiens
tagtttgtgaagtttcccgcttctcgatgctgtaacaagtaatttctcctcctccattatcttcaggtacatcc

SEQ ID NO: 116901 - DNA, 77 bp, Homo sapiens
agtttcccgcttctcgatgctgtaacaagtaatttctcctcctccattatcttcaggtacatcccatgacaggatga

SEQ ID NO: 116902 - DNA, 80 bp, Homo sapiens
aatttctcctcctccattatcttcaggtacatcccatgacaggatgacactatcagccttgatttcatcaaatcgaatgg

SEQ ID NO: 116903 - DNA, 78 bp, Homo sapiens
attatcttcaggtacatcccatgacaggatgacactatcagccttgatttcatcaaatcgaatgggtcctttgggctt

SEQ ID NO: 116904 - DNA, 80 bp, Homo sapiens
ttcaggtacatcccatgacaggatgacactatcagccttgatttcatcaaatcgaatgggtcctttgggctttgatggtg

SEQ ID NO: 116905 - DNA, 78 bp, Homo sapiens
atcccatgacaggatgacactatcagccttgatttcatcaaatcgaatgggtcctttgggctttgatggtgggccaag

SEQ ID NO: 116906 - DNA, 78 bp, Homo sapiens
atgacactatcagccttgatttcatcaaatcgaatgggtcctttgggctttgatggtgggccaagggtgatgactgta

SEQ ID NO: 116907 - DNA, 76 bp, Homo sapiens
tatcagccttgatttcatcaaatcgaatgggtcctttgggctttgatggtgggccaagggtgatgactgtaatggg

SEQ ID NO: 116908 - DNA, 74 bp, Homo sapiens
atttcatcaaatcgaatgggtcctttgggctttgatggtgggccaagggtgatgactgtaatggggactgcaat

SEQ ID NO: 116909 - DNA, 74 bp, Homo sapiens
aatcgaatgggtcctttgggctttgatggtgggccaagggtgatgactgtaatggggactgcaattctacacac

SEQ ID NO: 116910 - DNA, 79 bp, Homo sapiens
tttgatggtgggccaagggtgatgactgtaatggggactgcaattctacacactgcattatcaagaataacagtgtatt

SEQ ID NO: 116911 - DNA, 79 bp, Homo sapiens
actgtaatggggactgcaattctacacactgcattatcaagaataacagtgtattttcctccatgctccttcttggcat

SEQ ID NO: 116912 - DNA, 81 bp, Homo sapiens
ggactgcaattctacacactgcattatcaagaataacagtgtattttcctccatgctccttcttggcattcttaatactca

SEQ ID NO: 116913 - DNA, 78 bp, Homo sapiens
attctacacactgcattatcaagaataacagtgtattttcctccatgctccttcttggcattcttaatactcaaagta

SEQ ID NO: 116914 - DNA, 76 bp, Homo sapiens
cactgcattatcaagaataacagtgtattttcctccatgctccttcttggcattcttaatactcaaagtaattttg

SEQ ID NO: 116915 - DNA, 73 bp, Homo sapiens
tcaagaataacagtgtattttcctccatgctccttcttggcattcttaatactcaaagtaattttgttttcag

SEQ ID NO: 116916 - DNA, 71 bp, Homo sapiens
gtattttcctccatgctccttcttggcattcttaatactcaaagtaattttgttttcagttttactgaagc

SEQ ID NO: 116917 - DNA, 71 bp, Homo sapiens
cctccatgctccttcttggcattcttaatactcaaagtaattttgttttcagttttactgaagcgaacaaa

SEQ ID NO: 116918 - DNA, 69 bp, Homo sapiens
ctccttcttggcattcttaatactcaaagtaattttgttttcagttttactgaagcgaacaaattcact

SEQ ID NO: 116919 - DNA, 70 bp, Homo sapiens
gcattcttaatactcaaagtaattttgttttcagttttactgaagcgaacaaattcactttctttcagtg

SEQ ID NO: 116920 - DNA, 71 bp, Homo sapiens
caaagtaattttgttttcagttttactgaagcgaacaaattcactttctttcagtggcaagccatctttca

SEQ ID NO: 116921 - DNA, 76 bp, Homo sapiens
ttgttttcagttttactgaagcgaacaaattcactttctttcagtggcaagccatctttcagccaactgatggatg

SEQ ID NO: 116922 - DNA, 74 bp, Homo sapiens
agttttactgaagcgaacaaattcactttctttcagtggcaagccatctttcagccaactgatggatggtttgg

SEQ ID NO: 116923 - DNA, 72 bp, Homo sapiens
cgaacaaattcactttctttcagtggcaagccatctttcagccaactgatggatggtttgggttttccctta

SEQ ID NO: 116924 - DNA, 72 bp, Homo sapiens
tcactttctttcagtggcaagccatctttcagccaactgatggatggtttgggttttcccttataaggtaat

SEQ ID NO: 116925 - DNA, 72 bp, Homo sapiens
tctttcagtggcaagccatctttcagccaactgatggatggtttgggttttcccttataaggtaattcaagg

SEQ ID NO: 116926 - DNA, 73 bp, Homo sapiens
aagccatctttcagccaactgatggatggtttgggttttcccttataaggtaattcaaggtgcacattgtgcc

SEQ ID NO: 116927 - DNA, 74 bp, Homo sapiens
tttcagccaactgatggatggtttgggttttcccttataaggtaattcaaggtgcacattgtgcccaattctca

SEQ ID NO: 116928 - DNA, 74 bp, Homo sapiens
ctgatggatggtttgggttttcccttataaggtaattcaaggtgcacattgtgcccaattctcacagtgacttg

SEQ ID NO: 116929 - DNA, 74 bp, Homo sapiens
ggttttcccttataaggtaattcaaggtgcacattgtgcccaattctcacagtgacttgtgccccagggatatc

SEQ ID NO: 116930 - DNA, 78 bp, Homo sapiens
ttataaggtaattcaaggtgcacattgtgcccaattctcacagtgacttgtgccccagggatatctgacaggtcaact

SEQ ID NO: 116931 - DNA, 80 bp, Homo sapiens
ttcaaggtgcacattgtgcccaattctcacagtgacttgtgccccagggatatctgacaggtcaacttcaggtgtaataa

SEQ ID NO: 116932 - DNA, 77 bp, Homo sapiens
acattgtgcccaattctcacagtgacttgtgccccagggatatctgacaggtcaacttcaggtgtaataataagttc

SEQ ID NO: 116933 - DNA, 77 bp, Homo sapiens
caattctcacagtgacttgtgccccagggatatctgacaggtcaacttcaggtgtaataataagttctttcactgta

SEQ ID NO: 116934 - DNA, 75 bp, Homo sapiens
acagtgacttgtgccccagggatatctgacaggtcaacttcaggtgtaataataagttctttcactgtaattggc

SEQ ID NO: 116935 - DNA, 74 bp, Homo sapiens
ttgtgccccagggatatctgacaggtcaacttcaggtgtaataataagttctttcactgtaattggcccaatag

SEQ ID NO: 116936 - DNA, 76 bp, Homo sapiens
agggatatctgacaggtcaacttcaggtgtaataataagttctttcactgtaattggcccaatagtgacaggatca

SEQ ID NO: 116937 - DNA, 74 bp, Homo sapiens
ttcaggtgtaataataagttctttcactgtaattggcccaatagtgacaggatcactcagtcctttctcatttt

SEQ ID NO: 116938 - DNA, 77 bp, Homo sapiens
tctttcactgtaattggcccaatagtgacaggatcactcagtcctttctcatttttggcaaacactctgaactccag

SEQ ID NO: 116939 - DNA, 76 bp, Homo sapiens
aatagtgacaggatcactcagtcctttctcatttttggcaaacactctgaactccaggactgactgctccttaagt

SEQ ID NO: 116940 - DNA, 74 bp, Homo sapiens
actcagtcctttctcatttttggcaaacactctgaactccaggactgactgctccttaagttggctaacctcaa

SEQ ID NO: 116941 - DNA, 75 bp, Homo sapiens
ttttggcaaacactctgaactccaggactgactgctccttaagttggctaacctcaatttcacatgtcttactta

SEQ ID NO: 116942 - DNA, 77 bp, Homo sapiens
aacactctgaactccaggactgactgctccttaagttggctaacctcaatttcacatgtcttacttatgccagcgtg

SEQ ID NO: 116943 - DNA, 75 bp, Homo sapiens
aggactgactgctccttaagttggctaacctcaatttcacatgtcttacttatgccagcgtgggaccacgtctgt

SEQ ID NO: 116944 - DNA, 75 bp, Homo sapiens
tgctccttaagttggctaacctcaatttcacatgtcttacttatgccagcgtgggaccacgtctgttcaccttta

SEQ ID NO: 116945 - DNA, 72 bp, Homo sapiens
ttaagttggctaacctcaatttcacatgtcttacttatgccagcgtgggaccacgtctgttcacctttacct

SEQ ID NO: 116946 - DNA, 72 bp, Homo sapiens
taacctcaatttcacatgtcttacttatgccagcgtgggaccacgtctgttcacctttacctttcctttcta

SEQ ID NO: 116947 - DNA, 75 bp, Homo sapiens
atgtcttacttatgccagcgtgggaccacgtctgttcacctttacctttcctttctacaacatattctgtgatga

SEQ ID NO: 116948 - DNA, 75 bp, Homo sapiens
ttacttatgccagcgtgggaccacgtctgttcacctttacctttcctttctacaacatattctgtgatgacgcta

SEQ ID NO: 116949 - DNA, 75 bp, Homo sapiens
tgggaccacgtctgttcacctttacctttcctttctacaacatattctgtgatgacgctaccaccatcaaagtca

SEQ ID NO: 116950 - DNA, 72 bp, Homo sapiens
acgtctgttcacctttacctttcctttctacaacatattctgtgatgacgctaccaccatcaaagtcaggtt

SEQ ID NO: 116951 - DNA, 80 bp, Homo sapiens
ctttctacaacatattctgtgatgacgctaccaccatcaaagtcaggtttggtccagctgaggatgacagatgtctttgt

SEQ ID NO: 116952 - DNA, 80 bp, Homo sapiens
aacatattctgtgatgacgctaccaccatcaaagtcaggtttggtccagctgaggatgacagatgtctttgttgagtctt

SEQ ID NO: 116953 - DNA, 85 bp, Homo sapiens
tgtgatgacgctaccaccatcaaagtcaggtttggtccagctgaggatgacagatgtctttgttgagtctttcattgagagatca

SEQ ID NO: 116954 - DNA, 81 bp, Homo sapiens
taccaccatcaaagtcaggtttggtccagctgaggatgacagatgtctttgttgagtctttcattgagagatcacgtatag

SEQ ID NO: 116955 - DNA, 83 bp, Homo sapiens
tttggtccagctgaggatgacagatgtctttgttgagtctttcattgagagatcacgtataggagctggtacttcagcagcct

SEQ ID NO: 116956 - DNA, 82 bp, Homo sapiens
agatgtctttgttgagtctttcattgagagatcacgtataggagctggtacttcagcagccttcactggctctgtagtttca

SEQ ID NO: 116957 - DNA, 80 bp, Homo sapiens
ttgttgagtctttcattgagagatcacgtataggagctggtacttcagcagccttcactggctctgtagtttcacagggt

SEQ ID NO: 116958 - DNA, 78 bp, Homo sapiens
tttcattgagagatcacgtataggagctggtacttcagcagccttcactggctctgtagtttcacagggttccccaat

SEQ ID NO: 116959 - DNA, 75 bp, Homo sapiens
agatcacgtataggagctggtacttcagcagccttcactggctctgtagtttcacagggttccccaattccaatt

SEQ ID NO: 116960 - DNA, 74 bp, Homo sapiens
ataggagctggtacttcagcagccttcactggctctgtagtttcacagggttccccaattccaatttcattttc

SEQ ID NO: 116961 - DNA, 77 bp, Homo sapiens
tacttcagcagccttcactggctctgtagtttcacagggttccccaattccaatttcattttctgcaagaactctga

SEQ ID NO: 116962 - DNA, 75 bp, Homo sapiens
ttcactggctctgtagtttcacagggttccccaattccaatttcattttctgcaagaactctgaagaagaatgga

SEQ ID NO: 116963 - DNA, 74 bp, Homo sapiens
tctgtagtttcacagggttccccaattccaatttcattttctgcaagaactctgaagaagaatggagtcttctc

SEQ ID NO: 116964 - DNA, 73 bp, Homo sapiens
cagggttccccaattccaatttcattttctgcaagaactctgaagaagaatggagtcttctccgacaaatcta

SEQ ID NO: 116965 - DNA, 76 bp, Homo sapiens
caattccaatttcattttctgcaagaactctgaagaagaatggagtcttctccgacaaatctattagcttgaagga

SEQ ID NO: 116966 - DNA, 79 bp, Homo sapiens
ttcattttctgcaagaactctgaagaagaatggagtcttctccgacaaatctattagcttgaaggatgtgctagaacat

SEQ ID NO: 116967 - DNA, 79 bp, Homo sapiens
tttctgcaagaactctgaagaagaatggagtcttctccgacaaatctattagcttgaaggatgtgctagaacatttgtg

SEQ ID NO: 116968 - DNA, 79 bp, Homo sapiens
aactctgaagaagaatggagtcttctccgacaaatctattagcttgaaggatgtgctagaacatttgtgtgacacgaca

SEQ ID NO: 116969 - DNA, 82 bp, Homo sapiens
tcttctccgacaaatctattagcttgaaggatgtgctagaacatttgtgtgacacgacagaccatgttctcttggtggcatc

SEQ ID NO: 116970 - DNA, 81 bp, Homo sapiens
aaatctattagcttgaaggatgtgctagaacatttgtgtgacacgacagaccatgttctcttggtggcatctctcttttca

SEQ ID NO: 116971 - DNA, 82 bp, Homo sapiens
ttgaaggatgtgctagaacatttgtgtgacacgacagaccatgttctcttggtggcatctctcttttcaatgacataattaa

SEQ ID NO: 116972 - DNA, 81 bp, Homo sapiens
atgtgctagaacatttgtgtgacacgacagaccatgttctcttggtggcatctctcttttcaatgacataattaattattg

SEQ ID NO: 116973 - DNA, 80 bp, Homo sapiens
atttgtgtgacacgacagaccatgttctcttggtggcatctctcttttcaatgacataattaattattggagatcctcca

SEQ ID NO: 116974 - DNA, 81 bp, Homo sapiens
acacgacagaccatgttctcttggtggcatctctcttttcaatgacataattaattattggagatcctccatcaatgagag

SEQ ID NO: 116975 - DNA, 81 bp, Homo sapiens
atgttctcttggtggcatctctcttttcaatgacataattaattattggagatcctccatcaatgagaggaggatcccaga

SEQ ID NO: 116976 - DNA, 82 bp, Homo sapiens
ttggtggcatctctcttttcaatgacataattaattattggagatcctccatcaatgagaggaggatcccagagcaaagtga

SEQ ID NO: 116977 - DNA, 82 bp, Homo sapiens
tcttttcaatgacataattaattattggagatcctccatcaatgagaggaggatcccagagcaaagtgactgtgcctcgaga

SEQ ID NO: 116978 - DNA, 79 bp, Homo sapiens
acataattaattattggagatcctccatcaatgagaggaggatcccagagcaaagtgactgtgcctcgagaaacatgtt

SEQ ID NO: 116979 - DNA, 78 bp, Homo sapiens
attaattattggagatcctccatcaatgagaggaggatcccagagcaaagtgactgtgcctcgagaaacatgtttaac

SEQ ID NO: 116980 - DNA, 78 bp, Homo sapiens
agatcctccatcaatgagaggaggatcccagagcaaagtgactgtgcctcgagaaacatgtttaacctgtagtttctg

SEQ ID NO: 116981 - DNA, 80 bp, Homo sapiens
atcaatgagaggaggatcccagagcaaagtgactgtgcctcgagaaacatgtttaacctgtagtttctggcaggcagctg

SEQ ID NO: 116982 - DNA, 80 bp, Homo sapiens
gatcccagagcaaagtgactgtgcctcgagaaacatgtttaacctgtagtttctggcaggcagctggtgtgtcaagcact

SEQ ID NO: 116983 - DNA, 79 bp, Homo sapiens
tgtgcctcgagaaacatgtttaacctgtagtttctggcaggcagctggtgtgtcaagcactttaacactcacagttgaa

SEQ ID NO: 116984 - DNA, 77 bp, Homo sapiens
tttctggcaggcagctggtgtgtcaagcactttaacactcacagttgaagacttaggttcaccaactccattttcta

SEQ ID NO: 116985 - DNA, 77 bp, Homo sapiens
cagctggtgtgtcaagcactttaacactcacagttgaagacttaggttcaccaactccattttctattgtgagaata

SEQ ID NO: 116986 - DNA, 75 bp, Homo sapiens
tgtgtcaagcactttaacactcacagttgaagacttaggttcaccaactccattttctattgtgagaatatattt

SEQ ID NO: 116987 - DNA, 74 bp, Homo sapiens
gcactttaacactcacagttgaagacttaggttcaccaactccattttctattgtgagaatatattttcctgta

SEQ ID NO: 116988 - DNA, 74 bp, Homo sapiens
cagttgaagacttaggttcaccaactccattttctattgtgagaatatattttcctgtatcattgcgagtaact

SEQ ID NO: 116989 - DNA, 74 bp, Homo sapiens
agacttaggttcaccaactccattttctattgtgagaatatattttcctgtatcattgcgagtaacttgaggaa

SEQ ID NO: 116990 - DNA, 78 bp, Homo sapiens
ttcaccaactccattttctattgtgagaatatattttcctgtatcattgcgagtaacttgaggaatggtgagtaatga

SEQ ID NO: 116991 - DNA, 79 bp, Homo sapiens
tttctattgtgagaatatattttcctgtatcattgcgagtaacttgaggaatggtgagtaatgaggatgaatcagtgtt

SEQ ID NO: 116992 - DNA, 79 bp, Homo sapiens
attgtgagaatatattttcctgtatcattgcgagtaacttgaggaatggtgagtaatgaggatgaatcagtgttttcaa

SEQ ID NO: 116993 - DNA, 86 bp, Homo sapiens
tgtatcattgcgagtaacttgaggaatggtgagtaatgaggatgaatcagtgttttcaatgctgtatctggcatcactgccaagat

SEQ ID NO: 116994 - DNA, 84 bp, Homo sapiens
taacttgaggaatggtgagtaatgaggatgaatcagtgttttcaatgctgtatctggcatcactgccaagattcttctcatctt

SEQ ID NO: 116995 - DNA, 84 bp, Homo sapiens
aggaatggtgagtaatgaggatgaatcagtgttttcaatgctgtatctggcatcactgccaagattcttctcatcttttctcca

SEQ ID NO: 116996 - DNA, 85 bp, Homo sapiens
agtaatgaggatgaatcagtgttttcaatgctgtatctggcatcactgccaagattcttctcatcttttctccatgtgacagtag

SEQ ID NO: 116997 - DNA, 80 bp, Homo sapiens
tatctggcatcactgccaagattcttctcatcttttctccatgtgacagtaggtggaggtctgcctttaaagggaatcaa

SEQ ID NO: 116998 - DNA, 76 bp, Homo sapiens
atcactgccaagattcttctcatcttttctccatgtgacagtaggtggaggtctgcctttaaagggaatcaacact

SEQ ID NO: 116999 - DNA, 76 bp, Homo sapiens
attcttctcatcttttctccatgtgacagtaggtggaggtctgcctttaaagggaatcaacacttgtacatcttca

SEQ ID NO: 117000 - DNA, 74 bp, Homo sapiens
atcttttctccatgtgacagtaggtggaggtctgcctttaaagggaatcaacacttgtacatcttcaccagctt

SEQ ID NO: 117001 - DNA, 76 bp, Homo sapiens
atgtgacagtaggtggaggtctgcctttaaagggaatcaacacttgtacatcttcaccagctttggcaataacaga

SEQ ID NO: 117002 - DNA, 76 bp, Homo sapiens
aggtctgcctttaaagggaatcaacacttgtacatcttcaccagctttggcaataacagaagttctgagagccaca

SEQ ID NO: 117003 - DNA, 78 bp, Homo sapiens
ttaaagggaatcaacacttgtacatcttcaccagctttggcaataacagaagttctgagagccacatccaggtcaatc

SEQ ID NO: 117004 - DNA, 81 bp, Homo sapiens
acatcttcaccagctttggcaataacagaagttctgagagccacatccaggtcaatctctggtgcctctgtagacataaaa

SEQ ID NO: 117005 - DNA, 80 bp, Homo sapiens
aataacagaagttctgagagccacatccaggtcaatctctggtgcctctgtagacataaaatggatacatacagtgaatt

SEQ ID NO: 117006 - DNA, 72 bp, Homo sapiens
tggaagtatgcttattaaaaaacataatcaaaccagtaggtacataccaagtatatctttagcttgtacagg

SEQ ID NO: 117007 - DNA, 72 bp, Homo sapiens
gcttattaaaaaacataatcaaaccagtaggtacataccaagtatatctttagcttgtacaggttcattcat

SEQ ID NO: 117008 - DNA, 74 bp, Homo sapiens
acataatcaaaccagtaggtacataccaagtatatctttagcttgtacaggttcattcatttctataggttctc

SEQ ID NO: 117009 - DNA, 73 bp, Homo sapiens
atcaaaccagtaggtacataccaagtatatctttagcttgtacaggttcattcatttctataggttctccttg

SEQ ID NO: 117010 - DNA, 76 bp, Homo sapiens
aagtatatctttagcttgtacaggttcattcatttctataggttctccttgtccagcacagtttacagcagatacc

SEQ ID NO: 117011 - DNA, 75 bp, Homo sapiens
tttagcttgtacaggttcattcatttctataggttctccttgtccagcacagtttacagcagatacccggaagta

SEQ ID NO: 117012 - DNA, 74 bp, Homo sapiens
aggttcattcatttctataggttctccttgtccagcacagtttacagcagatacccggaagtagtaattgactc

SEQ ID NO: 117013 - DNA, 73 bp, Homo sapiens
ttcatttctataggttctccttgtccagcacagtttacagcagatacccggaagtagtaattgactccaggtt

SEQ ID NO: 117014 - DNA, 74 bp, Homo sapiens
ttctccttgtccagcacagtttacagcagatacccggaagtagtaattgactccaggtttcaggttggatacca

SEQ ID NO: 117015 - DNA, 75 bp, Homo sapiens
ttgtccagcacagtttacagcagatacccggaagtagtaattgactccaggtttcaggttggataccacatattc

SEQ ID NO: 117016 - DNA, 72 bp, Homo sapiens
agtttacagcagatacccggaagtagtaattgactccaggtttcaggttggataccacatattctgtagttc

SEQ ID NO: 117017 - DNA, 71 bp, Homo sapiens
atacccggaagtagtaattgactccaggtttcaggttggataccacatattctgtagttctgacctctcct

SEQ ID NO: 117018 - DNA, 73 bp, Homo sapiens
aagtagtaattgactccaggtttcaggttggataccacatattctgtagttctgacctctcctttggtagaga

SEQ ID NO: 117019 - DNA, 75 bp, Homo sapiens
ttgactccaggtttcaggttggataccacatattctgtagttctgacctctcctttggtagagacagtagtccat

SEQ ID NO: 117020 - DNA, 74 bp, Homo sapiens
gtttcaggttggataccacatattctgtagttctgacctctcctttggtagagacagtagtccattcctcttcc

SEQ ID NO: 117021 - DNA, 76 bp, Homo sapiens
tattctgtagttctgacctctcctttggtagagacagtagtccattcctcttcctctccttgtcttatctcgacaa

SEQ ID NO: 117022 - DNA, 73 bp, Homo sapiens
acctctcctttggtagagacagtagtccattcctcttcctctccttgtcttatctcgacaacatacccagtaa

SEQ ID NO: 117023 - DNA, 76 bp, Homo sapiens
tttggtagagacagtagtccattcctcttcctctccttgtcttatctcgacaacatacccagtaacagcactgccc

SEQ ID NO: 117024 - DNA, 78 bp, Homo sapiens
acagtagtccattcctcttcctctccttgtcttatctcgacaacatacccagtaacagcactgcccccatcatagaca

SEQ ID NO: 117025 - DNA, 77 bp, Homo sapiens
attcctcttcctctccttgtcttatctcgacaacatacccagtaacagcactgcccccatcatagacaggcttactc

SEQ ID NO: 117026 - DNA, 79 bp, Homo sapiens
tctccttgtcttatctcgacaacatacccagtaacagcactgcccccatcatagacaggcttactccagccaagggtga

SEQ ID NO: 117027 - DNA, 80 bp, Homo sapiens
tcttatctcgacaacatacccagtaacagcactgcccccatcatagacaggcttactccagccaagggtgatggatgact

SEQ ID NO: 117028 - DNA, 78 bp, Homo sapiens
aacatacccagtaacagcactgcccccatcatagacaggcttactccagccaagggtgatggatgacttggttgaatc

SEQ ID NO: 117029 - DNA, 81 bp, Homo sapiens
taacagcactgcccccatcatagacaggcttactccagccaagggtgatggatgacttggttgaatctgcgattcttatct

SEQ ID NO: 117030 - DNA, 80 bp, Homo sapiens
actgcccccatcatagacaggcttactccagccaagggtgatggatgacttggttgaatctgcgattcttatcttagcag

SEQ ID NO: 117031 - DNA, 80 bp, Homo sapiens
atcatagacaggcttactccagccaagggtgatggatgacttggttgaatctgcgattcttatcttagcaggtggacctg

SEQ ID NO: 117032 - DNA, 80 bp, Homo sapiens
aagggtgatggatgacttggttgaatctgcgattcttatcttagcaggtggacctggaggatctggaatggccattcaca

SEQ ID NO: 117033 - DNA, 79 bp, Homo sapiens
atggatgacttggttgaatctgcgattcttatcttagcaggtggacctggaggatctggaatggccattcacaataaaa

SEQ ID NO: 117034 - DNA, 77 bp, Homo sapiens
cttggttgaatctgcgattcttatcttagcaggtggacctggaggatctggaatggccattcacaataaaataatta

SEQ ID NO: 117035 - DNA, 87 bp, Homo sapiens
tgaatatagaagacacaggtgaagatgctgcaggtatgagcacttaccaataggatcagcagctttgtagaattcagatggttcaga

SEQ ID NO: 117036 - DNA, 84 bp, Homo sapiens
tagaagacacaggtgaagatgctgcaggtatgagcacttaccaataggatcagcagctttgtagaattcagatggttcagaaaa

SEQ ID NO: 117037 - DNA, 82 bp, Homo sapiens
aagatgctgcaggtatgagcacttaccaataggatcagcagctttgtagaattcagatggttcagaaaatggaccctgtcca

SEQ ID NO: 117038 - DNA, 79 bp, Homo sapiens
aggtatgagcacttaccaataggatcagcagctttgtagaattcagatggttcagaaaatggaccctgtccagcagcgt

SEQ ID NO: 117039 - DNA, 79 bp, Homo sapiens
acttaccaataggatcagcagctttgtagaattcagatggttcagaaaatggaccctgtccagcagcgtttacagcaca

SEQ ID NO: 117040 - DNA, 80 bp, Homo sapiens
ataggatcagcagctttgtagaattcagatggttcagaaaatggaccctgtccagcagcgtttacagcacaaactctgta

SEQ ID NO: 117041 - DNA, 79 bp, Homo sapiens
agctttgtagaattcagatggttcagaaaatggaccctgtccagcagcgtttacagcacaaactctgtattgatagtca

SEQ ID NO: 117042 - DNA, 78 bp, Homo sapiens
tagaattcagatggttcagaaaatggaccctgtccagcagcgtttacagcacaaactctgtattgatagtcactgttt

SEQ ID NO: 117043 - DNA, 78 bp, Homo sapiens
atggttcagaaaatggaccctgtccagcagcgtttacagcacaaactctgtattgatagtcactgttttctgtgagtc

SEQ ID NO: 117044 - DNA, 76 bp, Homo sapiens
atggaccctgtccagcagcgtttacagcacaaactctgtattgatagtcactgttttctgtgagtcctgttacttt

SEQ ID NO: 117045 - DNA, 79 bp, Homo sapiens
tccagcagcgtttacagcacaaactctgtattgatagtcactgttttctgtgagtcctgttactttttgtctggtgtca

SEQ ID NO: 117046 - DNA, 76 bp, Homo sapiens
tttacagcacaaactctgtattgatagtcactgttttctgtgagtcctgttactttttgtctggtgtcacggatag

SEQ ID NO: 117047 - DNA, 74 bp, Homo sapiens
aactctgtattgatagtcactgttttctgtgagtcctgttactttttgtctggtgtcacggatagtctctttta

SEQ ID NO: 117048 - DNA, 73 bp, Homo sapiens
tattgatagtcactgttttctgtgagtcctgttactttttgtctggtgtcacggatagtctcttttagtactt

SEQ ID NO: 117049 - DNA, 69 bp, Homo sapiens
actgttttctgtgagtcctgttactttttgtctggtgtcacggatagtctcttttagtactttaaacca

SEQ ID NO: 117050 - DNA, 69 bp, Homo sapiens
agtcctgttactttttgtctggtgtcacggatagtctcttttagtactttaaaccatcctaggctcttc

SEQ ID NO: 117051 - DNA, 70 bp, Homo sapiens
tactttttgtctggtgtcacggatagtctcttttagtactttaaaccatcctaggctcttcttgtctcgt

SEQ ID NO: 117052 - DNA, 70 bp, Homo sapiens
tggtgtcacggatagtctcttttagtactttaaaccatcctaggctcttcttgtctcgtttttcaaggaa

SEQ ID NO: 117053 - DNA, 68 bp, Homo sapiens
atagtctcttttagtactttaaaccatcctaggctcttcttgtctcgtttttcaaggaaatagccact

SEQ ID NO: 117054 - DNA, 70 bp, Homo sapiens
tttagtactttaaaccatcctaggctcttcttgtctcgtttttcaaggaaatagccacttatatcactac

SEQ ID NO: 117055 - DNA, 77 bp, Homo sapiens
atcctaggctcttcttgtctcgtttttcaaggaaatagccacttatatcactaccgccatctgcaattggcctgctc

SEQ ID NO: 117056 - DNA, 79 bp, Homo sapiens
ttcttgtctcgtttttcaaggaaatagccacttatatcactaccgccatctgcaattggcctgctccatacaacagtca

SEQ ID NO: 117057 - DNA, 80 bp, Homo sapiens
ttcaaggaaatagccacttatatcactaccgccatctgcaattggcctgctccatacaacagtcatcgaattcttggtaa

SEQ ID NO: 117058 - DNA, 79 bp, Homo sapiens
aaatagccacttatatcactaccgccatctgcaattggcctgctccatacaacagtcatcgaattcttggtaatctttg

SEQ ID NO: 117059 - DNA, 80 bp, Homo sapiens
acttatatcactaccgccatctgcaattggcctgctccatacaacagtcatcgaattcttggtaatctttgtcacttctg

SEQ ID NO: 117060 - DNA, 81 bp, Homo sapiens
taccgccatctgcaattggcctgctccatacaacagtcatcgaattcttggtaatctttgtcacttctggtatgcctggtg

SEQ ID NO: 117061 - DNA, 78 bp, Homo sapiens
attggcctgctccatacaacagtcatcgaattcttggtaatctttgtcacttctggtatgcctggtggcccaggtgta

SEQ ID NO: 117062 - DNA, 73 bp, Homo sapiens
aacagtcatcgaattcttggtaatctttgtcacttctggtatgcctggtggcccaggtgtaactatttagaaa

SEQ ID NO: 117063 - DNA, 70 bp, Homo sapiens
aattcttggtaatctttgtcacttctggtatgcctggtggcccaggtgtaactatttagaaaggaaggga

SEQ ID NO: 117064 - DNA, 73 bp, Homo sapiens
aatttttcacgtttcagttttctaatgaaatcatgtctcaccaaatgcgttcttggctacaacggaatcagat

SEQ ID NO: 117065 - DNA, 77 bp, Homo sapiens
agttttctaatgaaatcatgtctcaccaaatgcgttcttggctacaacggaatcagattccagtggctcgccaattc

SEQ ID NO: 117066 - DNA, 80 bp, Homo sapiens
atgaaatcatgtctcaccaaatgcgttcttggctacaacggaatcagattccagtggctcgccaattccatatttgttca

SEQ ID NO: 117067 - DNA, 78 bp, Homo sapiens
atgtctcaccaaatgcgttcttggctacaacggaatcagattccagtggctcgccaattccatatttgttcacggctc

SEQ ID NO: 117068 - DNA, 76 bp, Homo sapiens
gctacaacggaatcagattccagtggctcgccaattccatatttgttcacggctcggacccggaagatgtattcat

SEQ ID NO: 117069 - DNA, 74 bp, Homo sapiens
aacggaatcagattccagtggctcgccaattccatatttgttcacggctcggacccggaagatgtattcatttc

SEQ ID NO: 117070 - DNA, 70 bp, Homo sapiens
ccaattccatatttgttcacggctcggacccggaagatgtattcatttcctttgataattttggtggttg

SEQ ID NO: 117071 - DNA, 73 bp, Homo sapiens
atatttgttcacggctcggacccggaagatgtattcatttcctttgataattttggtggttgtaatgatgcac

SEQ ID NO: 117072 - DNA, 73 bp, Homo sapiens
ggctcggacccggaagatgtattcatttcctttgataattttggtggttgtaatgatgcactcttccaaatgt

SEQ ID NO: 117073 - DNA, 77 bp, Homo sapiens
cggaagatgtattcatttcctttgataattttggtggttgtaatgatgcactcttccaaatgttcagacaccataga

SEQ ID NO: 117074 - DNA, 76 bp, Homo sapiens
attcatttcctttgataattttggtggttgtaatgatgcactcttccaaatgttcagacaccatagaccacacaac

SEQ ID NO: 117075 - DNA, 79 bp, Homo sapiens
tttgataattttggtggttgtaatgatgcactcttccaaatgttcagacaccatagaccacacaacgcggcttgtctca

SEQ ID NO: 117076 - DNA, 77 bp, Homo sapiens
ttttggtggttgtaatgatgcactcttccaaatgttcagacaccatagaccacacaacgcggcttgtctcacgcttt

SEQ ID NO: 117077 - DNA, 80 bp, Homo sapiens
gttgtaatgatgcactcttccaaatgttcagacaccatagaccacacaacgcggcttgtctcacgcttttccacaatgta

SEQ ID NO: 117078 - DNA, 78 bp, Homo sapiens
aaatgttcagacaccatagaccacacaacgcggcttgtctcacgcttttccacaatgtagtgagtgatttttgcacca

SEQ ID NO: 117079 - DNA, 81 bp, Homo sapiens
agacaccatagaccacacaacgcggcttgtctcacgcttttccacaatgtagtgagtgatttttgcaccaccatcatcagc

SEQ ID NO: 117080 - DNA, 81 bp, Homo sapiens
acacaacgcggcttgtctcacgcttttccacaatgtagtgagtgatttttgcaccaccatcatcagctggaggccgccaga

SEQ ID NO: 117081 - DNA, 81 bp, Homo sapiens
cttgtctcacgcttttccacaatgtagtgagtgatttttgcaccaccatcatcagctggaggccgccagagaagggtgatc

SEQ ID NO: 117082 - DNA, 82 bp, Homo sapiens
ctcacgcttttccacaatgtagtgagtgatttttgcaccaccatcatcagctggaggccgccagagaagggtgatcttctca

SEQ ID NO: 117083 - DNA, 80 bp, Homo sapiens
gtgatttttgcaccaccatcatcagctggaggccgccagagaagggtgatcttctcagcagttacagtcttaaattcaat

SEQ ID NO: 117084 - DNA, 80 bp, Homo sapiens
ttttgcaccaccatcatcagctggaggccgccagagaagggtgatcttctcagcagttacagtcttaaattcaattggtc

SEQ ID NO: 117085 - DNA, 78 bp, Homo sapiens
atcatcagctggaggccgccagagaagggtgatcttctcagcagttacagtcttaaattcaattggtccaccaggtgg

SEQ ID NO: 117086 - DNA, 73 bp, Homo sapiens
aggccgccagagaagggtgatcttctcagcagttacagtcttaaattcaattggtccaccaggtgggcctggt

SEQ ID NO: 117087 - DNA, 75 bp, Homo sapiens
agagaagggtgatcttctcagcagttacagtcttaaattcaattggtccaccaggtgggcctggtttgtctatca

SEQ ID NO: 117088 - DNA, 75 bp, Homo sapiens
tcttctcagcagttacagtcttaaattcaattggtccaccaggtgggcctggtttgtctatcagtgaaaggacaa

SEQ ID NO: 117089 - DNA, 70 bp, Homo sapiens
agttacagtcttaaattcaattggtccaccaggtgggcctggtttgtctatcagtgaaaggacaaaacac

SEQ ID NO: 117090 - DNA, 72 bp, Homo sapiens
tcttaaattcaattggtccaccaggtgggcctggtttgtctatcagtgaaaggacaaaacacgatgttagta

SEQ ID NO: 117091 - DNA, 80 bp, Homo sapiens
actaagctttaggcaaatgtaatatgacagtggtctgtattcagcacctaccaaggatctgtactctgatggtggctgag

SEQ ID NO: 117092 - DNA, 84 bp, Homo sapiens
aaatgtaatatgacagtggtctgtattcagcacctaccaaggatctgtactctgatggtggctgaggctgagcccatggcattc

SEQ ID NO: 117093 - DNA, 83 bp, Homo sapiens
tatgacagtggtctgtattcagcacctaccaaggatctgtactctgatggtggctgaggctgagcccatggcattccttagtt

SEQ ID NO: 117094 - DNA, 82 bp, Homo sapiens
tctgtattcagcacctaccaaggatctgtactctgatggtggctgaggctgagcccatggcattccttagttttaattcata

SEQ ID NO: 117095 - DNA, 80 bp, Homo sapiens
acctaccaaggatctgtactctgatggtggctgaggctgagcccatggcattccttagttttaattcatagcatccacta

SEQ ID NO: 117096 - DNA, 80 bp, Homo sapiens
aaggatctgtactctgatggtggctgaggctgagcccatggcattccttagttttaattcatagcatccactattaaggc

SEQ ID NO: 117097 - DNA, 83 bp, Homo sapiens
tctgatggtggctgaggctgagcccatggcattccttagttttaattcatagcatccactattaaggcgatcggcatctttga

SEQ ID NO: 117098 - DNA, 82 bp, Homo sapiens
ctgaggctgagcccatggcattccttagttttaattcatagcatccactattaaggcgatcggcatctttgatgagtataga

SEQ ID NO: 117099 - DNA, 80 bp, Homo sapiens
agcccatggcattccttagttttaattcatagcatccactattaaggcgatcggcatctttgatgagtatagatgcgagg

SEQ ID NO: 117100 - DNA, 78 bp, Homo sapiens
ttccttagttttaattcatagcatccactattaaggcgatcggcatctttgatgagtatagatgcgaggtccgtggta

SEQ ID NO: 117101 - DNA, 79 bp, Homo sapiens
ttttaattcatagcatccactattaaggcgatcggcatctttgatgagtatagatgcgaggtccgtggtattttcaaca

SEQ ID NO: 117102 - DNA, 82 bp, Homo sapiens
atagcatccactattaaggcgatcggcatctttgatgagtatagatgcgaggtccgtggtattttcaacacacaccagtgca

SEQ ID NO: 117103 - DNA, 79 bp, Homo sapiens
tattaaggcgatcggcatctttgatgagtatagatgcgaggtccgtggtattttcaacacacaccagtgcattggtttg

SEQ ID NO: 117104 - DNA, 77 bp, Homo sapiens
atcggcatctttgatgagtatagatgcgaggtccgtggtattttcaacacacaccagtgcattggtttgtaattctt

SEQ ID NO: 117105 - DNA, 77 bp, Homo sapiens
tttgatgagtatagatgcgaggtccgtggtattttcaacacacaccagtgcattggtttgtaattctttatcatctt

SEQ ID NO: 117106 - DNA, 76 bp, Homo sapiens
gtatagatgcgaggtccgtggtattttcaacacacaccagtgcattggtttgtaattctttatcatctttatacca

SEQ ID NO: 117107 - DNA, 74 bp, Homo sapiens
gtccgtggtattttcaacacacaccagtgcattggtttgtaattctttatcatctttataccactcaatagtag

SEQ ID NO: 117108 - DNA, 74 bp, Homo sapiens
attttcaacacacaccagtgcattggtttgtaattctttatcatctttataccactcaatagtaggcgcaggtt

SEQ ID NO: 117109 - DNA, 77 bp, Homo sapiens
acacaccagtgcattggtttgtaattctttatcatctttataccactcaatagtaggcgcaggtttgccagaaatgc

SEQ ID NO: 117110 - DNA, 77 bp, Homo sapiens
attggtttgtaattctttatcatctttataccactcaatagtaggcgcaggtttgccagaaatgccagctctgagct

SEQ ID NO: 117111 - DNA, 82 bp, Homo sapiens
tgtaattctttatcatctttataccactcaatagtaggcgcaggtttgccagaaatgccagctctgagcttcacagatgtac

SEQ ID NO: 117112 - DNA, 84 bp, Homo sapiens
tatcatctttataccactcaatagtaggcgcaggtttgccagaaatgccagctctgagcttcacagatgtacctgctctgtatt

SEQ ID NO: 117113 - DNA, 82 bp, Homo sapiens
ataccactcaatagtaggcgcaggtttgccagaaatgccagctctgagcttcacagatgtacctgctctgtatttgacaact

SEQ ID NO: 117114 - DNA, 85 bp, Homo sapiens
ttgccagaaatgccagctctgagcttcacagatgtacctgctctgtatttgacaacttctgtatattctagaggcaaatcaatta

SEQ ID NO: 117115 - DNA, 83 bp, Homo sapiens
aaatgccagctctgagcttcacagatgtacctgctctgtatttgacaacttctgtatattctagaggcaaatcaattacagga

SEQ ID NO: 117116 - DNA, 83 bp, Homo sapiens
tgagcttcacagatgtacctgctctgtatttgacaacttctgtatattctagaggcaaatcaattacaggaccacctgcaaga

SEQ ID NO: 117117 - DNA, 77 bp, Homo sapiens
agatgtacctgctctgtatttgacaacttctgtatattctagaggcaaatcaattacaggaccacctgcaagaaaaa

SEQ ID NO: 117118 - DNA, 77 bp, Homo sapiens
ctctgtatttgacaacttctgtatattctagaggcaaatcaattacaggaccacctgcaagaaaaacagatgagaaa

SEQ ID NO: 117119 - DNA, 75 bp, Homo sapiens
atttgacaacttctgtatattctagaggcaaatcaattacaggaccacctgcaagaaaaacagatgagaaatatt

SEQ ID NO: 117120 - DNA, 74 bp, Homo sapiens
cttctgtatattctagaggcaaatcaattacaggaccacctgcaagaaaaacagatgagaaatatttaaaatat

SEQ ID NO: 117121 - DNA, 78 bp, Homo sapiens
atactgagttaaatagcaattttgattcaaagtgctaagcatgcttaccataagaatcgatgcaagtaatgggcccta

SEQ ID NO: 117122 - DNA, 78 bp, Homo sapiens
ttaaatagcaattttgattcaaagtgctaagcatgcttaccataagaatcgatgcaagtaatgggccctacaacctca

SEQ ID NO: 117123 - DNA, 80 bp, Homo sapiens
ttttgattcaaagtgctaagcatgcttaccataagaatcgatgcaagtaatgggccctacaacctcagatggattgctaa

SEQ ID NO: 117124 - DNA, 79 bp, Homo sapiens
aagtgctaagcatgcttaccataagaatcgatgcaagtaatgggccctacaacctcagatggattgctaatggaaccaa

SEQ ID NO: 117125 - DNA, 79 bp, Homo sapiens
atgcttaccataagaatcgatgcaagtaatgggccctacaacctcagatggattgctaatggaaccaacagcattccta

SEQ ID NO: 117126 - DNA, 79 bp, Homo sapiens
ataagaatcgatgcaagtaatgggccctacaacctcagatggattgctaatggaaccaacagcattcctagcaaagaca

SEQ ID NO: 117127 - DNA, 77 bp, Homo sapiens
caagtaatgggccctacaacctcagatggattgctaatggaaccaacagcattcctagcaaagacacggaattcata

SEQ ID NO: 117128 - DNA, 77 bp, Homo sapiens
gccctacaacctcagatggattgctaatggaaccaacagcattcctagcaaagacacggaattcatactgggaattc

SEQ ID NO: 117129 - DNA, 78 bp, Homo sapiens
aacctcagatggattgctaatggaaccaacagcattcctagcaaagacacggaattcatactgggaattctgagtcaa

SEQ ID NO: 117130 - DNA, 81 bp, Homo sapiens
attgctaatggaaccaacagcattcctagcaaagacacggaattcatactgggaattctgagtcaagccagagatgatgaa

SEQ ID NO: 117131 - DNA, 80 bp, Homo sapiens
aaccaacagcattcctagcaaagacacggaattcatactgggaattctgagtcaagccagagatgatgaattgagtttca

SEQ ID NO: 117132 - DNA, 79 bp, Homo sapiens
attcctagcaaagacacggaattcatactgggaattctgagtcaagccagagatgatgaattgagtttcagtaacattg

SEQ ID NO: 117133 - DNA, 79 bp, Homo sapiens
aaagacacggaattcatactgggaattctgagtcaagccagagatgatgaattgagtttcagtaacattggtgaagctg

SEQ ID NO: 117134 - DNA, 79 bp, Homo sapiens
acggaattcatactgggaattctgagtcaagccagagatgatgaattgagtttcagtaacattggtgaagctggccttg

SEQ ID NO: 117135 - DNA, 83 bp, Homo sapiens
tactgggaattctgagtcaagccagagatgatgaattgagtttcagtaacattggtgaagctggccttggtccatctgccatc

SEQ ID NO: 117136 - DNA, 81 bp, Homo sapiens
agtcaagccagagatgatgaattgagtttcagtaacattggtgaagctggccttggtccatctgccatctggaaggtcacg

SEQ ID NO: 117137 - DNA, 81 bp, Homo sapiens
agatgatgaattgagtttcagtaacattggtgaagctggccttggtccatctgccatctggaaggtcacgtctctcaacaa

SEQ ID NO: 117138 - DNA, 80 bp, Homo sapiens
atgaattgagtttcagtaacattggtgaagctggccttggtccatctgccatctggaaggtcacgtctctcaacaatgta

SEQ ID NO: 117139 - DNA, 80 bp, Homo sapiens
ttcagtaacattggtgaagctggccttggtccatctgccatctggaaggtcacgtctctcaacaatgtagcctgtaatct

SEQ ID NO: 117140 - DNA, 80 bp, Homo sapiens
attggtgaagctggccttggtccatctgccatctggaaggtcacgtctctcaacaatgtagcctgtaatcttgctacctc

SEQ ID NO: 117141 - DNA, 79 bp, Homo sapiens
cttggtccatctgccatctggaaggtcacgtctctcaacaatgtagcctgtaatcttgctacctccatcgaaagctggt

SEQ ID NO: 117142 - DNA, 81 bp, Homo sapiens
ctgccatctggaaggtcacgtctctcaacaatgtagcctgtaatcttgctacctccatcgaaagctggttgttgccatgaa

SEQ ID NO: 117143 - DNA, 78 bp, Homo sapiens
atctggaaggtcacgtctctcaacaatgtagcctgtaatcttgctacctccatcgaaagctggttgttgccatgaaag

SEQ ID NO: 117144 - DNA, 81 bp, Homo sapiens
tctctcaacaatgtagcctgtaatcttgctacctccatcgaaagctggttgttgccatgaaaggctgacagagttctttga

SEQ ID NO: 117145 - DNA, 77 bp, Homo sapiens
aacaatgtagcctgtaatcttgctacctccatcgaaagctggttgttgccatgaaaggctgacagagttctttgaaa

SEQ ID NO: 117146 - DNA, 80 bp, Homo sapiens
taatcttgctacctccatcgaaagctggttgttgccatgaaaggctgacagagttctttgaaatatcagtgatacgaaca

SEQ ID NO: 117147 - DNA, 78 bp, Homo sapiens
tacctccatcgaaagctggttgttgccatgaaaggctgacagagttctttgaaatatcagtgatacgaacatttcttg

SEQ ID NO: 117148 - DNA, 74 bp, Homo sapiens
aaagctggttgttgccatgaaaggctgacagagttctttgaaatatcagtgatacgaacatttcttgggggttc

SEQ ID NO: 117149 - DNA, 74 bp, Homo sapiens
atgaaaggctgacagagttctttgaaatatcagtgatacgaacatttcttgggggttctgtggtaataagagaa

SEQ ID NO: 117150 - DNA, 78 bp, Homo sapiens
ttgcatttttgttatcagaactgcccttcccatgacaaatacgtaccacaagcatcaattgccaagactggttcagaa

SEQ ID NO: 117151 - DNA, 76 bp, Homo sapiens
tttttgttatcagaactgcccttcccatgacaaatacgtaccacaagcatcaattgccaagactggttcagaagga

SEQ ID NO: 117152 - DNA, 74 bp, Homo sapiens
aactgcccttcccatgacaaatacgtaccacaagcatcaattgccaagactggttcagaaggatggctaggttt

SEQ ID NO: 117153 - DNA, 76 bp, Homo sapiens
ttcccatgacaaatacgtaccacaagcatcaattgccaagactggttcagaaggatggctaggttttccaactcca

SEQ ID NO: 117154 - DNA, 75 bp, Homo sapiens
aaatacgtaccacaagcatcaattgccaagactggttcagaaggatggctaggttttccaactccagcagcattt

SEQ ID NO: 117155 - DNA, 79 bp, Homo sapiens
agcatcaattgccaagactggttcagaaggatggctaggttttccaactccagcagcattttctgcatacaccctgaat

SEQ ID NO: 117156 - DNA, 79 bp, Homo sapiens
tgccaagactggttcagaaggatggctaggttttccaactccagcagcattttctgcatacaccctgaattcataaata

SEQ ID NO: 117157 - DNA, 76 bp, Homo sapiens
actggttcagaaggatggctaggttttccaactccagcagcattttctgcatacaccctgaattcataaataagtc

SEQ ID NO: 117158 - DNA, 80 bp, Homo sapiens
atggctaggttttccaactccagcagcattttctgcatacaccctgaattcataaataagtccagcactgattgttgtga

SEQ ID NO: 117159 - DNA, 80 bp, Homo sapiens
aactccagcagcattttctgcatacaccctgaattcataaataagtccagcactgattgttgtgactttgaagtgagttg

SEQ ID NO: 117160 - DNA, 80 bp, Homo sapiens
attttctgcatacaccctgaattcataaataagtccagcactgattgttgtgactttgaagtgagttgtgcggatgacca

SEQ ID NO: 117161 - DNA, 77 bp, Homo sapiens
atacaccctgaattcataaataagtccagcactgattgttgtgactttgaagtgagttgtgcggatgaccagtttgt

SEQ ID NO: 117162 - DNA, 75 bp, Homo sapiens
aattcataaataagtccagcactgattgttgtgactttgaagtgagttgtgcggatgaccagtttgttggctttt

SEQ ID NO: 117163 - DNA, 76 bp, Homo sapiens
ataagtccagcactgattgttgtgactttgaagtgagttgtgcggatgaccagtttgttggctttttgccataaaa

SEQ ID NO: 117164 - DNA, 74 bp, Homo sapiens
actgattgttgtgactttgaagtgagttgtgcggatgaccagtttgttggctttttgccataaaatactgtttc

SEQ ID NO: 117165 - DNA, 72 bp, Homo sapiens
actttgaagtgagttgtgcggatgaccagtttgttggctttttgccataaaatactgtttctgtctttcatt

SEQ ID NO: 117166 - DNA, 72 bp, Homo sapiens
aagtgagttgtgcggatgaccagtttgttggctttttgccataaaatactgtttctgtctttcatttccagg

SEQ ID NO: 117167 - DNA, 75 bp, Homo sapiens
atgaccagtttgttggctttttgccataaaatactgtttctgtctttcatttccaggtgatagcctacgactgca

SEQ ID NO: 117168 - DNA, 74 bp, Homo sapiens
agtttgttggctttttgccataaaatactgtttctgtctttcatttccaggtgatagcctacgactgcactgcc

SEQ ID NO: 117169 - DNA, 77 bp, Homo sapiens
tttttgccataaaatactgtttctgtctttcatttccaggtgatagcctacgactgcactgcctccatttgacactg

SEQ ID NO: 117170 - DNA, 79 bp, Homo sapiens
ataaaatactgtttctgtctttcatttccaggtgatagcctacgactgcactgcctccatttgacactggttcatgcca

SEQ ID NO: 117171 - DNA, 84 bp, Homo sapiens
tgtctttcatttccaggtgatagcctacgactgcactgcctccatttgacactggttcatgccagcccacagtgatgctttctc

SEQ ID NO: 117172 - DNA, 82 bp, Homo sapiens
atttccaggtgatagcctacgactgcactgcctccatttgacactggttcatgccagcccacagtgatgctttctcgagtaa

SEQ ID NO: 117173 - DNA, 82 bp, Homo sapiens
atagcctacgactgcactgcctccatttgacactggttcatgccagcccacagtgatgctttctcgagtaacattagtgacc

SEQ ID NO: 117174 - DNA, 83 bp, Homo sapiens
actgcactgcctccatttgacactggttcatgccagcccacagtgatgctttctcgagtaacattagtgacccatggtgtaga

SEQ ID NO: 117175 - DNA, 82 bp, Homo sapiens
tccatttgacactggttcatgccagcccacagtgatgctttctcgagtaacattagtgacccatggtgtagatggtggtcca

SEQ ID NO: 117176 - DNA, 79 bp, Homo sapiens
acactggttcatgccagcccacagtgatgctttctcgagtaacattagtgacccatggtgtagatggtggtccaggtgt

SEQ ID NO: 117177 - DNA, 79 bp, Homo sapiens
atgccagcccacagtgatgctttctcgagtaacattagtgacccatggtgtagatggtggtccaggtgttgctacaaaa

SEQ ID NO: 117178 - DNA, 75 bp, Homo sapiens
agtaacattagtgacccatggtgtagatggtggtccaggtgttgctacaaaagagagaaatcctatagattagta

SEQ ID NO: 117179 - DNA, 71 bp, Homo sapiens
ttatggtaaaagaaaacctggatctttgaaaagttggacaacttactgtatggtagtttgacagtcacaca

SEQ ID NO: 117180 - DNA, 74 bp, Homo sapiens
agaaaacctggatctttgaaaagttggacaacttactgtatggtagtttgacagtcacacaagctgaatctata

SEQ ID NO: 117181 - DNA, 81 bp, Homo sapiens
gatctttgaaaagttggacaacttactgtatggtagtttgacagtcacacaagctgaatctatatgatcactgatgccaaa

SEQ ID NO: 117182 - DNA, 78 bp, Homo sapiens
aagttggacaacttactgtatggtagtttgacagtcacacaagctgaatctatatgatcactgatgccaaagcggttt

SEQ ID NO: 117183 - DNA, 81 bp, Homo sapiens
acaacttactgtatggtagtttgacagtcacacaagctgaatctatatgatcactgatgccaaagcggttttctgccttga

SEQ ID NO: 117184 - DNA, 83 bp, Homo sapiens
tatggtagtttgacagtcacacaagctgaatctatatgatcactgatgccaaagcggttttctgccttgatgcggaattggta

SEQ ID NO: 117185 - DNA, 83 bp, Homo sapiens
tttgacagtcacacaagctgaatctatatgatcactgatgccaaagcggttttctgccttgatgcggaattggtattcttctc

SEQ ID NO: 117186 - DNA, 80 bp, Homo sapiens
aagctgaatctatatgatcactgatgccaaagcggttttctgccttgatgcggaattggtattcttctcctgtggtcagt

SEQ ID NO: 117187 - DNA, 81 bp, Homo sapiens
aatctatatgatcactgatgccaaagcggttttctgccttgatgcggaattggtattcttctcctgtggtcagtttcatga

SEQ ID NO: 117188 - DNA, 80 bp, Homo sapiens
atcactgatgccaaagcggttttctgccttgatgcggaattggtattcttctcctgtggtcagtttcatgactttcatca

SEQ ID NO: 117189 - DNA, 75 bp, Homo sapiens
aaagcggttttctgccttgatgcggaattggtattcttctcctgtggtcagtttcatgactttcatcatggttct

SEQ ID NO: 117190 - DNA, 82 bp, Homo sapiens
tttctgccttgatgcggaattggtattcttctcctgtggtcagtttcatgactttcatcatggttcttgcaactgttgcaga

SEQ ID NO: 117191 - DNA, 81 bp, Homo sapiens
atgcggaattggtattcttctcctgtggtcagtttcatgactttcatcatggttcttgcaactgttgcagacacttcagtc

SEQ ID NO: 117192 - DNA, 83 bp, Homo sapiens
tattcttctcctgtggtcagtttcatgactttcatcatggttcttgcaactgttgcagacacttcagtccacactgcagtact

SEQ ID NO: 117193 - DNA, 82 bp, Homo sapiens
tgtggtcagtttcatgactttcatcatggttcttgcaactgttgcagacacttcagtccacactgcagtacttgtttctctt

SEQ ID NO: 117194 - DNA, 82 bp, Homo sapiens
ttcatgactttcatcatggttcttgcaactgttgcagacacttcagtccacactgcagtacttgtttctcttttgagtagaa

SEQ ID NO: 117195 - DNA, 80 bp, Homo sapiens
actttcatcatggttcttgcaactgttgcagacacttcagtccacactgcagtacttgtttctcttttgagtagaatgta

SEQ ID NO: 117196 - DNA, 77 bp, Homo sapiens
ttcttgcaactgttgcagacacttcagtccacactgcagtacttgtttctcttttgagtagaatgtagttggtaact

SEQ ID NO: 117197 - DNA, 75 bp, Homo sapiens
aactgttgcagacacttcagtccacactgcagtacttgtttctcttttgagtagaatgtagttggtaacttgact

SEQ ID NO: 117198 - DNA, 74 bp, Homo sapiens
acttcagtccacactgcagtacttgtttctcttttgagtagaatgtagttggtaacttgacttccaccgtcata

SEQ ID NO: 117199 - DNA, 72 bp, Homo sapiens
acactgcagtacttgtttctcttttgagtagaatgtagttggtaacttgacttccaccgtcatacttaggtg

SEQ ID NO: 117200 - DNA, 70 bp, Homo sapiens
cttgtttctcttttgagtagaatgtagttggtaacttgacttccaccgtcatacttaggtggctcccatt

SEQ ID NO: 117201 - DNA, 73 bp, Homo sapiens
ttttgagtagaatgtagttggtaacttgacttccaccgtcatacttaggtggctcccatttgagagtcacact

SEQ ID NO: 117202 - DNA, 72 bp, Homo sapiens
agtagaatgtagttggtaacttgacttccaccgtcatacttaggtggctcccatttgagagtcacactttct

SEQ ID NO: 117203 - DNA, 75 bp, Homo sapiens
gtaacttgacttccaccgtcatacttaggtggctcccatttgagagtcacactttcttcagttatatcactaata

SEQ ID NO: 117204 - DNA, 76 bp, Homo sapiens
ttgacttccaccgtcatacttaggtggctcccatttgagagtcacactttcttcagttatatcactaataacaaca

SEQ ID NO: 117205 - DNA, 74 bp, Homo sapiens
atacttaggtggctcccatttgagagtcacactttcttcagttatatcactaataacaacagggccagttggag

SEQ ID NO: 117206 - DNA, 75 bp, Homo sapiens
taggtggctcccatttgagagtcacactttcttcagttatatcactaataacaacagggccagttggaggaccag

SEQ ID NO: 117207 - DNA, 77 bp, Homo sapiens
tttgagagtcacactttcttcagttatatcactaataacaacagggccagttggaggaccaggcctgtctagcacaa

SEQ ID NO: 117208 - DNA, 74 bp, Homo sapiens
agttatatcactaataacaacagggccagttggaggaccaggcctgtctagcacaacaatgttaatgaaagctt

SEQ ID NO: 117209 - DNA, 73 bp, Homo sapiens
actaataacaacagggccagttggaggaccaggcctgtctagcacaacaatgttaatgaaagctttggttgta

SEQ ID NO: 117210 - DNA, 74 bp, Homo sapiens
acaacagggccagttggaggaccaggcctgtctagcacaacaatgttaatgaaagctttggttgtaccactgga

SEQ ID NO: 117211 - DNA, 77 bp, Homo sapiens
ttggaggaccaggcctgtctagcacaacaatgttaatgaaagctttggttgtaccactggagttggcagcagtgatt

SEQ ID NO: 117212 - DNA, 79 bp, Homo sapiens
accaggcctgtctagcacaacaatgttaatgaaagctttggttgtaccactggagttggcagcagtgatttcatatctc

SEQ ID NO: 117213 - DNA, 80 bp, Homo sapiens
cacaacaatgttaatgaaagctttggttgtaccactggagttggcagcagtgatttcatatctcccagcgtcagctgtaa

SEQ ID NO: 117214 - DNA, 78 bp, Homo sapiens
atgttaatgaaagctttggttgtaccactggagttggcagcagtgatttcatatctcccagcgtcagctgtaacactt

SEQ ID NO: 117215 - DNA, 78 bp, Homo sapiens
aaagctttggttgtaccactggagttggcagcagtgatttcatatctcccagcgtcagctgtaacactttctttgaga

SEQ ID NO: 117216 - DNA, 81 bp, Homo sapiens
ttgtaccactggagttggcagcagtgatttcatatctcccagcgtcagctgtaacactttctttgagattgatggtcaggt

SEQ ID NO: 117217 - DNA, 83 bp, Homo sapiens
ttggcagcagtgatttcatatctcccagcgtcagctgtaacactttctttgagattgatggtcaggttctcagcagtaatttc

SEQ ID NO: 117218 - DNA, 80 bp, Homo sapiens
tgatttcatatctcccagcgtcagctgtaacactttctttgagattgatggtcaggttctcagcagtaatttcggtatta

SEQ ID NO: 117219 - DNA, 77 bp, Homo sapiens
atatctcccagcgtcagctgtaacactttctttgagattgatggtcaggttctcagcagtaatttcggtattaaatc

SEQ ID NO: 117220 - DNA, 75 bp, Homo sapiens
tttgagattgatggtcaggttctcagcagtaatttcggtattaaatctcatggttgccttaagggggacaccatc

SEQ ID NO: 117221 - DNA, 74 bp, Homo sapiens
atggtcaggttctcagcagtaatttcggtattaaatctcatggttgccttaagggggacaccatctcttgataa

SEQ ID NO: 117222 - DNA, 73 bp, Homo sapiens
ttctcagcagtaatttcggtattaaatctcatggttgccttaagggggacaccatctcttgataaggtcactt

SEQ ID NO: 117223 - DNA, 70 bp, Homo sapiens
gtaatttcggtattaaatctcatggttgccttaagggggacaccatctcttgataaggtcactttgggaa

SEQ ID NO: 117224 - DNA, 70 bp, Homo sapiens
ggggacaccatctcttgataaggtcactttgggaagtggttttccagagattggaatgtcaactttaagg

SEQ ID NO: 117225 - DNA, 70 bp, Homo sapiens
atctcttgataaggtcactttgggaagtggttttccagagattggaatgtcaactttaaggtttgaacca

SEQ ID NO: 117226 - DNA, 69 bp, Homo sapiens
ataaggtcactttgggaagtggttttccagagattggaatgtcaactttaaggtttgaaccagctctaa

SEQ ID NO: 117227 - DNA, 75 bp, Homo sapiens
agattggaatgtcaactttaaggtttgaaccagctctaacatatacagtgtgacttgggaaattcttcatatcaa

SEQ ID NO: 117228 - DNA, 74 bp, Homo sapiens
atgtcaactttaaggtttgaaccagctctaacatatacagtgtgacttgggaaattcttcatatcaatttcagg

SEQ ID NO: 117229 - DNA, 75 bp, Homo sapiens
taaggtttgaaccagctctaacatatacagtgtgacttgggaaattcttcatatcaatttcaggtggttctgaaa

SEQ ID NO: 117230 - DNA, 76 bp, Homo sapiens
gctctaacatatacagtgtgacttgggaaattcttcatatcaatttcaggtggttctgaaaaatgagtatagaaag

SEQ ID NO: 117231 - DNA, 72 bp, Homo sapiens
gtgacttgggaaattcttcatatcaatttcaggtggttctgaaaaatgagtatagaaagtgaaagtgaaaaa

SEQ ID NO: 117232 - DNA, 74 bp, Homo sapiens
tcaatgcaaataatttcaaattttgcttctacacaaaattagacatacctagttgctccttaataagaacagga

SEQ ID NO: 117233 - DNA, 73 bp, Homo sapiens
atttcaaattttgcttctacacaaaattagacatacctagttgctccttaataagaacaggaagcagaagctc

SEQ ID NO: 117234 - DNA, 73 bp, Homo sapiens
aaattttgcttctacacaaaattagacatacctagttgctccttaataagaacaggaagcagaagctctctcg

SEQ ID NO: 117235 - DNA, 75 bp, Homo sapiens
acaaaattagacatacctagttgctccttaataagaacaggaagcagaagctctctcgggtcactcaggccagct

SEQ ID NO: 117236 - DNA, 76 bp, Homo sapiens
attagacatacctagttgctccttaataagaacaggaagcagaagctctctcgggtcactcaggccagcttgattt

SEQ ID NO: 117237 - DNA, 78 bp, Homo sapiens
ctagttgctccttaataagaacaggaagcagaagctctctcgggtcactcaggccagcttgattttcagcaaacactc

SEQ ID NO: 117238 - DNA, 76 bp, Homo sapiens
taataagaacaggaagcagaagctctctcgggtcactcaggccagcttgattttcagcaaacactcggaaaaagta

SEQ ID NO: 117239 - DNA, 76 bp, Homo sapiens
aggaagcagaagctctctcgggtcactcaggccagcttgattttcagcaaacactcggaaaaagtattcagaattc

SEQ ID NO: 117240 - DNA, 78 bp, Homo sapiens
agaagctctctcgggtcactcaggccagcttgattttcagcaaacactcggaaaaagtattcagaattctctctcaga

SEQ ID NO: 117241 - DNA, 75 bp, Homo sapiens
tcactcaggccagcttgattttcagcaaacactcggaaaaagtattcagaattctctctcagaccggaaacaacg

SEQ ID NO: 117242 - DNA, 73 bp, Homo sapiens
cagcttgattttcagcaaacactcggaaaaagtattcagaattctctctcagaccggaaacaacgtgatgggt

SEQ ID NO: 117243 - DNA, 71 bp, Homo sapiens
ttttcagcaaacactcggaaaaagtattcagaattctctctcagaccggaaacaacgtgatgggttgactt

SEQ ID NO: 117244 - DNA, 73 bp, Homo sapiens
aaacactcggaaaaagtattcagaattctctctcagaccggaaacaacgtgatgggttgactttgccactgca

SEQ ID NO: 117245 - DNA, 72 bp, Homo sapiens
aaaaagtattcagaattctctctcagaccggaaacaacgtgatgggttgactttgccactgcacatttaacc

SEQ ID NO: 117246 - DNA, 72 bp, Homo sapiens
agaattctctctcagaccggaaacaacgtgatgggttgactttgccactgcacatttaacccagtttttctg

SEQ ID NO: 117247 - DNA, 70 bp, Homo sapiens
ctctcagaccggaaacaacgtgatgggttgactttgccactgcacatttaacccagtttttctgtccttt

SEQ ID NO: 117248 - DNA, 71 bp, Homo sapiens
aaacaacgtgatgggttgactttgccactgcacatttaacccagtttttctgtcctttttctagtgcttca

SEQ ID NO: 117249 - DNA, 73 bp, Homo sapiens
ggttgactttgccactgcacatttaacccagtttttctgtcctttttctagtgcttcaacgacatagtgtaca

SEQ ID NO: 117250 - DNA, 72 bp, Homo sapiens
actttgccactgcacatttaacccagtttttctgtcctttttctagtgcttcaacgacatagtgtacaattc

SEQ ID NO: 117251 - DNA, 73 bp, Homo sapiens
atttaacccagtttttctgtcctttttctagtgcttcaacgacatagtgtacaattctgcttccgccatcatg

SEQ ID NO: 117252 - DNA, 77 bp, Homo sapiens
agtttttctgtcctttttctagtgcttcaacgacatagtgtacaattctgcttccgccatcatgttcaggcttcagc

SEQ ID NO: 117253 - DNA, 79 bp, Homo sapiens
tcctttttctagtgcttcaacgacatagtgtacaattctgcttccgccatcatgttcaggcttcagccaggtcagggaa

SEQ ID NO: 117254 - DNA, 81 bp, Homo sapiens
ttctagtgcttcaacgacatagtgtacaattctgcttccgccatcatgttcaggcttcagccaggtcagggaaacactgtc

SEQ ID NO: 117255 - DNA, 79 bp, Homo sapiens
aacgacatagtgtacaattctgcttccgccatcatgttcaggcttcagccaggtcagggaaacactgtctttggatata

SEQ ID NO: 117256 - DNA, 74 bp, Homo sapiens
atcatgttcaggcttcagccaggtcagggaaacactgtctttggatatacttgttactccaagtttttcaggtg

SEQ ID NO: 117257 - DNA, 70 bp, Homo sapiens
ttcagccaggtcagggaaacactgtctttggatatacttgttactccaagtttttcaggtgggcttggtt

SEQ ID NO: 117258 - DNA, 69 bp, Homo sapiens
tcagggaaacactgtctttggatatacttgttactccaagtttttcaggtgggcttggtttttctaaga

SEQ ID NO: 117259 - DNA, 67 bp, Homo sapiens
gaaacactgtctttggatatacttgttactccaagtttttcaggtgggcttggtttttctaagaaaa

SEQ ID NO: 117260 - DNA, 67 bp, Homo sapiens
cttgttactccaagtttttcaggtgggcttggtttttctaagaaaacaaagcatcaaaagaaagtga

SEQ ID NO: 117261 - DNA, 67 bp, Homo sapiens
gcaaaattaacgtggatatgtagaatttccttattcttaaaacatacctgttatttttactccttcc

SEQ ID NO: 117262 - DNA, 68 bp, Homo sapiens
cgtggatatgtagaatttccttattcttaaaacatacctgttatttttactccttcctttgtttcagc

SEQ ID NO: 117263 - DNA, 67 bp, Homo sapiens
agaatttccttattcttaaaacatacctgttatttttactccttcctttgtttcagctggtatacca

SEQ ID NO: 117264 - DNA, 69 bp, Homo sapiens
tattcttaaaacatacctgttatttttactccttcctttgtttcagctggtataccaacaccaaactca

SEQ ID NO: 117265 - DNA, 69 bp, Homo sapiens
aacatacctgttatttttactccttcctttgtttcagctggtataccaacaccaaactcattttctcca

SEQ ID NO: 117266 - DNA, 74 bp, Homo sapiens
ttactccttcctttgtttcagctggtataccaacaccaaactcattttctccagagactctgaagtaatagata

SEQ ID NO: 117267 - DNA, 75 bp, Homo sapiens
tttcagctggtataccaacaccaaactcattttctccagagactctgaagtaatagatagctccttcttgtaaat

SEQ ID NO: 117268 - DNA, 73 bp, Homo sapiens
tataccaacaccaaactcattttctccagagactctgaagtaatagatagctccttcttgtaaattggtaact

SEQ ID NO: 117269 - DNA, 72 bp, Homo sapiens
aacaccaaactcattttctccagagactctgaagtaatagatagctccttcttgtaaattggtaactttgta

SEQ ID NO: 117270 - DNA, 72 bp, Homo sapiens
ttttctccagagactctgaagtaatagatagctccttcttgtaaattggtaactttgtaggagaggcggtta

SEQ ID NO: 117271 - DNA, 71 bp, Homo sapiens
agactctgaagtaatagatagctccttcttgtaaattggtaactttgtaggagaggcggttacagttgttg

SEQ ID NO: 117272 - DNA, 71 bp, Homo sapiens
aagtaatagatagctccttcttgtaaattggtaactttgtaggagaggcggttacagttgttggtcacaga

SEQ ID NO: 117273 - DNA, 72 bp, Homo sapiens
tagctccttcttgtaaattggtaactttgtaggagaggcggttacagttgttggtcacagagacccatgctt

SEQ ID NO: 117274 - DNA, 74 bp, Homo sapiens
tcttgtaaattggtaactttgtaggagaggcggttacagttgttggtcacagagacccatgctttcttgctggc

SEQ ID NO: 117275 - DNA, 73 bp, Homo sapiens
taactttgtaggagaggcggttacagttgttggtcacagagacccatgctttcttgctggcctcacgtttttc

SEQ ID NO: 117276 - DNA, 74 bp, Homo sapiens
agaggcggttacagttgttggtcacagagacccatgctttcttgctggcctcacgtttttctatgtggtaattc

SEQ ID NO: 117277 - DNA, 74 bp, Homo sapiens
cggttacagttgttggtcacagagacccatgctttcttgctggcctcacgtttttctatgtggtaattcttcac

SEQ ID NO: 117278 - DNA, 77 bp, Homo sapiens
gtcacagagacccatgctttcttgctggcctcacgtttttctatgtggtaattcttcactggtgctccaccatcgtt

SEQ ID NO: 117279 - DNA, 75 bp, Homo sapiens
cccatgctttcttgctggcctcacgtttttctatgtggtaattcttcactggtgctccaccatcgttttcaggaa

SEQ ID NO: 117280 - DNA, 75 bp, Homo sapiens
tttcttgctggcctcacgtttttctatgtggtaattcttcactggtgctccaccatcgttttcaggaacatccca

SEQ ID NO: 117281 - DNA, 77 bp, Homo sapiens
tcacgtttttctatgtggtaattcttcactggtgctccaccatcgttttcaggaacatcccaggataacactgcaga

SEQ ID NO: 117282 - DNA, 76 bp, Homo sapiens
ttttctatgtggtaattcttcactggtgctccaccatcgttttcaggaacatcccaggataacactgcagactctt

SEQ ID NO: 117283 - DNA, 76 bp, Homo sapiens
gtaattcttcactggtgctccaccatcgttttcaggaacatcccaggataacactgcagactctttggttacatct

SEQ ID NO: 117284 - DNA, 79 bp, Homo sapiens
tggtgctccaccatcgttttcaggaacatcccaggataacactgcagactctttggttacatcttgcacagtaatgttg

SEQ ID NO: 117285 - DNA, 76 bp, Homo sapiens
accatcgttttcaggaacatcccaggataacactgcagactctttggttacatcttgcacagtaatgttggttgga

SEQ ID NO: 117286 - DNA, 76 bp, Homo sapiens
ttttcaggaacatcccaggataacactgcagactctttggttacatcttgcacagtaatgttggttggaggacctg

SEQ ID NO: 117287 - DNA, 74 bp, Homo sapiens
ccaggataacactgcagactctttggttacatcttgcacagtaatgttggttggaggacctggggtatctaaaa

SEQ ID NO: 117288 - DNA, 73 bp, Homo sapiens
actgcagactctttggttacatcttgcacagtaatgttggttggaggacctggggtatctaaaactttgacaa

SEQ ID NO: 117289 - DNA, 70 bp, Homo sapiens
actctttggttacatcttgcacagtaatgttggttggaggacctggggtatctaaaactttgacaactaa

SEQ ID NO: 117290 - DNA, 72 bp, Homo sapiens
taatgttggttggaggacctggggtatctaaaactttgacaactaaggtcagtgaagcagcactcaaaacat

SEQ ID NO: 117291 - DNA, 74 bp, Homo sapiens
tggaggacctggggtatctaaaactttgacaactaaggtcagtgaagcagcactcaaaacattctgaattgtta

SEQ ID NO: 117292 - DNA, 75 bp, Homo sapiens
atctaaaactttgacaactaaggtcagtgaagcagcactcaaaacattctgaattgttaatgtgtactttccaga

SEQ ID NO: 117293 - DNA, 78 bp, Homo sapiens
ttgacaactaaggtcagtgaagcagcactcaaaacattctgaattgttaatgtgtactttccagagtcatttctgttg

SEQ ID NO: 117294 - DNA, 78 bp, Homo sapiens
aggtcagtgaagcagcactcaaaacattctgaattgttaatgtgtactttccagagtcatttctgttggcattttcaa

SEQ ID NO: 117295 - DNA, 79 bp, Homo sapiens
agcactcaaaacattctgaattgttaatgtgtactttccagagtcatttctgttggcattttcaatggtcagtgatgta

SEQ ID NO: 117296 - DNA, 77 bp, Homo sapiens
aaaacattctgaattgttaatgtgtactttccagagtcatttctgttggcattttcaatggtcagtgatgtacgaga

SEQ ID NO: 117297 - DNA, 79 bp, Homo sapiens
attgttaatgtgtactttccagagtcatttctgttggcattttcaatggtcagtgatgtacgagagtctgtggtatcaa

SEQ ID NO: 117298 - DNA, 81 bp, Homo sapiens
tactttccagagtcatttctgttggcattttcaatggtcagtgatgtacgagagtctgtggtatcaacataagctctagta

SEQ ID NO: 117299 - DNA, 80 bp, Homo sapiens
agtcatttctgttggcattttcaatggtcagtgatgtacgagagtctgtggtatcaacataagctctagtacggaggtca

SEQ ID NO: 117300 - DNA, 81 bp, Homo sapiens
ttggcattttcaatggtcagtgatgtacgagagtctgtggtatcaacataagctctagtacggaggtcagtgtctggctta

SEQ ID NO: 117301 - DNA, 79 bp, Homo sapiens
attttcaatggtcagtgatgtacgagagtctgtggtatcaacataagctctagtacggaggtcagtgtctggcttactc

SEQ ID NO: 117302 - DNA, 80 bp, Homo sapiens
tgatgtacgagagtctgtggtatcaacataagctctagtacggaggtcagtgtctggcttactccacaagacattgggta

SEQ ID NO: 117303 - DNA, 76 bp, Homo sapiens
tatcaacataagctctagtacggaggtcagtgtctggcttactccacaagacattgggtactggtcttcctcggaa

SEQ ID NO: 117304 - DNA, 75 bp, Homo sapiens
tacggaggtcagtgtctggcttactccacaagacattgggtactggtcttcctcggaaaggcacagtcatggtaa

SEQ ID NO: 117305 - DNA, 76 bp, Homo sapiens
ttactccacaagacattgggtactggtcttcctcggaaaggcacagtcatggtaaatgaggcaccagccttgacaa

SEQ ID NO: 117306 - DNA, 75 bp, Homo sapiens
acaagacattgggtactggtcttcctcggaaaggcacagtcatggtaaatgaggcaccagccttgacaatcaagg

SEQ ID NO: 117307 - DNA, 77 bp, Homo sapiens
gtactggtcttcctcggaaaggcacagtcatggtaaatgaggcaccagccttgacaatcaaggtcttcctcatttca

SEQ ID NO: 117308 - DNA, 77 bp, Homo sapiens
acagtcatggtaaatgaggcaccagccttgacaatcaaggtcttcctcatttcactgtcaatatcaaataaaggttc

SEQ ID NO: 117309 - DNA, 76 bp, Homo sapiens
taaatgaggcaccagccttgacaatcaaggtcttcctcatttcactgtcaatatcaaataaaggttcttcttctct

SEQ ID NO: 117310 - DNA, 72 bp, Homo sapiens
accagccttgacaatcaaggtcttcctcatttcactgtcaatatcaaataaaggttcttcttctctttcctt

SEQ ID NO: 117311 - DNA, 76 bp, Homo sapiens
cttgacaatcaaggtcttcctcatttcactgtcaatatcaaataaaggttcttcttctctttcctttgctatctga

SEQ ID NO: 117312 - DNA, 74 bp, Homo sapiens
aaggtcttcctcatttcactgtcaatatcaaataaaggttcttcttctctttcctttgctatctgagggtcaga

SEQ ID NO: 117313 - DNA, 77 bp, Homo sapiens
ctcatttcactgtcaatatcaaataaaggttcttcttctctttcctttgctatctgagggtcagagctatcactggg

SEQ ID NO: 117314 - DNA, 76 bp, Homo sapiens
atatcaaataaaggttcttcttctctttcctttgctatctgagggtcagagctatcactggggtcactagcaccaa

SEQ ID NO: 117315 - DNA, 74 bp, Homo sapiens
taaaggttcttcttctctttcctttgctatctgagggtcagagctatcactggggtcactagcaccaaccttat

SEQ ID NO: 117316 - DNA, 77 bp, Homo sapiens
ttctctttcctttgctatctgagggtcagagctatcactggggtcactagcaccaaccttattgacagattttactc

SEQ ID NO: 117317 - DNA, 78 bp, Homo sapiens
tttgctatctgagggtcagagctatcactggggtcactagcaccaaccttattgacagattttactctgaaaacatat

SEQ ID NO: 117318 - DNA, 80 bp, Homo sapiens
tatctgagggtcagagctatcactggggtcactagcaccaaccttattgacagattttactctgaaaacatattcagctc

SEQ ID NO: 117319 - DNA, 77 bp, Homo sapiens
agagctatcactggggtcactagcaccaaccttattgacagattttactctgaaaacatattcagctcctgttgtta

SEQ ID NO: 117320 - DNA, 76 bp, Homo sapiens
tagcaccaaccttattgacagattttactctgaaaacatattcagctcctgttgttagtccgcttattgtatattc

SEQ ID NO: 117321 - DNA, 76 bp, Homo sapiens
tattgacagattttactctgaaaacatattcagctcctgttgttagtccgcttattgtatattctgtccctcgtaa

SEQ ID NO: 117322 - DNA, 75 bp, Homo sapiens
attttactctgaaaacatattcagctcctgttgttagtccgcttattgtatattctgtccctcgtaagctctgaa

SEQ ID NO: 117323 - DNA, 73 bp, Homo sapiens
aaaacatattcagctcctgttgttagtccgcttattgtatattctgtccctcgtaagctctgaatggaagttt

SEQ ID NO: 117324 - DNA, 76 bp, Homo sapiens
tattcagctcctgttgttagtccgcttattgtatattctgtccctcgtaagctctgaatggaagttttccagtcag

SEQ ID NO: 117325 - DNA, 76 bp, Homo sapiens
ttgttagtccgcttattgtatattctgtccctcgtaagctctgaatggaagttttccagtcagtgtcatcagattt

SEQ ID NO: 117326 - DNA, 77 bp, Homo sapiens
ttattgtatattctgtccctcgtaagctctgaatggaagttttccagtcagtgtcatcagattttttgtattctaca

SEQ ID NO: 117327 - DNA, 75 bp, Homo sapiens
tgaatggaagttttccagtcagtgtcatcagattttttgtattctacagtatatccagttatcggggccccacca

SEQ ID NO: 117328 - DNA, 73 bp, Homo sapiens
aagttttccagtcagtgtcatcagattttttgtattctacagtatatccagttatcggggccccaccatcaaa

SEQ ID NO: 117329 - DNA, 71 bp, Homo sapiens
attttttgtattctacagtatatccagttatcggggccccaccatcaaacagcggcttaacccaggcaata

SEQ ID NO: 117330 - DNA, 72 bp, Homo sapiens
attctacagtatatccagttatcggggccccaccatcaaacagcggcttaacccaggcaatagttatagttg

SEQ ID NO: 117331 - DNA, 72 bp, Homo sapiens
agtatatccagttatcggggccccaccatcaaacagcggcttaacccaggcaatagttatagttgtcttgcc

SEQ ID NO: 117332 - DNA, 72 bp, Homo sapiens
accatcaaacagcggcttaacccaggcaatagttatagttgtcttgcctgagtccacaattttgggtttgga

SEQ ID NO: 117333 - DNA, 71 bp, Homo sapiens
aaacagcggcttaacccaggcaatagttatagttgtcttgcctgagtccacaattttgggtttggatggag

SEQ ID NO: 117334 - DNA, 73 bp, Homo sapiens
ttaacccaggcaatagttatagttgtcttgcctgagtccacaattttgggtttggatggaggagatggtagga

SEQ ID NO: 117335 - DNA, 73 bp, Homo sapiens
aatagttatagttgtcttgcctgagtccacaattttgggtttggatggaggagatggtaggaacactggatct

SEQ ID NO: 117336 - DNA, 75 bp, Homo sapiens
tgtcttgcctgagtccacaattttgggtttggatggaggagatggtaggaacactggatcttctgccctaattaa

SEQ ID NO: 117337 - DNA, 71 bp, Homo sapiens
agtccacaattttgggtttggatggaggagatggtaggaacactggatcttctgccctaattaagggagag

SEQ ID NO: 117338 - DNA, 73 bp, Homo sapiens
atggtaggaacactggatcttctgccctaattaagggagaggtttcacttggaagacttaggccagcagcatt

SEQ ID NO: 117339 - DNA, 75 bp, Homo sapiens
aacactggatcttctgccctaattaagggagaggtttcacttggaagacttaggccagcagcattttctgcataa

SEQ ID NO: 117340 - DNA, 77 bp, Homo sapiens
tctgccctaattaagggagaggtttcacttggaagacttaggccagcagcattttctgcataaacacgatattcata

SEQ ID NO: 117341 - DNA, 76 bp, Homo sapiens
cctaattaagggagaggtttcacttggaagacttaggccagcagcattttctgcataaacacgatattcatattca

SEQ ID NO: 117342 - DNA, 77 bp, Homo sapiens
agaggtttcacttggaagacttaggccagcagcattttctgcataaacacgatattcatattcacatccttcccgaa

SEQ ID NO: 117343 - DNA, 78 bp, Homo sapiens
ttggaagacttaggccagcagcattttctgcataaacacgatattcatattcacatccttcccgaagtcctgttgatt

SEQ ID NO: 117344 - DNA, 80 bp, Homo sapiens
ttaggccagcagcattttctgcataaacacgatattcatattcacatccttcccgaagtcctgttgatttcactcttaga

SEQ ID NO: 117345 - DNA, 77 bp, Homo sapiens
attttctgcataaacacgatattcatattcacatccttcccgaagtcctgttgatttcactcttagatcataaactg

SEQ ID NO: 117346 - DNA, 74 bp, Homo sapiens
cataaacacgatattcatattcacatccttcccgaagtcctgttgatttcactcttagatcataaactggtttt

SEQ ID NO: 117347 - DNA, 72 bp, Homo sapiens
acgatattcatattcacatccttcccgaagtcctgttgatttcactcttagatcataaactggttttttgtt

SEQ ID NO: 117348 - DNA, 72 bp, Homo sapiens
tattcacatccttcccgaagtcctgttgatttcactcttagatcataaactggttttttgtttacacgcacc

SEQ ID NO: 117349 - DNA, 71 bp, Homo sapiens
cgaagtcctgttgatttcactcttagatcataaactggttttttgtttacacgcacccatcttaggctatt

SEQ ID NO: 117350 - DNA, 72 bp, Homo sapiens
tcctgttgatttcactcttagatcataaactggttttttgtttacacgcacccatcttaggctatttttctc

SEQ ID NO: 117351 - DNA, 71 bp, Homo sapiens
tcttagatcataaactggttttttgtttacacgcacccatcttaggctatttttctctcgcctttcaatta

SEQ ID NO: 117352 - DNA, 71 bp, Homo sapiens
cataaactggttttttgtttacacgcacccatcttaggctatttttctctcgcctttcaattatatatcca

SEQ ID NO: 117353 - DNA, 73 bp, Homo sapiens
tttttgtttacacgcacccatcttaggctatttttctctcgcctttcaattatatatccagatatttcactac

SEQ ID NO: 117354 - DNA, 76 bp, Homo sapiens
tttacacgcacccatcttaggctatttttctctcgcctttcaattatatatccagatatttcactacctccatcac

SEQ ID NO: 117355 - DNA, 76 bp, Homo sapiens
ctatttttctctcgcctttcaattatatatccagatatttcactacctccatcactctcgggtcttgaccagcaaa

SEQ ID NO: 117356 - DNA, 77 bp, Homo sapiens
cctttcaattatatatccagatatttcactacctccatcactctcgggtcttgaccagcaaagtgtcatagattctt

SEQ ID NO: 117357 - DNA, 79 bp, Homo sapiens
aattatatatccagatatttcactacctccatcactctcgggtcttgaccagcaaagtgtcatagattctttggtcaca

SEQ ID NO: 117358 - DNA, 76 bp, Homo sapiens
agatatttcactacctccatcactctcgggtcttgaccagcaaagtgtcatagattctttggtcacagaagtaatt

SEQ ID NO: 117359 - DNA, 75 bp, Homo sapiens
actacctccatcactctcgggtcttgaccagcaaagtgtcatagattctttggtcacagaagtaatttccaaaga

SEQ ID NO: 117360 - DNA, 74 bp, Homo sapiens
atcactctcgggtcttgaccagcaaagtgtcatagattctttggtcacagaagtaatttccaaagacgtgggtg

SEQ ID NO: 117361 - DNA, 74 bp, Homo sapiens
ttgaccagcaaagtgtcatagattctttggtcacagaagtaatttccaaagacgtgggtggacttggaactgta

SEQ ID NO: 117362 - DNA, 72 bp, Homo sapiens
tagattctttggtcacagaagtaatttccaaagacgtgggtggacttggaactgtaaatggatctagtgcct

SEQ ID NO: 117363 - DNA, 73 bp, Homo sapiens
ttggtcacagaagtaatttccaaagacgtgggtggacttggaactgtaaatggatctagtgcctttatagcta

SEQ ID NO: 117364 - DNA, 72 bp, Homo sapiens
aagtaatttccaaagacgtgggtggacttggaactgtaaatggatctagtgcctttatagctacactctcta

SEQ ID NO: 117365 - DNA, 73 bp, Homo sapiens
aaagacgtgggtggacttggaactgtaaatggatctagtgcctttatagctacactctctaggggctcaccaa

SEQ ID NO: 117366 - DNA, 75 bp, Homo sapiens
gacttggaactgtaaatggatctagtgcctttatagctacactctctaggggctcaccaacaccatatttattaa

SEQ ID NO: 117367 - DNA, 75 bp, Homo sapiens
tgtaaatggatctagtgcctttatagctacactctctaggggctcaccaacaccatatttattaacaccagttac

SEQ ID NO: 117368 - DNA, 75 bp, Homo sapiens
tctagtgcctttatagctacactctctaggggctcaccaacaccatatttattaacaccagttactctaaatata

SEQ ID NO: 117369 - DNA, 74 bp, Homo sapiens
cctttatagctacactctctaggggctcaccaacaccatatttattaacaccagttactctaaatatatattca

SEQ ID NO: 117370 - DNA, 74 bp, Homo sapiens
actctctaggggctcaccaacaccatatttattaacaccagttactctaaatatatattcattgcctttgagta

SEQ ID NO: 117371 - DNA, 71 bp, Homo sapiens
caccatatttattaacaccagttactctaaatatatattcattgcctttgagtaacttggttactttacag

SEQ ID NO: 117372 - DNA, 75 bp, Homo sapiens
tattaacaccagttactctaaatatatattcattgcctttgagtaacttggttactttacaggatgtcatctgta

SEQ ID NO: 117373 - DNA, 77 bp, Homo sapiens
aatatatattcattgcctttgagtaacttggttactttacaggatgtcatctgtaactctccttcacatattgtcca

SEQ ID NO: 117374 - DNA, 77 bp, Homo sapiens
attcattgcctttgagtaacttggttactttacaggatgtcatctgtaactctccttcacatattgtccatgcaagg

SEQ ID NO: 117375 - DNA, 79 bp, Homo sapiens
tacaggatgtcatctgtaactctccttcacatattgtccatgcaaggtggcttgtttcacgtttttctacgatgtaata

SEQ ID NO: 117376 - DNA, 77 bp, Homo sapiens
atctgtaactctccttcacatattgtccatgcaaggtggcttgtttcacgtttttctacgatgtaatagtcgatatc

SEQ ID NO: 117377 - DNA, 79 bp, Homo sapiens
cttcacatattgtccatgcaaggtggcttgtttcacgtttttctacgatgtaatagtcgatatctgcaccaccatcttc

SEQ ID NO: 117378 - DNA, 77 bp, Homo sapiens
atattgtccatgcaaggtggcttgtttcacgtttttctacgatgtaatagtcgatatctgcaccaccatcttcttgg

SEQ ID NO: 117379 - DNA, 72 bp, Homo sapiens
aaggtggcttgtttcacgtttttctacgatgtaatagtcgatatctgcaccaccatcttcttggggacgtcc

SEQ ID NO: 117380 - DNA, 72 bp, Homo sapiens
ttgtttcacgtttttctacgatgtaatagtcgatatctgcaccaccatcttcttggggacgtccccaggaaa

SEQ ID NO: 117381 - DNA, 79 bp, Homo sapiens
taatagtcgatatctgcaccaccatcttcttggggacgtccccaggaaagagagcatttctcagcagtgaggccattta

SEQ ID NO: 117382 - DNA, 77 bp, Homo sapiens
atatctgcaccaccatcttcttggggacgtccccaggaaagagagcatttctcagcagtgaggccatttatttcaag

SEQ ID NO: 117383 - DNA, 74 bp, Homo sapiens
accaccatcttcttggggacgtccccaggaaagagagcatttctcagcagtgaggccatttatttcaagtggtc

SEQ ID NO: 117384 - DNA, 76 bp, Homo sapiens
ttcttggggacgtccccaggaaagagagcatttctcagcagtgaggccatttatttcaagtggtcctgctggtgga

SEQ ID NO: 117385 - DNA, 78 bp, Homo sapiens
cccaggaaagagagcatttctcagcagtgaggccatttatttcaagtggtcctgctggtggaccaggcttatcaagta

SEQ ID NO: 117386 - DNA, 76 bp, Homo sapiens
atttctcagcagtgaggccatttatttcaagtggtcctgctggtggaccaggcttatcaagtactttgcaattaac

SEQ ID NO: 117387 - DNA, 75 bp, Homo sapiens
agtgaggccatttatttcaagtggtcctgctggtggaccaggcttatcaagtactttgcaattaacggccacaga

SEQ ID NO: 117388 - DNA, 74 bp, Homo sapiens
tttatttcaagtggtcctgctggtggaccaggcttatcaagtactttgcaattaacggccacagaccgagtgcc

SEQ ID NO: 117389 - DNA, 76 bp, Homo sapiens
gaccaggcttatcaagtactttgcaattaacggccacagaccgagtgccggcaacattcttcagtgttagtacata

SEQ ID NO: 117390 - DNA, 76 bp, Homo sapiens
attaacggccacagaccgagtgccggcaacattcttcagtgttagtacatattgcccagtgtctcgtcttatacag

SEQ ID NO: 117391 - DNA, 75 bp, Homo sapiens
accgagtgccggcaacattcttcagtgttagtacatattgcccagtgtctcgtcttatacagtctttaactgtta

SEQ ID NO: 117392 - DNA, 76 bp, Homo sapiens
gcaacattcttcagtgttagtacatattgcccagtgtctcgtcttatacagtctttaactgttaacaaagtatgat

SEQ ID NO: 117393 - DNA, 75 bp, Homo sapiens
attcttcagtgttagtacatattgcccagtgtctcgtcttatacagtctttaactgttaacaaagtatgattgtc

SEQ ID NO: 117394 - DNA, 76 bp, Homo sapiens
attgcccagtgtctcgtcttatacagtctttaactgttaacaaagtatgattgtctgttgagatgatttctgttct

SEQ ID NO: 117395 - DNA, 76 bp, Homo sapiens
gtctcgtcttatacagtctttaactgttaacaaagtatgattgtctgttgagatgatttctgttcttgctctttct

SEQ ID NO: 117396 - DNA, 76 bp, Homo sapiens
cagtctttaactgttaacaaagtatgattgtctgttgagatgatttctgttcttgctctttcttcaatttctatac

SEQ ID NO: 117397 - DNA, 77 bp, Homo sapiens
actgttaacaaagtatgattgtctgttgagatgatttctgttcttgctctttcttcaatttctataccatccttggc

SEQ ID NO: 117398 - DNA, 77 bp, Homo sapiens
agtatgattgtctgttgagatgatttctgttcttgctctttcttcaatttctataccatccttggcccaggaaatta

SEQ ID NO: 117399 - DNA, 78 bp, Homo sapiens
ttgtctgttgagatgatttctgttcttgctctttcttcaatttctataccatccttggcccaggaaattactggcaga

SEQ ID NO: 117400 - DNA, 75 bp, Homo sapiens
atttctgttcttgctctttcttcaatttctataccatccttggcccaggaaattactggcagaggtcgccctgca

SEQ ID NO: 117401 - DNA, 76 bp, Homo sapiens
agaggtcgccctgcaatgtctgcatttatcttaaggacctctccagctttgacaacaataacgtctcggaacttga

SEQ ID NO: 117402 - DNA, 79 bp, Homo sapiens
ctgcaatgtctgcatttatcttaaggacctctccagctttgacaacaataacgtctcggaacttgacatccatcataac

SEQ ID NO: 117403 - DNA, 77 bp, Homo sapiens
tgcatttatcttaaggacctctccagctttgacaacaataacgtctcggaacttgacatccatcataactcttggag

SEQ ID NO: 117404 - DNA, 79 bp, Homo sapiens
tctccagctttgacaacaataacgtctcggaacttgacatccatcataactcttggaggctcaacatcatctttaacta

SEQ ID NO: 117405 - DNA, 77 bp, Homo sapiens
tttgacaacaataacgtctcggaacttgacatccatcataactcttggaggctcaacatcatctttaactataatag

SEQ ID NO: 117406 - DNA, 76 bp, Homo sapiens
aataacgtctcggaacttgacatccatcataactcttggaggctcaacatcatctttaactataataggcccagtg

SEQ ID NO: 117407 - DNA, 81 bp, Homo sapiens
aacttgacatccatcataactcttggaggctcaacatcatctttaactataataggcccagtggattcagatggctcacta

SEQ ID NO: 117408 - DNA, 82 bp, Homo sapiens
atccatcataactcttggaggctcaacatcatctttaactataataggcccagtggattcagatggctcactaactgagtca

SEQ ID NO: 117409 - DNA, 83 bp, Homo sapiens
taactcttggaggctcaacatcatctttaactataataggcccagtggattcagatggctcactaactgagtcagcagcattc

SEQ ID NO: 117410 - DNA, 81 bp, Homo sapiens
tcaacatcatctttaactataataggcccagtggattcagatggctcactaactgagtcagcagcattccttgcaaaaacc

SEQ ID NO: 117411 - DNA, 76 bp, Homo sapiens
tttaactataataggcccagtggattcagatggctcactaactgagtcagcagcattccttgcaaaaacccggaat

SEQ ID NO: 117412 - DNA, 78 bp, Homo sapiens
ctataataggcccagtggattcagatggctcactaactgagtcagcagcattccttgcaaaaacccggaattcataac

SEQ ID NO: 117413 - DNA, 80 bp, Homo sapiens
agtggattcagatggctcactaactgagtcagcagcattccttgcaaaaacccggaattcataacgctgatcttcagtaa

SEQ ID NO: 117414 - DNA, 76 bp, Homo sapiens
taactgagtcagcagcattccttgcaaaaacccggaattcataacgctgatcttcagtaagttcagttacttcaaa

SEQ ID NO: 117415 - DNA, 73 bp, Homo sapiens
agcagcattccttgcaaaaacccggaattcataacgctgatcttcagtaagttcagttacttcaaagtatgtt

SEQ ID NO: 117416 - DNA, 71 bp, Homo sapiens
ttccttgcaaaaacccggaattcataacgctgatcttcagtaagttcagttacttcaaagtatgtttcttg

SEQ ID NO: 117417 - DNA, 75 bp, Homo sapiens
ccggaattcataacgctgatcttcagtaagttcagttacttcaaagtatgtttcttgtatattagtataattgca

SEQ ID NO: 117418 - DNA, 78 bp, Homo sapiens
tcataacgctgatcttcagtaagttcagttacttcaaagtatgtttcttgtatattagtataattgcacttcagccac

SEQ ID NO: 117419 - DNA, 75 bp, Homo sapiens
atcttcagtaagttcagttacttcaaagtatgtttcttgtatattagtataattgcacttcagccaccggccatc

SEQ ID NO: 117420 - DNA, 74 bp, Homo sapiens
taagttcagttacttcaaagtatgtttcttgtatattagtataattgcacttcagccaccggccatctggtagt

SEQ ID NO: 117421 - DNA, 77 bp, Homo sapiens
ttcaaagtatgtttcttgtatattagtataattgcacttcagccaccggccatctggtagttctctgcgttcaacaa

SEQ ID NO: 117422 - DNA, 81 bp, Homo sapiens
atattagtataattgcacttcagccaccggccatctggtagttctctgcgttcaacaatgtatcctgtgatcttagctcca

SEQ ID NO: 117423 - DNA, 82 bp, Homo sapiens
ataattgcacttcagccaccggccatctggtagttctctgcgttcaacaatgtatcctgtgatcttagctccaccatcataa

SEQ ID NO: 117424 - DNA, 81 bp, Homo sapiens
ttcagccaccggccatctggtagttctctgcgttcaacaatgtatcctgtgatcttagctccaccatcataatgtggttta

SEQ ID NO: 117425 - DNA, 78 bp, Homo sapiens
atctggtagttctctgcgttcaacaatgtatcctgtgatcttagctccaccatcataatgtggtttagaccatttaag

SEQ ID NO: 117426 - DNA, 80 bp, Homo sapiens
ttctctgcgttcaacaatgtatcctgtgatcttagctccaccatcataatgtggtttagaccatttaagtgacactgatt

SEQ ID NO: 117427 - DNA, 79 bp, Homo sapiens
aacaatgtatcctgtgatcttagctccaccatcataatgtggtttagaccatttaagtgacactgattttcttgtgata

SEQ ID NO: 117428 - DNA, 81 bp, Homo sapiens
tgtatcctgtgatcttagctccaccatcataatgtggtttagaccatttaagtgacactgattttcttgtgatatttgtga

SEQ ID NO: 117429 - DNA, 77 bp, Homo sapiens
ttagctccaccatcataatgtggtttagaccatttaagtgacactgattttcttgtgatatttgtgacttcaggttg

SEQ ID NO: 117430 - DNA, 76 bp, Homo sapiens
accatcataatgtggtttagaccatttaagtgacactgattttcttgtgatatttgtgacttcaggttgtccagga

SEQ ID NO: 117431 - DNA, 74 bp, Homo sapiens
aatgtggtttagaccatttaagtgacactgattttcttgtgatatttgtgacttcaggttgtccaggagggtca

SEQ ID NO: 117432 - DNA, 75 bp, Homo sapiens
agaccatttaagtgacactgattttcttgtgatatttgtgacttcaggttgtccaggagggtcacaaggatctct

SEQ ID NO: 117433 - DNA, 77 bp, Homo sapiens
tatttgtgacttcaggttgtccaggagggtcacaaggatctcttgcagggactggttcacaagatttactgcattta

SEQ ID NO: 117434 - DNA, 76 bp, Homo sapiens
aggagggtcacaaggatctcttgcagggactggttcacaagatttactgcatttaccaattccagcaatattttca

SEQ ID NO: 117435 - DNA, 79 bp, Homo sapiens
aaggatctcttgcagggactggttcacaagatttactgcatttaccaattccagcaatattttcagcatatacacgata

SEQ ID NO: 117436 - DNA, 83 bp, Homo sapiens
tggttcacaagatttactgcatttaccaattccagcaatattttcagcatatacacgatactcatacatcagtccttcatcaa

SEQ ID NO: 117437 - DNA, 81 bp, Homo sapiens
acaagatttactgcatttaccaattccagcaatattttcagcatatacacgatactcatacatcagtccttcatcaaggcc

SEQ ID NO: 117438 - DNA, 82 bp, Homo sapiens
aattccagcaatattttcagcatatacacgatactcatacatcagtccttcatcaaggccggagactttcatttgagtatca

SEQ ID NO: 117439 - DNA, 83 bp, Homo sapiens
tttcagcatatacacgatactcatacatcagtccttcatcaaggccggagactttcatttgagtatcagcaatgaggatttta

SEQ ID NO: 117440 - DNA, 81 bp, Homo sapiens
atatacacgatactcatacatcagtccttcatcaaggccggagactttcatttgagtatcagcaatgaggattttatttgc

SEQ ID NO: 117441 - DNA, 79 bp, Homo sapiens
atactcatacatcagtccttcatcaaggccggagactttcatttgagtatcagcaatgaggattttatttgcttttgac

SEQ ID NO: 117442 - DNA, 76 bp, Homo sapiens
atcagtccttcatcaaggccggagactttcatttgagtatcagcaatgaggattttatttgcttttgaccaaagaa

SEQ ID NO: 117443 - DNA, 76 bp, Homo sapiens
atcaaggccggagactttcatttgagtatcagcaatgaggattttatttgcttttgaccaaagaatgctgcttctt

SEQ ID NO: 117444 - DNA, 76 bp, Homo sapiens
cggagactttcatttgagtatcagcaatgaggattttatttgcttttgaccaaagaatgctgcttctttctttata

SEQ ID NO: 117445 - DNA, 80 bp, Homo sapiens
tgagtatcagcaatgaggattttatttgcttttgaccaaagaatgctgcttctttctttatactcaagatgatagccaat

SEQ ID NO: 117446 - DNA, 77 bp, Homo sapiens
caatgaggattttatttgcttttgaccaaagaatgctgcttctttctttatactcaagatgatagccaattactcga

SEQ ID NO: 117447 - DNA, 78 bp, Homo sapiens
ttatttgcttttgaccaaagaatgctgcttctttctttatactcaagatgatagccaattactcgacttcctccatca

SEQ ID NO: 117448 - DNA, 78 bp, Homo sapiens
ctttctttatactcaagatgatagccaattactcgacttcctccatcattaactggcacttgccaggttacaagcatg

SEQ ID NO: 117449 - DNA, 79 bp, Homo sapiens
tatactcaagatgatagccaattactcgacttcctccatcattaactggcacttgccaggttacaagcatggtagattt

SEQ ID NO: 117450 - DNA, 78 bp, Homo sapiens
attactcgacttcctccatcattaactggcacttgccaggttacaagcatggtagattttgtggcatgcacaacttta

SEQ ID NO: 117451 - DNA, 75 bp, Homo sapiens
attaactggcacttgccaggttacaagcatggtagattttgtggcatgcacaactttaggagtaccaggaggacc

SEQ ID NO: 117452 - DNA, 75 bp, Homo sapiens
ttgccaggttacaagcatggtagattttgtggcatgcacaactttaggagtaccaggaggacctgggggactgaa

SEQ ID NO: 117453 - DNA, 76 bp, Homo sapiens
ttacaagcatggtagattttgtggcatgcacaactttaggagtaccaggaggacctgggggactgaatggatactc

SEQ ID NO: 117454 - DNA, 80 bp, Homo sapiens
ttgtggcatgcacaactttaggagtaccaggaggacctgggggactgaatggatactctgcaacaacagctgaagattca

SEQ ID NO: 117455 - DNA, 75 bp, Homo sapiens
acaactttaggagtaccaggaggacctgggggactgaatggatactctgcaacaacagctgaagattcactgtag

SEQ ID NO: 117456 - DNA, 78 bp, Homo sapiens
agtaccaggaggacctgggggactgaatggatactctgcaacaacagctgaagattcactgtaggagctctttccata

SEQ ID NO: 117457 - DNA, 79 bp, Homo sapiens
acctgggggactgaatggatactctgcaacaacagctgaagattcactgtaggagctctttccatagcggttttctgca

SEQ ID NO: 117458 - DNA, 80 bp, Homo sapiens
tgaatggatactctgcaacaacagctgaagattcactgtaggagctctttccatagcggttttctgcacaaacacggaac

SEQ ID NO: 117459 - DNA, 79 bp, Homo sapiens
atactctgcaacaacagctgaagattcactgtaggagctctttccatagcggttttctgcacaaacacggaactgatac

SEQ ID NO: 117460 - DNA, 77 bp, Homo sapiens
aacaacagctgaagattcactgtaggagctctttccatagcggttttctgcacaaacacggaactgatactcacttc

SEQ ID NO: 117461 - DNA, 76 bp, Homo sapiens
aagattcactgtaggagctctttccatagcggttttctgcacaaacacggaactgatactcacttcctgttgtcag

SEQ ID NO: 117462 - DNA, 74 bp, Homo sapiens
ggagctctttccatagcggttttctgcacaaacacggaactgatactcacttcctgttgtcaggcgaactattt

SEQ ID NO: 117463 - DNA, 75 bp, Homo sapiens
gttttctgcacaaacacggaactgatactcacttcctgttgtcaggcgaactattttaatggatgttcttgcaac

SEQ ID NO: 117464 - DNA, 77 bp, Homo sapiens
acttcctgttgtcaggcgaactattttaatggatgttcttgcaactgcttgtgaaactatgtgccatgttgtagagg

SEQ ID NO: 117465 - DNA, 77 bp, Homo sapiens
ttgtcaggcgaactattttaatggatgttcttgcaactgcttgtgaaactatgtgccatgttgtagaggtggtttct

SEQ ID NO: 117466 - DNA, 76 bp, Homo sapiens
aatggatgttcttgcaactgcttgtgaaactatgtgccatgttgtagaggtggtttctttcttttcaacaatgtaa

SEQ ID NO: 117467 - DNA, 76 bp, Homo sapiens
ttgcaactgcttgtgaaactatgtgccatgttgtagaggtggtttctttcttttcaacaatgtaattgctaatttg

SEQ ID NO: 117468 - DNA, 78 bp, Homo sapiens
tgaaactatgtgccatgttgtagaggtggtttctttcttttcaacaatgtaattgctaatttggcagccaccatcata

SEQ ID NO: 117469 - DNA, 76 bp, Homo sapiens
ttgtagaggtggtttctttcttttcaacaatgtaattgctaatttggcagccaccatcatattctggaggattcca

SEQ ID NO: 117470 - DNA, 75 bp, Homo sapiens
tttctttcttttcaacaatgtaattgctaatttggcagccaccatcatattctggaggattccaagaaatggtta

SEQ ID NO: 117471 - DNA, 81 bp, Homo sapiens
taattgctaatttggcagccaccatcatattctggaggattccaagaaatggttatgctgtcacaactaacctcatcaata

SEQ ID NO: 117472 - DNA, 80 bp, Homo sapiens
taatttggcagccaccatcatattctggaggattccaagaaatggttatgctgtcacaactaacctcatcaatacgtata

SEQ ID NO: 117473 - DNA, 77 bp, Homo sapiens
accatcatattctggaggattccaagaaatggttatgctgtcacaactaacctcatcaatacgtataggacctggag

SEQ ID NO: 117474 - DNA, 76 bp, Homo sapiens
tattctggaggattccaagaaatggttatgctgtcacaactaacctcatcaatacgtataggacctggaggtcctg

SEQ ID NO: 117475 - DNA, 75 bp, Homo sapiens
attccaagaaatggttatgctgtcacaactaacctcatcaatacgtataggacctggaggtcctggtctgtcaag

SEQ ID NO: 117476 - DNA, 77 bp, Homo sapiens
ttatgctgtcacaactaacctcatcaatacgtataggacctggaggtcctggtctgtcaaggacaattatagtaata

SEQ ID NO: 117477 - DNA, 72 bp, Homo sapiens
acaactaacctcatcaatacgtataggacctggaggtcctggtctgtcaaggacaattatagtaataggaac

SEQ ID NO: 117478 - DNA, 74 bp, Homo sapiens
taacctcatcaatacgtataggacctggaggtcctggtctgtcaaggacaattatagtaataggaactgttatg

SEQ ID NO: 117479 - DNA, 74 bp, Homo sapiens
aatacgtataggacctggaggtcctggtctgtcaaggacaattatagtaataggaactgttatggatccagcac

SEQ ID NO: 117480 - DNA, 76 bp, Homo sapiens
ctggtctgtcaaggacaattatagtaataggaactgttatggatccagcactgtttgaaacacataattcataagt

SEQ ID NO: 117481 - DNA, 76 bp, Homo sapiens
ggacaattatagtaataggaactgttatggatccagcactgtttgaaacacataattcataagttccaacatcttc

SEQ ID NO: 117482 - DNA, 75 bp, Homo sapiens
atagtaataggaactgttatggatccagcactgtttgaaacacataattcataagttccaacatcttcctttgaa

SEQ ID NO: 117483 - DNA, 75 bp, Homo sapiens
actgttatggatccagcactgtttgaaacacataattcataagttccaacatcttcctttgaagcttccttaata

SEQ ID NO: 117484 - DNA, 76 bp, Homo sapiens
cacataattcataagttccaacatcttcctttgaagcttccttaatagatagtgatgttacagtctttgaagaaga

SEQ ID NO: 117485 - DNA, 75 bp, Homo sapiens
cataagttccaacatcttcctttgaagcttccttaatagatagtgatgttacagtctttgaagaagaaacattga

SEQ ID NO: 117486 - DNA, 75 bp, Homo sapiens
atcttcctttgaagcttccttaatagatagtgatgttacagtctttgaagaagaaacattgactctagttgtctc

SEQ ID NO: 117487 - DNA, 76 bp, Homo sapiens
tgaagcttccttaatagatagtgatgttacagtctttgaagaagaaacattgactctagttgtctctttaagagtc

SEQ ID NO: 117488 - DNA, 76 bp, Homo sapiens
ttccttaatagatagtgatgttacagtctttgaagaagaaacattgactctagttgtctctttaagagtctgacca

SEQ ID NO: 117489 - DNA, 76 bp, Homo sapiens
atagtgatgttacagtctttgaagaagaaacattgactctagttgtctctttaagagtctgaccatcttttctcca

SEQ ID NO: 117490 - DNA, 76 bp, Homo sapiens
tacagtctttgaagaagaaacattgactctagttgtctctttaagagtctgaccatcttttctccagttcacagta

SEQ ID NO: 117491 - DNA, 75 bp, Homo sapiens
aagaaacattgactctagttgtctctttaagagtctgaccatcttttctccagttcacagtagcttgaggtcttc

SEQ ID NO: 117492 - DNA, 75 bp, Homo sapiens
attgactctagttgtctctttaagagtctgaccatcttttctccagttcacagtagcttgaggtcttcctttgaa

SEQ ID NO: 117493 - DNA, 79 bp, Homo sapiens
tgtctctttaagagtctgaccatcttttctccagttcacagtagcttgaggtcttcctttgaatggcacatcaatctta

SEQ ID NO: 117494 - DNA, 75 bp, Homo sapiens
atcttttctccagttcacagtagcttgaggtcttcctttgaatggcacatcaatcttaagttgttctctagcctt

SEQ ID NO: 117495 - DNA, 77 bp, Homo sapiens
tccagttcacagtagcttgaggtcttcctttgaatggcacatcaatcttaagttgttctctagcctttacattgaaa

SEQ ID NO: 117496 - DNA, 75 bp, Homo sapiens
agtagcttgaggtcttcctttgaatggcacatcaatcttaagttgttctctagcctttacattgaaagtatggaa

SEQ ID NO: 117497 - DNA, 75 bp, Homo sapiens
gtcttcctttgaatggcacatcaatcttaagttgttctctagcctttacattgaaagtatggaaaggaagctcaa

SEQ ID NO: 117498 - DNA, 72 bp, Homo sapiens
acatcaatcttaagttgttctctagcctttacattgaaagtatggaaaggaagctcaactgaaggctttatt

SEQ ID NO: 117499 - DNA, 72 bp, Homo sapiens
ttaagttgttctctagcctttacattgaaagtatggaaaggaagctcaactgaaggctttatttcaatatcc

SEQ ID NO: 117500 - DNA, 74 bp, Homo sapiens
tctagcctttacattgaaagtatggaaaggaagctcaactgaaggctttatttcaatatcccttgcaattactg

SEQ ID NO: 117501 - DNA, 73 bp, Homo sapiens
attgaaagtatggaaaggaagctcaactgaaggctttatttcaatatcccttgcaattactggcactccaagt

SEQ ID NO: 117502 - DNA, 77 bp, Homo sapiens
tatggaaaggaagctcaactgaaggctttatttcaatatcccttgcaattactggcactccaagttgtcttggatca

SEQ ID NO: 117503 - DNA, 74 bp, Homo sapiens
tcaactgaaggctttatttcaatatcccttgcaattactggcactccaagttgtcttggatcacttcttccctt

SEQ ID NO: 117504 - DNA, 72 bp, Homo sapiens
gctttatttcaatatcccttgcaattactggcactccaagttgtcttggatcacttcttcccttttcgttaa

SEQ ID NO: 117505 - DNA, 75 bp, Homo sapiens
tttcaatatcccttgcaattactggcactccaagttgtcttggatcacttcttcccttttcgttaactgcagcta

SEQ ID NO: 117506 - DNA, 76 bp, Homo sapiens
ttgcaattactggcactccaagttgtcttggatcacttcttcccttttcgttaactgcagctaccctgaagacata

SEQ ID NO: 117507 - DNA, 75 bp, Homo sapiens
tactggcactccaagttgtcttggatcacttcttcccttttcgttaactgcagctaccctgaagacatactcttc

SEQ ID NO: 117508 - DNA, 74 bp, Homo sapiens
aagttgtcttggatcacttcttcccttttcgttaactgcagctaccctgaagacatactcttctcctgcagtta

SEQ ID NO: 117509 - DNA, 75 bp, Homo sapiens
atcacttcttcccttttcgttaactgcagctaccctgaagacatactcttctcctgcagttaagccagatatagt

SEQ ID NO: 117510 - DNA, 77 bp, Homo sapiens
tcttcccttttcgttaactgcagctaccctgaagacatactcttctcctgcagttaagccagatatagttgcttcta

SEQ ID NO: 117511 - DNA, 81 bp, Homo sapiens
taccctgaagacatactcttctcctgcagttaagccagatatagttgcttctagagtcttaacttgtgtgcaggtgctcca

SEQ ID NO: 117512 - DNA, 77 bp, Homo sapiens
ttctcctgcagttaagccagatatagttgcttctagagtcttaacttgtgtgcaggtgctccacttttcactccctt

SEQ ID NO: 117513 - DNA, 77 bp, Homo sapiens
ttaagccagatatagttgcttctagagtcttaacttgtgtgcaggtgctccacttttcactccctttagtctgcatt

SEQ ID NO: 117514 - DNA, 78 bp, Homo sapiens
tatagttgcttctagagtcttaacttgtgtgcaggtgctccacttttcactccctttagtctgcatttcaaccacata

SEQ ID NO: 117515 - DNA, 75 bp, Homo sapiens
tagagtcttaacttgtgtgcaggtgctccacttttcactccctttagtctgcatttcaaccacataaccagtaat

SEQ ID NO: 117516 - DNA, 75 bp, Homo sapiens
tcttaacttgtgtgcaggtgctccacttttcactccctttagtctgcatttcaaccacataaccagtaattttgc

SEQ ID NO: 117517 - DNA, 73 bp, Homo sapiens
cctttagtctgcatttcaaccacataaccagtaattttgctgccaccatcactttctggtttctcccacttaa

SEQ ID NO: 117518 - DNA, 76 bp, Homo sapiens
tgcatttcaaccacataaccagtaattttgctgccaccatcactttctggtttctcccacttaattgtagctgtat

SEQ ID NO: 117519 - DNA, 72 bp, Homo sapiens
aaccacataaccagtaattttgctgccaccatcactttctggtttctcccacttaattgtagctgtattacg

SEQ ID NO: 117520 - DNA, 74 bp, Homo sapiens
agtaattttgctgccaccatcactttctggtttctcccacttaattgtagctgtattacgggtcacatcaacaa

SEQ ID NO: 117521 - DNA, 71 bp, Homo sapiens
actttctggtttctcccacttaattgtagctgtattacgggtcacatcaacaagagttactcttccaggtg

SEQ ID NO: 117522 - DNA, 71 bp, Homo sapiens
tggtttctcccacttaattgtagctgtattacgggtcacatcaacaagagttactcttccaggtgggaggg

SEQ ID NO: 117523 - DNA, 71 bp, Homo sapiens
gtagctgtattacgggtcacatcaacaagagttactcttccaggtgggaggggtggttcagacactttaac

SEQ ID NO: 117524 - DNA, 69 bp, Homo sapiens
gtcacatcaacaagagttactcttccaggtgggaggggtggttcagacactttaacgggttctgttgtt

SEQ ID NO: 117525 - DNA, 69 bp, Homo sapiens
atcaacaagagttactcttccaggtgggaggggtggttcagacactttaacgggttctgttgtttcagc

SEQ ID NO: 117526 - DNA, 69 bp, Homo sapiens
ttactcttccaggtgggaggggtggttcagacactttaacgggttctgttgtttcagctggcaaaccaa

SEQ ID NO: 117527 - DNA, 73 bp, Homo sapiens
ggtggttcagacactttaacgggttctgttgtttcagctggcaaaccaatcccatattcattggaagccaaga

SEQ ID NO: 117528 - DNA, 75 bp, Homo sapiens
tctgttgtttcagctggcaaaccaatcccatattcattggaagccaagactcggaagtagtaagaacatccttct

SEQ ID NO: 117529 - DNA, 75 bp, Homo sapiens
tcagctggcaaaccaatcccatattcattggaagccaagactcggaagtagtaagaacatccttcttgtagattt

SEQ ID NO: 117530 - DNA, 71 bp, Homo sapiens
aaaccaatcccatattcattggaagccaagactcggaagtagtaagaacatccttcttgtagattttcaat

SEQ ID NO: 117531 - DNA, 72 bp, Homo sapiens
atattcattggaagccaagactcggaagtagtaagaacatccttcttgtagattttcaattctgaaagtagt

SEQ ID NO: 117532 - DNA, 70 bp, Homo sapiens
ttggaagccaagactcggaagtagtaagaacatccttcttgtagattttcaattctgaaagtagttttag

SEQ ID NO: 117533 - DNA, 71 bp, Homo sapiens
gactcggaagtagtaagaacatccttcttgtagattttcaattctgaaagtagttttagtgcaattatttg

SEQ ID NO: 117534 - DNA, 74 bp, Homo sapiens
taagaacatccttcttgtagattttcaattctgaaagtagttttagtgcaattatttgtaatggtagcataggc

SEQ ID NO: 117535 - DNA, 72 bp, Homo sapiens
gattttcaattctgaaagtagttttagtgcaattatttgtaatggtagcataggcttttcttgtagtttctc

SEQ ID NO: 117536 - DNA, 70 bp, Homo sapiens
ctgaaagtagttttagtgcaattatttgtaatggtagcataggcttttcttgtagtttctcgtttttcga

SEQ ID NO: 117537 - DNA, 70 bp, Homo sapiens
gttttagtgcaattatttgtaatggtagcataggcttttcttgtagtttctcgtttttcgacaatgtagt

SEQ ID NO: 117538 - DNA, 72 bp, Homo sapiens
gtgcaattatttgtaatggtagcataggcttttcttgtagtttctcgtttttcgacaatgtagtttgtaatc

SEQ ID NO: 117539 - DNA, 72 bp, Homo sapiens
ttgtaatggtagcataggcttttcttgtagtttctcgtttttcgacaatgtagtttgtaatcttagctccac

SEQ ID NO: 117540 - DNA, 71 bp, Homo sapiens
ataggcttttcttgtagtttctcgtttttcgacaatgtagtttgtaatcttagctccaccatcaataagtg

SEQ ID NO: 117541 - DNA, 71 bp, Homo sapiens
tttcttgtagtttctcgtttttcgacaatgtagtttgtaatcttagctccaccatcaataagtggtggttc

SEQ ID NO: 117542 - DNA, 71 bp, Homo sapiens
tttctcgtttttcgacaatgtagtttgtaatcttagctccaccatcaataagtggtggttcccaggacaac

SEQ ID NO: 117543 - DNA, 74 bp, Homo sapiens
ttcgacaatgtagtttgtaatcttagctccaccatcaataagtggtggttcccaggacaacgtcactgagtctt

SEQ ID NO: 117544 - DNA, 74 bp, Homo sapiens
tagtttgtaatcttagctccaccatcaataagtggtggttcccaggacaacgtcactgagtctttcttcacttc

SEQ ID NO: 117545 - DNA, 75 bp, Homo sapiens
tagctccaccatcaataagtggtggttcccaggacaacgtcactgagtctttcttcacttctcttatggtcaaat

SEQ ID NO: 117546 - DNA, 74 bp, Homo sapiens
accatcaataagtggtggttcccaggacaacgtcactgagtctttcttcacttctcttatggtcaaattcacag

SEQ ID NO: 117547 - DNA, 76 bp, Homo sapiens
tggttcccaggacaacgtcactgagtctttcttcacttctcttatggtcaaattcacaggggcacttggtgagtca

SEQ ID NO: 117548 - DNA, 75 bp, Homo sapiens
aggacaacgtcactgagtctttcttcacttctcttatggtcaaattcacaggggcacttggtgagtcaagaactc

SEQ ID NO: 117549 - DNA, 75 bp, Homo sapiens
ctgagtctttcttcacttctcttatggtcaaattcacaggggcacttggtgagtcaagaactctgacgttaacaa

SEQ ID NO: 117550 - DNA, 74 bp, Homo sapiens
tcttcacttctcttatggtcaaattcacaggggcacttggtgagtcaagaactctgacgttaacaaaagctgtt

SEQ ID NO: 117551 - DNA, 73 bp, Homo sapiens
cttctcttatggtcaaattcacaggggcacttggtgagtcaagaactctgacgttaacaaaagctgttttgga

SEQ ID NO: 117552 - DNA, 74 bp, Homo sapiens
ggcacttggtgagtcaagaactctgacgttaacaaaagctgttttggagccactattattttctaatgtcagat

SEQ ID NO: 117553 - DNA, 74 bp, Homo sapiens
ttggtgagtcaagaactctgacgttaacaaaagctgttttggagccactattattttctaatgtcagattatac

SEQ ID NO: 117554 - DNA, 71 bp, Homo sapiens
aagaactctgacgttaacaaaagctgttttggagccactattattttctaatgtcagattataccgaccac

SEQ ID NO: 117555 - DNA, 74 bp, Homo sapiens
taacaaaagctgttttggagccactattattttctaatgtcagattataccgaccactgtcaaatctggtaaca

SEQ ID NO: 117556 - DNA, 75 bp, Homo sapiens
aagctgttttggagccactattattttctaatgtcagattataccgaccactgtcaaatctggtaacattatcaa

SEQ ID NO: 117557 - DNA, 77 bp, Homo sapiens
gccactattattttctaatgtcagattataccgaccactgtcaaatctggtaacattatcaatcaccaacattgtaa

SEQ ID NO: 117558 - DNA, 77 bp, Homo sapiens
attttctaatgtcagattataccgaccactgtcaaatctggtaacattatcaatcaccaacattgtaaatgagctgg

SEQ ID NO: 117559 - DNA, 80 bp, Homo sapiens
atgtcagattataccgaccactgtcaaatctggtaacattatcaatcaccaacattgtaaatgagctggtcacctctatc

SEQ ID NO: 117560 - DNA, 79 bp, Homo sapiens
ataccgaccactgtcaaatctggtaacattatcaatcaccaacattgtaaatgagctggtcacctctatctgagccctg

SEQ ID NO: 117561 - DNA, 81 bp, Homo sapiens
aaatctggtaacattatcaatcaccaacattgtaaatgagctggtcacctctatctgagccctgtcagtgagaatgccttc

SEQ ID NO: 117562 - DNA, 81 bp, Homo sapiens
gtaacattatcaatcaccaacattgtaaatgagctggtcacctctatctgagccctgtcagtgagaatgccttctgccttt

SEQ ID NO: 117563 - DNA, 79 bp, Homo sapiens
aatcaccaacattgtaaatgagctggtcacctctatctgagccctgtcagtgagaatgccttctgccttttcccattta

SEQ ID NO: 117564 - DNA, 77 bp, Homo sapiens
aacattgtaaatgagctggtcacctctatctgagccctgtcagtgagaatgccttctgccttttcccatttaacttc

SEQ ID NO: 117565 - DNA, 72 bp, Homo sapiens
cctgtcagtgagaatgccttctgccttttcccatttaacttcgggttctggtcgacctttgatagtgacaaa

SEQ ID NO: 117566 - DNA, 70 bp, Homo sapiens
ttctgccttttcccatttaacttcgggttctggtcgacctttgatagtgacaaataagcgtaaagtagca

SEQ ID NO: 117567 - DNA, 73 bp, Homo sapiens
tcccatttaacttcgggttctggtcgacctttgatagtgacaaataagcgtaaagtagcacttgcacgcagaa

SEQ ID NO: 117568 - DNA, 73 bp, Homo sapiens
taacttcgggttctggtcgacctttgatagtgacaaataagcgtaaagtagcacttgcacgcagaacgaccac

SEQ ID NO: 117569 - DNA, 79 bp, Homo sapiens
ttctggtcgacctttgatagtgacaaataagcgtaaagtagcacttgcacgcagaacgaccacctttctgagatcagca

SEQ ID NO: 117570 - DNA, 79 bp, Homo sapiens
tttgatagtgacaaataagcgtaaagtagcacttgcacgcagaacgaccacctttctgagatcagcatcgagttctatt

SEQ ID NO: 117571 - DNA, 78 bp, Homo sapiens
acaaataagcgtaaagtagcacttgcacgcagaacgaccacctttctgagatcagcatcgagttctatttctggtggc

SEQ ID NO: 117572 - DNA, 82 bp, Homo sapiens
taaagtagcacttgcacgcagaacgaccacctttctgagatcagcatcgagttctatttctggtggctctatcctctcctga

SEQ ID NO: 117573 - DNA, 81 bp, Homo sapiens
acttgcacgcagaacgaccacctttctgagatcagcatcgagttctatttctggtggctctatcctctcctgagcaaccac

SEQ ID NO: 117574 - DNA, 80 bp, Homo sapiens
aacgaccacctttctgagatcagcatcgagttctatttctggtggctctatcctctcctgagcaaccactgagccaggta

SEQ ID NO: 117575 - DNA, 84 bp, Homo sapiens
tttctgagatcagcatcgagttctatttctggtggctctatcctctcctgagcaaccactgagccaggtagagttgcaggttca

SEQ ID NO: 117576 - DNA, 82 bp, Homo sapiens
agatcagcatcgagttctatttctggtggctctatcctctcctgagcaaccactgagccaggtagagttgcaggttcaccta

SEQ ID NO: 117577 - DNA, 79 bp, Homo sapiens
tctatttctggtggctctatcctctcctgagcaaccactgagccaggtagagttgcaggttcacctacaccttcagaat

SEQ ID NO: 117578 - DNA, 80 bp, Homo sapiens
tatcctctcctgagcaaccactgagccaggtagagttgcaggttcacctacaccttcagaattgatggcacaaatacgga

SEQ ID NO: 117579 - DNA, 71 bp, Homo sapiens
aggttcacctacaccttcagaattgatggcacaaatacggaagttatattcagtgttttctttaagcttgg

SEQ ID NO: 117580 - DNA, 74 bp, Homo sapiens
attgatggcacaaatacggaagttatattcagtgttttctttaagcttggtcactgtgaactgctttccttgta

SEQ ID NO: 117581 - DNA, 70 bp, Homo sapiens
aaatacggaagttatattcagtgttttctttaagcttggtcactgtgaactgctttccttgtaatcctgt

SEQ ID NO: 117582 - DNA, 75 bp, Homo sapiens
gttttctttaagcttggtcactgtgaactgctttccttgtaatcctgttggtggagtgcaggttgtccattcatc

SEQ ID NO: 117583 - DNA, 79 bp, Homo sapiens
tttaagcttggtcactgtgaactgctttccttgtaatcctgttggtggagtgcaggttgtccattcatccgcagcagct

SEQ ID NO: 117584 - DNA, 79 bp, Homo sapiens
actgtgaactgctttccttgtaatcctgttggtggagtgcaggttgtccattcatccgcagcagcttctttgacctcta

SEQ ID NO: 117585 - DNA, 79 bp, Homo sapiens
actgctttccttgtaatcctgttggtggagtgcaggttgtccattcatccgcagcagcttctttgacctctacaacata

SEQ ID NO: 117586 - DNA, 79 bp, Homo sapiens
ttgtaatcctgttggtggagtgcaggttgtccattcatccgcagcagcttctttgacctctacaacatagcctttaaca

SEQ ID NO: 117587 - DNA, 80 bp, Homo sapiens
tgttggtggagtgcaggttgtccattcatccgcagcagcttctttgacctctacaacatagcctttaacaggtgcgccac

SEQ ID NO: 117588 - DNA, 78 bp, Homo sapiens
aggttgtccattcatccgcagcagcttctttgacctctacaacatagcctttaacaggtgcgccaccatcataaattg

SEQ ID NO: 117589 - DNA, 79 bp, Homo sapiens
attcatccgcagcagcttctttgacctctacaacatagcctttaacaggtgcgccaccatcataaattggcttactcca

SEQ ID NO: 117590 - DNA, 78 bp, Homo sapiens
agcagcttctttgacctctacaacatagcctttaacaggtgcgccaccatcataaattggcttactccatgccaggga

SEQ ID NO: 117591 - DNA, 78 bp, Homo sapiens
tctttgacctctacaacatagcctttaacaggtgcgccaccatcataaattggcttactccatgccagggagacagaa

SEQ ID NO: 117592 - DNA, 79 bp, Homo sapiens
tacaacatagcctttaacaggtgcgccaccatcataaattggcttactccatgccagggagacagaagatctggaagtg

SEQ ID NO: 117593 - DNA, 78 bp, Homo sapiens
cgccaccatcataaattggcttactccatgccagggagacagaagatctggaagtgtccgtcacttttggattgcttg

SEQ ID NO: 117594 - DNA, 76 bp, Homo sapiens
tactccatgccagggagacagaagatctggaagtgtccgtcacttttggattgcttgggggacctggtggatacaa

SEQ ID NO: 117595 - DNA, 75 bp, Homo sapiens
agaagatctggaagtgtccgtcacttttggattgcttgggggacctggtggatacaaggcatcacacgcacggta

SEQ ID NO: 117596 - DNA, 76 bp, Homo sapiens
cgtcacttttggattgcttgggggacctggtggatacaaggcatcacacgcacggtagaaaacagatggctcacta

SEQ ID NO: 117597 - DNA, 76 bp, Homo sapiens
attgcttgggggacctggtggatacaaggcatcacacgcacggtagaaaacagatggctcactaggttctcccaca

SEQ ID NO: 117598 - DNA, 83 bp, Homo sapiens
atacaaggcatcacacgcacggtagaaaacagatggctcactaggttctcccacaccagctgcattttcagcagcaactctga

SEQ ID NO: 117599 - DNA, 82 bp, Homo sapiens
atcacacgcacggtagaaaacagatggctcactaggttctcccacaccagctgcattttcagcagcaactctgaattcatag

SEQ ID NO: 117600 - DNA, 80 bp, Homo sapiens
acggtagaaaacagatggctcactaggttctcccacaccagctgcattttcagcagcaactctgaattcataggaatggc

SEQ ID NO: 117601 - DNA, 80 bp, Homo sapiens
aacagatggctcactaggttctcccacaccagctgcattttcagcagcaactctgaattcataggaatggccttcggtaa

SEQ ID NO: 117602 - DNA, 77 bp, Homo sapiens
actaggttctcccacaccagctgcattttcagcagcaactctgaattcataggaatggccttcggtaagaccagtta

SEQ ID NO: 117603 - DNA, 79 bp, Homo sapiens
ttctcccacaccagctgcattttcagcagcaactctgaattcataggaatggccttcggtaagaccagttaccctgagc

SEQ ID NO: 117604 - DNA, 78 bp, Homo sapiens
tgcattttcagcagcaactctgaattcataggaatggccttcggtaagaccagttaccctgagccgcagatccgttaa

SEQ ID NO: 117605 - DNA, 74 bp, Homo sapiens
agcagcaactctgaattcataggaatggccttcggtaagaccagttaccctgagccgcagatccgttaatgttt

SEQ ID NO: 117606 - DNA, 71 bp, Homo sapiens
aactctgaattcataggaatggccttcggtaagaccagttaccctgagccgcagatccgttaatgttttct

SEQ ID NO: 117607 - DNA, 71 bp, Homo sapiens
ataggaatggccttcggtaagaccagttaccctgagccgcagatccgttaatgttttcttgttgcacttgg

SEQ ID NO: 117608 - DNA, 71 bp, Homo sapiens
ccttcggtaagaccagttaccctgagccgcagatccgttaatgttttcttgttgcacttggtccatctaac

SEQ ID NO: 117609 - DNA, 72 bp, Homo sapiens
agaccagttaccctgagccgcagatccgttaatgttttcttgttgcacttggtccatctaacgccttcctta

SEQ ID NO: 117610 - DNA, 74 bp, Homo sapiens
tgagccgcagatccgttaatgttttcttgttgcacttggtccatctaacgccttccttatctcgtttttcaaga

SEQ ID NO: 117611 - DNA, 71 bp, Homo sapiens
agatccgttaatgttttcttgttgcacttggtccatctaacgccttccttatctcgtttttcaagaatgta

SEQ ID NO: 117612 - DNA, 71 bp, Homo sapiens
ttgttgcacttggtccatctaacgccttccttatctcgtttttcaagaatgtagccctcaatttcggtacc

SEQ ID NO: 117613 - DNA, 68 bp, Homo sapiens
aacgccttccttatctcgtttttcaagaatgtagccctcaatttcggtacctccgtcgtctactgggc

SEQ ID NO: 117614 - DNA, 72 bp, Homo sapiens
tatctcgtttttcaagaatgtagccctcaatttcggtacctccgtcgtctactgggcgtgcccatgttacta

SEQ ID NO: 117615 - DNA, 71 bp, Homo sapiens
aagaatgtagccctcaatttcggtacctccgtcgtctactgggcgtgcccatgttactaccatagaatctt

SEQ ID NO: 117616 - DNA, 72 bp, Homo sapiens
gtagccctcaatttcggtacctccgtcgtctactgggcgtgcccatgttactaccatagaatctttggtgat

SEQ ID NO: 117617 - DNA, 75 bp, Homo sapiens
atttcggtacctccgtcgtctactgggcgtgcccatgttactaccatagaatctttggtgattgctgagacttca

SEQ ID NO: 117618 - DNA, 77 bp, Homo sapiens
ctccgtcgtctactgggcgtgcccatgttactaccatagaatctttggtgattgctgagacttcaggtgttgaggga

SEQ ID NO: 117619 - DNA, 77 bp, Homo sapiens
tactgggcgtgcccatgttactaccatagaatctttggtgattgctgagacttcaggtgttgagggaggacctggtg

SEQ ID NO: 117620 - DNA, 76 bp, Homo sapiens
tgttactaccatagaatctttggtgattgctgagacttcaggtgttgagggaggacctggtggcttataaggatta

SEQ ID NO: 117621 - DNA, 75 bp, Homo sapiens
atagaatctttggtgattgctgagacttcaggtgttgagggaggacctggtggcttataaggattacaggccgta

SEQ ID NO: 117622 - DNA, 74 bp, Homo sapiens
atctttggtgattgctgagacttcaggtgttgagggaggacctggtggcttataaggattacaggccgtaacag

SEQ ID NO: 117623 - DNA, 73 bp, Homo sapiens
tgagacttcaggtgttgagggaggacctggtggcttataaggattacaggccgtaacaggcccagattccaag

SEQ ID NO: 117624 - DNA, 72 bp, Homo sapiens
ggtgttgagggaggacctggtggcttataaggattacaggccgtaacaggcccagattccaagggctctcca

SEQ ID NO: 117625 - DNA, 74 bp, Homo sapiens
ctggtggcttataaggattacaggccgtaacaggcccagattccaagggctctccaattccatatttattcaca

SEQ ID NO: 117626 - DNA, 76 bp, Homo sapiens
tataaggattacaggccgtaacaggcccagattccaagggctctccaattccatatttattcacagccatgacacg

SEQ ID NO: 117627 - DNA, 75 bp, Homo sapiens
ccgtaacaggcccagattccaagggctctccaattccatatttattcacagccatgacacggaaaatgtactcat

SEQ ID NO: 117628 - DNA, 73 bp, Homo sapiens
aagggctctccaattccatatttattcacagccatgacacggaaaatgtactcattaccaggaagaagtttag

SEQ ID NO: 117629 - DNA, 73 bp, Homo sapiens
caattccatatttattcacagccatgacacggaaaatgtactcattaccaggaagaagtttagtaactttgta

SEQ ID NO: 117630 - DNA, 70 bp, Homo sapiens
tttattcacagccatgacacggaaaatgtactcattaccaggaagaagtttagtaactttgtagttaagg

SEQ ID NO: 117631 - DNA, 68 bp, Homo sapiens
ggaaaatgtactcattaccaggaagaagtttagtaactttgtagttaagggcctgtacctcagttgaa

SEQ ID NO: 117632 - DNA, 68 bp, Homo sapiens
atgtactcattaccaggaagaagtttagtaactttgtagttaagggcctgtacctcagttgaaacctg

SEQ ID NO: 117633 - DNA, 66 bp, Homo sapiens
aagtttagtaactttgtagttaagggcctgtacctcagttgaaacctgggtccaagagagtcggct

SEQ ID NO: 117634 - DNA, 68 bp, Homo sapiens
actttgtagttaagggcctgtacctcagttgaaacctgggtccaagagagtcggcttgtctccctctt

SEQ ID NO: 117635 - DNA, 75 bp, Homo sapiens
gcctgtacctcagttgaaacctgggtccaagagagtcggcttgtctccctcttttcaatgatgtaatgtgaaata

SEQ ID NO: 117636 - DNA, 76 bp, Homo sapiens
tacctcagttgaaacctgggtccaagagagtcggcttgtctccctcttttcaatgatgtaatgtgaaatattagca

SEQ ID NO: 117637 - DNA, 74 bp, Homo sapiens
aaacctgggtccaagagagtcggcttgtctccctcttttcaatgatgtaatgtgaaatattagcaccaccatct

SEQ ID NO: 117638 - DNA, 75 bp, Homo sapiens
aagagagtcggcttgtctccctcttttcaatgatgtaatgtgaaatattagcaccaccatcttgcaaaggtgggt

SEQ ID NO: 117639 - DNA, 77 bp, Homo sapiens
ttgtctccctcttttcaatgatgtaatgtgaaatattagcaccaccatcttgcaaaggtgggttccatgccaggtaa

SEQ ID NO: 117640 - DNA, 76 bp, Homo sapiens
tcttttcaatgatgtaatgtgaaatattagcaccaccatcttgcaaaggtgggttccatgccaggtaacatttttc

SEQ ID NO: 117641 - DNA, 72 bp, Homo sapiens
aaatattagcaccaccatcttgcaaaggtgggttccatgccaggtaacatttttccgcagtaactccagtaa

SEQ ID NO: 117642 - DNA, 70 bp, Homo sapiens
aggtgggttccatgccaggtaacatttttccgcagtaactccagtaactttcagaggcccttcaggaggc

SEQ ID NO: 117643 - DNA, 71 bp, Homo sapiens
caggtaacatttttccgcagtaactccagtaactttcagaggcccttcaggaggccctggcctgtcaagta

SEQ ID NO: 117644 - DNA, 69 bp, Homo sapiens
atttttccgcagtaactccagtaactttcagaggcccttcaggaggccctggcctgtcaagtaccttta

SEQ ID NO: 117645 - DNA, 72 bp, Homo sapiens
taactttcagaggcccttcaggaggccctggcctgtcaagtacctttacagtgatgggtatagactttgtac

SEQ ID NO: 117646 - DNA, 75 bp, Homo sapiens
cctggcctgtcaagtacctttacagtgatgggtatagactttgtaccaccaacattgctgagtttcagaatatat

SEQ ID NO: 117647 - DNA, 76 bp, Homo sapiens
aagtacctttacagtgatgggtatagactttgtaccaccaacattgctgagtttcagaatatattgtcctccatca

SEQ ID NO: 117648 - DNA, 78 bp, Homo sapiens
tgatgggtatagactttgtaccaccaacattgctgagtttcagaatatattgtcctccatcagtccgtatacagtctt

SEQ ID NO: 117649 - DNA, 77 bp, Homo sapiens
taccaccaacattgctgagtttcagaatatattgtcctccatcagtccgtatacagtctttgacaacaagagttgtt

SEQ ID NO: 117650 - DNA, 77 bp, Homo sapiens
aacattgctgagtttcagaatatattgtcctccatcagtccgtatacagtctttgacaacaagagttgttttctgaa

SEQ ID NO: 117651 - DNA, 75 bp, Homo sapiens
cagaatatattgtcctccatcagtccgtatacagtctttgacaacaagagttgttttctgaatagtagatttaat

SEQ ID NO: 117652 - DNA, 75 bp, Homo sapiens
tatattgtcctccatcagtccgtatacagtctttgacaacaagagttgttttctgaatagtagatttaatttcca

SEQ ID NO: 117653 - DNA, 75 bp, Homo sapiens
atcagtccgtatacagtctttgacaacaagagttgttttctgaatagtagatttaatttccattctagcagctgt

SEQ ID NO: 117654 - DNA, 75 bp, Homo sapiens
cgtatacagtctttgacaacaagagttgttttctgaatagtagatttaatttccattctagcagctgtttcttca

SEQ ID NO: 117655 - DNA, 73 bp, Homo sapiens
gacaacaagagttgttttctgaatagtagatttaatttccattctagcagctgtttcttcaagttcttttcca

SEQ ID NO: 117656 - DNA, 71 bp, Homo sapiens
aagagttgttttctgaatagtagatttaatttccattctagcagctgtttcttcaagttcttttccatctt

SEQ ID NO: 117657 - DNA, 73 bp, Homo sapiens
ctgaatagtagatttaatttccattctagcagctgtttcttcaagttcttttccatcttttgaccaaacaaca

SEQ ID NO: 117658 - DNA, 72 bp, Homo sapiens
ttaatttccattctagcagctgtttcttcaagttcttttccatcttttgaccaaacaacatcaggtataggt

SEQ ID NO: 117659 - DNA, 74 bp, Homo sapiens
ttccattctagcagctgtttcttcaagttcttttccatcttttgaccaaacaacatcaggtataggtttgccac

SEQ ID NO: 117660 - DNA, 73 bp, Homo sapiens
tgtttcttcaagttcttttccatcttttgaccaaacaacatcaggtataggtttgccacggatgtcggcttca

SEQ ID NO: 117661 - DNA, 71 bp, Homo sapiens
agttcttttccatcttttgaccaaacaacatcaggtataggtttgccacggatgtcggcttcaagaacaaa

SEQ ID NO: 117662 - DNA, 72 bp, Homo sapiens
ttttccatcttttgaccaaacaacatcaggtataggtttgccacggatgtcggcttcaagaacaaaagtctc

SEQ ID NO: 117663 - DNA, 76 bp, Homo sapiens
tttgaccaaacaacatcaggtataggtttgccacggatgtcggcttcaagaacaaaagtctctcctgcatgaacaa

SEQ ID NO: 117664 - DNA, 81 bp, Homo sapiens
aacaaaagtctctcctgcatgaacaacgatgacatctttatattttggatccagagaggcatttggtgcatcaatttcatc

SEQ ID NO: 117665 - DNA, 87 bp, Homo sapiens
tctcctgcatgaacaacgatgacatctttatattttggatccagagaggcatttggtgcatcaatttcatctcttgcagtaatggca

SEQ ID NO: 117666 - DNA, 82 bp, Homo sapiens
aacgatgacatctttatattttggatccagagaggcatttggtgcatcaatttcatctcttgcagtaatggcaccactacta

SEQ ID NO: 117667 - DNA, 83 bp, Homo sapiens
ctttatattttggatccagagaggcatttggtgcatcaatttcatctcttgcagtaatggcaccactactatcagatggttca

SEQ ID NO: 117668 - DNA, 83 bp, Homo sapiens
tattttggatccagagaggcatttggtgcatcaatttcatctcttgcagtaatggcaccactactatcagatggttcactaaa

SEQ ID NO: 117669 - DNA, 83 bp, Homo sapiens
agaggcatttggtgcatcaatttcatctcttgcagtaatggcaccactactatcagatggttcactaaagtttccagctgcat

SEQ ID NO: 117670 - DNA, 81 bp, Homo sapiens
atttggtgcatcaatttcatctcttgcagtaatggcaccactactatcagatggttcactaaagtttccagctgcatttct

SEQ ID NO: 117671 - DNA, 81 bp, Homo sapiens
tcttgcagtaatggcaccactactatcagatggttcactaaagtttccagctgcatttcttgcaattactctaaattcata

SEQ ID NO: 117672 - DNA, 75 bp, Homo sapiens
atggttcactaaagtttccagctgcatttcttgcaattactctaaattcatatctttggtcttctacaagtccac

SEQ ID NO: 117673 - DNA, 73 bp, Homo sapiens
gcaattactctaaattcatatctttggtcttctacaagtccactcactgtaaattcagtttctaatacgttgg

SEQ ID NO: 117674 - DNA, 72 bp, Homo sapiens
aattcatatctttggtcttctacaagtccactcactgtaaattcagtttctaatacgttggtaaagctggct

SEQ ID NO: 117675 - DNA, 74 bp, Homo sapiens
tatctttggtcttctacaagtccactcactgtaaattcagtttctaatacgttggtaaagctggctttcatcca

SEQ ID NO: 117676 - DNA, 76 bp, Homo sapiens
tacaagtccactcactgtaaattcagtttctaatacgttggtaaagctggctttcatccagcggccatcaggtaga

SEQ ID NO: 117677 - DNA, 74 bp, Homo sapiens
tcactgtaaattcagtttctaatacgttggtaaagctggctttcatccagcggccatcaggtagatctttcttt

SEQ ID NO: 117678 - DNA, 75 bp, Homo sapiens
ttcagtttctaatacgttggtaaagctggctttcatccagcggccatcaggtagatctttcttttctacaatata

SEQ ID NO: 117679 - DNA, 74 bp, Homo sapiens
taatacgttggtaaagctggctttcatccagcggccatcaggtagatctttcttttctacaatataacctgtta

SEQ ID NO: 117680 - DNA, 75 bp, Homo sapiens
ttggtaaagctggctttcatccagcggccatcaggtagatctttcttttctacaatataacctgttattttgcta

SEQ ID NO: 117681 - DNA, 77 bp, Homo sapiens
tggctttcatccagcggccatcaggtagatctttcttttctacaatataacctgttattttgctaccaccatcatag

SEQ ID NO: 117682 - DNA, 73 bp, Homo sapiens
cggccatcaggtagatctttcttttctacaatataacctgttattttgctaccaccatcataggcaggtttct

SEQ ID NO: 117683 - DNA, 71 bp, Homo sapiens
aggtagatctttcttttctacaatataacctgttattttgctaccaccatcataggcaggtttcttccatt

SEQ ID NO: 117684 - DNA, 74 bp, Homo sapiens
tttcttttctacaatataacctgttattttgctaccaccatcataggcaggtttcttccatttcagtgtgacat

SEQ ID NO: 117685 - DNA, 75 bp, Homo sapiens
atataacctgttattttgctaccaccatcataggcaggtttcttccatttcagtgtgacattgtttcttgtaata

SEQ ID NO: 117686 - DNA, 74 bp, Homo sapiens
acctgttattttgctaccaccatcataggcaggtttcttccatttcagtgtgacattgtttcttgtaataacaa

SEQ ID NO: 117687 - DNA, 75 bp, Homo sapiens
atcataggcaggtttcttccatttcagtgtgacattgtttcttgtaataacaatggcttcagggcgaccaggtgg

SEQ ID NO: 117688 - DNA, 77 bp, Homo sapiens
tttcttccatttcagtgtgacattgtttcttgtaataacaatggcttcagggcgaccaggtgggtcacatggatcac

SEQ ID NO: 117689 - DNA, 78 bp, Homo sapiens
tttcagtgtgacattgtttcttgtaataacaatggcttcagggcgaccaggtgggtcacatggatcacgagcaacaaa

SEQ ID NO: 117690 - DNA, 80 bp, Homo sapiens
tcttgtaataacaatggcttcagggcgaccaggtgggtcacatggatcacgagcaacaaagcattctgacactttgctag

SEQ ID NO: 117691 - DNA, 82 bp, Homo sapiens
aatggcttcagggcgaccaggtgggtcacatggatcacgagcaacaaagcattctgacactttgctaggcttgccaatgcca

SEQ ID NO: 117692 - DNA, 81 bp, Homo sapiens
cgaccaggtgggtcacatggatcacgagcaacaaagcattctgacactttgctaggcttgccaatgccaacaatattttca

SEQ ID NO: 117693 - DNA, 82 bp, Homo sapiens
aggtgggtcacatggatcacgagcaacaaagcattctgacactttgctaggcttgccaatgccaacaatattttcagcagaa

SEQ ID NO: 117694 - DNA, 81 bp, Homo sapiens
atcacgagcaacaaagcattctgacactttgctaggcttgccaatgccaacaatattttcagcagaaactttgaactcata

SEQ ID NO: 117695 - DNA, 80 bp, Homo sapiens
ttctgacactttgctaggcttgccaatgccaacaatattttcagcagaaactttgaactcatactcaaggccctcatcaa

SEQ ID NO: 117696 - DNA, 78 bp, Homo sapiens
actttgctaggcttgccaatgccaacaatattttcagcagaaactttgaactcatactcaaggccctcatcaagccca

SEQ ID NO: 117697 - DNA, 75 bp, Homo sapiens
ccaatgccaacaatattttcagcagaaactttgaactcatactcaaggccctcatcaagcccagttgttttgaat

SEQ ID NO: 117698 - DNA, 73 bp, Homo sapiens
aacaatattttcagcagaaactttgaactcatactcaaggccctcatcaagcccagttgttttgaatttggtg

SEQ ID NO: 117699 - DNA, 75 bp, Homo sapiens
ttttcagcagaaactttgaactcatactcaaggccctcatcaagcccagttgttttgaatttggtgtcctgaatg

SEQ ID NO: 117700 - DNA, 73 bp, Homo sapiens
ttgaactcatactcaaggccctcatcaagcccagttgttttgaatttggtgtcctgaatgggggtcttattta

SEQ ID NO: 117701 - DNA, 71 bp, Homo sapiens
atactcaaggccctcatcaagcccagttgttttgaatttggtgtcctgaatgggggtcttatttaacttga

SEQ ID NO: 117702 - DNA, 70 bp, Homo sapiens
ctcatcaagcccagttgttttgaatttggtgtcctgaatgggggtcttatttaacttgacccataaaata

SEQ ID NO: 117703 - DNA, 67 bp, Homo sapiens
ccagttgttttgaatttggtgtcctgaatgggggtcttatttaacttgacccataaaatactgttct

SEQ ID NO: 117704 - DNA, 70 bp, Homo sapiens
tgtcctgaatgggggtcttatttaacttgacccataaaatactgttcttttctttctgttcaagatggta

SEQ ID NO: 117705 - DNA, 68 bp, Homo sapiens
ggggtcttatttaacttgacccataaaatactgttcttttctttctgttcaagatggtagccaataat

SEQ ID NO: 117706 - DNA, 71 bp, Homo sapiens
ttaacttgacccataaaatactgttcttttctttctgttcaagatggtagccaataattttggtgcctcca

SEQ ID NO: 117707 - DNA, 74 bp, Homo sapiens
ttgacccataaaatactgttcttttctttctgttcaagatggtagccaataattttggtgcctccatcattcac

SEQ ID NO: 117708 - DNA, 77 bp, Homo sapiens
aaatactgttcttttctttctgttcaagatggtagccaataattttggtgcctccatcattcactggctcatgccat

SEQ ID NO: 117709 - DNA, 84 bp, Homo sapiens
tttctttctgttcaagatggtagccaataattttggtgcctccatcattcactggctcatgccattgcacaagcatctgatctt

SEQ ID NO: 117710 - DNA, 89 bp, Homo sapiens
ttcaagatggtagccaataattttggtgcctccatcattcactggctcatgccattgcacaagcatctgatcttttgagattgatgtca

SEQ ID NO: 117711 - DNA, 84 bp, Homo sapiens
atcattcactggctcatgccattgcacaagcatctgatcttttgagattgatgtcacaaaaggagttccaggtggtccaggttc

SEQ ID NO: 117712 - DNA, 81 bp, Homo sapiens
tggctcatgccattgcacaagcatctgatcttttgagattgatgtcacaaaaggagttccaggtggtccaggttctttaaa

SEQ ID NO: 117713 - DNA, 76 bp, Homo sapiens
catctgatcttttgagattgatgtcacaaaaggagttccaggtggtccaggttctttaaatggatattgtacaata

SEQ ID NO: 117714 - DNA, 72 bp, Homo sapiens
atcttttgagattgatgtcacaaaaggagttccaggtggtccaggttctttaaatggatattgtacaataac

SEQ ID NO: 117715 - DNA, 72 bp, Homo sapiens
attgatgtcacaaaaggagttccaggtggtccaggttctttaaatggatattgtacaataactgccttagaa

SEQ ID NO: 117716 - DNA, 71 bp, Homo sapiens
ggtggtccaggttctttaaatggatattgtacaataactgccttagaatccagtggggcactttttccata

SEQ ID NO: 117717 - DNA, 71 bp, Homo sapiens
gttctttaaatggatattgtacaataactgccttagaatccagtggggcactttttccatacctgttttca

SEQ ID NO: 117718 - DNA, 72 bp, Homo sapiens
ttaaatggatattgtacaataactgccttagaatccagtggggcactttttccatacctgttttcagcaaaa

SEQ ID NO: 117719 - DNA, 70 bp, Homo sapiens
attgtacaataactgccttagaatccagtggggcactttttccatacctgttttcagcaaaaattctaaa

SEQ ID NO: 117720 - DNA, 69 bp, Homo sapiens
aactgccttagaatccagtggggcactttttccatacctgttttcagcaaaaattctaaactggtactc

SEQ ID NO: 117721 - DNA, 68 bp, Homo sapiens
atccagtggggcactttttccatacctgttttcagcaaaaattctaaactggtactccgtgcctgttt

SEQ ID NO: 117722 - DNA, 67 bp, Homo sapiens
ctttttccatacctgttttcagcaaaaattctaaactggtactccgtgcctgttttcagtttggtta

SEQ ID NO: 117723 - DNA, 67 bp, Homo sapiens
ccatacctgttttcagcaaaaattctaaactggtactccgtgcctgttttcagtttggttattttaa

SEQ ID NO: 117724 - DNA, 69 bp, Homo sapiens
cagcaaaaattctaaactggtactccgtgcctgttttcagtttggttattttaattgttgttcttgcaa

SEQ ID NO: 117725 - DNA, 69 bp, Homo sapiens
aattctaaactggtactccgtgcctgttttcagtttggttattttaattgttgttcttgcaactgttgc

SEQ ID NO: 117726 - DNA, 75 bp, Homo sapiens
tggtactccgtgcctgttttcagtttggttattttaattgttgttcttgcaactgttgctgataccatgtgccaa

SEQ ID NO: 117727 - DNA, 76 bp, Homo sapiens
tttggttattttaattgttgttcttgcaactgttgctgataccatgtgccaagtggtggtggttgtatctcgcttc

SEQ ID NO: 117728 - DNA, 79 bp, Homo sapiens
ttttaattgttgttcttgcaactgttgctgataccatgtgccaagtggtggtggttgtatctcgcttctctacaatgta

SEQ ID NO: 117729 - DNA, 80 bp, Homo sapiens
aactgttgctgataccatgtgccaagtggtggtggttgtatctcgcttctctacaatgtagttgcttatttggcagccac

SEQ ID NO: 117730 - DNA, 79 bp, Homo sapiens
ataccatgtgccaagtggtggtggttgtatctcgcttctctacaatgtagttgcttatttggcagccaccagtataggc

SEQ ID NO: 117731 - DNA, 76 bp, Homo sapiens
aagtggtggtggttgtatctcgcttctctacaatgtagttgcttatttggcagccaccagtataggctggaggttc

SEQ ID NO: 117732 - DNA, 79 bp, Homo sapiens
gttgtatctcgcttctctacaatgtagttgcttatttggcagccaccagtataggctggaggttcccaagatatgacta

SEQ ID NO: 117733 - DNA, 78 bp, Homo sapiens
atctcgcttctctacaatgtagttgcttatttggcagccaccagtataggctggaggttcccaagatatgactacaaa

SEQ ID NO: 117734 - DNA, 78 bp, Homo sapiens
agttgcttatttggcagccaccagtataggctggaggttcccaagatatgactacaaagtctgcactaacttcatcaa

SEQ ID NO: 117735 - DNA, 77 bp, Homo sapiens
ttggcagccaccagtataggctggaggttcccaagatatgactacaaagtctgcactaacttcatcaaaccgaactg

SEQ ID NO: 117736 - DNA, 74 bp, Homo sapiens
ctggaggttcccaagatatgactacaaagtctgcactaacttcatcaaaccgaactgggccaactggaggtcca

SEQ ID NO: 117737 - DNA, 72 bp, Homo sapiens
atatgactacaaagtctgcactaacttcatcaaaccgaactgggccaactggaggtccaggcttttctaaaa

SEQ ID NO: 117738 - DNA, 69 bp, Homo sapiens
ctaacttcatcaaaccgaactgggccaactggaggtccaggcttttctaaaacgataacactgagattt

SEQ ID NO: 117739 - DNA, 72 bp, Homo sapiens
ttcatcaaaccgaactgggccaactggaggtccaggcttttctaaaacgataacactgagattttctgttgc

SEQ ID NO: 117740 - DNA, 75 bp, Homo sapiens
tgggccaactggaggtccaggcttttctaaaacgataacactgagattttctgttgctgtgcctgcactatttgt

SEQ ID NO: 117741 - DNA, 75 bp, Homo sapiens
tggaggtccaggcttttctaaaacgataacactgagattttctgttgctgtgcctgcactatttgttgccgttac

SEQ ID NO: 117742 - DNA, 73 bp, Homo sapiens
gcttttctaaaacgataacactgagattttctgttgctgtgcctgcactatttgttgccgttacggtgtattt

SEQ ID NO: 117743 - DNA, 74 bp, Homo sapiens
tctaaaacgataacactgagattttctgttgctgtgcctgcactatttgttgccgttacggtgtattttccaaa

SEQ ID NO: 117744 - DNA, 75 bp, Homo sapiens
taacactgagattttctgttgctgtgcctgcactatttgttgccgttacggtgtattttccaaagtcatctttgt

SEQ ID NO: 117745 - DNA, 72 bp, Homo sapiens
tgcctgcactatttgttgccgttacggtgtattttccaaagtcatctttgttaccttctttaatgtgcaaaa

SEQ ID NO: 117746 - DNA, 69 bp, Homo sapiens
cactatttgttgccgttacggtgtattttccaaagtcatctttgttaccttctttaatgtgcaaaacag

SEQ ID NO: 117747 - DNA, 70 bp, Homo sapiens
ttacggtgtattttccaaagtcatctttgttaccttctttaatgtgcaaaacagttgaggtagctgtttc

SEQ ID NO: 117748 - DNA, 70 bp, Homo sapiens
gtattttccaaagtcatctttgttaccttctttaatgtgcaaaacagttgaggtagctgtttcttcaacg

SEQ ID NO: 117749 - DNA, 70 bp, Homo sapiens
agtcatctttgttaccttctttaatgtgcaaaacagttgaggtagctgtttcttcaacgtttactcttgt

SEQ ID NO: 117750 - DNA, 71 bp, Homo sapiens
aaaacagttgaggtagctgtttcttcaacgtttactcttgttgtctgtttaagaggctcaccatctttgac

SEQ ID NO: 117751 - DNA, 72 bp, Homo sapiens
gtagctgtttcttcaacgtttactcttgttgtctgtttaagaggctcaccatctttgacccaagaaatgtta

SEQ ID NO: 117752 - DNA, 70 bp, Homo sapiens
tttcttcaacgtttactcttgttgtctgtttaagaggctcaccatctttgacccaagaaatgttaggtct

SEQ ID NO: 117753 - DNA, 72 bp, Homo sapiens
ttactcttgttgtctgtttaagaggctcaccatctttgacccaagaaatgttaggtcttggtcggcctataa

SEQ ID NO: 117754 - DNA, 71 bp, Homo sapiens
ttgtctgtttaagaggctcaccatctttgacccaagaaatgttaggtcttggtcggcctataactggaatt

SEQ ID NO: 117755 - DNA, 69 bp, Homo sapiens
accatctttgacccaagaaatgttaggtcttggtcggcctataactggaatttctattttaagatcttc

SEQ ID NO: 117756 - DNA, 71 bp, Homo sapiens
aagaaatgttaggtcttggtcggcctataactggaatttctattttaagatcttctccagcttggatacta

SEQ ID NO: 117757 - DNA, 71 bp, Homo sapiens
ctggaatttctattttaagatcttctccagcttggatactatatgtgttaaatggtaactttaaactaggc

SEQ ID NO: 117758 - DNA, 73 bp, Homo sapiens
tattttaagatcttctccagcttggatactatatgtgttaaatggtaactttaaactaggctgtatagtcaag

SEQ ID NO: 117759 - DNA, 74 bp, Homo sapiens
taagatcttctccagcttggatactatatgtgttaaatggtaactttaaactaggctgtatagtcaagtccttg

SEQ ID NO: 117760 - DNA, 74 bp, Homo sapiens
agcttggatactatatgtgttaaatggtaactttaaactaggctgtatagtcaagtccttggctatgacaggaa

SEQ ID NO: 117761 - DNA, 73 bp, Homo sapiens
tactatatgtgttaaatggtaactttaaactaggctgtatagtcaagtccttggctatgacaggaacacccaa

SEQ ID NO: 117762 - DNA, 72 bp, Homo sapiens
aaatggtaactttaaactaggctgtatagtcaagtccttggctatgacaggaacacccaacactcttggatc

SEQ ID NO: 117763 - DNA, 72 bp, Homo sapiens
taactttaaactaggctgtatagtcaagtccttggctatgacaggaacacccaacactcttggatcgctttt

SEQ ID NO: 117764 - DNA, 76 bp, Homo sapiens
taggctgtatagtcaagtccttggctatgacaggaacacccaacactcttggatcgctttttcctttctcattata

SEQ ID NO: 117765 - DNA, 75 bp, Homo sapiens
tagtcaagtccttggctatgacaggaacacccaacactcttggatcgctttttcctttctcattataagccttga

SEQ ID NO: 117766 - DNA, 74 bp, Homo sapiens
ctatgacaggaacacccaacactcttggatcgctttttcctttctcattataagccttgacacggaactgatat

SEQ ID NO: 117767 - DNA, 73 bp, Homo sapiens
aacacccaacactcttggatcgctttttcctttctcattataagccttgacacggaactgatattcttgtcca

SEQ ID NO: 117768 - DNA, 76 bp, Homo sapiens
tttctcattataagccttgacacggaactgatattcttgtccagaactcaaaccagtaacaactgcattacagact

SEQ ID NO: 117769 - DNA, 75 bp, Homo sapiens
attataagccttgacacggaactgatattcttgtccagaactcaaaccagtaacaactgcattacagactttgga

SEQ ID NO: 117770 - DNA, 77 bp, Homo sapiens
aactgatattcttgtccagaactcaaaccagtaacaactgcattacagactttggattcagccacaatgctccattt

SEQ ID NO: 117771 - DNA, 76 bp, Homo sapiens
ttgtccagaactcaaaccagtaacaactgcattacagactttggattcagccacaatgctccatttttcagttcct

SEQ ID NO: 117772 - DNA, 77 bp, Homo sapiens
acaactgcattacagactttggattcagccacaatgctccatttttcagttcctttgggctgcatttcaacaacgta

SEQ ID NO: 117773 - DNA, 74 bp, Homo sapiens
attacagactttggattcagccacaatgctccatttttcagttcctttgggctgcatttcaacaacgtacccca

SEQ ID NO: 117774 - DNA, 76 bp, Homo sapiens
tttggattcagccacaatgctccatttttcagttcctttgggctgcatttcaacaacgtaccccaggactctgcta

SEQ ID NO: 117775 - DNA, 76 bp, Homo sapiens
aatgctccatttttcagttcctttgggctgcatttcaacaacgtaccccaggactctgctaccgccatcatgttca

SEQ ID NO: 117776 - DNA, 72 bp, Homo sapiens
atttttcagttcctttgggctgcatttcaacaacgtaccccaggactctgctaccgccatcatgttcaggtt

SEQ ID NO: 117777 - DNA, 78 bp, Homo sapiens
catttcaacaacgtaccccaggactctgctaccgccatcatgttcaggtttctcccacataagtgatgcactggtctg

SEQ ID NO: 117778 - DNA, 77 bp, Homo sapiens
aacaacgtaccccaggactctgctaccgccatcatgttcaggtttctcccacataagtgatgcactggtctgggaca

SEQ ID NO: 117779 - DNA, 81 bp, Homo sapiens
aggactctgctaccgccatcatgttcaggtttctcccacataagtgatgcactggtctgggacacatcagtgagtgtaacc

SEQ ID NO: 117780 - DNA, 79 bp, Homo sapiens
ctaccgccatcatgttcaggtttctcccacataagtgatgcactggtctgggacacatcagtgagtgtaacctttcctg

SEQ ID NO: 117781 - DNA, 76 bp, Homo sapiens
atgttcaggtttctcccacataagtgatgcactggtctgggacacatcagtgagtgtaacctttcctggtggggaa

SEQ ID NO: 117782 - DNA, 74 bp, Homo sapiens
aggtttctcccacataagtgatgcactggtctgggacacatcagtgagtgtaacctttcctggtggggaaggag

SEQ ID NO: 117783 - DNA, 78 bp, Homo sapiens
acataagtgatgcactggtctgggacacatcagtgagtgtaacctttcctggtggggaaggaggttcagcagctttca

SEQ ID NO: 117784 - DNA, 76 bp, Homo sapiens
actggtctgggacacatcagtgagtgtaacctttcctggtggggaaggaggttcagcagctttcacggcatcaaca

SEQ ID NO: 117785 - DNA, 73 bp, Homo sapiens
agtgagtgtaacctttcctggtggggaaggaggttcagcagctttcacggcatcaacagtttccactggaaca

SEQ ID NO: 117786 - DNA, 72 bp, Homo sapiens
tttcctggtggggaaggaggttcagcagctttcacggcatcaacagtttccactggaacaccaactccaaat

SEQ ID NO: 117787 - DNA, 75 bp, Homo sapiens
gggaaggaggttcagcagctttcacggcatcaacagtttccactggaacaccaactccaaattcattttcagcca

SEQ ID NO: 117788 - DNA, 79 bp, Homo sapiens
ttcagcagctttcacggcatcaacagtttccactggaacaccaactccaaattcattttcagccatgactctgaagtaa

SEQ ID NO: 117789 - DNA, 73 bp, Homo sapiens
cactggaacaccaactccaaattcattttcagccatgactctgaagtaataaatggctccttctgtaaggttt

SEQ ID NO: 117790 - DNA, 72 bp, Homo sapiens
ccaactccaaattcattttcagccatgactctgaagtaataaatggctccttctgtaaggttttccacttta

SEQ ID NO: 117791 - DNA, 70 bp, Homo sapiens
ccaaattcattttcagccatgactctgaagtaataaatggctccttctgtaaggttttccactttaaaac

SEQ ID NO: 117792 - DNA, 70 bp, Homo sapiens
ctgaagtaataaatggctccttctgtaaggttttccactttaaaacttgttttgctgcatttactactca

SEQ ID NO: 117793 - DNA, 70 bp, Homo sapiens
ccttctgtaaggttttccactttaaaacttgttttgctgcatttactactcacattagcatacgcttttc

SEQ ID NO: 117794 - DNA, 70 bp, Homo sapiens
aaggttttccactttaaaacttgttttgctgcatttactactcacattagcatacgcttttctggttgac

SEQ ID NO: 117795 - DNA, 77 bp, Homo sapiens
taaaacttgttttgctgcatttactactcacattagcatacgcttttctggttgactcacgtttgtcaatcacatag

SEQ ID NO: 117796 - DNA, 78 bp, Homo sapiens
tttgctgcatttactactcacattagcatacgcttttctggttgactcacgtttgtcaatcacatagttcttgacctt

SEQ ID NO: 117797 - DNA, 75 bp, Homo sapiens
atttactactcacattagcatacgcttttctggttgactcacgtttgtcaatcacatagttcttgacctttgccc

SEQ ID NO: 117798 - DNA, 78 bp, Homo sapiens
acattagcatacgcttttctggttgactcacgtttgtcaatcacatagttcttgacctttgcccctccatcaatgatg

SEQ ID NO: 117799 - DNA, 76 bp, Homo sapiens
atacgcttttctggttgactcacgtttgtcaatcacatagttcttgacctttgcccctccatcaatgatgggtggc

SEQ ID NO: 117800 - DNA, 78 bp, Homo sapiens
ttctggttgactcacgtttgtcaatcacatagttcttgacctttgcccctccatcaatgatgggtggctcccatacca

SEQ ID NO: 117801 - DNA, 76 bp, Homo sapiens
acgtttgtcaatcacatagttcttgacctttgcccctccatcaatgatgggtggctcccataccaggaaggcagaa

SEQ ID NO: 117802 - DNA, 77 bp, Homo sapiens
aatcacatagttcttgacctttgcccctccatcaatgatgggtggctcccataccaggaaggcagaatcttttctca

SEQ ID NO: 117803 - DNA, 74 bp, Homo sapiens
agttcttgacctttgcccctccatcaatgatgggtggctcccataccaggaaggcagaatcttttctcacttct

SEQ ID NO: 117804 - DNA, 76 bp, Homo sapiens
tttgcccctccatcaatgatgggtggctcccataccaggaaggcagaatcttttctcacttctttgactgccaaat

SEQ ID NO: 117805 - DNA, 74 bp, Homo sapiens
taccaggaaggcagaatcttttctcacttctttgactgccaaattctgtggtggtcctggagtgtcaagaactt

SEQ ID NO: 117806 - DNA, 75 bp, Homo sapiens
ttttctcacttctttgactgccaaattctgtggtggtcctggagtgtcaagaactttcacagttacaaaagcaga

SEQ ID NO: 117807 - DNA, 76 bp, Homo sapiens
ttctttgactgccaaattctgtggtggtcctggagtgtcaagaactttcacagttacaaaagcagactttgatcca

SEQ ID NO: 117808 - DNA, 74 bp, Homo sapiens
aaattctgtggtggtcctggagtgtcaagaactttcacagttacaaaagcagactttgatccactgctgttttc

SEQ ID NO: 117809 - DNA, 74 bp, Homo sapiens
tggtcctggagtgtcaagaactttcacagttacaaaagcagactttgatccactgctgttttccaacttaagaa

SEQ ID NO: 117810 - DNA, 72 bp, Homo sapiens
agtgtcaagaactttcacagttacaaaagcagactttgatccactgctgttttccaacttaagaatgtattt

SEQ ID NO: 117811 - DNA, 74 bp, Homo sapiens
aactttcacagttacaaaagcagactttgatccactgctgttttccaacttaagaatgtattttccagcatcat

SEQ ID NO: 117812 - DNA, 77 bp, Homo sapiens
ttacaaaagcagactttgatccactgctgttttccaacttaagaatgtattttccagcatcatttctatcacagtta

SEQ ID NO: 117813 - DNA, 77 bp, Homo sapiens
cactgctgttttccaacttaagaatgtattttccagcatcatttctatcacagttatctattgatagttgggtatag

SEQ ID NO: 117814 - DNA, 75 bp, Homo sapiens
tccaacttaagaatgtattttccagcatcatttctatcacagttatctattgatagttgggtatagtttactccc

SEQ ID NO: 117815 - DNA, 74 bp, Homo sapiens
gaatgtattttccagcatcatttctatcacagttatctattgatagttgggtatagtttactcccttttcaatt

SEQ ID NO: 117816 - DNA, 75 bp, Homo sapiens
tccagcatcatttctatcacagttatctattgatagttgggtatagtttactcccttttcaatttggaccttatc

SEQ ID NO: 117817 - DNA, 75 bp, Homo sapiens
catcatttctatcacagttatctattgatagttgggtatagtttactcccttttcaatttggaccttatctgtga

SEQ ID NO: 117818 - DNA, 71 bp, Homo sapiens
cacagttatctattgatagttgggtatagtttactcccttttcaatttggaccttatctgtgaattcacct

SEQ ID NO: 117819 - DNA, 72 bp, Homo sapiens
tattgatagttgggtatagtttactcccttttcaatttggaccttatctgtgaattcaccttcctctcgaga

SEQ ID NO: 117820 - DNA, 71 bp, Homo sapiens
ttgggtatagtttactcccttttcaatttggaccttatctgtgaattcaccttcctctcgagaccaagtga

SEQ ID NO: 117821 - DNA, 73 bp, Homo sapiens
tttactcccttttcaatttggaccttatctgtgaattcaccttcctctcgagaccaagtgatctcaggcgttg

SEQ ID NO: 117822 - DNA, 73 bp, Homo sapiens
ttttcaatttggaccttatctgtgaattcaccttcctctcgagaccaagtgatctcaggcgttggacgacctt

SEQ ID NO: 117823 - DNA, 77 bp, Homo sapiens
cttatctgtgaattcaccttcctctcgagaccaagtgatctcaggcgttggacgacctttgaatggaatgtgaattc

SEQ ID NO: 117824 - DNA, 78 bp, Homo sapiens
aattcaccttcctctcgagaccaagtgatctcaggcgttggacgacctttgaatggaatgtgaattctggcagatcca

SEQ ID NO: 117825 - DNA, 80 bp, Homo sapiens
ttcctctcgagaccaagtgatctcaggcgttggacgacctttgaatggaatgtgaattctggcagatccaccagctctta

SEQ ID NO: 117826 - DNA, 76 bp, Homo sapiens
atctcaggcgttggacgacctttgaatggaatgtgaattctggcagatccaccagctcttacaacaattccttttc

SEQ ID NO: 117827 - DNA, 74 bp, Homo sapiens
gttggacgacctttgaatggaatgtgaattctggcagatccaccagctcttacaacaattccttttcttaattc

SEQ ID NO: 117828 - DNA, 76 bp, Homo sapiens
ttgaatggaatgtgaattctggcagatccaccagctcttacaacaattccttttcttaattcggagtcaaggtcaa

SEQ ID NO: 117829 - DNA, 74 bp, Homo sapiens
aatgtgaattctggcagatccaccagctcttacaacaattccttttcttaattcggagtcaaggtcaagttcag

SEQ ID NO: 117830 - DNA, 71 bp, Homo sapiens
agatccaccagctcttacaacaattccttttcttaattcggagtcaaggtcaagttcaggtgcttcaagtt

SEQ ID NO: 117831 - DNA, 71 bp, Homo sapiens
tacaacaattccttttcttaattcggagtcaaggtcaagttcaggtgcttcaagtttatcttctggtttca

SEQ ID NO: 117832 - DNA, 71 bp, Homo sapiens
aggtgcttcaagtttatcttctggtttcacagtaccaggaactgatgtagcctcacctaaaccaactttgt

SEQ ID NO: 117833 - DNA, 72 bp, Homo sapiens
aagtttatcttctggtttcacagtaccaggaactgatgtagcctcacctaaaccaactttgttgagggcaca

SEQ ID NO: 117834 - DNA, 72 bp, Homo sapiens
acagtaccaggaactgatgtagcctcacctaaaccaactttgttgagggcacagactcgtattttatactct

SEQ ID NO: 117835 - DNA, 74 bp, Homo sapiens
aactgatgtagcctcacctaaaccaactttgttgagggcacagactcgtattttatactcttggtgttcagtga

SEQ ID NO: 117836 - DNA, 76 bp, Homo sapiens
tgttgagggcacagactcgtattttatactcttggtgttcagtgagttttgaaatttcaaatcgagtgactctcag

SEQ ID NO: 117837 - DNA, 75 bp, Homo sapiens
acagactcgtattttatactcttggtgttcagtgagttttgaaatttcaaatcgagtgactctcaggccagtctg

SEQ ID NO: 117838 - DNA, 75 bp, Homo sapiens
ttatactcttggtgttcagtgagttttgaaatttcaaatcgagtgactctcaggccagtctgtggagtaactatt

SEQ ID NO: 117839 - DNA, 78 bp, Homo sapiens
tgttcagtgagttttgaaatttcaaatcgagtgactctcaggccagtctgtggagtaactatttgccattcttcttca

SEQ ID NO: 117840 - DNA, 77 bp, Homo sapiens
gttttgaaatttcaaatcgagtgactctcaggccagtctgtggagtaactatttgccattcttcttcatctgcttta

SEQ ID NO: 117841 - DNA, 77 bp, Homo sapiens
aaatttcaaatcgagtgactctcaggccagtctgtggagtaactatttgccattcttcttcatctgctttacagatt

SEQ ID NO: 117842 - DNA, 81 bp, Homo sapiens
atcgagtgactctcaggccagtctgtggagtaactatttgccattcttcttcatctgctttacagatttctactacatatc

SEQ ID NO: 117843 - DNA, 79 bp, Homo sapiens
aggccagtctgtggagtaactatttgccattcttcttcatctgctttacagatttctactacatatcccaagatctcac

SEQ ID NO: 117844 - DNA, 82 bp, Homo sapiens
tatttgccattcttcttcatctgctttacagatttctactacatatcccaagatctcactgccgccatcatagatgggttta

SEQ ID NO: 117845 - DNA, 81 bp, Homo sapiens
tgctttacagatttctactacatatcccaagatctcactgccgccatcatagatgggtttaccccaggcaagtgtgattga

SEQ ID NO: 117846 - DNA, 76 bp, Homo sapiens
ccgccatcatagatgggtttaccccaggcaagtgtgattgaatttttagtggtgtctacaatgtgtgcattggtag

SEQ ID NO: 117847 - DNA, 75 bp, Homo sapiens
atcatagatgggtttaccccaggcaagtgtgattgaatttttagtggtgtctacaatgtgtgcattggtaggtgg

SEQ ID NO: 117848 - DNA, 74 bp, Homo sapiens
aatttttagtggtgtctacaatgtgtgcattggtaggtgggccaggtttgaacacaggatcacaggctttataa

SEQ ID NO: 117849 - DNA, 76 bp, Homo sapiens
ttagtggtgtctacaatgtgtgcattggtaggtgggccaggtttgaacacaggatcacaggctttataataaactg

SEQ ID NO: 117850 - DNA, 77 bp, Homo sapiens
tacaatgtgtgcattggtaggtgggccaggtttgaacacaggatcacaggctttataataaactgtagctggacttg

SEQ ID NO: 117851 - DNA, 71 bp, Homo sapiens
attggtaggtgggccaggtttgaacacaggatcacaggctttataataaactgtagctggacttggttccc

SEQ ID NO: 117852 - DNA, 75 bp, Homo sapiens
gccaggtttgaacacaggatcacaggctttataataaactgtagctggacttggttccccaactccagcagcatt

SEQ ID NO: 117853 - DNA, 78 bp, Homo sapiens
tttgaacacaggatcacaggctttataataaactgtagctggacttggttccccaactccagcagcattttctgcaga

SEQ ID NO: 117854 - DNA, 76 bp, Homo sapiens
atcacaggctttataataaactgtagctggacttggttccccaactccagcagcattttctgcagagaccctgaat

SEQ ID NO: 117855 - DNA, 80 bp, Homo sapiens
tataataaactgtagctggacttggttccccaactccagcagcattttctgcagagaccctgaattcatactcatgatct

SEQ ID NO: 117856 - DNA, 80 bp, Homo sapiens
aactgtagctggacttggttccccaactccagcagcattttctgcagagaccctgaattcatactcatgatcttctgtta

SEQ ID NO: 117857 - DNA, 83 bp, Homo sapiens
aactccagcagcattttctgcagagaccctgaattcatactcatgatcttctgttaatcctgtcactcttagacgcaaatctg

SEQ ID NO: 117858 - DNA, 83 bp, Homo sapiens
agcattttctgcagagaccctgaattcatactcatgatcttctgttaatcctgtcactcttagacgcaaatctgtaatgcggc

SEQ ID NO: 117859 - DNA, 79 bp, Homo sapiens
tactcatgatcttctgttaatcctgtcactcttagacgcaaatctgtaatgcggcgtttattacattttatccatcgaa

SEQ ID NO: 117860 - DNA, 77 bp, Homo sapiens
ttctgttaatcctgtcactcttagacgcaaatctgtaatgcggcgtttattacattttatccatcgaatgccacttc

SEQ ID NO: 117861 - DNA, 77 bp, Homo sapiens
aatcctgtcactcttagacgcaaatctgtaatgcggcgtttattacattttatccatcgaatgccacttctgtctct

SEQ ID NO: 117862 - DNA, 77 bp, Homo sapiens
tcttagacgcaaatctgtaatgcggcgtttattacattttatccatcgaatgccacttctgtctcttttctctacaa

SEQ ID NO: 117863 - DNA, 76 bp, Homo sapiens
gcgtttattacattttatccatcgaatgccacttctgtctcttttctctacaatgtaaccaataatctcacttcca

SEQ ID NO: 117864 - DNA, 78 bp, Homo sapiens
ttacattttatccatcgaatgccacttctgtctcttttctctacaatgtaaccaataatctcacttccaccatcacta

SEQ ID NO: 117865 - DNA, 77 bp, Homo sapiens
atcgaatgccacttctgtctcttttctctacaatgtaaccaataatctcacttccaccatcactatctggacggttc

SEQ ID NO: 117866 - DNA, 75 bp, Homo sapiens
acttctgtctcttttctctacaatgtaaccaataatctcacttccaccatcactatctggacggttccaacagac

SEQ ID NO: 117867 - DNA, 76 bp, Homo sapiens
tcttttctctacaatgtaaccaataatctcacttccaccatcactatctggacggttccaacagacggtcatggag

SEQ ID NO: 117868 - DNA, 77 bp, Homo sapiens
caatgtaaccaataatctcacttccaccatcactatctggacggttccaacagacggtcatggagtctttggcaata

SEQ ID NO: 117869 - DNA, 76 bp, Homo sapiens
taaccaataatctcacttccaccatcactatctggacggttccaacagacggtcatggagtctttggcaatatttg

SEQ ID NO: 117870 - DNA, 75 bp, Homo sapiens
acttccaccatcactatctggacggttccaacagacggtcatggagtctttggcaatatttgtgacttccaagct

SEQ ID NO: 117871 - DNA, 74 bp, Homo sapiens
accatcactatctggacggttccaacagacggtcatggagtctttggcaatatttgtgacttccaagctttttg

SEQ ID NO: 117872 - DNA, 71 bp, Homo sapiens
acggttccaacagacggtcatggagtctttggcaatatttgtgacttccaagctttttggtggtccaggaa

SEQ ID NO: 117873 - DNA, 74 bp, Homo sapiens
aacagacggtcatggagtctttggcaatatttgtgacttccaagctttttggtggtccaggaagcacaaatgga

SEQ ID NO: 117874 - DNA, 73 bp, Homo sapiens
tctttggcaatatttgtgacttccaagctttttggtggtccaggaagcacaaatggatttttcattagtactg

SEQ ID NO: 117875 - DNA, 73 bp, Homo sapiens
aagctttttggtggtccaggaagcacaaatggatttttcattagtactggtgcagattccaaaggctctccaa

SEQ ID NO: 117876 - DNA, 78 bp, Homo sapiens
agcacaaatggatttttcattagtactggtgcagattccaaaggctctccaacaccatatttgttgacagccattata

SEQ ID NO: 117877 - DNA, 76 bp, Homo sapiens
attagtactggtgcagattccaaaggctctccaacaccatatttgttgacagccattatacggaaaacatattcat

SEQ ID NO: 117878 - DNA, 77 bp, Homo sapiens
tgcagattccaaaggctctccaacaccatatttgttgacagccattatacggaaaacatattcattaccttctaaga

SEQ ID NO: 117879 - DNA, 72 bp, Homo sapiens
aaaggctctccaacaccatatttgttgacagccattatacggaaaacatattcattaccttctaagagtttg

SEQ ID NO: 117880 - DNA, 71 bp, Homo sapiens
acagccattatacggaaaacatattcattaccttctaagagtttggtaactttcagagaattggtcacaac

SEQ ID NO: 117881 - DNA, 71 bp, Homo sapiens
acggaaaacatattcattaccttctaagagtttggtaactttcagagaattggtcacaacttctgaagcaa

SEQ ID NO: 117882 - DNA, 73 bp, Homo sapiens
atattcattaccttctaagagtttggtaactttcagagaattggtcacaacttctgaagcaacaacagtccag

SEQ ID NO: 117883 - DNA, 73 bp, Homo sapiens
accttctaagagtttggtaactttcagagaattggtcacaacttctgaagcaacaacagtccaggcaagtcga

SEQ ID NO: 117884 - DNA, 73 bp, Homo sapiens
agtttggtaactttcagagaattggtcacaacttctgaagcaacaacagtccaggcaagtcgactggtttctc

SEQ ID NO: 117885 - DNA, 76 bp, Homo sapiens
attggtcacaacttctgaagcaacaacagtccaggcaagtcgactggtttctcgcttttcaacaacatagtgagaa

SEQ ID NO: 117886 - DNA, 77 bp, Homo sapiens
aacaacagtccaggcaagtcgactggtttctcgcttttcaacaacatagtgagaaatgtcactgccaccatcttgaa

SEQ ID NO: 117887 - DNA, 78 bp, Homo sapiens
caagtcgactggtttctcgcttttcaacaacatagtgagaaatgtcactgccaccatcttgaagtggtggagaccatg

SEQ ID NO: 117888 - DNA, 76 bp, Homo sapiens
actggtttctcgcttttcaacaacatagtgagaaatgtcactgccaccatcttgaagtggtggagaccatgttaaa

SEQ ID NO: 117889 - DNA, 78 bp, Homo sapiens
ttttcaacaacatagtgagaaatgtcactgccaccatcttgaagtggtggagaccatgttaaagagcatttttcagaa

SEQ ID NO: 117890 - DNA, 79 bp, Homo sapiens
aacatagtgagaaatgtcactgccaccatcttgaagtggtggagaccatgttaaagagcatttttcagaagtgactcca

SEQ ID NO: 117891 - DNA, 74 bp, Homo sapiens
atcttgaagtggtggagaccatgttaaagagcatttttcagaagtgactccagtaacctggactggcccttctg

SEQ ID NO: 117892 - DNA, 73 bp, Homo sapiens
agaccatgttaaagagcatttttcagaagtgactccagtaacctggactggcccttctggaggtcctggtcta

SEQ ID NO: 117893 - DNA, 73 bp, Homo sapiens
taaagagcatttttcagaagtgactccagtaacctggactggcccttctggaggtcctggtctatctaatact

SEQ ID NO: 117894 - DNA, 71 bp, Homo sapiens
tttttcagaagtgactccagtaacctggactggcccttctggaggtcctggtctatctaatacttttacat

SEQ ID NO: 117895 - DNA, 70 bp, Homo sapiens
aagtgactccagtaacctggactggcccttctggaggtcctggtctatctaatacttttacatttactgg

SEQ ID NO: 117896 - DNA, 73 bp, Homo sapiens
tggcccttctggaggtcctggtctatctaatacttttacatttactgggaatgacttagaacctgcaacattg

SEQ ID NO: 117897 - DNA, 72 bp, Homo sapiens
aggtcctggtctatctaatacttttacatttactgggaatgacttagaacctgcaacattggaagctcttaa

SEQ ID NO: 117898 - DNA, 73 bp, Homo sapiens
cttttacatttactgggaatgacttagaacctgcaacattggaagctcttaaaatatactgcccaccatcaat

SEQ ID NO: 117899 - DNA, 74 bp, Homo sapiens
acatttactgggaatgacttagaacctgcaacattggaagctcttaaaatatactgcccaccatcaattctaat

SEQ ID NO: 117900 - DNA, 76 bp, Homo sapiens
aatgacttagaacctgcaacattggaagctcttaaaatatactgcccaccatcaattctaattgcatcttttacaa

SEQ ID NO: 117901 - DNA, 75 bp, Homo sapiens
ctgcaacattggaagctcttaaaatatactgcccaccatcaattctaattgcatcttttacaataagtaaagcct

SEQ ID NO: 117902 - DNA, 74 bp, Homo sapiens
ggaagctcttaaaatatactgcccaccatcaattctaattgcatcttttacaataagtaaagccttgaaatctg

SEQ ID NO: 117903 - DNA, 74 bp, Homo sapiens
ctcttaaaatatactgcccaccatcaattctaattgcatcttttacaataagtaaagccttgaaatctgtgttc

SEQ ID NO: 117904 - DNA, 78 bp, Homo sapiens
tgcccaccatcaattctaattgcatcttttacaataagtaaagccttgaaatctgtgttctttatttcacatctagca

SEQ ID NO: 117905 - DNA, 77 bp, Homo sapiens
ccatcaattctaattgcatcttttacaataagtaaagccttgaaatctgtgttctttatttcacatctagcagattc

SEQ ID NO: 117906 - DNA, 74 bp, Homo sapiens
acaataagtaaagccttgaaatctgtgttctttatttcacatctagcagattcttcaatttccttatctcctct

SEQ ID NO: 117907 - DNA, 76 bp, Homo sapiens
taaagccttgaaatctgtgttctttatttcacatctagcagattcttcaatttccttatctcctcttaaccactca

SEQ ID NO: 117908 - DNA, 76 bp, Homo sapiens
acatctagcagattcttcaatttccttatctcctcttaaccactcaatggtaggtaggggctttccatggacatca

SEQ ID NO: 117909 - DNA, 74 bp, Homo sapiens
agattcttcaatttccttatctcctcttaaccactcaatggtaggtaggggctttccatggacatcagcctcaa

SEQ ID NO: 117910 - DNA, 74 bp, Homo sapiens
tttccttatctcctcttaaccactcaatggtaggtaggggctttccatggacatcagcctcaagtctgaatgtt

SEQ ID NO: 117911 - DNA, 77 bp, Homo sapiens
actcaatggtaggtaggggctttccatggacatcagcctcaagtctgaatgtttctccagcatttaccacaattgtg

SEQ ID NO: 117912 - DNA, 78 bp, Homo sapiens
taggtaggggctttccatggacatcagcctcaagtctgaatgtttctccagcatttaccacaattgtgtctctgaatt

SEQ ID NO: 117913 - DNA, 81 bp, Homo sapiens
tccatggacatcagcctcaagtctgaatgtttctccagcatttaccacaattgtgtctctgaattttggatccattgaaat

SEQ ID NO: 117914 - DNA, 79 bp, Homo sapiens
acatcagcctcaagtctgaatgtttctccagcatttaccacaattgtgtctctgaattttggatccattgaaattcttg

SEQ ID NO: 117915 - DNA, 76 bp, Homo sapiens
agtctgaatgtttctccagcatttaccacaattgtgtctctgaattttggatccattgaaattcttgggagttcaa

SEQ ID NO: 117916 - DNA, 75 bp, Homo sapiens
aatgtttctccagcatttaccacaattgtgtctctgaattttggatccattgaaattcttgggagttcaacctca

SEQ ID NO: 117917 - DNA, 74 bp, Homo sapiens
tttaccacaattgtgtctctgaattttggatccattgaaattcttgggagttcaacctcatccttggcagttat

SEQ ID NO: 117918 - DNA, 75 bp, Homo sapiens
attgtgtctctgaattttggatccattgaaattcttgggagttcaacctcatccttggcagttattggtccagta

SEQ ID NO: 117919 - DNA, 72 bp, Homo sapiens
aaattcttgggagttcaacctcatccttggcagttattggtccagtactgtcagagggtttacttattgcac

SEQ ID NO: 117920 - DNA, 76 bp, Homo sapiens
ggagttcaacctcatccttggcagttattggtccagtactgtcagagggtttacttattgcaccagctgcattctt

SEQ ID NO: 117921 - DNA, 79 bp, Homo sapiens
atccttggcagttattggtccagtactgtcagagggtttacttattgcaccagctgcattctttgcaatgactctgaat

SEQ ID NO: 117922 - DNA, 79 bp, Homo sapiens
agttattggtccagtactgtcagagggtttacttattgcaccagctgcattctttgcaatgactctgaattcatatctt

SEQ ID NO: 117923 - DNA, 82 bp, Homo sapiens
agtactgtcagagggtttacttattgcaccagctgcattctttgcaatgactctgaattcatatctttgatcttcagtaaga

SEQ ID NO: 117924 - DNA, 82 bp, Homo sapiens
agagggtttacttattgcaccagctgcattctttgcaatgactctgaattcatatctttgatcttcagtaagacctgacaca

SEQ ID NO: 117925 - DNA, 82 bp, Homo sapiens
tttacttattgcaccagctgcattctttgcaatgactctgaattcatatctttgatcttcagtaagacctgacacagtaaat

SEQ ID NO: 117926 - DNA, 83 bp, Homo sapiens
agctgcattctttgcaatgactctgaattcatatctttgatcttcagtaagacctgacacagtaaattgagtttcaatgacat

SEQ ID NO: 117927 - DNA, 81 bp, Homo sapiens
cattctttgcaatgactctgaattcatatctttgatcttcagtaagacctgacacagtaaattgagtttcaatgacatttg

SEQ ID NO: 117928 - DNA, 78 bp, Homo sapiens
ctctgaattcatatctttgatcttcagtaagacctgacacagtaaattgagtttcaatgacatttgtaaagctagctt

SEQ ID NO: 117929 - DNA, 77 bp, Homo sapiens
atatctttgatcttcagtaagacctgacacagtaaattgagtttcaatgacatttgtaaagctagctttcatccaac

SEQ ID NO: 117930 - DNA, 77 bp, Homo sapiens
tttgatcttcagtaagacctgacacagtaaattgagtttcaatgacatttgtaaagctagctttcatccaacgacca

SEQ ID NO: 117931 - DNA, 76 bp, Homo sapiens
agtaagacctgacacagtaaattgagtttcaatgacatttgtaaagctagctttcatccaacgaccatcaggcaaa

SEQ ID NO: 117932 - DNA, 76 bp, Homo sapiens
agtaaattgagtttcaatgacatttgtaaagctagctttcatccaacgaccatcaggcaaatcacgtttctctaca

SEQ ID NO: 117933 - DNA, 77 bp, Homo sapiens
acatttgtaaagctagctttcatccaacgaccatcaggcaaatcacgtttctctacaatgtagcctgtaatcatact

SEQ ID NO: 117934 - DNA, 79 bp, Homo sapiens
catcaggcaaatcacgtttctctacaatgtagcctgtaatcatacttccaccatcatacacaggtttggtccactgtaa

SEQ ID NO: 117935 - DNA, 76 bp, Homo sapiens
aatcacgtttctctacaatgtagcctgtaatcatacttccaccatcatacacaggtttggtccactgtaaagtgat

SEQ ID NO: 117936 - DNA, 76 bp, Homo sapiens
gtttctctacaatgtagcctgtaatcatacttccaccatcatacacaggtttggtccactgtaaagtgatttcatt

SEQ ID NO: 117937 - DNA, 74 bp, Homo sapiens
aatgtagcctgtaatcatacttccaccatcatacacaggtttggtccactgtaaagtgatttcatttcttttaa

SEQ ID NO: 117938 - DNA, 72 bp, Homo sapiens
aatcatacttccaccatcatacacaggtttggtccactgtaaagtgatttcatttcttttaaccattattgg

SEQ ID NO: 117939 - DNA, 71 bp, Homo sapiens
ttccaccatcatacacaggtttggtccactgtaaagtgatttcatttcttttaaccattattggttctggg

SEQ ID NO: 117940 - DNA, 68 bp, Homo sapiens
atacacaggtttggtccactgtaaagtgatttcatttcttttaaccattattggttctggggttcctg

SEQ ID NO: 117941 - DNA, 69 bp, Homo sapiens
ttggtccactgtaaagtgatttcatttcttttaaccattattggttctggggttcctggtgggtcacag

SEQ ID NO: 117942 - DNA, 71 bp, Homo sapiens
taaagtgatttcatttcttttaaccattattggttctggggttcctggtgggtcacagggatctctggcta

SEQ ID NO: 117943 - DNA, 73 bp, Homo sapiens
tttcttttaaccattattggttctggggttcctggtgggtcacagggatctctggctacatagcattcagaat

SEQ ID NO: 117944 - DNA, 77 bp, Homo sapiens
ttaaccattattggttctggggttcctggtgggtcacagggatctctggctacatagcattcagaattcttgcttgc

SEQ ID NO: 117945 - DNA, 79 bp, Homo sapiens
tctggggttcctggtgggtcacagggatctctggctacatagcattcagaattcttgcttgctttgcctacaccaacaa

SEQ ID NO: 117946 - DNA, 80 bp, Homo sapiens
ttcctggtgggtcacagggatctctggctacatagcattcagaattcttgcttgctttgcctacaccaacaatattttca

SEQ ID NO: 117947 - DNA, 82 bp, Homo sapiens
acagggatctctggctacatagcattcagaattcttgcttgctttgcctacaccaacaatattttcagcatacactctgaat

SEQ ID NO: 117948 - DNA, 85 bp, Homo sapiens
atctctggctacatagcattcagaattcttgcttgctttgcctacaccaacaatattttcagcatacactctgaattcatattca

SEQ ID NO: 117949 - DNA, 82 bp, Homo sapiens
atagcattcagaattcttgcttgctttgcctacaccaacaatattttcagcatacactctgaattcatattcaatgccttct

SEQ ID NO: 117950 - DNA, 80 bp, Homo sapiens
aattcttgcttgctttgcctacaccaacaatattttcagcatacactctgaattcatattcaatgccttcttcaagattc

SEQ ID NO: 117951 - DNA, 82 bp, Homo sapiens
ttgctttgcctacaccaacaatattttcagcatacactctgaattcatattcaatgccttcttcaagattctgtgctttgaa

SEQ ID NO: 117952 - DNA, 82 bp, Homo sapiens
tacaccaacaatattttcagcatacactctgaattcatattcaatgccttcttcaagattctgtgctttgaattgggtgtca

SEQ ID NO: 117953 - DNA, 80 bp, Homo sapiens
agcatacactctgaattcatattcaatgccttcttcaagattctgtgctttgaattgggtgtcatgaataatagttttgt

SEQ ID NO: 117954 - DNA, 73 bp, Homo sapiens
cttcaagattctgtgctttgaattgggtgtcatgaataatagttttgttgacctttgtccacaaaatactgtt

SEQ ID NO: 117955 - DNA, 72 bp, Homo sapiens
attctgtgctttgaattgggtgtcatgaataatagttttgttgacctttgtccacaaaatactgtttctttc

SEQ ID NO: 117956 - DNA, 68 bp, Homo sapiens
atagttttgttgacctttgtccacaaaatactgtttctttcttttctctccaggtggtaacctatgac

SEQ ID NO: 117957 - DNA, 69 bp, Homo sapiens
ttgacctttgtccacaaaatactgtttctttcttttctctccaggtggtaacctatgacggggcttcca

SEQ ID NO: 117958 - DNA, 69 bp, Homo sapiens
acaaaatactgtttctttcttttctctccaggtggtaacctatgacggggcttccaccattgttgactg

SEQ ID NO: 117959 - DNA, 76 bp, Homo sapiens
ttttctctccaggtggtaacctatgacggggcttccaccattgttgactggttcatgccactgtatgaccatggag

SEQ ID NO: 117960 - DNA, 80 bp, Homo sapiens
tatgacggggcttccaccattgttgactggttcatgccactgtatgaccatggagtctttggaaatggctgtggcaaatg

SEQ ID NO: 117961 - DNA, 80 bp, Homo sapiens
ttccaccattgttgactggttcatgccactgtatgaccatggagtctttggaaatggctgtggcaaatggtgtacctgga

SEQ ID NO: 117962 - DNA, 78 bp, Homo sapiens
attgttgactggttcatgccactgtatgaccatggagtctttggaaatggctgtggcaaatggtgtacctggagggcc

SEQ ID NO: 117963 - DNA, 78 bp, Homo sapiens
ttcatgccactgtatgaccatggagtctttggaaatggctgtggcaaatggtgtacctggagggcctggttctttgta

SEQ ID NO: 117964 - DNA, 76 bp, Homo sapiens
tatgaccatggagtctttggaaatggctgtggcaaatggtgtacctggagggcctggttctttgtagggatattga

SEQ ID NO: 117965 - DNA, 77 bp, Homo sapiens
tttgtagggatattgagctacaattggatcagactctaaggcaaagctttgtccatatctgttttcggcaaatattc

SEQ ID NO: 117966 - DNA, 76 bp, Homo sapiens
agggatattgagctacaattggatcagactctaaggcaaagctttgtccatatctgttttcggcaaatattctaaa

SEQ ID NO: 117967 - DNA, 76 bp, Homo sapiens
tacaattggatcagactctaaggcaaagctttgtccatatctgttttcggcaaatattctaaattggtattctgta

SEQ ID NO: 117968 - DNA, 71 bp, Homo sapiens
ctaaggcaaagctttgtccatatctgttttcggcaaatattctaaattggtattctgtaccagttttcagt

SEQ ID NO: 117969 - DNA, 71 bp, Homo sapiens
gctttgtccatatctgttttcggcaaatattctaaattggtattctgtaccagttttcagtttggtcactt

SEQ ID NO: 117970 - DNA, 70 bp, Homo sapiens
ctgttttcggcaaatattctaaattggtattctgtaccagttttcagtttggtcactttgagtgtagttc

SEQ ID NO: 117971 - DNA, 74 bp, Homo sapiens
aatattctaaattggtattctgtaccagttttcagtttggtcactttgagtgtagttctagcaacagtagcaga

SEQ ID NO: 117972 - DNA, 74 bp, Homo sapiens
tctaaattggtattctgtaccagttttcagtttggtcactttgagtgtagttctagcaacagtagcagaaacaa

SEQ ID NO: 117973 - DNA, 76 bp, Homo sapiens
tattctgtaccagttttcagtttggtcactttgagtgtagttctagcaacagtagcagaaacaacatcccatactg

SEQ ID NO: 117974 - DNA, 76 bp, Homo sapiens
ttttcagtttggtcactttgagtgtagttctagcaacagtagcagaaacaacatcccatactgtggtggttgtatc

SEQ ID NO: 117975 - DNA, 76 bp, Homo sapiens
tttggtcactttgagtgtagttctagcaacagtagcagaaacaacatcccatactgtggtggttgtatctcttttc

SEQ ID NO: 117976 - DNA, 76 bp, Homo sapiens
agtgtagttctagcaacagtagcagaaacaacatcccatactgtggtggttgtatctcttttctgaacaatgtagt

SEQ ID NO: 117977 - DNA, 77 bp, Homo sapiens
ttctagcaacagtagcagaaacaacatcccatactgtggtggttgtatctcttttctgaacaatgtagttggtgatt

SEQ ID NO: 117978 - DNA, 76 bp, Homo sapiens
agtagcagaaacaacatcccatactgtggtggttgtatctcttttctgaacaatgtagttggtgatttggcagccc

SEQ ID NO: 117979 - DNA, 75 bp, Homo sapiens
aacatcccatactgtggtggttgtatctcttttctgaacaatgtagttggtgatttggcagccccctgtatataa

SEQ ID NO: 117980 - DNA, 74 bp, Homo sapiens
tactgtggtggttgtatctcttttctgaacaatgtagttggtgatttggcagccccctgtatataatggagggt

SEQ ID NO: 117981 - DNA, 73 bp, Homo sapiens
tttctgaacaatgtagttggtgatttggcagccccctgtatataatggagggttccaagataatgtaatactt

SEQ ID NO: 117982 - DNA, 75 bp, Homo sapiens
aatgtagttggtgatttggcagccccctgtatataatggagggttccaagataatgtaatactttcagcactgac

SEQ ID NO: 117983 - DNA, 75 bp, Homo sapiens
tttggcagccccctgtatataatggagggttccaagataatgtaatactttcagcactgacgtcatcaaatttaa

SEQ ID NO: 117984 - DNA, 73 bp, Homo sapiens
ccctgtatataatggagggttccaagataatgtaatactttcagcactgacgtcatcaaatttaacaggtcct

SEQ ID NO: 117985 - DNA, 74 bp, Homo sapiens
tatataatggagggttccaagataatgtaatactttcagcactgacgtcatcaaatttaacaggtccttttgga

SEQ ID NO: 117986 - DNA, 75 bp, Homo sapiens
tccaagataatgtaatactttcagcactgacgtcatcaaatttaacaggtccttttggaggatcaggtttatcta

SEQ ID NO: 117987 - DNA, 74 bp, Homo sapiens
taatgtaatactttcagcactgacgtcatcaaatttaacaggtccttttggaggatcaggtttatctagagtta

SEQ ID NO: 117988 - DNA, 73 bp, Homo sapiens
tactttcagcactgacgtcatcaaatttaacaggtccttttggaggatcaggtttatctagagttacaatttc

SEQ ID NO: 117989 - DNA, 73 bp, Homo sapiens
acgtcatcaaatttaacaggtccttttggaggatcaggtttatctagagttacaatttcgatggatgctgtct

SEQ ID NO: 117990 - DNA, 77 bp, Homo sapiens
tccttttggaggatcaggtttatctagagttacaatttcgatggatgctgtcttctgaccaacaacattggcaactg

SEQ ID NO: 117991 - DNA, 79 bp, Homo sapiens
aggatcaggtttatctagagttacaatttcgatggatgctgtcttctgaccaacaacattggcaactgtgattccatat

SEQ ID NO: 117992 - DNA, 82 bp, Homo sapiens
agttacaatttcgatggatgctgtcttctgaccaacaacattggcaactgtgattccatattgtccaccatcatccttatga

SEQ ID NO: 117993 - DNA, 81 bp, Homo sapiens
atggatgctgtcttctgaccaacaacattggcaactgtgattccatattgtccaccatcatccttatgagtttctttaata

SEQ ID NO: 117994 - DNA, 80 bp, Homo sapiens
tgtcttctgaccaacaacattggcaactgtgattccatattgtccaccatcatccttatgagtttctttaatactgagtg

SEQ ID NO: 117995 - DNA, 80 bp, Homo sapiens
aacaacattggcaactgtgattccatattgtccaccatcatccttatgagtttctttaatactgagtgtggtgagatcca

SEQ ID NO: 117996 - DNA, 79 bp, Homo sapiens
ttccatattgtccaccatcatccttatgagtttctttaatactgagtgtggtgagatccagtgaatcggtaacattgat

SEQ ID NO: 117997 - DNA, 80 bp, Homo sapiens
atcatccttatgagtttctttaatactgagtgtggtgagatccagtgaatcggtaacattgattcttgtggtctgcttca

SEQ ID NO: 117998 - DNA, 79 bp, Homo sapiens
ttctttaatactgagtgtggtgagatccagtgaatcggtaacattgattcttgtggtctgcttcagtgggagaccatct

SEQ ID NO: 117999 - DNA, 80 bp, Homo sapiens
taatactgagtgtggtgagatccagtgaatcggtaacattgattcttgtggtctgcttcagtgggagaccatctttagtc

SEQ ID NO: 118000 - DNA, 78 bp, Homo sapiens
tgagatccagtgaatcggtaacattgattcttgtggtctgcttcagtgggagaccatctttagtccaggtaatggttg

SEQ ID NO: 118001 - DNA, 75 bp, Homo sapiens
agtgaatcggtaacattgattcttgtggtctgcttcagtgggagaccatctttagtccaggtaatggttggctta

SEQ ID NO: 118002 - DNA, 75 bp, Homo sapiens
acattgattcttgtggtctgcttcagtgggagaccatctttagtccaggtaatggttggcttaggacgtccagaa

SEQ ID NO: 118003 - DNA, 73 bp, Homo sapiens
attcttgtggtctgcttcagtgggagaccatctttagtccaggtaatggttggcttaggacgtccagaaattg

SEQ ID NO: 118004 - DNA, 71 bp, Homo sapiens
cttcagtgggagaccatctttagtccaggtaatggttggcttaggacgtccagaaattggcacttctattt

SEQ ID NO: 118005 - DNA, 71 bp, Homo sapiens
gtgggagaccatctttagtccaggtaatggttggcttaggacgtccagaaattggcacttctattttcaaa

SEQ ID NO: 118006 - DNA, 71 bp, Homo sapiens
atctttagtccaggtaatggttggcttaggacgtccagaaattggcacttctattttcaaatcttggccaa

SEQ ID NO: 118007 - DNA, 72 bp, Homo sapiens
gtaatggttggcttaggacgtccagaaattggcacttctattttcaaatcttggccaacctgtacactgtaa

SEQ ID NO: 118008 - DNA, 73 bp, Homo sapiens
ttggcttaggacgtccagaaattggcacttctattttcaaatcttggccaacctgtacactgtaactactgaa

SEQ ID NO: 118009 - DNA, 75 bp, Homo sapiens
tccagaaattggcacttctattttcaaatcttggccaacctgtacactgtaactactgaatgcaggttttacatc

SEQ ID NO: 118010 - DNA, 75 bp, Homo sapiens
cacttctattttcaaatcttggccaacctgtacactgtaactactgaatgcaggttttacatctggctcaattac

SEQ ID NO: 118011 - DNA, 75 bp, Homo sapiens
ttttcaaatcttggccaacctgtacactgtaactactgaatgcaggttttacatctggctcaattaccagatctt

SEQ ID NO: 118012 - DNA, 77 bp, Homo sapiens
atcttggccaacctgtacactgtaactactgaatgcaggttttacatctggctcaattaccagatctttggcaacta

SEQ ID NO: 118013 - DNA, 78 bp, Homo sapiens
tgtacactgtaactactgaatgcaggttttacatctggctcaattaccagatctttggcaactattggaactgcaagg

SEQ ID NO: 118014 - DNA, 76 bp, Homo sapiens
aatgcaggttttacatctggctcaattaccagatctttggcaactattggaactgcaagggaccgaggatcacttc

SEQ ID NO: 118015 - DNA, 74 bp, Homo sapiens
tttacatctggctcaattaccagatctttggcaactattggaactgcaagggaccgaggatcacttctcccctt

SEQ ID NO: 118016 - DNA, 73 bp, Homo sapiens
atctttggcaactattggaactgcaagggaccgaggatcacttctccccttttcatttacagcaacaactcta

SEQ ID NO: 118017 - DNA, 70 bp, Homo sapiens
aactgcaagggaccgaggatcacttctccccttttcatttacagcaacaactctaaaaagatattcttcc

SEQ ID NO: 118018 - DNA, 67 bp, Homo sapiens
cttctccccttttcatttacagcaacaactctaaaaagatattcttccccttgagttaggttggtaa

SEQ ID NO: 118019 - DNA, 70 bp, Homo sapiens
cttttcatttacagcaacaactctaaaaagatattcttccccttgagttaggttggtaattactgcctga

SEQ ID NO: 118020 - DNA, 71 bp, Homo sapiens
tacagcaacaactctaaaaagatattcttccccttgagttaggttggtaattactgcctgaagagacttta

SEQ ID NO: 118021 - DNA, 72 bp, Homo sapiens
aaaaagatattcttccccttgagttaggttggtaattactgcctgaagagactttactcgagcacactctga

SEQ ID NO: 118022 - DNA, 73 bp, Homo sapiens
atattcttccccttgagttaggttggtaattactgcctgaagagactttactcgagcacactctgaccatttc

SEQ ID NO: 118023 - DNA, 76 bp, Homo sapiens
ttgagttaggttggtaattactgcctgaagagactttactcgagcacactctgaccatttctcactgtgtttagct

SEQ ID NO: 118024 - DNA, 79 bp, Homo sapiens
ttggtaattactgcctgaagagactttactcgagcacactctgaccatttctcactgtgtttagcttgcatttccacaa

SEQ ID NO: 118025 - DNA, 81 bp, Homo sapiens
ttactgcctgaagagactttactcgagcacactctgaccatttctcactgtgtttagcttgcatttccacaatatactgaa

SEQ ID NO: 118026 - DNA, 79 bp, Homo sapiens
aagagactttactcgagcacactctgaccatttctcactgtgtttagcttgcatttccacaatatactgaatgatttta

SEQ ID NO: 118027 - DNA, 83 bp, Homo sapiens
agcacactctgaccatttctcactgtgtttagcttgcatttccacaatatactgaatgattttactgccaccatcatgttcag

SEQ ID NO: 118028 - DNA, 79 bp, Homo sapiens
tttctcactgtgtttagcttgcatttccacaatatactgaatgattttactgccaccatcatgttcaggttttgtccaa

SEQ ID NO: 118029 - DNA, 81 bp, Homo sapiens
tgtttagcttgcatttccacaatatactgaatgattttactgccaccatcatgttcaggttttgtccaactcagagagaca

SEQ ID NO: 118030 - DNA, 78 bp, Homo sapiens
atttccacaatatactgaatgattttactgccaccatcatgttcaggttttgtccaactcagagagacactgtttctg

SEQ ID NO: 118031 - DNA, 81 bp, Homo sapiens
aatatactgaatgattttactgccaccatcatgttcaggttttgtccaactcagagagacactgtttctggtgacatcatc

SEQ ID NO: 118032 - DNA, 77 bp, Homo sapiens
accatcatgttcaggttttgtccaactcagagagacactgtttctggtgacatcatccacagttatttttccaggag

SEQ ID NO: 118033 - DNA, 79 bp, Homo sapiens
tttgtccaactcagagagacactgtttctggtgacatcatccacagttatttttccaggaggttgtggcacttctgcaa

SEQ ID NO: 118034 - DNA, 76 bp, Homo sapiens
agagacactgtttctggtgacatcatccacagttatttttccaggaggttgtggcacttctgcaaccttaattgga

SEQ ID NO: 118035 - DNA, 77 bp, Homo sapiens
actgtttctggtgacatcatccacagttatttttccaggaggttgtggcacttctgcaaccttaattggatcagcag

SEQ ID NO: 118036 - DNA, 77 bp, Homo sapiens
acatcatccacagttatttttccaggaggttgtggcacttctgcaaccttaattggatcagcagtctgggcaggaag

SEQ ID NO: 118037 - DNA, 74 bp, Homo sapiens
agttatttttccaggaggttgtggcacttctgcaaccttaattggatcagcagtctgggcaggaaggccaatac

SEQ ID NO: 118038 - DNA, 83 bp, Homo sapiens
ttgtggcacttctgcaaccttaattggatcagcagtctgggcaggaaggccaataccatactcattctcagctgtgactctaa

SEQ ID NO: 118039 - DNA, 80 bp, Homo sapiens
ctgcaaccttaattggatcagcagtctgggcaggaaggccaataccatactcattctcagctgtgactctaaagtaataa

SEQ ID NO: 118040 - DNA, 80 bp, Homo sapiens
cttaattggatcagcagtctgggcaggaaggccaataccatactcattctcagctgtgactctaaagtaataactgcaac

SEQ ID NO: 118041 - DNA, 79 bp, Homo sapiens
agtctgggcaggaaggccaataccatactcattctcagctgtgactctaaagtaataactgcaaccttcttggagctga

SEQ ID NO: 118042 - DNA, 77 bp, Homo sapiens
aggaaggccaataccatactcattctcagctgtgactctaaagtaataactgcaaccttcttggagctgatcgattt

SEQ ID NO: 118043 - DNA, 77 bp, Homo sapiens
attctcagctgtgactctaaagtaataactgcaaccttcttggagctgatcgattttccaagaattcttatggcagt

SEQ ID NO: 118044 - DNA, 76 bp, Homo sapiens
tgtgactctaaagtaataactgcaaccttcttggagctgatcgattttccaagaattcttatggcagttagttaca

SEQ ID NO: 118045 - DNA, 75 bp, Homo sapiens
ctaaagtaataactgcaaccttcttggagctgatcgattttccaagaattcttatggcagttagttacaacagca

SEQ ID NO: 118046 - DNA, 79 bp, Homo sapiens
taactgcaaccttcttggagctgatcgattttccaagaattcttatggcagttagttacaacagcagcatatgattttc

SEQ ID NO: 118047 - DNA, 80 bp, Homo sapiens
cttcttggagctgatcgattttccaagaattcttatggcagttagttacaacagcagcatatgattttcttgtggcttca

SEQ ID NO: 118048 - DNA, 77 bp, Homo sapiens
atcgattttccaagaattcttatggcagttagttacaacagcagcatatgattttcttgtggcttcacgtttctcaa

SEQ ID NO: 118049 - DNA, 76 bp, Homo sapiens
aagaattcttatggcagttagttacaacagcagcatatgattttcttgtggcttcacgtttctcaacaatgtaatt

SEQ ID NO: 118050 - DNA, 75 bp, Homo sapiens
cttatggcagttagttacaacagcagcatatgattttcttgtggcttcacgtttctcaacaatgtaattttttat

SEQ ID NO: 118051 - DNA, 73 bp, Homo sapiens
agttacaacagcagcatatgattttcttgtggcttcacgtttctcaacaatgtaattttttattttggatccc

SEQ ID NO: 118052 - DNA, 72 bp, Homo sapiens
agcatatgattttcttgtggcttcacgtttctcaacaatgtaattttttattttggatcccccatccaacaa

SEQ ID NO: 118053 - DNA, 71 bp, Homo sapiens
ttctcaacaatgtaattttttattttggatcccccatccaacaaaggaggttcccatgtaattgatactga

SEQ ID NO: 118054 - DNA, 70 bp, Homo sapiens
taattttttattttggatcccccatccaacaaaggaggttcccatgtaattgatactgagtctttggtga

SEQ ID NO: 118055 - DNA, 71 bp, Homo sapiens
ttttattttggatcccccatccaacaaaggaggttcccatgtaattgatactgagtctttggtgatttctg

SEQ ID NO: 118056 - DNA, 73 bp, Homo sapiens
cccatccaacaaaggaggttcccatgtaattgatactgagtctttggtgatttctgtgactttcaggttaaca

SEQ ID NO: 118057 - DNA, 72 bp, Homo sapiens
aacaaaggaggttcccatgtaattgatactgagtctttggtgatttctgtgactttcaggttaacaggtgga

SEQ ID NO: 118058 - DNA, 76 bp, Homo sapiens
tcccatgtaattgatactgagtctttggtgatttctgtgactttcaggttaacaggtggacttggcgtgtccagaa

SEQ ID NO: 118059 - DNA, 77 bp, Homo sapiens
taattgatactgagtctttggtgatttctgtgactttcaggttaacaggtggacttggcgtgtccagaactctcaca

SEQ ID NO: 118060 - DNA, 73 bp, Homo sapiens
agtctttggtgatttctgtgactttcaggttaacaggtggacttggcgtgtccagaactctcacagtaacaaa

SEQ ID NO: 118061 - DNA, 73 bp, Homo sapiens
tttctgtgactttcaggttaacaggtggacttggcgtgtccagaactctcacagtaacaaaggcagactttgt

SEQ ID NO: 118062 - DNA, 73 bp, Homo sapiens
gtgactttcaggttaacaggtggacttggcgtgtccagaactctcacagtaacaaaggcagactttgttccac

SEQ ID NO: 118063 - DNA, 74 bp, Homo sapiens
ttaacaggtggacttggcgtgtccagaactctcacagtaacaaaggcagactttgttccactgctgttttctaa

SEQ ID NO: 118064 - DNA, 76 bp, Homo sapiens
cagaactctcacagtaacaaaggcagactttgttccactgctgttttctaatgtaagcgtatattttccactatca

SEQ ID NO: 118065 - DNA, 73 bp, Homo sapiens
acagtaacaaaggcagactttgttccactgctgttttctaatgtaagcgtatattttccactatcatatcggt

SEQ ID NO: 118066 - DNA, 75 bp, Homo sapiens
actttgttccactgctgttttctaatgtaagcgtatattttccactatcatatcggttgacattgtcaagaacaa

SEQ ID NO: 118067 - DNA, 76 bp, Homo sapiens
actgctgttttctaatgtaagcgtatattttccactatcatatcggttgacattgtcaagaacaagagaggtgaaa

SEQ ID NO: 118068 - DNA, 80 bp, Homo sapiens
agcgtatattttccactatcatatcggttgacattgtcaagaacaagagaggtgaaactgctagtgacatcaattatagc

SEQ ID NO: 118069 - DNA, 83 bp, Homo sapiens
ttccactatcatatcggttgacattgtcaagaacaagagaggtgaaactgctagtgacatcaattatagctgcatctcggatt

SEQ ID NO: 118070 - DNA, 83 bp, Homo sapiens
atatcggttgacattgtcaagaacaagagaggtgaaactgctagtgacatcaattatagctgcatctcggatttcaccatcca

SEQ ID NO: 118071 - DNA, 77 bp, Homo sapiens
aacaagagaggtgaaactgctagtgacatcaattatagctgcatctcggatttcaccatccacctttccccatttaa

SEQ ID NO: 118072 - DNA, 75 bp, Homo sapiens
tgacatcaattatagctgcatctcggatttcaccatccacctttccccatttaacttctggtgtaggacgacctt

SEQ ID NO: 118073 - DNA, 72 bp, Homo sapiens
attatagctgcatctcggatttcaccatccacctttccccatttaacttctggtgtaggacgaccttttata

SEQ ID NO: 118074 - DNA, 68 bp, Homo sapiens
atctcggatttcaccatccacctttccccatttaacttctggtgtaggacgaccttttataggaacaa

SEQ ID NO: 118075 - DNA, 66 bp, Homo sapiens
atttcaccatccacctttccccatttaacttctggtgtaggacgaccttttataggaacaaataac

SEQ ID NO: 118076 - DNA, 64 bp, Homo sapiens
acctttccccatttaacttctggtgtaggacgaccttttataggaacaaataaccttaaggagc

SEQ ID NO: 118077 - DNA, 67 bp, Homo sapiens
taacttctggtgtaggacgaccttttataggaacaaataaccttaaggagccacctgcccttatatt

SEQ ID NO: 118078 - DNA, 69 bp, Homo sapiens
tctggtgtaggacgaccttttataggaacaaataaccttaaggagccacctgcccttatatttatgatt

SEQ ID NO: 118079 - DNA, 67 bp, Homo sapiens
gacgaccttttataggaacaaataaccttaaggagccacctgcccttatatttatgattttccttag

SEQ ID NO: 118080 - DNA, 71 bp, Homo sapiens
aataaccttaaggagccacctgcccttatatttatgattttccttagttctaggtcaagatcaatgtctgg

SEQ ID NO: 118081 - DNA, 73 bp, Homo sapiens
gcccttatatttatgattttccttagttctaggtcaagatcaatgtctggtgcttctaatttttcttcaacta

SEQ ID NO: 118082 - DNA, 73 bp, Homo sapiens
tgattttccttagttctaggtcaagatcaatgtctggtgcttctaatttttcttcaactataataggtccagg

SEQ ID NO: 118083 - DNA, 74 bp, Homo sapiens
tccttagttctaggtcaagatcaatgtctggtgcttctaatttttcttcaactataataggtccagggacgtca

SEQ ID NO: 118084 - DNA, 75 bp, Homo sapiens
atgtctggtgcttctaatttttcttcaactataataggtccagggacgtcagcatgttctccaactccagcttta

SEQ ID NO: 118085 - DNA, 75 bp, Homo sapiens
ttctaatttttcttcaactataataggtccagggacgtcagcatgttctccaactccagctttattaatagcaca

SEQ ID NO: 118086 - DNA, 75 bp, Homo sapiens
cttcaactataataggtccagggacgtcagcatgttctccaactccagctttattaatagcacagatacggaagt

SEQ ID NO: 118087 - DNA, 75 bp, Homo sapiens
actataataggtccagggacgtcagcatgttctccaactccagctttattaatagcacagatacggaagttgtat

SEQ ID NO: 118088 - DNA, 77 bp, Homo sapiens
agggacgtcagcatgttctccaactccagctttattaatagcacagatacggaagttgtattcatgcttttccaaca

SEQ ID NO: 118089 - DNA, 77 bp, Homo sapiens
catgttctccaactccagctttattaatagcacagatacggaagttgtattcatgcttttccaacagcttctctact

SEQ ID NO: 118090 - DNA, 75 bp, Homo sapiens
aactccagctttattaatagcacagatacggaagttgtattcatgcttttccaacagcttctctacttctatgtt

SEQ ID NO: 118091 - DNA, 75 bp, Homo sapiens
cagctttattaatagcacagatacggaagttgtattcatgcttttccaacagcttctctacttctatgtttgttt

SEQ ID NO: 118092 - DNA, 71 bp, Homo sapiens
acggaagttgtattcatgcttttccaacagcttctctacttctatgtttgttttattaattcctgttggtg

SEQ ID NO: 118093 - DNA, 77 bp, Homo sapiens
tattcatgcttttccaacagcttctctacttctatgtttgttttattaattcctgttggtggagtgcacattgtcca

SEQ ID NO: 118094 - DNA, 78 bp, Homo sapiens
tctctacttctatgtttgttttattaattcctgttggtggagtgcacattgtccattcaccaacactcacatcacatt

SEQ ID NO: 118095 - DNA, 77 bp, Homo sapiens
ttttattaattcctgttggtggagtgcacattgtccattcaccaacactcacatcacatttttcaacaatgtatcct

SEQ ID NO: 118096 - DNA, 79 bp, Homo sapiens
attgtccattcaccaacactcacatcacatttttcaacaatgtatccttgaatttcacagccaccatcatatattggtt

SEQ ID NO: 118097 - DNA, 78 bp, Homo sapiens
aacactcacatcacatttttcaacaatgtatccttgaatttcacagccaccatcatatattggtttgctccaagaaag

SEQ ID NO: 118098 - DNA, 78 bp, Homo sapiens
atcacatttttcaacaatgtatccttgaatttcacagccaccatcatatattggtttgctccaagaaaggaatactga

SEQ ID NO: 118099 - DNA, 77 bp, Homo sapiens
aatttcacagccaccatcatatattggtttgctccaagaaaggaatactgaagatctggttatgtctatgactttgg

SEQ ID NO: 118100 - DNA, 74 bp, Homo sapiens
accatcatatattggtttgctccaagaaaggaatactgaagatctggttatgtctatgactttggggttgtttg

SEQ ID NO: 118101 - DNA, 71 bp, Homo sapiens
tatattggtttgctccaagaaaggaatactgaagatctggttatgtctatgactttggggttgtttggggg

SEQ ID NO: 118102 - DNA, 69 bp, Homo sapiens
caagaaaggaatactgaagatctggttatgtctatgactttggggttgtttgggggtcctggtttataa

SEQ ID NO: 118103 - DNA, 68 bp, Homo sapiens
aaggaatactgaagatctggttatgtctatgactttggggttgtttgggggtcctggtttataaatag

SEQ ID NO: 118104 - DNA, 68 bp, Homo sapiens
atctggttatgtctatgactttggggttgtttgggggtcctggtttataaataggatcacaagccttt

SEQ ID NO: 118105 - DNA, 68 bp, Homo sapiens
ttatgtctatgactttggggttgtttgggggtcctggtttataaataggatcacaagccttttggtaa

SEQ ID NO: 118106 - DNA, 66 bp, Homo sapiens
actttggggttgtttgggggtcctggtttataaataggatcacaagccttttggtaagcagaagga

SEQ ID NO: 118107 - DNA, 69 bp, Homo sapiens
ttgggggtcctggtttataaataggatcacaagccttttggtaagcagaaggagggcttggttcactaa

SEQ ID NO: 118108 - DNA, 76 bp, Homo sapiens
tggtttataaataggatcacaagccttttggtaagcagaaggagggcttggttcactaagtccagcagcattctca

SEQ ID NO: 118109 - DNA, 77 bp, Homo sapiens
ataaataggatcacaagccttttggtaagcagaaggagggcttggttcactaagtccagcagcattctcagcagaaa

SEQ ID NO: 118110 - DNA, 82 bp, Homo sapiens
taagcagaaggagggcttggttcactaagtccagcagcattctcagcagaaactctgaactcataatcgtgattttctatga

SEQ ID NO: 118111 - DNA, 81 bp, Homo sapiens
gagggcttggttcactaagtccagcagcattctcagcagaaactctgaactcataatcgtgattttctatgagtccagtta

SEQ ID NO: 118112 - DNA, 82 bp, Homo sapiens
cttggttcactaagtccagcagcattctcagcagaaactctgaactcataatcgtgattttctatgagtccagttactctca

SEQ ID NO: 118113 - DNA, 84 bp, Homo sapiens
taagtccagcagcattctcagcagaaactctgaactcataatcgtgattttctatgagtccagttactctcaggcgcaactctc

SEQ ID NO: 118114 - DNA, 82 bp, Homo sapiens
aactcataatcgtgattttctatgagtccagttactctcaggcgcaactctccaatcagacgcttatggcatcttgtccatc

SEQ ID NO: 118115 - DNA, 82 bp, Homo sapiens
tgattttctatgagtccagttactctcaggcgcaactctccaatcagacgcttatggcatcttgtccatctaatgccttctt

SEQ ID NO: 118116 - DNA, 80 bp, Homo sapiens
ttactctcaggcgcaactctccaatcagacgcttatggcatcttgtccatctaatgccttctttatcccgtttctcaaga

SEQ ID NO: 118117 - DNA, 79 bp, Homo sapiens
cgcaactctccaatcagacgcttatggcatcttgtccatctaatgccttctttatcccgtttctcaagaacatatccaa

SEQ ID NO: 118118 - DNA, 77 bp, Homo sapiens
aatcagacgcttatggcatcttgtccatctaatgccttctttatcccgtttctcaagaacatatccaagaatttcac

SEQ ID NO: 118119 - DNA, 76 bp, Homo sapiens
acgcttatggcatcttgtccatctaatgccttctttatcccgtttctcaagaacatatccaagaatttcactacca

SEQ ID NO: 118120 - DNA, 78 bp, Homo sapiens
atcttgtccatctaatgccttctttatcccgtttctcaagaacatatccaagaatttcactaccaccatcagatgctg

SEQ ID NO: 118121 - DNA, 76 bp, Homo sapiens
atctaatgccttctttatcccgtttctcaagaacatatccaagaatttcactaccaccatcagatgctggtctttc

SEQ ID NO: 118122 - DNA, 77 bp, Homo sapiens
tttatcccgtttctcaagaacatatccaagaatttcactaccaccatcagatgctggtctttcccatacaacaatca

SEQ ID NO: 118123 - DNA, 78 bp, Homo sapiens
aacatatccaagaatttcactaccaccatcagatgctggtctttcccatacaacaatcattgagtccttggtcactgt

SEQ ID NO: 118124 - DNA, 78 bp, Homo sapiens
actaccaccatcagatgctggtctttcccatacaacaatcattgagtccttggtcactgttgtgacttctggagcttt

SEQ ID NO: 118125 - DNA, 80 bp, Homo sapiens
tgctggtctttcccatacaacaatcattgagtccttggtcactgttgtgacttctggagcttttggtgcatctggtacta

SEQ ID NO: 118126 - DNA, 79 bp, Homo sapiens
tacaacaatcattgagtccttggtcactgttgtgacttctggagcttttggtgcatctggtactacaaatggattcttg

SEQ ID NO: 118127 - DNA, 77 bp, Homo sapiens
attgagtccttggtcactgttgtgacttctggagcttttggtgcatctggtactacaaatggattcttggcaactac

SEQ ID NO: 118128 - DNA, 78 bp, Homo sapiens
cttctggagcttttggtgcatctggtactacaaatggattcttggcaactactggctcagattcaagaggttcaccaa

SEQ ID NO: 118129 - DNA, 77 bp, Homo sapiens
tacaaatggattcttggcaactactggctcagattcaagaggttcaccaacaccatatttgtttactgccattatac

SEQ ID NO: 118130 - DNA, 76 bp, Homo sapiens
tcttggcaactactggctcagattcaagaggttcaccaacaccatatttgtttactgccattatacggaaagtata

SEQ ID NO: 118131 - DNA, 74 bp, Homo sapiens
aactactggctcagattcaagaggttcaccaacaccatatttgtttactgccattatacggaaagtatattcat

SEQ ID NO: 118132 - DNA, 74 bp, Homo sapiens
agattcaagaggttcaccaacaccatatttgtttactgccattatacggaaagtatattcattgccttcaagaa

SEQ ID NO: 118133 - DNA, 73 bp, Homo sapiens
aggttcaccaacaccatatttgtttactgccattatacggaaagtatattcattgccttcaagaagcttagta

SEQ ID NO: 118134 - DNA, 74 bp, Homo sapiens
aacaccatatttgtttactgccattatacggaaagtatattcattgccttcaagaagcttagtaaccttgcagc

SEQ ID NO: 118135 - DNA, 79 bp, Homo sapiens
ttgtttactgccattatacggaaagtatattcattgccttcaagaagcttagtaaccttgcagctgagagtctgcacat

SEQ ID NO: 118136 - DNA, 81 bp, Homo sapiens
attatacggaaagtatattcattgccttcaagaagcttagtaaccttgcagctgagagtctgcacattggcatcaaccaca

SEQ ID NO: 118137 - DNA, 81 bp, Homo sapiens
agtatattcattgccttcaagaagcttagtaaccttgcagctgagagtctgcacattggcatcaaccacagtccaaactaa

SEQ ID NO: 118138 - DNA, 80 bp, Homo sapiens
tgccttcaagaagcttagtaaccttgcagctgagagtctgcacattggcatcaaccacagtccaaactaagcggctggtt

SEQ ID NO: 118139 - DNA, 79 bp, Homo sapiens
aagaagcttagtaaccttgcagctgagagtctgcacattggcatcaaccacagtccaaactaagcggctggtttctctc

SEQ ID NO: 118140 - DNA, 80 bp, Homo sapiens
taaccttgcagctgagagtctgcacattggcatcaaccacagtccaaactaagcggctggtttctctcctttccacaata

SEQ ID NO: 118141 - DNA, 78 bp, Homo sapiens
agctgagagtctgcacattggcatcaaccacagtccaaactaagcggctggtttctctcctttccacaatataattta

SEQ ID NO: 118142 - DNA, 74 bp, Homo sapiens
acagtccaaactaagcggctggtttctctcctttccacaatataatttatgatgtcactcccaccatcctgaag

SEQ ID NO: 118143 - DNA, 73 bp, Homo sapiens
taagcggctggtttctctcctttccacaatataatttatgatgtcactcccaccatcctgaagtgggggtttc

SEQ ID NO: 118144 - DNA, 74 bp, Homo sapiens
ctttccacaatataatttatgatgtcactcccaccatcctgaagtgggggtttccaagctagtgtgcatttttc

SEQ ID NO: 118145 - DNA, 73 bp, Homo sapiens
accatcctgaagtgggggtttccaagctagtgtgcatttttctgctgtaactcctgagataacaacaggtcct

SEQ ID NO: 118146 - DNA, 73 bp, Homo sapiens
aagtgggggtttccaagctagtgtgcatttttctgctgtaactcctgagataacaacaggtccttcaggtggc

SEQ ID NO: 118147 - DNA, 77 bp, Homo sapiens
tttccaagctagtgtgcatttttctgctgtaactcctgagataacaacaggtccttcaggtggccctggtctgtcaa

SEQ ID NO: 118148 - DNA, 78 bp, Homo sapiens
tgcatttttctgctgtaactcctgagataacaacaggtccttcaggtggccctggtctgtcaagaaccttgacattca

SEQ ID NO: 118149 - DNA, 77 bp, Homo sapiens
tttctgctgtaactcctgagataacaacaggtccttcaggtggccctggtctgtcaagaaccttgacattcacagta

SEQ ID NO: 118150 - DNA, 76 bp, Homo sapiens
taactcctgagataacaacaggtccttcaggtggccctggtctgtcaagaaccttgacattcacagtaactgatct

SEQ ID NO: 118151 - DNA, 76 bp, Homo sapiens
ataacaacaggtccttcaggtggccctggtctgtcaagaaccttgacattcacagtaactgatctttctcctgcaa

SEQ ID NO: 118152 - DNA, 75 bp, Homo sapiens
ggtccttcaggtggccctggtctgtcaagaaccttgacattcacagtaactgatctttctcctgcaacatttttg

SEQ ID NO: 118153 - DNA, 77 bp, Homo sapiens
tctgtcaagaaccttgacattcacagtaactgatctttctcctgcaacatttttggccttcagtatgtaatttccac

SEQ ID NO: 118154 - DNA, 77 bp, Homo sapiens
ttgacattcacagtaactgatctttctcctgcaacatttttggccttcagtatgtaatttccactgtcgacacgtac

SEQ ID NO: 118155 - DNA, 76 bp, Homo sapiens
gtaactgatctttctcctgcaacatttttggccttcagtatgtaatttccactgtcgacacgtactgcatctttta

SEQ ID NO: 118156 - DNA, 75 bp, Homo sapiens
aacatttttggccttcagtatgtaatttccactgtcgacacgtactgcatcttttacactgagactggtggcaaa

SEQ ID NO: 118157 - DNA, 75 bp, Homo sapiens
agtatgtaatttccactgtcgacacgtactgcatcttttacactgagactggtggcaaagtcggtgctctttatt

SEQ ID NO: 118158 - DNA, 77 bp, Homo sapiens
tttccactgtcgacacgtactgcatcttttacactgagactggtggcaaagtcggtgctctttatttctaatcgagc

SEQ ID NO: 118159 - DNA, 76 bp, Homo sapiens
acacgtactgcatcttttacactgagactggtggcaaagtcggtgctctttatttctaatcgagctgtgtttgaaa

SEQ ID NO: 118160 - DNA, 77 bp, Homo sapiens
atcttttacactgagactggtggcaaagtcggtgctctttatttctaatcgagctgtgtttgaaagctcctgatcac

SEQ ID NO: 118161 - DNA, 76 bp, Homo sapiens
tggcaaagtcggtgctctttatttctaatcgagctgtgtttgaaagctcctgatcaccttttatccactgaatggt

SEQ ID NO: 118162 - DNA, 75 bp, Homo sapiens
tgctctttatttctaatcgagctgtgtttgaaagctcctgatcaccttttatccactgaatggttggtattggtt

SEQ ID NO: 118163 - DNA, 76 bp, Homo sapiens
ttatttctaatcgagctgtgtttgaaagctcctgatcaccttttatccactgaatggttggtattggtttgccata

SEQ ID NO: 118164 - DNA, 78 bp, Homo sapiens
agctgtgtttgaaagctcctgatcaccttttatccactgaatggttggtattggtttgccataaatatctgcatcaac

SEQ ID NO: 118165 - DNA, 80 bp, Homo sapiens
atcaccttttatccactgaatggttggtattggtttgccataaatatctgcatcaaccttgaatgattcaccagcatgaa

SEQ ID NO: 118166 - DNA, 80 bp, Homo sapiens
tttatccactgaatggttggtattggtttgccataaatatctgcatcaaccttgaatgattcaccagcatgaaccacgat

SEQ ID NO: 118167 - DNA, 80 bp, Homo sapiens
atggttggtattggtttgccataaatatctgcatcaaccttgaatgattcaccagcatgaaccacgattgtgtctttgta

SEQ ID NO: 118168 - DNA, 80 bp, Homo sapiens
ataaatatctgcatcaaccttgaatgattcaccagcatgaaccacgattgtgtctttgtattttggatccatacttattc

SEQ ID NO: 118169 - DNA, 80 bp, Homo sapiens
atctgcatcaaccttgaatgattcaccagcatgaaccacgattgtgtctttgtattttggatccatacttattcgtggtg

SEQ ID NO: 118170 - DNA, 79 bp, Homo sapiens
ccagcatgaaccacgattgtgtctttgtattttggatccatacttattcgtggtggatctacctcatctctagctgtta

SEQ ID NO: 118171 - DNA, 78 bp, Homo sapiens
atgaaccacgattgtgtctttgtattttggatccatacttattcgtggtggatctacctcatctctagctgttattgc

SEQ ID NO: 118172 - DNA, 79 bp, Homo sapiens
gtctttgtattttggatccatacttattcgtggtggatctacctcatctctagctgttattgctcctgtgctttctgaa

SEQ ID NO: 118173 - DNA, 81 bp, Homo sapiens
tattttggatccatacttattcgtggtggatctacctcatctctagctgttattgctcctgtgctttctgaaggctcacta

SEQ ID NO: 118174 - DNA, 80 bp, Homo sapiens
atccatacttattcgtggtggatctacctcatctctagctgttattgctcctgtgctttctgaaggctcactaaacactc

SEQ ID NO: 118175 - DNA, 80 bp, Homo sapiens
attcgtggtggatctacctcatctctagctgttattgctcctgtgctttctgaaggctcactaaacactcctgcggcatt

SEQ ID NO: 118176 - DNA, 80 bp, Homo sapiens
atctacctcatctctagctgttattgctcctgtgctttctgaaggctcactaaacactcctgcggcatttcgggctataa

SEQ ID NO: 118177 - DNA, 77 bp, Homo sapiens
tagctgttattgctcctgtgctttctgaaggctcactaaacactcctgcggcatttcgggctataacccggaactca

SEQ ID NO: 118178 - DNA, 77 bp, Homo sapiens
ttattgctcctgtgctttctgaaggctcactaaacactcctgcggcatttcgggctataacccggaactcatatctg

SEQ ID NO: 118179 - DNA, 76 bp, Homo sapiens
ctttctgaaggctcactaaacactcctgcggcatttcgggctataacccggaactcatatctgtgatcttcaacta

SEQ ID NO: 118180 - DNA, 76 bp, Homo sapiens
gctcactaaacactcctgcggcatttcgggctataacccggaactcatatctgtgatcttcaactaggccagttac

SEQ ID NO: 118181 - DNA, 75 bp, Homo sapiens
taaacactcctgcggcatttcgggctataacccggaactcatatctgtgatcttcaactaggccagttacttcaa

SEQ ID NO: 118182 - DNA, 76 bp, Homo sapiens
gcatttcgggctataacccggaactcatatctgtgatcttcaactaggccagttacttcaaaatgagtgtcaataa

SEQ ID NO: 118183 - DNA, 75 bp, Homo sapiens
ctataacccggaactcatatctgtgatcttcaactaggccagttacttcaaaatgagtgtcaataatatttgtaa

SEQ ID NO: 118184 - DNA, 73 bp, Homo sapiens
acccggaactcatatctgtgatcttcaactaggccagttacttcaaaatgagtgtcaataatatttgtaaaac

SEQ ID NO: 118185 - DNA, 72 bp, Homo sapiens
atcttcaactaggccagttacttcaaaatgagtgtcaataatatttgtaaaactggctttcatccaacggcc

SEQ ID NO: 118186 - DNA, 70 bp, Homo sapiens
agttacttcaaaatgagtgtcaataatatttgtaaaactggctttcatccaacggccctcaggtaattct

SEQ ID NO: 118187 - DNA, 71 bp, Homo sapiens
cttcaaaatgagtgtcaataatatttgtaaaactggctttcatccaacggccctcaggtaattctttcttc

SEQ ID NO: 118188 - DNA, 71 bp, Homo sapiens
caataatatttgtaaaactggctttcatccaacggccctcaggtaattctttcttctcaacaatataacca

SEQ ID NO: 118189 - DNA, 76 bp, Homo sapiens
tggctttcatccaacggccctcaggtaattctttcttctcaacaatataaccagtgatcttgcttccaccgtcata

SEQ ID NO: 118190 - DNA, 71 bp, Homo sapiens
aacggccctcaggtaattctttcttctcaacaatataaccagtgatcttgcttccaccgtcataggtgggt

SEQ ID NO: 118191 - DNA, 73 bp, Homo sapiens
aggtaattctttcttctcaacaatataaccagtgatcttgcttccaccgtcataggtgggtttcttccactga

SEQ ID NO: 118192 - DNA, 74 bp, Homo sapiens
aacaatataaccagtgatcttgcttccaccgtcataggtgggtttcttccactgaagagtcacagaattccttg

SEQ ID NO: 118193 - DNA, 77 bp, Homo sapiens
taaccagtgatcttgcttccaccgtcataggtgggtttcttccactgaagagtcacagaattccttgtgacaatgat

SEQ ID NO: 118194 - DNA, 78 bp, Homo sapiens
tcttgcttccaccgtcataggtgggtttcttccactgaagagtcacagaattccttgtgacaatgattgcctctggcc

SEQ ID NO: 118195 - DNA, 80 bp, Homo sapiens
tcataggtgggtttcttccactgaagagtcacagaattccttgtgacaatgattgcctctggccgtcctggtggatcaca

SEQ ID NO: 118196 - DNA, 80 bp, Homo sapiens
gtttcttccactgaagagtcacagaattccttgtgacaatgattgcctctggccgtcctggtggatcacatgggtcacga

SEQ ID NO: 118197 - DNA, 83 bp, Homo sapiens
tgaagagtcacagaattccttgtgacaatgattgcctctggccgtcctggtggatcacatgggtcacgagccacataacattc

SEQ ID NO: 118198 - DNA, 81 bp, Homo sapiens
acagaattccttgtgacaatgattgcctctggccgtcctggtggatcacatgggtcacgagccacataacattctgatact

SEQ ID NO: 118199 - DNA, 80 bp, Homo sapiens
aatgattgcctctggccgtcctggtggatcacatgggtcacgagccacataacattctgatactttactcggcttgccaa

SEQ ID NO: 118200 - DNA, 80 bp, Homo sapiens
gccgtcctggtggatcacatgggtcacgagccacataacattctgatactttactcggcttgccaatgcccacgatgttc

SEQ ID NO: 118201 - DNA, 85 bp, Homo sapiens
tggatcacatgggtcacgagccacataacattctgatactttactcggcttgccaatgcccacgatgttctctgcagagactcta

SEQ ID NO: 118202 - DNA, 80 bp, Homo sapiens
atgggtcacgagccacataacattctgatactttactcggcttgccaatgcccacgatgttctctgcagagactctaaat

SEQ ID NO: 118203 - DNA, 82 bp, Homo sapiens
agccacataacattctgatactttactcggcttgccaatgcccacgatgttctctgcagagactctaaattcatattcaaca

SEQ ID NO: 118204 - DNA, 80 bp, Homo sapiens
ttctgatactttactcggcttgccaatgcccacgatgttctctgcagagactctaaattcatattcaacaccttcttcaa

SEQ ID NO: 118205 - DNA, 78 bp, Homo sapiens
atactttactcggcttgccaatgcccacgatgttctctgcagagactctaaattcatattcaacaccttcttcaaggc

SEQ ID NO: 118206 - DNA, 78 bp, Homo sapiens
cttgccaatgcccacgatgttctctgcagagactctaaattcatattcaacaccttcttcaaggccagttgtcttaaa

SEQ ID NO: 118207 - DNA, 76 bp, Homo sapiens
cacgatgttctctgcagagactctaaattcatattcaacaccttcttcaaggccagttgtcttaaacttggtttga

SEQ ID NO: 118208 - DNA, 75 bp, Homo sapiens
ttctctgcagagactctaaattcatattcaacaccttcttcaaggccagttgtcttaaacttggtttgaggaata

SEQ ID NO: 118209 - DNA, 69 bp, Homo sapiens
ctctaaattcatattcaacaccttcttcaaggccagttgtcttaaacttggtttgaggaataggtgttt

SEQ ID NO: 118210 - DNA, 70 bp, Homo sapiens
ttcatattcaacaccttcttcaaggccagttgtcttaaacttggtttgaggaataggtgttttattcaac

SEQ ID NO: 118211 - DNA, 66 bp, Homo sapiens
accttcttcaaggccagttgtcttaaacttggtttgaggaataggtgttttattcaacttaaccca

SEQ ID NO: 118212 - DNA, 68 bp, Homo sapiens
aaggccagttgtcttaaacttggtttgaggaataggtgttttattcaacttaacccagaggatgctat

SEQ ID NO: 118213 - DNA, 68 bp, Homo sapiens
gttgtcttaaacttggtttgaggaataggtgttttattcaacttaacccagaggatgctatttctttc

SEQ ID NO: 118214 - DNA, 73 bp, Homo sapiens
tggtttgaggaataggtgttttattcaacttaacccagaggatgctatttctttccttgcgttctagatgata

SEQ ID NO: 118215 - DNA, 75 bp, Homo sapiens
ataggtgttttattcaacttaacccagaggatgctatttctttccttgcgttctagatgatagccaatgactcta

SEQ ID NO: 118216 - DNA, 78 bp, Homo sapiens
acttaacccagaggatgctatttctttccttgcgttctagatgatagccaatgactctacttcctccatcactgattg

SEQ ID NO: 118217 - DNA, 81 bp, Homo sapiens
atgctatttctttccttgcgttctagatgatagccaatgactctacttcctccatcactgattggctcattccattgtact

SEQ ID NO: 118218 - DNA, 82 bp, Homo sapiens
tttctttccttgcgttctagatgatagccaatgactctacttcctccatcactgattggctcattccattgtacttccatgc

SEQ ID NO: 118219 - DNA, 83 bp, Homo sapiens
cgttctagatgatagccaatgactctacttcctccatcactgattggctcattccattgtacttccatgctgtccctggagga

SEQ ID NO: 118220 - DNA, 83 bp, Homo sapiens
atagccaatgactctacttcctccatcactgattggctcattccattgtacttccatgctgtccctggaggacagtgtgacaa

SEQ ID NO: 118221 - DNA, 83 bp, Homo sapiens
ttcctccatcactgattggctcattccattgtacttccatgctgtccctggaggacagtgtgacaactggagtgccaggagga

SEQ ID NO: 118222 - DNA, 78 bp, Homo sapiens
ttggctcattccattgtacttccatgctgtccctggaggacagtgtgacaactggagtgccaggaggaccaggaactt

SEQ ID NO: 118223 - DNA, 77 bp, Homo sapiens
attccattgtacttccatgctgtccctggaggacagtgtgacaactggagtgccaggaggaccaggaactttgaatg

SEQ ID NO: 118224 - DNA, 77 bp, Homo sapiens
gtacttccatgctgtccctggaggacagtgtgacaactggagtgccaggaggaccaggaactttgaatggatattgg

SEQ ID NO: 118225 - DNA, 77 bp, Homo sapiens
tccctggaggacagtgtgacaactggagtgccaggaggaccaggaactttgaatggatattgggctacagtaggctc

SEQ ID NO: 118226 - DNA, 78 bp, Homo sapiens
cagtgtgacaactggagtgccaggaggaccaggaactttgaatggatattgggctacagtaggctctgaattgaggta

SEQ ID NO: 118227 - DNA, 75 bp, Homo sapiens
caggaggaccaggaactttgaatggatattgggctacagtaggctctgaattgaggtaggtactcttcccatatc

SEQ ID NO: 118228 - DNA, 73 bp, Homo sapiens
accaggaactttgaatggatattgggctacagtaggctctgaattgaggtaggtactcttcccatatctgttt

SEQ ID NO: 118229 - DNA, 81 bp, Homo sapiens
taggctctgaattgaggtaggtactcttcccatatctgttttcagctgcaattctaaactgatattcacatccagtcttca

SEQ ID NO: 118230 - DNA, 80 bp, Homo sapiens
aattgaggtaggtactcttcccatatctgttttcagctgcaattctaaactgatattcacatccagtcttcagtctgcaa

SEQ ID NO: 118231 - DNA, 81 bp, Homo sapiens
tactcttcccatatctgttttcagctgcaattctaaactgatattcacatccagtcttcagtctgcaagcctttattgttg

SEQ ID NO: 118232 - DNA, 81 bp, Homo sapiens
atatctgttttcagctgcaattctaaactgatattcacatccagtcttcagtctgcaagcctttattgttgtccttgcaac

SEQ ID NO: 118233 - DNA, 84 bp, Homo sapiens
tttcagctgcaattctaaactgatattcacatccagtcttcagtctgcaagcctttattgttgtccttgcaactgtagctgata

SEQ ID NO: 118234 - DNA, 79 bp, Homo sapiens
aattctaaactgatattcacatccagtcttcagtctgcaagcctttattgttgtccttgcaactgtagctgatacaatt

SEQ ID NO: 118235 - DNA, 80 bp, Homo sapiens
atattcacatccagtcttcagtctgcaagcctttattgttgtccttgcaactgtagctgatacaatttgccaggtggttg

SEQ ID NO: 118236 - DNA, 79 bp, Homo sapiens
acatccagtcttcagtctgcaagcctttattgttgtccttgcaactgtagctgatacaatttgccaggtggttgtggaa

SEQ ID NO: 118237 - DNA, 75 bp, Homo sapiens
ttgtccttgcaactgtagctgatacaatttgccaggtggttgtggaagtgtcccgtttctcaacaatgtaattat

SEQ ID NO: 118238 - DNA, 75 bp, Homo sapiens
tacaatttgccaggtggttgtggaagtgtcccgtttctcaacaatgtaattattgatagaacttccaccatcata

SEQ ID NO: 118239 - DNA, 74 bp, Homo sapiens
tttgccaggtggttgtggaagtgtcccgtttctcaacaatgtaattattgatagaacttccaccatcatacttg

SEQ ID NO: 118240 - DNA, 72 bp, Homo sapiens
ggttgtggaagtgtcccgtttctcaacaatgtaattattgatagaacttccaccatcatacttgggtgggcc

SEQ ID NO: 118241 - DNA, 71 bp, Homo sapiens
ccgtttctcaacaatgtaattattgatagaacttccaccatcatacttgggtgggccccaggaaagagtaa

SEQ ID NO: 118242 - DNA, 74 bp, Homo sapiens
aacaatgtaattattgatagaacttccaccatcatacttgggtgggccccaggaaagagtaatactatcagctg

SEQ ID NO: 118243 - DNA, 74 bp, Homo sapiens
atcatacttgggtgggccccaggaaagagtaatactatcagctgtcacttcatccattttaactggtccagttg

SEQ ID NO: 118244 - DNA, 73 bp, Homo sapiens
ttgggtgggccccaggaaagagtaatactatcagctgtcacttcatccattttaactggtccagttggaggcc

SEQ ID NO: 118245 - DNA, 74 bp, Homo sapiens
aggaaagagtaatactatcagctgtcacttcatccattttaactggtccagttggaggccctggtttgtcaaga

SEQ ID NO: 118246 - DNA, 75 bp, Homo sapiens
atactatcagctgtcacttcatccattttaactggtccagttggaggccctggtttgtcaagaacgataacatta

SEQ ID NO: 118247 - DNA, 70 bp, Homo sapiens
ctgtcacttcatccattttaactggtccagttggaggccctggtttgtcaagaacgataacattaagggt

SEQ ID NO: 118248 - DNA, 70 bp, Homo sapiens
ttcatccattttaactggtccagttggaggccctggtttgtcaagaacgataacattaagggtttcaata

SEQ ID NO: 118249 - DNA, 69 bp, Homo sapiens
ttttaactggtccagttggaggccctggtttgtcaagaacgataacattaagggtttcaatagcttcac

SEQ ID NO: 118250 - DNA, 72 bp, Homo sapiens
ttggaggccctggtttgtcaagaacgataacattaagggtttcaatagcttcaccagctgagttagtcagtt

SEQ ID NO: 118251 - DNA, 73 bp, Homo sapiens
tggtttgtcaagaacgataacattaagggtttcaatagcttcaccagctgagttagtcagtttaaccacataa

SEQ ID NO: 118252 - DNA, 74 bp, Homo sapiens
ataacattaagggtttcaatagcttcaccagctgagttagtcagtttaaccacataatggccaacatcttctcg

SEQ ID NO: 118253 - DNA, 76 bp, Homo sapiens
tttcaatagcttcaccagctgagttagtcagtttaaccacataatggccaacatcttctcggcaggcgtcctttat

SEQ ID NO: 118254 - DNA, 78 bp, Homo sapiens
tagcttcaccagctgagttagtcagtttaaccacataatggccaacatcttctcggcaggcgtcctttattgtcagta

SEQ ID NO: 118255 - DNA, 73 bp, Homo sapiens
agttagtcagtttaaccacataatggccaacatcttctcggcaggcgtcctttattgtcagtagtgaattatt

SEQ ID NO: 118256 - DNA, 79 bp, Homo sapiens
ataatggccaacatcttctcggcaggcgtcctttattgtcagtagtgaattattttctgtgctctctgcatttactcta

SEQ ID NO: 118257 - DNA, 79 bp, Homo sapiens
aacatcttctcggcaggcgtcctttattgtcagtagtgaattattttctgtgctctctgcatttactctagttgtctgc

SEQ ID NO: 118258 - DNA, 79 bp, Homo sapiens
ctttattgtcagtagtgaattattttctgtgctctctgcatttactctagttgtctgcttcagtggtacattatcttta

SEQ ID NO: 118259 - DNA, 79 bp, Homo sapiens
aattattttctgtgctctctgcatttactctagttgtctgcttcagtggtacattatctttatgccaggttacagctgg

SEQ ID NO: 118260 - DNA, 78 bp, Homo sapiens
ctctctgcatttactctagttgtctgcttcagtggtacattatctttatgccaggttacagctggggtagggcggcca

SEQ ID NO: 118261 - DNA, 75 bp, Homo sapiens
atttactctagttgtctgcttcagtggtacattatctttatgccaggttacagctggggtagggcggccaatgaa

SEQ ID NO: 118262 - DNA, 74 bp, Homo sapiens
cttcagtggtacattatctttatgccaggttacagctggggtagggcggccaatgaatggaacatcaactttta

SEQ ID NO: 118263 - DNA, 74 bp, Homo sapiens
tacattatctttatgccaggttacagctggggtagggcggccaatgaatggaacatcaacttttaggtcttcac

SEQ ID NO: 118264 - DNA, 75 bp, Homo sapiens
ttatgccaggttacagctggggtagggcggccaatgaatggaacatcaacttttaggtcttcacctgccagtaca

SEQ ID NO: 118265 - DNA, 74 bp, Homo sapiens
agctggggtagggcggccaatgaatggaacatcaacttttaggtcttcacctgccagtacagtgaaagtattga

SEQ ID NO: 118266 - DNA, 74 bp, Homo sapiens
tagggcggccaatgaatggaacatcaacttttaggtcttcacctgccagtacagtgaaagtattgaacaggagt

SEQ ID NO: 118267 - DNA, 74 bp, Homo sapiens
aatgaatggaacatcaacttttaggtcttcacctgccagtacagtgaaagtattgaacaggagtttgaaggctg

SEQ ID NO: 118268 - DNA, 74 bp, Homo sapiens
atcaacttttaggtcttcacctgccagtacagtgaaagtattgaacaggagtttgaaggctggtggaatgacaa

SEQ ID NO: 118269 - DNA, 74 bp, Homo sapiens
ttttaggtcttcacctgccagtacagtgaaagtattgaacaggagtttgaaggctggtggaatgacaagatctt

SEQ ID NO: 118270 - DNA, 79 bp, Homo sapiens
acctgccagtacagtgaaagtattgaacaggagtttgaaggctggtggaatgacaagatctttggcgatcactggcaca

SEQ ID NO: 118271 - DNA, 79 bp, Homo sapiens
agtgaaagtattgaacaggagtttgaaggctggtggaatgacaagatctttggcgatcactggcacactcagttgtcta

SEQ ID NO: 118272 - DNA, 80 bp, Homo sapiens
agtattgaacaggagtttgaaggctggtggaatgacaagatctttggcgatcactggcacactcagttgtctaggatcac

SEQ ID NO: 118273 - DNA, 81 bp, Homo sapiens
agtttgaaggctggtggaatgacaagatctttggcgatcactggcacactcagttgtctaggatcactgatgcccttttca

SEQ ID NO: 118274 - DNA, 85 bp, Homo sapiens
tggtggaatgacaagatctttggcgatcactggcacactcagttgtctaggatcactgatgcccttttcattctgagctgaaaca

SEQ ID NO: 118275 - DNA, 81 bp, Homo sapiens
acaagatctttggcgatcactggcacactcagttgtctaggatcactgatgcccttttcattctgagctgaaacacggaaa

SEQ ID NO: 118276 - DNA, 81 bp, Homo sapiens
tttggcgatcactggcacactcagttgtctaggatcactgatgcccttttcattctgagctgaaacacggaaagagtattc

SEQ ID NO: 118277 - DNA, 80 bp, Homo sapiens
tggcacactcagttgtctaggatcactgatgcccttttcattctgagctgaaacacggaaagagtattcttcaccctgaa

SEQ ID NO: 118278 - DNA, 76 bp, Homo sapiens
agttgtctaggatcactgatgcccttttcattctgagctgaaacacggaaagagtattcttcaccctgaattaatc

SEQ ID NO: 118279 - DNA, 78 bp, Homo sapiens
taggatcactgatgcccttttcattctgagctgaaacacggaaagagtattcttcaccctgaattaatccagtgatag

SEQ ID NO: 118280 - DNA, 76 bp, Homo sapiens
cccttttcattctgagctgaaacacggaaagagtattcttcaccctgaattaatccagtgatagtggcttcagtga

SEQ ID NO: 118281 - DNA, 75 bp, Homo sapiens
aaacacggaaagagtattcttcaccctgaattaatccagtgatagtggcttcagtgaccttgactgtggcacacg

SEQ ID NO: 118282 - DNA, 76 bp, Homo sapiens
aaagagtattcttcaccctgaattaatccagtgatagtggcttcagtgaccttgactgtggcacacgtggcccatt

SEQ ID NO: 118283 - DNA, 79 bp, Homo sapiens
ttcttcaccctgaattaatccagtgatagtggcttcagtgaccttgactgtggcacacgtggcccatttgtcactgcct

SEQ ID NO: 118284 - DNA, 82 bp, Homo sapiens
atagtggcttcagtgaccttgactgtggcacacgtggcccatttgtcactgcctttggtctgcatctccacaatgtagccta

SEQ ID NO: 118285 - DNA, 84 bp, Homo sapiens
ttgactgtggcacacgtggcccatttgtcactgcctttggtctgcatctccacaatgtagcctagaattcggctgcctccatca

SEQ ID NO: 118286 - DNA, 82 bp, Homo sapiens
ggcccatttgtcactgcctttggtctgcatctccacaatgtagcctagaattcggctgcctccatcatgctctggtttctcc

SEQ ID NO: 118287 - DNA, 83 bp, Homo sapiens
actgcctttggtctgcatctccacaatgtagcctagaattcggctgcctccatcatgctctggtttctcccaagagagtgaca

SEQ ID NO: 118288 - DNA, 85 bp, Homo sapiens
tgcatctccacaatgtagcctagaattcggctgcctccatcatgctctggtttctcccaagagagtgacacactatttcttgtga

SEQ ID NO: 118289 - DNA, 82 bp, Homo sapiens
acaatgtagcctagaattcggctgcctccatcatgctctggtttctcccaagagagtgacacactatttcttgtgacatcca

SEQ ID NO: 118290 - DNA, 81 bp, Homo sapiens
tagaattcggctgcctccatcatgctctggtttctcccaagagagtgacacactatttcttgtgacatccatcaaagttat

SEQ ID NO: 118291 - DNA, 73 bp, Homo sapiens
tttctcccaagagagtgacacactatttcttgtgacatccatcaaagttatttttcctggaggaagaggtcgt

SEQ ID NO: 118292 - DNA, 75 bp, Homo sapiens
aagagagtgacacactatttcttgtgacatccatcaaagttatttttcctggaggaagaggtcgttctgatgctt

SEQ ID NO: 118293 - DNA, 76 bp, Homo sapiens
acacactatttcttgtgacatccatcaaagttatttttcctggaggaagaggtcgttctgatgctttcacagattc

SEQ ID NO: 118294 - DNA, 76 bp, Homo sapiens
atcaaagttatttttcctggaggaagaggtcgttctgatgctttcacagattctgcggtttcagcaggcagcccaa

SEQ ID NO: 118295 - DNA, 80 bp, Homo sapiens
tatttttcctggaggaagaggtcgttctgatgctttcacagattctgcggtttcagcaggcagcccaatgccatattcat

SEQ ID NO: 118296 - DNA, 81 bp, Homo sapiens
aggaagaggtcgttctgatgctttcacagattctgcggtttcagcaggcagcccaatgccatattcattttctgcgagaac

SEQ ID NO: 118297 - DNA, 82 bp, Homo sapiens
gtcgttctgatgctttcacagattctgcggtttcagcaggcagcccaatgccatattcattttctgcgagaaccctgaaata

SEQ ID NO: 118298 - DNA, 82 bp, Homo sapiens
atgctttcacagattctgcggtttcagcaggcagcccaatgccatattcattttctgcgagaaccctgaaatagtagctaca

SEQ ID NO: 118299 - DNA, 80 bp, Homo sapiens
attctgcggtttcagcaggcagcccaatgccatattcattttctgcgagaaccctgaaatagtagctacagccttcttga

SEQ ID NO: 118300 - DNA, 77 bp, Homo sapiens
agcccaatgccatattcattttctgcgagaaccctgaaatagtagctacagccttcttgaagctggtctaccttcca

SEQ ID NO: 118301 - DNA, 74 bp, Homo sapiens
atattcattttctgcgagaaccctgaaatagtagctacagccttcttgaagctggtctaccttccaggaagtct

SEQ ID NO: 118302 - DNA, 75 bp, Homo sapiens
attttctgcgagaaccctgaaatagtagctacagccttcttgaagctggtctaccttccaggaagtcttgtggca

SEQ ID NO: 118303 - DNA, 74 bp, Homo sapiens
aaccctgaaatagtagctacagccttcttgaagctggtctaccttccaggaagtcttgtggcagtttgttgcaa

SEQ ID NO: 118304 - DNA, 76 bp, Homo sapiens
aatagtagctacagccttcttgaagctggtctaccttccaggaagtcttgtggcagtttgttgcaacagttgaata

SEQ ID NO: 118305 - DNA, 74 bp, Homo sapiens
ccttcttgaagctggtctaccttccaggaagtcttgtggcagtttgttgcaacagttgaatatgcttttcttgt

SEQ ID NO: 118306 - DNA, 76 bp, Homo sapiens
ttgaagctggtctaccttccaggaagtcttgtggcagtttgttgcaacagttgaatatgcttttcttgttgattcc

SEQ ID NO: 118307 - DNA, 74 bp, Homo sapiens
cttccaggaagtcttgtggcagtttgttgcaacagttgaatatgcttttcttgttgattcccgcttttcaacaa

SEQ ID NO: 118308 - DNA, 74 bp, Homo sapiens
agtcttgtggcagtttgttgcaacagttgaatatgcttttcttgttgattcccgcttttcaacaatatagttct

SEQ ID NO: 118309 - DNA, 74 bp, Homo sapiens
gtggcagtttgttgcaacagttgaatatgcttttcttgttgattcccgcttttcaacaatatagttcttgattt

SEQ ID NO: 118310 - DNA, 76 bp, Homo sapiens
tgcaacagttgaatatgcttttcttgttgattcccgcttttcaacaatatagttcttgatttttgaacctccatca

SEQ ID NO: 118311 - DNA, 72 bp, Homo sapiens
aatatgcttttcttgttgattcccgcttttcaacaatatagttcttgatttttgaacctccatcaaggagag

SEQ ID NO: 118312 - DNA, 70 bp, Homo sapiens
ttttcttgttgattcccgcttttcaacaatatagttcttgatttttgaacctccatcaaggagaggtggg

SEQ ID NO: 118313 - DNA, 72 bp, Homo sapiens
attcccgcttttcaacaatatagttcttgatttttgaacctccatcaaggagaggtgggtcccatgtgagtg

SEQ ID NO: 118314 - DNA, 77 bp, Homo sapiens
tttcaacaatatagttcttgatttttgaacctccatcaaggagaggtgggtcccatgtgagtgtgacagatgtctta

SEQ ID NO: 118315 - DNA, 76 bp, Homo sapiens
ttcttgatttttgaacctccatcaaggagaggtgggtcccatgtgagtgtgacagatgtcttagtgacctctttta

SEQ ID NO: 118316 - DNA, 73 bp, Homo sapiens
atttttgaacctccatcaaggagaggtgggtcccatgtgagtgtgacagatgtcttagtgacctcttttacct

SEQ ID NO: 118317 - DNA, 77 bp, Homo sapiens
ctccatcaaggagaggtgggtcccatgtgagtgtgacagatgtcttagtgacctcttttaccttcagatcctgtggg

SEQ ID NO: 118318 - DNA, 77 bp, Homo sapiens
tgtgagtgtgacagatgtcttagtgacctcttttaccttcagatcctgtggggggcctggtgtatcgagaactctaa

SEQ ID NO: 118319 - DNA, 75 bp, Homo sapiens
acagatgtcttagtgacctcttttaccttcagatcctgtggggggcctggtgtatcgagaactctaacattgaca

SEQ ID NO: 118320 - DNA, 76 bp, Homo sapiens
tgtcttagtgacctcttttaccttcagatcctgtggggggcctggtgtatcgagaactctaacattgacaaatgca

SEQ ID NO: 118321 - DNA, 77 bp, Homo sapiens
ttttaccttcagatcctgtggggggcctggtgtatcgagaactctaacattgacaaatgcagacttgctgcctgaac

SEQ ID NO: 118322 - DNA, 77 bp, Homo sapiens
gggggcctggtgtatcgagaactctaacattgacaaatgcagacttgctgcctgaactattttctacagttagtata

SEQ ID NO: 118323 - DNA, 80 bp, Homo sapiens
ctggtgtatcgagaactctaacattgacaaatgcagacttgctgcctgaactattttctacagttagtatatatttgcca

SEQ ID NO: 118324 - DNA, 79 bp, Homo sapiens
agaactctaacattgacaaatgcagacttgctgcctgaactattttctacagttagtatatatttgccactgtcaaatc

SEQ ID NO: 118325 - DNA, 78 bp, Homo sapiens
attgacaaatgcagacttgctgcctgaactattttctacagttagtatatatttgccactgtcaaatctgtttacatt

SEQ ID NO: 118326 - DNA, 77 bp, Homo sapiens
cagacttgctgcctgaactattttctacagttagtatatatttgccactgtcaaatctgtttacatttccaacaata

SEQ ID NO: 118327 - DNA, 75 bp, Homo sapiens
tttctacagttagtatatatttgccactgtcaaatctgtttacatttccaacaataagcagggtgtaagagcttg

SEQ ID NO: 118328 - DNA, 75 bp, Homo sapiens
agttagtatatatttgccactgtcaaatctgtttacatttccaacaataagcagggtgtaagagcttgtggattc

SEQ ID NO: 118329 - DNA, 77 bp, Homo sapiens
tgtcaaatctgtttacatttccaacaataagcagggtgtaagagcttgtggattcgatgctagctttatctaaagat

SEQ ID NO: 118330 - DNA, 77 bp, Homo sapiens
ttacatttccaacaataagcagggtgtaagagcttgtggattcgatgctagctttatctaaagattctccatggtcc

SEQ ID NO: 118331 - DNA, 75 bp, Homo sapiens
aacaataagcagggtgtaagagcttgtggattcgatgctagctttatctaaagattctccatggtcccgggccca

SEQ ID NO: 118332 - DNA, 78 bp, Homo sapiens
taagagcttgtggattcgatgctagctttatctaaagattctccatggtcccgggcccacttcacctcaggtgcaggc

SEQ ID NO: 118333 - DNA, 75 bp, Homo sapiens
attcgatgctagctttatctaaagattctccatggtcccgggcccacttcacctcaggtgcaggccttcctttga

SEQ ID NO: 118334 - DNA, 72 bp, Homo sapiens
ctttatctaaagattctccatggtcccgggcccacttcacctcaggtgcaggccttcctttgatgggaacaa

SEQ ID NO: 118335 - DNA, 71 bp, Homo sapiens
tctaaagattctccatggtcccgggcccacttcacctcaggtgcaggccttcctttgatgggaacaaaaag

SEQ ID NO: 118336 - DNA, 73 bp, Homo sapiens
ctccatggtcccgggcccacttcacctcaggtgcaggccttcctttgatgggaacaaaaagtctcagggtgca

SEQ ID NO: 118337 - DNA, 73 bp, Homo sapiens
aggccttcctttgatgggaacaaaaagtctcagggtgcagcaggcccttatagtaacaactttgcgcaggtca

SEQ ID NO: 118338 - DNA, 77 bp, Homo sapiens
tgatgggaacaaaaagtctcagggtgcagcaggcccttatagtaacaactttgcgcaggtcagcatccagttcaatt

SEQ ID NO: 118339 - DNA, 76 bp, Homo sapiens
aacaaaaagtctcagggtgcagcaggcccttatagtaacaactttgcgcaggtcagcatccagttcaatttctgga

SEQ ID NO: 118340 - DNA, 81 bp, Homo sapiens
agggtgcagcaggcccttatagtaacaactttgcgcaggtcagcatccagttcaatttctggaggcagcattctgtcttca

SEQ ID NO: 118341 - DNA, 78 bp, Homo sapiens
aggcccttatagtaacaactttgcgcaggtcagcatccagttcaatttctggaggcagcattctgtcttcagcctttg

SEQ ID NO: 118342 - DNA, 80 bp, Homo sapiens
ttatagtaacaactttgcgcaggtcagcatccagttcaatttctggaggcagcattctgtcttcagcctttggagttcca

SEQ ID NO: 118343 - DNA, 78 bp, Homo sapiens
aactttgcgcaggtcagcatccagttcaatttctggaggcagcattctgtcttcagcctttggagttccaggaacaag

SEQ ID NO: 118344 - DNA, 77 bp, Homo sapiens
aggtcagcatccagttcaatttctggaggcagcattctgtcttcagcctttggagttccaggaacaagggcaggttc

SEQ ID NO: 118345 - DNA, 73 bp, Homo sapiens
ttcaatttctggaggcagcattctgtcttcagcctttggagttccaggaacaagggcaggttccccaagtcct

SEQ ID NO: 118346 - DNA, 74 bp, Homo sapiens
tggaggcagcattctgtcttcagcctttggagttccaggaacaagggcaggttccccaagtccttcggaattca

SEQ ID NO: 118347 - DNA, 73 bp, Homo sapiens
attctgtcttcagcctttggagttccaggaacaagggcaggttccccaagtccttcggaattcatggcataga

SEQ ID NO: 118348 - DNA, 73 bp, Homo sapiens
agcctttggagttccaggaacaagggcaggttccccaagtccttcggaattcatggcatagatgcggatctta

SEQ ID NO: 118349 - DNA, 74 bp, Homo sapiens
agttccaggaacaagggcaggttccccaagtccttcggaattcatggcatagatgcggatcttatattcctgat

SEQ ID NO: 118350 - DNA, 77 bp, Homo sapiens
aggaacaagggcaggttccccaagtccttcggaattcatggcatagatgcggatcttatattcctgattctctgtga

SEQ ID NO: 118351 - DNA, 81 bp, Homo sapiens
ttccccaagtccttcggaattcatggcatagatgcggatcttatattcctgattctctgtgaggccagtgatagtatacga

SEQ ID NO: 118352 - DNA, 81 bp, Homo sapiens
aagtccttcggaattcatggcatagatgcggatcttatattcctgattctctgtgaggccagtgatagtatacgaagttgc

SEQ ID NO: 118353 - DNA, 83 bp, Homo sapiens
agtgatagtatacgaagttgccttgagtcctgctggtggagtgacaatctgccattcatcttcctctggcagggcaatctcaa

SEQ ID NO: 118354 - DNA, 82 bp, Homo sapiens
atacgaagttgccttgagtcctgctggtggagtgacaatctgccattcatcttcctctggcagggcaatctcaaccatatac

SEQ ID NO: 118355 - DNA, 84 bp, Homo sapiens
ttgagtcctgctggtggagtgacaatctgccattcatcttcctctggcagggcaatctcaaccatatacccagtgatttctgaa

SEQ ID NO: 118356 - DNA, 84 bp, Homo sapiens
tggtggagtgacaatctgccattcatcttcctctggcagggcaatctcaaccatatacccagtgatttctgaaccaccatcata

SEQ ID NO: 118357 - DNA, 81 bp, Homo sapiens
caatctgccattcatcttcctctggcagggcaatctcaaccatatacccagtgatttctgaaccaccatcatagataggtt

SEQ ID NO: 118358 - DNA, 79 bp, Homo sapiens
ttcatcttcctctggcagggcaatctcaaccatatacccagtgatttctgaaccaccatcatagataggtttattccaa

SEQ ID NO: 118359 - DNA, 77 bp, Homo sapiens
agggcaatctcaaccatatacccagtgatttctgaaccaccatcatagataggtttattccaagcgattgaaatgga

SEQ ID NO: 118360 - DNA, 79 bp, Homo sapiens
aaccatatacccagtgatttctgaaccaccatcatagataggtttattccaagcgattgaaatggatgatctgcttgta

SEQ ID NO: 118361 - DNA, 80 bp, Homo sapiens
agtgatttctgaaccaccatcatagataggtttattccaagcgattgaaatggatgatctgcttgtatccagaacacgtg

SEQ ID NO: 118362 - DNA, 79 bp, Homo sapiens
ttctgaaccaccatcatagataggtttattccaagcgattgaaatggatgatctgcttgtatccagaacacgtgggtta

SEQ ID NO: 118363 - DNA, 76 bp, Homo sapiens
atagataggtttattccaagcgattgaaatggatgatctgcttgtatccagaacacgtgggttacctggtggtcca

SEQ ID NO: 118364 - DNA, 74 bp, Homo sapiens
aagcgattgaaatggatgatctgcttgtatccagaacacgtgggttacctggtggtccaggtttaaacacagtg

SEQ ID NO: 118365 - DNA, 74 bp, Homo sapiens
aaatggatgatctgcttgtatccagaacacgtgggttacctggtggtccaggtttaaacacagtgtcacaagcc

SEQ ID NO: 118366 - DNA, 70 bp, Homo sapiens
cttgtatccagaacacgtgggttacctggtggtccaggtttaaacacagtgtcacaagccttgtaaaatg

SEQ ID NO: 118367 - DNA, 69 bp, Homo sapiens
agaacacgtgggttacctggtggtccaggtttaaacacagtgtcacaagccttgtaaaatggactggta

SEQ ID NO: 118368 - DNA, 69 bp, Homo sapiens
tgggttacctggtggtccaggtttaaacacagtgtcacaagccttgtaaaatggactggtaggacttgg

SEQ ID NO: 118369 - DNA, 73 bp, Homo sapiens
tggtggtccaggtttaaacacagtgtcacaagccttgtaaaatggactggtaggacttggtgcactaattcca

SEQ ID NO: 118370 - DNA, 73 bp, Homo sapiens
aggtttaaacacagtgtcacaagccttgtaaaatggactggtaggacttggtgcactaattccagcagcattt

SEQ ID NO: 118371 - DNA, 77 bp, Homo sapiens
aagccttgtaaaatggactggtaggacttggtgcactaattccagcagcattttcagccataatcctgaactcatat

SEQ ID NO: 118372 - DNA, 82 bp, Homo sapiens
acttggtgcactaattccagcagcattttcagccataatcctgaactcatattcatgtccttctgtcagtccagacacttta

SEQ ID NO: 118373 - DNA, 81 bp, Homo sapiens
actaattccagcagcattttcagccataatcctgaactcatattcatgtccttctgtcagtccagacactttatatcttaa

SEQ ID NO: 118374 - DNA, 76 bp, Homo sapiens
agccataatcctgaactcatattcatgtccttctgtcagtccagacactttatatcttaaatcagtaagagttttt

SEQ ID NO: 118375 - DNA, 76 bp, Homo sapiens
cctgaactcatattcatgtccttctgtcagtccagacactttatatcttaaatcagtaagagtttttttgttgcat

SEQ ID NO: 118376 - DNA, 75 bp, Homo sapiens
attcatgtccttctgtcagtccagacactttatatcttaaatcagtaagagtttttttgttgcatttaatccagc

SEQ ID NO: 118377 - DNA, 74 bp, Homo sapiens
tgtccttctgtcagtccagacactttatatcttaaatcagtaagagtttttttgttgcatttaatccagcgttg

SEQ ID NO: 118378 - DNA, 74 bp, Homo sapiens
tcagtccagacactttatatcttaaatcagtaagagtttttttgttgcatttaatccagcgttggccagcttta

SEQ ID NO: 118379 - DNA, 72 bp, Homo sapiens
tttatatcttaaatcagtaagagtttttttgttgcatttaatccagcgttggccagctttatcacgccgttc

SEQ ID NO: 118380 - DNA, 73 bp, Homo sapiens
taaatcagtaagagtttttttgttgcatttaatccagcgttggccagctttatcacgccgttccacaatataa

SEQ ID NO: 118381 - DNA, 74 bp, Homo sapiens
gtttttttgttgcatttaatccagcgttggccagctttatcacgccgttccacaatataattgatgatttcact

SEQ ID NO: 118382 - DNA, 79 bp, Homo sapiens
tttgttgcatttaatccagcgttggccagctttatcacgccgttccacaatataattgatgatttcacttccaccatca

SEQ ID NO: 118383 - DNA, 80 bp, Homo sapiens
ttaatccagcgttggccagctttatcacgccgttccacaatataattgatgatttcacttccaccatcagaatcaggatg

SEQ ID NO: 118384 - DNA, 81 bp, Homo sapiens
tttatcacgccgttccacaatataattgatgatttcacttccaccatcagaatcaggatgtccccagcagacaaccatcga

SEQ ID NO: 118385 - DNA, 81 bp, Homo sapiens
tccacaatataattgatgatttcacttccaccatcagaatcaggatgtccccagcagacaaccatcgaatctttagtaata

SEQ ID NO: 118386 - DNA, 81 bp, Homo sapiens
tataattgatgatttcacttccaccatcagaatcaggatgtccccagcagacaaccatcgaatctttagtaatagttgtca

SEQ ID NO: 118387 - DNA, 77 bp, Homo sapiens
atttcacttccaccatcagaatcaggatgtccccagcagacaaccatcgaatctttagtaatagttgtcacttcagg

SEQ ID NO: 118388 - DNA, 74 bp, Homo sapiens
accatcagaatcaggatgtccccagcagacaaccatcgaatctttagtaatagttgtcacttcagggtttttgg

SEQ ID NO: 118389 - DNA, 74 bp, Homo sapiens
aatcaggatgtccccagcagacaaccatcgaatctttagtaatagttgtcacttcagggtttttgggcggatca

SEQ ID NO: 118390 - DNA, 72 bp, Homo sapiens
aatctttagtaatagttgtcacttcagggtttttgggcggatcagggggtccataaggattcactgcaagca

SEQ ID NO: 118391 - DNA, 75 bp, Homo sapiens
aatagttgtcacttcagggtttttgggcggatcagggggtccataaggattcactgcaagcacaggctctgattc

SEQ ID NO: 118392 - DNA, 76 bp, Homo sapiens
acttcagggtttttgggcggatcagggggtccataaggattcactgcaagcacaggctctgattccagtggctctc

SEQ ID NO: 118393 - DNA, 79 bp, Homo sapiens
tttgggcggatcagggggtccataaggattcactgcaagcacaggctctgattccagtggctctcccactccatattta

SEQ ID NO: 118394 - DNA, 81 bp, Homo sapiens
ggggtccataaggattcactgcaagcacaggctctgattccagtggctctcccactccatatttatttacagccatgacac

SEQ ID NO: 118395 - DNA, 80 bp, Homo sapiens
gctctgattccagtggctctcccactccatatttatttacagccatgacacggaatatgtattcattgcctttcaagagt

SEQ ID NO: 118396 - DNA, 77 bp, Homo sapiens
attccagtggctctcccactccatatttatttacagccatgacacggaatatgtattcattgcctttcaagagttta

SEQ ID NO: 118397 - DNA, 74 bp, Homo sapiens
tttacagccatgacacggaatatgtattcattgcctttcaagagtttagtgacctttagctttgttacttggac

SEQ ID NO: 118398 - DNA, 73 bp, Homo sapiens
acacggaatatgtattcattgcctttcaagagtttagtgacctttagctttgttacttggacttctgaggcta

SEQ ID NO: 118399 - DNA, 75 bp, Homo sapiens
tatgtattcattgcctttcaagagtttagtgacctttagctttgttacttggacttctgaggctacatttgtcca

SEQ ID NO: 118400 - DNA, 75 bp, Homo sapiens
tttcaagagtttagtgacctttagctttgttacttggacttctgaggctacatttgtccatgccaatctgctggt

SEQ ID NO: 118401 - DNA, 74 bp, Homo sapiens
tttagtgacctttagctttgttacttggacttctgaggctacatttgtccatgccaatctgctggtttcacgtt

SEQ ID NO: 118402 - DNA, 77 bp, Homo sapiens
ttagctttgttacttggacttctgaggctacatttgtccatgccaatctgctggtttcacgtttctgtactatgtaa

SEQ ID NO: 118403 - DNA, 78 bp, Homo sapiens
ttacttggacttctgaggctacatttgtccatgccaatctgctggtttcacgtttctgtactatgtaatgatcaattt

SEQ ID NO: 118404 - DNA, 79 bp, Homo sapiens
acttctgaggctacatttgtccatgccaatctgctggtttcacgtttctgtactatgtaatgatcaattttggcacctc

SEQ ID NO: 118405 - DNA, 79 bp, Homo sapiens
atgccaatctgctggtttcacgtttctgtactatgtaatgatcaattttggcacctccatcatccagtggagggaacca

SEQ ID NO: 118406 - DNA, 78 bp, Homo sapiens
ctggtttcacgtttctgtactatgtaatgatcaattttggcacctccatcatccagtggagggaaccatgatagtaca

SEQ ID NO: 118407 - DNA, 76 bp, Homo sapiens
acgtttctgtactatgtaatgatcaattttggcacctccatcatccagtggagggaaccatgatagtacacacttt

SEQ ID NO: 118408 - DNA, 81 bp, Homo sapiens
tgtactatgtaatgatcaattttggcacctccatcatccagtggagggaaccatgatagtacacacttttctgatgtcact

SEQ ID NO: 118409 - DNA, 80 bp, Homo sapiens
aatgatcaattttggcacctccatcatccagtggagggaaccatgatagtacacacttttctgatgtcacttcagttaca

SEQ ID NO: 118410 - DNA, 78 bp, Homo sapiens
tttggcacctccatcatccagtggagggaaccatgatagtacacacttttctgatgtcacttcagttacagccaaagg

SEQ ID NO: 118411 - DNA, 77 bp, Homo sapiens
atcatccagtggagggaaccatgatagtacacacttttctgatgtcacttcagttacagccaaaggtccttcaggtg

SEQ ID NO: 118412 - DNA, 74 bp, Homo sapiens
agggaaccatgatagtacacacttttctgatgtcacttcagttacagccaaaggtccttcaggtgggcctggtc

SEQ ID NO: 118413 - DNA, 74 bp, Homo sapiens
atagtacacacttttctgatgtcacttcagttacagccaaaggtccttcaggtgggcctggtctgtcaagaact

SEQ ID NO: 118414 - DNA, 74 bp, Homo sapiens
atgtcacttcagttacagccaaaggtccttcaggtgggcctggtctgtcaagaactttgacattgaaaatgtgt

SEQ ID NO: 118415 - DNA, 73 bp, Homo sapiens
aggtccttcaggtgggcctggtctgtcaagaactttgacattgaaaatgtgtttagcaaagccaccaggatta

SEQ ID NO: 118416 - DNA, 74 bp, Homo sapiens
aggtgggcctggtctgtcaagaactttgacattgaaaatgtgtttagcaaagccaccaggattagtcgctgtaa

SEQ ID NO: 118417 - DNA, 74 bp, Homo sapiens
ctggtctgtcaagaactttgacattgaaaatgtgtttagcaaagccaccaggattagtcgctgtaagggtatag

SEQ ID NO: 118418 - DNA, 74 bp, Homo sapiens
ttgaaaatgtgtttagcaaagccaccaggattagtcgctgtaagggtataggcaccactatcccttcttgttga

SEQ ID NO: 118419 - DNA, 73 bp, Homo sapiens
aatgtgtttagcaaagccaccaggattagtcgctgtaagggtataggcaccactatcccttcttgttgaatct

SEQ ID NO: 118420 - DNA, 71 bp, Homo sapiens
aaagccaccaggattagtcgctgtaagggtataggcaccactatcccttcttgttgaatctttgtttacca

SEQ ID NO: 118421 - DNA, 72 bp, Homo sapiens
attagtcgctgtaagggtataggcaccactatcccttcttgttgaatctttgtttaccagattagtagagaa

SEQ ID NO: 118422 - DNA, 72 bp, Homo sapiens
taagggtataggcaccactatcccttcttgttgaatctttgtttaccagattagtagagaaatctgcaattt

SEQ ID NO: 118423 - DNA, 72 bp, Homo sapiens
gtataggcaccactatcccttcttgttgaatctttgtttaccagattagtagagaaatctgcaatttttatt

SEQ ID NO: 118424 - DNA, 73 bp, Homo sapiens
tcccttcttgttgaatctttgtttaccagattagtagagaaatctgcaatttttatttctaactttgctgtgc

SEQ ID NO: 118425 - DNA, 75 bp, Homo sapiens
tgttgaatctttgtttaccagattagtagagaaatctgcaatttttatttctaactttgctgtgccttccagctc

SEQ ID NO: 118426 - DNA, 74 bp, Homo sapiens
ttgtttaccagattagtagagaaatctgcaatttttatttctaactttgctgtgccttccagctcttttccatc

SEQ ID NO: 118427 - DNA, 75 bp, Homo sapiens
attagtagagaaatctgcaatttttatttctaactttgctgtgccttccagctcttttccatctttgctccattc

SEQ ID NO: 118428 - DNA, 75 bp, Homo sapiens
aaatctgcaatttttatttctaactttgctgtgccttccagctcttttccatctttgctccattccattgttgga

SEQ ID NO: 118429 - DNA, 72 bp, Homo sapiens
aatttttatttctaactttgctgtgccttccagctcttttccatctttgctccattccattgttggaggtgg

SEQ ID NO: 118430 - DNA, 75 bp, Homo sapiens
tttctaactttgctgtgccttccagctcttttccatctttgctccattccattgttggaggtgggcggcctgaaa

SEQ ID NO: 118431 - DNA, 79 bp, Homo sapiens
tgccttccagctcttttccatctttgctccattccattgttggaggtgggcggcctgaaacatcagcttccagtctgaa

SEQ ID NO: 118432 - DNA, 79 bp, Homo sapiens
agctcttttccatctttgctccattccattgttggaggtgggcggcctgaaacatcagcttccagtctgaatgcttcac

SEQ ID NO: 118433 - DNA, 75 bp, Homo sapiens
attccattgttggaggtgggcggcctgaaacatcagcttccagtctgaatgcttcacctgcttttaatataaccg

SEQ ID NO: 118434 - DNA, 75 bp, Homo sapiens
tggaggtgggcggcctgaaacatcagcttccagtctgaatgcttcacctgcttttaatataaccgtgtccttaaa

SEQ ID NO: 118435 - DNA, 74 bp, Homo sapiens
cggcctgaaacatcagcttccagtctgaatgcttcacctgcttttaatataaccgtgtccttaaatttaacatc

SEQ ID NO: 118436 - DNA, 70 bp, Homo sapiens
cttccagtctgaatgcttcacctgcttttaatataaccgtgtccttaaatttaacatccacctttatctt

SEQ ID NO: 118437 - DNA, 70 bp, Homo sapiens
aatgcttcacctgcttttaatataaccgtgtccttaaatttaacatccacctttatctttggtgcctcaa

SEQ ID NO: 118438 - DNA, 71 bp, Homo sapiens
cttttaatataaccgtgtccttaaatttaacatccacctttatctttggtgcctcaacatcatccctgcaa

SEQ ID NO: 118439 - DNA, 75 bp, Homo sapiens
aatataaccgtgtccttaaatttaacatccacctttatctttggtgcctcaacatcatccctgcaagtgatagca

SEQ ID NO: 118440 - DNA, 82 bp, Homo sapiens
ttaaatttaacatccacctttatctttggtgcctcaacatcatccctgcaagtgatagcatcagatggctcagatggtggac

SEQ ID NO: 118441 - DNA, 86 bp, Homo sapiens
tttaacatccacctttatctttggtgcctcaacatcatccctgcaagtgatagcatcagatggctcagatggtggactgatggcac

SEQ ID NO: 118442 - DNA, 88 bp, Homo sapiens
ctttatctttggtgcctcaacatcatccctgcaagtgatagcatcagatggctcagatggtggactgatggcacctgcagcatttttg

SEQ ID NO: 118443 - DNA, 91 bp, Homo sapiens
tgcctcaacatcatccctgcaagtgatagcatcagatggctcagatggtggactgatggcacctgcagcatttttggcgatcacacggaat

SEQ ID NO: 118444 - DNA, 92 bp, Homo sapiens
agtgatagcatcagatggctcagatggtggactgatggcacctgcagcatttttggcgatcacacggaattcatatgcagcatcttctgtta

SEQ ID NO: 118445 - DNA, 92 bp, Homo sapiens
tagcatcagatggctcagatggtggactgatggcacctgcagcatttttggcgatcacacggaattcatatgcagcatcttctgttaggcca

SEQ ID NO: 118446 - DNA, 88 bp, Homo sapiens
tcagatggtggactgatggcacctgcagcatttttggcgatcacacggaattcatatgcagcatcttctgttaggccactgactgtaa

SEQ ID NO: 118447 - DNA, 85 bp, Homo sapiens
actgatggcacctgcagcatttttggcgatcacacggaattcatatgcagcatcttctgttaggccactgactgtaaattcattc

SEQ ID NO: 118448 - DNA, 81 bp, Homo sapiens
atcacacggaattcatatgcagcatcttctgttaggccactgactgtaaattcattctccaaaatgttgctgaagttggcc

SEQ ID NO: 118449 - DNA, 81 bp, Homo sapiens
aattcatatgcagcatcttctgttaggccactgactgtaaattcattctccaaaatgttgctgaagttggccttcagccac

SEQ ID NO: 118450 - DNA, 77 bp, Homo sapiens
catcttctgttaggccactgactgtaaattcattctccaaaatgttgctgaagttggccttcagccaccgtccatta

SEQ ID NO: 118451 - DNA, 72 bp, Homo sapiens
actgtaaattcattctccaaaatgttgctgaagttggccttcagccaccgtccattaggaaggtctctcttt

SEQ ID NO: 118452 - DNA, 72 bp, Homo sapiens
aatgttgctgaagttggccttcagccaccgtccattaggaaggtctctcttttcaacgatataactggtaat

SEQ ID NO: 118453 - DNA, 68 bp, Homo sapiens
aagttggccttcagccaccgtccattaggaaggtctctcttttcaacgatataactggtaattttaaa

SEQ ID NO: 118454 - DNA, 68 bp, Homo sapiens
ggccttcagccaccgtccattaggaaggtctctcttttcaacgatataactggtaattttaaagcccc

SEQ ID NO: 118455 - DNA, 70 bp, Homo sapiens
tccattaggaaggtctctcttttcaacgatataactggtaattttaaagcccccagtatattcaggctta

SEQ ID NO: 118456 - DNA, 69 bp, Homo sapiens
aggtctctcttttcaacgatataactggtaattttaaagcccccagtatattcaggcttagcccattta

SEQ ID NO: 118457 - DNA, 69 bp, Homo sapiens
tctcttttcaacgatataactggtaattttaaagcccccagtatattcaggcttagcccatttaagtgt

SEQ ID NO: 118458 - DNA, 71 bp, Homo sapiens
tataactggtaattttaaagcccccagtatattcaggcttagcccatttaagtgttactgtgtgtcttgta

SEQ ID NO: 118459 - DNA, 70 bp, Homo sapiens
tggtaattttaaagcccccagtatattcaggcttagcccatttaagtgttactgtgtgtcttgtaatatt

SEQ ID NO: 118460 - DNA, 70 bp, Homo sapiens
ccccagtatattcaggcttagcccatttaagtgttactgtgtgtcttgtaatatttagaggtactggttt

SEQ ID NO: 118461 - DNA, 71 bp, Homo sapiens
gtatattcaggcttagcccatttaagtgttactgtgtgtcttgtaatatttagaggtactggttttccagg

SEQ ID NO: 118462 - DNA, 70 bp, Homo sapiens
ttagcccatttaagtgttactgtgtgtcttgtaatatttagaggtactggttttccaggtgggtcaatgg

SEQ ID NO: 118463 - DNA, 72 bp, Homo sapiens
tttaagtgttactgtgtgtcttgtaatatttagaggtactggttttccaggtgggtcaatgggatccagagc

SEQ ID NO: 118464 - DNA, 75 bp, Homo sapiens
tgtgtcttgtaatatttagaggtactggttttccaggtgggtcaatgggatccagagccaacataggttctgatg

SEQ ID NO: 118465 - DNA, 75 bp, Homo sapiens
taatatttagaggtactggttttccaggtgggtcaatgggatccagagccaacataggttctgatggcttgcttg

SEQ ID NO: 118466 - DNA, 73 bp, Homo sapiens
aggtactggttttccaggtgggtcaatgggatccagagccaacataggttctgatggcttgcttggcttactt

SEQ ID NO: 118467 - DNA, 81 bp, Homo sapiens
gtgggtcaatgggatccagagccaacataggttctgatggcttgcttggcttacttttgcctgccatgttttctgcaatca

SEQ ID NO: 118468 - DNA, 80 bp, Homo sapiens
tccagagccaacataggttctgatggcttgcttggcttacttttgcctgccatgttttctgcaatcacccggaactcata

SEQ ID NO: 118469 - DNA, 78 bp, Homo sapiens
aacataggttctgatggcttgcttggcttacttttgcctgccatgttttctgcaatcacccggaactcataagcaata

SEQ ID NO: 118470 - DNA, 80 bp, Homo sapiens
ttctgatggcttgcttggcttacttttgcctgccatgttttctgcaatcacccggaactcataagcaataccatctgtaa

SEQ ID NO: 118471 - DNA, 77 bp, Homo sapiens
ttggcttacttttgcctgccatgttttctgcaatcacccggaactcataagcaataccatctgtaagtccacttgat

SEQ ID NO: 118472 - DNA, 77 bp, Homo sapiens
tacttttgcctgccatgttttctgcaatcacccggaactcataagcaataccatctgtaagtccacttgatttgaaa

SEQ ID NO: 118473 - DNA, 76 bp, Homo sapiens
atgttttctgcaatcacccggaactcataagcaataccatctgtaagtccacttgatttgaaaatgttgcctggta

SEQ ID NO: 118474 - DNA, 76 bp, Homo sapiens
ttctgcaatcacccggaactcataagcaataccatctgtaagtccacttgatttgaaaatgttgcctggtactaaa

SEQ ID NO: 118475 - DNA, 73 bp, Homo sapiens
acccggaactcataagcaataccatctgtaagtccacttgatttgaaaatgttgcctggtactaaagctttgc

SEQ ID NO: 118476 - DNA, 77 bp, Homo sapiens
atctgtaagtccacttgatttgaaaatgttgcctggtactaaagctttgctcacagtctgccagagaataccatttc

SEQ ID NO: 118477 - DNA, 74 bp, Homo sapiens
acttgatttgaaaatgttgcctggtactaaagctttgctcacagtctgccagagaataccatttcgttcttttc

SEQ ID NO: 118478 - DNA, 74 bp, Homo sapiens
atttgaaaatgttgcctggtactaaagctttgctcacagtctgccagagaataccatttcgttcttttctttca

SEQ ID NO: 118479 - DNA, 75 bp, Homo sapiens
ctggtactaaagctttgctcacagtctgccagagaataccatttcgttcttttctttcaacatgatatcctaaaa

SEQ ID NO: 118480 - DNA, 74 bp, Homo sapiens
actaaagctttgctcacagtctgccagagaataccatttcgttcttttctttcaacatgatatcctaaaatggg

SEQ ID NO: 118481 - DNA, 75 bp, Homo sapiens
acagtctgccagagaataccatttcgttcttttctttcaacatgatatcctaaaatggggcttccaccatcagaa

SEQ ID NO: 118482 - DNA, 74 bp, Homo sapiens
agagaataccatttcgttcttttctttcaacatgatatcctaaaatggggcttccaccatcagaaagtggctca

SEQ ID NO: 118483 - DNA, 75 bp, Homo sapiens
atttcgttcttttctttcaacatgatatcctaaaatggggcttccaccatcagaaagtggctcatgccagctaat

SEQ ID NO: 118484 - DNA, 79 bp, Homo sapiens
tttctttcaacatgatatcctaaaatggggcttccaccatcagaaagtggctcatgccagctaattgtcattgaatcct

SEQ ID NO: 118485 - DNA, 80 bp, Homo sapiens
ttcaacatgatatcctaaaatggggcttccaccatcagaaagtggctcatgccagctaattgtcattgaatccttggtaa

SEQ ID NO: 118486 - DNA, 79 bp, Homo sapiens
tatcctaaaatggggcttccaccatcagaaagtggctcatgccagctaattgtcattgaatccttggtaactgcagtta

SEQ ID NO: 118487 - DNA, 77 bp, Homo sapiens
atcagaaagtggctcatgccagctaattgtcattgaatccttggtaactgcagttacctgaggggtaccaggaggtc

SEQ ID NO: 118488 - DNA, 74 bp, Homo sapiens
ctcatgccagctaattgtcattgaatccttggtaactgcagttacctgaggggtaccaggaggtccaggaacct

SEQ ID NO: 118489 - DNA, 69 bp, Homo sapiens
attgaatccttggtaactgcagttacctgaggggtaccaggaggtccaggaaccttaaatggatagttg

SEQ ID NO: 118490 - DNA, 77 bp, Homo sapiens
agttacctgaggggtaccaggaggtccaggaaccttaaatggatagttggcaactatgcatgctgatgtgatgcctg

SEQ ID NO: 118491 - DNA, 79 bp, Homo sapiens
gggtaccaggaggtccaggaaccttaaatggatagttggcaactatgcatgctgatgtgatgcctggtccaactccata

SEQ ID NO: 118492 - DNA, 82 bp, Homo sapiens
aggtccaggaaccttaaatggatagttggcaactatgcatgctgatgtgatgcctggtccaactccatatctattctgagct

SEQ ID NO: 118493 - DNA, 82 bp, Homo sapiens
aggaaccttaaatggatagttggcaactatgcatgctgatgtgatgcctggtccaactccatatctattctgagcttttaca

SEQ ID NO: 118494 - DNA, 84 bp, Homo sapiens
aaatggatagttggcaactatgcatgctgatgtgatgcctggtccaactccatatctattctgagcttttacacggaactgata

SEQ ID NO: 118495 - DNA, 83 bp, Homo sapiens
aactatgcatgctgatgtgatgcctggtccaactccatatctattctgagcttttacacggaactgatactctaatccagtag

SEQ ID NO: 118496 - DNA, 81 bp, Homo sapiens
atgctgatgtgatgcctggtccaactccatatctattctgagcttttacacggaactgatactctaatccagtagtaaggc

SEQ ID NO: 118497 - DNA, 75 bp, Homo sapiens
atgcctggtccaactccatatctattctgagcttttacacggaactgatactctaatccagtagtaaggcgggtg

SEQ ID NO: 118498 - DNA, 73 bp, Homo sapiens
aactccatatctattctgagcttttacacggaactgatactctaatccagtagtaaggcgggtggctttatag

SEQ ID NO: 118499 - DNA, 73 bp, Homo sapiens
atatctattctgagcttttacacggaactgatactctaatccagtagtaaggcgggtggctttataggtagta

SEQ ID NO: 118500 - DNA, 69 bp, Homo sapiens
atactctaatccagtagtaaggcgggtggctttataggtagtacgtataacggtggttgctaactcaac

SEQ ID NO: 118501 - DNA, 67 bp, Homo sapiens
agtagtaaggcgggtggctttataggtagtacgtataacggtggttgctaactcaacccaggtagta

SEQ ID NO: 118502 - DNA, 69 bp, Homo sapiens
aggcgggtggctttataggtagtacgtataacggtggttgctaactcaacccaggtagtactgtcagtc

SEQ ID NO: 118503 - DNA, 73 bp, Homo sapiens
ttataggtagtacgtataacggtggttgctaactcaacccaggtagtactgtcagtctgccgcatttccacta

SEQ ID NO: 118504 - DNA, 75 bp, Homo sapiens
tacgtataacggtggttgctaactcaacccaggtagtactgtcagtctgccgcatttccactacatagttgctta

SEQ ID NO: 118505 - DNA, 75 bp, Homo sapiens
acggtggttgctaactcaacccaggtagtactgtcagtctgccgcatttccactacatagttgcttattggtaca

SEQ ID NO: 118506 - DNA, 76 bp, Homo sapiens
taactcaacccaggtagtactgtcagtctgccgcatttccactacatagttgcttattggtacaccaccatcgttc

SEQ ID NO: 118507 - DNA, 76 bp, Homo sapiens
aggtagtactgtcagtctgccgcatttccactacatagttgcttattggtacaccaccatcgttctcaggtgggtc

SEQ ID NO: 118508 - DNA, 71 bp, Homo sapiens
atttccactacatagttgcttattggtacaccaccatcgttctcaggtgggtcccaagagaaggttacaaa

SEQ ID NO: 118509 - DNA, 74 bp, Homo sapiens
tacatagttgcttattggtacaccaccatcgttctcaggtgggtcccaagagaaggttacaaaatcagatgaaa

SEQ ID NO: 118510 - DNA, 73 bp, Homo sapiens
ttattggtacaccaccatcgttctcaggtgggtcccaagagaaggttacaaaatcagatgaaacttcatcaaa

SEQ ID NO: 118511 - DNA, 74 bp, Homo sapiens
tacaccaccatcgttctcaggtgggtcccaagagaaggttacaaaatcagatgaaacttcatcaaatttgattg

SEQ ID NO: 118512 - DNA, 73 bp, Homo sapiens
atcgttctcaggtgggtcccaagagaaggttacaaaatcagatgaaacttcatcaaatttgattggtccagta

SEQ ID NO: 118513 - DNA, 73 bp, Homo sapiens
gtcccaagagaaggttacaaaatcagatgaaacttcatcaaatttgattggtccagtaggtggccctgggata

SEQ ID NO: 118514 - DNA, 75 bp, Homo sapiens
aaggttacaaaatcagatgaaacttcatcaaatttgattggtccagtaggtggccctgggatatcatggacttga

SEQ ID NO: 118515 - DNA, 79 bp, Homo sapiens
aaaatcagatgaaacttcatcaaatttgattggtccagtaggtggccctgggatatcatggacttgaatggtgatgaca

SEQ ID NO: 118516 - DNA, 79 bp, Homo sapiens
atgaaacttcatcaaatttgattggtccagtaggtggccctgggatatcatggacttgaatggtgatgacatcaccaac

SEQ ID NO: 118517 - DNA, 77 bp, Homo sapiens
aaatttgattggtccagtaggtggccctgggatatcatggacttgaatggtgatgacatcaccaacctctcctacaa

SEQ ID NO: 118518 - DNA, 77 bp, Homo sapiens
attggtccagtaggtggccctgggatatcatggacttgaatggtgatgacatcaccaacctctcctacaatgttcct

SEQ ID NO: 118519 - DNA, 80 bp, Homo sapiens
tggccctgggatatcatggacttgaatggtgatgacatcaccaacctctcctacaatgttccttgctgttaatggatagg

SEQ ID NO: 118520 - DNA, 81 bp, Homo sapiens
atatcatggacttgaatggtgatgacatcaccaacctctcctacaatgttccttgctgttaatggatagggcccactatca

SEQ ID NO: 118521 - DNA, 79 bp, Homo sapiens
acttgaatggtgatgacatcaccaacctctcctacaatgttccttgctgttaatggatagggcccactatcacttctga

SEQ ID NO: 118522 - DNA, 82 bp, Homo sapiens
gatgacatcaccaacctctcctacaatgttccttgctgttaatggatagggcccactatcacttctgacacactcattgata

SEQ ID NO: 118523 - DNA, 77 bp, Homo sapiens
accaacctctcctacaatgttccttgctgttaatggatagggcccactatcacttctgacacactcattgatattta

SEQ ID NO: 118524 - DNA, 77 bp, Homo sapiens
tctcctacaatgttccttgctgttaatggatagggcccactatcacttctgacacactcattgatatttaaaatggt

SEQ ID NO: 118525 - DNA, 77 bp, Homo sapiens
atgttccttgctgttaatggatagggcccactatcacttctgacacactcattgatatttaaaatggttgaagtcgc

SEQ ID NO: 118526 - DNA, 76 bp, Homo sapiens
ttaatggatagggcccactatcacttctgacacactcattgatatttaaaatggttgaagtcgctgtggtttcaaa

SEQ ID NO: 118527 - DNA, 74 bp, Homo sapiens
atagggcccactatcacttctgacacactcattgatatttaaaatggttgaagtcgctgtggtttcaaaattaa

SEQ ID NO: 118528 - DNA, 77 bp, Homo sapiens
tatcacttctgacacactcattgatatttaaaatggttgaagtcgctgtggtttcaaaattaactctctgtgtctgt

SEQ ID NO: 118529 - DNA, 70 bp, Homo sapiens
tatttaaaatggttgaagtcgctgtggtttcaaaattaactctctgtgtctgtttaagaatttggtctcc

SEQ ID NO: 118530 - DNA, 70 bp, Homo sapiens
aagtcgctgtggtttcaaaattaactctctgtgtctgtttaagaatttggtctccttttttccatgtcac

SEQ ID NO: 118531 - DNA, 70 bp, Homo sapiens
tttcaaaattaactctctgtgtctgtttaagaatttggtctccttttttccatgtcactgtgggcttcgg

SEQ ID NO: 118532 - DNA, 73 bp, Homo sapiens
ttaactctctgtgtctgtttaagaatttggtctccttttttccatgtcactgtgggcttcggtcgaccgagca

SEQ ID NO: 118533 - DNA, 71 bp, Homo sapiens
tgtttaagaatttggtctccttttttccatgtcactgtgggcttcggtcgaccgagcactggaatttcaac

SEQ ID NO: 118534 - DNA, 71 bp, Homo sapiens
aagaatttggtctccttttttccatgtcactgtgggcttcggtcgaccgagcactggaatttcaactttga

SEQ ID NO: 118535 - DNA, 77 bp, Homo sapiens
tgtcactgtgggcttcggtcgaccgagcactggaatttcaactttgatgttgtcaccagctttggcaatgaccagtt

SEQ ID NO: 118536 - DNA, 78 bp, Homo sapiens
tgtgggcttcggtcgaccgagcactggaatttcaactttgatgttgtcaccagctttggcaatgaccagtttctgata

SEQ ID NO: 118537 - DNA, 80 bp, Homo sapiens
accgagcactggaatttcaactttgatgttgtcaccagctttggcaatgaccagtttctgatagatgccacggagatcca

SEQ ID NO: 118538 - DNA, 85 bp, Homo sapiens
atgttgtcaccagctttggcaatgaccagtttctgatagatgccacggagatccagctctggaagcattgtctgctccttgacaa

SEQ ID NO: 118539 - DNA, 84 bp, Homo sapiens
ttggcaatgaccagtttctgatagatgccacggagatccagctctggaagcattgtctgctccttgacaatgacgggtctgctt

SEQ ID NO: 118540 - DNA, 84 bp, Homo sapiens
atgaccagtttctgatagatgccacggagatccagctctggaagcattgtctgctccttgacaatgacgggtctgctttctcta

SEQ ID NO: 118541 - DNA, 78 bp, Homo sapiens
acggagatccagctctggaagcattgtctgctccttgacaatgacgggtctgctttctctaggggcacttctccccgc

SEQ ID NO: 118542 - DNA, 80 bp, Homo sapiens
atccagctctggaagcattgtctgctccttgacaatgacgggtctgctttctctaggggcacttctccccgcgctgttca

SEQ ID NO: 118543 - DNA, 79 bp, Homo sapiens
aagcattgtctgctccttgacaatgacgggtctgctttctctaggggcacttctccccgcgctgttcactgccatcact

SEQ ID NO: 118544 - DNA, 77 bp, Homo sapiens
tccttgacaatgacgggtctgctttctctaggggcacttctccccgcgctgttcactgccatcacttggaaggtata

SEQ ID NO: 118545 - DNA, 75 bp, Homo sapiens
acaatgacgggtctgctttctctaggggcacttctccccgcgctgttcactgccatcacttggaaggtatattcc

SEQ ID NO: 118546 - DNA, 77 bp, Homo sapiens
tgctttctctaggggcacttctccccgcgctgttcactgccatcacttggaaggtatattcctctccttcagttaga

SEQ ID NO: 118547 - DNA, 77 bp, Homo sapiens
tctaggggcacttctccccgcgctgttcactgccatcacttggaaggtatattcctctccttcagttagattcctca

SEQ ID NO: 118548 - DNA, 78 bp, Homo sapiens
ttctccccgcgctgttcactgccatcacttggaaggtatattcctctccttcagttagattcctcacaacacattcta

SEQ ID NO: 118549 - DNA, 76 bp, Homo sapiens
tgttcactgccatcacttggaaggtatattcctctccttcagttagattcctcacaacacattctaaccctttcac

SEQ ID NO: 118550 - DNA, 73 bp, Homo sapiens
atcacttggaaggtatattcctctccttcagttagattcctcacaacacattctaaccctttcacggttgtga

SEQ ID NO: 118551 - DNA, 72 bp, Homo sapiens
aaggtatattcctctccttcagttagattcctcacaacacattctaaccctttcacggttgtgatgtgggtc

SEQ ID NO: 118552 - DNA, 74 bp, Homo sapiens
attcctctccttcagttagattcctcacaacacattctaaccctttcacggttgtgatgtgggtccactggtca

SEQ ID NO: 118553 - DNA, 72 bp, Homo sapiens
agttagattcctcacaacacattctaaccctttcacggttgtgatgtgggtccactggtcagagccttttct

SEQ ID NO: 118554 - DNA, 75 bp, Homo sapiens
accctttcacggttgtgatgtgggtccactggtcagagccttttctttgggcttcaatcacatagccagtgatct

SEQ ID NO: 118555 - DNA, 81 bp, Homo sapiens
ttgtgatgtgggtccactggtcagagccttttctttgggcttcaatcacatagccagtgatcttgctgccaccatcgtgtt

SEQ ID NO: 118556 - DNA, 79 bp, Homo sapiens
gtccactggtcagagccttttctttgggcttcaatcacatagccagtgatcttgctgccaccatcgtgtttgggcttag

SEQ ID NO: 118557 - DNA, 83 bp, Homo sapiens
tttgggcttcaatcacatagccagtgatcttgctgccaccatcgtgtttgggcttaggccatgccaggctgacggtgctctta

SEQ ID NO: 118558 - DNA, 84 bp, Homo sapiens
ttcaatcacatagccagtgatcttgctgccaccatcgtgtttgggcttaggccatgccaggctgacggtgctcttagttatgtc

SEQ ID NO: 118559 - DNA, 82 bp, Homo sapiens
ccagtgatcttgctgccaccatcgtgtttgggcttaggccatgccaggctgacggtgctcttagttatgtccatgatgttaa

SEQ ID NO: 118560 - DNA, 82 bp, Homo sapiens
ttgctgccaccatcgtgtttgggcttaggccatgccaggctgacggtgctcttagttatgtccatgatgttaaggctgtctg

SEQ ID NO: 118561 - DNA, 79 bp, Homo sapiens
accatcgtgtttgggcttaggccatgccaggctgacggtgctcttagttatgtccatgatgttaaggctgtctggtgga

SEQ ID NO: 118562 - DNA, 80 bp, Homo sapiens
atgccaggctgacggtgctcttagttatgtccatgatgttaaggctgtctggtggagatggtgcttcagaggcttttacg

SEQ ID NO: 118563 - DNA, 80 bp, Homo sapiens
tgacggtgctcttagttatgtccatgatgttaaggctgtctggtggagatggtgcttcagaggcttttacgggctctgta

SEQ ID NO: 118564 - DNA, 77 bp, Homo sapiens
ttagttatgtccatgatgttaaggctgtctggtggagatggtgcttcagaggcttttacgggctctgtagtttctgt

SEQ ID NO: 118565 - DNA, 80 bp, Homo sapiens
tatgtccatgatgttaaggctgtctggtggagatggtgcttcagaggcttttacgggctctgtagtttctgttggctcac

SEQ ID NO: 118566 - DNA, 81 bp, Homo sapiens
tggtgcttcagaggcttttacgggctctgtagtttctgttggctcaccaattccatattcattctctgccatcactctgaa

SEQ ID NO: 118567 - DNA, 77 bp, Homo sapiens
aggcttttacgggctctgtagtttctgttggctcaccaattccatattcattctctgccatcactctgaagaaatat

SEQ ID NO: 118568 - DNA, 79 bp, Homo sapiens
ttacgggctctgtagtttctgttggctcaccaattccatattcattctctgccatcactctgaagaaatattcacaccc

SEQ ID NO: 118569 - DNA, 80 bp, Homo sapiens
tttctgttggctcaccaattccatattcattctctgccatcactctgaagaaatattcacacccttcagacaagccggta

SEQ ID NO: 118570 - DNA, 78 bp, Homo sapiens
ctcaccaattccatattcattctctgccatcactctgaagaaatattcacacccttcagacaagccggtaactttata

SEQ ID NO: 118571 - DNA, 79 bp, Homo sapiens
attccatattcattctctgccatcactctgaagaaatattcacacccttcagacaagccggtaactttatatgtgcatt

SEQ ID NO: 118572 - DNA, 79 bp, Homo sapiens
attctctgccatcactctgaagaaatattcacacccttcagacaagccggtaactttatatgtgcatttatggcactta

SEQ ID NO: 118573 - DNA, 77 bp, Homo sapiens
atcactctgaagaaatattcacacccttcagacaagccggtaactttatatgtgcatttatggcacttagtggtggc

SEQ ID NO: 118574 - DNA, 76 bp, Homo sapiens
ttcacacccttcagacaagccggtaactttatatgtgcatttatggcacttagtggtggctgtggaataagatttc

SEQ ID NO: 118575 - DNA, 76 bp, Homo sapiens
agacaagccggtaactttatatgtgcatttatggcacttagtggtggctgtggaataagatttccgtgttgcttca

SEQ ID NO: 118576 - DNA, 77 bp, Homo sapiens
taactttatatgtgcatttatggcacttagtggtggctgtggaataagatttccgtgttgcttcacgtttctctaca

SEQ ID NO: 118577 - DNA, 75 bp, Homo sapiens
ttatggcacttagtggtggctgtggaataagatttccgtgttgcttcacgtttctctacaatgtagtttgttata

SEQ ID NO: 118578 - DNA, 76 bp, Homo sapiens
gtggctgtggaataagatttccgtgttgcttcacgtttctctacaatgtagtttgttatacgtgagcctccatcta

SEQ ID NO: 118579 - DNA, 74 bp, Homo sapiens
atttccgtgttgcttcacgtttctctacaatgtagtttgttatacgtgagcctccatctatcagagggaggtcc

SEQ ID NO: 118580 - DNA, 78 bp, Homo sapiens
ttgcttcacgtttctctacaatgtagtttgttatacgtgagcctccatctatcagagggaggtcccagtgcagggtga

SEQ ID NO: 118581 - DNA, 77 bp, Homo sapiens
ttctctacaatgtagtttgttatacgtgagcctccatctatcagagggaggtcccagtgcagggtgacactgtcctt

SEQ ID NO: 118582 - DNA, 79 bp, Homo sapiens
atgtagtttgttatacgtgagcctccatctatcagagggaggtcccagtgcagggtgacactgtcctttgtgatgtctg

SEQ ID NO: 118583 - DNA, 80 bp, Homo sapiens
ttatacgtgagcctccatctatcagagggaggtcccagtgcagggtgacactgtcctttgtgatgtctgtaggccgcagg

SEQ ID NO: 118584 - DNA, 79 bp, Homo sapiens
cctccatctatcagagggaggtcccagtgcagggtgacactgtcctttgtgatgtctgtaggccgcaggttgaggactg

SEQ ID NO: 118585 - DNA, 78 bp, Homo sapiens
atcagagggaggtcccagtgcagggtgacactgtcctttgtgatgtctgtaggccgcaggttgaggactgggcctggc

SEQ ID NO: 118586 - DNA, 80 bp, Homo sapiens
cagtgcagggtgacactgtcctttgtgatgtctgtaggccgcaggttgaggactgggcctggcgtgtccaagactctgac

SEQ ID NO: 118587 - DNA, 79 bp, Homo sapiens
tgacactgtcctttgtgatgtctgtaggccgcaggttgaggactgggcctggcgtgtccaagactctgacgttcacaaa

SEQ ID NO: 118588 - DNA, 75 bp, Homo sapiens
atgtctgtaggccgcaggttgaggactgggcctggcgtgtccaagactctgacgttcacaaagccacttttcttc

SEQ ID NO: 118589 - DNA, 70 bp, Homo sapiens
aggactgggcctggcgtgtccaagactctgacgttcacaaagccacttttcttcccagccgggttttcaa

SEQ ID NO: 118590 - DNA, 69 bp, Homo sapiens
aagactctgacgttcacaaagccacttttcttcccagccgggttttcaatggtcatgacaaatttaccg

SEQ ID NO: 118591 - DNA, 70 bp, Homo sapiens
aaagccacttttcttcccagccgggttttcaatggtcatgacaaatttaccggtatcatatctgttacat

SEQ ID NO: 118592 - DNA, 74 bp, Homo sapiens
tttcttcccagccgggttttcaatggtcatgacaaatttaccggtatcatatctgttacattctgggataatca

SEQ ID NO: 118593 - DNA, 75 bp, Homo sapiens
gggttttcaatggtcatgacaaatttaccggtatcatatctgttacattctgggataatcagaagagtaaatgat

SEQ ID NO: 118594 - DNA, 76 bp, Homo sapiens
ggtcatgacaaatttaccggtatcatatctgttacattctgggataatcagaagagtaaatgattccgtattttca

SEQ ID NO: 118595 - DNA, 75 bp, Homo sapiens
atttaccggtatcatatctgttacattctgggataatcagaagagtaaatgattccgtattttcaatgttggctc

SEQ ID NO: 118596 - DNA, 76 bp, Homo sapiens
tatcatatctgttacattctgggataatcagaagagtaaatgattccgtattttcaatgttggctcggtttttcag

SEQ ID NO: 118597 - DNA, 72 bp, Homo sapiens
atctgttacattctgggataatcagaagagtaaatgattccgtattttcaatgttggctcggtttttcaggt

SEQ ID NO: 118598 - DNA, 73 bp, Homo sapiens
ttctgggataatcagaagagtaaatgattccgtattttcaatgttggctcggtttttcaggttgatgttatct

SEQ ID NO: 118599 - DNA, 72 bp, Homo sapiens
aagagtaaatgattccgtattttcaatgttggctcggtttttcaggttgatgttatctttggtccatgtcac

SEQ ID NO: 118600 - DNA, 74 bp, Homo sapiens
taaatgattccgtattttcaatgttggctcggtttttcaggttgatgttatctttggtccatgtcacttcagga

SEQ ID NO: 118601 - DNA, 74 bp, Homo sapiens
tttcaatgttggctcggtttttcaggttgatgttatctttggtccatgtcacttcaggagcaggacgaccttta

SEQ ID NO: 118602 - DNA, 73 bp, Homo sapiens
atgttggctcggtttttcaggttgatgttatctttggtccatgtcacttcaggagcaggacgacctttaattg

SEQ ID NO: 118603 - DNA, 76 bp, Homo sapiens
tttcaggttgatgttatctttggtccatgtcacttcaggagcaggacgacctttaattggcacaaatatcctaata

SEQ ID NO: 118604 - DNA, 77 bp, Homo sapiens
ttgatgttatctttggtccatgtcacttcaggagcaggacgacctttaattggcacaaatatcctaatactgagtcc

SEQ ID NO: 118605 - DNA, 77 bp, Homo sapiens
tttggtccatgtcacttcaggagcaggacgacctttaattggcacaaatatcctaatactgagtcctgctctaacaa

SEQ ID NO: 118606 - DNA, 74 bp, Homo sapiens
acttcaggagcaggacgacctttaattggcacaaatatcctaatactgagtcctgctctaacaacaagtgttct

SEQ ID NO: 118607 - DNA, 74 bp, Homo sapiens
aggagcaggacgacctttaattggcacaaatatcctaatactgagtcctgctctaacaacaagtgttcttcgaa

SEQ ID NO: 118608 - DNA, 77 bp, Homo sapiens
tttaattggcacaaatatcctaatactgagtcctgctctaacaacaagtgttcttcgaagctcggcatctagttcaa

SEQ ID NO: 118609 - DNA, 78 bp, Homo sapiens
ttggcacaaatatcctaatactgagtcctgctctaacaacaagtgttcttcgaagctcggcatctagttcaaaatcag

SEQ ID NO: 118610 - DNA, 79 bp, Homo sapiens
tatcctaatactgagtcctgctctaacaacaagtgttcttcgaagctcggcatctagttcaaaatcaggagccatctcc

SEQ ID NO: 118611 - DNA, 76 bp, Homo sapiens
tcctgctctaacaacaagtgttcttcgaagctcggcatctagttcaaaatcaggagccatctcccgttctacgatt

SEQ ID NO: 118612 - DNA, 76 bp, Homo sapiens
taacaacaagtgttcttcgaagctcggcatctagttcaaaatcaggagccatctcccgttctacgatttcaacatc

SEQ ID NO: 118613 - DNA, 77 bp, Homo sapiens
aagtgttcttcgaagctcggcatctagttcaaaatcaggagccatctcccgttctacgatttcaacatctggaatca

SEQ ID NO: 118614 - DNA, 77 bp, Homo sapiens
aagctcggcatctagttcaaaatcaggagccatctcccgttctacgatttcaacatctggaatcaccgctggctccc

SEQ ID NO: 118615 - DNA, 75 bp, Homo sapiens
atctagttcaaaatcaggagccatctcccgttctacgatttcaacatctggaatcaccgctggctccccaacacc

SEQ ID NO: 118616 - DNA, 77 bp, Homo sapiens
aaaatcaggagccatctcccgttctacgatttcaacatctggaatcaccgctggctccccaacacctgcatcgttga

SEQ ID NO: 118617 - DNA, 80 bp, Homo sapiens
atctcccgttctacgatttcaacatctggaatcaccgctggctccccaacacctgcatcgttgatggcactgattctgaa

SEQ ID NO: 118618 - DNA, 80 bp, Homo sapiens
ttctacgatttcaacatctggaatcaccgctggctccccaacacctgcatcgttgatggcactgattctgaagttgtatt

SEQ ID NO: 118619 - DNA, 79 bp, Homo sapiens
aatcaccgctggctccccaacacctgcatcgttgatggcactgattctgaagttgtatttttctttagtctgaagatca

SEQ ID NO: 118620 - DNA, 77 bp, Homo sapiens
tccccaacacctgcatcgttgatggcactgattctgaagttgtatttttctttagtctgaagatcaggaacaacgaa

SEQ ID NO: 118621 - DNA, 78 bp, Homo sapiens
acctgcatcgttgatggcactgattctgaagttgtatttttctttagtctgaagatcaggaacaacgaactgagtgat

SEQ ID NO: 118622 - DNA, 78 bp, Homo sapiens
tcgttgatggcactgattctgaagttgtatttttctttagtctgaagatcaggaacaacgaactgagtgattctgagg

SEQ ID NO: 118623 - DNA, 73 bp, Homo sapiens
attctgaagttgtatttttctttagtctgaagatcaggaacaacgaactgagtgattctgagggcggttcctg

SEQ ID NO: 118624 - DNA, 73 bp, Homo sapiens
tgtatttttctttagtctgaagatcaggaacaacgaactgagtgattctgagggcggttcctgtggtatcttt

SEQ ID NO: 118625 - DNA, 74 bp, Homo sapiens
ttttctttagtctgaagatcaggaacaacgaactgagtgattctgagggcggttcctgtggtatcttttatcca

SEQ ID NO: 118626 - DNA, 74 bp, Homo sapiens
aagatcaggaacaacgaactgagtgattctgagggcggttcctgtggtatcttttatccaggcctcgtctccta

SEQ ID NO: 118627 - DNA, 75 bp, Homo sapiens
agtgattctgagggcggttcctgtggtatcttttatccaggcctcgtctcctactttttgatgctccacgacata

SEQ ID NO: 118628 - DNA, 74 bp, Homo sapiens
agggcggttcctgtggtatcttttatccaggcctcgtctcctactttttgatgctccacgacatagccagtgat

SEQ ID NO: 118629 - DNA, 77 bp, Homo sapiens
ttcctgtggtatcttttatccaggcctcgtctcctactttttgatgctccacgacatagccagtgatttcaagtcca

SEQ ID NO: 118630 - DNA, 80 bp, Homo sapiens
tatcttttatccaggcctcgtctcctactttttgatgctccacgacatagccagtgatttcaagtccaccatcataatga

SEQ ID NO: 118631 - DNA, 81 bp, Homo sapiens
tctcctactttttgatgctccacgacatagccagtgatttcaagtccaccatcataatgaggcttgccccatgccaaagaa

SEQ ID NO: 118632 - DNA, 82 bp, Homo sapiens
ttttgatgctccacgacatagccagtgatttcaagtccaccatcataatgaggcttgccccatgccaaagaagcagatttct

SEQ ID NO: 118633 - DNA, 82 bp, Homo sapiens
tgatttcaagtccaccatcataatgaggcttgccccatgccaaagaagcagatttcttggtagtatcagtgacatgcggatt

SEQ ID NO: 118634 - DNA, 80 bp, Homo sapiens
aagtccaccatcataatgaggcttgccccatgccaaagaagcagatttcttggtagtatcagtgacatgcggatttgaag

SEQ ID NO: 118635 - DNA, 80 bp, Homo sapiens
ttgccccatgccaaagaagcagatttcttggtagtatcagtgacatgcggatttgaaggtggtcctggaggatctgagaa

SEQ ID NO: 118636 - DNA, 78 bp, Homo sapiens
atgccaaagaagcagatttcttggtagtatcagtgacatgcggatttgaaggtggtcctggaggatctgagaaagaaa

SEQ ID NO: 118637 - DNA, 76 bp, Homo sapiens
agatttcttggtagtatcagtgacatgcggatttgaaggtggtcctggaggatctgagaaagaaacaaagacacaa

SEQ ID NO: 118638 - DNA, 78 bp, Homo sapiens
tagtatcagtgacatgcggatttgaaggtggtcctggaggatctgagaaagaaacaaagacacaaaagtatatattca

SEQ ID NO: 118639 - DNA, 79 bp, Homo sapiens
taaaatattggcactctggaatgaacggtgttgaaaaagacaaatactaacatgctgcatctttcatcagaacagaatc

SEQ ID NO: 118640 - DNA, 80 bp, Homo sapiens
actctggaatgaacggtgttgaaaaagacaaatactaacatgctgcatctttcatcagaacagaatctgaagcctcactg

SEQ ID NO: 118641 - DNA, 80 bp, Homo sapiens
aaagacaaatactaacatgctgcatctttcatcagaacagaatctgaagcctcactgggtggaccaattcctgctctgtt

SEQ ID NO: 118642 - DNA, 82 bp, Homo sapiens
aaatactaacatgctgcatctttcatcagaacagaatctgaagcctcactgggtggaccaattcctgctctgttttctgcac

SEQ ID NO: 118643 - DNA, 79 bp, Homo sapiens
tttcatcagaacagaatctgaagcctcactgggtggaccaattcctgctctgttttctgcactgacacggaattcgtag

SEQ ID NO: 118644 - DNA, 77 bp, Homo sapiens
aacagaatctgaagcctcactgggtggaccaattcctgctctgttttctgcactgacacggaattcgtaggtgcttc

SEQ ID NO: 118645 - DNA, 76 bp, Homo sapiens
aagcctcactgggtggaccaattcctgctctgttttctgcactgacacggaattcgtaggtgcttccttcttgcag

SEQ ID NO: 118646 - DNA, 75 bp, Homo sapiens
gtggaccaattcctgctctgttttctgcactgacacggaattcgtaggtgcttccttcttgcagtcctgttactt

SEQ ID NO: 118647 - DNA, 77 bp, Homo sapiens
aattcctgctctgttttctgcactgacacggaattcgtaggtgcttccttcttgcagtcctgttactttgcacctga

SEQ ID NO: 118648 - DNA, 76 bp, Homo sapiens
ttttctgcactgacacggaattcgtaggtgcttccttcttgcagtcctgttactttgcacctgagatcggaaactg

SEQ ID NO: 118649 - DNA, 71 bp, Homo sapiens
acacggaattcgtaggtgcttccttcttgcagtcctgttactttgcacctgagatcggaaactggtgtttt

SEQ ID NO: 118650 - DNA, 73 bp, Homo sapiens
aattcgtaggtgcttccttcttgcagtcctgttactttgcacctgagatcggaaactggtgtttttattgctc

SEQ ID NO: 118651 - DNA, 76 bp, Homo sapiens
tccttcttgcagtcctgttactttgcacctgagatcggaaactggtgtttttattgctctcacccatcgcaggctt

SEQ ID NO: 118652 - DNA, 72 bp, Homo sapiens
agtcctgttactttgcacctgagatcggaaactggtgtttttattgctctcacccatcgcaggcttttcttt

SEQ ID NO: 118653 - DNA, 74 bp, Homo sapiens
tgttactttgcacctgagatcggaaactggtgtttttattgctctcacccatcgcaggcttttcttttctctcc

SEQ ID NO: 118654 - DNA, 76 bp, Homo sapiens
ctgagatcggaaactggtgtttttattgctctcacccatcgcaggcttttcttttctctcctttctacatgatatc

SEQ ID NO: 118655 - DNA, 73 bp, Homo sapiens
aactggtgtttttattgctctcacccatcgcaggcttttcttttctctcctttctacatgatatcctgtaatt

SEQ ID NO: 118656 - DNA, 79 bp, Homo sapiens
tcacccatcgcaggcttttcttttctctcctttctacatgatatcctgtaatttcgctgccaccatcatccactggcct

SEQ ID NO: 118657 - DNA, 77 bp, Homo sapiens
atcgcaggcttttcttttctctcctttctacatgatatcctgtaatttcgctgccaccatcatccactggccttttc

SEQ ID NO: 118658 - DNA, 81 bp, Homo sapiens
tttctctcctttctacatgatatcctgtaatttcgctgccaccatcatccactggccttttccagctgacagtggcagtgt

SEQ ID NO: 118659 - DNA, 83 bp, Homo sapiens
tttctacatgatatcctgtaatttcgctgccaccatcatccactggccttttccagctgacagtggcagtgttcttagtgaca

SEQ ID NO: 118660 - DNA, 83 bp, Homo sapiens
atgatatcctgtaatttcgctgccaccatcatccactggccttttccagctgacagtggcagtgttcttagtgacatttgata

SEQ ID NO: 118661 - DNA, 77 bp, Homo sapiens
accatcatccactggccttttccagctgacagtggcagtgttcttagtgacatttgatacctctggtttttcaggag

SEQ ID NO: 118662 - DNA, 76 bp, Homo sapiens
atccactggccttttccagctgacagtggcagtgttcttagtgacatttgatacctctggtttttcaggagggcca

SEQ ID NO: 118663 - DNA, 73 bp, Homo sapiens
ccttttccagctgacagtggcagtgttcttagtgacatttgatacctctggtttttcaggagggccaggggga

SEQ ID NO: 118664 - DNA, 70 bp, Homo sapiens
agtggcagtgttcttagtgacatttgatacctctggtttttcaggagggccagggggacctgaaaaggaa

SEQ ID NO: 118665 - DNA, 69 bp, Homo sapiens
ttcttagtgacatttgatacctctggtttttcaggagggccagggggacctgaaaaggaagcaaattta

SEQ ID NO: 118666 - DNA, 67 bp, Homo sapiens
acatttgatacctctggtttttcaggagggccagggggacctgaaaaggaagcaaatttattagaaa

SEQ ID NO: 118667 - DNA, 77 bp, Homo sapiens
aaactctgctataaatgtttccatgtcaattccctcacatgctctacataccaaatctgtctaccattttgacaggt

SEQ ID NO: 118668 - DNA, 79 bp, Homo sapiens
ataaatgtttccatgtcaattccctcacatgctctacataccaaatctgtctaccattttgacaggttcagactgtaca

SEQ ID NO: 118669 - DNA, 77 bp, Homo sapiens
atgtcaattccctcacatgctctacataccaaatctgtctaccattttgacaggttcagactgtacaggttctcctt

SEQ ID NO: 118670 - DNA, 78 bp, Homo sapiens
tcacatgctctacataccaaatctgtctaccattttgacaggttcagactgtacaggttctcctttgccatagtggtt

SEQ ID NO: 118671 - DNA, 75 bp, Homo sapiens
ctctacataccaaatctgtctaccattttgacaggttcagactgtacaggttctcctttgccatagtggtttaca

SEQ ID NO: 118672 - DNA, 74 bp, Homo sapiens
aaatctgtctaccattttgacaggttcagactgtacaggttctcctttgccatagtggtttacagctgagaccc

SEQ ID NO: 118673 - DNA, 75 bp, Homo sapiens
attttgacaggttcagactgtacaggttctcctttgccatagtggtttacagctgagacccggaagatgtactca

SEQ ID NO: 118674 - DNA, 73 bp, Homo sapiens
aggttcagactgtacaggttctcctttgccatagtggtttacagctgagacccggaagatgtactcatttcct

SEQ ID NO: 118675 - DNA, 73 bp, Homo sapiens
tgtacaggttctcctttgccatagtggtttacagctgagacccggaagatgtactcatttccttggataagtt

SEQ ID NO: 118676 - DNA, 74 bp, Homo sapiens
ttctcctttgccatagtggtttacagctgagacccggaagatgtactcatttccttggataagtttggttgcca

SEQ ID NO: 118677 - DNA, 76 bp, Homo sapiens
atagtggtttacagctgagacccggaagatgtactcatttccttggataagtttggttgccacatgcctgcaagac

SEQ ID NO: 118678 - DNA, 78 bp, Homo sapiens
tttacagctgagacccggaagatgtactcatttccttggataagtttggttgccacatgcctgcaagactgaatatct

SEQ ID NO: 118679 - DNA, 76 bp, Homo sapiens
agacccggaagatgtactcatttccttggataagtttggttgccacatgcctgcaagactgaatatcttcagaaac

SEQ ID NO: 118680 - DNA, 76 bp, Homo sapiens
ttggataagtttggttgccacatgcctgcaagactgaatatcttcagaaaccactgtccacaaaagtcggctggtt

SEQ ID NO: 118681 - DNA, 77 bp, Homo sapiens
taagtttggttgccacatgcctgcaagactgaatatcttcagaaaccactgtccacaaaagtcggctggtttctctc

SEQ ID NO: 118682 - DNA, 77 bp, Homo sapiens
acatgcctgcaagactgaatatcttcagaaaccactgtccacaaaagtcggctggtttctctcttttcaagtatata

SEQ ID NO: 118683 - DNA, 73 bp, Homo sapiens
agactgaatatcttcagaaaccactgtccacaaaagtcggctggtttctctcttttcaagtatataggactta

SEQ ID NO: 118684 - DNA, 71 bp, Homo sapiens
aatatcttcagaaaccactgtccacaaaagtcggctggtttctctcttttcaagtatataggacttaattg

SEQ ID NO: 118685 - DNA, 71 bp, Homo sapiens
aaaccactgtccacaaaagtcggctggtttctctcttttcaagtatataggacttaattggtgagccgcca

SEQ ID NO: 118686 - DNA, 71 bp, Homo sapiens
acaaaagtcggctggtttctctcttttcaagtatataggacttaattggtgagccgccatcttccaaggga

SEQ ID NO: 118687 - DNA, 73 bp, Homo sapiens
ctggtttctctcttttcaagtatataggacttaattggtgagccgccatcttccaagggaggtgtccatgtaa

SEQ ID NO: 118688 - DNA, 75 bp, Homo sapiens
aagtatataggacttaattggtgagccgccatcttccaagggaggtgtccatgtaagtgttgctttttcagcaga

SEQ ID NO: 118689 - DNA, 75 bp, Homo sapiens
ttaattggtgagccgccatcttccaagggaggtgtccatgtaagtgttgctttttcagcagaaacattactgatt

SEQ ID NO: 118690 - DNA, 75 bp, Homo sapiens
agccgccatcttccaagggaggtgtccatgtaagtgttgctttttcagcagaaacattactgatttcaacaggac

SEQ ID NO: 118691 - DNA, 73 bp, Homo sapiens
atcttccaagggaggtgtccatgtaagtgttgctttttcagcagaaacattactgatttcaacaggacctggg

SEQ ID NO: 118692 - DNA, 73 bp, Homo sapiens
aggtgtccatgtaagtgttgctttttcagcagaaacattactgatttcaacaggacctgggggaccaggtaca

SEQ ID NO: 118693 - DNA, 73 bp, Homo sapiens
taagtgttgctttttcagcagaaacattactgatttcaacaggacctgggggaccaggtacatcaaggactgt

SEQ ID NO: 118694 - DNA, 73 bp, Homo sapiens
tttttcagcagaaacattactgatttcaacaggacctgggggaccaggtacatcaaggactgttaccttcaca

SEQ ID NO: 118695 - DNA, 72 bp, Homo sapiens
agaaacattactgatttcaacaggacctgggggaccaggtacatcaaggactgttaccttcacatgttccac

SEQ ID NO: 118696 - DNA, 71 bp, Homo sapiens
attactgatttcaacaggacctgggggaccaggtacatcaaggactgttaccttcacatgttccaccttcg

SEQ ID NO: 118697 - DNA, 70 bp, Homo sapiens
aggacctgggggaccaggtacatcaaggactgttaccttcacatgttccaccttcgtgccaaaaggattg

SEQ ID NO: 118698 - DNA, 75 bp, Homo sapiens
ggaccaggtacatcaaggactgttaccttcacatgttccaccttcgtgccaaaaggattggtagcagtgatggta

SEQ ID NO: 118699 - DNA, 76 bp, Homo sapiens
aggtacatcaaggactgttaccttcacatgttccaccttcgtgccaaaaggattggtagcagtgatggtatattca

SEQ ID NO: 118700 - DNA, 76 bp, Homo sapiens
tgttaccttcacatgttccaccttcgtgccaaaaggattggtagcagtgatggtatattcacccgcatcttttcta

SEQ ID NO: 118701 - DNA, 76 bp, Homo sapiens
accttcgtgccaaaaggattggtagcagtgatggtatattcacccgcatcttttctagtggcatacttgatagtaa

SEQ ID NO: 118702 - DNA, 78 bp, Homo sapiens
aaaaggattggtagcagtgatggtatattcacccgcatcttttctagtggcatacttgatagtaagcatggaagatgt

SEQ ID NO: 118703 - DNA, 78 bp, Homo sapiens
attggtagcagtgatggtatattcacccgcatcttttctagtggcatacttgatagtaagcatggaagatgttggggt

SEQ ID NO: 118704 - DNA, 78 bp, Homo sapiens
atggtatattcacccgcatcttttctagtggcatacttgatagtaagcatggaagatgttggggttgaagttatctga

SEQ ID NO: 118705 - DNA, 80 bp, Homo sapiens
tattcacccgcatcttttctagtggcatacttgatagtaagcatggaagatgttggggttgaagttatctgagtgatatc

SEQ ID NO: 118706 - DNA, 80 bp, Homo sapiens
atcttttctagtggcatacttgatagtaagcatggaagatgttggggttgaagttatctgagtgatatctgatggtctaa

SEQ ID NO: 118707 - DNA, 80 bp, Homo sapiens
agtggcatacttgatagtaagcatggaagatgttggggttgaagttatctgagtgatatctgatggtctaatgtcttttc

SEQ ID NO: 118708 - DNA, 80 bp, Homo sapiens
ttgatagtaagcatggaagatgttggggttgaagttatctgagtgatatctgatggtctaatgtcttttcctgccttgga

SEQ ID NO: 118709 - DNA, 74 bp, Homo sapiens
gggttgaagttatctgagtgatatctgatggtctaatgtcttttcctgccttggaccaacttgattttggaagg

SEQ ID NO: 118710 - DNA, 72 bp, Homo sapiens
aagttatctgagtgatatctgatggtctaatgtcttttcctgccttggaccaacttgattttggaaggggtt

SEQ ID NO: 118711 - DNA, 73 bp, Homo sapiens
atatctgatggtctaatgtcttttcctgccttggaccaacttgattttggaaggggtttgccaagaatgctaa

SEQ ID NO: 118712 - DNA, 73 bp, Homo sapiens
gtctaatgtcttttcctgccttggaccaacttgattttggaaggggtttgccaagaatgctaatggcattcaa

SEQ ID NO: 118713 - DNA, 71 bp, Homo sapiens
ttttcctgccttggaccaacttgattttggaaggggtttgccaagaatgctaatggcattcaaaacaatgg

SEQ ID NO: 118714 - DNA, 72 bp, Homo sapiens
ttgattttggaaggggtttgccaagaatgctaatggcattcaaaacaatggtatcccctgctttaattgtta

SEQ ID NO: 118715 - DNA, 74 bp, Homo sapiens
gtttgccaagaatgctaatggcattcaaaacaatggtatcccctgctttaattgttagcccatcttttattgtg

SEQ ID NO: 118716 - DNA, 74 bp, Homo sapiens
aatggtatcccctgctttaattgttagcccatcttttattgtgggatcaaggacaattgttggtgcctctgcaa

SEQ ID NO: 118717 - DNA, 72 bp, Homo sapiens
ccctgctttaattgttagcccatcttttattgtgggatcaaggacaattgttggtgcctctgcaaagaaaaa

SEQ ID NO: 118718 - DNA, 71 bp, Homo sapiens
attgttagcccatcttttattgtgggatcaaggacaattgttggtgcctctgcaaagaaaaaaatacattt

SEQ ID NO: 118719 - DNA, 64 bp, Homo sapiens
aaaaaaaaaagtacataaaaagtaaaatggacctaccgtattcatccttgcaaataatggtttc

SEQ ID NO: 118720 - DNA, 73 bp, Homo sapiens
aaaaagtaaaatggacctaccgtattcatccttgcaaataatggtttctgtactttctgatggagcactgata

SEQ ID NO: 118721 - DNA, 79 bp, Homo sapiens
aatggacctaccgtattcatccttgcaaataatggtttctgtactttctgatggagcactgatagcacctgctgtattc

SEQ ID NO: 118722 - DNA, 80 bp, Homo sapiens
caaataatggtttctgtactttctgatggagcactgatagcacctgctgtattctttgctctaattctgaattcatattt

SEQ ID NO: 118723 - DNA, 80 bp, Homo sapiens
aatggtttctgtactttctgatggagcactgatagcacctgctgtattctttgctctaattctgaattcatattttccac

SEQ ID NO: 118724 - DNA, 80 bp, Homo sapiens
gtactttctgatggagcactgatagcacctgctgtattctttgctctaattctgaattcatattttccaccctcaacaag

SEQ ID NO: 118725 - DNA, 79 bp, Homo sapiens
gcactgatagcacctgctgtattctttgctctaattctgaattcatattttccaccctcaacaaggtcagttacagtaa

SEQ ID NO: 118726 - DNA, 75 bp, Homo sapiens
atagcacctgctgtattctttgctctaattctgaattcatattttccaccctcaacaaggtcagttacagtaaag

SEQ ID NO: 118727 - DNA, 75 bp, Homo sapiens
tctaattctgaattcatattttccaccctcaacaaggtcagttacagtaaaggcacattctgggacattaacatg

SEQ ID NO: 118728 - DNA, 72 bp, Homo sapiens
attcatattttccaccctcaacaaggtcagttacagtaaaggcacattctgggacattaacatggttggctt

SEQ ID NO: 118729 - DNA, 73 bp, Homo sapiens
ttttccaccctcaacaaggtcagttacagtaaaggcacattctgggacattaacatggttggctttcatccaa

SEQ ID NO: 118730 - DNA, 73 bp, Homo sapiens
acaaggtcagttacagtaaaggcacattctgggacattaacatggttggctttcatccaagacttcgaaggta

SEQ ID NO: 118731 - DNA, 74 bp, Homo sapiens
agttacagtaaaggcacattctgggacattaacatggttggctttcatccaagacttcgaaggtagatctcgct

SEQ ID NO: 118732 - DNA, 77 bp, Homo sapiens
aaggcacattctgggacattaacatggttggctttcatccaagacttcgaaggtagatctcgcttctccactatata

SEQ ID NO: 118733 - DNA, 76 bp, Homo sapiens
attaacatggttggctttcatccaagacttcgaaggtagatctcgcttctccactatatatccagttaacttatga

SEQ ID NO: 118734 - DNA, 76 bp, Homo sapiens
tttcatccaagacttcgaaggtagatctcgcttctccactatatatccagttaacttatgaccaccgtcatattta

SEQ ID NO: 118735 - DNA, 74 bp, Homo sapiens
aagacttcgaaggtagatctcgcttctccactatatatccagttaacttatgaccaccgtcatatttaggttca

SEQ ID NO: 118736 - DNA, 75 bp, Homo sapiens
aaggtagatctcgcttctccactatatatccagttaacttatgaccaccgtcatatttaggttcagtccaaatga

SEQ ID NO: 118737 - DNA, 76 bp, Homo sapiens
cttctccactatatatccagttaacttatgaccaccgtcatatttaggttcagtccaaatgagagtcactgaattc

SEQ ID NO: 118738 - DNA, 74 bp, Homo sapiens
actatatatccagttaacttatgaccaccgtcatatttaggttcagtccaaatgagagtcactgaattccttgt

SEQ ID NO: 118739 - DNA, 71 bp, Homo sapiens
accaccgtcatatttaggttcagtccaaatgagagtcactgaattccttgttatgttaataacctcaggtt

SEQ ID NO: 118740 - DNA, 71 bp, Homo sapiens
atatttaggttcagtccaaatgagagtcactgaattccttgttatgttaataacctcaggttttccaggag

SEQ ID NO: 118741 - DNA, 72 bp, Homo sapiens
aatgagagtcactgaattccttgttatgttaataacctcaggttttccaggaggatctaaaacataaaagca

SEQ ID NO: 118742 - DNA, 69 bp, Homo sapiens
cactgaattccttgttatgttaataacctcaggttttccaggaggatctaaaacataaaagcaaaacca

SEQ ID NO: 118743 - DNA, 68 bp, Homo sapiens
ccttgttatgttaataacctcaggttttccaggaggatctaaaacataaaagcaaaaccagtcaaaca

SEQ ID NO: 118744 - DNA, 74 bp, Homo sapiens
ttttcttcatgtaaaacatgcacctgggtttttcttcatataatgacttaccaattgggtccagtgccacaaca

SEQ ID NO: 118745 - DNA, 76 bp, Homo sapiens
taaaacatgcacctgggtttttcttcatataatgacttaccaattgggtccagtgccacaacaggctctgatggta

SEQ ID NO: 118746 - DNA, 74 bp, Homo sapiens
cctgggtttttcttcatataatgacttaccaattgggtccagtgccacaacaggctctgatggtaggcttggct

SEQ ID NO: 118747 - DNA, 79 bp, Homo sapiens
tcatataatgacttaccaattgggtccagtgccacaacaggctctgatggtaggcttggcttgcccacacctgctaaat

SEQ ID NO: 118748 - DNA, 78 bp, Homo sapiens
taatgacttaccaattgggtccagtgccacaacaggctctgatggtaggcttggcttgcccacacctgctaaattgat

SEQ ID NO: 118749 - DNA, 78 bp, Homo sapiens
aattgggtccagtgccacaacaggctctgatggtaggcttggcttgcccacacctgctaaattgattgccataactcg

SEQ ID NO: 118750 - DNA, 81 bp, Homo sapiens
agtgccacaacaggctctgatggtaggcttggcttgcccacacctgctaaattgattgccataactcggaattcatattca

SEQ ID NO: 118751 - DNA, 79 bp, Homo sapiens
aggctctgatggtaggcttggcttgcccacacctgctaaattgattgccataactcggaattcatattcaagaccttca

SEQ ID NO: 118752 - DNA, 76 bp, Homo sapiens
atggtaggcttggcttgcccacacctgctaaattgattgccataactcggaattcatattcaagaccttcagttaa

SEQ ID NO: 118753 - DNA, 76 bp, Homo sapiens
ttgcccacacctgctaaattgattgccataactcggaattcatattcaagaccttcagttaatcctgtcactttaa

SEQ ID NO: 118754 - DNA, 74 bp, Homo sapiens
acacctgctaaattgattgccataactcggaattcatattcaagaccttcagttaatcctgtcactttaaagtc

SEQ ID NO: 118755 - DNA, 73 bp, Homo sapiens
ataactcggaattcatattcaagaccttcagttaatcctgtcactttaaagtctctcatccttatcggagtct

SEQ ID NO: 118756 - DNA, 75 bp, Homo sapiens
attcatattcaagaccttcagttaatcctgtcactttaaagtctctcatccttatcggagtcttgttagctctct

SEQ ID NO: 118757 - DNA, 73 bp, Homo sapiens
aagaccttcagttaatcctgtcactttaaagtctctcatccttatcggagtcttgttagctctcttccacaaa

SEQ ID NO: 118758 - DNA, 72 bp, Homo sapiens
agttaatcctgtcactttaaagtctctcatccttatcggagtcttgttagctctcttccacaaaaggctgtt

SEQ ID NO: 118759 - DNA, 71 bp, Homo sapiens
actttaaagtctctcatccttatcggagtcttgttagctctcttccacaaaaggctgtttctttccttgaa

SEQ ID NO: 118760 - DNA, 76 bp, Homo sapiens
agtctctcatccttatcggagtcttgttagctctcttccacaaaaggctgtttctttccttgaactcgagatgata

SEQ ID NO: 118761 - DNA, 73 bp, Homo sapiens
ttatcggagtcttgttagctctcttccacaaaaggctgtttctttccttgaactcgagatgataccctacaaa

SEQ ID NO: 118762 - DNA, 71 bp, Homo sapiens
agtcttgttagctctcttccacaaaaggctgtttctttccttgaactcgagatgataccctacaaaagacc

SEQ ID NO: 118763 - DNA, 72 bp, Homo sapiens
tcttccacaaaaggctgtttctttccttgaactcgagatgataccctacaaaagacccagggatgtatcaag

SEQ ID NO: 118764 - DNA, 70 bp, Homo sapiens
aaaaggctgtttctttccttgaactcgagatgataccctacaaaagacccagggatgtatcaagtataaa

SEQ ID NO: 118765 - DNA, 70 bp, Homo sapiens
gaggaatcttgatgtaaaagctgtaggataagaacaaacaaaatacctgtaattggagaaccaccagttt

SEQ ID NO: 118766 - DNA, 70 bp, Homo sapiens
tcttgatgtaaaagctgtaggataagaacaaacaaaatacctgtaattggagaaccaccagttttcttgg

SEQ ID NO: 118767 - DNA, 67 bp, Homo sapiens
aaaagctgtaggataagaacaaacaaaatacctgtaattggagaaccaccagttttcttggggtcag

SEQ ID NO: 118768 - DNA, 68 bp, Homo sapiens
aagaacaaacaaaatacctgtaattggagaaccaccagttttcttggggtcagtccaagttagagata

SEQ ID NO: 118769 - DNA, 69 bp, Homo sapiens
aaacaaaatacctgtaattggagaaccaccagttttcttggggtcagtccaagttagagatactgaatc

SEQ ID NO: 118770 - DNA, 75 bp, Homo sapiens
taattggagaaccaccagttttcttggggtcagtccaagttagagatactgaatcgtgtctgacatccacaatat

SEQ ID NO: 118771 - DNA, 74 bp, Homo sapiens
agaaccaccagttttcttggggtcagtccaagttagagatactgaatcgtgtctgacatccacaatattgggag

SEQ ID NO: 118772 - DNA, 73 bp, Homo sapiens
agttttcttggggtcagtccaagttagagatactgaatcgtgtctgacatccacaatattgggaggtggggga

SEQ ID NO: 118773 - DNA, 79 bp, Homo sapiens
agtccaagttagagatactgaatcgtgtctgacatccacaatattgggaggtgggggagcatcaggcacatctagaaaa

SEQ ID NO: 118774 - DNA, 78 bp, Homo sapiens
agttagagatactgaatcgtgtctgacatccacaatattgggaggtgggggagcatcaggcacatctagaaaaaagta

SEQ ID NO: 118775 - DNA, 78 bp, Homo sapiens
aatcgtgtctgacatccacaatattgggaggtgggggagcatcaggcacatctagaaaaaagtagataatgcaagatt

SEQ ID NO: 118776 - DNA, 79 bp, Homo sapiens
tctgacatccacaatattgggaggtgggggagcatcaggcacatctagaaaaaagtagataatgcaagatttataataa

SEQ ID NO: 118777 - DNA, 71 bp, Homo sapiens
ctcaaaaccgtgttttgctttacgtcttctgaatttaagacacttaccaaatggatgtctcgcaacaattg

SEQ ID NO: 118778 - DNA, 74 bp, Homo sapiens
gtgttttgctttacgtcttctgaatttaagacacttaccaaatggatgtctcgcaacaattggctccgatttca

SEQ ID NO: 118779 - DNA, 73 bp, Homo sapiens
ctttacgtcttctgaatttaagacacttaccaaatggatgtctcgcaacaattggctccgatttcaggccttc

SEQ ID NO: 118780 - DNA, 72 bp, Homo sapiens
aatttaagacacttaccaaatggatgtctcgcaacaattggctccgatttcaggccttcccctacaccatat

SEQ ID NO: 118781 - DNA, 72 bp, Homo sapiens
aagacacttaccaaatggatgtctcgcaacaattggctccgatttcaggccttcccctacaccatatttatt

SEQ ID NO: 118782 - DNA, 73 bp, Homo sapiens
aaatggatgtctcgcaacaattggctccgatttcaggccttcccctacaccatatttattttcggcactgacc

SEQ ID NO: 118783 - DNA, 72 bp, Homo sapiens
gcaacaattggctccgatttcaggccttcccctacaccatatttattttcggcactgaccctgaaggtatat

SEQ ID NO: 118784 - DNA, 71 bp, Homo sapiens
aattggctccgatttcaggccttcccctacaccatatttattttcggcactgaccctgaaggtatattcca

SEQ ID NO: 118785 - DNA, 73 bp, Homo sapiens
atttcaggccttcccctacaccatatttattttcggcactgaccctgaaggtatattccatgccctcatgaag

SEQ ID NO: 118786 - DNA, 74 bp, Homo sapiens
cctacaccatatttattttcggcactgaccctgaaggtatattccatgccctcatgaagtctggttactctaaa

SEQ ID NO: 118787 - DNA, 72 bp, Homo sapiens
atatttattttcggcactgaccctgaaggtatattccatgccctcatgaagtctggttactctaaaggtggt

SEQ ID NO: 118788 - DNA, 73 bp, Homo sapiens
ttttcggcactgaccctgaaggtatattccatgccctcatgaagtctggttactctaaaggtggttttctgga

SEQ ID NO: 118789 - DNA, 75 bp, Homo sapiens
accctgaaggtatattccatgccctcatgaagtctggttactctaaaggtggttttctggacagctgaggcgcac

SEQ ID NO: 118790 - DNA, 77 bp, Homo sapiens
tatattccatgccctcatgaagtctggttactctaaaggtggttttctggacagctgaggcgcacgtcacccacttg

SEQ ID NO: 118791 - DNA, 76 bp, Homo sapiens
ctcatgaagtctggttactctaaaggtggttttctggacagctgaggcgcacgtcacccacttgttgttcacagaa

SEQ ID NO: 118792 - DNA, 73 bp, Homo sapiens
aagtctggttactctaaaggtggttttctggacagctgaggcgcacgtcacccacttgttgttcacagaatcc

SEQ ID NO: 118793 - DNA, 76 bp, Homo sapiens
taaaggtggttttctggacagctgaggcgcacgtcacccacttgttgttcacagaatccctcttctctaggatata

SEQ ID NO: 118794 - DNA, 77 bp, Homo sapiens
ttttctggacagctgaggcgcacgtcacccacttgttgttcacagaatccctcttctctaggatatagttggtgatt

SEQ ID NO: 118795 - DNA, 77 bp, Homo sapiens
acagctgaggcgcacgtcacccacttgttgttcacagaatccctcttctctaggatatagttggtgatttcagaacc

SEQ ID NO: 118796 - DNA, 75 bp, Homo sapiens
acgtcacccacttgttgttcacagaatccctcttctctaggatatagttggtgatttcagaacctccatcatcct

SEQ ID NO: 118797 - DNA, 75 bp, Homo sapiens
acccacttgttgttcacagaatccctcttctctaggatatagttggtgatttcagaacctccatcatcctttgga

SEQ ID NO: 118798 - DNA, 74 bp, Homo sapiens
acagaatccctcttctctaggatatagttggtgatttcagaacctccatcatcctttggaggagcccactttaa

SEQ ID NO: 118799 - DNA, 76 bp, Homo sapiens
tcttctctaggatatagttggtgatttcagaacctccatcatcctttggaggagcccactttaaggtcatggcttc

SEQ ID NO: 118800 - DNA, 79 bp, Homo sapiens
tctaggatatagttggtgatttcagaacctccatcatcctttggaggagcccactttaaggtcatggcttctgctgtga

SEQ ID NO: 118801 - DNA, 78 bp, Homo sapiens
ttcagaacctccatcatcctttggaggagcccactttaaggtcatggcttctgctgtgacttcatcaaatttgattgg

SEQ ID NO: 118802 - DNA, 77 bp, Homo sapiens
ccatcatcctttggaggagcccactttaaggtcatggcttctgctgtgacttcatcaaatttgattggtccagtggg

SEQ ID NO: 118803 - DNA, 78 bp, Homo sapiens
ttggaggagcccactttaaggtcatggcttctgctgtgacttcatcaaatttgattggtccagtggggatgccaggct

SEQ ID NO: 118804 - DNA, 78 bp, Homo sapiens
ttaaggtcatggcttctgctgtgacttcatcaaatttgattggtccagtggggatgccaggcttgccaacaaccttta

SEQ ID NO: 118805 - DNA, 79 bp, Homo sapiens
tggcttctgctgtgacttcatcaaatttgattggtccagtggggatgccaggcttgccaacaacctttatggagatagt

SEQ ID NO: 118806 - DNA, 76 bp, Homo sapiens
tgtgacttcatcaaatttgattggtccagtggggatgccaggcttgccaacaacctttatggagatagttccttcc

SEQ ID NO: 118807 - DNA, 74 bp, Homo sapiens
ttcatcaaatttgattggtccagtggggatgccaggcttgccaacaacctttatggagatagttccttccttgg

SEQ ID NO: 118808 - DNA, 76 bp, Homo sapiens
ttgattggtccagtggggatgccaggcttgccaacaacctttatggagatagttccttccttggtgccagcaacat

SEQ ID NO: 118809 - DNA, 76 bp, Homo sapiens
gggatgccaggcttgccaacaacctttatggagatagttccttccttggtgccagcaacattcttaagtgtgattg

SEQ ID NO: 118810 - DNA, 74 bp, Homo sapiens
aggcttgccaacaacctttatggagatagttccttccttggtgccagcaacattcttaagtgtgattgtgtatt

SEQ ID NO: 118811 - DNA, 76 bp, Homo sapiens
aacctttatggagatagttccttccttggtgccagcaacattcttaagtgtgattgtgtattttccagcatcagat

SEQ ID NO: 118812 - DNA, 78 bp, Homo sapiens
cttccttggtgccagcaacattcttaagtgtgattgtgtattttccagcatcagatttttggcaatcgtacactataa

SEQ ID NO: 118813 - DNA, 80 bp, Homo sapiens
tgccagcaacattcttaagtgtgattgtgtattttccagcatcagatttttggcaatcgtacactataagagttgtgtta

SEQ ID NO: 118814 - DNA, 81 bp, Homo sapiens
tgattgtgtattttccagcatcagatttttggcaatcgtacactataagagttgtgttaaccgcagatgactcaacactga

SEQ ID NO: 118815 - DNA, 78 bp, Homo sapiens
attttccagcatcagatttttggcaatcgtacactataagagttgtgttaaccgcagatgactcaacactgactctag

SEQ ID NO: 118816 - DNA, 80 bp, Homo sapiens
atcagatttttggcaatcgtacactataagagttgtgttaaccgcagatgactcaacactgactctagtgtcagttgcta

SEQ ID NO: 118817 - DNA, 79 bp, Homo sapiens
tttttggcaatcgtacactataagagttgtgttaaccgcagatgactcaacactgactctagtgtcagttgctagagga

SEQ ID NO: 118818 - DNA, 77 bp, Homo sapiens
taagagttgtgttaaccgcagatgactcaacactgactctagtgtcagttgctagaggatcttcccctttcttccag

SEQ ID NO: 118819 - DNA, 78 bp, Homo sapiens
actcaacactgactctagtgtcagttgctagaggatcttcccctttcttccaggagactgatggagctggcttgcctt

SEQ ID NO: 118820 - DNA, 77 bp, Homo sapiens
actgactctagtgtcagttgctagaggatcttcccctttcttccaggagactgatggagctggcttgccttttatgg

SEQ ID NO: 118821 - DNA, 76 bp, Homo sapiens
agtgtcagttgctagaggatcttcccctttcttccaggagactgatggagctggcttgccttttatggggatctta

SEQ ID NO: 118822 - DNA, 72 bp, Homo sapiens
cctttcttccaggagactgatggagctggcttgccttttatggggatcttaagccggaagttgctgttttct

SEQ ID NO: 118823 - DNA, 73 bp, Homo sapiens
aggagactgatggagctggcttgccttttatggggatcttaagccggaagttgctgttttctttagccaagta

SEQ ID NO: 118824 - DNA, 74 bp, Homo sapiens
atggagctggcttgccttttatggggatcttaagccggaagttgctgttttctttagccaagtagcacaaatca

SEQ ID NO: 118825 - DNA, 74 bp, Homo sapiens
ttgctgttttctttagccaagtagcacaaatcaggtagaccctttaagtcaagatcaggagccactgtaaaata

SEQ ID NO: 118826 - DNA, 74 bp, Homo sapiens
gttttctttagccaagtagcacaaatcaggtagaccctttaagtcaagatcaggagccactgtaaaatagcaga

SEQ ID NO: 118827 - DNA, 75 bp, Homo sapiens
agtagcacaaatcaggtagaccctttaagtcaagatcaggagccactgtaaaatagcagagataaattactgtta

SEQ ID NO: 118828 - DNA, 72 bp, Homo sapiens
acaaatcaggtagaccctttaagtcaagatcaggagccactgtaaaatagcagagataaattactgttattt

SEQ ID NO: 118829 - DNA, 79 bp, Homo sapiens
tttcgatgacaataaaggaaaaatgaagatgtgtgcatagagccttaccaacatcatcccttgccacaacagtgatttc

SEQ ID NO: 118830 - DNA, 76 bp, Homo sapiens
aataaaggaaaaatgaagatgtgtgcatagagccttaccaacatcatcccttgccacaacagtgatttcgcttggg

SEQ ID NO: 118831 - DNA, 76 bp, Homo sapiens
aaaaatgaagatgtgtgcatagagccttaccaacatcatcccttgccacaacagtgatttcgcttggggttccttc

SEQ ID NO: 118832 - DNA, 77 bp, Homo sapiens
atgtgtgcatagagccttaccaacatcatcccttgccacaacagtgatttcgcttggggttccttctccattttcat

SEQ ID NO: 118833 - DNA, 77 bp, Homo sapiens
tagagccttaccaacatcatcccttgccacaacagtgatttcgcttggggttccttctccattttcattctcagcac

SEQ ID NO: 118834 - DNA, 78 bp, Homo sapiens
atcatcccttgccacaacagtgatttcgcttggggttccttctccattttcattctcagcactcactctgaaggtata

SEQ ID NO: 118835 - DNA, 77 bp, Homo sapiens
ttgccacaacagtgatttcgcttggggttccttctccattttcattctcagcactcactctgaaggtatattccttc

SEQ ID NO: 118836 - DNA, 73 bp, Homo sapiens
ttggggttccttctccattttcattctcagcactcactctgaaggtatattccttcccttcagtcaaatcttt

SEQ ID NO: 118837 - DNA, 78 bp, Homo sapiens
ttctccattttcattctcagcactcactctgaaggtatattccttcccttcagtcaaatcttttgcagagtactgtag

SEQ ID NO: 118838 - DNA, 77 bp, Homo sapiens
ttttcattctcagcactcactctgaaggtatattccttcccttcagtcaaatcttttgcagagtactgtaggcttaa

SEQ ID NO: 118839 - DNA, 74 bp, Homo sapiens
actcactctgaaggtatattccttcccttcagtcaaatcttttgcagagtactgtaggcttaaggatttcataa

SEQ ID NO: 118840 - DNA, 73 bp, Homo sapiens
tctgaaggtatattccttcccttcagtcaaatcttttgcagagtactgtaggcttaaggatttcataactcgt

SEQ ID NO: 118841 - DNA, 71 bp, Homo sapiens
ccttcccttcagtcaaatcttttgcagagtactgtaggcttaaggatttcataactcgttgccacttattt

SEQ ID NO: 118842 - DNA, 73 bp, Homo sapiens
ccttcagtcaaatcttttgcagagtactgtaggcttaaggatttcataactcgttgccacttattttcttcag

SEQ ID NO: 118843 - DNA, 74 bp, Homo sapiens
ttttgcagagtactgtaggcttaaggatttcataactcgttgccacttattttcttcagtcaggaaatcaacta

SEQ ID NO: 118844 - DNA, 75 bp, Homo sapiens
tactgtaggcttaaggatttcataactcgttgccacttattttcttcagtcaggaaatcaactacatatccaata

SEQ ID NO: 118845 - DNA, 74 bp, Homo sapiens
taaggatttcataactcgttgccacttattttcttcagtcaggaaatcaactacatatccaataatccgacttc

SEQ ID NO: 118846 - DNA, 74 bp, Homo sapiens
atttcataactcgttgccacttattttcttcagtcaggaaatcaactacatatccaataatccgacttccacca

SEQ ID NO: 118847 - DNA, 75 bp, Homo sapiens
gccacttattttcttcagtcaggaaatcaactacatatccaataatccgacttccaccatcactgtgaggctttt

SEQ ID NO: 118848 - DNA, 76 bp, Homo sapiens
ttattttcttcagtcaggaaatcaactacatatccaataatccgacttccaccatcactgtgaggctttttccagc

SEQ ID NO: 118849 - DNA, 78 bp, Homo sapiens
aggaaatcaactacatatccaataatccgacttccaccatcactgtgaggctttttccagccaatgctacaggatgac

SEQ ID NO: 118850 - DNA, 80 bp, Homo sapiens
atcaactacatatccaataatccgacttccaccatcactgtgaggctttttccagccaatgctacaggatgacttagata

SEQ ID NO: 118851 - DNA, 77 bp, Homo sapiens
aataatccgacttccaccatcactgtgaggctttttccagccaatgctacaggatgacttagatacagacctcactt

SEQ ID NO: 118852 - DNA, 79 bp, Homo sapiens
cttccaccatcactgtgaggctttttccagccaatgctacaggatgacttagatacagacctcactttcaggtccacaa

SEQ ID NO: 118853 - DNA, 79 bp, Homo sapiens
atcactgtgaggctttttccagccaatgctacaggatgacttagatacagacctcactttcaggtccacaactggtcca

SEQ ID NO: 118854 - DNA, 75 bp, Homo sapiens
ctttttccagccaatgctacaggatgacttagatacagacctcactttcaggtccacaactggtccaggagtttc

SEQ ID NO: 118855 - DNA, 76 bp, Homo sapiens
agccaatgctacaggatgacttagatacagacctcactttcaggtccacaactggtccaggagtttctaaagcaaa

SEQ ID NO: 118856 - DNA, 74 bp, Homo sapiens
ctacaggatgacttagatacagacctcactttcaggtccacaactggtccaggagtttctaaagcaaaggagaa

SEQ ID NO: 118857 - DNA, 74 bp, Homo sapiens
ttagatacagacctcactttcaggtccacaactggtccaggagtttctaaagcaaaggagaaatgataagtgta

SEQ ID NO: 118858 - DNA, 71 bp, Homo sapiens
agacctcactttcaggtccacaactggtccaggagtttctaaagcaaaggagaaatgataagtgtaagccc

SEQ ID NO: 118859 - DNA, 75 bp, Homo sapiens
aaaggaaggatataactcaaaatgatgggatgatggttcatttgcttacgggaagctttgacagcatcacgagtt

SEQ ID NO: 118860 - DNA, 78 bp, Homo sapiens
atataactcaaaatgatgggatgatggttcatttgcttacgggaagctttgacagcatcacgagtttcaccgggatca

SEQ ID NO: 118861 - DNA, 80 bp, Homo sapiens
gatgggatgatggttcatttgcttacgggaagctttgacagcatcacgagtttcaccgggatcaccaatgccatactcat

SEQ ID NO: 118862 - DNA, 79 bp, Homo sapiens
atgatggttcatttgcttacgggaagctttgacagcatcacgagtttcaccgggatcaccaatgccatactcattttca

SEQ ID NO: 118863 - DNA, 77 bp, Homo sapiens
atttgcttacgggaagctttgacagcatcacgagtttcaccgggatcaccaatgccatactcattttcagcaaacac

SEQ ID NO: 118864 - DNA, 77 bp, Homo sapiens
aagctttgacagcatcacgagtttcaccgggatcaccaatgccatactcattttcagcaaacactcggaagaagtag

SEQ ID NO: 118865 - DNA, 76 bp, Homo sapiens
acagcatcacgagtttcaccgggatcaccaatgccatactcattttcagcaaacactcggaagaagtaggattttc

SEQ ID NO: 118866 - DNA, 72 bp, Homo sapiens
acgagtttcaccgggatcaccaatgccatactcattttcagcaaacactcggaagaagtaggattttccctc

SEQ ID NO: 118867 - DNA, 74 bp, Homo sapiens
atcaccaatgccatactcattttcagcaaacactcggaagaagtaggattttccctcctccaaattagctactc

SEQ ID NO: 118868 - DNA, 74 bp, Homo sapiens
aatgccatactcattttcagcaaacactcggaagaagtaggattttccctcctccaaattagctactctgaagc

SEQ ID NO: 118869 - DNA, 70 bp, Homo sapiens
attttcagcaaacactcggaagaagtaggattttccctcctccaaattagctactctgaagcttgttttg

SEQ ID NO: 118870 - DNA, 71 bp, Homo sapiens
aaacactcggaagaagtaggattttccctcctccaaattagctactctgaagcttgttttggagcactcag

SEQ ID NO: 118871 - DNA, 74 bp, Homo sapiens
aagaagtaggattttccctcctccaaattagctactctgaagcttgttttggagcactcagttgtcactgtaga

SEQ ID NO: 118872 - DNA, 74 bp, Homo sapiens
attttccctcctccaaattagctactctgaagcttgttttggagcactcagttgtcactgtagaccaggatttc

SEQ ID NO: 118873 - DNA, 78 bp, Homo sapiens
caaattagctactctgaagcttgttttggagcactcagttgtcactgtagaccaggatttcctctctgcatcacgttt

SEQ ID NO: 118874 - DNA, 79 bp, Homo sapiens
tactctgaagcttgttttggagcactcagttgtcactgtagaccaggatttcctctctgcatcacgtttttgtaccaca

SEQ ID NO: 118875 - DNA, 78 bp, Homo sapiens
ttgttttggagcactcagttgtcactgtagaccaggatttcctctctgcatcacgtttttgtaccacatagtttatga

SEQ ID NO: 118876 - DNA, 78 bp, Homo sapiens
agcactcagttgtcactgtagaccaggatttcctctctgcatcacgtttttgtaccacatagtttatgatggggcttc

SEQ ID NO: 118877 - DNA, 79 bp, Homo sapiens
tgtcactgtagaccaggatttcctctctgcatcacgtttttgtaccacatagtttatgatggggcttccgccatcaata

SEQ ID NO: 118878 - DNA, 77 bp, Homo sapiens
tgtagaccaggatttcctctctgcatcacgtttttgtaccacatagtttatgatggggcttccgccatcaataatgg

SEQ ID NO: 118879 - DNA, 76 bp, Homo sapiens
atttcctctctgcatcacgtttttgtaccacatagtttatgatggggcttccgccatcaataatgggaggctccca

SEQ ID NO: 118880 - DNA, 73 bp, Homo sapiens
atcacgtttttgtaccacatagtttatgatggggcttccgccatcaataatgggaggctcccaggtaacataa

SEQ ID NO: 118881 - DNA, 75 bp, Homo sapiens
acatagtttatgatggggcttccgccatcaataatgggaggctcccaggtaacataagcagagtctttggatatt

SEQ ID NO: 118882 - DNA, 75 bp, Homo sapiens
gggcttccgccatcaataatgggaggctcccaggtaacataagcagagtctttggatatttccttaacagtcaca

SEQ ID NO: 118883 - DNA, 76 bp, Homo sapiens
ccatcaataatgggaggctcccaggtaacataagcagagtctttggatatttccttaacagtcacattgacaggtg

SEQ ID NO: 118884 - DNA, 76 bp, Homo sapiens
caggtaacataagcagagtctttggatatttccttaacagtcacattgacaggtggcccaggagtatctggataaa

SEQ ID NO: 118885 - DNA, 76 bp, Homo sapiens
aacataagcagagtctttggatatttccttaacagtcacattgacaggtggcccaggagtatctggataaatagta

SEQ ID NO: 118886 - DNA, 73 bp, Homo sapiens
atatttccttaacagtcacattgacaggtggcccaggagtatctggataaatagtaggtaaataagaaatgaa

SEQ ID NO: 118887 - DNA, 71 bp, Homo sapiens
taaaatatatatgattcttttttgaaatagacttaccaagcactttcacaacaatggtatattccttttta

SEQ ID NO: 118888 - DNA, 71 bp, Homo sapiens
atgattcttttttgaaatagacttaccaagcactttcacaacaatggtatattcctttttaccacagctgt

SEQ ID NO: 118889 - DNA, 71 bp, Homo sapiens
tttttgaaatagacttaccaagcactttcacaacaatggtatattcctttttaccacagctgttctccagg

SEQ ID NO: 118890 - DNA, 71 bp, Homo sapiens
acttaccaagcactttcacaacaatggtatattcctttttaccacagctgttctccagggttaagatatat

SEQ ID NO: 118891 - DNA, 71 bp, Homo sapiens
ccaagcactttcacaacaatggtatattcctttttaccacagctgttctccagggttaagatatattttcc

SEQ ID NO: 118892 - DNA, 75 bp, Homo sapiens
tcacaacaatggtatattcctttttaccacagctgttctccagggttaagatatattttcctgcatcatatttgt

SEQ ID NO: 118893 - DNA, 73 bp, Homo sapiens
ggtatattcctttttaccacagctgttctccagggttaagatatattttcctgcatcatatttgttcacattt

SEQ ID NO: 118894 - DNA, 77 bp, Homo sapiens
ttttaccacagctgttctccagggttaagatatattttcctgcatcatatttgttcacattttcacagcgcaagaaa

SEQ ID NO: 118895 - DNA, 77 bp, Homo sapiens
ttctccagggttaagatatattttcctgcatcatatttgttcacattttcacagcgcaagaaagtgtcaaagtcagt

SEQ ID NO: 118896 - DNA, 78 bp, Homo sapiens
gttaagatatattttcctgcatcatatttgttcacattttcacagcgcaagaaagtgtcaaagtcagttgactttatg

SEQ ID NO: 118897 - DNA, 79 bp, Homo sapiens
atatattttcctgcatcatatttgttcacattttcacagcgcaagaaagtgtcaaagtcagttgactttatgtccagtc

SEQ ID NO: 118898 - DNA, 79 bp, Homo sapiens
tcatatttgttcacattttcacagcgcaagaaagtgtcaaagtcagttgactttatgtccagtccaatcctgtctctta

SEQ ID NO: 118899 - DNA, 79 bp, Homo sapiens
tcacattttcacagcgcaagaaagtgtcaaagtcagttgactttatgtccagtccaatcctgtctcttagattgacatt

SEQ ID NO: 118900 - DNA, 77 bp, Homo sapiens
ttttcacagcgcaagaaagtgtcaaagtcagttgactttatgtccagtccaatcctgtctcttagattgacatttgg

SEQ ID NO: 118901 - DNA, 74 bp, Homo sapiens
agaaagtgtcaaagtcagttgactttatgtccagtccaatcctgtctcttagattgacatttggtttagaccaa

SEQ ID NO: 118902 - DNA, 72 bp, Homo sapiens
aaagtcagttgactttatgtccagtccaatcctgtctcttagattgacatttggtttagaccaagtaatctt

SEQ ID NO: 118903 - DNA, 73 bp, Homo sapiens
gttgactttatgtccagtccaatcctgtctcttagattgacatttggtttagaccaagtaatctttggaggtg

SEQ ID NO: 118904 - DNA, 70 bp, Homo sapiens
agtccaatcctgtctcttagattgacatttggtttagaccaagtaatctttggaggtgggcgtcctttta

SEQ ID NO: 118905 - DNA, 72 bp, Homo sapiens
tgtctcttagattgacatttggtttagaccaagtaatctttggaggtgggcgtccttttactggtacatata

SEQ ID NO: 118906 - DNA, 73 bp, Homo sapiens
tagattgacatttggtttagaccaagtaatctttggaggtgggcgtccttttactggtacatatagtctcata

SEQ ID NO: 118907 - DNA, 69 bp, Homo sapiens
atttggtttagaccaagtaatctttggaggtgggcgtccttttactggtacatatagtctcatagtaac

SEQ ID NO: 118908 - DNA, 73 bp, Homo sapiens
aagtaatctttggaggtgggcgtccttttactggtacatatagtctcatagtaactccagcacgtaatatgag

SEQ ID NO: 118909 - DNA, 74 bp, Homo sapiens
tttggaggtgggcgtccttttactggtacatatagtctcatagtaactccagcacgtaatatgagtgtcttcct

SEQ ID NO: 118910 - DNA, 76 bp, Homo sapiens
cgtccttttactggtacatatagtctcatagtaactccagcacgtaatatgagtgtcttccttaagtccgcatcaa

SEQ ID NO: 118911 - DNA, 77 bp, Homo sapiens
ttttactggtacatatagtctcatagtaactccagcacgtaatatgagtgtcttccttaagtccgcatcaagttctc

SEQ ID NO: 118912 - DNA, 77 bp, Homo sapiens
atatagtctcatagtaactccagcacgtaatatgagtgtcttccttaagtccgcatcaagttctccctcaggtggaa

SEQ ID NO: 118913 - DNA, 74 bp, Homo sapiens
atagtaactccagcacgtaatatgagtgtcttccttaagtccgcatcaagttctccctcaggtggaactgttta

SEQ ID NO: 118914 - DNA, 71 bp, Homo sapiens
agcacgtaatatgagtgtcttccttaagtccgcatcaagttctccctcaggtggaactgtttaattttggg

SEQ ID NO: 118915 - DNA, 71 bp, Homo sapiens
aatatgagtgtcttccttaagtccgcatcaagttctccctcaggtggaactgtttaattttgggtgaagaa

SEQ ID NO: 118916 - DNA, 68 bp, Homo sapiens
ttccttaagtccgcatcaagttctccctcaggtggaactgtttaattttgggtgaagaagttaaataa

SEQ ID NO: 118917 - DNA, 69 bp, Homo sapiens
aatatgattaataggaaaagccttatgtactccccctggtaatacttacttaagatgtccttgggatag

SEQ ID NO: 118918 - DNA, 69 bp, Homo sapiens
taataggaaaagccttatgtactccccctggtaatacttacttaagatgtccttgggatagtgtttatc

SEQ ID NO: 118919 - DNA, 73 bp, Homo sapiens
agccttatgtactccccctggtaatacttacttaagatgtccttgggatagtgtttatctggcacatcactgg

SEQ ID NO: 118920 - DNA, 75 bp, Homo sapiens
ccctggtaatacttacttaagatgtccttgggatagtgtttatctggcacatcactggggtcactgtatccaatc

SEQ ID NO: 118921 - DNA, 76 bp, Homo sapiens
taatacttacttaagatgtccttgggatagtgtttatctggcacatcactggggtcactgtatccaatcttattaa

SEQ ID NO: 118922 - DNA, 78 bp, Homo sapiens
ttaagatgtccttgggatagtgtttatctggcacatcactggggtcactgtatccaatcttattaacggcatacacac

SEQ ID NO: 118923 - DNA, 78 bp, Homo sapiens
ttgggatagtgtttatctggcacatcactggggtcactgtatccaatcttattaacggcatacacacggaattgatat

SEQ ID NO: 118924 - DNA, 79 bp, Homo sapiens
gtgtttatctggcacatcactggggtcactgtatccaatcttattaacggcatacacacggaattgatattgtgtgtct

SEQ ID NO: 118925 - DNA, 79 bp, Homo sapiens
atcactggggtcactgtatccaatcttattaacggcatacacacggaattgatattgtgtgtcttccatcaggccagta

SEQ ID NO: 118926 - DNA, 78 bp, Homo sapiens
gtcactgtatccaatcttattaacggcatacacacggaattgatattgtgtgtcttccatcaggccagtaacctcaaa

SEQ ID NO: 118927 - DNA, 74 bp, Homo sapiens
caatcttattaacggcatacacacggaattgatattgtgtgtcttccatcaggccagtaacctcaaagcgggtt

SEQ ID NO: 118928 - DNA, 75 bp, Homo sapiens
tattaacggcatacacacggaattgatattgtgtgtcttccatcaggccagtaacctcaaagcgggttttctgta

SEQ ID NO: 118929 - DNA, 74 bp, Homo sapiens
acacggaattgatattgtgtgtcttccatcaggccagtaacctcaaagcgggttttctgtagattctgtggtaa

SEQ ID NO: 118930 - DNA, 75 bp, Homo sapiens
aattgatattgtgtgtcttccatcaggccagtaacctcaaagcgggttttctgtagattctgtggtaagttgcac

SEQ ID NO: 118931 - DNA, 74 bp, Homo sapiens
tgtcttccatcaggccagtaacctcaaagcgggttttctgtagattctgtggtaagttgcacctcacccagtta

SEQ ID NO: 118932 - DNA, 72 bp, Homo sapiens
aggccagtaacctcaaagcgggttttctgtagattctgtggtaagttgcacctcacccagttatcggagtca

SEQ ID NO: 118933 - DNA, 71 bp, Homo sapiens
ggttttctgtagattctgtggtaagttgcacctcacccagttatcggagtcagcccgttttacttcaacga

SEQ ID NO: 118934 - DNA, 73 bp, Homo sapiens
agattctgtggtaagttgcacctcacccagttatcggagtcagcccgttttacttcaacgagataaccaatga

SEQ ID NO: 118935 - DNA, 72 bp, Homo sapiens
ctgtggtaagttgcacctcacccagttatcggagtcagcccgttttacttcaacgagataaccaatgatagg

SEQ ID NO: 118936 - DNA, 73 bp, Homo sapiens
acctcacccagttatcggagtcagcccgttttacttcaacgagataaccaatgatagggctgccgccgtcata

SEQ ID NO: 118937 - DNA, 75 bp, Homo sapiens
agttatcggagtcagcccgttttacttcaacgagataaccaatgatagggctgccgccgtcataggctggcttgc

SEQ ID NO: 118938 - DNA, 75 bp, Homo sapiens
agtcagcccgttttacttcaacgagataaccaatgatagggctgccgccgtcataggctggcttgccccaagata

SEQ ID NO: 118939 - DNA, 77 bp, Homo sapiens
cgttttacttcaacgagataaccaatgatagggctgccgccgtcataggctggcttgccccaagatagactcacaga

SEQ ID NO: 118940 - DNA, 83 bp, Homo sapiens
agataaccaatgatagggctgccgccgtcataggctggcttgccccaagatagactcacagagctgcgagttgtatcatatac

SEQ ID NO: 118941 - DNA, 82 bp, Homo sapiens
accaatgatagggctgccgccgtcataggctggcttgccccaagatagactcacagagctgcgagttgtatcatatacttta

SEQ ID NO: 118942 - DNA, 79 bp, Homo sapiens
ctgccgccgtcataggctggcttgccccaagatagactcacagagctgcgagttgtatcatatactttagggaaagccg

SEQ ID NO: 118943 - DNA, 77 bp, Homo sapiens
ataggctggcttgccccaagatagactcacagagctgcgagttgtatcatatactttagggaaagccggtgggccag

SEQ ID NO: 118944 - DNA, 78 bp, Homo sapiens
cttgccccaagatagactcacagagctgcgagttgtatcatatactttagggaaagccggtgggccaggaggatctga

SEQ ID NO: 118945 - DNA, 77 bp, Homo sapiens
atagactcacagagctgcgagttgtatcatatactttagggaaagccggtgggccaggaggatctgagaataaataa

SEQ ID NO: 118946 - DNA, 76 bp, Homo sapiens
agagctgcgagttgtatcatatactttagggaaagccggtgggccaggaggatctgagaataaataatgataggaa

SEQ ID NO: 118947 - DNA, 71 bp, Homo sapiens
agttgtatcatatactttagggaaagccggtgggccaggaggatctgagaataaataatgataggaaattt

SEQ ID NO: 118948 - DNA, 76 bp, Homo sapiens
aatgctgcttttaacacaggatatggaactcgttcatgaacacttacactgagggtcccgagcataagcggccttg

SEQ ID NO: 118949 - DNA, 75 bp, Homo sapiens
aactcgttcatgaacacttacactgagggtcccgagcataagcggccttggatgcgtcactgggtttgcctggtc

SEQ ID NO: 118950 - DNA, 73 bp, Homo sapiens
aacacttacactgagggtcccgagcataagcggccttggatgcgtcactgggtttgcctggtccagctttatt

SEQ ID NO: 118951 - DNA, 75 bp, Homo sapiens
actgagggtcccgagcataagcggccttggatgcgtcactgggtttgcctggtccagctttatttatagctgtaa

SEQ ID NO: 118952 - DNA, 76 bp, Homo sapiens
agcataagcggccttggatgcgtcactgggtttgcctggtccagctttatttatagctgtaacacggaactcatat

SEQ ID NO: 118953 - DNA, 73 bp, Homo sapiens
ccttggatgcgtcactgggtttgcctggtccagctttatttatagctgtaacacggaactcatattcggtacc

SEQ ID NO: 118954 - DNA, 73 bp, Homo sapiens
gtcactgggtttgcctggtccagctttatttatagctgtaacacggaactcatattcggtaccttcttgaaga

SEQ ID NO: 118955 - DNA, 73 bp, Homo sapiens
ttgcctggtccagctttatttatagctgtaacacggaactcatattcggtaccttcttgaagacctgttgctt

SEQ ID NO: 118956 - DNA, 71 bp, Homo sapiens
ccagctttatttatagctgtaacacggaactcatattcggtaccttcttgaagacctgttgcttttaatgt

SEQ ID NO: 118957 - DNA, 71 bp, Homo sapiens
ttatttatagctgtaacacggaactcatattcggtaccttcttgaagacctgttgcttttaatgttctttc

SEQ ID NO: 118958 - DNA, 70 bp, Homo sapiens
tgtaacacggaactcatattcggtaccttcttgaagacctgttgcttttaatgttctttctataataggt

SEQ ID NO: 118959 - DNA, 70 bp, Homo sapiens
ctcatattcggtaccttcttgaagacctgttgcttttaatgttctttctataataggttttctgttgacc

SEQ ID NO: 118960 - DNA, 69 bp, Homo sapiens
tcggtaccttcttgaagacctgttgcttttaatgttctttctataataggttttctgttgaccttagtc

SEQ ID NO: 118961 - DNA, 70 bp, Homo sapiens
cttgaagacctgttgcttttaatgttctttctataataggttttctgttgaccttagtccagttaacagc

SEQ ID NO: 118962 - DNA, 68 bp, Homo sapiens
ttgcttttaatgttctttctataataggttttctgttgaccttagtccagttaacagcctgggtttcc

SEQ ID NO: 118963 - DNA, 69 bp, Homo sapiens
tctttctataataggttttctgttgaccttagtccagttaacagcctgggtttcccgcttttcaagcaa

SEQ ID NO: 118964 - DNA, 69 bp, Homo sapiens
ataataggttttctgttgaccttagtccagttaacagcctgggtttcccgcttttcaagcaaatagcca

SEQ ID NO: 118965 - DNA, 72 bp, Homo sapiens
ttttctgttgaccttagtccagttaacagcctgggtttcccgcttttcaagcaaatagccagtgatgggtga

SEQ ID NO: 118966 - DNA, 72 bp, Homo sapiens
accttagtccagttaacagcctgggtttcccgcttttcaagcaaatagccagtgatgggtgagcccccatca

SEQ ID NO: 118967 - DNA, 75 bp, Homo sapiens
agttaacagcctgggtttcccgcttttcaagcaaatagccagtgatgggtgagcccccatcatctgctggtggct

SEQ ID NO: 118968 - DNA, 83 bp, Homo sapiens
tttcccgcttttcaagcaaatagccagtgatgggtgagcccccatcatctgctggtggcttccagctgactgtcatgtgatct

SEQ ID NO: 118969 - DNA, 84 bp, Homo sapiens
tttcaagcaaatagccagtgatgggtgagcccccatcatctgctggtggcttccagctgactgtcatgtgatctttggttatgt

SEQ ID NO: 118970 - DNA, 84 bp, Homo sapiens
aaatagccagtgatgggtgagcccccatcatctgctggtggcttccagctgactgtcatgtgatctttggttatgttgctaata

SEQ ID NO: 118971 - DNA, 84 bp, Homo sapiens
atgggtgagcccccatcatctgctggtggcttccagctgactgtcatgtgatctttggttatgttgctaataacaggaggatca

SEQ ID NO: 118972 - DNA, 84 bp, Homo sapiens
cccatcatctgctggtggcttccagctgactgtcatgtgatctttggttatgttgctaataacaggaggatcacagcgtcctgg

SEQ ID NO: 118973 - DNA, 82 bp, Homo sapiens
atctgctggtggcttccagctgactgtcatgtgatctttggttatgttgctaataacaggaggatcacagcgtcctggtggg

SEQ ID NO: 118974 - DNA, 83 bp, Homo sapiens
ttccagctgactgtcatgtgatctttggttatgttgctaataacaggaggatcacagcgtcctggtgggtctgcagaaattga

SEQ ID NO: 118975 - DNA, 80 bp, Homo sapiens
actgtcatgtgatctttggttatgttgctaataacaggaggatcacagcgtcctggtgggtctgcagaaattgattgaaa

SEQ ID NO: 118976 - DNA, 66 bp, Homo sapiens
aaaataaaatgaaaaaccaccgggaaatgttcctaccatatgggtttttggcaattgctggttcag

SEQ ID NO: 118977 - DNA, 69 bp, Homo sapiens
aaatgaaaaaccaccgggaaatgttcctaccatatgggtttttggcaattgctggttcagtgaagactg

SEQ ID NO: 118978 - DNA, 73 bp, Homo sapiens
aatgttcctaccatatgggtttttggcaattgctggttcagtgaagactggatcgcctactccatatttattt

SEQ ID NO: 118979 - DNA, 75 bp, Homo sapiens
atatgggtttttggcaattgctggttcagtgaagactggatcgcctactccatatttattttcagcacaaatacg

SEQ ID NO: 118980 - DNA, 77 bp, Homo sapiens
ttttggcaattgctggttcagtgaagactggatcgcctactccatatttattttcagcacaaatacggaactgatac

SEQ ID NO: 118981 - DNA, 78 bp, Homo sapiens
gttcagtgaagactggatcgcctactccatatttattttcagcacaaatacggaactgatactcatggccctctataa

SEQ ID NO: 118982 - DNA, 75 bp, Homo sapiens
aagactggatcgcctactccatatttattttcagcacaaatacggaactgatactcatggccctctataagtttc

SEQ ID NO: 118983 - DNA, 78 bp, Homo sapiens
atcgcctactccatatttattttcagcacaaatacggaactgatactcatggccctctataagtttctccacgctgca

SEQ ID NO: 118984 - DNA, 80 bp, Homo sapiens
atatttattttcagcacaaatacggaactgatactcatggccctctataagtttctccacgctgcagctggtgataggca

SEQ ID NO: 118985 - DNA, 83 bp, Homo sapiens
ttttcagcacaaatacggaactgatactcatggccctctataagtttctccacgctgcagctggtgataggcacagttgcaga

SEQ ID NO: 118986 - DNA, 82 bp, Homo sapiens
aaatacggaactgatactcatggccctctataagtttctccacgctgcagctggtgataggcacagttgcagagacttgagc

SEQ ID NO: 118987 - DNA, 83 bp, Homo sapiens
ctgatactcatggccctctataagtttctccacgctgcagctggtgataggcacagttgcagagacttgagcccagttgggcc

SEQ ID NO: 118988 - DNA, 81 bp, Homo sapiens
ccctctataagtttctccacgctgcagctggtgataggcacagttgcagagacttgagcccagttgggcctgcttgtttca

SEQ ID NO: 118989 - DNA, 80 bp, Homo sapiens
taagtttctccacgctgcagctggtgataggcacagttgcagagacttgagcccagttgggcctgcttgtttcacgtttg

SEQ ID NO: 118990 - DNA, 81 bp, Homo sapiens
tgcagctggtgataggcacagttgcagagacttgagcccagttgggcctgcttgtttcacgtttgtcaacaatatagttgg

SEQ ID NO: 118991 - DNA, 78 bp, Homo sapiens
gtgataggcacagttgcagagacttgagcccagttgggcctgcttgtttcacgtttgtcaacaatatagttggtgatt

SEQ ID NO: 118992 - DNA, 77 bp, Homo sapiens
acagttgcagagacttgagcccagttgggcctgcttgtttcacgtttgtcaacaatatagttggtgatttctgagcc

SEQ ID NO: 118993 - DNA, 76 bp, Homo sapiens
acttgagcccagttgggcctgcttgtttcacgtttgtcaacaatatagttggtgatttctgagcctccatcttcaa

SEQ ID NO: 118994 - DNA, 74 bp, Homo sapiens
agttgggcctgcttgtttcacgtttgtcaacaatatagttggtgatttctgagcctccatcttcaagaggcggt

SEQ ID NO: 118995 - DNA, 77 bp, Homo sapiens
ttcacgtttgtcaacaatatagttggtgatttctgagcctccatcttcaagaggcggttcccaagaaagcatagcac

SEQ ID NO: 118996 - DNA, 78 bp, Homo sapiens
ttggtgatttctgagcctccatcttcaagaggcggttcccaagaaagcatagcacgatctgaatacattttgttgatt

SEQ ID NO: 118997 - DNA, 77 bp, Homo sapiens
atcttcaagaggcggttcccaagaaagcatagcacgatctgaatacattttgttgattttaacagatgctggaggac

SEQ ID NO: 118998 - DNA, 74 bp, Homo sapiens
ggttcccaagaaagcatagcacgatctgaatacattttgttgattttaacagatgctggaggacccggtttatc

SEQ ID NO: 118999 - DNA, 74 bp, Homo sapiens
atagcacgatctgaatacattttgttgattttaacagatgctggaggacccggtttatctgaaggaataaggaa

SEQ ID NO: 119000 - DNA, 72 bp, Homo sapiens
atacattttgttgattttaacagatgctggaggacccggtttatctgaaggaataaggaagaagagtgaata

SEQ ID NO: 119001 - DNA, 73 bp, Homo sapiens
tttgttgattttaacagatgctggaggacccggtttatctgaaggaataaggaagaagagtgaatatgtggaa

SEQ ID NO: 119002 - DNA, 67 bp, Homo sapiens
cccattatccaaagtaaaatatgggattccaatgaagtttattagttacctaacactttaagcttaa

SEQ ID NO: 119003 - DNA, 69 bp, Homo sapiens
ccaaagtaaaatatgggattccaatgaagtttattagttacctaacactttaagcttaatggtggctga

SEQ ID NO: 119004 - DNA, 70 bp, Homo sapiens
gggattccaatgaagtttattagttacctaacactttaagcttaatggtggctgatttagaaccacttga

SEQ ID NO: 119005 - DNA, 70 bp, Homo sapiens
gaagtttattagttacctaacactttaagcttaatggtggctgatttagaaccacttgaattttcagcag

SEQ ID NO: 119006 - DNA, 71 bp, Homo sapiens
agttacctaacactttaagcttaatggtggctgatttagaaccacttgaattttcagcagtaatggtatag

SEQ ID NO: 119007 - DNA, 75 bp, Homo sapiens
taacactttaagcttaatggtggctgatttagaaccacttgaattttcagcagtaatggtatagtctcctgagtc

SEQ ID NO: 119008 - DNA, 74 bp, Homo sapiens
ttaatggtggctgatttagaaccacttgaattttcagcagtaatggtatagtctcctgagtccttccggttcac

SEQ ID NO: 119009 - DNA, 76 bp, Homo sapiens
ctgatttagaaccacttgaattttcagcagtaatggtatagtctcctgagtccttccggttcacgctgaatagctc

SEQ ID NO: 119010 - DNA, 75 bp, Homo sapiens
ttagaaccacttgaattttcagcagtaatggtatagtctcctgagtccttccggttcacgctgaatagctccaag

SEQ ID NO: 119011 - DNA, 78 bp, Homo sapiens
ttgaattttcagcagtaatggtatagtctcctgagtccttccggttcacgctgaatagctccaaggtgcacagattcc

SEQ ID NO: 119012 - DNA, 81 bp, Homo sapiens
taatggtatagtctcctgagtccttccggttcacgctgaatagctccaaggtgcacagattccgctgcatggccatcttta

SEQ ID NO: 119013 - DNA, 81 bp, Homo sapiens
gtatagtctcctgagtccttccggttcacgctgaatagctccaaggtgcacagattccgctgcatggccatctttatgcct

SEQ ID NO: 119014 - DNA, 79 bp, Homo sapiens
agtccttccggttcacgctgaatagctccaaggtgcacagattccgctgcatggccatctttatgccttctgctggttt

SEQ ID NO: 119015 - DNA, 85 bp, Homo sapiens
ttcacgctgaatagctccaaggtgcacagattccgctgcatggccatctttatgccttctgctggttttagcagtgtgccatctt

SEQ ID NO: 119016 - DNA, 82 bp, Homo sapiens
ctgaatagctccaaggtgcacagattccgctgcatggccatctttatgccttctgctggttttagcagtgtgccatcttttt

SEQ ID NO: 119017 - DNA, 79 bp, Homo sapiens
aaggtgcacagattccgctgcatggccatctttatgccttctgctggttttagcagtgtgccatcttttttccaagaaa

SEQ ID NO: 119018 - DNA, 79 bp, Homo sapiens
agattccgctgcatggccatctttatgccttctgctggttttagcagtgtgccatcttttttccaagaaactgttggca

SEQ ID NO: 119019 - DNA, 75 bp, Homo sapiens
atggccatctttatgccttctgctggttttagcagtgtgccatcttttttccaagaaactgttggcatcggttta

SEQ ID NO: 119020 - DNA, 72 bp, Homo sapiens
ttatgccttctgctggttttagcagtgtgccatcttttttccaagaaactgttggcatcggtttaccaaaaa

SEQ ID NO: 119021 - DNA, 73 bp, Homo sapiens
ttctgctggttttagcagtgtgccatcttttttccaagaaactgttggcatcggtttaccaaaaacagtagca

SEQ ID NO: 119022 - DNA, 76 bp, Homo sapiens
tagcagtgtgccatcttttttccaagaaactgttggcatcggtttaccaaaaacagtagcatccaagcagacatta

SEQ ID NO: 119023 - DNA, 72 bp, Homo sapiens
tcttttttccaagaaactgttggcatcggtttaccaaaaacagtagcatccaagcagacattagttccagct

SEQ ID NO: 119024 - DNA, 75 bp, Homo sapiens
aagaaactgttggcatcggtttaccaaaaacagtagcatccaagcagacattagttccagctttcacagtaagca

SEQ ID NO: 119025 - DNA, 75 bp, Homo sapiens
actgttggcatcggtttaccaaaaacagtagcatccaagcagacattagttccagctttcacagtaagcaaagat

SEQ ID NO: 119026 - DNA, 78 bp, Homo sapiens
gtttaccaaaaacagtagcatccaagcagacattagttccagctttcacagtaagcaaagatttcatagccacactca

SEQ ID NO: 119027 - DNA, 79 bp, Homo sapiens
aaaaacagtagcatccaagcagacattagttccagctttcacagtaagcaaagatttcatagccacactcaggtctatc

SEQ ID NO: 119028 - DNA, 78 bp, Homo sapiens
atccaagcagacattagttccagctttcacagtaagcaaagatttcatagccacactcaggtctatcctgggagggac

SEQ ID NO: 119029 - DNA, 75 bp, Homo sapiens
attagttccagctttcacagtaagcaaagatttcatagccacactcaggtctatcctgggagggactggaaagaa

SEQ ID NO: 119030 - DNA, 74 bp, Homo sapiens
ctttcacagtaagcaaagatttcatagccacactcaggtctatcctgggagggactggaaagaaataagataaa

SEQ ID NO: 119031 - DNA, 81 bp, Homo sapiens
atgaatgctgttacatctttgcctataatactcagcagaatcttaccattttctgcgaggatagtcactggatcagaaggt

SEQ ID NO: 119032 - DNA, 80 bp, Homo sapiens
ctgttacatctttgcctataatactcagcagaatcttaccattttctgcgaggatagtcactggatcagaaggttcagaa

SEQ ID NO: 119033 - DNA, 79 bp, Homo sapiens
ttgcctataatactcagcagaatcttaccattttctgcgaggatagtcactggatcagaaggttcagaaggtgggctaa

SEQ ID NO: 119034 - DNA, 78 bp, Homo sapiens
taatactcagcagaatcttaccattttctgcgaggatagtcactggatcagaaggttcagaaggtgggctaatgttta

SEQ ID NO: 119035 - DNA, 73 bp, Homo sapiens
aatcttaccattttctgcgaggatagtcactggatcagaaggttcagaaggtgggctaatgtttaccgcggtc

SEQ ID NO: 119036 - DNA, 75 bp, Homo sapiens
ccattttctgcgaggatagtcactggatcagaaggttcagaaggtgggctaatgtttaccgcggtcctggcaata

SEQ ID NO: 119037 - DNA, 75 bp, Homo sapiens
atagtcactggatcagaaggttcagaaggtgggctaatgtttaccgcggtcctggcaatagctctaaattgatac

SEQ ID NO: 119038 - DNA, 75 bp, Homo sapiens
actggatcagaaggttcagaaggtgggctaatgtttaccgcggtcctggcaatagctctaaattgatactgagct

SEQ ID NO: 119039 - DNA, 73 bp, Homo sapiens
aaggttcagaaggtgggctaatgtttaccgcggtcctggcaatagctctaaattgatactgagctttctcttc

SEQ ID NO: 119040 - DNA, 74 bp, Homo sapiens
aaggtgggctaatgtttaccgcggtcctggcaatagctctaaattgatactgagctttctcttctaggccagta

SEQ ID NO: 119041 - DNA, 76 bp, Homo sapiens
aatgtttaccgcggtcctggcaatagctctaaattgatactgagctttctcttctaggccagtagctgtgtactct

SEQ ID NO: 119042 - DNA, 80 bp, Homo sapiens
tcctggcaatagctctaaattgatactgagctttctcttctaggccagtagctgtgtactcttcctggggaatctggtga

SEQ ID NO: 119043 - DNA, 79 bp, Homo sapiens
aatagctctaaattgatactgagctttctcttctaggccagtagctgtgtactcttcctggggaatctggtgaggtgca

SEQ ID NO: 119044 - DNA, 79 bp, Homo sapiens
aaattgatactgagctttctcttctaggccagtagctgtgtactcttcctggggaatctggtgaggtgcagtattgcac

SEQ ID NO: 119045 - DNA, 76 bp, Homo sapiens
tttctcttctaggccagtagctgtgtactcttcctggggaatctggtgaggtgcagtattgcaccgtacccattta

SEQ ID NO: 119046 - DNA, 77 bp, Homo sapiens
ttctaggccagtagctgtgtactcttcctggggaatctggtgaggtgcagtattgcaccgtacccatttatcaccag

SEQ ID NO: 119047 - DNA, 74 bp, Homo sapiens
agtagctgtgtactcttcctggggaatctggtgaggtgcagtattgcaccgtacccatttatcaccaggaagtt

SEQ ID NO: 119048 - DNA, 75 bp, Homo sapiens
ttcctggggaatctggtgaggtgcagtattgcaccgtacccatttatcaccaggaagtttgcaagcttctacgaa

SEQ ID NO: 119049 - DNA, 76 bp, Homo sapiens
atctggtgaggtgcagtattgcaccgtacccatttatcaccaggaagtttgcaagcttctacgaaatagccaataa

SEQ ID NO: 119050 - DNA, 73 bp, Homo sapiens
aggtgcagtattgcaccgtacccatttatcaccaggaagtttgcaagcttctacgaaatagccaataatttta

SEQ ID NO: 119051 - DNA, 73 bp, Homo sapiens
gtattgcaccgtacccatttatcaccaggaagtttgcaagcttctacgaaatagccaataattttactgcctc

SEQ ID NO: 119052 - DNA, 77 bp, Homo sapiens
accaggaagtttgcaagcttctacgaaatagccaataattttactgcctccatcatgctttggacgagcccagatca

SEQ ID NO: 119053 - DNA, 80 bp, Homo sapiens
tttgcaagcttctacgaaatagccaataattttactgcctccatcatgctttggacgagcccagatcagagatacagtac

SEQ ID NO: 119054 - DNA, 80 bp, Homo sapiens
ttctacgaaatagccaataattttactgcctccatcatgctttggacgagcccagatcagagatacagtactcttggtga

SEQ ID NO: 119055 - DNA, 81 bp, Homo sapiens
atagccaataattttactgcctccatcatgctttggacgagcccagatcagagatacagtactcttggtgacatcaataac

SEQ ID NO: 119056 - DNA, 79 bp, Homo sapiens
attttactgcctccatcatgctttggacgagcccagatcagagatacagtactcttggtgacatcaataacctcaggtt

SEQ ID NO: 119057 - DNA, 80 bp, Homo sapiens
atcatgctttggacgagcccagatcagagatacagtactcttggtgacatcaataacctcaggtttcccaggaggatcta

SEQ ID NO: 119058 - DNA, 76 bp, Homo sapiens
tttggacgagcccagatcagagatacagtactcttggtgacatcaataacctcaggtttcccaggaggatctaaaa

SEQ ID NO: 119059 - DNA, 73 bp, Homo sapiens
agatcagagatacagtactcttggtgacatcaataacctcaggtttcccaggaggatctaaaacaaaaagagg

SEQ ID NO: 119060 - DNA, 72 bp, Homo sapiens
atacagtactcttggtgacatcaataacctcaggtttcccaggaggatctaaaacaaaaagaggtacactca

SEQ ID NO: 119061 - DNA, 72 bp, Homo sapiens
tggtgacatcaataacctcaggtttcccaggaggatctaaaacaaaaagaggtacactcaccatttatctta

SEQ ID NO: 119062 - DNA, 68 bp, Homo sapiens
aacaataaaaaaaccccaaaacttaccaactggcattcttgcagttacatattctgtgggtttgctgg

SEQ ID NO: 119063 - DNA, 71 bp, Homo sapiens
aaaaccccaaaacttaccaactggcattcttgcagttacatattctgtgggtttgctgggtgggctggatc

SEQ ID NO: 119064 - DNA, 74 bp, Homo sapiens
aaacttaccaactggcattcttgcagttacatattctgtgggtttgctgggtgggctggatccagctttgttta

SEQ ID NO: 119065 - DNA, 79 bp, Homo sapiens
ttcttgcagttacatattctgtgggtttgctgggtgggctggatccagctttgtttagggcatagattctgaatgaata

SEQ ID NO: 119066 - DNA, 76 bp, Homo sapiens
atattctgtgggtttgctgggtgggctggatccagctttgtttagggcatagattctgaatgaatactcaagacct

SEQ ID NO: 119067 - DNA, 76 bp, Homo sapiens
tgggtttgctgggtgggctggatccagctttgtttagggcatagattctgaatgaatactcaagaccttctacaag

SEQ ID NO: 119068 - DNA, 79 bp, Homo sapiens
tgggctggatccagctttgtttagggcatagattctgaatgaatactcaagaccttctacaaggccagcacaaggatat

SEQ ID NO: 119069 - DNA, 79 bp, Homo sapiens
atccagctttgtttagggcatagattctgaatgaatactcaagaccttctacaaggccagcacaaggatattcagttga

SEQ ID NO: 119070 - DNA, 78 bp, Homo sapiens
tttagggcatagattctgaatgaatactcaagaccttctacaaggccagcacaaggatattcagttgaccggacaaga

SEQ ID NO: 119071 - DNA, 79 bp, Homo sapiens
atagattctgaatgaatactcaagaccttctacaaggccagcacaaggatattcagttgaccggacaagagtatcattg

SEQ ID NO: 119072 - DNA, 77 bp, Homo sapiens
aatgaatactcaagaccttctacaaggccagcacaaggatattcagttgaccggacaagagtatcattggctttcac

SEQ ID NO: 119073 - DNA, 76 bp, Homo sapiens
aagaccttctacaaggccagcacaaggatattcagttgaccggacaagagtatcattggctttcacccacagcaaa

SEQ ID NO: 119074 - DNA, 76 bp, Homo sapiens
tacaaggccagcacaaggatattcagttgaccggacaagagtatcattggctttcacccacagcaaactgtttctt

SEQ ID NO: 119075 - DNA, 74 bp, Homo sapiens
aaggatattcagttgaccggacaagagtatcattggctttcacccacagcaaactgtttctttccttgcgttca

SEQ ID NO: 119076 - DNA, 74 bp, Homo sapiens
acaagagtatcattggctttcacccacagcaaactgtttctttccttgcgttcaatcagataaccaataatggg

SEQ ID NO: 119077 - DNA, 74 bp, Homo sapiens
agtatcattggctttcacccacagcaaactgtttctttccttgcgttcaatcagataaccaataatggggctcc

SEQ ID NO: 119078 - DNA, 75 bp, Homo sapiens
tttcacccacagcaaactgtttctttccttgcgttcaatcagataaccaataatggggctccctccatcactatc

SEQ ID NO: 119079 - DNA, 74 bp, Homo sapiens
aaactgtttctttccttgcgttcaatcagataaccaataatggggctccctccatcactatctggtctgtccca

SEQ ID NO: 119080 - DNA, 75 bp, Homo sapiens
tttccttgcgttcaatcagataaccaataatggggctccctccatcactatctggtctgtcccaagcaacaaaaa

SEQ ID NO: 119081 - DNA, 75 bp, Homo sapiens
gttcaatcagataaccaataatggggctccctccatcactatctggtctgtcccaagcaacaaaaatacagtcct

SEQ ID NO: 119082 - DNA, 73 bp, Homo sapiens
taaccaataatggggctccctccatcactatctggtctgtcccaagcaacaaaaatacagtccttgttgactt

SEQ ID NO: 119083 - DNA, 74 bp, Homo sapiens
aataatggggctccctccatcactatctggtctgtcccaagcaacaaaaatacagtccttgttgactttggtga

SEQ ID NO: 119084 - DNA, 76 bp, Homo sapiens
tccatcactatctggtctgtcccaagcaacaaaaatacagtccttgttgactttggtgactcgtgcattctttggt

SEQ ID NO: 119085 - DNA, 75 bp, Homo sapiens
ctatctggtctgtcccaagcaacaaaaatacagtccttgttgactttggtgactcgtgcattctttggttcacta

SEQ ID NO: 119086 - DNA, 74 bp, Homo sapiens
tctgtcccaagcaacaaaaatacagtccttgttgactttggtgactcgtgcattctttggttcactaggaacac

SEQ ID NO: 119087 - DNA, 73 bp, Homo sapiens
aacaaaaatacagtccttgttgactttggtgactcgtgcattctttggttcactaggaacacctggagatgaa

SEQ ID NO: 119088 - DNA, 76 bp, Homo sapiens
tacagtccttgttgactttggtgactcgtgcattctttggttcactaggaacacctggagatgaagacaaggaaga

SEQ ID NO: 119089 - DNA, 77 bp, Homo sapiens
ttgactttggtgactcgtgcattctttggttcactaggaacacctggagatgaagacaaggaagatgtcagtttcta

SEQ ID NO: 119090 - DNA, 68 bp, Homo sapiens
tagaaagaaaacaactttttttctccttcacaaaaacataccaaatgggaactgcgcaaccatctttg

SEQ ID NO: 119091 - DNA, 70 bp, Homo sapiens
aaaacaactttttttctccttcacaaaaacataccaaatgggaactgcgcaaccatctttggagatgtga

SEQ ID NO: 119092 - DNA, 74 bp, Homo sapiens
acaaaaacataccaaatgggaactgcgcaaccatctttggagatgtgagaggctctgaaatgccaaatcggttt

SEQ ID NO: 119093 - DNA, 77 bp, Homo sapiens
ataccaaatgggaactgcgcaaccatctttggagatgtgagaggctctgaaatgccaaatcggttttcagcacggac

SEQ ID NO: 119094 - DNA, 77 bp, Homo sapiens
aactgcgcaaccatctttggagatgtgagaggctctgaaatgccaaatcggttttcagcacggacccggaagatgta

SEQ ID NO: 119095 - DNA, 75 bp, Homo sapiens
aaccatctttggagatgtgagaggctctgaaatgccaaatcggttttcagcacggacccggaagatgtactcctg

SEQ ID NO: 119096 - DNA, 78 bp, Homo sapiens
ttggagatgtgagaggctctgaaatgccaaatcggttttcagcacggacccggaagatgtactcctggcctgggatca

SEQ ID NO: 119097 - DNA, 74 bp, Homo sapiens
aggctctgaaatgccaaatcggttttcagcacggacccggaagatgtactcctggcctgggatcagctttccaa

SEQ ID NO: 119098 - DNA, 73 bp, Homo sapiens
aaatgccaaatcggttttcagcacggacccggaagatgtactcctggcctgggatcagctttccaaccctgca

SEQ ID NO: 119099 - DNA, 73 bp, Homo sapiens
ttttcagcacggacccggaagatgtactcctggcctgggatcagctttccaaccctgcaggaagtttttgtga

SEQ ID NO: 119100 - DNA, 73 bp, Homo sapiens
agcacggacccggaagatgtactcctggcctgggatcagctttccaaccctgcaggaagtttttgtgactgaa

SEQ ID NO: 119101 - DNA, 75 bp, Homo sapiens
aagatgtactcctggcctgggatcagctttccaaccctgcaggaagtttttgtgactgaagctagagccgtgacc

SEQ ID NO: 119102 - DNA, 75 bp, Homo sapiens
actcctggcctgggatcagctttccaaccctgcaggaagtttttgtgactgaagctagagccgtgacccagtcac

SEQ ID NO: 119103 - DNA, 75 bp, Homo sapiens
tttccaaccctgcaggaagtttttgtgactgaagctagagccgtgacccagtcacctcggcttacatcacacttc

SEQ ID NO: 119104 - DNA, 75 bp, Homo sapiens
aggaagtttttgtgactgaagctagagccgtgacccagtcacctcggcttacatcacacttctccactatataat

SEQ ID NO: 119105 - DNA, 79 bp, Homo sapiens
ttttgtgactgaagctagagccgtgacccagtcacctcggcttacatcacacttctccactatataattggtgatgtta

SEQ ID NO: 119106 - DNA, 77 bp, Homo sapiens
aagctagagccgtgacccagtcacctcggcttacatcacacttctccactatataattggtgatgttactgcctccg

SEQ ID NO: 119107 - DNA, 76 bp, Homo sapiens
acccagtcacctcggcttacatcacacttctccactatataattggtgatgttactgcctccgtcctccagaggga

SEQ ID NO: 119108 - DNA, 80 bp, Homo sapiens
acctcggcttacatcacacttctccactatataattggtgatgttactgcctccgtcctccagagggatgtgccatgaca

SEQ ID NO: 119109 - DNA, 81 bp, Homo sapiens
cttacatcacacttctccactatataattggtgatgttactgcctccgtcctccagagggatgtgccatgacagggagcaa

SEQ ID NO: 119110 - DNA, 86 bp, Homo sapiens
tccactatataattggtgatgttactgcctccgtcctccagagggatgtgccatgacagggagcaagcatcagcgtctatatcaga

SEQ ID NO: 119111 - DNA, 85 bp, Homo sapiens
gtgatgttactgcctccgtcctccagagggatgtgccatgacagggagcaagcatcagcgtctatatcagaaatgtcaaatggag

SEQ ID NO: 119112 - DNA, 82 bp, Homo sapiens
cctccgtcctccagagggatgtgccatgacagggagcaagcatcagcgtctatatcagaaatgtcaaatggaggctgagggg

SEQ ID NO: 119113 - DNA, 84 bp, Homo sapiens
tgtgccatgacagggagcaagcatcagcgtctatatcagaaatgtcaaatggaggctgaggggggccgggggcatctacatgaa

SEQ ID NO: 119114 - DNA, 80 bp, Homo sapiens
gagcaagcatcagcgtctatatcagaaatgtcaaatggaggctgaggggggccgggggcatctacatgaaccaagaggaa

SEQ ID NO: 119115 - DNA, 75 bp, Homo sapiens
tctatatcagaaatgtcaaatggaggctgaggggggccgggggcatctacatgaaccaagaggaaagaaatgtaa

SEQ ID NO: 119116 - DNA, 71 bp, Homo sapiens
aaatgtcaaatggaggctgaggggggccgggggcatctacatgaaccaagaggaaagaaatgtaagaacaa

SEQ ID NO: 119117 - DNA, 76 bp, Homo sapiens
ttctgagcttcatatttagatggccatttgtctaatacttaacttacccatgactacaactttgattttctgagtg

SEQ ID NO: 119118 - DNA, 75 bp, Homo sapiens
cttcatatttagatggccatttgtctaatacttaacttacccatgactacaactttgattttctgagtgtctgtc

SEQ ID NO: 119119 - DNA, 73 bp, Homo sapiens
atggccatttgtctaatacttaacttacccatgactacaactttgattttctgagtgtctgtcccagaactgt

SEQ ID NO: 119120 - DNA, 75 bp, Homo sapiens
tttgtctaatacttaacttacccatgactacaactttgattttctgagtgtctgtcccagaactgttctctgctg

SEQ ID NO: 119121 - DNA, 77 bp, Homo sapiens
ttaacttacccatgactacaactttgattttctgagtgtctgtcccagaactgttctctgctgtgaggctgtagtaa

SEQ ID NO: 119122 - DNA, 79 bp, Homo sapiens
ttgattttctgagtgtctgtcccagaactgttctctgctgtgaggctgtagtaaccactgtctttcctagtcacatctt

SEQ ID NO: 119123 - DNA, 82 bp, Homo sapiens
tgagtgtctgtcccagaactgttctctgctgtgaggctgtagtaaccactgtctttcctagtcacatcttttatgatcagaa

SEQ ID NO: 119124 - DNA, 81 bp, Homo sapiens
tctgtcccagaactgttctctgctgtgaggctgtagtaaccactgtctttcctagtcacatcttttatgatcagaattgaa

SEQ ID NO: 119125 - DNA, 83 bp, Homo sapiens
tgttctctgctgtgaggctgtagtaaccactgtctttcctagtcacatcttttatgatcagaattgaagagctgtctgcttta

SEQ ID NO: 119126 - DNA, 84 bp, Homo sapiens
ctgtgaggctgtagtaaccactgtctttcctagtcacatcttttatgatcagaattgaagagctgtctgctttatgcactgcca

SEQ ID NO: 119127 - DNA, 83 bp, Homo sapiens
tgtagtaaccactgtctttcctagtcacatcttttatgatcagaattgaagagctgtctgctttatgcactgccaggtggctg

SEQ ID NO: 119128 - DNA, 86 bp, Homo sapiens
tgtctttcctagtcacatcttttatgatcagaattgaagagctgtctgctttatgcactgccaggtggctggatgtgacaacttca

SEQ ID NO: 119129 - DNA, 85 bp, Homo sapiens
tcacatcttttatgatcagaattgaagagctgtctgctttatgcactgccaggtggctggatgtgacaacttcatcttctccttt

SEQ ID NO: 119130 - DNA, 82 bp, Homo sapiens
tcttttatgatcagaattgaagagctgtctgctttatgcactgccaggtggctggatgtgacaacttcatcttctccttttt

SEQ ID NO: 119131 - DNA, 80 bp, Homo sapiens
agaattgaagagctgtctgctttatgcactgccaggtggctggatgtgacaacttcatcttctccttttttccatttaca

SEQ ID NO: 119132 - DNA, 80 bp, Homo sapiens
agctgtctgctttatgcactgccaggtggctggatgtgacaacttcatcttctccttttttccatttacaggtgggatga

SEQ ID NO: 119133 - DNA, 77 bp, Homo sapiens
tttatgcactgccaggtggctggatgtgacaacttcatcttctccttttttccatttacaggtgggatgaggctttc

SEQ ID NO: 119134 - DNA, 75 bp, Homo sapiens
aggtggctggatgtgacaacttcatcttctccttttttccatttacaggtgggatgaggctttccatacacatgg

SEQ ID NO: 119135 - DNA, 75 bp, Homo sapiens
atgtgacaacttcatcttctccttttttccatttacaggtgggatgaggctttccatacacatgggcttcaattc

SEQ ID NO: 119136 - DNA, 72 bp, Homo sapiens
ttcatcttctccttttttccatttacaggtgggatgaggctttccatacacatgggcttcaattcggagttt

SEQ ID NO: 119137 - DNA, 69 bp, Homo sapiens
cttctccttttttccatttacaggtgggatgaggctttccatacacatgggcttcaattcggagttttt

SEQ ID NO: 119138 - DNA, 72 bp, Homo sapiens
atttacaggtgggatgaggctttccatacacatgggcttcaattcggagttttttcccagctttgatagtta

SEQ ID NO: 119139 - DNA, 77 bp, Homo sapiens
tgggatgaggctttccatacacatgggcttcaattcggagttttttcccagctttgatagttatttgctctggcata

SEQ ID NO: 119140 - DNA, 74 bp, Homo sapiens
tttccatacacatgggcttcaattcggagttttttcccagctttgatagttatttgctctggcataaggatctt

SEQ ID NO: 119141 - DNA, 74 bp, Homo sapiens
atacacatgggcttcaattcggagttttttcccagctttgatagttatttgctctggcataaggatctttggtg

SEQ ID NO: 119142 - DNA, 72 bp, Homo sapiens
aattcggagttttttcccagctttgatagttatttgctctggcataaggatctttggtggcactgaaagtaa

SEQ ID NO: 119143 - DNA, 74 bp, Homo sapiens
tttttcccagctttgatagttatttgctctggcataaggatctttggtggcactgaaagtaaaatgaaaagata

SEQ ID NO: 119144 - DNA, 75 bp, Homo sapiens
tctaataaacttaccacatgacataaatgaagcaaagactacttacacagttgttctttggcttcatacactcct

SEQ ID NO: 119145 - DNA, 76 bp, Homo sapiens
taaacttaccacatgacataaatgaagcaaagactacttacacagttgttctttggcttcatacactccttcagct

SEQ ID NO: 119146 - DNA, 78 bp, Homo sapiens
acatgacataaatgaagcaaagactacttacacagttgttctttggcttcatacactccttcagcttctcttggcaaa

SEQ ID NO: 119147 - DNA, 77 bp, Homo sapiens
atgaagcaaagactacttacacagttgttctttggcttcatacactccttcagcttctcttggcaaactgactccaa

SEQ ID NO: 119148 - DNA, 78 bp, Homo sapiens
ttgttctttggcttcatacactccttcagcttctcttggcaaactgactccaacagcatttctggccgctactctaaa

SEQ ID NO: 119149 - DNA, 78 bp, Homo sapiens
tttggcttcatacactccttcagcttctcttggcaaactgactccaacagcatttctggccgctactctaaatttgta

SEQ ID NO: 119150 - DNA, 75 bp, Homo sapiens
atacactccttcagcttctcttggcaaactgactccaacagcatttctggccgctactctaaatttgtatttctt

SEQ ID NO: 119151 - DNA, 78 bp, Homo sapiens
ttctttccttcctttaggccagtgacaacaaggctcagatcttttaccactgagtactctgtccagcgatctgcaggc

SEQ ID NO: 119152 - DNA, 81 bp, Homo sapiens
ttcctttaggccagtgacaacaaggctcagatcttttaccactgagtactctgtccagcgatctgcaggctgctcttcttc

SEQ ID NO: 119153 - DNA, 83 bp, Homo sapiens
agtgacaacaaggctcagatcttttaccactgagtactctgtccagcgatctgcaggctgctcttcttctctgtaactagtga

SEQ ID NO: 119154 - DNA, 83 bp, Homo sapiens
aacaaggctcagatcttttaccactgagtactctgtccagcgatctgcaggctgctcttcttctctgtaactagtgatgtagc

SEQ ID NO: 119155 - DNA, 82 bp, Homo sapiens
atcttttaccactgagtactctgtccagcgatctgcaggctgctcttcttctctgtaactagtgatgtagccatcgatttta

SEQ ID NO: 119156 - DNA, 86 bp, Homo sapiens
tgagtactctgtccagcgatctgcaggctgctcttcttctctgtaactagtgatgtagccatcgattttagcacctccatcacgta

SEQ ID NO: 119157 - DNA, 83 bp, Homo sapiens
actctgtccagcgatctgcaggctgctcttcttctctgtaactagtgatgtagccatcgattttagcacctccatcacgtagg

SEQ ID NO: 119158 - DNA, 79 bp, Homo sapiens
atctgcaggctgctcttcttctctgtaactagtgatgtagccatcgattttagcacctccatcacgtaggggaggtaac

SEQ ID NO: 119159 - DNA, 75 bp, Homo sapiens
ctcttcttctctgtaactagtgatgtagccatcgattttagcacctccatcacgtaggggaggtaaccaggctaa

SEQ ID NO: 119160 - DNA, 76 bp, Homo sapiens
tctgtaactagtgatgtagccatcgattttagcacctccatcacgtaggggaggtaaccaggctaaggtggcactg

SEQ ID NO: 119161 - DNA, 74 bp, Homo sapiens
actagtgatgtagccatcgattttagcacctccatcacgtaggggaggtaaccaggctaaggtggcactgttct

SEQ ID NO: 119162 - DNA, 75 bp, Homo sapiens
tagccatcgattttagcacctccatcacgtaggggaggtaaccaggctaaggtggcactgttcttggtcatttca

SEQ ID NO: 119163 - DNA, 73 bp, Homo sapiens
ttttagcacctccatcacgtaggggaggtaaccaggctaaggtggcactgttcttggtcatttcagtcacttc

SEQ ID NO: 119164 - DNA, 72 bp, Homo sapiens
tccatcacgtaggggaggtaaccaggctaaggtggcactgttcttggtcatttcagtcacttctaatttcct

SEQ ID NO: 119165 - DNA, 70 bp, Homo sapiens
aggtaaccaggctaaggtggcactgttcttggtcatttcagtcacttctaatttccttgggggatccggc

SEQ ID NO: 119166 - DNA, 73 bp, Homo sapiens
gctaaggtggcactgttcttggtcatttcagtcacttctaatttccttgggggatccggctcacctagaagaa

SEQ ID NO: 119167 - DNA, 71 bp, Homo sapiens
cactgttcttggtcatttcagtcacttctaatttccttgggggatccggctcacctagaagaaaaacataa

SEQ ID NO: 119168 - DNA, 70 bp, Homo sapiens
ttcttggtcatttcagtcacttctaatttccttgggggatccggctcacctagaagaaaaacataattta

SEQ ID NO: 119169 - DNA, 69 bp, Homo sapiens
tttcagtcacttctaatttccttgggggatccggctcacctagaagaaaaacataatttagaagattac

SEQ ID NO: 119170 - DNA, 72 bp, Homo sapiens
actggggttaaaaggaggaagaaagcataatacttacttagaggatctgatgcaagcactggttttgggaca

SEQ ID NO: 119171 - DNA, 76 bp, Homo sapiens
aaggaggaagaaagcataatacttacttagaggatctgatgcaagcactggttttgggacatctgttgggacgcca

SEQ ID NO: 119172 - DNA, 77 bp, Homo sapiens
atgcaagcactggttttgggacatctgttgggacgccagggccatattcgttgacagcagttactctgaagtaatac

SEQ ID NO: 119173 - DNA, 75 bp, Homo sapiens
actggttttgggacatctgttgggacgccagggccatattcgttgacagcagttactctgaagtaatactcattc

SEQ ID NO: 119174 - DNA, 76 bp, Homo sapiens
acatctgttgggacgccagggccatattcgttgacagcagttactctgaagtaatactcattcccagggacaagat

SEQ ID NO: 119175 - DNA, 76 bp, Homo sapiens
acgccagggccatattcgttgacagcagttactctgaagtaatactcattcccagggacaagattggttacatgga

SEQ ID NO: 119176 - DNA, 75 bp, Homo sapiens
catattcgttgacagcagttactctgaagtaatactcattcccagggacaagattggttacatggaagcttgttt

SEQ ID NO: 119177 - DNA, 74 bp, Homo sapiens
gttgacagcagttactctgaagtaatactcattcccagggacaagattggttacatggaagcttgttttcttaa

SEQ ID NO: 119178 - DNA, 71 bp, Homo sapiens
agttactctgaagtaatactcattcccagggacaagattggttacatggaagcttgttttcttaacttctg

SEQ ID NO: 119179 - DNA, 68 bp, Homo sapiens
aagtaatactcattcccagggacaagattggttacatggaagcttgttttcttaacttctggggtaac

SEQ ID NO: 119180 - DNA, 68 bp, Homo sapiens
attcccagggacaagattggttacatggaagcttgttttcttaacttctggggtaacggtcgaccatg

SEQ ID NO: 119181 - DNA, 70 bp, Homo sapiens
ggacaagattggttacatggaagcttgttttcttaacttctggggtaacggtcgaccatgtctttctgtc

SEQ ID NO: 119182 - DNA, 71 bp, Homo sapiens
ttacatggaagcttgttttcttaacttctggggtaacggtcgaccatgtctttctgtctgcctcacgtttc

SEQ ID NO: 119183 - DNA, 72 bp, Homo sapiens
tgttttcttaacttctggggtaacggtcgaccatgtctttctgtctgcctcacgtttctccacgatataatg

SEQ ID NO: 119184 - DNA, 74 bp, Homo sapiens
tcttaacttctggggtaacggtcgaccatgtctttctgtctgcctcacgtttctccacgatataatgtgtcact

SEQ ID NO: 119185 - DNA, 75 bp, Homo sapiens
taacggtcgaccatgtctttctgtctgcctcacgtttctccacgatataatgtgtcacttggctcccaccgtcgt

SEQ ID NO: 119186 - DNA, 75 bp, Homo sapiens
accatgtctttctgtctgcctcacgtttctccacgatataatgtgtcacttggctcccaccgtcgttttcaggag

SEQ ID NO: 119187 - DNA, 73 bp, Homo sapiens
cctcacgtttctccacgatataatgtgtcacttggctcccaccgtcgttttcaggaggggcccaggacacatg

SEQ ID NO: 119188 - DNA, 76 bp, Homo sapiens
ttctccacgatataatgtgtcacttggctcccaccgtcgttttcaggaggggcccaggacacatggcatgatgttt

SEQ ID NO: 119189 - DNA, 79 bp, Homo sapiens
tataatgtgtcacttggctcccaccgtcgttttcaggaggggcccaggacacatggcatgatgttttagtgacatctga

SEQ ID NO: 119190 - DNA, 74 bp, Homo sapiens
ttggctcccaccgtcgttttcaggaggggcccaggacacatggcatgatgttttagtgacatctgaaactttta

SEQ ID NO: 119191 - DNA, 74 bp, Homo sapiens
accgtcgttttcaggaggggcccaggacacatggcatgatgttttagtgacatctgaaacttttaaatcagaca

SEQ ID NO: 119192 - DNA, 79 bp, Homo sapiens
aggacacatggcatgatgttttagtgacatctgaaacttttaaatcagacacaggcccaggagtgtctgtaaagaatca

SEQ ID NO: 119193 - DNA, 77 bp, Homo sapiens
atggcatgatgttttagtgacatctgaaacttttaaatcagacacaggcccaggagtgtctgtaaagaatcataaaa

SEQ ID NO: 119194 - DNA, 76 bp, Homo sapiens
atgttttagtgacatctgaaacttttaaatcagacacaggcccaggagtgtctgtaaagaatcataaaatcagata

SEQ ID NO: 119195 - DNA, 79 bp, Homo sapiens
acatctgaaacttttaaatcagacacaggcccaggagtgtctgtaaagaatcataaaatcagatatacatgtctcctca

SEQ ID NO: 119196 - DNA, 70 bp, Homo sapiens
caaattcatttttgaagtgggagggagaagcattttagtaacccacctaatactctgacatttacgaata

SEQ ID NO: 119197 - DNA, 69 bp, Homo sapiens
ttttgaagtgggagggagaagcattttagtaacccacctaatactctgacatttacgaatacagccttt

SEQ ID NO: 119198 - DNA, 71 bp, Homo sapiens
gagggagaagcattttagtaacccacctaatactctgacatttacgaatacagccttttctcctgctgggt

SEQ ID NO: 119199 - DNA, 71 bp, Homo sapiens
cattttagtaacccacctaatactctgacatttacgaatacagccttttctcctgctgggttcacaagtgt

SEQ ID NO: 119200 - DNA, 72 bp, Homo sapiens
taacccacctaatactctgacatttacgaatacagccttttctcctgctgggttcacaagtgttaaggaata

SEQ ID NO: 119201 - DNA, 71 bp, Homo sapiens
cctaatactctgacatttacgaatacagccttttctcctgctgggttcacaagtgttaaggaatattttcc

SEQ ID NO: 119202 - DNA, 72 bp, Homo sapiens
tttacgaatacagccttttctcctgctgggttcacaagtgttaaggaatattttcctgagtcatcacgggta

SEQ ID NO: 119203 - DNA, 72 bp, Homo sapiens
aatacagccttttctcctgctgggttcacaagtgttaaggaatattttcctgagtcatcacgggtagaattg

SEQ ID NO: 119204 - DNA, 73 bp, Homo sapiens
ttttctcctgctgggttcacaagtgttaaggaatattttcctgagtcatcacgggtagaattggggatgacaa

SEQ ID NO: 119205 - DNA, 75 bp, Homo sapiens
ttcacaagtgttaaggaatattttcctgagtcatcacgggtagaattggggatgacaaggaaggccatagtgtca

SEQ ID NO: 119206 - DNA, 75 bp, Homo sapiens
ttaaggaatattttcctgagtcatcacgggtagaattggggatgacaaggaaggccatagtgtcaaccagatcaa

SEQ ID NO: 119207 - DNA, 74 bp, Homo sapiens
ttttcctgagtcatcacgggtagaattggggatgacaaggaaggccatagtgtcaaccagatcaacttgtcctt

SEQ ID NO: 119208 - DNA, 75 bp, Homo sapiens
agtcatcacgggtagaattggggatgacaaggaaggccatagtgtcaaccagatcaacttgtccttttctgacca

SEQ ID NO: 119209 - DNA, 78 bp, Homo sapiens
tagaattggggatgacaaggaaggccatagtgtcaaccagatcaacttgtccttttctgaccacattatcaatgccaa

SEQ ID NO: 119210 - DNA, 76 bp, Homo sapiens
gggatgacaaggaaggccatagtgtcaaccagatcaacttgtccttttctgaccacattatcaatgccaacttttc

SEQ ID NO: 119211 - DNA, 75 bp, Homo sapiens
aaggccatagtgtcaaccagatcaacttgtccttttctgaccacattatcaatgccaacttttcgccaagtgact

SEQ ID NO: 119212 - DNA, 74 bp, Homo sapiens
atagtgtcaaccagatcaacttgtccttttctgaccacattatcaatgccaacttttcgccaagtgactttagg

SEQ ID NO: 119213 - DNA, 73 bp, Homo sapiens
agatcaacttgtccttttctgaccacattatcaatgccaacttttcgccaagtgactttaggggctggtcgtc

SEQ ID NO: 119214 - DNA, 75 bp, Homo sapiens
tgtccttttctgaccacattatcaatgccaacttttcgccaagtgactttaggggctggtcgtcctctcactata

SEQ ID NO: 119215 - DNA, 75 bp, Homo sapiens
ccacattatcaatgccaacttttcgccaagtgactttaggggctggtcgtcctctcactatagcaaagagacgaa

SEQ ID NO: 119216 - DNA, 74 bp, Homo sapiens
ttatcaatgccaacttttcgccaagtgactttaggggctggtcgtcctctcactatagcaaagagacgaatagg

SEQ ID NO: 119217 - DNA, 74 bp, Homo sapiens
aacttttcgccaagtgactttaggggctggtcgtcctctcactatagcaaagagacgaatagggcatcctgctc

SEQ ID NO: 119218 - DNA, 77 bp, Homo sapiens
aagtgactttaggggctggtcgtcctctcactatagcaaagagacgaatagggcatcctgctctcactatgaccagt

SEQ ID NO: 119219 - DNA, 83 bp, Homo sapiens
agacgaatagggcatcctgctctcactatgaccagtttcctcatgctggcatccaaatcaatctccggaggttctgcaaatga

SEQ ID NO: 119220 - DNA, 83 bp, Homo sapiens
catcctgctctcactatgaccagtttcctcatgctggcatccaaatcaatctccggaggttctgcaaatgacattaaggtcat

SEQ ID NO: 119221 - DNA, 81 bp, Homo sapiens
tcactatgaccagtttcctcatgctggcatccaaatcaatctccggaggttctgcaaatgacattaaggtcattaattgat

SEQ ID NO: 119222 - DNA, 76 bp, Homo sapiens
accagtttcctcatgctggcatccaaatcaatctccggaggttctgcaaatgacattaaggtcattaattgatttt

SEQ ID NO: 119223 - DNA, 73 bp, Homo sapiens
cataagaaattaagtgtgaatgaatcacatgctaagggaaggacttacctagtatttctttaggtttgatagc

SEQ ID NO: 119224 - DNA, 71 bp, Homo sapiens
aattaagtgtgaatgaatcacatgctaagggaaggacttacctagtatttctttaggtttgatagcttcct

SEQ ID NO: 119225 - DNA, 72 bp, Homo sapiens
tagtatttctttaggtttgatagcttcctttagctctgcagggcgcccaataccaacttggttttgggcaca

SEQ ID NO: 119226 - DNA, 72 bp, Homo sapiens
tttaggtttgatagcttcctttagctctgcagggcgcccaataccaacttggttttgggcacacaccctgaa

SEQ ID NO: 119227 - DNA, 74 bp, Homo sapiens
atagcttcctttagctctgcagggcgcccaataccaacttggttttgggcacacaccctgaactcatattcctg

SEQ ID NO: 119228 - DNA, 74 bp, Homo sapiens
tttagctctgcagggcgcccaataccaacttggttttgggcacacaccctgaactcatattcctggttttcatc

SEQ ID NO: 119229 - DNA, 72 bp, Homo sapiens
cgcccaataccaacttggttttgggcacacaccctgaactcatattcctggttttcatccaagctggtaaca

SEQ ID NO: 119230 - DNA, 72 bp, Homo sapiens
ataccaacttggttttgggcacacaccctgaactcatattcctggttttcatccaagctggtaacagtgaat

SEQ ID NO: 119231 - DNA, 74 bp, Homo sapiens
gttttgggcacacaccctgaactcatattcctggttttcatccaagctggtaacagtgaattccttgcgtacaa

SEQ ID NO: 119232 - DNA, 80 bp, Homo sapiens
accctgaactcatattcctggttttcatccaagctggtaacagtgaattccttgcgtacaagctgtgctgcagcattaca

SEQ ID NO: 119233 - DNA, 78 bp, Homo sapiens
actcatattcctggttttcatccaagctggtaacagtgaattccttgcgtacaagctgtgctgcagcattacaccgtt

SEQ ID NO: 119234 - DNA, 81 bp, Homo sapiens
tggttttcatccaagctggtaacagtgaattccttgcgtacaagctgtgctgcagcattacaccgtttccagccttcatca

SEQ ID NO: 119235 - DNA, 82 bp, Homo sapiens
atccaagctggtaacagtgaattccttgcgtacaagctgtgctgcagcattacaccgtttccagccttcatcaggagacgca

SEQ ID NO: 119236 - DNA, 82 bp, Homo sapiens
taacagtgaattccttgcgtacaagctgtgctgcagcattacaccgtttccagccttcatcaggagacgcatctgctatttt

SEQ ID NO: 119237 - DNA, 82 bp, Homo sapiens
aattccttgcgtacaagctgtgctgcagcattacaccgtttccagccttcatcaggagacgcatctgctatttttggtctca

SEQ ID NO: 119238 - DNA, 81 bp, Homo sapiens
ttacaccgtttccagccttcatcaggagacgcatctgctatttttggtctcatttccacaacatatccaatgatcggtgca

SEQ ID NO: 119239 - DNA, 84 bp, Homo sapiens
agccttcatcaggagacgcatctgctatttttggtctcatttccacaacatatccaatgatcggtgcaccaccatcatagactg

SEQ ID NO: 119240 - DNA, 81 bp, Homo sapiens
atcaggagacgcatctgctatttttggtctcatttccacaacatatccaatgatcggtgcaccaccatcatagactggttt

SEQ ID NO: 119241 - DNA, 77 bp, Homo sapiens
atctgctatttttggtctcatttccacaacatatccaatgatcggtgcaccaccatcatagactggttttccccacc

SEQ ID NO: 119242 - DNA, 76 bp, Homo sapiens
tttggtctcatttccacaacatatccaatgatcggtgcaccaccatcatagactggttttccccacccaagagtta

SEQ ID NO: 119243 - DNA, 75 bp, Homo sapiens
tttccacaacatatccaatgatcggtgcaccaccatcatagactggttttccccacccaagagttatggaatgtt

SEQ ID NO: 119244 - DNA, 76 bp, Homo sapiens
atatccaatgatcggtgcaccaccatcatagactggttttccccacccaagagttatggaatgtttggttgtatca

SEQ ID NO: 119245 - DNA, 74 bp, Homo sapiens
ggtgcaccaccatcatagactggttttccccacccaagagttatggaatgtttggttgtatcaaccactctgaa

SEQ ID NO: 119246 - DNA, 71 bp, Homo sapiens
accaccatcatagactggttttccccacccaagagttatggaatgtttggttgtatcaaccactctgaaat

SEQ ID NO: 119247 - DNA, 70 bp, Homo sapiens
tagactggttttccccacccaagagttatggaatgtttggttgtatcaaccactctgaaattggttggtg

SEQ ID NO: 119248 - DNA, 73 bp, Homo sapiens
cacccaagagttatggaatgtttggttgtatcaaccactctgaaattggttggtggaccaggtggctctgaaa

SEQ ID NO: 119249 - DNA, 71 bp, Homo sapiens
agttatggaatgtttggttgtatcaaccactctgaaattggttggtggaccaggtggctctgaaagtaaaa

SEQ ID NO: 119250 - DNA, 73 bp, Homo sapiens
aatgtttggttgtatcaaccactctgaaattggttggtggaccaggtggctctgaaagtaaaatatacatata

SEQ ID NO: 119251 - DNA, 74 bp, Homo sapiens
tgtatcaaccactctgaaattggttggtggaccaggtggctctgaaagtaaaatatacatatagttaactacta

SEQ ID NO: 119252 - DNA, 72 bp, Homo sapiens
ttgagattaagagttgctgtaatatcagaaaaaacaaggacatcctacctatggggtcttttgccaccaccg

SEQ ID NO: 119253 - DNA, 72 bp, Homo sapiens
taagagttgctgtaatatcagaaaaaacaaggacatcctacctatggggtcttttgccaccaccggtcttga

SEQ ID NO: 119254 - DNA, 70 bp, Homo sapiens
aatatcagaaaaaacaaggacatcctacctatggggtcttttgccaccaccggtcttgaaggcaagcttg

SEQ ID NO: 119255 - DNA, 69 bp, Homo sapiens
aaacaaggacatcctacctatggggtcttttgccaccaccggtcttgaaggcaagcttggttctccaat

SEQ ID NO: 119256 - DNA, 70 bp, Homo sapiens
atcctacctatggggtcttttgccaccaccggtcttgaaggcaagcttggttctccaattccaatttcat

SEQ ID NO: 119257 - DNA, 71 bp, Homo sapiens
tatggggtcttttgccaccaccggtcttgaaggcaagcttggttctccaattccaatttcattttctgcct

SEQ ID NO: 119258 - DNA, 72 bp, Homo sapiens
ttttgccaccaccggtcttgaaggcaagcttggttctccaattccaatttcattttctgccttgacacggaa

SEQ ID NO: 119259 - DNA, 74 bp, Homo sapiens
accggtcttgaaggcaagcttggttctccaattccaatttcattttctgccttgacacggaactgatattcatg

SEQ ID NO: 119260 - DNA, 75 bp, Homo sapiens
aaggcaagcttggttctccaattccaatttcattttctgccttgacacggaactgatattcatggtctgggagga

SEQ ID NO: 119261 - DNA, 78 bp, Homo sapiens
tctccaattccaatttcattttctgccttgacacggaactgatattcatggtctgggaggagattctgtactttcata

SEQ ID NO: 119262 - DNA, 75 bp, Homo sapiens
aattccaatttcattttctgccttgacacggaactgatattcatggtctgggaggagattctgtactttcatacg

SEQ ID NO: 119263 - DNA, 79 bp, Homo sapiens
attttctgccttgacacggaactgatattcatggtctgggaggagattctgtactttcatacgtctctcagggattgca

SEQ ID NO: 119264 - DNA, 81 bp, Homo sapiens
ttgacacggaactgatattcatggtctgggaggagattctgtactttcatacgtctctcagggattgcactcttgttgaca

SEQ ID NO: 119265 - DNA, 78 bp, Homo sapiens
aactgatattcatggtctgggaggagattctgtactttcatacgtctctcagggattgcactcttgttgacagggacc

SEQ ID NO: 119266 - DNA, 79 bp, Homo sapiens
gtctgggaggagattctgtactttcatacgtctctcagggattgcactcttgttgacagggacccatcgtgttgaatgc

SEQ ID NO: 119267 - DNA, 77 bp, Homo sapiens
aggagattctgtactttcatacgtctctcagggattgcactcttgttgacagggacccatcgtgttgaatgcttttc

SEQ ID NO: 119268 - DNA, 74 bp, Homo sapiens
ctgtactttcatacgtctctcagggattgcactcttgttgacagggacccatcgtgttgaatgcttttcctttt

SEQ ID NO: 119269 - DNA, 73 bp, Homo sapiens
atacgtctctcagggattgcactcttgttgacagggacccatcgtgttgaatgcttttcctttttctccaaaa

SEQ ID NO: 119270 - DNA, 72 bp, Homo sapiens
attgcactcttgttgacagggacccatcgtgttgaatgcttttcctttttctccaaaaagtatccagttata

SEQ ID NO: 119271 - DNA, 70 bp, Homo sapiens
tcttgttgacagggacccatcgtgttgaatgcttttcctttttctccaaaaagtatccagttatagactt

SEQ ID NO: 119272 - DNA, 73 bp, Homo sapiens
gacccatcgtgttgaatgcttttcctttttctccaaaaagtatccagttatagactttccaccatcatattca

SEQ ID NO: 119273 - DNA, 73 bp, Homo sapiens
tgttgaatgcttttcctttttctccaaaaagtatccagttatagactttccaccatcatattcaggtggattc

SEQ ID NO: 119274 - DNA, 71 bp, Homo sapiens
tttcctttttctccaaaaagtatccagttatagactttccaccatcatattcaggtggattccaaaccaca

SEQ ID NO: 119275 - DNA, 74 bp, Homo sapiens
ttttctccaaaaagtatccagttatagactttccaccatcatattcaggtggattccaaaccacagtcatctct

SEQ ID NO: 119276 - DNA, 75 bp, Homo sapiens
aaaagtatccagttatagactttccaccatcatattcaggtggattccaaaccacagtcatctcttctttgctta

SEQ ID NO: 119277 - DNA, 76 bp, Homo sapiens
ttatagactttccaccatcatattcaggtggattccaaaccacagtcatctcttctttgcttactttagtgacttc

SEQ ID NO: 119278 - DNA, 74 bp, Homo sapiens
ttccaaaccacagtcatctcttctttgcttactttagtgacttctgggggatcagggcgaccaggtttatcata

SEQ ID NO: 119279 - DNA, 71 bp, Homo sapiens
agtcatctcttctttgcttactttagtgacttctgggggatcagggcgaccaggtttatcatacttggttt

SEQ ID NO: 119280 - DNA, 71 bp, Homo sapiens
ttactttagtgacttctgggggatcagggcgaccaggtttatcatacttggttttggctatgactggttta

SEQ ID NO: 119281 - DNA, 70 bp, Homo sapiens
acttctgggggatcagggcgaccaggtttatcatacttggttttggctatgactggtttactttctgttg

SEQ ID NO: 119282 - DNA, 73 bp, Homo sapiens
tcagggcgaccaggtttatcatacttggttttggctatgactggtttactttctgttggaggccctgtgccta

SEQ ID NO: 119283 - DNA, 70 bp, Homo sapiens
caggtttatcatacttggttttggctatgactggtttactttctgttggaggccctgtgcctattttatt

SEQ ID NO: 119284 - DNA, 74 bp, Homo sapiens
ttggctatgactggtttactttctgttggaggccctgtgcctattttattttctgcacggactctgaaaatata

SEQ ID NO: 119285 - DNA, 74 bp, Homo sapiens
tatgactggtttactttctgttggaggccctgtgcctattttattttctgcacggactctgaaaatatattcat

SEQ ID NO: 119286 - DNA, 73 bp, Homo sapiens
ttactttctgttggaggccctgtgcctattttattttctgcacggactctgaaaatatattcatttccttcta

SEQ ID NO: 119287 - DNA, 75 bp, Homo sapiens
ggccctgtgcctattttattttctgcacggactctgaaaatatattcatttccttctatgagacgtgttactgta

SEQ ID NO: 119288 - DNA, 73 bp, Homo sapiens
ctattttattttctgcacggactctgaaaatatattcatttccttctatgagacgtgttactgtagtaccagg

SEQ ID NO: 119289 - DNA, 76 bp, Homo sapiens
ttattttctgcacggactctgaaaatatattcatttccttctatgagacgtgttactgtagtaccaggtgtcaaga

SEQ ID NO: 119290 - DNA, 74 bp, Homo sapiens
atttccttctatgagacgtgttactgtagtaccaggtgtcaagacagtagcagaataggtagaccaaaccattc

SEQ ID NO: 119291 - DNA, 75 bp, Homo sapiens
agacgtgttactgtagtaccaggtgtcaagacagtagcagaataggtagaccaaaccattcgctttgtctcacat

SEQ ID NO: 119292 - DNA, 75 bp, Homo sapiens
tgttactgtagtaccaggtgtcaagacagtagcagaataggtagaccaaaccattcgctttgtctcacatttttc

SEQ ID NO: 119293 - DNA, 73 bp, Homo sapiens
aggtgtcaagacagtagcagaataggtagaccaaaccattcgctttgtctcacatttttctagaatataattt

SEQ ID NO: 119294 - DNA, 73 bp, Homo sapiens
caagacagtagcagaataggtagaccaaaccattcgctttgtctcacatttttctagaatataattttggatt

SEQ ID NO: 119295 - DNA, 76 bp, Homo sapiens
gtagaccaaaccattcgctttgtctcacatttttctagaatataattttggatttcacagccaccatcatcttctg

SEQ ID NO: 119296 - DNA, 78 bp, Homo sapiens
ttttctagaatataattttggatttcacagccaccatcatcttctggtggatcccagcaaacagtacacctatcactg

SEQ ID NO: 119297 - DNA, 79 bp, Homo sapiens
ttttggatttcacagccaccatcatcttctggtggatcccagcaaacagtacacctatcactggacacatcaacaattt

SEQ ID NO: 119298 - DNA, 80 bp, Homo sapiens
atttcacagccaccatcatcttctggtggatcccagcaaacagtacacctatcactggacacatcaacaattttcagatt

SEQ ID NO: 119299 - DNA, 80 bp, Homo sapiens
accatcatcttctggtggatcccagcaaacagtacacctatcactggacacatcaacaattttcagatttctcacaggac

SEQ ID NO: 119300 - DNA, 78 bp, Homo sapiens
agcaaacagtacacctatcactggacacatcaacaattttcagatttctcacaggaccaggcttatctaaaacattga

SEQ ID NO: 119301 - DNA, 78 bp, Homo sapiens
actggacacatcaacaattttcagatttctcacaggaccaggcttatctaaaacattgacagtggcataggccacaaa

SEQ ID NO: 119302 - DNA, 78 bp, Homo sapiens
acatcaacaattttcagatttctcacaggaccaggcttatctaaaacattgacagtggcataggccacaaaactgcca

SEQ ID NO: 119303 - DNA, 77 bp, Homo sapiens
ttcagatttctcacaggaccaggcttatctaaaacattgacagtggcataggccacaaaactgccagccgtgttagt

SEQ ID NO: 119304 - DNA, 74 bp, Homo sapiens
acaggaccaggcttatctaaaacattgacagtggcataggccacaaaactgccagccgtgttagttgccgtaac

SEQ ID NO: 119305 - DNA, 75 bp, Homo sapiens
ggcttatctaaaacattgacagtggcataggccacaaaactgccagccgtgttagttgccgtaactacatattta

SEQ ID NO: 119306 - DNA, 73 bp, Homo sapiens
tctaaaacattgacagtggcataggccacaaaactgccagccgtgttagttgccgtaactacatatttacccc

SEQ ID NO: 119307 - DNA, 71 bp, Homo sapiens
ccacaaaactgccagccgtgttagttgccgtaactacatatttacccccatcacttcgctttgctttagta

SEQ ID NO: 119308 - DNA, 71 bp, Homo sapiens
aaactgccagccgtgttagttgccgtaactacatatttacccccatcacttcgctttgctttagtaagaga

SEQ ID NO: 119309 - DNA, 68 bp, Homo sapiens
ccgtgttagttgccgtaactacatatttacccccatcacttcgctttgctttagtaagagaaaattta

SEQ ID NO: 119310 - DNA, 74 bp, Homo sapiens
taactacatatttacccccatcacttcgctttgctttagtaagagaaaatttagatgaatcagcacgggtatca

SEQ ID NO: 119311 - DNA, 74 bp, Homo sapiens
atatttacccccatcacttcgctttgctttagtaagagaaaatttagatgaatcagcacgggtatcaatcttga

SEQ ID NO: 119312 - DNA, 75 bp, Homo sapiens
atcacttcgctttgctttagtaagagaaaatttagatgaatcagcacgggtatcaatcttgacccttggtgatct

SEQ ID NO: 119313 - DNA, 74 bp, Homo sapiens
tttgctttagtaagagaaaatttagatgaatcagcacgggtatcaatcttgacccttggtgatcttgttaagtc

SEQ ID NO: 119314 - DNA, 76 bp, Homo sapiens
gtatcaatcttgacccttggtgatcttgttaagtctgtagcgtctttgtccttggtccatgcaacttctgggaatg

SEQ ID NO: 119315 - DNA, 73 bp, Homo sapiens
ggtgatcttgttaagtctgtagcgtctttgtccttggtccatgcaacttctgggaatggtttgcctctaaccc

SEQ ID NO: 119316 - DNA, 73 bp, Homo sapiens
gttaagtctgtagcgtctttgtccttggtccatgcaacttctgggaatggtttgcctctaacccctgcctcaa

SEQ ID NO: 119317 - DNA, 74 bp, Homo sapiens
tagcgtctttgtccttggtccatgcaacttctgggaatggtttgcctctaacccctgcctcaagcctaatggtg

SEQ ID NO: 119318 - DNA, 75 bp, Homo sapiens
ttggtccatgcaacttctgggaatggtttgcctctaacccctgcctcaagcctaatggtgtcccctgctttgaca

SEQ ID NO: 119319 - DNA, 71 bp, Homo sapiens
aacttctgggaatggtttgcctctaacccctgcctcaagcctaatggtgtcccctgctttgacagttagga

SEQ ID NO: 119320 - DNA, 70 bp, Homo sapiens
aatggtttgcctctaacccctgcctcaagcctaatggtgtcccctgctttgacagttaggaccccactta

SEQ ID NO: 119321 - DNA, 72 bp, Homo sapiens
ctctaacccctgcctcaagcctaatggtgtcccctgctttgacagttaggaccccacttaatttcagatcaa

SEQ ID NO: 119322 - DNA, 72 bp, Homo sapiens
tgcctcaagcctaatggtgtcccctgctttgacagttaggaccccacttaatttcagatcaagtactggttt

SEQ ID NO: 119323 - DNA, 69 bp, Homo sapiens
cctaatggtgtcccctgctttgacagttaggaccccacttaatttcagatcaagtactggtttttgtaa

SEQ ID NO: 119324 - DNA, 69 bp, Homo sapiens
tgtcccctgctttgacagttaggaccccacttaatttcagatcaagtactggtttttgtaagtcttctt

SEQ ID NO: 119325 - DNA, 69 bp, Homo sapiens
ttaggaccccacttaatttcagatcaagtactggtttttgtaagtcttctttcacaacaacttcctctg

SEQ ID NO: 119326 - DNA, 70 bp, Homo sapiens
acttaatttcagatcaagtactggtttttgtaagtcttctttcacaacaacttcctctgtcttcacccag

SEQ ID NO: 119327 - DNA, 70 bp, Homo sapiens
agatcaagtactggtttttgtaagtcttctttcacaacaacttcctctgtcttcacccagtcactttccc

SEQ ID NO: 119328 - DNA, 72 bp, Homo sapiens
taagtcttctttcacaacaacttcctctgtcttcacccagtcactttccccaccttcattctttgtttgcac

SEQ ID NO: 119329 - DNA, 73 bp, Homo sapiens
acaacaacttcctctgtcttcacccagtcactttccccaccttcattctttgtttgcactctgaactcataaa

SEQ ID NO: 119330 - DNA, 75 bp, Homo sapiens
tctgtcttcacccagtcactttccccaccttcattctttgtttgcactctgaactcataaatctggttttcaaca

SEQ ID NO: 119331 - DNA, 75 bp, Homo sapiens
ttcacccagtcactttccccaccttcattctttgtttgcactctgaactcataaatctggttttcaacacatctg

SEQ ID NO: 119332 - DNA, 77 bp, Homo sapiens
ttcattctttgtttgcactctgaactcataaatctggttttcaacacatctgtcaaccatgtagtgagtttctttaa

SEQ ID NO: 119333 - DNA, 77 bp, Homo sapiens
tttgcactctgaactcataaatctggttttcaacacatctgtcaaccatgtagtgagtttctttaatgcttccttta

SEQ ID NO: 119334 - DNA, 77 bp, Homo sapiens
tgaactcataaatctggttttcaacacatctgtcaaccatgtagtgagtttctttaatgcttcctttatgcactctt

SEQ ID NO: 119335 - DNA, 75 bp, Homo sapiens
ataaatctggttttcaacacatctgtcaaccatgtagtgagtttctttaatgcttcctttatgcactctttccca

SEQ ID NO: 119336 - DNA, 77 bp, Homo sapiens
ttttcaacacatctgtcaaccatgtagtgagtttctttaatgcttcctttatgcactctttcccagtcatcggagcc

SEQ ID NO: 119337 - DNA, 75 bp, Homo sapiens
atctgtcaaccatgtagtgagtttctttaatgcttcctttatgcactctttcccagtcatcggagcccttaagcc

SEQ ID NO: 119338 - DNA, 77 bp, Homo sapiens
tagtgagtttctttaatgcttcctttatgcactctttcccagtcatcggagcccttaagccttctctcaacatgata

SEQ ID NO: 119339 - DNA, 78 bp, Homo sapiens
ttctttaatgcttcctttatgcactctttcccagtcatcggagcccttaagccttctctcaacatgatatgacagatt

SEQ ID NO: 119340 - DNA, 84 bp, Homo sapiens
tatgcactctttcccagtcatcggagcccttaagccttctctcaacatgatatgacagatttggactgccaccatcatagtcag

SEQ ID NO: 119341 - DNA, 81 bp, Homo sapiens
agtcatcggagcccttaagccttctctcaacatgatatgacagatttggactgccaccatcatagtcaggcctccgccact

SEQ ID NO: 119342 - DNA, 81 bp, Homo sapiens
agcccttaagccttctctcaacatgatatgacagatttggactgccaccatcatagtcaggcctccgccactttagataga

SEQ ID NO: 119343 - DNA, 81 bp, Homo sapiens
ccttctctcaacatgatatgacagatttggactgccaccatcatagtcaggcctccgccactttagatagacaaatgtctt

SEQ ID NO: 119344 - DNA, 77 bp, Homo sapiens
atcatagtcaggcctccgccactttagatagacaaatgtctttcctttatctgcaatgtgaaggttttcaggctcac

SEQ ID NO: 119345 - DNA, 75 bp, Homo sapiens
tttagatagacaaatgtctttcctttatctgcaatgtgaaggttttcaggctcacctggtctgtcaatagggtta

SEQ ID NO: 119346 - DNA, 75 bp, Homo sapiens
atagacaaatgtctttcctttatctgcaatgtgaaggttttcaggctcacctggtctgtcaatagggttaatagc

SEQ ID NO: 119347 - DNA, 74 bp, Homo sapiens
tcctttatctgcaatgtgaaggttttcaggctcacctggtctgtcaatagggttaatagccagaatgggagttt

SEQ ID NO: 119348 - DNA, 74 bp, Homo sapiens
tatctgcaatgtgaaggttttcaggctcacctggtctgtcaatagggttaatagccagaatgggagtttttgtt

SEQ ID NO: 119349 - DNA, 69 bp, Homo sapiens
aaggttttcaggctcacctggtctgtcaatagggttaatagccagaatgggagtttttgtttcgatggt

SEQ ID NO: 119350 - DNA, 71 bp, Homo sapiens
ctcacctggtctgtcaatagggttaatagccagaatgggagtttttgtttcgatggttggcccaacaccta

SEQ ID NO: 119351 - DNA, 69 bp, Homo sapiens
gtctgtcaatagggttaatagccagaatgggagtttttgtttcgatggttggcccaacacctactttat

SEQ ID NO: 119352 - DNA, 70 bp, Homo sapiens
cagaatgggagtttttgtttcgatggttggcccaacacctactttattctctgcacaaactcggaaatag

SEQ ID NO: 119353 - DNA, 70 bp, Homo sapiens
agtttttgtttcgatggttggcccaacacctactttattctctgcacaaactcggaaatagtattcattg

SEQ ID NO: 119354 - DNA, 72 bp, Homo sapiens
tttcgatggttggcccaacacctactttattctctgcacaaactcggaaatagtattcattgttggctaaaa

SEQ ID NO: 119355 - DNA, 70 bp, Homo sapiens
actttattctctgcacaaactcggaaatagtattcattgttggctaaaaggttggccttgattaatcgtt

SEQ ID NO: 119356 - DNA, 73 bp, Homo sapiens
attctctgcacaaactcggaaatagtattcattgttggctaaaaggttggccttgattaatcgtttagtgaca

SEQ ID NO: 119357 - DNA, 74 bp, Homo sapiens
aaactcggaaatagtattcattgttggctaaaaggttggccttgattaatcgtttagtgacatctgatgcaaca

SEQ ID NO: 119358 - DNA, 74 bp, Homo sapiens
attgttggctaaaaggttggccttgattaatcgtttagtgacatctgatgcaacaattgaccagcctttctggt

SEQ ID NO: 119359 - DNA, 77 bp, Homo sapiens
gttggccttgattaatcgtttagtgacatctgatgcaacaattgaccagcctttctggtttggtttgcgatattcta

SEQ ID NO: 119360 - DNA, 76 bp, Homo sapiens
attaatcgtttagtgacatctgatgcaacaattgaccagcctttctggtttggtttgcgatattctactatgaagt

SEQ ID NO: 119361 - DNA, 78 bp, Homo sapiens
acatctgatgcaacaattgaccagcctttctggtttggtttgcgatattctactatgaagtttgttatttctgagcca

SEQ ID NO: 119362 - DNA, 74 bp, Homo sapiens
aattgaccagcctttctggtttggtttgcgatattctactatgaagtttgttatttctgagccaccattatcta

SEQ ID NO: 119363 - DNA, 72 bp, Homo sapiens
tttggtttgcgatattctactatgaagtttgttatttctgagccaccattatctagtgggttttcccaagaa

SEQ ID NO: 119364 - DNA, 72 bp, Homo sapiens
gatattctactatgaagtttgttatttctgagccaccattatctagtgggttttcccaagaaattgtacagt

SEQ ID NO: 119365 - DNA, 70 bp, Homo sapiens
actatgaagtttgttatttctgagccaccattatctagtgggttttcccaagaaattgtacagttctctt

SEQ ID NO: 119366 - DNA, 68 bp, Homo sapiens
ttatctagtgggttttcccaagaaattgtacagttctctttggttacattggtaaccttcaaattctg

SEQ ID NO: 119367 - DNA, 68 bp, Homo sapiens
gttttcccaagaaattgtacagttctctttggttacattggtaaccttcaaattctggcaaggcccag

SEQ ID NO: 119368 - DNA, 70 bp, Homo sapiens
aagaaattgtacagttctctttggttacattggtaaccttcaaattctggcaaggcccaggtctgtcaag

SEQ ID NO: 119369 - DNA, 71 bp, Homo sapiens
gttacattggtaaccttcaaattctggcaaggcccaggtctgtcaaggacgttaacgatggctgaaccttg

SEQ ID NO: 119370 - DNA, 75 bp, Homo sapiens
aaattctggcaaggcccaggtctgtcaaggacgttaacgatggctgaaccttgggcatgtccactgctgttctta

SEQ ID NO: 119371 - DNA, 79 bp, Homo sapiens
aaggcccaggtctgtcaaggacgttaacgatggctgaaccttgggcatgtccactgctgttcttagctgagatgatata

SEQ ID NO: 119372 - DNA, 86 bp, Homo sapiens
taacgatggctgaaccttgggcatgtccactgctgttcttagctgagatgatatacttgccatgatcagctctaacagcttcttta

SEQ ID NO: 119373 - DNA, 84 bp, Homo sapiens
tgaaccttgggcatgtccactgctgttcttagctgagatgatatacttgccatgatcagctctaacagcttctttaatttgtaa

SEQ ID NO: 119374 - DNA, 85 bp, Homo sapiens
ttgggcatgtccactgctgttcttagctgagatgatatacttgccatgatcagctctaacagcttctttaatttgtaactcaaca

SEQ ID NO: 119375 - DNA, 82 bp, Homo sapiens
actgctgttcttagctgagatgatatacttgccatgatcagctctaacagcttctttaatttgtaactcaacacgaggtaga

SEQ ID NO: 119376 - DNA, 82 bp, Homo sapiens
ttagctgagatgatatacttgccatgatcagctctaacagcttctttaatttgtaactcaacacgaggtagatcctgaataa

SEQ ID NO: 119377 - DNA, 79 bp, Homo sapiens
atgatatacttgccatgatcagctctaacagcttctttaatttgtaactcaacacgaggtagatcctgaataaggtcca

SEQ ID NO: 119378 - DNA, 74 bp, Homo sapiens
catgatcagctctaacagcttctttaatttgtaactcaacacgaggtagatcctgaataaggtccaccctcttt

SEQ ID NO: 119379 - DNA, 69 bp, Homo sapiens
tctttaatttgtaactcaacacgaggtagatcctgaataaggtccaccctcttttctcggaccaatact

SEQ ID NO: 119380 - DNA, 69 bp, Homo sapiens
aatttgtaactcaacacgaggtagatcctgaataaggtccaccctcttttctcggaccaatactttgcc

SEQ ID NO: 119381 - DNA, 69 bp, Homo sapiens
aacacgaggtagatcctgaataaggtccaccctcttttctcggaccaatactttgccttccttagtcca

SEQ ID NO: 119382 - DNA, 70 bp, Homo sapiens
accctcttttctcggaccaatactttgccttccttagtccaagttatgtctggttcaggtctgcctttga

SEQ ID NO: 119383 - DNA, 77 bp, Homo sapiens
tagtccaagttatgtctggttcaggtctgcctttgactcgagctagaatgcggatagtttggcctactctcacggta

SEQ ID NO: 119384 - DNA, 75 bp, Homo sapiens
aagttatgtctggttcaggtctgcctttgactcgagctagaatgcggatagtttggcctactctcacggtaataa

SEQ ID NO: 119385 - DNA, 77 bp, Homo sapiens
ttcaggtctgcctttgactcgagctagaatgcggatagtttggcctactctcacggtaataacatcacgacaagtaa

SEQ ID NO: 119386 - DNA, 76 bp, Homo sapiens
aatgcggatagtttggcctactctcacggtaataacatcacgacaagtaacatcaagttctacttctggaggatga

SEQ ID NO: 119387 - DNA, 75 bp, Homo sapiens
tttggcctactctcacggtaataacatcacgacaagtaacatcaagttctacttctggaggatgaaggatatctt

SEQ ID NO: 119388 - DNA, 77 bp, Homo sapiens
acggtaataacatcacgacaagtaacatcaagttctacttctggaggatgaaggatatcttttgcaatcacagattc

SEQ ID NO: 119389 - DNA, 79 bp, Homo sapiens
aataacatcacgacaagtaacatcaagttctacttctggaggatgaaggatatcttttgcaatcacagattctgctagt

SEQ ID NO: 119390 - DNA, 80 bp, Homo sapiens
acaagtaacatcaagttctacttctggaggatgaaggatatcttttgcaatcacagattctgctagttctcttggctcac

SEQ ID NO: 119391 - DNA, 80 bp, Homo sapiens
atcaagttctacttctggaggatgaaggatatcttttgcaatcacagattctgctagttctcttggctcaccctctccta

SEQ ID NO: 119392 - DNA, 81 bp, Homo sapiens
tacttctggaggatgaaggatatcttttgcaatcacagattctgctagttctcttggctcaccctctcctacaatattagc

SEQ ID NO: 119393 - DNA, 80 bp, Homo sapiens
atgaaggatatcttttgcaatcacagattctgctagttctcttggctcaccctctcctacaatattagctgcctttatac

SEQ ID NO: 119394 - DNA, 79 bp, Homo sapiens
ttttgcaatcacagattctgctagttctcttggctcaccctctcctacaatattagctgcctttatacggaatctgtac

SEQ ID NO: 119395 - DNA, 78 bp, Homo sapiens
aatcacagattctgctagttctcttggctcaccctctcctacaatattagctgcctttatacggaatctgtactcatt

SEQ ID NO: 119396 - DNA, 75 bp, Homo sapiens
ctagttctcttggctcaccctctcctacaatattagctgcctttatacggaatctgtactcatttccttcaatta

SEQ ID NO: 119397 - DNA, 75 bp, Homo sapiens
ttggctcaccctctcctacaatattagctgcctttatacggaatctgtactcatttccttcaattagtccaggta

SEQ ID NO: 119398 - DNA, 72 bp, Homo sapiens
acaatattagctgcctttatacggaatctgtactcatttccttcaattagtccaggtaccctaaaggcacat

SEQ ID NO: 119399 - DNA, 74 bp, Homo sapiens
tttatacggaatctgtactcatttccttcaattagtccaggtaccctaaaggcacattgcctaatgagttcatc

SEQ ID NO: 119400 - DNA, 73 bp, Homo sapiens
aatctgtactcatttccttcaattagtccaggtaccctaaaggcacattgcctaatgagttcatctttattaa

SEQ ID NO: 119401 - DNA, 77 bp, Homo sapiens
gtaccctaaaggcacattgcctaatgagttcatctttattaatcctgttccattgtgctgtgccaggtttctgacat

SEQ ID NO: 119402 - DNA, 80 bp, Homo sapiens
aaggcacattgcctaatgagttcatctttattaatcctgttccattgtgctgtgccaggtttctgacattccactacata

SEQ ID NO: 119403 - DNA, 80 bp, Homo sapiens
attgcctaatgagttcatctttattaatcctgttccattgtgctgtgccaggtttctgacattccactacatatcctaga

SEQ ID NO: 119404 - DNA, 78 bp, Homo sapiens
agttcatctttattaatcctgttccattgtgctgtgccaggtttctgacattccactacatatcctagaatggggcta

SEQ ID NO: 119405 - DNA, 79 bp, Homo sapiens
ttattaatcctgttccattgtgctgtgccaggtttctgacattccactacatatcctagaatggggctaccaccatcac

SEQ ID NO: 119406 - DNA, 81 bp, Homo sapiens
ttccattgtgctgtgccaggtttctgacattccactacatatcctagaatggggctaccaccatcactgagaggctttgtc

SEQ ID NO: 119407 - DNA, 80 bp, Homo sapiens
tgccaggtttctgacattccactacatatcctagaatggggctaccaccatcactgagaggctttgtccacaccaaatca

SEQ ID NO: 119408 - DNA, 79 bp, Homo sapiens
tttctgacattccactacatatcctagaatggggctaccaccatcactgagaggctttgtccacaccaaatcagctgtt

SEQ ID NO: 119409 - DNA, 80 bp, Homo sapiens
attccactacatatcctagaatggggctaccaccatcactgagaggctttgtccacaccaaatcagctgtttctctgctc

SEQ ID NO: 119410 - DNA, 80 bp, Homo sapiens
atatcctagaatggggctaccaccatcactgagaggctttgtccacaccaaatcagctgtttctctgctcttgtctttca

SEQ ID NO: 119411 - DNA, 79 bp, Homo sapiens
gctaccaccatcactgagaggctttgtccacaccaaatcagctgtttctctgctcttgtctttcagtttaggattaata

SEQ ID NO: 119412 - DNA, 77 bp, Homo sapiens
atcactgagaggctttgtccacaccaaatcagctgtttctctgctcttgtctttcagtttaggattaataggtggtc

SEQ ID NO: 119413 - DNA, 74 bp, Homo sapiens
agaggctttgtccacaccaaatcagctgtttctctgctcttgtctttcagtttaggattaataggtggtccagg

SEQ ID NO: 119414 - DNA, 75 bp, Homo sapiens
tccacaccaaatcagctgtttctctgctcttgtctttcagtttaggattaataggtggtccaggtggtttgatgg

SEQ ID NO: 119415 - DNA, 74 bp, Homo sapiens
aatcagctgtttctctgctcttgtctttcagtttaggattaataggtggtccaggtggtttgatgggccggcaa

SEQ ID NO: 119416 - DNA, 71 bp, Homo sapiens
tttcagtttaggattaataggtggtccaggtggtttgatgggccggcaagcttttattggatcagaacttg

SEQ ID NO: 119417 - DNA, 71 bp, Homo sapiens
tttaggattaataggtggtccaggtggtttgatgggccggcaagcttttattggatcagaacttggggatg

SEQ ID NO: 119418 - DNA, 71 bp, Homo sapiens
aataggtggtccaggtggtttgatgggccggcaagcttttattggatcagaacttggggatggtttgctta

SEQ ID NO: 119419 - DNA, 74 bp, Homo sapiens
gtggtttgatgggccggcaagcttttattggatcagaacttggggatggtttgcttagtcctgcaagattttca

SEQ ID NO: 119420 - DNA, 73 bp, Homo sapiens
atgggccggcaagcttttattggatcagaacttggggatggtttgcttagtcctgcaagattttcagcaaaaa

SEQ ID NO: 119421 - DNA, 74 bp, Homo sapiens
attggatcagaacttggggatggtttgcttagtcctgcaagattttcagcaaaaactctaaactcatatgtatt

SEQ ID NO: 119422 - DNA, 78 bp, Homo sapiens
tttgcttagtcctgcaagattttcagcaaaaactctaaactcatatgtatttccttcatagagtccagtcactctgaa

SEQ ID NO: 119423 - DNA, 77 bp, Homo sapiens
agtcctgcaagattttcagcaaaaactctaaactcatatgtatttccttcatagagtccagtcactctgaacttcag

SEQ ID NO: 119424 - DNA, 77 bp, Homo sapiens
attttcagcaaaaactctaaactcatatgtatttccttcatagagtccagtcactctgaacttcaggtcagcgatag

SEQ ID NO: 119425 - DNA, 74 bp, Homo sapiens
aaaaactctaaactcatatgtatttccttcatagagtccagtcactctgaacttcaggtcagcgataggtgttt

SEQ ID NO: 119426 - DNA, 76 bp, Homo sapiens
atatgtatttccttcatagagtccagtcactctgaacttcaggtcagcgataggtgttttgttgaccctcacccat

SEQ ID NO: 119427 - DNA, 76 bp, Homo sapiens
atttccttcatagagtccagtcactctgaacttcaggtcagcgataggtgttttgttgaccctcacccatttgcca

SEQ ID NO: 119428 - DNA, 75 bp, Homo sapiens
atagagtccagtcactctgaacttcaggtcagcgataggtgttttgttgaccctcacccatttgccagttacttc

SEQ ID NO: 119429 - DNA, 75 bp, Homo sapiens
tctgaacttcaggtcagcgataggtgttttgttgaccctcacccatttgccagttacttctcgacgttccatata

SEQ ID NO: 119430 - DNA, 73 bp, Homo sapiens
acttcaggtcagcgataggtgttttgttgaccctcacccatttgccagttacttctcgacgttccatatagta

SEQ ID NO: 119431 - DNA, 72 bp, Homo sapiens
ataggtgttttgttgaccctcacccatttgccagttacttctcgacgttccatatagtagccagttattgga

SEQ ID NO: 119432 - DNA, 74 bp, Homo sapiens
ttttgttgaccctcacccatttgccagttacttctcgacgttccatatagtagccagttattggactgccacca

SEQ ID NO: 119433 - DNA, 76 bp, Homo sapiens
tttgccagttacttctcgacgttccatatagtagccagttattggactgccaccatcagattttggcagggtccaa

SEQ ID NO: 119434 - DNA, 77 bp, Homo sapiens
acttctcgacgttccatatagtagccagttattggactgccaccatcagattttggcagggtccaagacactgttgc

SEQ ID NO: 119435 - DNA, 80 bp, Homo sapiens
gtagccagttattggactgccaccatcagattttggcagggtccaagacactgttgctgcattttcagtaatgtcagtaa

SEQ ID NO: 119436 - DNA, 76 bp, Homo sapiens
atcagattttggcagggtccaagacactgttgctgcattttcagtaatgtcagtaaccactggtttaccaggagga

SEQ ID NO: 119437 - DNA, 74 bp, Homo sapiens
ttttggcagggtccaagacactgttgctgcattttcagtaatgtcagtaaccactggtttaccaggaggagacg

SEQ ID NO: 119438 - DNA, 73 bp, Homo sapiens
agacactgttgctgcattttcagtaatgtcagtaaccactggtttaccaggaggagacggaggactaaattta

SEQ ID NO: 119439 - DNA, 72 bp, Homo sapiens
ttttcagtaatgtcagtaaccactggtttaccaggaggagacggaggactaaatttatgcttagcaacagta

SEQ ID NO: 119440 - DNA, 71 bp, Homo sapiens
agtaaccactggtttaccaggaggagacggaggactaaatttatgcttagcaacagtaggtgtggagtcaa

SEQ ID NO: 119441 - DNA, 70 bp, Homo sapiens
actggtttaccaggaggagacggaggactaaatttatgcttagcaacagtaggtgtggagtcaaggggag

SEQ ID NO: 119442 - DNA, 72 bp, Homo sapiens
gaggagacggaggactaaatttatgcttagcaacagtaggtgtggagtcaaggggaggaccaacacctatct

SEQ ID NO: 119443 - DNA, 71 bp, Homo sapiens
acggaggactaaatttatgcttagcaacagtaggtgtggagtcaaggggaggaccaacacctatcttattc

SEQ ID NO: 119444 - DNA, 75 bp, Homo sapiens
taaatttatgcttagcaacagtaggtgtggagtcaaggggaggaccaacacctatcttattctctgctctaactc

SEQ ID NO: 119445 - DNA, 74 bp, Homo sapiens
tagcaacagtaggtgtggagtcaaggggaggaccaacacctatcttattctctgctctaactcggaaaacatat

SEQ ID NO: 119446 - DNA, 74 bp, Homo sapiens
taggtgtggagtcaaggggaggaccaacacctatcttattctctgctctaactcggaaaacatattcacagccc

SEQ ID NO: 119447 - DNA, 77 bp, Homo sapiens
aggaccaacacctatcttattctctgctctaactcggaaaacatattcacagcccttctgcagatgtgggattttca

SEQ ID NO: 119448 - DNA, 78 bp, Homo sapiens
tctgctctaactcggaaaacatattcacagcccttctgcagatgtgggattttcagctttgtcttactgcttccggaa

SEQ ID NO: 119449 - DNA, 76 bp, Homo sapiens
aactcggaaaacatattcacagcccttctgcagatgtgggattttcagctttgtcttactgcttccggaagagaca

SEQ ID NO: 119450 - DNA, 76 bp, Homo sapiens
atattcacagcccttctgcagatgtgggattttcagctttgtcttactgcttccggaagagacaacaccccacgtg

SEQ ID NO: 119451 - DNA, 75 bp, Homo sapiens
ttctgcagatgtgggattttcagctttgtcttactgcttccggaagagacaacaccccacgtgtctttccttgta

SEQ ID NO: 119452 - DNA, 72 bp, Homo sapiens
tgtgggattttcagctttgtcttactgcttccggaagagacaacaccccacgtgtctttccttgtatcttgt

SEQ ID NO: 119453 - DNA, 72 bp, Homo sapiens
ttttcagctttgtcttactgcttccggaagagacaacaccccacgtgtctttccttgtatcttgtttctcaa

SEQ ID NO: 119454 - DNA, 72 bp, Homo sapiens
tcttactgcttccggaagagacaacaccccacgtgtctttccttgtatcttgtttctcaacaatataattta

SEQ ID NO: 119455 - DNA, 71 bp, Homo sapiens
cttccggaagagacaacaccccacgtgtctttccttgtatcttgtttctcaacaatataatttatcacagg

SEQ ID NO: 119456 - DNA, 74 bp, Homo sapiens
agacaacaccccacgtgtctttccttgtatcttgtttctcaacaatataatttatcacagggcttcctccatca

SEQ ID NO: 119457 - DNA, 74 bp, Homo sapiens
ccacgtgtctttccttgtatcttgtttctcaacaatataatttatcacagggcttcctccatcatccttaggtg

SEQ ID NO: 119458 - DNA, 82 bp, Homo sapiens
tttctcaacaatataatttatcacagggcttcctccatcatccttaggtggctgccatgagatagtcatgtgttcaggagta

SEQ ID NO: 119459 - DNA, 82 bp, Homo sapiens
atataatttatcacagggcttcctccatcatccttaggtggctgccatgagatagtcatgtgttcaggagtaacatccagaa

SEQ ID NO: 119460 - DNA, 83 bp, Homo sapiens
ttatcacagggcttcctccatcatccttaggtggctgccatgagatagtcatgtgttcaggagtaacatccagaatattaata

SEQ ID NO: 119461 - DNA, 81 bp, Homo sapiens
ttcctccatcatccttaggtggctgccatgagatagtcatgtgttcaggagtaacatccagaatattaataggacctgttg

SEQ ID NO: 119462 - DNA, 81 bp, Homo sapiens
gctgccatgagatagtcatgtgttcaggagtaacatccagaatattaataggacctgttggtggcccaggaacatcaagaa

SEQ ID NO: 119463 - DNA, 77 bp, Homo sapiens
agatagtcatgtgttcaggagtaacatccagaatattaataggacctgttggtggcccaggaacatcaagaacagta

SEQ ID NO: 119464 - DNA, 76 bp, Homo sapiens
atgtgttcaggagtaacatccagaatattaataggacctgttggtggcccaggaacatcaagaacagtaagatgta

SEQ ID NO: 119465 - DNA, 74 bp, Homo sapiens
taacatccagaatattaataggacctgttggtggcccaggaacatcaagaacagtaagatgtacggctactgtt

SEQ ID NO: 119466 - DNA, 72 bp, Homo sapiens
aatattaataggacctgttggtggcccaggaacatcaagaacagtaagatgtacggctactgttttgctacc

SEQ ID NO: 119467 - DNA, 76 bp, Homo sapiens
aggaacatcaagaacagtaagatgtacggctactgttttgctaccggctgcattggaaactgtgatttgatattcc

SEQ ID NO: 119468 - DNA, 75 bp, Homo sapiens
aagaacagtaagatgtacggctactgttttgctaccggctgcattggaaactgtgatttgatattccccagtgtc

SEQ ID NO: 119469 - DNA, 75 bp, Homo sapiens
aagatgtacggctactgttttgctaccggctgcattggaaactgtgatttgatattccccagtgtctctccttaa

SEQ ID NO: 119470 - DNA, 76 bp, Homo sapiens
tactgttttgctaccggctgcattggaaactgtgatttgatattccccagtgtctctccttaagcagttcttaatg

SEQ ID NO: 119471 - DNA, 76 bp, Homo sapiens
taccggctgcattggaaactgtgatttgatattccccagtgtctctccttaagcagttcttaatggtaagtactga

SEQ ID NO: 119472 - DNA, 74 bp, Homo sapiens
attggaaactgtgatttgatattccccagtgtctctccttaagcagttcttaatggtaagtactgatgagaagt

SEQ ID NO: 119473 - DNA, 77 bp, Homo sapiens
tgtgatttgatattccccagtgtctctccttaagcagttcttaatggtaagtactgatgagaagttgtctgtttcaa

SEQ ID NO: 119474 - DNA, 75 bp, Homo sapiens
atattccccagtgtctctccttaagcagttcttaatggtaagtactgatgagaagttgtctgtttcaactgtgta

SEQ ID NO: 119475 - DNA, 76 bp, Homo sapiens
tctctccttaagcagttcttaatggtaagtactgatgagaagttgtctgtttcaactgtgtagtgctcatcggttt

SEQ ID NO: 119476 - DNA, 77 bp, Homo sapiens
tcttaatggtaagtactgatgagaagttgtctgtttcaactgtgtagtgctcatcggttttaatctcactcccatcg

SEQ ID NO: 119477 - DNA, 79 bp, Homo sapiens
tactgatgagaagttgtctgtttcaactgtgtagtgctcatcggttttaatctcactcccatcggttgtccactttgca

SEQ ID NO: 119478 - DNA, 75 bp, Homo sapiens
agttgtctgtttcaactgtgtagtgctcatcggttttaatctcactcccatcggttgtccactttgcagtaggaa

SEQ ID NO: 119479 - DNA, 77 bp, Homo sapiens
ctgtttcaactgtgtagtgctcatcggttttaatctcactcccatcggttgtccactttgcagtaggaacaggcaca

SEQ ID NO: 119480 - DNA, 77 bp, Homo sapiens
tgtagtgctcatcggttttaatctcactcccatcggttgtccactttgcagtaggaacaggcacacctcttataata

SEQ ID NO: 119481 - DNA, 74 bp, Homo sapiens
atcggttttaatctcactcccatcggttgtccactttgcagtaggaacaggcacacctcttataatagcaggga

SEQ ID NO: 119482 - DNA, 77 bp, Homo sapiens
atctcactcccatcggttgtccactttgcagtaggaacaggcacacctcttataatagcagggaatctgactgtggt

SEQ ID NO: 119483 - DNA, 75 bp, Homo sapiens
actttgcagtaggaacaggcacacctcttataatagcagggaatctgactgtggttccagcctttaccacaagac

SEQ ID NO: 119484 - DNA, 75 bp, Homo sapiens
taggaacaggcacacctcttataatagcagggaatctgactgtggttccagcctttaccacaagaccttcaatta

SEQ ID NO: 119485 - DNA, 74 bp, Homo sapiens
acacctcttataatagcagggaatctgactgtggttccagcctttaccacaagaccttcaattaatttcacatc

SEQ ID NO: 119486 - DNA, 74 bp, Homo sapiens
tggttccagcctttaccacaagaccttcaattaatttcacatctagctccacggatggaggcactgaaaagtaa

SEQ ID NO: 119487 - DNA, 65 bp, Homo sapiens
ataattttaaaaagaaataaggtaatactgctagtccaaaaattacctagtttttcttgacattc

SEQ ID NO: 119488 - DNA, 67 bp, Homo sapiens
aaagaaataaggtaatactgctagtccaaaaattacctagtttttcttgacattctatcgggatagt

SEQ ID NO: 119489 - DNA, 72 bp, Homo sapiens
tactgctagtccaaaaattacctagtttttcttgacattctatcgggatagttgtgtcagggagaccaagac

SEQ ID NO: 119490 - DNA, 69 bp, Homo sapiens
aaattacctagtttttcttgacattctatcgggatagttgtgtcagggagaccaagacccacaatgttt

SEQ ID NO: 119491 - DNA, 72 bp, Homo sapiens
ctagtttttcttgacattctatcgggatagttgtgtcagggagaccaagacccacaatgttttcagctttta

SEQ ID NO: 119492 - DNA, 72 bp, Homo sapiens
tatcgggatagttgtgtcagggagaccaagacccacaatgttttcagcttttacacggaatctataggtctt

SEQ ID NO: 119493 - DNA, 72 bp, Homo sapiens
ttgtgtcagggagaccaagacccacaatgttttcagcttttacacggaatctataggtctttccttgttgta

SEQ ID NO: 119494 - DNA, 70 bp, Homo sapiens
agaccaagacccacaatgttttcagcttttacacggaatctataggtctttccttgttgtagtccagtaa

SEQ ID NO: 119495 - DNA, 71 bp, Homo sapiens
acaatgttttcagcttttacacggaatctataggtctttccttgttgtagtccagtaaccacacactctaa

SEQ ID NO: 119496 - DNA, 70 bp, Homo sapiens
ttttcagcttttacacggaatctataggtctttccttgttgtagtccagtaaccacacactctaagtttg

SEQ ID NO: 119497 - DNA, 70 bp, Homo sapiens
acggaatctataggtctttccttgttgtagtccagtaaccacacactctaagtttgtcacagtcttaaat

SEQ ID NO: 119498 - DNA, 72 bp, Homo sapiens
tctataggtctttccttgttgtagtccagtaaccacacactctaagtttgtcacagtcttaaatttaatcca

SEQ ID NO: 119499 - DNA, 70 bp, Homo sapiens
tttccttgttgtagtccagtaaccacacactctaagtttgtcacagtcttaaatttaatccagtcctggg

SEQ ID NO: 119500 - DNA, 73 bp, Homo sapiens
tccagtaaccacacactctaagtttgtcacagtcttaaatttaatccagtcctgggtgccttcttcttgatat

SEQ ID NO: 119501 - DNA, 72 bp, Homo sapiens
acacactctaagtttgtcacagtcttaaatttaatccagtcctgggtgccttcttcttgatattctaccaaa

SEQ ID NO: 119502 - DNA, 74 bp, Homo sapiens
taagtttgtcacagtcttaaatttaatccagtcctgggtgccttcttcttgatattctaccaaatatccagtga

SEQ ID NO: 119503 - DNA, 73 bp, Homo sapiens
agtcttaaatttaatccagtcctgggtgccttcttcttgatattctaccaaatatccagtgattggagaacca

SEQ ID NO: 119504 - DNA, 74 bp, Homo sapiens
aaatttaatccagtcctgggtgccttcttcttgatattctaccaaatatccagtgattggagaaccaccatcac

SEQ ID NO: 119505 - DNA, 77 bp, Homo sapiens
ctgggtgccttcttcttgatattctaccaaatatccagtgattggagaaccaccatcacgatccggcttattccaga

SEQ ID NO: 119506 - DNA, 77 bp, Homo sapiens
ttcttcttgatattctaccaaatatccagtgattggagaaccaccatcacgatccggcttattccagactagggaga

SEQ ID NO: 119507 - DNA, 75 bp, Homo sapiens
attctaccaaatatccagtgattggagaaccaccatcacgatccggcttattccagactagggagacttcagtct

SEQ ID NO: 119508 - DNA, 80 bp, Homo sapiens
agtgattggagaaccaccatcacgatccggcttattccagactagggagacttcagtcttgtcaacatctacatggtgca

SEQ ID NO: 119509 - DNA, 77 bp, Homo sapiens
agaaccaccatcacgatccggcttattccagactagggagacttcagtcttgtcaacatctacatggtgcaggtcct

SEQ ID NO: 119510 - DNA, 77 bp, Homo sapiens
tcacgatccggcttattccagactagggagacttcagtcttgtcaacatctacatggtgcaggtccttgggtggccc

SEQ ID NO: 119511 - DNA, 73 bp, Homo sapiens
actagggagacttcagtcttgtcaacatctacatggtgcaggtccttgggtggccctgggggatcttttcaaa

SEQ ID NO: 119512 - DNA, 75 bp, Homo sapiens
agtcttgtcaacatctacatggtgcaggtccttgggtggccctgggggatcttttcaaagaagaagttatgatga

SEQ ID NO: 119513 - DNA, 72 bp, Homo sapiens
acatctacatggtgcaggtccttgggtggccctgggggatcttttcaaagaagaagttatgatgaaaaagta

SEQ ID NO: 119514 - DNA, 71 bp, Homo sapiens
tcttttcaaagaagaagttatgatgaaaaagtaatattcttaaagacagtcaaacaatagttttgtattca

SEQ ID NO: 119515 - DNA, 72 bp, Homo sapiens
ttcttaaagacagtcaaacaatagttttgtattcagagaaagcaacttacggagaggatccaaagccttgat

SEQ ID NO: 119516 - DNA, 71 bp, Homo sapiens
acagtcaaacaatagttttgtattcagagaaagcaacttacggagaggatccaaagccttgattggttttg

SEQ ID NO: 119517 - DNA, 70 bp, Homo sapiens
ttttgtattcagagaaagcaacttacggagaggatccaaagccttgattggttttggtgtttcaacaaaa

SEQ ID NO: 119518 - DNA, 71 bp, Homo sapiens
tattcagagaaagcaacttacggagaggatccaaagccttgattggttttggtgtttcaacaaaaggacca

SEQ ID NO: 119519 - DNA, 69 bp, Homo sapiens
aagcaacttacggagaggatccaaagccttgattggttttggtgtttcaacaaaaggaccacgtccata

SEQ ID NO: 119520 - DNA, 71 bp, Homo sapiens
aggatccaaagccttgattggttttggtgtttcaacaaaaggaccacgtccatactggttctccgcagcta

SEQ ID NO: 119521 - DNA, 70 bp, Homo sapiens
aaagccttgattggttttggtgtttcaacaaaaggaccacgtccatactggttctccgcagctactcgga

SEQ ID NO: 119522 - DNA, 69 bp, Homo sapiens
gttttggtgtttcaacaaaaggaccacgtccatactggttctccgcagctactcggaagaggtactggt

SEQ ID NO: 119523 - DNA, 74 bp, Homo sapiens
tttcaacaaaaggaccacgtccatactggttctccgcagctactcggaagaggtactggttgccttcattcaga

SEQ ID NO: 119524 - DNA, 75 bp, Homo sapiens
aaaaggaccacgtccatactggttctccgcagctactcggaagaggtactggttgccttcattcagatgcttagc

SEQ ID NO: 119525 - DNA, 77 bp, Homo sapiens
tccatactggttctccgcagctactcggaagaggtactggttgccttcattcagatgcttagcgaagtgactctttt

SEQ ID NO: 119526 - DNA, 77 bp, Homo sapiens
tggttctccgcagctactcggaagaggtactggttgccttcattcagatgcttagcgaagtgactctttttctttga

SEQ ID NO: 119527 - DNA, 79 bp, Homo sapiens
agctactcggaagaggtactggttgccttcattcagatgcttagcgaagtgactctttttctttgatgtagctgagaga

SEQ ID NO: 119528 - DNA, 78 bp, Homo sapiens
aagaggtactggttgccttcattcagatgcttagcgaagtgactctttttctttgatgtagctgagagaggtgaccac

SEQ ID NO: 119529 - DNA, 83 bp, Homo sapiens
ttgccttcattcagatgcttagcgaagtgactctttttctttgatgtagctgagagaggtgaccactgggcgctggcaacatc

SEQ ID NO: 119530 - DNA, 82 bp, Homo sapiens
attcagatgcttagcgaagtgactctttttctttgatgtagctgagagaggtgaccactgggcgctggcaacatctctcctc

SEQ ID NO: 119531 - DNA, 80 bp, Homo sapiens
cgaagtgactctttttctttgatgtagctgagagaggtgaccactgggcgctggcaacatctctcctctcaaccacataa

SEQ ID NO: 119532 - DNA, 80 bp, Homo sapiens
tctttttctttgatgtagctgagagaggtgaccactgggcgctggcaacatctctcctctcaaccacataattggtaata

SEQ ID NO: 119533 - DNA, 81 bp, Homo sapiens
tttgatgtagctgagagaggtgaccactgggcgctggcaacatctctcctctcaaccacataattggtaataacagaacca

SEQ ID NO: 119534 - DNA, 79 bp, Homo sapiens
agagaggtgaccactgggcgctggcaacatctctcctctcaaccacataattggtaataacagaaccaccatcatccag

SEQ ID NO: 119535 - DNA, 77 bp, Homo sapiens
accactgggcgctggcaacatctctcctctcaaccacataattggtaataacagaaccaccatcatccagtggttct

SEQ ID NO: 119536 - DNA, 76 bp, Homo sapiens
ctggcaacatctctcctctcaaccacataattggtaataacagaaccaccatcatccagtggttctttccaagtaa

SEQ ID NO: 119537 - DNA, 73 bp, Homo sapiens
atctctcctctcaaccacataattggtaataacagaaccaccatcatccagtggttctttccaagtaaggtaa

SEQ ID NO: 119538 - DNA, 71 bp, Homo sapiens
aaccacataattggtaataacagaaccaccatcatccagtggttctttccaagtaaggtaacatgaatctt

SEQ ID NO: 119539 - DNA, 70 bp, Homo sapiens
aattggtaataacagaaccaccatcatccagtggttctttccaagtaaggtaacatgaatctttcctaat

SEQ ID NO: 119540 - DNA, 72 bp, Homo sapiens
aataacagaaccaccatcatccagtggttctttccaagtaaggtaacatgaatctttcctaatttcactgac

SEQ ID NO: 119541 - DNA, 72 bp, Homo sapiens
agtggttctttccaagtaaggtaacatgaatctttcctaatttcactgacttccagatctctaggtggccca

SEQ ID NO: 119542 - DNA, 71 bp, Homo sapiens
aagtaaggtaacatgaatctttcctaatttcactgacttccagatctctaggtggcccaggtttatctaaa

SEQ ID NO: 119543 - DNA, 72 bp, Homo sapiens
taacatgaatctttcctaatttcactgacttccagatctctaggtggcccaggtttatctaaaaagtgttaa

SEQ ID NO: 119544 - DNA, 70 bp, Homo sapiens
cactgacttccagatctctaggtggcccaggtttatctaaaaagtgttaaataacagtttgataagtaat

SEQ ID NO: 119545 - DNA, 65 bp, Homo sapiens
atttatttttaatggcctaagtagtaaaattcttacctaatacaagtacttttactgagacagtt

SEQ ID NO: 119546 - DNA, 69 bp, Homo sapiens
taatggcctaagtagtaaaattcttacctaatacaagtacttttactgagacagtttttgaaccagctg

SEQ ID NO: 119547 - DNA, 70 bp, Homo sapiens
gtagtaaaattcttacctaatacaagtacttttactgagacagtttttgaaccagctggattctccactg

SEQ ID NO: 119548 - DNA, 70 bp, Homo sapiens
attcttacctaatacaagtacttttactgagacagtttttgaaccagctggattctccactgttaaagaa

SEQ ID NO: 119549 - DNA, 71 bp, Homo sapiens
atacaagtacttttactgagacagtttttgaaccagctggattctccactgttaaagaataaattccacca

SEQ ID NO: 119550 - DNA, 73 bp, Homo sapiens
tacttttactgagacagtttttgaaccagctggattctccactgttaaagaataaattccaccatcttcatgg

SEQ ID NO: 119551 - DNA, 74 bp, Homo sapiens
cagtttttgaaccagctggattctccactgttaaagaataaattccaccatcttcatgggcagcattacgaatt

SEQ ID NO: 119552 - DNA, 76 bp, Homo sapiens
tttgaaccagctggattctccactgttaaagaataaattccaccatcttcatgggcagcattacgaatttcaagct

SEQ ID NO: 119553 - DNA, 76 bp, Homo sapiens
attctccactgttaaagaataaattccaccatcttcatgggcagcattacgaatttcaagcttgctaccaactgga

SEQ ID NO: 119554 - DNA, 78 bp, Homo sapiens
ttaaagaataaattccaccatcttcatgggcagcattacgaatttcaagcttgctaccaactggagtcacatcaattc

SEQ ID NO: 119555 - DNA, 78 bp, Homo sapiens
aataaattccaccatcttcatgggcagcattacgaatttcaagcttgctaccaactggagtcacatcaattcttgctt

SEQ ID NO: 119556 - DNA, 82 bp, Homo sapiens
atcttcatgggcagcattacgaatttcaagcttgctaccaactggagtcacatcaattcttgctttagttggagcatctctg

SEQ ID NO: 119557 - DNA, 79 bp, Homo sapiens
cagcattacgaatttcaagcttgctaccaactggagtcacatcaattcttgctttagttggagcatctctgtcttcttt

SEQ ID NO: 119558 - DNA, 76 bp, Homo sapiens
ttacgaatttcaagcttgctaccaactggagtcacatcaattcttgctttagttggagcatctctgtcttcttttt

SEQ ID NO: 119559 - DNA, 74 bp, Homo sapiens
ttgctaccaactggagtcacatcaattcttgctttagttggagcatctctgtcttcttttttccaagttacttt

SEQ ID NO: 119560 - DNA, 72 bp, Homo sapiens
aactggagtcacatcaattcttgctttagttggagcatctctgtcttcttttttccaagttacttttgggaa

SEQ ID NO: 119561 - DNA, 71 bp, Homo sapiens
atcaattcttgctttagttggagcatctctgtcttcttttttccaagttacttttgggaatggcactcctt

SEQ ID NO: 119562 - DNA, 74 bp, Homo sapiens
ttcttgctttagttggagcatctctgtcttcttttttccaagttacttttgggaatggcactcctttgatgatg

SEQ ID NO: 119563 - DNA, 75 bp, Homo sapiens
ttggagcatctctgtcttcttttttccaagttacttttgggaatggcactcctttgatgatggcactaagtctta

SEQ ID NO: 119564 - DNA, 72 bp, Homo sapiens
ttttccaagttacttttgggaatggcactcctttgatgatggcactaagtcttagagtatcaccaactttaa

SEQ ID NO: 119565 - DNA, 73 bp, Homo sapiens
agttacttttgggaatggcactcctttgatgatggcactaagtcttagagtatcaccaactttaatgtgttgt

SEQ ID NO: 119566 - DNA, 78 bp, Homo sapiens
gggaatggcactcctttgatgatggcactaagtcttagagtatcaccaactttaatgtgttgttctcttgccatgttg

SEQ ID NO: 119567 - DNA, 82 bp, Homo sapiens
tttgatgatggcactaagtcttagagtatcaccaactttaatgtgttgttctcttgccatgttggcatcaagaatcaactca

SEQ ID NO: 119568 - DNA, 78 bp, Homo sapiens
atggcactaagtcttagagtatcaccaactttaatgtgttgttctcttgccatgttggcatcaagaatcaactcaggg

SEQ ID NO: 119569 - DNA, 77 bp, Homo sapiens
ttagagtatcaccaactttaatgtgttgttctcttgccatgttggcatcaagaatcaactcagggggttctagaata

SEQ ID NO: 119570 - DNA, 74 bp, Homo sapiens
accaactttaatgtgttgttctcttgccatgttggcatcaagaatcaactcagggggttctagaataaagagaa

SEQ ID NO: 119571 - DNA, 76 bp, Homo sapiens
tttaatgtgttgttctcttgccatgttggcatcaagaatcaactcagggggttctagaataaagagaacagaacac

SEQ ID NO: 119572 - DNA, 80 bp, Homo sapiens
tctcttgccatgttggcatcaagaatcaactcagggggttctagaataaagagaacagaacactcagatttgatccataa

SEQ ID NO: 119573 - DNA, 76 bp, Homo sapiens
aatcagacatctattttccttgcaaacacaagtgagagcattttactcaccaagcctgtcttttactaggactggc

SEQ ID NO: 119574 - DNA, 75 bp, Homo sapiens
ttttccttgcaaacacaagtgagagcattttactcaccaagcctgtcttttactaggactggctccggaacatga

SEQ ID NO: 119575 - DNA, 77 bp, Homo sapiens
aaacacaagtgagagcattttactcaccaagcctgtcttttactaggactggctccggaacatgagctggatctgat

SEQ ID NO: 119576 - DNA, 79 bp, Homo sapiens
aagtgagagcattttactcaccaagcctgtcttttactaggactggctccggaacatgagctggatctgattcaccagc

SEQ ID NO: 119577 - DNA, 82 bp, Homo sapiens
tttactcaccaagcctgtcttttactaggactggctccggaacatgagctggatctgattcaccagctgcattgactgctaa

SEQ ID NO: 119578 - DNA, 81 bp, Homo sapiens
aagcctgtcttttactaggactggctccggaacatgagctggatctgattcaccagctgcattgactgctaacactctaaa

SEQ ID NO: 119579 - DNA, 80 bp, Homo sapiens
ttttactaggactggctccggaacatgagctggatctgattcaccagctgcattgactgctaacactctaaacttatagg

SEQ ID NO: 119580 - DNA, 80 bp, Homo sapiens
actggctccggaacatgagctggatctgattcaccagctgcattgactgctaacactctaaacttataggtttgaccgtc

SEQ ID NO: 119581 - DNA, 75 bp, Homo sapiens
tctgattcaccagctgcattgactgctaacactctaaacttataggtttgaccgtcccgaagaccggtgacttta

SEQ ID NO: 119582 - DNA, 71 bp, Homo sapiens
accagctgcattgactgctaacactctaaacttataggtttgaccgtcccgaagaccggtgactttatatt

SEQ ID NO: 119583 - DNA, 67 bp, Homo sapiens
attgactgctaacactctaaacttataggtttgaccgtcccgaagaccggtgactttatatttagtt

SEQ ID NO: 119584 - DNA, 69 bp, Homo sapiens
taacactctaaacttataggtttgaccgtcccgaagaccggtgactttatatttagtttcaggacatga

SEQ ID NO: 119585 - DNA, 67 bp, Homo sapiens
aaacttataggtttgaccgtcccgaagaccggtgactttatatttagtttcaggacatgactcaggg

SEQ ID NO: 119586 - DNA, 72 bp, Homo sapiens
tttgaccgtcccgaagaccggtgactttatatttagtttcaggacatgactcaggggtgtgattggctcttc

SEQ ID NO: 119587 - DNA, 76 bp, Homo sapiens
aagaccggtgactttatatttagtttcaggacatgactcaggggtgtgattggctcttctccactcttcatctcca

SEQ ID NO: 119588 - DNA, 76 bp, Homo sapiens
ctttatatttagtttcaggacatgactcaggggtgtgattggctcttctccactcttcatctccaactttctggta

SEQ ID NO: 119589 - DNA, 79 bp, Homo sapiens
tagtttcaggacatgactcaggggtgtgattggctcttctccactcttcatctccaactttctggtactcaacaatata

SEQ ID NO: 119590 - DNA, 77 bp, Homo sapiens
acatgactcaggggtgtgattggctcttctccactcttcatctccaactttctggtactcaacaatataacccagaa

SEQ ID NO: 119591 - DNA, 77 bp, Homo sapiens
gggtgtgattggctcttctccactcttcatctccaactttctggtactcaacaatataacccagaatcttgctccca

SEQ ID NO: 119592 - DNA, 79 bp, Homo sapiens
attggctcttctccactcttcatctccaactttctggtactcaacaatataacccagaatcttgctcccaccatcatga

SEQ ID NO: 119593 - DNA, 78 bp, Homo sapiens
ttctccactcttcatctccaactttctggtactcaacaatataacccagaatcttgctcccaccatcatgacgtggtg

SEQ ID NO: 119594 - DNA, 77 bp, Homo sapiens
atctccaactttctggtactcaacaatataacccagaatcttgctcccaccatcatgacgtggtggctgccaagtta

SEQ ID NO: 119595 - DNA, 79 bp, Homo sapiens
ttctggtactcaacaatataacccagaatcttgctcccaccatcatgacgtggtggctgccaagttagatcgactgaat

SEQ ID NO: 119596 - DNA, 82 bp, Homo sapiens
acaatataacccagaatcttgctcccaccatcatgacgtggtggctgccaagttagatcgactgaattgcatgttgtatcta

SEQ ID NO: 119597 - DNA, 82 bp, Homo sapiens
ataacccagaatcttgctcccaccatcatgacgtggtggctgccaagttagatcgactgaattgcatgttgtatctattgct

SEQ ID NO: 119598 - DNA, 84 bp, Homo sapiens
atcttgctcccaccatcatgacgtggtggctgccaagttagatcgactgaattgcatgttgtatctattgcttcaggattaaca

SEQ ID NO: 119599 - DNA, 81 bp, Homo sapiens
accatcatgacgtggtggctgccaagttagatcgactgaattgcatgttgtatctattgcttcaggattaacaggtggact

SEQ ID NO: 119600 - DNA, 79 bp, Homo sapiens
gtggctgccaagttagatcgactgaattgcatgttgtatctattgcttcaggattaacaggtggacttggtttagctaa

SEQ ID NO: 119601 - DNA, 74 bp, Homo sapiens
gatcgactgaattgcatgttgtatctattgcttcaggattaacaggtggacttggtttagctaaaaaataaaag

SEQ ID NO: 119602 - DNA, 72 bp, Homo sapiens
acaaagttagataacatgaaaactgaataaatccattaatactataccaattggatctttagcaaagactgg

SEQ ID NO: 119603 - DNA, 73 bp, Homo sapiens
taacatgaaaactgaataaatccattaatactataccaattggatctttagcaaagactggtttggatggtgg

SEQ ID NO: 119604 - DNA, 71 bp, Homo sapiens
aaaactgaataaatccattaatactataccaattggatctttagcaaagactggtttggatggtgggcttg

SEQ ID NO: 119605 - DNA, 74 bp, Homo sapiens
ataaatccattaatactataccaattggatctttagcaaagactggtttggatggtgggcttggatctccaata

SEQ ID NO: 119606 - DNA, 74 bp, Homo sapiens
aattggatctttagcaaagactggtttggatggtgggcttggatctccaataccaatttcattttctgcagaaa

SEQ ID NO: 119607 - DNA, 72 bp, Homo sapiens
ttagcaaagactggtttggatggtgggcttggatctccaataccaatttcattttctgcagaaacccggaat

SEQ ID NO: 119608 - DNA, 74 bp, Homo sapiens
gtttggatggtgggcttggatctccaataccaatttcattttctgcagaaacccggaattcatactgacatcct

SEQ ID NO: 119609 - DNA, 76 bp, Homo sapiens
ttggatctccaataccaatttcattttctgcagaaacccggaattcatactgacatccttctagaagatcaggaac

SEQ ID NO: 119610 - DNA, 72 bp, Homo sapiens
caatttcattttctgcagaaacccggaattcatactgacatccttctagaagatcaggaaccctaaatttag

SEQ ID NO: 119611 - DNA, 76 bp, Homo sapiens
ttctgcagaaacccggaattcatactgacatccttctagaagatcaggaaccctaaatttagtgtatggatgaata

SEQ ID NO: 119612 - DNA, 73 bp, Homo sapiens
agaaacccggaattcatactgacatccttctagaagatcaggaaccctaaatttagtgtatggatgaatagga

SEQ ID NO: 119613 - DNA, 74 bp, Homo sapiens
aattcatactgacatccttctagaagatcaggaaccctaaatttagtgtatggatgaataggatctttggtaac

SEQ ID NO: 119614 - DNA, 73 bp, Homo sapiens
tccttctagaagatcaggaaccctaaatttagtgtatggatgaataggatctttggtaactctagcccatcgt

SEQ ID NO: 119615 - DNA, 73 bp, Homo sapiens
aagatcaggaaccctaaatttagtgtatggatgaataggatctttggtaactctagcccatcgtttagacata

SEQ ID NO: 119616 - DNA, 70 bp, Homo sapiens
aggaaccctaaatttagtgtatggatgaataggatctttggtaactctagcccatcgtttagacatagtt

SEQ ID NO: 119617 - DNA, 73 bp, Homo sapiens
aatttagtgtatggatgaataggatctttggtaactctagcccatcgtttagacatagtttctctcttttcca

SEQ ID NO: 119618 - DNA, 74 bp, Homo sapiens
atgaataggatctttggtaactctagcccatcgtttagacatagtttctctcttttccaggatgtagtttgtga

SEQ ID NO: 119619 - DNA, 71 bp, Homo sapiens
atctttggtaactctagcccatcgtttagacatagtttctctcttttccaggatgtagtttgtgatgggtt

SEQ ID NO: 119620 - DNA, 74 bp, Homo sapiens
taactctagcccatcgtttagacatagtttctctcttttccaggatgtagtttgtgatgggttttcctccatca

SEQ ID NO: 119621 - DNA, 74 bp, Homo sapiens
atcgtttagacatagtttctctcttttccaggatgtagtttgtgatgggttttcctccatcatgtggcttattc

SEQ ID NO: 119622 - DNA, 73 bp, Homo sapiens
tagtttctctcttttccaggatgtagtttgtgatgggttttcctccatcatgtggcttattccaggttactaa

SEQ ID NO: 119623 - DNA, 75 bp, Homo sapiens
tcttttccaggatgtagtttgtgatgggttttcctccatcatgtggcttattccaggttactaatgcagagtctt

SEQ ID NO: 119624 - DNA, 74 bp, Homo sapiens
atgtagtttgtgatgggttttcctccatcatgtggcttattccaggttactaatgcagagtctttggtaacttc

SEQ ID NO: 119625 - DNA, 75 bp, Homo sapiens
tttgtgatgggttttcctccatcatgtggcttattccaggttactaatgcagagtctttggtaacttctgtaaca

SEQ ID NO: 119626 - DNA, 77 bp, Homo sapiens
ttttcctccatcatgtggcttattccaggttactaatgcagagtctttggtaacttctgtaacaattggctgatcag

SEQ ID NO: 119627 - DNA, 80 bp, Homo sapiens
atcatgtggcttattccaggttactaatgcagagtctttggtaacttctgtaacaattggctgatcaggtgcatcaggaa

SEQ ID NO: 119628 - DNA, 77 bp, Homo sapiens
tattccaggttactaatgcagagtctttggtaacttctgtaacaattggctgatcaggtgcatcaggaacccctgta

SEQ ID NO: 119629 - DNA, 76 bp, Homo sapiens
ttactaatgcagagtctttggtaacttctgtaacaattggctgatcaggtgcatcaggaacccctgtaacaaatgt

SEQ ID NO: 119630 - DNA, 73 bp, Homo sapiens
agagtctttggtaacttctgtaacaattggctgatcaggtgcatcaggaacccctgtaacaaatgttggaaaa

SEQ ID NO: 119631 - DNA, 74 bp, Homo sapiens
cttctgtaacaattggctgatcaggtgcatcaggaacccctgtaacaaatgttggaaaatgcgttagaaattta

SEQ ID NO: 119632 - DNA, 79 bp, Homo sapiens
tagttttatcaagcattgaatcactaaaaagaaacataatgcatactgaaacgatctttggctttcattgaatcagaca

SEQ ID NO: 119633 - DNA, 80 bp, Homo sapiens
ttatcaagcattgaatcactaaaaagaaacataatgcatactgaaacgatctttggctttcattgaatcagacaccagag

SEQ ID NO: 119634 - DNA, 83 bp, Homo sapiens
ataatgcatactgaaacgatctttggctttcattgaatcagacaccagaggatcacttattccatacagattttcagcatgta

SEQ ID NO: 119635 - DNA, 79 bp, Homo sapiens
acgatctttggctttcattgaatcagacaccagaggatcacttattccatacagattttcagcatgtatccggaaaata

SEQ ID NO: 119636 - DNA, 79 bp, Homo sapiens
tttggctttcattgaatcagacaccagaggatcacttattccatacagattttcagcatgtatccggaaaatataatct

SEQ ID NO: 119637 - DNA, 78 bp, Homo sapiens
attgaatcagacaccagaggatcacttattccatacagattttcagcatgtatccggaaaatataatcttttccttca

SEQ ID NO: 119638 - DNA, 74 bp, Homo sapiens
acaccagaggatcacttattccatacagattttcagcatgtatccggaaaatataatcttttccttcaagtagt

SEQ ID NO: 119639 - DNA, 73 bp, Homo sapiens
gatcacttattccatacagattttcagcatgtatccggaaaatataatcttttccttcaagtagtttagaaac

SEQ ID NO: 119640 - DNA, 73 bp, Homo sapiens
ccatacagattttcagcatgtatccggaaaatataatcttttccttcaagtagtttagaaactttgcatgttg

SEQ ID NO: 119641 - DNA, 75 bp, Homo sapiens
tcagcatgtatccggaaaatataatcttttccttcaagtagtttagaaactttgcatgttgttttagcacttgca

SEQ ID NO: 119642 - DNA, 72 bp, Homo sapiens
ccggaaaatataatcttttccttcaagtagtttagaaactttgcatgttgttttagcacttgcagatgtcac

SEQ ID NO: 119643 - DNA, 77 bp, Homo sapiens
aatataatcttttccttcaagtagtttagaaactttgcatgttgttttagcacttgcagatgtcactggcatccaga

SEQ ID NO: 119644 - DNA, 76 bp, Homo sapiens
tttccttcaagtagtttagaaactttgcatgttgttttagcacttgcagatgtcactggcatccagacgtctttac

SEQ ID NO: 119645 - DNA, 75 bp, Homo sapiens
gtttagaaactttgcatgttgttttagcacttgcagatgtcactggcatccagacgtctttacccacttccttct

SEQ ID NO: 119646 - DNA, 79 bp, Homo sapiens
ttgcatgttgttttagcacttgcagatgtcactggcatccagacgtctttacccacttccttcttctcaataatataat

SEQ ID NO: 119647 - DNA, 77 bp, Homo sapiens
ttttagcacttgcagatgtcactggcatccagacgtctttacccacttccttcttctcaataatataattggtgatt

SEQ ID NO: 119648 - DNA, 77 bp, Homo sapiens
acttgcagatgtcactggcatccagacgtctttacccacttccttcttctcaataatataattggtgattttactgc

SEQ ID NO: 119649 - DNA, 76 bp, Homo sapiens
actggcatccagacgtctttacccacttccttcttctcaataatataattggtgattttactgcctccatcatcta

SEQ ID NO: 119650 - DNA, 73 bp, Homo sapiens
atccagacgtctttacccacttccttcttctcaataatataattggtgattttactgcctccatcatctaaag

SEQ ID NO: 119651 - DNA, 73 bp, Homo sapiens
tttacccacttccttcttctcaataatataattggtgattttactgcctccatcatctaaaggaggcttccaa

SEQ ID NO: 119652 - DNA, 77 bp, Homo sapiens
tcttctcaataatataattggtgattttactgcctccatcatctaaaggaggcttccaagagataaccatgtaatct

SEQ ID NO: 119653 - DNA, 77 bp, Homo sapiens
tggtgattttactgcctccatcatctaaaggaggcttccaagagataaccatgtaatctttggtcacctcatcaaaa

SEQ ID NO: 119654 - DNA, 75 bp, Homo sapiens
tttactgcctccatcatctaaaggaggcttccaagagataaccatgtaatctttggtcacctcatcaaaactaac

SEQ ID NO: 119655 - DNA, 74 bp, Homo sapiens
atcatctaaaggaggcttccaagagataaccatgtaatctttggtcacctcatcaaaactaactggtcctactg

SEQ ID NO: 119656 - DNA, 72 bp, Homo sapiens
aaggaggcttccaagagataaccatgtaatctttggtcacctcatcaaaactaactggtcctactggtggtc

SEQ ID NO: 119657 - DNA, 74 bp, Homo sapiens
agataaccatgtaatctttggtcacctcatcaaaactaactggtcctactggtggtccaggacggtctgcagaa

SEQ ID NO: 119658 - DNA, 72 bp, Homo sapiens
accatgtaatctttggtcacctcatcaaaactaactggtcctactggtggtccaggacggtctgcagaaaaa

SEQ ID NO: 119659 - DNA, 70 bp, Homo sapiens
ctttggtcacctcatcaaaactaactggtcctactggtggtccaggacggtctgcagaaaaaaaaaatca

SEQ ID NO: 119660 - DNA, 72 bp, Homo sapiens
ctgcttttgaaagaacagaagatctattctttccactaaataagacttaccaacaacattaacttgacagaa

SEQ ID NO: 119661 - DNA, 69 bp, Homo sapiens
agaacagaagatctattctttccactaaataagacttaccaacaacattaacttgacagaaacctttcc

SEQ ID NO: 119662 - DNA, 70 bp, Homo sapiens
tattctttccactaaataagacttaccaacaacattaacttgacagaaacctttcctagagcctgtactg

SEQ ID NO: 119663 - DNA, 70 bp, Homo sapiens
tttccactaaataagacttaccaacaacattaacttgacagaaacctttcctagagcctgtactgttctc

SEQ ID NO: 119664 - DNA, 72 bp, Homo sapiens
aacattaacttgacagaaacctttcctagagcctgtactgttctccacaaccacacagtatttgccggaatc

SEQ ID NO: 119665 - DNA, 73 bp, Homo sapiens
ttgacagaaacctttcctagagcctgtactgttctccacaaccacacagtatttgccggaatctgaacgtttg

SEQ ID NO: 119666 - DNA, 70 bp, Homo sapiens
aaacctttcctagagcctgtactgttctccacaaccacacagtatttgccggaatctgaacgtttggcct

SEQ ID NO: 119667 - DNA, 75 bp, Homo sapiens
ctagagcctgtactgttctccacaaccacacagtatttgccggaatctgaacgtttggccttgatcttctctaaa

SEQ ID NO: 119668 - DNA, 76 bp, Homo sapiens
tactgttctccacaaccacacagtatttgccggaatctgaacgtttggccttgatcttctctaaagcaagtgttgc

SEQ ID NO: 119669 - DNA, 75 bp, Homo sapiens
ccacacagtatttgccggaatctgaacgtttggccttgatcttctctaaagcaagtgttgctggtgtagtcttta

SEQ ID NO: 119670 - DNA, 75 bp, Homo sapiens
agtatttgccggaatctgaacgtttggccttgatcttctctaaagcaagtgttgctggtgtagtctttatatgag

SEQ ID NO: 119671 - DNA, 81 bp, Homo sapiens
aatctgaacgtttggccttgatcttctctaaagcaagtgttgctggtgtagtctttatatgagtgcgatcatcttccagca

SEQ ID NO: 119672 - DNA, 85 bp, Homo sapiens
ttggccttgatcttctctaaagcaagtgttgctggtgtagtctttatatgagtgcgatcatcttccagcacatcagcttcatctt

SEQ ID NO: 119673 - DNA, 86 bp, Homo sapiens
ttgatcttctctaaagcaagtgttgctggtgtagtctttatatgagtgcgatcatcttccagcacatcagcttcatctttgaacca

SEQ ID NO: 119674 - DNA, 81 bp, Homo sapiens
tgttgctggtgtagtctttatatgagtgcgatcatcttccagcacatcagcttcatctttgaaccaggaaaccttaggctt

SEQ ID NO: 119675 - DNA, 79 bp, Homo sapiens
tagtctttatatgagtgcgatcatcttccagcacatcagcttcatctttgaaccaggaaaccttaggctttggtttgcc

SEQ ID NO: 119676 - DNA, 79 bp, Homo sapiens
tatgagtgcgatcatcttccagcacatcagcttcatctttgaaccaggaaaccttaggctttggtttgcctgagtaacg

SEQ ID NO: 119677 - DNA, 77 bp, Homo sapiens
atcatcttccagcacatcagcttcatctttgaaccaggaaaccttaggctttggtttgcctgagtaacggccagtga

SEQ ID NO: 119678 - DNA, 72 bp, Homo sapiens
acatcagcttcatctttgaaccaggaaaccttaggctttggtttgcctgagtaacggccagtgagggcaaaa

SEQ ID NO: 119679 - DNA, 70 bp, Homo sapiens
tctttgaaccaggaaaccttaggctttggtttgcctgagtaacggccagtgagggcaaaagcttcaccaa

SEQ ID NO: 119680 - DNA, 76 bp, Homo sapiens
taggctttggtttgcctgagtaacggccagtgagggcaaaagcttcaccaactcgaatcgtgagcttatctctgaa

SEQ ID NO: 119681 - DNA, 77 bp, Homo sapiens
tttgcctgagtaacggccagtgagggcaaaagcttcaccaactcgaatcgtgagcttatctctgaagtcgaggtgaa

SEQ ID NO: 119682 - DNA, 75 bp, Homo sapiens
agtaacggccagtgagggcaaaagcttcaccaactcgaatcgtgagcttatctctgaagtcgaggtgaagcgttg

SEQ ID NO: 119683 - DNA, 72 bp, Homo sapiens
aaaagcttcaccaactcgaatcgtgagcttatctctgaagtcgaggtgaagcgttgggggtgctaaaatttg

SEQ ID NO: 119684 - DNA, 72 bp, Homo sapiens
accaactcgaatcgtgagcttatctctgaagtcgaggtgaagcgttgggggtgctaaaatttgtaattataa

SEQ ID NO: 119685 - DNA, 72 bp, Homo sapiens
tgagcttatctctgaagtcgaggtgaagcgttgggggtgctaaaatttgtaattataaaggcaagtcatttt

SEQ ID NO: 119686 - DNA, 76 bp, Homo sapiens
atctacaaatgtgcaagtttcagaagtataaattgtagtagacacatacccagctcatccttgcaagtaattggtt

SEQ ID NO: 119687 - DNA, 76 bp, Homo sapiens
caagtttcagaagtataaattgtagtagacacatacccagctcatccttgcaagtaattggtttggtgcaaaatga

SEQ ID NO: 119688 - DNA, 76 bp, Homo sapiens
ttcagaagtataaattgtagtagacacatacccagctcatccttgcaagtaattggtttggtgcaaaatgatggtt

SEQ ID NO: 119689 - DNA, 77 bp, Homo sapiens
taaattgtagtagacacatacccagctcatccttgcaagtaattggtttggtgcaaaatgatggtttgccttgtcca

SEQ ID NO: 119690 - DNA, 79 bp, Homo sapiens
tagacacatacccagctcatccttgcaagtaattggtttggtgcaaaatgatggtttgccttgtccaacaatgttgaca

SEQ ID NO: 119691 - DNA, 78 bp, Homo sapiens
ctcatccttgcaagtaattggtttggtgcaaaatgatggtttgccttgtccaacaatgttgacagcactgacacggta

SEQ ID NO: 119692 - DNA, 78 bp, Homo sapiens
ttgcaagtaattggtttggtgcaaaatgatggtttgccttgtccaacaatgttgacagcactgacacggtactcatag

SEQ ID NO: 119693 - DNA, 77 bp, Homo sapiens
aattggtttggtgcaaaatgatggtttgccttgtccaacaatgttgacagcactgacacggtactcataggtatcac

SEQ ID NO: 119694 - DNA, 75 bp, Homo sapiens
aaaatgatggtttgccttgtccaacaatgttgacagcactgacacggtactcataggtatcaccttcttttaagc

SEQ ID NO: 119695 - DNA, 74 bp, Homo sapiens
atggtttgccttgtccaacaatgttgacagcactgacacggtactcataggtatcaccttcttttaagccttta

SEQ ID NO: 119696 - DNA, 74 bp, Homo sapiens
ttgtccaacaatgttgacagcactgacacggtactcataggtatcaccttcttttaagcctttaacagtgtatt

SEQ ID NO: 119697 - DNA, 71 bp, Homo sapiens
acacggtactcataggtatcaccttcttttaagcctttaacagtgtattttctgctaagcaagttgtcatt

SEQ ID NO: 119698 - DNA, 69 bp, Homo sapiens
caccttcttttaagcctttaacagtgtattttctgctaagcaagttgtcatttgtaactttgtggaact

SEQ ID NO: 119699 - DNA, 71 bp, Homo sapiens
ttttaagcctttaacagtgtattttctgctaagcaagttgtcatttgtaactttgtggaacttctcagtcc

SEQ ID NO: 119700 - DNA, 75 bp, Homo sapiens
cagtgtattttctgctaagcaagttgtcatttgtaactttgtggaacttctcagtcccaatgagccgactttcta

SEQ ID NO: 119701 - DNA, 75 bp, Homo sapiens
ttttctgctaagcaagttgtcatttgtaactttgtggaacttctcagtcccaatgagccgactttctaggacata

SEQ ID NO: 119702 - DNA, 71 bp, Homo sapiens
aagttgtcatttgtaactttgtggaacttctcagtcccaatgagccgactttctaggacatagttaataat

SEQ ID NO: 119703 - DNA, 71 bp, Homo sapiens
atttgtaactttgtggaacttctcagtcccaatgagccgactttctaggacatagttaataatttctgacc

SEQ ID NO: 119704 - DNA, 75 bp, Homo sapiens
ttgtggaacttctcagtcccaatgagccgactttctaggacatagttaataatttctgacccaccatcatactta

SEQ ID NO: 119705 - DNA, 75 bp, Homo sapiens
ttctcagtcccaatgagccgactttctaggacatagttaataatttctgacccaccatcatacttaggaggattc

SEQ ID NO: 119706 - DNA, 73 bp, Homo sapiens
aatgagccgactttctaggacatagttaataatttctgacccaccatcatacttaggaggattccaagtcaaa

SEQ ID NO: 119707 - DNA, 72 bp, Homo sapiens
tttctaggacatagttaataatttctgacccaccatcatacttaggaggattccaagtcaaagttacagtat

SEQ ID NO: 119708 - DNA, 71 bp, Homo sapiens
ggacatagttaataatttctgacccaccatcatacttaggaggattccaagtcaaagttacagtattttta

SEQ ID NO: 119709 - DNA, 70 bp, Homo sapiens
tttctgacccaccatcatacttaggaggattccaagtcaaagttacagtatttttagtaacttctttgac

SEQ ID NO: 119710 - DNA, 69 bp, Homo sapiens
acccaccatcatacttaggaggattccaagtcaaagttacagtatttttagtaacttctttgacttcca

SEQ ID NO: 119711 - DNA, 69 bp, Homo sapiens
catacttaggaggattccaagtcaaagttacagtatttttagtaacttctttgacttccaggtcttcag

SEQ ID NO: 119712 - DNA, 70 bp, Homo sapiens
attccaagtcaaagttacagtatttttagtaacttctttgacttccaggtcttcaggacgctctggtaca

SEQ ID NO: 119713 - DNA, 72 bp, Homo sapiens
atttttagtaacttctttgacttccaggtcttcaggacgctctggtacagctgcgaatataagtataggaat

SEQ ID NO: 119714 - DNA, 75 bp, Homo sapiens
taacttctttgacttccaggtcttcaggacgctctggtacagctgcgaatataagtataggaattgtggtagaaa

SEQ ID NO: 119715 - DNA, 75 bp, Homo sapiens
ttttttttttacttacttattggctctctgataacaagtgcctctgatgtctcaacaaatggacccatgccaata

SEQ ID NO: 119716 - DNA, 76 bp, Homo sapiens
tttttacttacttattggctctctgataacaagtgcctctgatgtctcaacaaatggacccatgccaatactattt

SEQ ID NO: 119717 - DNA, 80 bp, Homo sapiens
tggctctctgataacaagtgcctctgatgtctcaacaaatggacccatgccaatactattttcagccgcaattcggaaaa

SEQ ID NO: 119718 - DNA, 75 bp, Homo sapiens
ataacaagtgcctctgatgtctcaacaaatggacccatgccaatactattttcagccgcaattcggaaaaagtag

SEQ ID NO: 119719 - DNA, 74 bp, Homo sapiens
aagtgcctctgatgtctcaacaaatggacccatgccaatactattttcagccgcaattcggaaaaagtaggctt

SEQ ID NO: 119720 - DNA, 72 bp, Homo sapiens
atgtctcaacaaatggacccatgccaatactattttcagccgcaattcggaaaaagtaggcttttccttgaa

SEQ ID NO: 119721 - DNA, 70 bp, Homo sapiens
aaatggacccatgccaatactattttcagccgcaattcggaaaaagtaggcttttccttgaatgagaccc

SEQ ID NO: 119722 - DNA, 71 bp, Homo sapiens
caatactattttcagccgcaattcggaaaaagtaggcttttccttgaatgagaccctggacagtagcattt

SEQ ID NO: 119723 - DNA, 71 bp, Homo sapiens
tattttcagccgcaattcggaaaaagtaggcttttccttgaatgagaccctggacagtagcattttgtcgg

SEQ ID NO: 119724 - DNA, 69 bp, Homo sapiens
aattcggaaaaagtaggcttttccttgaatgagaccctggacagtagcattttgtcgggtaactgtata

SEQ ID NO: 119725 - DNA, 71 bp, Homo sapiens
aaaaagtaggcttttccttgaatgagaccctggacagtagcattttgtcgggtaactgtatatgtcactgg

SEQ ID NO: 119726 - DNA, 78 bp, Homo sapiens
tttccttgaatgagaccctggacagtagcattttgtcgggtaactgtatatgtcactggggtccatgctctgcggtca

SEQ ID NO: 119727 - DNA, 77 bp, Homo sapiens
agaccctggacagtagcattttgtcgggtaactgtatatgtcactggggtccatgctctgcggtcagattcacgctt

SEQ ID NO: 119728 - DNA, 80 bp, Homo sapiens
acagtagcattttgtcgggtaactgtatatgtcactggggtccatgctctgcggtcagattcacgcttttcaatgacata

SEQ ID NO: 119729 - DNA, 77 bp, Homo sapiens
attttgtcgggtaactgtatatgtcactggggtccatgctctgcggtcagattcacgcttttcaatgacataattgg

SEQ ID NO: 119730 - DNA, 83 bp, Homo sapiens
taactgtatatgtcactggggtccatgctctgcggtcagattcacgcttttcaatgacataattggtgattggagagcctcca

SEQ ID NO: 119731 - DNA, 84 bp, Homo sapiens
atatgtcactggggtccatgctctgcggtcagattcacgcttttcaatgacataattggtgattggagagcctccatcatcttc

SEQ ID NO: 119732 - DNA, 82 bp, Homo sapiens
gggtccatgctctgcggtcagattcacgcttttcaatgacataattggtgattggagagcctccatcatcttctggagaaaa

SEQ ID NO: 119733 - DNA, 79 bp, Homo sapiens
cggtcagattcacgcttttcaatgacataattggtgattggagagcctccatcatcttctggagaaaaccatgtcagtt

SEQ ID NO: 119734 - DNA, 81 bp, Homo sapiens
agattcacgcttttcaatgacataattggtgattggagagcctccatcatcttctggagaaaaccatgtcagtttgcagga

SEQ ID NO: 119735 - DNA, 81 bp, Homo sapiens
tttcaatgacataattggtgattggagagcctccatcatcttctggagaaaaccatgtcagtttgcaggactcattggtta

SEQ ID NO: 119736 - DNA, 79 bp, Homo sapiens
ataattggtgattggagagcctccatcatcttctggagaaaaccatgtcagtttgcaggactcattggttaggttgtga

SEQ ID NO: 119737 - DNA, 79 bp, Homo sapiens
attggagagcctccatcatcttctggagaaaaccatgtcagtttgcaggactcattggttaggttgtgagctaggaatg

SEQ ID NO: 119738 - DNA, 76 bp, Homo sapiens
atcatcttctggagaaaaccatgtcagtttgcaggactcattggttaggttgtgagctaggaatggtgttccaacg

SEQ ID NO: 119739 - DNA, 73 bp, Homo sapiens
aaaccatgtcagtttgcaggactcattggttaggttgtgagctaggaatggtgttccaacgggacctggaaca

SEQ ID NO: 119740 - DNA, 73 bp, Homo sapiens
agtttgcaggactcattggttaggttgtgagctaggaatggtgttccaacgggacctggaacatctggaaata

SEQ ID NO: 119741 - DNA, 71 bp, Homo sapiens
actcattggttaggttgtgagctaggaatggtgttccaacgggacctggaacatctggaaataagaagaaa

SEQ ID NO: 119742 - DNA, 72 bp, Homo sapiens
ttgtgagctaggaatggtgttccaacgggacctggaacatctggaaataagaagaaaataattcaagctgtt

SEQ ID NO: 119743 - DNA, 70 bp, Homo sapiens
agaatgttggtttaaaaagttgcacagacaaattgaaagtatttacctaatacatcaacaataattgtct

SEQ ID NO: 119744 - DNA, 69 bp, Homo sapiens
gttggtttaaaaagttgcacagacaaattgaaagtatttacctaatacatcaacaataattgtcttctt

SEQ ID NO: 119745 - DNA, 73 bp, Homo sapiens
gttgcacagacaaattgaaagtatttacctaatacatcaacaataattgtcttctttctttctccggcttcat

SEQ ID NO: 119746 - DNA, 71 bp, Homo sapiens
caaattgaaagtatttacctaatacatcaacaataattgtcttctttctttctccggcttcatttttggca

SEQ ID NO: 119747 - DNA, 72 bp, Homo sapiens
gtatttacctaatacatcaacaataattgtcttctttctttctccggcttcatttttggcaagaagagaata

SEQ ID NO: 119748 - DNA, 75 bp, Homo sapiens
taatacatcaacaataattgtcttctttctttctccggcttcatttttggcaagaagagaatagacgccttgatg

SEQ ID NO: 119749 - DNA, 73 bp, Homo sapiens
aacaataattgtcttctttctttctccggcttcatttttggcaagaagagaatagacgccttgatggctcctc

SEQ ID NO: 119750 - DNA, 77 bp, Homo sapiens
ttctttctttctccggcttcatttttggcaagaagagaatagacgccttgatggctcctctggcagttcttgatgac

SEQ ID NO: 119751 - DNA, 80 bp, Homo sapiens
ctttctccggcttcatttttggcaagaagagaatagacgccttgatggctcctctggcagttcttgatgaccatggatga

SEQ ID NO: 119752 - DNA, 82 bp, Homo sapiens
atttttggcaagaagagaatagacgccttgatggctcctctggcagttcttgatgaccatggatgagctaatggctgtggtc

SEQ ID NO: 119753 - DNA, 84 bp, Homo sapiens
agaagagaatagacgccttgatggctcctctggcagttcttgatgaccatggatgagctaatggctgtggtctcaatggtggct

SEQ ID NO: 119754 - DNA, 84 bp, Homo sapiens
aatagacgccttgatggctcctctggcagttcttgatgaccatggatgagctaatggctgtggtctcaatggtggcttcttgag

SEQ ID NO: 119755 - DNA, 81 bp, Homo sapiens
tggctcctctggcagttcttgatgaccatggatgagctaatggctgtggtctcaatggtggcttcttgaggtaaggttctt

SEQ ID NO: 119756 - DNA, 83 bp, Homo sapiens
tctggcagttcttgatgaccatggatgagctaatggctgtggtctcaatggtggcttcttgaggtaaggttctttcattcatg

SEQ ID NO: 119757 - DNA, 81 bp, Homo sapiens
ttcttgatgaccatggatgagctaatggctgtggtctcaatggtggcttcttgaggtaaggttctttcattcatgttccag

SEQ ID NO: 119758 - DNA, 77 bp, Homo sapiens
atggatgagctaatggctgtggtctcaatggtggcttcttgaggtaaggttctttcattcatgttccaggtgacggt

SEQ ID NO: 119759 - DNA, 74 bp, Homo sapiens
tggtctcaatggtggcttcttgaggtaaggttctttcattcatgttccaggtgacggttggaggaggctttcca

SEQ ID NO: 119760 - DNA, 76 bp, Homo sapiens
gcttcttgaggtaaggttctttcattcatgttccaggtgacggttggaggaggctttccagacacataggcaatga

SEQ ID NO: 119761 - DNA, 75 bp, Homo sapiens
ttgaggtaaggttctttcattcatgttccaggtgacggttggaggaggctttccagacacataggcaatgattcg

SEQ ID NO: 119762 - DNA, 77 bp, Homo sapiens
ttctttcattcatgttccaggtgacggttggaggaggctttccagacacataggcaatgattcggatcacccctcca

SEQ ID NO: 119763 - DNA, 77 bp, Homo sapiens
ttccaggtgacggttggaggaggctttccagacacataggcaatgattcggatcacccctccagcatggacaacaat

SEQ ID NO: 119764 - DNA, 79 bp, Homo sapiens
acggttggaggaggctttccagacacataggcaatgattcggatcacccctccagcatggacaacaattctatctctga

SEQ ID NO: 119765 - DNA, 83 bp, Homo sapiens
aggaggctttccagacacataggcaatgattcggatcacccctccagcatggacaacaattctatctctgacactggcatcta

SEQ ID NO: 119766 - DNA, 86 bp, Homo sapiens
ttccagacacataggcaatgattcggatcacccctccagcatggacaacaattctatctctgacactggcatctagctgaaggtca

SEQ ID NO: 119767 - DNA, 83 bp, Homo sapiens
ataggcaatgattcggatcacccctccagcatggacaacaattctatctctgacactggcatctagctgaaggtcaggtgaaa

SEQ ID NO: 119768 - DNA, 83 bp, Homo sapiens
gatcacccctccagcatggacaacaattctatctctgacactggcatctagctgaaggtcaggtgaaactggaagcaattgaa

SEQ ID NO: 119769 - DNA, 81 bp, Homo sapiens
ccagcatggacaacaattctatctctgacactggcatctagctgaaggtcaggtgaaactggaagcaattgaaaattacaa

SEQ ID NO: 119770 - DNA, 79 bp, Homo sapiens
atggacaacaattctatctctgacactggcatctagctgaaggtcaggtgaaactggaagcaattgaaaattacaaatg

SEQ ID NO: 119771 - DNA, 78 bp, Homo sapiens
attctatctctgacactggcatctagctgaaggtcaggtgaaactggaagcaattgaaaattacaaatgtgatttttc

SEQ ID NO: 119772 - DNA, 80 bp, Homo sapiens
aatctgaaacataaatactgatggcataaggaaggattgataattaccaagtctgtccttcatttcaatgacatctgtga

SEQ ID NO: 119773 - DNA, 78 bp, Homo sapiens
aaacataaatactgatggcataaggaaggattgataattaccaagtctgtccttcatttcaatgacatctgtgacctc

SEQ ID NO: 119774 - DNA, 78 bp, Homo sapiens
atggcataaggaaggattgataattaccaagtctgtccttcatttcaatgacatctgtgacctctccaggttctccaa

SEQ ID NO: 119775 - DNA, 79 bp, Homo sapiens
aaggattgataattaccaagtctgtccttcatttcaatgacatctgtgacctctccaggttctccaatgccagcaatgt

SEQ ID NO: 119776 - DNA, 82 bp, Homo sapiens
ataattaccaagtctgtccttcatttcaatgacatctgtgacctctccaggttctccaatgccagcaatgttgactgctcta

SEQ ID NO: 119777 - DNA, 82 bp, Homo sapiens
tctgtccttcatttcaatgacatctgtgacctctccaggttctccaatgccagcaatgttgactgctctaactctaaatttg

SEQ ID NO: 119778 - DNA, 81 bp, Homo sapiens
cttcatttcaatgacatctgtgacctctccaggttctccaatgccagcaatgttgactgctctaactctaaatttgtagaa

SEQ ID NO: 119779 - DNA, 81 bp, Homo sapiens
aatgacatctgtgacctctccaggttctccaatgccagcaatgttgactgctctaactctaaatttgtagaatgctccttc

SEQ ID NO: 119780 - DNA, 76 bp, Homo sapiens
acctctccaggttctccaatgccagcaatgttgactgctctaactctaaatttgtagaatgctccttcctttaatc

SEQ ID NO: 119781 - DNA, 78 bp, Homo sapiens
gttctccaatgccagcaatgttgactgctctaactctaaatttgtagaatgctccttcctttaatcctgtcacaacaa

SEQ ID NO: 119782 - DNA, 77 bp, Homo sapiens
atgccagcaatgttgactgctctaactctaaatttgtagaatgctccttcctttaatcctgtcacaacaagctttgt

SEQ ID NO: 119783 - DNA, 76 bp, Homo sapiens
atgttgactgctctaactctaaatttgtagaatgctccttcctttaatcctgtcacaacaagctttgttcctctca

SEQ ID NO: 119784 - DNA, 73 bp, Homo sapiens
taactctaaatttgtagaatgctccttcctttaatcctgtcacaacaagctttgttcctctcacttctttatc

SEQ ID NO: 119785 - DNA, 71 bp, Homo sapiens
aaatttgtagaatgctccttcctttaatcctgtcacaacaagctttgttcctctcacttctttatctttac

SEQ ID NO: 119786 - DNA, 71 bp, Homo sapiens
tccttcctttaatcctgtcacaacaagctttgttcctctcacttctttatctttaccctggggagaaatca

SEQ ID NO: 119787 - DNA, 72 bp, Homo sapiens
tttaatcctgtcacaacaagctttgttcctctcacttctttatctttaccctggggagaaatcatagacatt

SEQ ID NO: 119788 - DNA, 72 bp, Homo sapiens
gtcacaacaagctttgttcctctcacttctttatctttaccctggggagaaatcatagacattttataatta

SEQ ID NO: 119789 - DNA, 67 bp, Homo sapiens
ttttagtttattcatagtgcatttccttagtgccaagttttcctaccttttcccattcttcttttcc

SEQ ID NO: 119790 - DNA, 68 bp, Homo sapiens
gtttattcatagtgcatttccttagtgccaagttttcctaccttttcccattcttcttttccttcttc

SEQ ID NO: 119791 - DNA, 67 bp, Homo sapiens
gcatttccttagtgccaagttttcctaccttttcccattcttcttttccttcttctttatattcaac

SEQ ID NO: 119792 - DNA, 69 bp, Homo sapiens
tagtgccaagttttcctaccttttcccattcttcttttccttcttctttatattcaacgatgtatccag

SEQ ID NO: 119793 - DNA, 70 bp, Homo sapiens
tcctaccttttcccattcttcttttccttcttctttatattcaacgatgtatccagttactttggatcca

SEQ ID NO: 119794 - DNA, 71 bp, Homo sapiens
tcccattcttcttttccttcttctttatattcaacgatgtatccagttactttggatccaccatcttttag

SEQ ID NO: 119795 - DNA, 70 bp, Homo sapiens
ttcttcttttccttcttctttatattcaacgatgtatccagttactttggatccaccatcttttagtggg

SEQ ID NO: 119796 - DNA, 73 bp, Homo sapiens
cttctttatattcaacgatgtatccagttactttggatccaccatcttttagtgggggagaccactccagatc

SEQ ID NO: 119797 - DNA, 78 bp, Homo sapiens
tatattcaacgatgtatccagttactttggatccaccatcttttagtgggggagaccactccagatctgcagatgatt

SEQ ID NO: 119798 - DNA, 77 bp, Homo sapiens
atgtatccagttactttggatccaccatcttttagtgggggagaccactccagatctgcagatgatttagtccaatc

SEQ ID NO: 119799 - DNA, 77 bp, Homo sapiens
ttactttggatccaccatcttttagtgggggagaccactccagatctgcagatgatttagtccaatctgtcactttg

SEQ ID NO: 119800 - DNA, 77 bp, Homo sapiens
atccaccatcttttagtgggggagaccactccagatctgcagatgatttagtccaatctgtcactttgggaaatgga

SEQ ID NO: 119801 - DNA, 76 bp, Homo sapiens
ttttagtgggggagaccactccagatctgcagatgatttagtccaatctgtcactttgggaaatggaggaccagga

SEQ ID NO: 119802 - DNA, 79 bp, Homo sapiens
ggagaccactccagatctgcagatgatttagtccaatctgtcactttgggaaatggaggaccaggaggggctgcaaaga

SEQ ID NO: 119803 - DNA, 78 bp, Homo sapiens
tctgcagatgatttagtccaatctgtcactttgggaaatggaggaccaggaggggctgcaaagagccagtatacgtta

SEQ ID NO: 119804 - DNA, 72 bp, Homo sapiens
atttagtccaatctgtcactttgggaaatggaggaccaggaggggctgcaaagagccagtatacgttagtat

SEQ ID NO: 119805 - DNA, 72 bp, Homo sapiens
aatctgtcactttgggaaatggaggaccaggaggggctgcaaagagccagtatacgttagtattcttgactt

SEQ ID NO: 119806 - DNA, 68 bp, Homo sapiens
ttttggaaaataagatttaaaaaaaaggaatggtttccaggcttaccaattggatctctagcagtcgc

SEQ ID NO: 119807 - DNA, 75 bp, Homo sapiens
aaaaaaggaatggtttccaggcttaccaattggatctctagcagtcgctgggtctgatggcagacttgctggacc

SEQ ID NO: 119808 - DNA, 83 bp, Homo sapiens
tggtttccaggcttaccaattggatctctagcagtcgctgggtctgatggcagacttgctggacccacgccagcagcattgat

SEQ ID NO: 119809 - DNA, 85 bp, Homo sapiens
aggcttaccaattggatctctagcagtcgctgggtctgatggcagacttgctggacccacgccagcagcattgattgcatatacc

SEQ ID NO: 119810 - DNA, 85 bp, Homo sapiens
tctagcagtcgctgggtctgatggcagacttgctggacccacgccagcagcattgattgcatatacccggaattgatagtcggaa

SEQ ID NO: 119811 - DNA, 81 bp, Homo sapiens
ggtctgatggcagacttgctggacccacgccagcagcattgattgcatatacccggaattgatagtcggaaccttcaataa

SEQ ID NO: 119812 - DNA, 78 bp, Homo sapiens
tggacccacgccagcagcattgattgcatatacccggaattgatagtcggaaccttcaataagaccagtcactttata

SEQ ID NO: 119813 - DNA, 76 bp, Homo sapiens
acgccagcagcattgattgcatatacccggaattgatagtcggaaccttcaataagaccagtcactttataagaaa

SEQ ID NO: 119814 - DNA, 72 bp, Homo sapiens
attgattgcatatacccggaattgatagtcggaaccttcaataagaccagtcactttataagaaacacccaa

SEQ ID NO: 119815 - DNA, 70 bp, Homo sapiens
atatacccggaattgatagtcggaaccttcaataagaccagtcactttataagaaacacccaaagtcatg

SEQ ID NO: 119816 - DNA, 72 bp, Homo sapiens
aattgatagtcggaaccttcaataagaccagtcactttataagaaacacccaaagtcatggctttgatagga

SEQ ID NO: 119817 - DNA, 70 bp, Homo sapiens
aaccttcaataagaccagtcactttataagaaacacccaaagtcatggctttgataggatctcggttaac

SEQ ID NO: 119818 - DNA, 72 bp, Homo sapiens
aataagaccagtcactttataagaaacacccaaagtcatggctttgataggatctcggttaactctcttcca

SEQ ID NO: 119819 - DNA, 72 bp, Homo sapiens
actttataagaaacacccaaagtcatggctttgataggatctcggttaactctcttccatctctttgaagtg

SEQ ID NO: 119820 - DNA, 73 bp, Homo sapiens
aacacccaaagtcatggctttgataggatctcggttaactctcttccatctctttgaagtggtgtctttcatt

SEQ ID NO: 119821 - DNA, 76 bp, Homo sapiens
aagtcatggctttgataggatctcggttaactctcttccatctctttgaagtggtgtctttcatttccagccagta

SEQ ID NO: 119822 - DNA, 76 bp, Homo sapiens
tttgataggatctcggttaactctcttccatctctttgaagtggtgtctttcatttccagccagtaccctgtcaca

SEQ ID NO: 119823 - DNA, 75 bp, Homo sapiens
atctcggttaactctcttccatctctttgaagtggtgtctttcatttccagccagtaccctgtcacaggagagcc

SEQ ID NO: 119824 - DNA, 79 bp, Homo sapiens
taactctcttccatctctttgaagtggtgtctttcatttccagccagtaccctgtcacaggagagcctccatcatattc

SEQ ID NO: 119825 - DNA, 79 bp, Homo sapiens
atctctttgaagtggtgtctttcatttccagccagtaccctgtcacaggagagcctccatcatattctggctcttccca

SEQ ID NO: 119826 - DNA, 78 bp, Homo sapiens
aagtggtgtctttcatttccagccagtaccctgtcacaggagagcctccatcatattctggctcttcccagttgacag

SEQ ID NO: 119827 - DNA, 81 bp, Homo sapiens
ttcatttccagccagtaccctgtcacaggagagcctccatcatattctggctcttcccagttgacagtcatggagttacga

SEQ ID NO: 119828 - DNA, 81 bp, Homo sapiens
agtaccctgtcacaggagagcctccatcatattctggctcttcccagttgacagtcatggagttacgagtcacgctgctaa

SEQ ID NO: 119829 - DNA, 81 bp, Homo sapiens
tcacaggagagcctccatcatattctggctcttcccagttgacagtcatggagttacgagtcacgctgctaactgttggtt

SEQ ID NO: 119830 - DNA, 80 bp, Homo sapiens
agagcctccatcatattctggctcttcccagttgacagtcatggagttacgagtcacgctgctaactgttggtttatctg

SEQ ID NO: 119831 - DNA, 79 bp, Homo sapiens
ttcccagttgacagtcatggagttacgagtcacgctgctaactgttggtttatctggtgctccagggacagctgtgaaa

SEQ ID NO: 119832 - DNA, 79 bp, Homo sapiens
acagtcatggagttacgagtcacgctgctaactgttggtttatctggtgctccagggacagctgtgaaaaagatcatat

SEQ ID NO: 119833 - DNA, 78 bp, Homo sapiens
agttacgagtcacgctgctaactgttggtttatctggtgctccagggacagctgtgaaaaagatcatattgattataa

SEQ ID NO: 119834 - DNA, 78 bp, Homo sapiens
tcacgctgctaactgttggtttatctggtgctccagggacagctgtgaaaaagatcatattgattataagaaatttaa

SEQ ID NO: 119835 - DNA, 69 bp, Homo sapiens
aaaaaagtaaaaatggctttgtatgtgaaaatgttctcctacttacagaagaggtttcttgctgtttca

SEQ ID NO: 119836 - DNA, 73 bp, Homo sapiens
aaaatggctttgtatgtgaaaatgttctcctacttacagaagaggtttcttgctgtttcaggttcactgtcaa

SEQ ID NO: 119837 - DNA, 74 bp, Homo sapiens
tttgtatgtgaaaatgttctcctacttacagaagaggtttcttgctgtttcaggttcactgtcaagaggttctc

SEQ ID NO: 119838 - DNA, 75 bp, Homo sapiens
atgttctcctacttacagaagaggtttcttgctgtttcaggttcactgtcaagaggttctccaatgccatattta

SEQ ID NO: 119839 - DNA, 75 bp, Homo sapiens
ctcctacttacagaagaggtttcttgctgtttcaggttcactgtcaagaggttctccaatgccatatttattctg

SEQ ID NO: 119840 - DNA, 80 bp, Homo sapiens
ttcttgctgtttcaggttcactgtcaagaggttctccaatgccatatttattctgggccatgattcggaatacatattca

SEQ ID NO: 119841 - DNA, 80 bp, Homo sapiens
ttcaggttcactgtcaagaggttctccaatgccatatttattctgggccatgattcggaatacatattcatggccttcta

SEQ ID NO: 119842 - DNA, 77 bp, Homo sapiens
aagaggttctccaatgccatatttattctgggccatgattcggaatacatattcatggccttctagcaatttgggaa

SEQ ID NO: 119843 - DNA, 79 bp, Homo sapiens
ttctccaatgccatatttattctgggccatgattcggaatacatattcatggccttctagcaatttgggaatcgtgtac

SEQ ID NO: 119844 - DNA, 78 bp, Homo sapiens
tatttattctgggccatgattcggaatacatattcatggccttctagcaatttgggaatcgtgtacgtgcactcctta

SEQ ID NO: 119845 - DNA, 78 bp, Homo sapiens
ggccatgattcggaatacatattcatggccttctagcaatttgggaatcgtgtacgtgcactccttaggttcactgga

SEQ ID NO: 119846 - DNA, 77 bp, Homo sapiens
attcggaatacatattcatggccttctagcaatttgggaatcgtgtacgtgcactccttaggttcactggagacatg

SEQ ID NO: 119847 - DNA, 77 bp, Homo sapiens
atattcatggccttctagcaatttgggaatcgtgtacgtgcactccttaggttcactggagacatggacccatgtct

SEQ ID NO: 119848 - DNA, 76 bp, Homo sapiens
ttctagcaatttgggaatcgtgtacgtgcactccttaggttcactggagacatggacccatgtcttcctgttagct

SEQ ID NO: 119849 - DNA, 74 bp, Homo sapiens
aatttgggaatcgtgtacgtgcactccttaggttcactggagacatggacccatgtcttcctgttagcttctct

SEQ ID NO: 119850 - DNA, 74 bp, Homo sapiens
actccttaggttcactggagacatggacccatgtcttcctgttagcttctcttttctcaattacatagtttgta

SEQ ID NO: 119851 - DNA, 76 bp, Homo sapiens
taggttcactggagacatggacccatgtcttcctgttagcttctcttttctcaattacatagtttgtaatcttaga

SEQ ID NO: 119852 - DNA, 75 bp, Homo sapiens
acatggacccatgtcttcctgttagcttctcttttctcaattacatagtttgtaatcttagacccaccatcatct

SEQ ID NO: 119853 - DNA, 74 bp, Homo sapiens
atgtcttcctgttagcttctcttttctcaattacatagtttgtaatcttagacccaccatcatctttaggtgga

SEQ ID NO: 119854 - DNA, 73 bp, Homo sapiens
ttagcttctcttttctcaattacatagtttgtaatcttagacccaccatcatctttaggtggaaaccaagata

SEQ ID NO: 119855 - DNA, 72 bp, Homo sapiens
cttttctcaattacatagtttgtaatcttagacccaccatcatctttaggtggaaaccaagatagtgtcatt

SEQ ID NO: 119856 - DNA, 76 bp, Homo sapiens
attacatagtttgtaatcttagacccaccatcatctttaggtggaaaccaagatagtgtcatttgatctgctgaaa

SEQ ID NO: 119857 - DNA, 77 bp, Homo sapiens
tttgtaatcttagacccaccatcatctttaggtggaaaccaagatagtgtcatttgatctgctgaaacagattcaaa

SEQ ID NO: 119858 - DNA, 76 bp, Homo sapiens
cttagacccaccatcatctttaggtggaaaccaagatagtgtcatttgatctgctgaaacagattcaaattttatg

SEQ ID NO: 119859 - DNA, 76 bp, Homo sapiens
atcatctttaggtggaaaccaagatagtgtcatttgatctgctgaaacagattcaaattttatgggtcccactgga

SEQ ID NO: 119860 - DNA, 75 bp, Homo sapiens
taggtggaaaccaagatagtgtcatttgatctgctgaaacagattcaaattttatgggtcccactggagggccag

SEQ ID NO: 119861 - DNA, 74 bp, Homo sapiens
atagtgtcatttgatctgctgaaacagattcaaattttatgggtcccactggagggccaggacgacctaaaatg

SEQ ID NO: 119862 - DNA, 71 bp, Homo sapiens
atttgatctgctgaaacagattcaaattttatgggtcccactggagggccaggacgacctaaaatggttta
